United States Patent Application Publication US 2014/0057251 A1 - sequence listing, part 194

SEQ ID NO: 399764 - DNA, 2806 bp, Cannabis indica
tcacattaatgaactttaataaaaatccacaaaagacaaaactcacacaagcaaaatgaccattttaccccttcaacactaaaagttataaaaagggggtaatttgggaaattctaattcccaaccaatcccgacattcccaatgtctaaataaaccgtcccactctactaaaatattagattgtgattctactgagccatacaccgcgttccatgttcccgggcactaaaaatgcaaaattataagatttcactatatgacataaaaatacattctgaattcaaataaatcaacataaataattatttaaatatcaataaataattttcataattaaaccctaaatatctgctaatttccaaattaaactaagcggtctttagaagatttactagacctttcgagattctcgagaaggttgggtaagtggcataccgattatctttgcctccagctctttcagcagttcataacgtattccatgtctctatgttgagaaaatacgtttcagatcctgctcatgtacttagctatgagaatcttgagctgcaaccagatatgtcttatgaagaacaactagttcagatccttgacagaaaggataaggttcttcggaacaagaccatatctctagtcaaagtactcttgaagccacctgggagttagaatcagacatgagagctcaatatccaaagttattcaggttagatttcgagaacgaaatccttatcaggagggataactgtaaagaccgcttagttttaaaataacttaaaatccacaataaacatataattctcatttaaactcattttttttgcttaagttaaaaatctatattagtctttttaaaaagaaaaattatattattatatcatgttaatttttgacataatatcttatatatatagctccacttacatttattagtatataattttttagtgtcatcttctttttttggcatacttttatctctaattctctcattttttttttaaaacaaattactgtaatataaacataaaaaatagagatttattctttaattaacttatgcacatattattacaattatttttacgattttaattgattatttttaaaaaaattgtacttcatgtattattattattgtaaagacccttagttttaatttggaaattagctgataaatagggtttaattttgaaatctatgtttgattatgaatttatagtttatgacgaattatttgaattcagaatgcatttttatgtcacacatagaaatttcataattttgcatattttgtgcccgacaacattggaacgcggtgtatggctattagaataacattttagtatttttagtagccggacaatagtttagacattgggaatgtcgggattagtcgagatattagaattttccaaaataccccttagtgccattttatgacttttagtgtgggaggggcaaaatggtcattttgccccattagtctttttgtctttagtgaataaatttattagtaatgatctgattttttattaagtattttggctgaaatggattttagtaagctaagttatttcatttatttcaaaaaaaaaaaaaaaaaaactaaagaaagttctaggtaagcttcttgtaacttttcctttagtttcttgaagtgtagaagaacagttcatgcatgattttatggttttgttgctgtagctagtgttagagtttgttatagttttcaaagattgttatatgttagattatgttgttttaagcatgaattggtagttgtttgaaggtttaaccaagttttgagtttaagagctcaaacttggagctttaatggtgaaattcaaatttgagccttaattgttgttttgttgcttggaaaatgttaattggggtataatatgcaggcctggaaagtttgattaagtttgggaacaatttggttaggggttgaatttttgttagttttctggataaaaccggttaaccggctttacactgcttgtaaaactggttacccagattttggagcagggaaaataggtttttctgcttgtcgtttcgtgccaatttcaagtttctacttggttgattctttgctagtttgggatattaccatattaagttgcagtagatagggtttcgattgtaaaccttagtcccggtggtgatttaacgagtcacttatgcgtgttgttccactcaggttgatcggcacacctgaattcggaattgaggcaagattagtataatatcatgcatatattattacatgtttagcgtacatgttgttatacctgttagattacattgatagcaataatagtatacatagagttgtgctgattactgataaatgtatgttgggtaaactactggtcgatgctgtccaatcaatatggctagagtatgactagcatattgagtataggctgacattatggtcgatagtactgtcttatgaacgttctagactcagtaccgtttgggacaccgggattagggttatgatcaggtgtatgggcgccaacttataacccgggttatttgtatgtttatgttatgcttttcttactgagtctgtcgactcacagtgctttgtttatgtgtaggtaagggcaaggctaaagttgaggagccgtgagtacgagcagatgaagattatacatgtcagggtggttatgcctggagcgtacgatctttgggacatcaagccttttgttgtatagtcgcttggcgacaagcttttgtttatgtgtatagcaaaacttttaaaaagtattttgtaaacgggatccttgaatt

SEQ ID NO: 399765 - DNA, 429 bp, Cannabis indica
gacattctcaaaggtagatgagggcatccacacgacactatgaccacccaaaacatacaaggggtctcagggggtcaccccggatgataattgacacccttctcatgttgggtctcgtgggtgtcacccccaattgttagcttttatcctcgaaggtggtcaacaaccgtgtctcacccttaggagaccctcatcgtcagtgactagttcaaatattcaaatcccacaagaagctcaaagaccattataaacccacaaaaatagtgagatattatcataaaaattaaacatcaactgtaaaccctatgtatttgtctaacctatgtttttcatattttgattgattttatcttgatttatgcttgaatataaaaaccaaaatcaaagattcaacagcagaaatttacaagcttcacctgccctagaaac

SEQ ID NO: 399766 - DNA, 533 bp, Cannabis indica
attaaatggggtcgaaaaatcttgggttgcataagtccaagaagagtaaatactcaccaagaacattctctgtatttaacacatccataaataacacagactcgtggactaaggctcattaatgccccaaccacgtaaaaatccttctctaattttcttacagttctctaatcttatattattttattggttgccgaaaacctcggtcaacaactaatataagtgattacataagttaaaaaaaacatatttgctttctttttttttttttacttttatttaactttaaataataaaaataataaaattaaggattatttttgtcaatattattttttactttattcaatttcaatgttcattaaagtgttaaactaaacatcataaactaaacccattacaattcttattccattacattatcattcatattactattactaggggcggacccacatagaggcaaggtggggcgagtcgccaaccctaaaaaaaaaaaaaatcgagaaaaaaaaatatatacattttagtta

SEQ ID NO: 399767 - DNA, 667 bp, Cannabis indica
cctaggaagccccacagattcggaattccagttggggaaccggtctaccggttggggcaattttgggaaccctagttttcccatttttgagatatttagggtgtttccatgttatttatcgatagggaaactttttgtttcaagtttaagtccccgaaaagtgatttagcgtgtcacttacctatgttacaattgatgtgatttaggagcctataattcgccgagcagttgctccactcaggttggccgacacacctgaattcgaaatcaaggtaagattagtataatgttatgcatatatttatacatgtttagcgtacatgttagtttccatcagaataacatatcagtaggcaaatctatagtcatcagattagcatatcagggcaacagtgaggtgtacatagagttacaccgagatgccatcagatatatgctaggctatcagatagtatgagttaactgctaccacatcagtacgattagagtactgagtataggctgggtttgcggttagtcatactttgtcaagaacgttcccgatttagttagggttatagttaggtgtatgggcgcctgattataacccggtgatattagcatgtttattgtgttatgcttttcttactgagtctttggactcacagtgctattgctatgtgtaggt

SEQ ID NO: 399768 - DNA, 686 bp, Cannabis indica
tttctgatgtctgttttctaaccgtgttgttgttcattctgtacagacatgtctcggcagatgcttgacgctctgaagaagagaatgggcggaagctctagcgcctctcctccagccaagaagtctaaggatggtgaggggttctcttctaaggaatagaggtctgctagggagctcattcatctttctgaggagctaactgctgcaaacccctctacccccaaagctactaagtccaaggagtctcagggaggaagcttggacaagtctgggcaactgaaggttgggtctgaactagtcaggagtgatcctgaacgggtgcgggcacctactccacctttgtcagtgcttccagaggccaagaaggggaaggagatgttggcccattacatgaaccggctggttcctgaggtcagtgagaaactggctggtgctaacaatgactcttctttggaattgctggtgggtggagtcttgaaggagttcaccagggtaagtctttcttgatacttccctttaatcttccatacttagctcaaatgctaaagtttttcctttgtgaaggccggtctgaagttggcctacacttacgcccgggctaagtctgctgctttcaggaacacggctctgtcagaatccatgaaggcggaggcggacttggccaggaagtgttggaaattatttta

SEQ ID NO: 399769 - DNA, 1073 bp, Cannabis indica
cccatgtcccggtcccggtctcggtctcggtcccaggtctcgatcttggtcccaggtcccgagtctcgatcccattcccaatttgggttctagtcctagtcctggttcaggtcttggtcctagttcgggtctaggtcccatacctgatatcggtctaggtccccgtcccgagttcgagtccgagttcttgtacgagtccgaggctgggtctgggtccaagtttcagtccgtgtatgggtccgggtcttagtctgggtctaggtttgggtctgcgtttgggttcaggtacaggtctcgattttggccccaatcctgggtcacgggtcttgggttacggaatttgggtcgcaggtcctggcgcaagtctaggtttgggttcaggtctgggtctgggtattgatcccagcttgggtccggcttattgtgcggttttgcgtctaggtctggttttggtccaggtctaattccggttccacgatccttattccagttcttattcttatttcgattctcgaatccaagtttgggtttgggtcctagtttggaagtggttccaagttcgggtcttggtacgattccaagatctagacgcccactaggggttaggtccaagtcttgggtcgtgggtcaagatccgtatccaatcttatgtcccagtctcgttccgattcggatcttgggtcccagtccgtgtctgggtcgaggtttgggaccgagaccgcggtcggggcttgggtcacagtccctgtcctgggtctcgattctggttctaatttttagtttgggaccccaatctaggtctgggtcttgagtcaaggtctgggtcttaagtcctagttcgagttttggtttgggttccgatcttggtttgggtccaaatttgggttcgagtctaggtccaggctcgggtccgtgtcccgagtttcgatctgggtctaggttccggggcccaagtctaggtccccaatgtaggtccaggtcctaggtcccgatatgggtccattcaggtttgggtccttgtcccaatttaaaatttcaattcagttttttgttcaggtttgggtctgggtctg

SEQ ID NO: 399770 - DNA, 820 bp, Cannabis indica
ctctatgccactaaccgagctaattaagaaaaatcaataattcatatggtccgataaatgtgaagcaagtttccaggaattgaaacagcatttgataacagctccagtgttagctttgccatcagatcgagaaaagtttgttgtttactgtgacgcatccaaacagggtttgggatgtgttctgatgctctgacaaagttatagcttatgcctctcgtcaactgaaagattatgagcagcgctatccaacacatgatttagagcctgctgctggggtatttgctctaaaaatatggcgacacaatctttatggtgaaaatgcgagatttacactaatcataagagtctcaagtactttttcacccagagagatttaaatatgaggcatagaaggtggctggaactggttaaggactacgactgcgagattctgtatcaccccaagaaagccgatgttgtggccgatgcactgagtagtagaggtcctgggcaggttttcaccactgttatgatagctcatcaactggcctcacaaatggataatgcgggaattgaatttgtagttggaaagttgcataatttgacacaccaatctgatttgcttgagagaattagaaaggcgcagttagaagatcctgagctaattaaaatttgagatgacgtgatggctggtcggcctaaggacttttcaatctcaaacaatgaagttgctatataaagctttggtttgtgctcttaacattgattcgcttaaaatggaaatcctcgatgaagcccacaccacgccttattcactgcatccgggaaccaccaagatgta

SEQ ID NO: 399771 - DNA, 662 bp, Cannabis indica
tataaaaatactgaattttgggctaaaatttacaattttactttcacgcaaattcttttacaaaaataatgtctttttataaaacaactataaaataacaattagaacaacaatggaacaactaaaaaataaacgtagaacaactgtaaaaacttaacaaagtacatagtataaaacttacacagcatttttgaaaaaaaaaatagaatattttaaaaaaaaaaaaattggctcactgtagaaaagaattaaaaaaattcaatatataatataaaaagaggaaattacacttagtatgggattttaaaagttcttatgataaatatggcacatttaagtttggccaatttatatggtattttttgtttttaagtttttttatggtatttgatatgccatatatatgtaattaggtttctaaatctcatatttaatgtttttatttgtttaggaagttttatttgtcattgatgccgaaaaattcaccggaatttgctgtcggtgccgaaaaagtcgtcggagtagcggtcggtgccggaaaagtcgtcggagttgctgctggtgccagaaaattcgtcagaattggcattgtcgccggaaaaatcactaaaaattcaccaagaaaccggtttcttggtgattttccgttgacaatgccaatt

SEQ ID NO: 399772 - DNA, 707 bp, Cannabis indica
tgaattgtcaaaagcactacagaaaaaagatcaagatattgcaaatgccatgaaattagtggaaatttgcaagaaacgattgcaagcaatgagagacaatggttgggattcctttcttattcaagtctcaacattttgtgctaaatataatgtatatgttcctactatggatgatatatatgttgtacaaggtcgatcacgacgtaatgctcaagaaatgacaaatttacatcactttcgtgtggaattcttttatgctgttattgatatgcaacttcaagagctaaatgaacgtttcaacgaggtaaacactgaattacttctctctttagcttccttgtgccctagtgattcatttgaagcttttgataaagaaaggttgatccgatttgctgagtattaccctagagatttttctacttttgagcttaccatgctcgataatcaacttgaaacttacattcttgatgtaagttccactgagaatttcttgggtttgaaaagtattggcgatctcgctgaaaaaatggttgagacaaagaagcatattgtttatcctctagtgtatcgactaattacattagcattgattctacctgttgttactgctacagtggagagagtattttcttctatgaatattttgaaaagtagattgcgcaattagggatgttcataaaatagccgatccaatccaatcagcacga

SEQ ID NO: 399773 - DNA, 855 bp, Cannabis indica
ccaaaagccttgattaagtgccggtcggccttgttatgggattcgaacccatgacattatataatatgtcatacacctcaatcaactaagttatgactatttattatttaaaatacacttaattttactttaataaaagcttaatagttttttttttattttgggcctccgaaatgagggggccctaggcacgggcctagcctgcctatgcctaggcccgtgcctagggccggccctggactggtcatgtatacacaaagtatatttttagtggtccacataatattaattatttaaagattataaaaaaaataaaaatttatttttggcggtaataatatgtaaattatattttggaactctttagttacctgaacattaaatattatgtcattatccacgtgtcattttcttattggtatgtttaaattaattttttaaaaatttaatgacttggaccaatcaggaattgtcacgtagcaatttacttaacagtcaggtacctacaaaagttccaaaattataacctaggtattattactgctaaaaattaaacttaggtttttatttgcaattgggagttaaacttaggtatttatgccgcaaattactcaaaaatttgttatagtctcttaattaaaatagttttttctaaaagttaggttggaagctttagagcatgtttggtattgttttctgttttttgtttttaaaaaattgtttttaaaaatgagaacaaaaaatagtttttgaagtttttaaaaacaagtcatgtttggttagtgttttttaaaaacaatattgactaaaagtgaactggtttttaaaacagaaaacaacattttgttgttttca

SEQ ID NO: 399774 - DNA, 1116 bp, Cannabis indica
gtaaaataaatgttgaataattaattattttttgtaaaaatttcatctaattttttttgcagcaactgcttgacccatcttactcccatataaaaaaaataaataaaaataaaaaatctccaatttcaaaaattagggttgatcagtttgtcccaacctaacatcatgtgaatttttcactttgatcgaatctcctatacatctctactgcatttagatttctctttaatttttagtaacttacttgctattttcctacaatttatgcttatttgtgaaaaagaagaacaatctcaattaattgataatctactttggaattttttttacaatctctagactgatgaatatgatttcaacggagcaaaaatagttaactaatctttaattttataattgttattatattttaaacttggactgacacactgatttgacacttaaaagtattaaaaataatattgagtataaaattacatctaattagatggtattcttattattttttttattaattaagactatgtgtataacaattttaaattattacgagttttgttataaatattttaattatttaagttaaaataattaaatgttaaaagatttttactcagtaaaaaattacataaaattaattaaaaattatcagtaatttaattttgaatatatttagttttaatgtaagtttttataaagaaataaagtatcaaactataaattatttattatttattttttataattttaaattaattataattattcaacattaatttaatgcttaaaaataaattaatgtaatcatgatgattacatattgtagagggtgaaatctacaattacggaatttgggcaccagcaacctgtcaagaacaaagagagagacaaaagttcaattgggagcaccggtggggtgtcagccaaagggactccgacgctcaagtcagtacgattatagtaaaaaattataataacggaaaataaatgtaatataaatggtagccggacggatgagtggacaagcggacagacgaactaaaagagtaactccgatggtgaggcttaagagaaaagcttagaaaaggtgactgtctgcttgagtcagtgagtagt

SEQ ID NO: 399775 - DNA, 544 bp, Cannabis indica
tgtgtgttgaagttgttttttgtggtcctaggatgattgaggttttgacggatgatcaattcggagtatatggattttatcttcataaataccttagggaaagattgattgctttggatttgaagatgaatgagctgagggtgcaaatatgtttgatgccttccgtaaatgaagaatcaaaaaaaaaacttacaattcttcgaaaaacaatagatgaagggtacgaaaacatatggaacaaacttgatcttaactcaacatcagcagctgcatcatcatcatcatcatcatcctaataatttggttttgtattcgagtttcaagtattggagtttgagataaagatgaagattatgtgaaggtttagttttgttttgtaactttcttttaactgtatagtgtttctttgttttagtatttgaaaatatgagacatggatttgatttaatattgagtgtttatgttttgtttgtttaatctcaagattatttggttttgcttgagtttcatttgagttatagtactggctcagtttattggttat

SEQ ID NO: 399776 - DNA, 781 bp, Cannabis indica
ccaagtgacttcagacccatagcctgctgcaatataatgtacaaggcaactataaaaatcctttgctcgagacttaaacacatcttgctagaactcatagcccaaaaccaaggtggctttgtgcaaggaaggttcatctgatacaacataatgatctgtcaagatttggttctgcactatggaaggaaatcaaacaaggccaattgtatggtcaaacttgatttacaaaaagcctacaacacaattaaaatgggagtttatagaggaggtctcaggggcttactttttcctgacaatttcatctctttggtgatgaactgtgtcaaaacaccaaagttctccctttttttcaatggaactttacatggtttctttaattctaaaagaggattgcgacaaggagaccccctatccccacttttgtttgtcattggaatggaataactatcccgaataatgaaggaagtgttggaaatattttaaatgaaaataaacacataaggatttaagaaaaccttacattgattgcagcggaatataatgactccttccgttcaagatctctagcccttgattcgtttctgtagtagcgcattttcaagatttgaacaacccaacccgaaatgggccgaagcatggtccttttttgtgggccgaaatacatatgggttgataaaaatataacccactactattgggttgatatcgggttggtatttttctaacccaatgaacccaacccacaccgttcagcccagcccaagcaaaaaaaaaaaaaaaa

SEQ ID NO: 399777 - DNA, 1424 bp, Cannabis indica
ctcgatcttagaaaaatctcctagttcatatgcttactaaaggtaacttaaacttagagttgaattattacctttagtggttgtccaagctaaaataattactcattgaagtatttggtataaatttacgtcttcgactttaaattttagattccaaatagaaatttaatttcagtttcctgaatacattgaacactacggtataactttcacaagttattaatatcgattttctatcaatggatccaaactatatgttaaatgtatggaaagtgagtcttctatttgtattatgtgactagaatctacttgaactattctaggaactctttattgtaactaaacttagggatcatcaaaagatcacaaccacaataatatatttatggcatttacatctttttcatagtaattttgacaagatcattctctacaaagagaaaacatgctaatatccacttagaagtatgttcatctacatatgtatgtacatttaggggtggatatgagttatcattaaattcttagacaataactctagaatataccttatacaaggaaatttgaaatatttgagaaatttcatgaatttctagcaatggtgaaactattaaggtaagcggttaaagatcttgcgaaatgatagaggtggagaaatatttggttatgtagtttaaagatcattaaattgaacttcaaattgtatccaaaattacgtcccagaactttggagtcacatattatgaaaatgaaaggtctatgattagttactagcagttgcccgagtccttctagggaaatgccttagagatagcaaacaacattctatgtcattccatctaagtctgatccaaagaaaacctcataatgatggagtggtcgtatacttagtgtacaccattactagattcagggatgccctgatcatgaacttaagaaaagcaagaactgttaactaaagtttgcatgtttaatagctattctaaagagattagggtggaccatcatatggtcattaagataagaaagtatttgtttcaacaaatactactttctaagaacatgactaaatttgtagcaaagtagggggagatactatttgattcaaacccatagtgttctatgatcttattctacgtaacatgatcctactgcctctattgtattgacacaatcaatgaggtcaataccactaatattcttagacagaaagtcacggcacctcgtcgtagtgggggttttcaaggaactcaacctgttatgacttagaagatacttgtgataaaaattcatttttagtttaaacaagtaataaatagtcctaataaggaacaagtatcgaagcccaagagaactatagttgaaaccattcatatggagcaaccaaaagttttctattacaaggacaagaagggaaattttga

SEQ ID NO: 399778 - DNA, 564 bp, Cannabis indica
ctgaggaggtttttgattcccacgagctgcttgtcaatgccagattttaggggtttgatggataaaactgctgaggagtatggtttcgagcaagagggtgcaatagagatcccttgtgatgaacaagatttccaaaaaattttgtgcagatgtctgtcttctaaggataagaaaaaaaatgacaaaaaggcatgagggcaaccaagaacctcaatcaatcttactaagtaatgcgctcaatttgaaccccacggtttgtttttcactactaatactcctcatttgcgtgtttcaacagagtatggacttgcttgtagaatgattgtaaaaatatgtatgtatatatattaactgtaatgtaccgattgtttttaaattaagagttcatcttgaagctcaagtgagcatattaaaatttaagggtgtacatcggtcggtgtggtcgggttatagtgtatttttaccaacccaatataaatgtcgggttgcaaatatctaattgtaatccgtccaatgaaaaaataaaaaaaaaatgtgtaacccgtccaatgatttttgtcggtt

SEQ ID NO: 399779 - DNA, 1456 bp, Cannabis indica
agacgttatgtttgaaagctcggttggaacttctagcatcacaacttggttatgagggtcttttttcggttgatgctcaggggagggggtggattagcaatgttatggaaggataaggatgatgttgagatggtcaggtattcgcaaaatcatatagatatggtggtaatgcatgatagctctccgtttacttgggagaagattaggggcacggatagttggatcgaagtgaggttggatagagcgctagcttccccttcttggatgagtttgtttcctaatgcacggttgattaacatggtcttttccacatcggatcattgtcctctatttttggatccatcgtttcggttctaggcagcttctaggagggtgtttctatttgagaatgcttggctgcgtgattctaattgtaatgtaattatccagaagcaatgggaagcttgtgtatcaggtaacattgttgacaaagtgcggatattcagggccctcttggtgtgtggggaaggagcttaactgataattttaaggagagaattccaagttgtaagaccagaattggtctccttaaaggccgattggatgtagagtctctttctgaatataaggaggcgagaaaacaacttgctaaaatttatcatcaaaaagaaatcttttagcagcaaagatcgaagcaattgtggcttagggagggtgaccaaaatacgaggtattttcacgctactactagctcaagaagaaaaaataatttcattcatgaattaaaagatgagactgattcttgggttcagtggggtcgggtctgtcttaggttatgatagactattactctgatctttttcattctatggggtcgaattgtgttgaagttcttgatttatacaaccatccataacatctaaggataatgttactcttttacaaccagttttggaggaggaggtaaggcatactgtcttccaaatgcacccaaacaagtcacctgggcctgatggattgatccctgctttctatcagaagtgttggcatattgtgggcaaagatgttgttaagatggttaaggatttctttcgatctaagtccattccggggtctaaatgctactaatctcgttctcatttcgaagaagaaatctccttctgttatgggtgatctaaggcctattgctctttgcaatatatcttataaaatcatttcgaaagtcatggctaatcggctcaaaagcttactatcgaaggtcatctcggagtttcatagtgcgtttattcctggtaggctcattactaacaatattcttatttcgtttgagatattacattatcttagacgtaagcaataggggaagaatggttgtatggctctaaaacttgatatgagtaaggcatatgataggatggaatggtctttcttacaagctattttattacggatgcgctttacggaggcttgggttgac

SEQ ID NO: 399780 - DNA, 1392 bp, Cannabis indica
acatgaagcttaaccctaaaaaaatgttgttttggggtttccttaggaaatttttaagtttcatagtgaatacaagaggaattgaagctgacctggagaaaataaaggctttaatcgagatgccttcaccaacgaagccaaaggaagtttggctttgataagaaggatggcaacactcaacagataaatgccttccattttctaatgttttacaaggcaataagaaattcagatggacaggaaaatgtgaggaagcatttaatggcataaagaaacatttatcaacacccccaatttttgccaaacctataacttgagaaactttatacctttatttggctgtctcgaagcatgccattagtgcagctttagtgcgagaagaaggtgagcaccgacaacctgtttactatgtcagtaaaaggttactgggggtagagtcgagatatccacctttagaaaaacttacactatatttaattcatccatcttgcaaattacgaccatatttccaggcacatctaattaaattcttaacaaattagccattaaggaaagttttatcaaaggctgatgcttcaggaagattgataaagtgatcaattgagttgggacaatttgacgtaacttatcactcgagagtgtcaatcaaaggataagctttggatgactttctattagaaggaatatacgcaaaagaagaccctgatgttgagtgtgagacgaaaacatggaaactatatgttgatggggcttcaaatgagaatggctcaggggcaggagttataatgatgtcgccagataacttcaaattccactacgcactgagattccaattcgatacttcgaacaacgaggattatacgaggccttgttggtaggtttaaaaatagttgaggcactaaaagtcaaaaatattacatgctatagtgactcgcagctaattgtaaattaagtcttgggagaataccaagcaaaaagcctaaagatgaaaaatatttagagaaagttcaaaagaacttgaaaatttttaattattttaaaattgagaaaattctgagagaacaaaactctaatacagatgtactagcaaaattagcatctcaattcgatcttgattagataaatttggtattggttgaggtcttagacgatccatgtaaagcccgcttagtttaatttggaaattagcagttaattatgattaattatgaaaattatttatagctatttaaataatttagtatactgttatttattgaattcagtgatgcattttatgtcattcagtagttttaaaattttgcatttccggtgcccggtattttggaacccagcgtttggctcagtagaaatcacaacttagcatgttagtagtttgggacggtttattag

SEQ ID NO: 399781 - DNA, 569 bp, Cannabis indica
tttttctaggaattgtaactcaatttgataaaagatcactacatgttacaaagtgaacaaattaaaatattaccatgaagaagggtcattagttgaatacaaggaagataatgagcatacaattgaagatcaagatcctattaaagtggtattaactcaaaatttggctacatcagattcttacttgataaataatgaatatcgtgtagtgaatgaaatcatggaagagaatgaattcatccatgattaggaaatcattgaatatgaaatcacaagtaagggtatggatagccaagtggagagctagcaacaacaagaagggttgttagatgaaagtgtagatactatgacattggaggatgaggaagcacatgacatcattgattcgatttcatcattgatattgactaataaaaccaccaatggatccatatattttatccaaactatattatattctctacgggctacgaaagacttctccccaagctcatcatccaaagtcttatgttgttggtgctgactttggttcaaactcattgcttgccaagcttgaaggcagtacaaca

SEQ ID NO: 399782 - DNA, 946 bp, Cannabis indica
tgaactttttaagccgttaaaaattcatataatatttaaagaataattagcaattttgtcccataacttttgttaatactgattttactccctaaaatatacgacttgttaaaaatctcccatgaacttttactattaacacaaattttcgttaactaaatatataagctttttatgtaataaacataccacagaattaacggtaacaataaatgaacaccaaatatttttacgtggttttgtacttaaaatctacatacttcacgagtctttattattagtgatgataatctggatacaaagtacaattctctcaatcaatgcaaaatatagtctttttctctcaattttgtcgtctcctttacctagattctgcccctatttataggggagtagggtggcagttatttttccttgggatctaatcattcataactgctcatgaaacatggatattccccacgtttcatttttatgcatacatatggcataatatttaataaccacccaatcgctcttttgtctttaaccttaaacgattatgctgattatgaaagttgtttctcgctaagtatgtgttgtccttctttactgtctttgtatgaaaaatactctgtctatcccgagatggactcactatctcgccaatcttaacgaataatagttattattcttatctcgcatctactttttgtgatagcgagtttgaatatttctattgaaatgagttattttaattatatttaataacggaatttaataagtacatgtatcagcttctcgttgatagccaaattttgggtataacatttacatttatagaaatttagtccttcagttaggttacgtcccattattctatttaaatgttgacgtgtctttgtaaattaacaattttatcccctaaattttgacaactatcaaattgtacccccttaaaataaaa

SEQ ID NO: 399783 - DNA, 516 bp, Cannabis indica
ctacatttgggatggtatttagtcttgggggtggaccagttgtttggagaaatgtcaagtaatccgcaatatcaaactctaccatggtggtcgaatacatagctgctactgaagctgctaaggaactgatctggctaagaaaattcttcacaaaacttggtgttgttcttggaatggaaaaaccattggttttactttgtgacaacactggtgctatagcaaacagtaaagagcctcgaagccacaagagaagcaaatacattgagaggaagtaccacatcatcaaggaatatgtaggcaagagggcacgtactagtggagaaagttgataccgaagacaacttaactgatccattcaccaaaattttgaccttaactacatttgaaaagcactgactaaatctaggattaattgagatgtactgattgttttatgttagtgcatgggagtttgttgggttttgtgctgtaaataaactctatttcagtgtaatttttatattcatttatcaataa

SEQ ID NO: 399784 - DNA, 524 bp, Cannabis indica
ttccatcccccacttctttatttttttatttcatttttttatactcaaaaatatataatcagagtttgatcttcttttctttagtttttttagcgttaaactaagatttagaggtagtagttgtggtggttgtagcttcggccgccaattttggtggagaaatcgtggaatctcaacgtctattaaggtataaatctataataattttagtaatgtacattgctttatattttttattttgtaaattttcttaggattttttaaagattgtgctattgtggttgtgtggggtgatcaaattttagtcggtattggcggccgaatttcggtaataaggtaaaaatctaaagtttaatagtgtatatgtatgcattttgtgttttattgaatatgtattgtatgtatattttttataattgtattgtatatgtatgtataaaatattgtaattatattattatatatttattatgtattgtatatgtatatattgaatattttaaaataatagttttgttaaatat

SEQ ID NO: 399785 - DNA, 957 bp, Cannabis indica
tgagaggaatgctcctaatagtctaattatattgtaatggttgatttaatttaattcaataaaattctcattacttaattaaaaaaaaaaattctactaataaatgaattttaatggttccataacaaaaaaataataattaaacaagaagaaaaagcaaaatacatttcatgacatggatttataaattcataacattcaagttagtttaattttaaaataaaaaataaattatttttttttaacattttaaagcagttttcttctttggtatttgtatagaaatccacataataatccatatagcaactaataaaggaacttaaatcgcaactaaaattcacatagtaatccacataaaaactagcagaggtagagctaccgaaacagtaaatttgaacaaaaattaattttgtcaaataacttatgcaataataatttaagagtaatgtagtaattttgtaatagtttaattttgtatttcattcctactcaccaaacatataggaaacaaatagatttttttcattcctactccattttccctttattctttttttttttcccctttttcttcataataacataaaaaattgtgtataattacaaaatattacaattttttaaacaattaatacatatcaataattgtttaattggttttattaatttgtaagaatattaatgatgactataaataaaatacaaatagtttacttaattaatctataacaaaataatttacttaggtataaaagtaggtatttattaaatattgtttgatttattttatatacagaccaaactaaacctattaaaaatgatattaatgatgaatgcaagtaatataatttgataacatcaactttaaatgaagtagctattacaagtgagctacgatatttttttaagaacttgatttgaagatattttttttattattttataaaaaatatt

SEQ ID NO: 399786 - DNA, 675 bp, Cannabis indica
ggttagggcaaggttataacatttccgggaaacttgttgatttcctctcaagtatctaaccccatttttcattggaaacttaaggcatgaatgaaatatcgatgtaacagcctttaggtcatataaagttggtcggcctaacatgacattaaaggctgatggaacatccaatatcaaaaattgtgccattacagttatactctttggagcttgtccaacagtgaggggtaagcgaatttgccctagaggtgtaacattctgaccggagaaaccatataggggctgaagatagggagttaagtctttgagttggagccccattttttcatatggtgttttgaacaagatatttgcagaggctcgaattatctatcatagttcgggcaaccattttgtaggctatctggacttccacgaccaacagaccgttgtgcgggaaattaatcttgacaacatcttcatcattaaatgttattgtgggttcccatacccgtcgtatttttgttgggttttataccctatataaaactctttacaatctgattagatatcaatataagaaatttgaagtgattgatgtttgcatgaattctacatgataatggtttaaatatgtttattacaattacacacacaaagtcagttaaatccagatcatatgtttattcacaatta

SEQ ID NO: 399787 - DNA, 570 bp, Cannabis indica
cccacttttcttctctcattggcgccaaggaagtcttcaccccgagaaggcttgaatcaccttttttcccttcatttttccactcaatagaacaacaaggagaaagtctaggtaccaagtggcaatgaagcaagggtgtgccaaaaggcaaaaggaatgtactttggagtgtgttgtgtaccagcctaacctctgcactggacaagtcgtggtgacagaactgtgtacaagggaaccaaccgccaagaccatcaagtactctgacagccacaacctctgcaactactacccctaccacaactctgacatctgagggttagtaggtgtaccatttaccgatcgtccctaaggaccacagacaacaatttgtaacacaatgctagtagagtctcattataaatagcccttaccttcattgaaggggggttaatgtaacagtaactacataaatagaaccagtgacggacccacttgtattaatgtggggtttatagcctccaatagctaacaaaaatattaccttttaaaaaattaaatgtaactttttttaatttgataattataggctaa

SEQ ID NO: 399788 - DNA, 934 bp, Cannabis indica
gacaaattatcttctgttttactcttcttggttttgcttcagctaaaaccgatcactcactttttgtcaagattgattcaacacattttctctatgttctagtttatgttgatgatatcttgattacaggctctaatgataatcaagtttctctcttgatagacaggttacaccactcatttgctctaaaagatcttggtactcttaattattttcttggcattaaagctttaccaagtgcttctggtatactcttaagtcagaaaaagtatattcaagatcttctctgtagggctgaaatgcaaggggcaaagactcacaatactcccatgaatagtggtttgaagctctctaactatggaagtgatcctgtggtcgatcctagtctataccgatccatagttggtgctcttcaatatggcaccattacaagacctgacatagcattcagggtaaacaaagtttgtcaattcatgcataatccccttcagtcacactggatagcagtcaagcgcattttaaggtatttggctggtactctcaactatggacttcatctacataaagtctctacctttaaacttgaagcttactgtgctgctgactggacatctgatcctgatgatagaagatcaacaacaggatattgtgtttacttgggcaataacttgatatcctggcaatctaaaaagcaaccaaccatctccaggtcttcaaccgaagctgaatttcgaagccttgcagcggttgtctctgaaataacctggatcaaatctcttcttactgaattgcatctccctgtcacaactcctcctctgatctggtgtgataatatcagctcagtcatgttagctgccaaccccatactccatgccagaactaaacatatagagattgatctctattttgttcgtgacaaggtgatcaatagaga

SEQ ID NO: 399789 - DNA, 691 bp, Cannabis indica
ggaatcacaaaacttgaacaattgtcttgcacctctatctaaaagtttatttccccctaccacaaacacttagggaaaagaaattaaagaatgaaaatgtgattctcttgaggatcacatttgaaaatcaaatcctttcatcgcatggctgttaccaacactataattggtgttcaatgggataaaaacgttggacaaagagagctggaaacatgctcaattaatttatgtacgtttataaaacgttttcaaaaacttgttccaggtttcgtaaaacaaccatgaaacaacagaaaaacaactattaaacaactgtttccagagaactcaaaatgtaactcctctccgagttaaatcttttctcaacgtcccaatacccaattaattaatgataattagtattgtaatagtttttaatagctagaaacttatcccattaatttcataactcccatatgtaacaactcacataattacatatttatcaattttaatttttaagttacaatctattttcagatttgtaactcatcgtatgttacaattttatatgtattattatactatatatgatataatataatctccaacacataatatatattaatctcatattaatatataatataccacattattttaatcttcattatatatttattaaataataaatatataacaattataatat

SEQ ID NO: 399790 - DNA, 775 bp, Cannabis indica
tttcttctcactgataatggtaagtatatattcttcattgttaatgctcttacactatcatgagaagattgatttctatttttatcaactcggttaattttctcatgccaaccaaagtacacaaaatgcaatgcacatgtattatttgtataaacttttgagtttatttacaaaatagaaaaaatcttattttaattatttaccatcattatggattttgtgataatgatgagtatgatgtaaaatagtagaagtgacatatttagtagataaaatgatgttaatttgaaacaaaataaaaatatacagatttgcatgaggatagtaaacatcatatattccctatatatgttatatgtatgtatgcatttgaagcacacataatctatttatttaaaagaattcactgttttgttattaatttaaggtgtgtaaaagggtacttagagtgcattgagtatgagagaataccttccaagattcttacgtaccaagctgcaaaggactcactgtacaagggctaccaatcagtggtacaatcttcaagccaagaggaaactctggtacatgacttcacaacacaacaacactactatctcccaaataatttctcatcatctctttctgatctacatattcatgatttgacagaataaagaaggaagaaagtgatataaaattactatattaattaatgagtttaattaaattcttttatttcgggaaatttcatttttaatgcttaaaaaaacactctctaataaaatttagactc

SEQ ID NO: 399791 - DNA, 1007 bp, Cannabis indica
  modified_base (31)..(31): a, c, t, g, unknown or other
tatccgcacgtgcaaacaaaagattttaaanctttgtttttggcattaattgtaaactactcggaatttttcaaaaaacttacaggtgatcctaaataactataatgtatacgatcatagaaaaaaaagatggattaatcagctttagtaaaaagccaaaataaataggggggtcgatctaccgaaacaccactttaagaagtgtactataaacttatccaaatctacttgtttgtattgtctattacaatatcgttaactatttataaggcacctcacagtagtagtttgaacatcattaatacttaataacaatgctcaataataaaaatgtgaataccactcacaaatagaatttgttttttatttagttatttaatttaccttttatatttgacataaaatttaatgataattttataccttttttttaataccgttttttttttttttttctattatgcttattttttttttggcagaaacttttatatttgttttgatttattgtaaactactgtgggtactataatttttctatatataattattttttaccataaatttctgtttaatataaaaaatttatgaatcttcaacttttgagaggctttttttcgttttctattattttttatttccggtaatctctttctttttggaaaaaaaaaggaaaagatatcattaaaataacgcatgcttataattttttttttcaaaaactcttttttcaagcgacaaaataggatcctgagctcaattttcaataattttattttttaatataaccaacttaagacaatttttaacacgaacagatacagaaaatgtaactagttttgtcataacatctctagatcagattattattaagttttattttgacaaaaaatcagttcatggtcctatttgtacaattttgaaaaatacagggtccattttatcattttaacaaaacagagggtccaatttgtaacttttacaaaacacatggtccaaaatagtat

SEQ ID NO: 399792 - DNA, 767 bp, Cannabis indica
ccctctctatctcactcatatctctaacctcactctcgcataatctaggtagtgaccattcaatctcaagaatcattcaccccaataaagggtaagttttttgtagcaactttttaaatatttggaatagtatgtagtttgtttctattatatgtgtgtgtgttgtttgattgcactggtgttagtttactattttttttgtttgaaaggtcgagatctaattttttttgtagtttctcagttttttactatttatcgatggtttatagatagtatgtcgacatactgtcgatgctaagcaagcaaagtcagggaagatcattattaatggtatgtcaatagtttatcgacaattttctaaaataaggttttagcttgaattattgatggtttgtcaattgaatgtcgatagttttgtctaattatcaatttctcatatttagtactattgattgataggatatctattgacctcaagaattggccaactaacagcagagtcatattgaactgatgcttgtcacgtgttacacaattagaactagataataaaagaacacaaggatttttatagaggttcagccccttgagttagcgggtaatgacctcctcttctttcagttgaattgataccgagagataatactatctagatcactataggttcgatctgatatagctctcttaaggttataatgcatgaagcagtaagcaggtctttaatgagagagagatgaatctgtggaggtgtgtgtgtgtgtgtgtgt

SEQ ID NO: 399793 - DNA, 571 bp, Cannabis indica
atctcggtttgggtatgggtctgagcctgtgtccaggtttgggtttagggtttagggtttagtatttagggcttagggcttagggtttaggggtaagtgtaaagagtttagaatttagggtttaaggtttaggatttagagtttaatggcccgcttccagatcgagttctaatttcgtgtcacagggtacgttttaaggttcgggtgtgggctgggtccgagtcctggtttaggtctaggtccgtgttttggtccaggtctgagtcttagtcccaaatccaaacaaaccacatgtcgagtctagttccgagttttggtacggcttcgatttttggtctggggccaggtccgagcctaggtctaattaccagatttagacaccaaatatgggtcgggtccatgcctcgggtcttgggtccagtctcgggtctaaatccagatcctggtccagttctagctcatgtcttgggtcctggtctgggtctaggtttgggtcttgggcttgagtcatgggtctgggtccccgattcaggtcagggtcctagcacccgattgttggaaatattttacc

SEQ ID NO: 399794 - DNA, 569 bp, Cannabis indica
catgccatttattggtgtttttttcaatgtttattgctttgtattgataaatatttctaaaactaatttcagatctttgagaagaatcttacaacaatcaagaacttcggtatctggttgaggtatcaaagtagaactggttatcacaacatgtacaaggagtaccgtgacaccacacttaatggagctgtggaacagatgtacaccgagatggcttctcgtcatagggtcaggtttccttgcattcaaatcatcaagactgcaactatccctgctaagctttgcaagagagaaatcaccaagcaattccacaactcgaaaatcaagttcccattggtcttcaagaaggttaggccaccaaccaggaagttgaagaccacatacaaagcaacaaggcccaacttgttcatgtaacttggttatttaacaatcaagctataaagagaagttgagtgagtgagtgactcagttgattcctgaatctttttttggtagaaaccttttttgtctgttttgttttgaaggatatttcagtcgtttgagcataaattttaatttatttttctttt

SEQ ID NO: 399795 - DNA, 590 bp, Cannabis indica
gatcataaagtgaacttatgcttgagcatcaagcacacaagacataacccactacaccttaacagtggtctatcgcactcacaacaaatagcttcaaaataaaagacttcaaagtttttcaccccaattactaagagatcaatgatgggggcaagagcagttaagctcagacagtatcaatgaaattgcaaacataatcgagacaaatatgatggttaatgatcaagcatcaacaaatattctataaaaagagtgggtcactctttaagagattcaacgccaagcaagcagctcatgtatggtttcaggtgagctaacatcactccgtgtggtaaaatcagattacgactcatagtcaaaactaccccgtggcaaacatcaccatgactaccttcatagagatcgaaaccaagtctccctggagggtcaacacccagcgacctctaagccatctcacctatctatcacctgtctatcaagttctcgacagcatctagtatcgatcgtcaccttgctaaccaaagatttgcatgcaaaaattcttgggttttatgccctaaataaaactctttacaatcagattagttatc

SEQ ID NO: 399796 - DNA, 609 bp, Cannabis indica
caataaaatggtgggatgcttttctatcctcatccacattggtgttttgtcaaatctaatttcagaaggagttagccaagatggccaaggcattataaccatgagtgacccacaaacaaaccaaggccttcgtgccaggacattcatggcatcacttctattggcaaacatgaatttgatgagtccatcttcgatttctttccacttccatcccttaatggcactccaagacaaccgcagagagccttgtatagctactttgcctagcttataccggctgagtattttccctatgagaacctggtttgattcttgaggctcatcgacttcacccgggttgagggagaatgtgatgtcatcacttgctatttggaccgcatcctggaagagttcactaacttgcttgggatccatggagcattagtgtaacaccctaactagcataggcgtattacgtgatttttaaacgtactgtgcagctcgttgctaatcaacgaggtttatggaaatcgtgattaaaaaaaaattttgctttttatttaaacttatataatattttataaaaaataactcgggatcccgattacaaaatactttacaaaagtttaa

SEQ ID NO: 399797 - DNA, 775 bp, Cannabis indica
catctggcgtgcctcccctgtgtctgtgttgagtgcagaagaagagttgcgattgggccttttccccgtacacactaaagccgcctctttgagttcttgcaggtctaggagcgaaactgtttttgagttattgccaaaaggggcaacttccccaatgcccggtaggtaaactagagagatttgggtaataaccgctacttggagtggagactcctgatcgtgttgatcgtgttcttcgtcgaaaactatgcgtttcttagatgggagttgtttgcgattctccctgggttcatccaactcaccatggaggattgccttttgcactttgagttggtttcgaagggtagggtctaggaacaaccgcttttgaaagacccaatcttggaaccatttggcaagaggggtggtaaaagttgacttctccttggcatctgccttaagccaaatcccatacattgggtagaagtttcctttgtcatctttaaccactgtgggaggtttgaagcaaatgctttgatcgtgagtgaggagtccacatttgaagcacatttttggtagtctttcatacttgtattggatccatagatccttaagtctttgccgccgaaggaagaaaccagagaaaactagtttgttaaggtctatggtggctcggaactttaaattgctcatcccgatagcatcctcaatgccttgaggcagttcatagactggtgatgcccttgaagctagctcttttgtaacaccctaactagcataggcgtattacgtgatt

SEQ ID NO: 399798 - DNA, 1096 bp, Cannabis indica
ccccctaatttctcgagctcaatcgctgtttaatgctatatctctctcacacttgaatttaattatggcggctctttctttcagcatttaatttctctgcacaatctccactcttttcgatcttcgaatcgatcttctacagctaaaccaaccgtcaattggtttctcttcgtctcacacccaacaaccatcattgcgtatcaactccgaatccagactgtctctcccagctttgaagagatggttcagacgccagttctctcttcgaggcgacctttcttctccaggtactcttctctgtggcttttttctatctttgcttatttatatgttctctcccttactctattcatatcacctttgtttcccacttcaaatcctgttagtttcctatttcctaccttaatggcttcctcctccagcaacccaaaccctataactgctcttgatgatgaggacagccttgtccacgatttcgatcacatttccatccattctcctactgatgctgattcattttgcttgttcttcaaacttttatctcccaaatctgctaagccctcttggattgaaaaagccatgtccgaagcttggaccctccgttttccttgccaaatctctgaatatcattctgggttattcgcttccttccaatgtgatggagataggcgtcgtgttctcgaagaacagccatggcattttgataagtttttgatggtcttcacccaccctgacgtgtcgccaaccctactcctgaatctattcgatatgtccccttctggatccaagtccatcgaatcccgtttggacgtaaaagtccccaacttgcacaattcattgctgatgaaattggtgatctcctggaaatttatcctctctccttaatggaaaactttggtccttacctacgaattcgtgtgcttcttgacatcactaagcctcttcgcagaggtatgaccatacgtttcaggggcatatcagagccatgatgggtcagtttcaaatatgagagtcttccgaatttctgctatttctgtggccttgttgaccatacctataacaaatgttctaaatacctccttcgttatgacaattt

SEQ ID NO: 399799 - DNA, 511 bp, Cannabis indica
atgaggtgtaaaaatctcaaaaaataaagtaagataaattagtgttttttataccatttttatttctatactaaatatgagaagttatgaaatttagcatagggtgtgagagcactttccactctatcatttaaaatatattattttatttttttttttttttttctatttttacatcaacttctttaaaataaggaatcttatcttcttcttgaagcttcctataggctttgctctggttcaacctcaatatcggtttgttttgcctgattttttctttctttctttgttttcttcttgaacaggtttgagcttctctgtttctttcttttagtttctctttgcttcttttctgcttttattgcattaattacccctatcatctctttaattttgatgttcccttttgttcctgttagcctcattaattgctctcccctgacctctgatttatttccctaatacgtcaccctaatcattatacatctccccctaatttctcgagctcaat

SEQ ID NO: 399800 - DNA, 820 bp, Cannabis indica
tgtcaatgatcttacgctcaagatggaagcaaatcttgcttatggggcatcaagaactggtttctttaaaccatctcagaatcctggacgtggctcaacaactgatggttataccagaactcaaggacgaggcttcaatcgtggttcatatgtcaactccaagctcacttgtcaagtttgcatgaaatctggacacaccgcagctgtgtgtcactacagattcgacaaaaaattttgtctcccccaaacctagtgtctctactcctcgtgcttacttgactgaatatgaacctcctacagattctcataacaccactgttcttcctgactttggtgatgatctatcatggtttgctgacactggggcaacaaatcatatcaccaacaacctaatttatgcttaagatacctaattaataagtgacatttacaataaaagtatccaagctattgaaaaatttgtgtaccctgcctttatatttaattgagaaaggataaactacaaagatattagataaatatgtaaaatgctattagaaataattctaaattgagaatatatgggaagcattatagtttaatataggaattgagctactccacttagtaccaattgattttaagttggaacctaaatccctgtctaaaaaacattctctttcaatttgtaaaaaatgcaacaaaagtaccttatagcaaatgtatcagcatcagagctgactttatgctaatttgagccttaagcaaaaataaaaaatgagacccaataaaaaagaggataagttgaaaaatactttttttattaatcaattaactaaat

SEQ ID NO: 399801 - DNA, 558 bp, Cannabis indica
tagcgaggttgatgcctcgctttttaacatagatatcatccttatgattgtgtcttctgacgcggaatggtttctcgttaacgcatgaggcaattatatccttatctcgcttaagactttacaatcagtgagttatagatatgctctatcaatctccgcatttaatgaattattccgctttaatatcttttaatataattgtcattatatttgttgattcgtattctcccaggttgccacgtgtcctcttctgaagtaccagctgaattttaggtataacatattttattataaaacagtaattagtttatgaattatctagatcgatattttctaggtagacttttagtattttttgtagatatatttaattaaataaaaaaattaatatttaagttgatttgttctagacacttaaatatttgatatttttcttaagatatttaattaaataagaaaattatatttatgttgaaaattaatttattaattttagatcaacataaattagaataattttttccaattttattttaatataatttcaaaaatgtattt

SEQ ID NO: 399802 - DNA, 689 bp, Cannabis indica
cagcgaaataacaatcttaatctctatctcaatctcaatctctccactaaaatcccaatatacattttgcttcttcctcactctcaccacataacaaaactcacacacttctcttttcacaactcactatttttttccgacactcatacatctctctctcacacaaaacgcatatttataaagttacaaaatttgagcatcaagacaacttggggaacaagacattccaaatcttccttaagaagacttatcaaaacttggtcaccaagactttcctttttcccacaattaataattacccaaaaagaaattgcaacttcacatatatagataaataaataaagaaataaataatttgagtcaaactccaacaatttccactttgactcaaattctctaaactcacacacaacaaattaatttattaggggcgacaaaagtcgcccctaaataactataaatcgctcttaatgtattttagaggcgacatgtcgcccctaataagtcgcccctaaaagttcgcgcctaaaagtaccattaggggcgacaaaaaagtcgcctgacaattggggcgacactgtcgcccctaaaagtaaaacacgaatttctgttttttacttttagagacgacaatatcacccctaatacctagaatgtcgcccctaaaaagtgttgtcagagttgttata

SEQ ID NO: 399803 - DNA, 514 bp, Cannabis indica
ctatcaattttattttactattttttttaattattaatttgggaaaaaattggacggtaggagatggaaacgacgtcgctttcgtggttgtttttcctggggaaagagtacgttgaattgaagatattttgttaggagaatggagaaccgtccctttattattaagaaatgaaatcaccactaactatcataactatcatcaaccaaacatattgtattaatattagatagtgagctaaactatatattttctaaatagaggtaatcaaacaaatggcattacgaaataattatttgaccaatgatgaattttgaaccacttaatagatttagaattggaaaggtgtggtatacttatttcctataaatggaaagatttagcggaaagttaatttgaagtcgtctagaagtctaacttcaccactttagattagagctgaacatcgggcgggtttaccgggtttcgggttggcgggtttcgggttcaaaaattgaaaccgaacccggacccgaa

SEQ ID NO: 399804 - DNA, 626 bp, Cannabis indica
agatgtttattccaatggggtgaatcactatttatacaaaaatatgactaagacaatgagaaactaaattaatgtaataaaggaaaatacaaccaagcattaatgatgataattaatttggtaatttggacatccataaataatatttaataacactcccccttggatgtccataaaaactgcctcattaaaccttgctgaaaaaaattggctaaaagaaaaagagtgaagtatgaattaactccccctcatttaggcatttatggagatcttctaatcgaagaattacaatcttgtatgtcgtcttctcaaatattgatgttggtaatagctttattaataagtctggattgacacttgattgcatttgttaaaaaccaatgtgcattttattgaaatgtataaagaagaatttagtgaaatgtgttttaattctatctccttcaatgtaccctccttttaattgagcgatgcaagtagtattatcttcatagaaaactacttgtgttgatacttcttcattgagtgtactccatatgttgtctgccgtcttctcaaatgttgatgttggtaataactttgtgaataagtttgcaagattgacacttgattaaaaatgttgaaca

SEQ ID NO: 399805 - DNA, 564 bp, Cannabis indica
ttttgctgcagtaaaatccctgcaaatttttagcaaaatcttgcattttctctattaaacttttttcttcaacaaaactcaaatcaaacttaataattatcactaacgctccaaattacccaaaaaaattaatataaaaatacaaaataacattgaaaggaaagaaaagaactaaaaaataaacaaaacacacacacacaagttaagtttaaaaacatgacaaagaactctttattcaagaattatcaactgcaaacatcttgttgctgagatgataatgggttttgcaatgcatataatattcattgatatgtgacaataagaatcatcttgcactggtagcagtagagtcattttgtgtgttgctaccttcttagttggtcgtgcttagattttatgaacgcgacgacatatatttctctgctataccttatgctatgaaaattatgtagtaatctctttcagatagttttggatggtgacatttcaaccgagttgtctaggtgtgtgttctttttgtttccatttctaaaatgtatttcattttattatatgattaatttt

SEQ ID NO: 399806 - DNA, 609 bp, Cannabis indica
tattgatatttgtagtgtcaaaacgtacaacccacagcccaattctcatctagaatatgcctttaggaatgaacttcaaattgtgaagatgactcctggtcagagtatcactccacacttgctcatgatgaacatgaaattccagaaagcagctatgctgggaattgttttatctagagagcaaagagttcattttattctcaacaacttatcacctgagtttaaccaatttgttgttaacaatcagaactcgtccgacatagacaagtcggacgctaaaatgtgtgcttatgaacggacattgtcacttgcatggagatccttctctagtaatgcagataagggcaagaggaatgttgaagatattaagaataattcctccgacaatcctactgcttcaggctcagttgagaaggatagagaaagtgattccacttactcagattatctttcacaacagattgaaccaacaataagaacaatccaaaaatagttaagcagtcacattattcaatgttctaattgtgatcagaagggacattttaaatcaaattgtcctagacttctcaacactaagaacaataataatgccttagtttttgaatcatg

SEQ ID NO: 399807 - DNA, 1688 bp, Cannabis indica
gaaagcttcccttccccatttttcctccttttttctatgtatgagccgaggttgtgggttacacacctcatgactgttgggctttgtgtcctaaataaaatactatttcgatgtaatcttttctattcatctatcaataaagaaacagattcatttttcattacttgtttaatgtgttatttggttcatgtgatcatttatatgtttatttgatttataaattcaaccaaatccttgtcacattgatattcttgtttattgtgtcgtcaacacagtagaaagtaatcaatattatgtgattaaatgtatgcctatgatttatcagtgtacaaggtttaattgataggataatcaacaatgtagtttacttgcaccttggataagtgttatgttctttccagagcattgattaaagtaagcttgggttggatggatggagtatgcattggaagggaccgatattgaacttgaactagatatgataaacttaccgtaatatctattcaatttaatataacctagttgatcctagatcaaatgatctcaatcctgagatggttaggttctagttcagttacattatttgtgttcttaaatctgttcgttaaagtcgaccaaatggttgttctcgtgacatataggttaaggatatcgtagttcaattgagtgggggcgctaatcatagatacgaaatttatagcctctatccaaatatagaagtcatatgatgatttccttcgagcttggcttaacagagataaatggttgagtactcattccaatgattatattagttcactagaatatcatttataggtagctaagtattttaaggataaaatacattgaagagtgtaatggtaaattattccctattcaatgtaaatcatctatagaggatcattgattactgggataataacaaatggataatctcatagcgtatctatatcgtggaacatatagagcactttatataattgagagtgcaattccaaatctatagtggtgcaaggaggaatttataagttagagaatttacttaataaatcctagatttgcttattggaagctcgttatttaggcccatggtccgcatactagttgagacaaagtgcttgtaagacttaattaattgactttaataaatcaattataattctaaagttaaactttcactaagttatggcttgaatgtgaagaaatataattttagggtttacttgttaattaagaaactttatggagtctaattaataaataatacaaatagaaattttatttgataattaatttaattattaaataaatagttttggcatttatgggattcaaagtgcaaaaagtggtatttgtgaaaaatagataaatgattaaaaaaatggaaaaaaatctaactaatgatggacccacttaaggggccagccacttaaccctatttttgctgtatttttataattttttattcaaataattcaatcctaaccctagtagaattagtataaaaagaagagtaaggtctcactatccaaactaatgcttctaatgctttaaacctagttttcattctgacagacaactagagttttaagacttcctcttcttcttttgtctcttctaattcaaaattcttagtcttcttcactttaaaaattcaagccttagtgattgagtgcatgcccactcat

SEQ ID NO: 399808 - DNA, 558 bp, Cannabis indica
taatcactcacaacgtgctacattggccgtataatgctggacacttgataaagcctattccttcgatgtgggacttgggttgattctccaataatattaacgtaatattaagagcgttgctaaagaaccaaggtatctagcaccactatgaggtgaagccctatacttggttatcaattctccataatctttattaaagtaaaatgtatggaacccgatattaaattgcacaaattgagatttttaccccttaaacttttacttataccaaattatgcccttaaacttttatggtcattaaaaattctcactgttcaattgagattgttagatttaagaatttttgtccaatttcgttcaattttactaatttagtgattgtctatgtatcaaatcatgctccccaaactttgatatatctactaaatcatatgttcctcgaactttgacatgtactaaattatgtcatctaaacttttatctatgttagatttttcttactaaaattatataaaaattcttaaatttaacaatctcaataatttaaaagagattttt

SEQ ID NO: 399809 - DNA, 941 bp, Cannabis indica
tatatagtgacattgtttacaagtggtataacactaaatccaaatcaaaaaagaaacaaatcaatagaaaaataatataaccaatataaatacaagcggatttaagtattaagatgcaccgtatatacttgctaaccaagataagaaagttttctatcttcaacactcacttagaggtcgtgattggaaagttgttgaagatgttaaccatcaaccaatgtgggacagtgatgactattgactcccaaaaattgctaagtgtaatttttagagtcattagtgttatgtccaaaagttcgccaagtgtgaattctaaaatacacccaaagggatgtgttggtacgaagaggagcaaaggcacgagtcatgctccccgtgcccacgcccgtgcgcccaagctccttgtgcccatgcccgcacgccaagcctccatgcaagcagccctccctgcgcgcctagcctgtgcgcttaggcttccctccctacgtgcccagctcccctccctgcgcacctagcccccgcgcctaggctcttttccccacgtgcctggcctccacatgcccatcctccttacacccccttcaaccctttttttctcctcatacaaacggtctgtgtgcttgaactctatattaacatcttgaatgtgcacataacctcacaaatataggagatggggagcaaagatcaaggctaaggtcatttaagcaaggatatcacatacaagataactgttggaaattattttaccaggatcttagatctactcacaagtatgttgtttaacaccctaaatatgaactttctaaaacgataaaataaacacatatatgcatctatataataaaataaacatataggctcacacaggcacacatttggatggatcctatcatgttgctaggccatacacagatgaaagaagattgtgaaaattacct

SEQ ID NO: 399810 - DNA, 556 bp, Cannabis indica
tattggtcattacttgtaaaaaaaaaaattataactacaccttcaaaaatataattacatatttaacctccttttgtgaaatgacctaaatagatatctttgttttttttttttattttgtttatcaatttatttttagtaattaagtatatcccaccactttaatttaatataaatatataaaataaaaaaattaacttataaaattgttcattataaaatttgaaacccttgataaaaatcgcttcattcagctgtaatttatgttagatgtgatgttgtataaataggaggtttattgaaaataaagggctagggttagatggcttaaagctggggacaaaaatactaaatttttccacaggcatgccccctttcgtaagaggaccaattgtatcaagtatcttaagacggaggatgggactgttgttaatactcaggatgacattgttggcctgataacctcctatttttctgatatgttgtgtaatatcccgaaaaatatattgatattttaattggacatattttattaaatatgtgattaagtgggtat

SEQ ID NO: 399811 - DNA, 929 bp, Cannabis indica
agaattaagattacttagccatggataaaatagtccacaacatattaaagtttgtgaatctttaatcaatggttcctagtacggtccagttatgcgcgctctttagtgcaagtaatctcagtttagattggcctaaatcctaagtagtgatgaactcatgttcatgttattaggttctttgatacactcatttaagtttctcgaagaatatgattcttacaacttctattttagaaatataataatatggatgactaggaacatgatctacaataatagaatcctgactttcctgacggatcaaatgttggtttcctttatgtgttaattctagaattagaaagttacgcgtaaatttagacgagatctaaattttacttgttagggtttatgccctaaaaatcttataaatacatttttgattattaaataaagagttgaacattttgatatatgcttgaatgttaaattattgatatttattattgaataatttatatataaatatcagaaaatttcttattcatatatgaggatgtggctcgtagttgtacaaagaactaagactacttagctatgaataaaatactcagcaacatattaaagtttgagattctttaatcaatggtagctactactgttcactgatgtcctttcttcggtacaagtaatttcagttcaaattacaaatgtagtataacatcaaagtgaaggtattgtatatattgcagtagtactcctagttctttatgttgattacattctacttattagaaacaatatagaaaggttattagatgtaaagaagtggttagccaataaattccaaataaaggattcgggagaagcaagctatgttcttggttgggatcaaaatctatagagatagaaagaggagagcattactactttctcaagcaacttatata

SEQ ID NO: 399812 - DNA, 596 bp, Cannabis indica
aagccccctccatcaacaccaacaccggtcttacctaagccccctcctttgacgccgacaccagaggttcctaaacccctccatcaacgccagtgcctgtggttccaaagcctcctccatcgacacctactccagtaattccaaaaccccctccattaacacctacgccagtgattccaaagccccctccactccaaccgcctgtcccagtggttccaaagccccctccatccacgccaacgccagtacgtaccctaagcctcctcctctaacgcccagcaccagtgacttcctaatccccctccttccgatgccaacaccagaggttcccaagcccctccatcaacacctgcacctataatcccaaaacctcctccatcaacacctactccagtacgttccaaagccccctccatcaactcctaccccaatagtccctaagccccctccttcaacatcaccacccagtggtaccaaagcctcctcctatgacaccaacaccagtggttcctaagccacctccttcgacaccagaggttcccaagccccctccatcaacgcctacgcctgtagttccaaagcctcctccgtcaaca

SEQ ID NO: 399813 - DNA, 691 bp, Cannabis indica
gaatgaattaaaagagaaagttattattggtgaaatcgaagctaagggtcggaatgatatcttaacgtaagctttaggcatacctgagcacccaagtcgtgttagagttgttgggtatgatgtttctttaattgagtcatattacttctctttttttttctttctatatttaaagggatactaagttggtacattatgttgtaggtcatttgccaagatttctaccgtgttttgtagaatgtaaagaaagaaaaagttgaggttgatgtcgatagtgaacatgtcgctgaaatcaagagattaaaagctgaaattaagacgctaaaagcacaaagaaatgcacaaacagaagagcttcaaaagttagacaatgaatatagagatgaagagcgacatgaagactattatgaggaccaagcagaccagcaactatgaagaataagaacaacccttggcatatgaagaccaagaaccgatcggcaactatgaacaccaagaacaaccaatggactatgaggatgtaagtcaatgtgtaaaattatgttcggataacattgacaatgttgtggctgagggtgtcataattgaggcggttggtttcttttcatattatggtgatataatttcaaatgattatgcacgggttcaaatcacacaagttattcaaggggaagctgaaatcccatatcca

SEQ ID NO: 399814 - DNA, 564 bp, Cannabis indica
aattatagctaaaagagtacaaattattctagttatttaatcctaaaataaccaatacaatcaacaatataatcatagtgtaagcggtaaaattctcttacatcaactataatgtcataagtttaatcatttgtaaagacataattttattatttttaatttaaattttaaattaatttaataatttgattttttttttctaaacaataatttaaatttcttcaatattttttcattattagtatagaacaattcttaactataataacttaaagtttgtaattattgtagtggaaaatctgcaatacttttttgttaatatacatagggcaagactatggaaggaacttggaaatttttttgaccattgattttagatcatgtggttattatgatgtaacgtgtatactcttacgatatgactgcttgtatacgactaaaattttatacatattatattaatatttaatgatatttattttttaaaaaataatattaataattaaaaaatttattaatttttattttgaattattattattttttttaaaagttactttgaat

SEQ ID NO: 399815 - DNA, 1004 bp, Cannabis indica
ttaaccctgtacttattatttcagtacggtactggaagatttttgtccagccgtgtcaaatcaattgattttattcattatctcttccatgtttacttatactttaaaggatttttttttactttaaatgtagaaattattattttattataaacatgtactttcatttgttttaaatatatatatgtcacatcatatgtagtgtagccctttttttaaaaaagaaaaataaaaaataaacaatggtaaccaaagtttcattcatattaacccaacaataatgtagatttatttttccaaagaacgtatttgaaggtaagtcataaagtggaccttctctatttcaataagttaaaaagacttacaataacgtacttcaatgtttatatagtgtacgtcccatcaaactttcaatcaggcatcacctctttactgcatatttggatattatgagatttgattttaaattaaaacattaatttctgtcatattttccttcacgggtttgtgttataatatttaaatttgtaatttttatgttttgaaactagctagtacatcctactgatatgaattgatgggaaaataatattccaacaaaacctaaaaaaattaatttctgacaacttgtactaatattttacacgtatccattattaattgagctagttcttgtaaaaattggaattattaaatacaaattattaattaagtaaattttcaataaagtacgtcagcgtttttagtcttagatcaaatcaatttcactaaatgatgacctgcagatattgtgggattttattaaaaaaattatttctgagtagttgtaataattttatacacgtatccattattaattgacatttttcttgtaaaatttggaataactgaatacaatttattaaataagttaattttcaataaagtacgtcagggtttttacagtcttaggtcaaatcaatttcactaaatgatgacctgcagatattgtgtgattttatttt

SEQ ID NO: 399816 - DNA, 1465 bp, Cannabis indica
ctactggaattgaaactggcggaaccgaaaatcaaaaccgaaaaaaccgctaacggttagaactgccattgaacggtcaatttttgttggtaataaactgatcgaaaaaactgaaaccgactgttatatatatatatatattaatttattaagtttatttttgctttatgtattgtagttactcatagtatataataatatattattattttattaatattaaagataaaagaataagacaattagtttttgaataattaatttgtatgttgttgttatagaataatatgcttatagaataaattggatcatattttaaaaaaacaaaaagaagtttggttcgaggttaaaaatggtcagttttaagaaaaactttgaattggtcggtcggtttttgaattacaccaatccaaaccgaaaatcgaattcaaaatttttatataaaataaaattgatcaaactgaccgatgctccaccttattttgatagggtctgtctatctaatattggttatattttgtgttaattttttcaaaatttttcaaaatgtgattaaataatgatatgatgatcttatatttaaaaaatatattttttcattaataattattattatttttgtttaactttgtagttccattcaaagagtatgtgagtatgtgacaatagaatgaaattgtatttgactgttggtcttatttatttaaaagctgagtacagctcagcatttacttgctatttttttgaccgttgttaatttaaccatttaaataaaaaaaaaacggtcaaaaataaaagacgaccgccaccccggtgatcggcaacgttcgatttcgatttccccaaaacccaagtctccttcctttctcttcaccaccataacccaaaccctagctgaccttaatcgttgaagaatcaagtgctctttctgttctctctcgagtctcgattcaaccagagagtgttgcctatgggtgtttgcctctgattttggaagggaagtgaatgggaatgatgatcagactgctgaggccattgcagacctttctttttttttcaaaggtgacaccttttttcaagtttctgtataaaggctaaacctttgatgcttaccgtcccatgttctcttatattacagtgaatgtaatgttgattgctttataaattgtgttctttctttctttcatatcactattttttgtttcttctctgtttgattgctgttagcttttgaaaatatagaaaataagagggaaggcttgtgggtgggataagattaaattttgggttaatagaacaaaacctttatttttattattattattattattatttttacgatttgattagattattgggagttattttacagaaaatcggtaaactaattagtgtatatatccattaaaaaaaatagtatatatatagtataaatatcatgatcattacctgtggctgtggccat

SEQ ID NO: 399817 - DNA, 1000 bp, Cannabis indica
attaattttagaatctaaactataattcttttaataataaatatttaagttaggaaaaaaatttataaaataattacttaataattaaatataaaagaattaattaaataataaaattataatttataaataattgaaaattgaatattaacaataataatttaatttttttgaataaaaaaattcaataaatgagaaatttattgtaataattactttaaaaataaaaaaagtattttcatgtaaagaattaaataatttttaagatttaatatatgaaaatatttataaataatatttccttaaaaatagaaaataaaaaagacatttaataaattaataatataataatatataattaattaaataatgaatgttaataatataattattaataaataattttgtaattaatgttaaaataataatataattttttttgaataataaaattttaatataagtaaaaataaaagtaatcatattataactttgttatacccaaaatttggtaagcacattagaggaggacatgtgtcgagctgcaaagaactcaaacacacaaacgacaagtatgtgtagcatggaacaacttgttggaaatataatttacagggtaggtttataacttcgtaacacatgtctgcaaaacgagcgaggcgttacaatcattataaaagacaattaaaaaggggaggagtataaatttcctcctaagggatttaccaaaatcactaaaaggcgagttatcactagatgagggggtagaaggaccataatattcgctaaaatccctagagtctgtaattttgaatatatcaaaaggctcgagtggttctaaattccagctcgcatctatgtgacctgctctatcttctatggtaccatgttgctcggttataccataaaatgactcgtgacagttgatctggacatggaatctagggtaccaactatcaaacttatgagaaatgcagtccacgagaatggaattccaagt

SEQ ID NO: 399818 - DNA, 1010 bp, Cannabis indica
tggtgatttgcacgaggaagtgtacatggaacaacccctaggtttgttcttccaaatgcacctcaccttgtgtgcaaacttcataaggttttgtatggcctcaaacaggcccctcgtgcctagtttgataaattgcacaccagccttattgctcttgggtttttcatcatcgaagtctgacaaatccttgtttattttacacacatcctcctccaccacattcatcttggtatacgttgatgatatagttatcacagggagtgattctaatctcatcaccaatatatcatcaactcactgaattctcaattctcacttaaggatcttggcaacttaacatactttcttggcattgaagttcagatcacacgggcttcatctatcccagtcaaaatacattcgtgatcttcttatcaaagcccaaatggaggatgctaaacctcttccaactataatagtgagtggtttaaaattgtctgctcatggtcatgaaccatttgacgatcctcaactttataggtcgattgtgggggccttacaatacctattaatcactcggtctgaactctcttttagtgtaaataaggtctgttagttcatgaaaacccccttacaaccacattggtaaactgtcaaacatatccttcgataccttagtggcactatggactatggcttacacattcacaaatctctctcgactgagcttgttgccttttgtgatgctgattgggcctcgaatcccggtgacaggtgctctacctctagttttgctatctttttaggaggcaacttaatcacctggcaatgcaagaagcaacaaaccataagtcgatcgattactgaagctgagtatcgaagcttagcaaatgtcactacaagaattttgattattagcagcagaagaattagcagcggagcaaatctgccgctactaataggactaataccggcggacttcttctattaaatgttatttattttttttttgtataaaaatgtattagcgg

SEQ ID NO: 399819 - DNA, 750 bp, Cannabis indica
atttaatttcaagaaatatggatttaaaacgatgaatgtgtaatttggatgtgattcatgttgatctatgtgtttatttgatgattgattgatgtttataattttttatgataaataattggatttatgatttgaaattattttatttagagagtatgaaaaaaataagcaatttacttttttgcataactaaagctcattaaagaggggtcgagaattctgggttgcacaagtgctagaagagtaaaaactcaccaagaacattctctgtattaaacactatcataaatacacagacttgtggactaaggttcattaacgccccaaccacgtaaaaaatctcctcttaatttcttgcagctctctaaattattattttattagttgccgaaaacctcggtcaacattttggtgctttcattgagagctgaagaaagcgtctgtaagtaaacactgcgttacaacaacacaacaatggtggagactcgaagcacacgtcaacctcgccctcttcaagatgctcaagatccaaatgacgaggacgtggcctcaagagcaaccgtgggttccgaagaagaagaaggaatccctgatgacgactacgagggaaacctcaatgagtacgcctacgacgaaggcagctactcagaattggtactcttaaggcaaaaggctgtcgatcatgaagctgaaatcgcagcccaaaaagcgcaaaaccaaaagatgcaagaggtgatgctggccatgcaa

SEQ ID NO: 399820 - DNA, 759 bp, Cannabis indica
acttcaagctctcaaaatatcagtcacctcagattgaaattgagaggaagaacatggactgcataacctatgccagttgtgttggctgcctgatgtatgccatggtgtgcacaagaccagatttggcctatgccatgagcataatcagtaggtttattgctgatcctggcagcaagcattgggatgaagtcaaatgggtaatgagatatgtgaaagggtccatgtaacgccgcaacccgcagggctgccacgtgtgtgcttttacaaacttatctcttactaatatattagtttagataaagtgtggtttaattaaaatttgataatttaaattatacatataaattttctttttaaaataccgctaaagtatggggatcccctgtttataaaatttctttatagcaaattgcaaaactgatattacacaaaaataaagttacattttcacacataaagaaaagaagtcgatcctgcttcccagaagtcaagacaccacggctgatatgtacattactgggagacctctgactcatgggcaaacacagcttccaactcccttacctggaccacgaagcacctgtgagtcataatgacttagcaagaaaagctactagataataatcttggaaagtgctagcattctcattacaacattatatacgtattagtaggtcattacatgttcagcatgcataggtaatttaacgtttatacaacacacttattacataatcaagaatatttataactattcat

SEQ ID NO: 399821 - DNA, 841 bp, Cannabis indica
gtttaggttcaggttcaggttttagacccaatcccggggtgggtatgtccgagtcctattcctgggtcccgatccgcttctagttttggttccagttttaactaatggggtacggcttcgggtcgagttctggttcgagtctaagtttgggtcttgatttgggtccgtggcgaggttcaggtctgagtttttgtctccattagggtctgaggctgggtctggtttcgagtttgggttcgggtttaggtcccggtaccattccaagatcccggtctggttctagttcaagtttcggttttggttcccgtgtgtgggcctgggtctttgtatgtgttcggggtcctagtttgagttcaagtttgggtttgggttctggtctaagtcctagatccagacaccgactacgggtcgggtccaagcatcgagtcccgaatcccaggtcccgaggtgggtcctaagtccacgtttgggtctggggtcgagtcccggatcctgatccacgatatgacacccaagttcttgtgctagttcgtgggcccgattcccagctctgggtcccccatctatatttggatcctaggtcccagtttgggtcaaagttcgtgtttcggtttaggttcgggtccggtctgagtcctggtcccgatttgggtttgggtccgagtttgggtccaagtcccagtctgggtccgagtttcgggtcccaggtccgagtctggttcttgggtccttggttcggccccggtttttgggtttggtttttgcttcgggtctgggttgtaatatcccagaaaataaataatatttaaatggacatattttattaaatatgtaattactt

SEQ ID NO: 399822 - DNA, 581 bp, Cannabis indica
ggggcatgatagaagcgttgccatgtcagctttgtgttggcatcttgccacacatgctaccttggtcatgagtgactagttaatcatcggtgttgggatttccttatcatagtgggaatctatggacaatgcgagtatcttggctagagagcttcgatgcatggatgcattcatggatgcttgtgagtatgactcaacaggagttgttcgagagatggaagtgtgcatgaggtacacagtcgtgcaaaaaatgagcctattattactcagatggttggaaggttgaccttggcttagtgaagtcaaagtgacgcatgagtgttctgttgcctgaaaaggtgagcctgtgacactaagcacaacaaaaggtgctatattattgttggtgcaaagaaatatcatgtcccacataatttgatttaataaataatataagaaattgctgactagtatatacataaacacataaaaagtgttggaacttattttaccaggatctagatttactaacatgtatgttgattaacacctaaatgtgaattctcttatacgataaaattaaacacataacagtttagaaa

SEQ ID NO: 399823 - DNA, 680 bp, Cannabis indica
agatttgacaaacaagtgagaattgagctctactattatagaaaccaaaaccttatatcaacttcactaaaattatttaaattatatgttattacgtcatatatgtccactaaagacttgactattgaagttttaagtttattatttaaattatatgttattacgtcatatatgtccactagatacttggctatctaatttttaagtttattatttgaattgaaaagtttttttatttttaaattttaaaataattttttttttgcatttttacagaattctacataaaaactcttattgcaactaatagagcaacttaaattacaataaaatatctaaaaactacttttaaaacccaaatcataaatttaaaaaaaaaattaaaaaataatatataaaataattcacgtacaaataattatataaatatatagttagttattttacatgatagaattataaatgagtgatatgaattagtccacgcgtatataataatggataataattttgtagctactttcttctatttttgtaatgatgtgtctccctgtaaatttttctttgcaatagtggtactactagggacccaaaaacttttaaatacatcttattttaataattttaaatttatataaaatttatattttttaattatattaaatttttttaactttttt

SEQ ID NO: 399824 - DNA, 626 bp, Cannabis indica
acatagcaacccacatagaaattgttggaacaactcaaaccataaaaatgaaaaaaaaaaaaagttgaaaaatagtatatggggtgatttcccaataatataacaagattttcttatagatatttatttcttataaccgattgagggaatctctcaaccacttgagggaatatctcaaccaccaaaaatatttataactactttttaaatttaaatttatataaatatttattttttaaaattatttaattaattaaatatctaaaaataaatccagtgtaaacaaccctacattataggcgcctatcactttgttaagacacagtgatagtggcctcatttatgtcttaatgagacattggtggtgtcttttgtccagacaacttttatcttttttccaatttattaattaataaatttgaaaattaaattattcattataaaataaataaatactattttgacaaatcaatatatatatatatttccaaactttaatatacaacttttattcctacccttatttcaatgtggcaatccagagactatggacctataattgaagctccaataaactatattatttattaaatctcatcaatgaaataatcttgtttattaatttc

SEQ ID NO: 399825 - DNA, 540 bp, Cannabis indica
atttttttactacattatccttatcattttcttttcccctgtcaaattcaaactttcaaacataagcataaagttattaagacatttttcctttggtaaattagagcttcactcaatcaaccaaagaatttacaaaacctgggaatttttaagcaaaattagggagcaattacagttaataaaagagagctgcctaaaccaactcctcttaagctcactttggactgcagaaacaacaaaattctattgtatacatcatgttttactctatgcacatttacatgaataggagaaacaacatattatcccaataaactttttttcaatttttccaaacagagtagattgttgcattcctccaaaaagttattgaaatattatttagatagagactttttactatagaggggtgtttatataatttatctatttaattaataacagggtttgagcagaaataaaattgtatagaacaggtgatcaaagtgagtaaacttaattctattatataatttatttatttattaacgcacatcggcc

SEQ ID NO: 399826 - DNA, 963 bp, Cannabis indica
aaaaaaaaaaaaaaaatgttattaaaatagagattctgttcaatactatatacatgttttacatacatagagtaaagatcagatcatgtatatttaatttgagtatgtttgcaaaagcacaagttcaaaggccaaattaagcttctgcagacaatacttgtacggaatattaattaagttacagaagattttgtacttttgtccataactataagctgtatgttttattacaatttcaaacggtgttacagtagtaaataaatgtttaattgatttaattttgaggttgtaacctcttaataacccatgaaatagtattattggaatgtttcccaataataaaatggtcatttggtcaacttaatttggtcatcaataagataaaacacaacttattattattacgtatgtgggtacgtaaaaattattgacatgatatatgttttgacttataattttttattttaacctttaatttacttttccgtgcgtataaatgtagatgaagttttacgtgtcaaccaatacaaaccaatattatatattatacataccgatcgatttcaaagtaataagataaaaactattaattgttcgaaattaaaaaaaaagttggaagtgttagggattataaaacactcaagaaatatataaatcacagatctaaacatattccttaagtactttaatatagaaaaccctaaattataaatttataaagcctttgctaaattaaagaagaagatgatgataaaatatgagcggaagcactaacttgaatccattgttggagattgcagagaaggttttgatctttcaagaatacactattttcttaagtattttctctgatggggaaggagataatacagaaaccctagtgttttttggggaccactacctatttatagagtcatcttagaataactcttgagtatttataatttggcccctcaacaaatt

SEQ ID NO: 399827 - DNA, 1080 bp, Cannabis indica
aattcggtagttttttttttttttttggattatttcataaacattcaaaaacaataaaaattttaaattttaaatatttttacaatttttataattatatttatagaaaatctaatcttttgatgtattttaatattgtattcttattaaatttttattgttgtttgtatattataaaaaatactctaaaaatattaaaaaaaatctttgaacataaaattataaaaaacttacaaaagataatattttattgaattattctttttcttattaggagttgaaattgttaattatgtctaaccaataatcttattcgaaaattccatgtgttatgacccttctctactaaaatatgggagtagagaaagattaggagtaaattaatgaacaaggaaaacaaattgtaatggcggaagaccaaatacacaatatggatgatgaaagatagaagtggcgtttggtgacacttttgttttgaaattttttaatcacaaaaataaaatataaaaaattttgttttaaaattttgtttttgaaaaacaaaaatgttctataaccacttttgttttttaattttaaaaacaaaaaacagaagcactacaagaattgtaacttttacgagcacagtcgctactgcgttggtaaaagaaagtaacttttaccagcacattttacaaattgcgctggtaaaaaggtcaaaatattaccagcgtacatttggagtgcttaaaatctaacttttaccagtgcatttacgcgctgggaaaagtaatttttgccagcacttttcattttgtgctggcaaaagttctaataccaacgttgatttgccaacacatcagaagtaaattttatattaccagcgcaatactaaacttttgtcagcataaaaatgtgctggcaaaagtgacatttcttgtagtgaagtgtgttcagtaaatttcatttttttgatttttatttaattcgagttttgaggttcgggattggaggtcaggtccaaggtctgggggccaggtgtaggtcggtttccaagggtctaagttggggtcagagtctaaaatagttgattaaaaaaaa

SEQ ID NO: 399828 - DNA, 749 bp, Cannabis indica
ctaaatcgctaaaatggatgattattgaatttctgagactcaaatataaacgtgatataatcacaattcctatgcctaagggattcataacaccacgtacccaaatcacgttatctggagagaatttgcagcatgttgcattgtgtgacttcatcggcaaccagggaatgctgtttggaatgatgtatactcttccttaatctaattaaccttatatatcaaattctagtgaaattattataaaacactaatacttaacaatttaatgcaggcacatttgggagagcataaaagatttgagaatttttttcaagttttacgatccaaagcttctcgcagtgaatggtatcaacaatgaagagaagagtcagtcttttgacaatatggcaagacgattggctgcttggttatcattgatgaataacaaccaccaaatgttcgttattccctgaaatatcgggtaaatactatttacttttttggtgctaattgtttatttctatattataactcggaattatttttatactatcttacctataacccaatataattttttagtgcgcattggatgctagaggtcattgcgccaaggaaagttatccatttagaccctatacgtgaccaccaagttcctgaacaaattactgaaatgttaaaaaagtaataatttaatgactatttatgtaacaaattatttaattaactaatgaattaaaatgttaatataatttttcaaatagagcata

SEQ ID NO: 399829 - DNA, 564 bp, Cannabis indica
gcttccgcctagctacaagaaatcaaagacacatgtcgcctgagtattttgccacgtcattgtggaaaaattggataacaaatattttattaagaatatacaaaaattattattttttattcttttattattaatataatggtaatatagtaaataaagaatgtaaagttttgtaaaagtcaatgaattacaataattagtgatattatagtaaataaaaagtaacatttattgtaggctaaattgacacaataatatattttgtggcaaatttagtacaattttttatatgtttcaaatttaacatacttttagaacatattaaaataatatttttataagtatggtaaattataactatacaccacttggactccattactcactggagaggctcttaactatggtgacgtttgataacacttttttaatcagttttctgtttttaaaattaaaaaagtgaaaatatttttcaaaatcatgttctataaaattgttttcacttttaaattttttaattaagaatcaaaaatttaaaaataaattttttaaacagtttttttt

SEQ ID NO: 399830 - DNA, 746 bp, Cannabis indica
taaccaagctcccaataagtatacctttgaaatatactaagtaaattttctaacttattagtttctcttgacaccactatagattcagaactcctcttagttacatagaacactctatatgtccaatatagatatgctatgaattattcattatttcaatcacaataatcaaagatcctctatgtatggttaatattgaatagggacaaaattatcgttttactcttcaatgcattttatccttaatacacgtagctccttgtaaatgatatttcggtaaacaatgagattttcaaaaaccaattcattatatgtgaaagctaaagaaattaatcaaagataaagaaaataacaacaaggatttttacgtggttagggcgttagcgagccttagtccacgagtcaatattattactttaaagctagaaaagcctaaaggtttataataatgtgggaactctatatttttcctgagcaattggagaatgagtttctaacccctttgcatgaagggttctttatgcatatatagtgatacctttgactattatatagtgtagtcatggtactcacccgaacaaaatttggccttcactaccaggacacgctgatagatgaagttgatcccaatgttcaaatagaaacatggaataatggagatcctactgaggcaacttgtaacgccctgtcccatatgtgtgctatttgtgtgattttataaactagtttagtactaatagattaat

SEQ ID NO: 399831 - DNA, 1311 bp, Cannabis indica
taataagtagaaattatataatacatgaaaaaaaattataagaatttaattttttatgacataaataaataatactatggggttatagatttattttttattttcttacatttatatgaattttttatgccatatttttgtaaaaaaaaaaaaaaatcatatatttataaaataataataagttttgccaaaaaaacaccagtatcgaaaaagtcaccagaaaagttgcaggtgccaaaaaaatcacaggaaaaattattgtcgtcgaaaaaattgctgaaaaagtcatcattgctagaaaagttaccaaaagtagatgtctcaaatataaataaaaatggaaccggttctgtaatgaattaaatcaaataacacaagataactcaaaccggttataattgaaaaataacgattctgtaacataatgaataaaaacaaataacacaaaataactcaaaccagttataattaaaatagaatcgtatctataacagtgttataatgaaataaaaataaataacaacgaaataattacaaaccagttaataaaaaacatagaatcgattatataattaatgaatgagtgtttttaggatagatatggtacgtgtataattatttggtggataagaacatgttgaatgagtatttttgtttgagttattttatttaactggtttttgtgtgtgagtttttatcttagttgctttacgaaactagtttttttgtctcaaattttaactagttgataaatgtaactgatttctttatattatatttgagttattgtgtgttattatttgtatttatttattttattatggaaccggttcttttcatatttatgcatcaatatattttggaattgatccctacttttttttataaataaattgtaaccgattttatgaggtattatgtgttatgaggtattatgtagtggaactagttttatttttaatttatgtttcagtattttagagactgatttcctctttattttttaattgtacgtaatcggtttgagttattgtgtgttactaatacttagttaatgctcatttgagttattccttattgttgatgatgttaatattttgttttaatactaggattgcaaataaaattactcaattcatagggagactcgagcactaaatacgtgactcatctaaaataaagctcactttactaaaaaataaacactaatattcttagacattctagaattagacaaatatataatgaaatgacttccaaatataaaaaatatcattgagttgcaattcataaaataataagtacacctta

SEQ ID NO: 399832 - DNA, 1037 bp, Cannabis indica
caaatttctttattcaaggtatactctagaatgattgtgttaaaaattaaacgataactcatatctacccctgaatgtacatccatatatctaaatatagatgatctttcttccaagtggatattagcatgttttctctttacagagaatagtcttctcaaaatcgctatgaacaagatgtaaatgtcatagatgtattattgtggttgttgtcttttgatgatccataggtttagttacaataaagagttcttagaatagttcaagtggattccggtcacagaatacaaaactcataattcatacattaatatatagttcaaatccattgttataaacaacttgtgaaagtttgactgtagtgtttaatgtattatggaaactgaacttcaattattatttggattctaaaatttaaagtcaaagacataaatttataccaaatattttttgagtaattattcttccttagaccatcactactaatataactcgaagtttaagttgccacatataagcatatttaagtaggagatttttctaagatcaagtatttatatcattacgggataaaatatctagaatatagatattagcaaaattagtaaaatatataaatatccaaagcaatataaaaaaaaataaaaacaaattctttttagaatgaaattccatttagcatggatacaaacctacagtagatactctatccaagaatacacttgagaccaaataaattatattctaattgagatgttataactgaatagagtcatactaaaaaaatatatcaatgtagcaacaataacaataaataattcttaatattatattataatagaattattttgagtaaatataatatgtatacatgtattacaatttagaataaaattattaattctacataaataaatttataaaatatgtgtatatattctattgtgatgtaattattcttatataaatgtatactttgttaatatgagatttagagaatgtataactaattacaatttagaggttattcttattta

SEQ ID NO: 399833 - DNA, 916 bp, Cannabis indica
cataaagaaattgaaagggagaatgtgagggtatgatgacacggatattatgggtatgctatcaataattagctttttttatatatattttttttcataaatacttaaaataatttaaataatacaaaaatatgaatatatagttttttttttaaatatttttattgattttaactttttcattacaaatatatggatggttgtttttcgttaggtatttttaaaatgttatttttaggttattattatatgaaaataatgtaaaagtaatgttattttttgaagaaaaaaaaaccaataaaaaaataaagagtaacattttaggttttaggttttctttttcgaatcattttttagttttcttttaaaagaagtttgacactataggggatgccatattttcttattaggggtatatagactaagtatataatcaactcaaatagggttttgataaaatgatggtgttacttttttgagttaattttctatataactgtatttttataattttatttttgttgtttttgtatatttgtaaaatatatttttttaagggataaattgaagaatacttcttttttgtatccattaattaaaaataccctcatattatatttcattaaaatctacccacttttatgagtggttgcccaatataccctcacacttcacttaagtttacaacataatttacattaacctaagggtataatagggacatcatctataaaagtgagtatatcttaaagaatatagaaataaaggtaaaaattaaaacaaataaaataaaatgagtatacaatgtaatttcttcttttttaatatgagaataaaaaaaaatcaattgaaagtagtagtgagaaaattacactctacacccttttaatattgtcctcttttatttttaccttct

SEQ ID NO: 399834 - DNA, 618 bp, Cannabis indica
tctgatgttcaacctttatctgcgagtaggttaaacacatagatacataatcaaccccatctttcttttggaacttattctaccaggatctatatttactagcatgtgtgtttaattaacaccctaaatatgaactctctaatatgatgaaatgaaacacatgagagtttagagaaccttacatttatggcaacagaataaaatgactctttctgctcaaatctctaacccttgttcctttctgtcgcatagtaataacaagatctgagcctgaatctccttctgtcctttgggttggttaaccaccgtctttactatgattcagtacttgacttgctatgtgtgggcatggtactctttcactaaaggcttgaagattgatgaagaataacaaaagtggtgaaatcactatgaaaaaaatatattttattaaactctaaggaggcgtttggttgggaggaataaaaatataggaataggaatgggaatgggaatgggaataggaatggaatggaataaaatttaaaatggataaaaaaattgataaaaaataattaaattttttcttgttacattggaatggtcattccttccttttaaaatggaatagccattcca

SEQ ID NO: 399835 - DNA, 1436 bp, Cannabis indica
tttaaaaaaaaaggaaaaataaatgtgaatgaaatgaaaaaaagaagtatagaagaaaatttcagtgatgtcgggtgaatgaaaagaaaaaaaaattcaatcatggttaattgtgggaacacttcgggaaattgtaacttatgggaagcttggggttataaaggtgcttatgatatctttcgccaagaacccttttcagttaccaaatacttaagcccgaaaattttaccctggaagacctattgattatgaaaaggatgttttcaacattagtggaggaaggtaagcaagcaaacatattggctatcgatatttttccaattagaggcacaacctaattcctatataaaggactcgactcagatgatgaaaagatcataaatcggccccgaaatgtcaatgaaggaggagaggaagctatcttgatgatccggagcgaaatcaccatctagtttctttcttcaactctttaaatttctttaagtctatttttgttttagatttaaccatggaagttaattttattttcatgaactaaattcctaattggggaagatgatgaatgttgtttaaagttttgcctaattaatgtcaattgccattcctttaatcttgatttgtgaaattatctatatttgtgtttaattccatgtgtaagcttgatcaccttctacatgttctatgatcttaattcgaaatctgaaaagtgagaattgagaatgctaaaattcgataatctaggtcttatgtgaaatgaaagtatttccgtgatctctgtgacacttagattattgcttaagactgattacatgtgattctaattaagagattaattagagagcatgtgatttagaacctaaaaaatctgaaaagagttaggctaaattttataatctatcattcacatcaggaaaaaggatatcaattaggcattaacaattgggtaaacaaatcaacaggattctcttccctatcttgtcatcttgattattctttatctgtctacttaagtttcttgaattattgttctgtttttaatcataaaaactattggtttgccaaatagaatcataaagttagtctagtggtattcaatctaattccctgtggttcgacctcacctgtgtgagtttactacttgattacttacacttgcgtactgttcataattttcataatacttatagggttgtctagtgagaaatattaatgaattcaacgaaagagtgcaagtgtttgtttgtaaagaggaagcaagaaatgagataaagttgctcaagactggcttgggaaacaaacccaacactagtactgccacaacaagtaccgtgtcgacgaagactgataattcaggcagttcaaatactaaaagaaaagatgactcaagagagtaatttaaaaataagaaaaaacaaaaaatcacgagaaatatgtgc

SEQ ID NO: 399836 - DNA, 541 bp, Cannabis indica
aaggctaccttttgctcatgtgctaggtaatattttcctgagtttcattaagctcggtataaatagtatacaccggcacatatttgtcatgcttcttctgtttttttctatcctttgacggttccttaagtccatcctttttgtttttggaccagaaacccccaagttataaattctcgtgggaacagttcctgtttacgcattttcaacaagttcagttcctttcagacttcttccttcaggacgaacacttgagctctctcattgaactcagtgatgtttcttactggacgtccttgtagatcatcccacaactcgcccccgcggttaatggatctgtggagattcccacctgaagggctgtaagttgcgtgttgtaatccaagtttctaaccctagcggcagccgtgctaaaaaagcttaagtacgccttaagtgtttcatcaagctgctgctttatattggttagcgaggccgctttatattggttgcctatccctagggcttggaattgcttcttgaaatccctagatagctgctc

SEQ ID NO: 399837 - DNA, 463 bp, Cannabis indica
gtcgtcagtggtggactgacactaatggcgtgcaagaccaccactgacgacaatataatcaatgtatgtcaccattaaaaaacaacctcaaatctcgattcaattaataaccccaatcccttttctgataccccattaatttattttttccatttcaaaccaaccccccacccgatttcaccatttcaaaccaaatcccccactcaatttcaccatttcattttttattcactctctcacgtccctcatcatcttcatttttttttcttgatttttttccttcatcttcaatttgaggccgaatccatcgctagaccagcaatgtctctccattgtcagaccaccacgctgctgccacctccaccgccgcctgaaacttcaccggaccacctcactatcgctatcttagggtaatgttatatattatcctcattttattctctttattatttatatatatttt

SEQ ID NO: 399838 - DNA, 992 bp, Cannabis indica
accaaaaattgtgccatcacaactatgctcttcggagcttatccaacagcgaggggtaggcaaattttccctaaaggtgcaatactctgcccggagacaccatatacgagctggagacaggggatcagatctttgagttagagccctattttttcatacggtgtttcgaacaggatatttgctaaggctccattatctatcatagtctgggccactgttttgttagctatctatacttccacgactaatggatcattgtgtgggaagcgaacattgacatcatcttcttcagtgaaagttatagtgggttcccctatccgtggcatttttggcttcctttcctctacagccagaaccacttctttttgttcgtgttgtaaatttcgggcgtacctatcacaagctttgctcgaatatccaactatatgtgggcccccgatgatgacttgtaaatgcccgtccactggtggaggcaataacaggtctttgttattgtctgcttgggcggccctttgattttggtctgccgtgacatacttttgcacatgcaggttattttttcttatcaagaattcaatttcccgcttcagattgttgcattcattagtgtcatggccataatctccatgaaaacggaaaaatttggacatgttcagtttacttatgtcctttttcatgggaggaggtttcttgtacgggactaccgactgagtagccatgtaaatggtctccaggtcgtcagtcaagatagagaaagcagtgaacttggaaggattctatataggggtctgttcggctttgcctgcgaacttttcctttttcccattgccttgtctgccattgttattagatcttttaccgtctgaatttgaactactagggtaccgagggttttgggcagacgttcaagctgaaggagcatgtggttgtcccggtctaggctcgacatctgcccgttgaatagcttcttcaagcttgatgaaaccatctgc

SEQ ID NO: 399839 - DNA, 919 bp, Cannabis indica
gcttggcttcaagtataggcttcaagttctgatattgaccttgggcttgggcttctaatattgggttatcactaaaattgaaataatcacataatacatttatttttttggaataattaataagattaattttttttttaatatttacatttttacgttaaaagaatattttttttacatttcgaacgattttccaaaaaataatacaaaaacaatatagaatcaacaagaaaactacataaaagtaacattaaaataacaacaaaaaataacatacatataacaaaaaattaacaagattacaacataaaaagaccgtatttttgtaaataaaatcaaaaaaatcgtaaaaatgtttaaaattccgtgaaaccgtatttttgttaatttttttgttgtttttgtgaaataatcccttattttatttttttacaatatttttacatttaaagatttttttatatatatttttacgagtttttataaacgtaacaaaaaaattatataaaagtaatatgaaaataacatcaaaacaataacaaaaaataacatacagataacaaaaaattaacaataaattaagataaatacaaacaacataaaatgctggtattttctgtaaataaaatcaaaaaagttgtaaaaatgtttaaaattctgtaaaaccgtatttttataatttttttattatttttgtgtatttgattatcccaatcatatacctatgttagtaaatgtccacattttaaaatttgtagcaaaatgatcattttttagattatttattatttatattgtcttttgccacataaaaaattaataatttttttatatttttttagaattagaagcaaattacttaaagattatggtatatttatattagttttgttaaaatctttttttatttaaaagttat

SEQ ID NO: 399840 - DNA, 755 bp, Cannabis indica
agttttcttccaaggactatcaagctcatcgtatttttgaagtgtcaatctcaccgaccgagttgtttttctaccagtgccaacttcacttcagccagtagttttccaaaggactatcaacgtcttcagattattgaagtactaatctcactctcggattgttgtagtgacagtttcactataactgggttgtttacaataccggtgccaacctcacctcaatcacaatatgaaaatgtgcttgaaattacaagcaaattcactctagaagtatgatgatacaatagaaacctagagtgacaagcaagcacacttgaaataaataaacacaaattttggctcaagtgtgtgtggttggtgtgtttatgaaaggatgataattccttagcttagaacacttaaaatgatgttataggatgaatagaagctcaagtaaccttaatttttgagtgaaaaatgagtttatatagtgtaggaataaaaactagccgttagcacgtttttaaaaagaatcctgggaaaaataaattaccttttttaaaatggactacctattttgtaaaaaatggactacctattgaaaaaaggtaggtcaaaaatcaggcaggttcaaaacatatattttttgaatctaaaacacgtataactctttactcgattatccgttttcaacaattctaattttattctcttagttaaataaaatgtgatttagaaagtcaatcaaaaaaattttgaaccatcgggtgagaaaa

SEQ ID NO: 399841 - DNA, 644 bp, Cannabis indica
catgttcaacattcaagttttgcctgagttacataaactgaaccttatttacttgacttcaacagatttggtaagaagagagtttagccataacatcaaaaagataatatgggttacatatttatctagtcagagttgattggttagtttcaaaatatatgaaccttaattaggttagtcttgagctttgttttgttcaagtgattggtataatgcctaatggtatcgttggtggaaatcaattgttttgttttcatgtatacaatactttaaataaattacatttgcatatgcttgattaactaaagcaacacaagctcaagctgtttgttagaacaacctgaaataggtttttcatttgcatatccttagtttgttgtatgtgtgcatattttttttattttcttttatgtgatatgatgaagaattattcggtggattgtatgaataatagtaagtttctttttctcaattactgtcattgtaggataatggctcgcttaactgtaagtgaaagataaattttgagaaagaagaagatcgtgactctttatatgcattggatgaatgtgttgcatgtagtgcaatggttttttaaattatgggaaaaaattattgaacatagtattgaatcaagctctttg

SEQ ID NO: 399842 - DNA, 1296 bp, Cannabis indica
agggcccaatgaaggcttgaagtagggacgtttcaaaggtaacgtataacagaacgttagggagagtattggtatcactaaggtaaagaagattacctgaattattcatggtgatatggtaatgatggacaatgcttttatattttaccggatggtcaacctggtatacgaggtgactattgaaattataagaaaatattgtctcattaagtaatgatgaaagggtatgctcacctacaatgggaaaagcatataaagtgggatgcaatttaatgggcatgtattcaagtggtttgtgaatgttggatcacaaaataggtttcttattaaacaacgaactatataattaaatgtatgaagatagtgatgattgcaaggaagtaatggtaccgtataaactagggagtgaaactttagtgataatgatggaaaaagaacacgagagtctcagatgttgatgaatcagcataatcaatgggagactcactataagttggtatggcagttcgtaccaaggggttgtcaataaaacaaagaatatcgaggtatgtatatttctggatgtgttcgaaaatatttttaagatttctaccaaacacagatgcgaaacttcaagatcaaggaatgatctctgattaattattatcagttgagaattcaggtaatggtatttacagtttagttatgggtgcccggtatgagcaatgtcgcctctaccgtataggttacatcaattcactttataccagtgattaattgtaagtaattgggaaatttaaaagttgtgtcagttcaaggaaaattgatgcaagttaaaattagtggagatgaacaacattcaagttcatagtaaggtggaaattcctcatagttaagtgaacaaaaccgatgaggaatcataagagtgtaatgaagggagtgatgggaattgaattttttttaacaaaagaatggaagcaagaaatacaattaggaacgacaaagaagcatctactttctgataacccaccatgattaaggacaaagtacattaggaagattcatattaggatgcagaatcgatagtcgttctagagattatcaagaggaagggatgtgttaacaagtaaagatttacaaggtatcaagatgagtatatgttagtgagtagaaatgagaaatattctaattgaatatctatcataaatgaatattaacttgttaataagttaagttagtagttttaggaggtccataggtggaatagaaagacataattataaattatgtactgtaacaccctaactaccttaggcg

SEQ ID NO: 399843 - DNA, 609 bp, Cannabis indica
taagtcgggtccaaagtcggatccgatattgggacaaagggtggatccaagtccgggttcggagtcgggttcggtttccaaggtctaaattagagtcgaagactaaaatattaattaaaaaaacgatttaaaaaaaatattaaaagtaaatttttttaaaaataaattcttaattaaaaaattaaaaagtaaaatcaattttatagaacataattttaaaaatatatcttttacttttttaattttaaaaataaaaagcttgattaaaaaaatattaacagactttgcatatatacaaaaaaaaaatttcccaattactctgtcttttgttttacagtaccgtctcacaaaatcaaatttctcaaaatatatatgtgtatatagctattaaactccgcagagaatatcggaatatccaatgatcaaacaaagcccaattcccatcatcataaacccctggttacccaccactggcataggcactggtggtaacattggctcaacaggggcagccggtgccggttgccttaatcgacgcaactcttcctcttgacgaagtatgatacctcgcatttcatggaacatctgctgccagtcagcaggaggatt

SEQ ID NO: 399844 - DNA, 568 bp, Cannabis indica
tagtgtgtcaccctggcgagctcatgtattaatgtttgttaagaagaaagatggatctttatgtatgtgtattgactattgggaattaaacaaaatgactgtgaagaacaagtatcctttagttataaccgatttgagttatttcgtgttatttgtttttattcattataacactgttatagaaccgattttattttaattataacttgtttgcgttattttgtgttatttatttttattcattatgttatagaatcggttatatttcaattataaccgatttgagttatttgtttttattcattatgttatagaactagttctatttttagttatatctaagacatctacttctgatgacttttccaataattttttcagcgacggtgacttttccgacgatatttctgacgacagtgacttttctggggacaataactttttcgacgacttttccgacgccggtgacttctccagcgaaacttattattgttttacagatatgaaattttcattttttcttacaaaaatatagcataaaacagcctatataaatgtaaaaaataaa

SEQ ID NO: 399845 - DNA, 613 bp, Cannabis indica
ttgttttatttggattcttatattaacatgttatttatttgattgtattgttttttttagctgttgctagtgtatatgctaaccttaattcggtaccagtccttaatggtaataactttaaggactggaaggtaaacatttttattattcttggctgcaaggatcttgaccttaccttaaggatggatcgacttgcttctcttacgaaaatcagtacctctaagcaaaggaggatttatgagaagtgggaccgctcaaaccacacgagtcttatgatgatcaagcgcgacatacttgaggcttttcggggtgtagtgtccgaagaggttaccgatgccataatttttcttggtaaaattgagaaacgctttgcaaaaagcaagaaggtggaaacaagtactcttttaaagaaacttatttccatgagctagggcaatgaaaacataaaggagtacattatggaaatgttttgccttgtttcaaagttaaagatactaaagcttgagctttcagatgacttgcttgtgcatttagtgcatacatctctttctccataattcagccaattgaaggtcagttacaactgtcaaagggagaagtggactcttaatga

SEQ ID NO: 399846 - DNA, 716 bp, Cannabis indica
tgggctaagtgtactcctaaaagaatccaaaatccgacccctagctgagaatgccgcctcagaagcaacagtggtaaccggtatagctagcacaccacgtgccatgagggacaatatcctttatttgcacccactactagcccaccatcctaaaacatcaaattgttccgttggttgcttagcttcctcttcaaaatacttatcaagttcattttccatcttgctgccatttttctccattcttcgtgtcatgaactcatcatggacattacgagacttcttgcctttaggtcggctgaaaacgataaatgaggaagaaccaccatcatcaataggttgagcttgagcatgtcattgagtgattgaaggatcaatacttgatgttgaatcattatattgattaaacatactctgaatcgtttgttccacccctttcaccatctctttgcattctaactctgtatgagtaaagctaaaacaatgatagagataatcaactttgtatctagggtcaagaaccaaggcaattagaagttcctcattacaatcatcaagcttttcccaatacttgtcatacttgaatttcatgttatgcgccatgttcctcaacaattcatcctcatcttcatcaactgaagaatcggccaactcttgctgaatattgcatatctcaatgaagtatttatttgcagttacataagtagacccactaaact

SEQ ID NO: 399847 - DNA, 568 bp, Cannabis indica
tggtgcttattatgtaaataagactataataaagtcattaaggttagcttagtggtgagggagggatggaaaaaaggcagaggtcgtgggtttgaacttaagacttttaagctattaaacaattaattgattgtaaataccattacgctacactaaaaaaaataacactataatggaatggtcagttgcattaacgatatttgaggcacataataacactctaatgactatgaattgatctattaattaaagatcaccactactagcagtagcattattacccaaaaacatgctcattttactccttagggtattaggcatataatgaaaaatagggtgagcaacagtcggtttagtcggtttttatacgaaaaaaaaatttaaaattcaattttcagttttcatagttataatccgaaaatcgaccgactattatataaatataaaaaaaaaaaaaattgactgttttaatccatgatttagtcggtttaaatcaacagaatcaagcttcatttttttaaaaaaaaaataagtctttaaatttcctataattatttaaaaactaaaa

SEQ ID NO: 399848 - DNA, 750 bp, Cannabis indica
ccttcaatcaaattcttcttttatgaccaaaataactccctacaaaattaacaaggaagacggtttgcctctacttaggaatctactttttaataaagcaatgttaattcttaaatcgggaataaatacttaaactagacaccgagagcaagaagtaccaaagagttgacatctgaagtagcactcaaacaccggggcactaggaatttggtcttaaattattcaatgcccaggggatggtgtgagtgctcaaaaattaggtggaggaattcgttgttgatgatgttttccatactccaacatgtgggaggatgttaaggatacttaaatacgaccccaaactgagtttagaagactcgactgaactggaggattagaagatcaaagctattggttcaaagagctggctttcaaaaaaaaaatgcttatttcttaatacagaacttgtggtttatcctacaagtgtggtagtattcaagagctgtcggcgcacaaagaccgaagagagactgaaagcttccttggcctaatatgtagtagcctacacattgacgaacctcaaggatagtatgaaacaaaggatatggacagaatttgtaaccaggaaagtatctatgttagtgttgctactcgaaggcaaggagaaaacgtactgcaatggaaacttaaggtcgagagaatgatgcaagcaccacctacaccacactagatgcatcccgagttagttgtaaaatagtacaatgattaggt

SEQ ID NO: 399849 - DNA, 652 bp, Cannabis indica
tagtcacaaaaattacaatttttggtgagtaaatgtatttttagtaacaatatttgttgtgactaaaattaaatagttataatttgtatctaaatactatgttttagtcacaaataatttttattgtgagcaaaagtcacatttagtaaaaaaaaaataaataatattatattgtgacttaaaatgttatcactaaacttaaaagtaaagtaattttttttttgtagtgagtataaaactttaattttcttaaaaaagaaataaatatgaaataaagagaataattccattgtcgaagaggttttctttgatgcttatttataatggctcactgcacaactactttaaacctaaaaggagattaacacaagaaaattcgatgtctcctcttcactttgtattaggtattaatagtataaaaagcctttgtaactgatgtaagtgtcagtcataagaaccaacttatgttctaccaatgcaaattgagaaatatttgtgttgtcagttgttaaccaataggagtgtaaatacatggggtccaatctgatctgactataatccaatttgattcaaattatgtaatgatattattcttcttttccaattctttttttttcttacgacactacacaatcaaatcttaattttgata

SEQ ID NO: 399850 - DNA, 1348 bp, Cannabis indica
atcgacatctggattcagtttacaccaacctgaatgaacgttttttcagcaagcttgaagctaaaaacctctcttttccctctaaactggcttagccaagaaggttggtaaaaaatgagtttgtggacaaatgcttgattgtatttatagcaaaaatagtgataaggggtaataatttaagaaaattggtgagagaaaatcggttttcgaagtattaattccctcagagcatttattagctgaaaactgaagagacgcctaatcagcctcacatcgagtcacgaactgacgcatttgacatgtgtcacccatccaaatgcaaaaacaggtcagatgaagtctacacgcaacttcaaacgtcccgtacagacttgggggcaaatgttatcctaatttttgcactctgacgtgccatcacacgatggcaacatgtggaattgacactgggtacccactcgcaagacacaaggcgaacaaggcacctcacacatccgcttggacaaagacctttagactgagcagtgagcaatccgcgcaccatgccaacacttagcaaattcagctttcacatcgtgagtcatcaaagaaatccctataactttgggatcagattacagagatatggcaagctttccaaatcccaggattagtgtattatatatttactatgcaatctttctgcttatatcaattgtaactaaaagggaatacttcctctcaaagcttatagccctataaatagtgattcgtactcattgggcaaaagggtcgagagattttgtctaagaattcataattagagatgttagtgtaagagctctaagaaaaggaacctttttccttgttcttaagtttatacaaataacgaggattagggtattaccgaacttctcggggctgaacctctataaaattcttgtgtctttattcgctttattacatttcattcgtattcaactacttgtcgcttacaaaattagactcactgtcgttggctaaaagcgagatcaatagaccccaaaacctcttttcttcacaattaagcccctgcttagtgaaaattattaaataagacatagtctaattttagaattataattgataaactaaaatcaattaactgagtctgagagcaatattatctcaactagtgaggggaccatgggcatatctaaccgagctttcaatacgtagatctagaattcaccaagtaaattctcaacttataaattcctcattgaaccactatagaacttggaattgaatacactcttagttatatagaatgctctatacgtagcacgatatagatacgttatatttatccattgttacaatcctaatagtc

SEQ ID NO: 399851 - DNA, 671 bp, Cannabis indica
tctaaacaaaagaataaaagaaaaatagtaaaaaaaaaaaaagtttttttatttttaaattattttcattatatttaaaattaaaattaattgaaaccattaaaaattatgtcatgtgtattcttgtgtaaacgtagacagtctactatgctacttaagtgaagatttttgacaaaaatataaaaagcaaaagtttagtaggttttgcctttaaaaaatcaacttttgtgtttaaatgttacaaaaatataaagttcgtgtgattttgccgtcaatatatttacttttaatttatataaaatatcatacacttttttattatttttaaaaaattatagaaagttatttttcattttttctattttattgtttaaaacaaaaataataatataatttttaaaaaaaaaatatgtgaatccgtaaaaaaaatgataataaaaatatatttttaaaatatatacaatgagttcaaattttaattttaatttaaaaaagtatattatatagtgataactctatgttatagagttaatttttatgcttttaaactaaagtattatgaggagagtagtgaaaatgtgtttattttgcttaattttaattagttttagtgttattttctatttaataatctaacctttaagttttgtaaatattgatattgttgggtg

SEQ ID NO: 399852 - DNA, 763 bp, Cannabis indica
ttttatgagataagaaaagtaaattatgtgatctacacatttttgtgtttttcttgtcatagcaagagcaaagtgatcaaaatggatctaaattgtgaaatgagctcataaaattggaaggacaattttagactcaaagaaagtagatcattgtggattcaaataatgagatataagattataaaattagagaagtaattttgaatctttaaaagtaaagtggtgaaacaaaattgatgagaaataattttgttaacattggactaatctcagtgaggagataaccataaaattgaagaagcaattttatgctatctattaacaaattttaagtataattttgttaataaaggacaaataatggataaaaataattctattaatttgtaagtggtattttgagagattatcatgtgatatctaaaggttcatgataattttgagtgcacattattttgaaagataatgtgtagagaacaaaataaaataaagaggttttattttaaagtgatatggtattttcactttatggtcaaatgtgggggtgagatttgagtttaatcaaatttgttgagaaattattgattatatatatgtggttttgaatttaatattctaaattaatattttgctatgtgcatatgtgaaattttgacatatttagtgtcaaaatttggtggtaataattacaagaatatttttatttaaggaaatatatttctatttaaagaaataaatttctatttaaggaaataaataaata

SEQ ID NO: 399853 - DNA, 659 bp, Cannabis indica
tatggtcttgaacagaagtactgtgcctatgccaaatacgccaacaaataacaatagattcctccaattcgtgtttactcaaaattattaagatttataaaacactgaaaaagtatattaagatttataaaaggagaactcccttagctcatttttcacattcagaaaactactacaaggttagagcttttctctataaattggagcttctgacacttgcctatttttgtaatatcgtctcatgagaaataaaactcgaagtagacgtagctccattactgtcgcggtacagggagtgaactaatataaatttgctgtgtctcttataattacttaacatctatttcattctcgccaatctagcaagcgggtgtagcttagaagtctagtccatatttttaagtcaacataaactctctcttagaggtttataataggggaaaaattaaggtttcttgttcctaaatctatagctatcgacattatcttttttctctggataggcccgctgccttccttgggcttgaggtgtggcttggttggggttgtattttgttattgcaatttgatttttgctactgcaattagtcttgtttctgtgacatagtcttgagtgttttagtattgcctatgtgacatagttttgaacatttttgcct

SEQ ID NO: 399854 - DNA, 532 bp, Cannabis indica
gagaaaaagtaactaagaaaaaaaaaatcatgctaaatattattttgtgttcaaagagtatcatataaaggaagttcactaattttaatcttggggataaaaaaaaacactttgttattatttgaaaaaaaaaaaccatatatttaaaagattaaaattaattgtaatccatgataagctcttgaactccactatggtatttttttttaattttattttgctctagagatcacaattgataacatctactatagatataagagaaatcaaatatatatatatatatatatataaatttatattatgaagatgatttcattactaataaattttgtataatcacctcagtaattcttggtctttttgtatagccacaaatatatttgcagattgtcctttccaccttggtattcaagttctgtgaataagttgcttccttgtactgactctgctgaatgtaacatttcttattctatgagaaattgttgctctgtgaagtgaaatttttgtaagatataaataagaacttttt

SEQ ID NO: 399855 - DNA, 540 bp, Cannabis indica
ttaaggatgacaactcaattagtaccaatccagcatgcatgcaacagatatcacgatagaaatgtgtatacttgagtaagccctaggttgcctttcgatacgcatatatatatgtgtgtatatgggactgttgatctcgctttagccaacgacagtgagtaaaattaataattaagaataaataatagaagtaaataaataaaataagaaaatatcaaagttttatagaggttcgaccctttttggttggtaataggctacttccattttgttgtattaacttgtgagatgatgaagaagaatgacttattctctctcgatagctcttacactgatcactaagggagcgtttggaaagccacaatgtaattggatttgtgtgtaattggaggtaattacacaatttggcatgtttgtctgaccatgtaattacactgtaactgtgtaattggaagtaattgaggggttccaattacactctccaattctcatgccccccatgagaattgaatgtaattacactgtgtaattactaaaaac

SEQ ID NO: 399856 - DNA, 912 bp, Cannabis indica
tcgatgatatgttggtatagtcggtaaagtgtgaaaatcatacaaaagacctcgcgaagtgctttgaaatactcaaaaagtacaacatgaaactcaacctaaagaagtgttcctttggagactcctcggggaagtttctaggattcatagttaacgcaaggggcattgaagaaaatcttgaaaaaattaaggctttgatagaggtgccaacgcctacaaagacaaaggaagttcaagccttgccaggaagaatggcagcactaaatagattcatcgcaaaattaactgataaatgcttaccattcttcaatgtgttacgaggcaacaaaaagtttgaatggacggatgagtgcaaggaagcctttaggagcataaagaaacatttatcaacacctccagttttggccaaaccaataactggagagactttatacctctacttggttgtctcggaatatgcaatcagtgcaacattagtgcgagaagagggaaagcaccagcaacctgtttactatgttagtaaaaggttactaggggcagaatcaagatattcccctcttgaaaaactttccctatgcctaatccttgcatcttataaactaaggccttacttcaaagcacatactataaatgtgttgaccgatcaaccattaaggcaagttttgtcaaaaccagacgattctggaaggttgataaaatggtctattgaactagggtagttcgatttaacttatcatccaagaacatccatcaagggcaggctttggcagatttcctaatagaaggaatagttccagataaaaatcaacttatccagcgagacgcagaaacttggaaattatacgtggatggagcccctaatgaaaatggtgttgggttttatgccctagataaaactcatttcaatataat

SEQ ID NO: 399857 - DNA, 1080 bp, Cannabis indica
ctctctctctctctctcgctcgagctctcaagaaccatctgagcttagggttttcttcaacacaatttaaagcatttctagcataatttttgtgattccaatcccagctaagcttctaagctcttctcttttaatttcttaagtttcaggttaagttcttgcatgttttcttaggttaggattatgtggtgttgtatagtgtttgaacttgtattctgaagctaagttgatgttatatgagttgattttgagttattttatggcttggggatgtttttggacaaagtttgagctttagagctcaaactttggtctctaatggtgctttgagtttctgtggttgattcttgtttttactacctggagtatgtttgttgtgatctaattaggaggtttggcaggtttggtggcatttggaattgatttgaggtgttggtggtgttttgggtgtttcctgcactaaaccggttgaccggttcagtgggacctgtaggaatcggaatttgggttggtccctaggaaaccccacaggactggacttccgattggggaacctgtctacgggttgggaaagtttagggaaccctaatttttcccattttttctatatttagggtattgctatgttgtctatcgatatgaaaacttctagtttcaattttaagtcctcgaaaagtgaattagcgtgtcactcaccagttttacgaatattgtgatttaggggcatgtaaatcgtcgaggagcaattccactcaggttgaccgacacacctgaattagaaaatgaggtaagattagtataatgatatgcacatgtatatacatatttagcgtacatatttattaagcctattacattacattgatagtggtatcagtatacgtagagttgtactggataccgatagatgtatgtttggctcaagtacaagatcaactctatcacatcggtagactagagtatgactagagtaccgagtataggctgatcttatgatcaatagtattgccgtataaacattctagactcagtaccgtgttggacatggggatagggttatagttgggtgtatgggcacct

SEQ ID NO: 399858 - DNA, 1063 bp, Cannabis indica
agaccaggaactaaacctggactcacatggggatcgaaacttgggactcaaaccttgacctagacccagacccaggacccgaacccacacacggagcctgatccaaacctagactgaaatccagacccgaacccaaactaagataaggactcgaaccccgaccgaaactcaaaccctaactcaaattcagaatcgcaattagaactggaactggactaggactaggacaaggataaggaaataaacccgaaccccaacccagataaaaatccagaccgagacctaaacctgaaccgagactaggactcaaccccgaacatagaccgggacccaaaccaagataagaattggaacttgtaccaagaatcaggatagggacttgggcaacaaaactaggatcgggacctagtacccaaactcagaccccgacttgaacctaagacccagctcgtgacccaacacccgaaatggaaccaaagcaggagcccagattgggatccgaatttagacccggggcttggaccggacccgtagtcagtgtttggatctgggactcagccccggccccaaacccagacctggacctgaaccaagacccagacctcaactcagtcaaaacccaaaccgtgacccgaacccataccctatgaccgaaaattggaaccaaaattggaagtagaccgggacccaggatcgggaccagacaaggacatggacttggaaccgtaatcatacatggacgtagacccagaaccgtaaccagaccaggacctagactccatctcagacctagacctaaacctggacccgaacctagatcccaaccaagacttggactcgaacccaaactcagacccaaacatggaaccgaaattaggataaggaactggggccgggacctaaaatcgcaccccagtcttgatcccgaatctagacttggacctgggacccaagacttgaacaagaacaagaccgggaccggtgatagggatccaaatcttaaatcaagatctgggaaacggggcttgcaacaaacccgtagtccggtgtttggatctaggac

SEQ ID NO: 399859 - DNA, 658 bp, Cannabis indica
ttttaaataatattattaattatgtaccaatataaacgtcccacgtgtacaagaatgtacacataagccgtccatgttagcagataactatgaaaaatagatgacaccttaaatttgctaacagttaagtaatttagagggttttatcaccaaaatttgaacttggagggttaaatgaaagtagaatgatagttgagagagtttaaccgcaaaaaactctatcactattggtgaaattcaatatcatgttttacttattttaatttaacaaaaattatagaataccgctaactaattataagacgtcatgtcataaaaattttaggcaccttaatgcctcgttgcaatgcttttcataacatataatatatagagaaatattatatctaatatcactattggtacaattttttattgaattctacttattttatttattatagagaattctaccgtcattacataagattatgtagtctagtataaaaaaaagctcggtaccagtaacatttttagcgaaagtccacttaatcatattatgggccgcaaaattataatgtcttgaataaacgaaaaattataagagagatatttatatgtttgcgatttttatttattttttaataaattcttaattaatttgttttgttgaaagttt

SEQ ID NO: 399860 - DNA, 750 bp, Cannabis indica
gttttcaatcccacttacccttggtatactggtcttacataatgaagactgccacttacttacacaacaaaacaccctctgcattattcaaaagcctcactacatataagatccttcacaataaaactccaacctatgaacacttgaggatttttggatgcctagattatggatctacaagtctcgaaaagacataagttttccccctgcagtcgtgcttccatcttcattggctacccaccaggcatggatgcctatactttattggacactgaaaccaatcagatctacacctctcgagatgtttttttctacgaataacgtatcctttttttgacacatctccaatagacatagacctgtgtcttcttcaagtcatacttacatgcaatacaccaataaaacacacctcatcaccacaacaggctgctgctactacttttccttcgaatagaactggtatgccataaccaaaccatctcatttaaaatattatctatgccatacatcttccacgactcaccccattgagccttttctctcatacattgaacttagcccttaattcagagtaattgttctagcagcatactctaaaattgaaccctaaacctatgatgaagcatcacaattttaaacttggttacaggccatggataccgagacacaagcctctagattgttaccaagttacccctacggaaaagtgtcattgggtgcaaatgagtttataaagtcaaatacaaataa

SEQ ID NO: 399861 - DNA, 593 bp, Cannabis indica
ccaccatcagaaatgagataagggcgtacgtcctcgagaaccaagtcaacgttttgagctgtgagttcaaatttctgggcagagtaaagtcctggcgaagaaggaccagttgacgcgcttggattcgaagctccaatggccgttttgaagatggtctttctgtcagaggttagacagcgttgttggacagatatgaattgtgggtattgttgagatttaagtaggatcatcggaaaataagacgacggggatttgaggattccagttgtagtagctgagagagaagccatggttatagcttggagtttctcttccacgagtctgaaattgataaagattaagtaaaagttatagccttttgtcatttcaataagtttatgggttacaatagaaggagtatattttgggcaccactaatgttctctataattaattataattagcgatattttttaaaaattatttctttttagctaattaaaggcttcgttaatatttttaagggcttttttcataaatgtacaacaaaaataaaataattacaaaaaatgtgcaaaaaaaaattattttaaaaatttatacattttaaaaac

SEQ ID NO: 399862 - DNA, 519 bp, Cannabis indica
gagacactgctaccatatacgtgacgtaaataaagactagaatttaaaatatagacaaaaaataaataatatgtatatatttaacaaaatattaatattaattataattaataatatatagattttattatatataattataataataatattctatacttaaataatagatgtaatactatattaatattatatataaataataatataataaattaaatatatatatattagtttacgttaaacaacgttgtcaataataataataataatatataactttatatataatagtttgtttcactactaaacgaagtataatatgtataatataataactagtagaagaattataccaatttggattaaagtagtttttttcttgtagttttctggcaatggtgccaaaaagtttttggtaccaaaagtggtacattttacattcatcaactcgcaagttcacaactctttattgtagtgtagagattgtgaagaacgagatcgaacccatagaaattg

SEQ ID NO: 399863 - DNA, 630 bp, Cannabis indica
aaatgggcctttacaaaaaaaaataaatagtgtgtaaaataaaagtgacccaaacaccagaaaagagaaatctaagcgtattacgcaaaagctcaaggcgaaacattcccaaaaacttcgaacatcaaacccagaaacacagatgaacagtaaagcatgccatgaacacaaacagtaaagtgagggatgcgaaaaacttacataaagtgttagaactgggagttgctgttgatcaacgaaggaatgtagactgatagtaacgaacgaaggataatgagaaatctgtaagtgtttgaaggttttctggtctgagggtttctttctctctggaaaactcaaagaaatttggtgaaaggatgaaagtaaccaaatcaaggaaaggtggtggcttttataggccaaggtgcatgtggaacaggcgcaattacctaccaatcgaacggctggggaggcgcacgattcgaattcccaagatccaacagctagattgatttgtaattaaggcagtggaaatgtttgagtatccttctgacacccattaatgcgccgtatcaattaatgggcatgaaatgaatcatttgttgggtttcatgccctaaataaaactctgtttcaatgtaatccagatta

SEQ ID NO: 399864 - DNA, 705 bp, Cannabis indica
taagtttgtgttcaaaaatttaacatataccaatagtgtatttactaaactgtaactggaattaaaataaataataggagaaatgaattagtttaaaatagaaaataatcgaaaataatatattattattttgtttactttaaaaaaaaaaatcaaaatcatattattttgtttacataactataaaaggtaatcgaaatgctttaatttgataaaattgttacaacatgtaattattttctatttatagattttttaagagtatatttatttttttttattatttttaattaataaaattaaaattaactaaataaagatattccttataaaattgtatgagaataaattcaaatttcctttaagaaaatataaaataatgtgaatattaaaagacaagaggaggacgccgtctgtgggaatcgaacccacgaccacatggttaaaagccatgcgctctaccggctgagctaagacggcttgcttgttcattaatttctgtaattatttatataacttgattattatctcttggaaaccaaagaaatttataaaaaatatcttataattaaaggataattgcatttttctaaatgaattaaatactatgggtgcatttggtaatactttttttaataaaaattttggttttgaaattaaaaaaataaaaatatttttcaaaatcatgttctataaaactggttt

SEQ ID NO: 399865 - DNA, 471 bp, Cannabis indica
ttatgatatttaaattgatttcaactaatcacataagtaaaagtctcaccgtctatttttatacaaagaaagactctcaaatacaaataattgattattgaaaaagaaaacatttaattatgggtaattattcaatgaaatatttgttaattttgttagtgattcttctccaatattgtcaacaaattaatggagcttgactattttggatatgggtgcaacaatacaatgctaaatgtggggttctttatatgaggacaagtagttttagagtggtgggtttcaacaaaatagcagaagccctccaatcagcctcacgcaattcccaaaacatgacaacaatttttgaaaataatctcaaaaaagacatcattccttactgtggagacttcttattcttaatcgacaaacatagtagatttaccatctacagctgtaacaccctaactagcataggcgtattacgtgatt

SEQ ID NO: 399866 - DNA, 575 bp, Cannabis indica
agagagagagaggtcggatagggtagaggaaatcaagaaaaatcagctctctaatttctcagaaatttattttgttaagtggtcaaatgaccaaaatgcccttaggaacaataaaactacatacatacacacaagggcaaaattgtccaatcccacacacaatattttttatgattattcatttatgaaatcaatgccaaaataaaatcccaaaaatatatttctagccccaaacctcactcggcccaaaataccagattgtgactatatcgcgccggcttgtcaaaaatacctgcatatagacagaataaatatactatataatatatagttcataagcatgatatatcatataaattacgattttacccctctcaggccaaaattacaaaaatacccctagtacaccaacgagatcttaaaatgcaatttatttgtaaagactgcttaactttaatttggaaattagcagataattaggggttaattatgaaaattatttattaattctaaattattaatttatagtgatttatttgaattcagaatgcattttatatgtcatatatagaaat

SEQ ID NO: 399867 - DNA, 743 bp, Cannabis indica
aatatatcacagcttctgtacacgttgagcccaggaaatttagatgcaagatttaaaatctgatacagttggcaatcaaagcagaattaaaggcacaagcataatatcatatacagaaaaaaaaagtattatgcagaaatcaatacataaaactccaagaaaatggccttacctgatcatataaaggtttacgaacatatgttgattcagtttcaaggtattcatatacaggttctcctggtgagttataagcattagtttctttacttgatggactcaaaggagatggatctttcaaactaagtccattcaacatctgcgtattcaagttcgtgaggttgtgccgaccctgtcctccattaacaacaccagttgctcgcctttctgcttcacggttgccacttccagcatcactgtgagcatcacgcatcacggttgcaatgtcatcacggttgccatggttggttgagttgagaagctattgtgccccaaaacggtgagaccaaacactacaacaaaatatactattagcggcagacttatcagcggcggaccacctctgccgctagtaacaggggtaatagcggcgggaagtggggtccgccgctattgttggccaatttttttttttttaaaaaacgtattagcggcgggcagtccaccgcaattgctccgccgctaatactagtagcggtgggcccaccgctattgctccgccgctaatagtattagcggcggacccc

SEQ ID NO: 399868 - DNA, 566 bp, Cannabis indica
atttcttcgatcttggttatctagatcaccatcttggttgtctagatgaacaactgggaatagaaaattccttaggagtaaaatcaaaattatgataatcattttcttcatgtattgctacattgtaaataggatcattagaaaaatgatccgagtgataaccgtcactcgtggactcatccaccgcctctggatttggaccaggcttctcagaatgttgtttcctcttacttttttttacccttaaagagacttcttagcattttattcactgctccccttcgttcttttagagtttccttttttccttttttttgttgttggtttttgtacattgttaaaattgaaatgagaatcatgtggtaatgaaaacctcatactttgcgttatacgtacatgatcaaagtttttcctatatctacttgatatatatacaaggtcggccctaggcataggcgggctaggctcgtgcctagggcccacacctttcgggggcccaaaataaaacataaaaaaaaattattaagcttttatttaagtaaaattaagtgtattgtaaacaacaa

SEQ ID NO: 399869 - DNA, 1163 bp, Cannabis indica
tctcttgaagcgagaagtgtcgacattttttcctatataaggggtcgcccatggcctgggaaagggatctgcaattttgagcacttagagaaaaaaaaaacacacttttttattttttgcattcaagagcttgtttttgacttttgcaactctgattaataaaacacaagcggagtaggctattaccgacatctggggccgaagctctttaaattttaatgtctttctttatatttattgcaaattccaatgtcattaattacatttattgttacgattttggtttaaatctcatttattacgattcctcgtcggttgactaataattcagacaacagtgtgcattatagaatcaccctaaaatatattttaaatattatggcaaataaattaaaataaaaaattatatgaaattttatttgaaaaaaaaaattaaaaaattatagatggtttttaaaaattgtgaaaataaaataaaactaactattgatattaaacaaaaataatgtgaaaaaaaattcaaaaaaaatattaaaagtattttttaaaaattaatttaagttaattattttataatattgaggtgcacttataactttataaggtgcaaataaaatttccttatttattttcttaacttcttaaagtttgaaatgttattatgacatgcatccatttttttaagtacagaaaagtaatttgattaatatacattaattaaataattttctaggatttacatgcaaatgaaaacactgagatatatataagtgctagataataatatgataactattcttatgattgttttgctcatactgaaaaagaatgtagaccaagaacaatgaacataaatctatttcagaattattctaaacaaaaaaagttcaatcatttaaaattcatgaaataaaatttctttgtatcattcttggggaaatccttctgctgattcccaatgaaaaaattattaacaaggcagttggcataacaaaaatgcaacactaagttttttcagctattgctatttatcattgtgtacactaattattagaaggcctttaagagagtataaaaattaaaataaataaaattttagaccttatattatacaaaaattattaattaaaatgtctattttgttaaatgacaaaatgaacctt

SEQ ID NO: 399870 - DNA, 501 bp, Cannabis indica
aatactcttaatttaaacagtgcccctctttacgacgccaatttttaagatcgcagtacaaaacaatcaatgggtacagtatataaatgggaaatttacaccctctactgttttttcccaatttattacttttatactgttgcacggcaaattcaacatttatactgttttttttttttttttggcagtttactgcctttaaaactttagccgcttgatgtgagtggtgtttgttttcattgccacttgtcacgatagggttttgccacgtttttttttttttttataaaaaaaaagtaattgttttgattttgacggttatgtgttatgatcaaaaagtgttgtatttatgtatttttcttttattttttttatattattttcgaatctaaattttgtaattggtattctctctcatttcaactgttcatcttcttccccatttttcagtttgcttagacggttgtaatagtgggtagttttttcattttaaaaaatttc

SEQ ID NO: 399871 - DNA, 924 bp, Cannabis indica
attaatgagtaataactcatagacgtaatgaagtaaaaccatgtatataaagtcactttttagcttgatatatatttgatcaacttgtttttctaacttaactttattattttgcaactaagttaaccttccataagtcagttcttatatgcaaacttatgtcatatattaaattcatcagtcaatcgatgaaaactttttttgttttgtatttttcttaacattgaagaaggcgaatttggatttgtgactttattaataaagaaatcgagatataatatatccattgattaaatggttcaatttgccaaaatactaattttgtgtaaccaaaaacccacaattataaacatatattacctagctactcaatagagaaatgttaaaaagtacaccataaatgtttagcaccttagatcatctccaatgaaagatataaatattgtgctaaatttggcacaaaaaataaacaaactttatatttagcacaatatatatttgctatgttgctccaatgtacaataatattttaaaaggtatattggtttaaaaagcaaagtatcattaataacaaacaataaattaaatatttaagtgccgtttgataatacttttattttctaattttttaatcacaatatgaaaataaaatttttgtttttgaaaaataaaaatgctttttgtaactacttttgttttttaattttaaaaacagaaaacaaaagtgtgttctgcaaagtttatttttatttttattttttaattttatttaagtctggtgtaagttcggggttgaattcgggttcgggtcagaggacgggttcagcaccagggccttgggaagggatttgggtccgagtctagttagaatccaaatattgattaagaaaaaaaaactgtttaaaaatattgaaagtgattttt

SEQ ID NO: 399872 - DNA, 906 bp, Cannabis indica
aacccgggtcaggcggctggagcattgctgcaaggagcaccaaggggtgtagcaggagtattggctccagttgttccccctatagatgcccagcatattctcggcctgccacctagacccaacgggagagtggctatcatctcgagaggcccccacattagaggaactacccacaaggagctcaaacggtacgcaggggtcgtgaaacacgatgaggtttgggaagttactcaactcccagcttaaagcccccggctaatggatgaacccattacattcacggaagaagaccatagaacagtgtgttttcctcaccatgacccgtcggtcataaagacccccattgccaataagatcgtggctagagtcctaatcgaaaatggaagttccgtgaatctattattcaaagaggccttcactgcaataggcctaactgaccgagacctatcaccaagtggttcccaactcacagggttcaatggaacaacacttatccctatgggaaaagtgatgctcccagtcaccttgtgtgcggacacaccccagagcactttcaagtactgcatgtttgtggtggtggactgcccaacagattataacgcaatcctcggccgaccggccttggtggactttggtgcagtcacgtcaatacggcacttgtgcctgaaattcccaacccaggaggctgggatagggaccgtgaggggaaaccaaggggaggctaggcagtgctataacgttgctgcccacctacccgtgttgatggtccgagaagatattgagccagaaatggcgaaagaagatgagttggatccccgtactccggctaggaaagagcctagaaccggaggaaaaaagaaagaataataaaaacattgagggtgccattgacgttttcgcatggtg

SEQ ID NO: 399873 - DNA, 760 bp, Cannabis indica
cttatttgattaatgtatgtgttttactaaattttcccatgaaaattattttattttatttctaaaaatattttatttggattccaggagaaaaattaagcaattttagtttttacggaactcgattccgataaaaattgaaaaagatatgaatttttaagaatcgggttgaatgggtgtcgagttgctgatcgtatgcgggcgcatggcttcagacaaggtgatccgcgcggatcagacagccttttgtctaaattccccgatcacccccctcgctcagacacgagcgtgtcacgaccaggctgcagctcgcgtacgatgatgctgcatctaccgagaattctcggcgcagcaccctgcatcctttcactcccgcgcgcggaatgggctgcttgcagcctatttcgtgggcagctgggagatttgccccaaaaatctgattttcatgggattttttcccaaagtacggatttttcaattttcaaaccctaatatctaattaaaatattatttttgtcatttaaacctaaatatcaatattctaaattaataatatttattttttaatagattatttttttttttgaggtttaaatttaaaaattgattattttaatttttaaattatggtcagagttaaaaatttgttaatttctacaatatttatatattatttaattataagattagatattttaatattgggcatattttaaattaaaagataactttatctgtttaatttgaaatattatattaa

SEQ ID NO: 399874 - DNA, 1224 bp, Cannabis indica
tggcgctgattcacgatgacgattgaggttgaaaggcccaagaatttttcttcattatgtaatttttttagattaacttgtagttagatttattaacttattaatattttggactaattttacattaatgtttgtgtaatatttaattacttttatgaaatgaaattatgtattttagccaattttaaaattaatttaaataatatttaatttacattttaaaaaataaatatgtaatttaaattaaataaaataatatataaattaataaatatataattaaaataaattatataaaattaaaaaaactgaaaactgctcatttttggcgtcggttcctacgccacctatggcgtcggttattagctaggaaccgacgccataggggtatatatggcgtcggtttttcaaaaccctttagcgttgtcctgatcagcgtcggtagcgaatttcgccaaaaccgacgctgaaagagcttaaaaactacctctaaagggaatttttgtagtagtgttggctaacaactcacctaatcaataattatacaatcaatattatgacttgattgtattgggtgcattaattaaagatgtagggttatgatatttgtttgggtaaaatctctatctccattgcctttaagagtttctgcctcattttacttaaagtttttcagtctttccccaaggagtttagataatatgcttgagcttaggagtaagtttgcaattaaatagttggtagacattttaatataactcgagaattcttgctcttatcttaaaggtatcacttctttttcctacttaaatttgattcttatatgtgatgttgtagtgttaattgtaagtatatatgtacgacttgggtgggatgtgatatgatgaggtttcttgtacatgcatatgaaatactattttattaagatcctacttatgataggttggtgtggaaagaagtgagaagacaggttgcattagcaggcccagtgtgtggttattttgttgcagatttctcttcttacttatgatatcactcatgttcattgtgttgtgcacaatgataaaaagttgcgtttagctattacatcattagcaactgtatttgcttatttattggtaaattaaattattaacttcattcttaatttgtgtgcattatttattttaaggtaaatactattttggaccctgtgttttgcaaaagttacagattggaccctgt

SEQ ID NO: 399875 - DNA, 922 bp, Cannabis indica
aacttttctccatggctgacaatagggaaaatgatgataatcaacttgaagagactactcactgtcctggaaaagagttggtgggcacacagaggcctcccaactcatggacaactcaatctacacgatcgacacgttcaaagaggaaccaacctaaaggtggccgaaacccagaatctgggaatgaagtacccaacaatgacggtggcggcactcctagaagtgggggtttttatgacttcaacaaatacataccattagtagagttaaaaaattgccaactcaagcgactgctggaggaggcaaactgacaaaacactaagttggagtaggaggcagccgcagccagggcggctcaggaaaatgatgctcaaaaccaacctgatcttgaggtaaggaggccagacagacctcgtggaacctgaaccaggaggttggagaaaactcagggggaccctcaaaatgctcataaaaaacaacctggggatactgaggatgcccctgatgatgagcaatcaaatgaccaggctcgtcgtcaagaagagcctcgaagaccccgggtttgcacaacctagggaatggaaattgtgatttgctggaatcttctcgcaggaatgcgagtaggaggaaacctcgaagtagggaacatgaatcccttgtgacaacaagagagatcctaggactcaacctagggcaggtgggttgcccccgagacatcgtcaatgttcttctcgcactgatagggaaagggcacatacaaaccctagtagggggcatgtatcagcccgttctcaaaagagaaggccattacgtgacgaggcatgttccagttctggacgtacaagaactcgtattcgatctacgcaaggaggagatagaactcgtcgcagtattgatcgagaaagtatgggcacaagtagaa

SEQ ID NO: 399876 - DNA, 276 bp, Cannabis indica
aaaatcttattataatattcattctaaaagaatcttattttaatatttaaattttaaaaacaatatcaaaaaaataccggaaaaatacatatatttttttttcataatttatgtaacgttctcgtttcaagctttcattggatacttacacccacggaataataactcttatacacgagtacgtcactctggctacttcatagactgacgaatgaccctacaaaccaacacgagtgtttccaacatgctttgtcctcactcgcacgcttcctggga

SEQ ID NO: 399877 - DNA, 700 bp, Cannabis indica
aaaaaaaaaaactaaataagtatgtattgaaactcttatttgtacctaatatttataaaactataatttccttccaattttatcagtacagattccattttgaatttattaaaagaatatttagaaataattcatactatatatttctgtctataccaaatgatctagaaattgagtctaatatgtctcctgtttaagatagtaacagagtctatactgatgaaattagataaaaattacatttttacaaacattaggtacttatgcagctaaatataaacattgagtttatgcagtttacaaacttaaaactttgtgtacttatgccactatttacgaattagactccgattgggaaaaaacaaataggacttcagttgtttgtaaaggtggaaggtttgattttggggacaatgatgtcgttagtgcagtggacgtcgaaggcaaagaaggagtagagggaaagggcttggagttctgactgggatagggagctctggttgtgtttgggacgttggtggcatgaagaggacgaagaagaaaaaaataaagaaaaaaaaaaagaaagaaaataaattttatgattttaaaataattattttagtttttttttttttttgtcaatttaaattattttaattaaattataattgggaattaccccatatactattttttaattttttttttctaaatttac

SEQ ID NO: 399878 - DNA, 778 bp, Cannabis indica
cgtggattgaaggagtaagactttaagataattcgactaagtcttattaatgaaaaggatcagcaagaaacatgcctcccggagaaggtatgagggattcacatgctcccggagagcaaggctataacaaagcacctccgggaggtatcaaatcctatctgaacagtcacctcgcatttaatgccgcatgggagaaggcgtattggaattgccataagtattaaagtctgatggcgtaaccccccttctgcagctattacactatgattaatgagcctagtgacggctactttatgagaaatcacatcagtcaagagaggataatggattacatccacctaacccctaaaaacctagggattagaccatgcatgtcctatgatacactcgttgggaatgtgtgcctctactgaataatacagaaagacatgtacctcggttctagggatcaccccacaaaaacactataaataccccccaaactcattaaggcaggggtcgagaattctgggtttcataagaaccaaagagaaaaaccaccaagaacattctctgtaataaatactctcataaataacaaagactcgtggactaaggctcattaatgccccaaccacgtaaaaatctcgtgcattaacttcttacagctttcttatatattattattatattggttgccgaaaacctcggtcaacattttggtgctttcattgaaagctgaaggaagcgtctggaagtagacagtaatattacaaaacaacaatggtggagactcgca

SEQ ID NO: 399879 - DNA, 703 bp, Cannabis indica
gcccaggtagccattctagtcaagatcccagcgtgcctcattgaccttggacggagggctcacccaccgggcacccaaagtgccttcccatctatgaggaactgcgacaataaattcctcactggcatagtccacgccctcaaccaggacgtcgccatccgcatcgattggctccccagcctcattatgtcccccaaagtttgggggtgcaacctcctcctcttcctctgcctcgaaaggactgttaggacgaacatcgtcctgttcctcaatctcctggacctcagtgtccccttcataatcctcctcctcctagacggacatatcttgtttggcacttggtaaggtggcatgtcgggccacttgagggtcagatgcgtcaactctacgcattgtcctttttgtacgagccatcatcctatggctggacggaagacttaagctaaaatgtctgtcacttgaagaggttggactagaacgaagacgaggatgatcctcgtgcaatagctgaagcagatcctggtcgatttggtgttcgattccccaaaactcacccgggttcatctacaaaagacaacacacaagatgagtgtttggtcaggatatcgaacattaaaataggcaaatatgccgaccaggagtactcaacggattaaagaataagaatattcgacgaaaagttaaaactcagaagtttgaaatt

SEQ ID NO: 399880 - DNA, 771 bp, Cannabis indica
ctcaatagaggcttgaagcgagaatgttacagtaagattttttgtagtgataatagggatccactctctccatttaccttaatattggccacactcatcttaacccactttctttaactatttaaaaaaattgctatcgtcaatttttgcgtttgaaaatacgtgtgaaatacttttttcataacaacattcgttataattacaatattaaatttataaagttttaagaaaatttgaataatttaccgtgttaaaaatagagttctaaatattttaatttaccaaacaaattcaaaaataccgtcgtaaaaataattaattataataaaataatactctggcatatatatttttagagtggaatttgacatgaaccaaattgtgccctacgaacttttaaggacattaaaaatttgcttttaattattggattcaaaaactttcatcaaatttcgttcaattttactaatgggcgcctaatgtaacaattatccatataaatctcactttctaaactttgacatatatatgtcaaatagtgccctcgaattttcgtccacatcaagagtttattagtataattaaataaaatcagaataaaatttttgaattctaaattcaatagttaattcagagaaataacttcaaagaataaatacctttagtgataatcttttagtcacaacataatttttttgtgacttaatgtgacttttagtcacaacaaaatatcacttgtgactaaaatatagtattaagatacaagttgtc

SEQ ID NO: 399881 - DNA, 1076 bp, Cannabis indica
ttgaaattttttccattaggctttagaagcattggtgtggacttcttagtgttgttgtttaaaaaaataagcacttcatctttctggtcttgttttctcgcttcctcctctatacgaaggtgagtgatcaaactttctaaggaaaattctttagtcttatgcatgagagcacttttgaaatcattccaggaagggggtaacttatcaattagtacaacaactggaaggaggtaacttatcaattagtacaacaacttgaaattgttcatctaaagtcataccttctgagatgatctcatgtgtaattttctgaagctcgtgagattgggctttcacagatttgtcgtccaccatttgatacttgaggtagtgactaacatcatactttttattttcagctttttcagtatcatatttcttttacagagcatcccatatttcgtttgccaatttatctaaattataatagtcatacagatcgttagataaaccgttaagaataaaattcttacagagaaaataattttcgacccaggagtccaaatattttttttgcttctcgcattcagcctctttgtccttgtcggtagaagctttagagacgacatgctttagagcagaaagaacgaaagcaactttcttcatcatcaagtagaacaacatcttttgtttccatcgcttaaagtgtaatccctcaaaacggaaaggcttggtaatatcgttagaagcagaataaaaaaaattcatcggtagcaaccatagtagaactaaatgtattaaaattgttataccaaatttaaaataataaaactggaacaaattaccgatagaaaattttggttgagtcacggacaatgtcgctttctgtaagacattttgcggttctgcccgaagtgtgcacgacagtctagtaaccacggcgtcctcaggataaaacaacctctgtatacgatatgctctgcaccaaactatatcgctcaattacaccctaatttttttgctctgagaaaaatcataaggaagaaagaaaaaaaaattatgttgaaaaagatatgttcttccgttgttctgatacg

SEQ ID NO: 399882 - DNA, 576 bp, Cannabis indica
tatatatatgtaaaaaaaaaatagcaacaaaagagaaaaaaaaaagtgttcttacaactaagtttgagctgtttccctcattttagttcaaaaataaaaaaataaaaataaaaacatagcaagagagttatattacaataccaagtacttatgagtatactagagtgaaggaagtgagttaaaagaaaaaaattatgagagagaggctcgatttttgacaagtgaagtagttaggtgttgagctagctaaaatatatcctttaccataccctaacccaagcctaatattacaagcttagtaaagtcctattgatcaaggggataagtttagactacattagtggaaaggaatgcactaataaaacttatatagctttaataattgtaaaaagttctaaggtagttgtagggaagttcaaagctttggtgggatatacttgtatatattgttgattaggtgactttggggaggtattagtgttatcaagtgagaaaagtttggaggggcagcaaataaagttacggcaaaaacattgttctattttttttttattaataattgttttattttttatt

SEQ ID NO: 399883 - DNA, 788 bp, Cannabis indica
ggggttatatcaccccttctttactcataccagttgtattaattatgattttttaatttttgacaagactacacaacacagtcacacccacaagtactatatatagcccctatacctctccttactccttcacacctcaatttagtattgttttctttgctagagaagtcactccttatttgtagacgtatgtatagggataatatataaaaataatgtatgtattgttgttgcactcaagtgaagatgtgtaaacagaaggattggtatgcactacaaccgtgtgttgtagctgcatcaaggaaatttcagcaatccaataaatcatctcataaaaaaattgagtaataactcatcttaaaaattttatgtctgtactatatgtatattcaggaaatattgacaaaggcttcgaatgggtggattaggctggatggaactacttccaacaccgccaaatgtgccatccaattgagcctcaacctcccgcagtccacaaggccaccgtgggatgagtgttatcatatttgacacaaccaccggtgcgccagacacaggaacaaaatcgagacgcgggaggaaatcgtcagcgtttgtacagtcttatgtcaaattacttcctcatgtaataacagtggtgatattatagtatacgtacaaattcatctcactacaatctatatttacagtgtcaaataaagcatcctaattaaatacctcaaatcaaacatcacgtaacttgcacccttctgtacacaaaaaaactatacatgtatcatttaaaaaaa

SEQ ID NO: 399884 - DNA, 1151 bp, Cannabis indica
atacccctttattcccacataaagaggggatcgaaaaagtgatagcagaagctgtgtgaaaatatctctaagctttcttcttcttcaagagaaaccaagagagcagagttagtgtggaccttgcttttagcaaatgacaatgagtcaattaataagcgataagaaatgtaattaagataaggtgagaaccagtaagcaataaagaacacaggatcttaaagaggtttggcccctttagttcggtgatagcctactctccttagattgtattaacgcgagaacaaagaatacagtgtttcctctctcaaagctctcacaaaaaaatctttgagtattttctcttatatctctttgaagtaattcttttgaccccttttacagtgacgatggatcactatttatagggttaaatgcatgagggaaggttttccttttgcttacaatatctataattggtaagaacatacattacatgtttaaaatacatagattgagggattcagacagcttgccatatccttttgatatgatcccatgattgtagggattgctcgttaactccacaatatcaatcttgaagttgctaagtcttgatacattgcttggagaaatgactttattcgttgtctggatcatctgcccttgccctgctcggtcaggcagactttgtccgtacagatgtatactaagctctatttgaaatatctctttaaccagatttaggaagtaacagccacctgtcaccagtatgtgctgccacgtcatagtgcaaaaaatgggataaaatttttcccccaagtctgcatgggacttctaaagtcgtgcgtagacttcactcagcttatgttcgggtctgaacgggtggcacgtgttcgatgcacctattggtgatttgatgtgattctgaccaagaatcccttcagtattcggctaattaatgctctaattaattcgtacctcgagacactctaacaatttgcatgctttgtacggttacccttttttaggtacttaattacttttgatttcccaatatttacttctagggggaaatcgaggcgtttgaaattcaaaataattgcacccctcactaatctgcttataaatagggcaaaaagtcctaataaaccacttttagcatttttcttgtt

SEQ ID NO: 399885 - DNA, 1403 bp, Cannabis indica
gtatacaactacaaccgtctatggaccctctacctcagggtatgcgcctccaaaaacaagtttcttcagttttggaactacacataccaaatacagtgtcgctcccgagaagatatatacgaaccaaaaattagaagttctagagttaggcctgagtcagtcccagaataagaaaagtggacagactcaaagctggagtgaagcttcagagaaagggagaaaaaaatatgaagcctagtataccgagtatactaatttgatcaacacactcgggagaatgtctacagggctacatgaaacacacattactacaaaattggttttttctgacagtttgaaacagtcgggtaaagtatttccatcgatttcaataaacgtcgcatattcgactgtcgtaaaataggcaataagtgactgtttgaaattaccgccaatctaaacttcttgatagtttaaataagaaaaaatttaaattttgagactattattattattaatgaaatatgcaaaacattattagatatcattctaaaatacatcaattaaagtatgtagctacaattagcctgagaacttgaagctctagtgaaataataagcaacacgatttgtagaccgcttaataaagtataaaaaaaaatatcatgtaaatccaaaacaatacaaaaatcaaaagaaaagtaaaaaaaaaaaacaaaacaagagagagagagagagagaattcaaatagagaggagcctttattttcaattatcacacataatggactaatgaagagttataaggttatgagcctcttatattctatttgtagaattctttctaggattagggtttagattttatgaaattaaaaaaagataaaaaaatggcttaaaatcccttaagtggtcgtcctctcatgtggaccccactaatttcaattttgccattttattttaacaacttctcttttttcacaaatttcatattttaatttcaaacctttaaatgtcaaatctatttatttaataattataattaattatcaaataaaattttcacttagcttatttattaattagaccatacaaagtctcttaattaataaataaaccctaaaacctcttttcttctcaattaagccactgtttagtgaaaatttataaataagatatagtctaatttacaattctaattagtgaattaaaacaaattaactgagtctacaagccaatattatctcaactagtgtggggaccatgagcctatataatcaagcttccaataaatagatctagaattcaccgagtaaattccttaacttattaatgttgggttttgtgccctaaataaaacccactacaatctgattagttatcaatacaagaaatttgaagtgatttatgtttgcatgaattttac

SEQ ID NO: 399886 - DNA, 621 bp, Cannabis indica
gtgaggttcgcaaaccaactgttgccaacggcacctacagaatatgcttccactgaagccaagtccatctggacaagtccctgttgacacttcacacgccaactctatggcgcaccatcctcctgatggcaatcgagcaagacactcacatcgcaggataaaatttggtgcatcccgcctgaacgaggctcgcaagccagcatcacccaatgcagcaccaagtgcacccttacacagattctcttcgcgaagttctcaacattggccctctggccctaccgcacacccacgacttcatgcaaaaaggtcccactgacccactacatacttgctcctctgagctcctgcttgtgtcagctcccaaaactgtgccacaagctcatctcccaaaatcaaccctgcatcctctgatgactcgctaacttttgacaaacttgctgacacccagtcttactcttaagacatgaagtcatcttaatccgctatctcccatcggcatatgctctctgaaccattcggcttacaatgtcccacacaacaccagtgtcgccataaacacaaaacatgcccatacatgccgcaaactagctcagtcttgatctcagtctacgcccttgcata

SEQ ID NO: 399887 - DNA, 727 bp, Cannabis indica
atcttctccttcttctcaaccatcttcttctttctctttttgccattaactacaaaaaaactgctacttttagtaataccgaactcacggtgcgtcacaccaaaacctccaatttaaactttactcaaggaaacatgcatgtatgtgtaaatatacatagttgaaggtgctttattagtttttgttatttttctaggtacatatgactatacaatatatataatattgataatgtatgtaaaatatataggatgagaatcaagaaggacatgacggatcttatgtggagtgttacatgaaggaattaggaggcagtgttgaagatgcacgtgaggaaatgatggaaaagatttcagatgcatggaagtgcctcaataaagaatgcatacttcgaaatccagcgtttccaccaccattcctcaaagcttctctcaatctcgcaagattagttcctttgatgtataattatgatcacaaccaacgcctaccccacttggaagaacatatcaaatctttgttatagtatctacctaaaataacaccatatctttgtatataaaatatggttatttaaaggtttttgttagtttaagggaatatatattttaagaatataagaatatttcgttaaatttaattaagggtggctatcatccaatccgattcaattgaactgaaccgatccaatacaatatctaattacaaaaagttggatattcaattacaa

SEQ ID NO: 399888 - DNA, 860 bp, Cannabis indica
attctagttcttttctttcccttaaaatcttaataaaatattataattttcattataatgcctagttcagagtagttttttttagttacgggttatttcaaaacccgagacattaattcttagttttattattgaatgttaatttctagtttccactatatatcaaattgcttctattcttctatgtttaatatcataattattattttaatcttgtttaggaggccactaaattaggttttactttaatctactgtcatcttaggatactattcacctaatagtctaggattctaagtatctttgacaaattataaattttaattgtgatgaatagaacctaggttaaatgaattatatgctttattaatttgttttctagattagtctatctccataaatctcaaagctttatctaagttaaataaattgcatgcttcgtgaatttactgcttaggtaaaataattaattattgaacgtttcgccttgattacatacaatggggagattgagataattgactgcttcagctttatctgcgagattaataatttgattggaaactaaaattacatttattaatagaaattaggaatgattgttgagggtgacgaataacctttaactagtttctcatatcgtagtctctctttaaactttgttttttttttttattttttattattgttattttattctaattatcaaaacctcttctctaattccagttactaatttgtgaataaatgaataaacatagtcatcgggggatcgacccttacttaaaattatactaaaataattggaggtattagaattaaaaaaatagtaaatttgatatggcatacgacatgcatca

SEQ ID NO: 399889 - DNA, 1139 bp, Cannabis indica
ccattaacatatattgttttttttgttttttcttgtccagttcttcttcttcatcttgtttttattttttttagtttttgaaatttttactcacgtttttttagaaaagtaagagtggtatttttattctgattttttagaactggtctgcaaatatagcatatattgcatctggtgttgaagttgtgtagaagatggttagtttttttaatcatttttttcttttgtttttttatttgttttactgttattttgtcatgatttatttatttgacgtcgatttcactgttcttgctctatctcgccggaattaacagttattttttgggtattcccgtgttgttgtggtggatctgttcgtaggtggaagatagaggctataaatatatttcttcttcttattctatggttatttttgtattttttttttactttaattctcctataaatagatttgacgaactcactgacaaaagggttttgagatgtgtgattcttttatatttttttaagtggttattttatttctgcttcattattttacatttgttttaatatttttttactctgatttttcaagactgagcttgtaaatatagccactattgcatatggtgttaaggttgtgcagaaaatgattagtttttttaatcatttcttttattttttatttgttttagtgttgttttacaattgttttaccatgattatttatttgacgttgatttcactgtttttgctcaatctcgccgaaattaatagttaatttttgaggtgttgattcgtgtatttttagctcctggggcctaaactttgatacttcatattttcatggtacaaaatactttaaatatagtgagttagaaacaacttggcgggatccaaacacccattcccgagttcctaaagttaacctgggcttagggctaagacctctcccaagttgacttactatgatttgggactatttgttaggctaaaattagtctaagtttcgggttatattttcggttagttttcactctttgtttctagttttagggctattttacgcttgattcttttgtttcaggtccttgggtgtttaaagaaagtatgtacaagaattgaggacgcgtggtgaaagaatcgagaagaaa

SEQ ID NO: 399890 - DNA, 707 bp, Cannabis indica
ttttttttatcctttgatagttccttagaaccgccgtttctcttcgagccagaagcccccgagttttcaactctcgttgagacagtacttgtctaaatattgctggtttgcctcccgagcctgatttcaacaaattcatttctttttgggcgtcctctttttgaacgaacacctgagccctttcgttgaactcagtgatgattttcactggacgaccctgtaagtcatcccatggctcgcccccagcggttgatggatcagtagagatccccacctgaaaggctgtaagttgtgtactatcatccaaatttctaacccttgtagcagccgttctaaaatgacttaagtatgccttaattgtctcaccaggctgttgctttggttagcgaggccgcttcgggtcgtctatcccttacaacagggaactgtttcttgaaatccctggacagctattcccaggaagttattgaatggtgagtaaacttgttgaaccagatacttgctgctactactagcgaggtgggaaacaagatacaacgtaaattatttgtcacattactagcttgcattactgtgttgaagttgttcaaatacgagaccagatcgttggttctatcatatgatgagacatgtgggtttttaaatctcgagggaaaaggggtattcatgatatctgggtggtatggctcaagctccttgtctaagtc

SEQ ID NO: 399891 - DNA, 664 bp, Cannabis indica
aaaaaaaattaaagtttaaattagaaagaagaataaaagtaataatgtaaatatatttttttatttaatgtaaaaaagtgatattttttaattaatagtaaaattaagtataaaaactctaatttttctttattattggttattgaattatctaaaatttaaaattaatatttctaaaattgaggtgtaattatagttattttttaggaattatttcacaagcacacaaaaacaataaaaaattataaaaatacaattgttaggaattttaaatatttttacaatttttataattttatgtacaaaaaatgtaattttttgatgtatttttatgctatgaggttgttaatttattattatttgtatgctattttgatgttattttttattttttaaatgtaattttttgttatttttgtatataacaaagtatcgtaaacataatttaataatattacatttcttcataggaaggaaagatcttaaatttgaattgaatcttgcttctcaatttaaaatacaaatgatatataaacttggaaatattatataacgcacgactcttaggactcgtttagaacgccgtattagatcgtattgtattgtattttattatattgaattgtattttatgtaatatttttatataaaattatatgtggta

SEQ ID NO: 399892 - DNA, 735 bp, Cannabis indica
gaaggagacgactccgatctgccgagttgacctcttttcctgggttgatcttgatcgttttgaggtcctgagcactgtggagagcttccccaatcgaaaggacgcttcaagagcaatcggagacaaagttacactttaccggcgacgaaaccgacgagaacgccggcgaccacgttctgaccgtttctgaggtgtttttcttagatatttttgtatattttgattccttattttattctaaggtgcttggtgaagtttcataattttctgaatttatttggaattattgtgaattatttagtatatttcatagattaattatgaaaaatacttaggttgctcagaaaaatctagatttattttatatgatgggctatgatatataaactgttataaaattggtagattgaattttaggcgattatgtatttttcatgaattattgatgttatttcttattttaattatgaaaaatacctaggttgcttagaaaattcaaagaaaattatttatgacttagtacagattataaactgtgttagaagagttagattcggtttttaatcaattttggtatttttcatgaatttacttaattaatgcttaagttaattatgaaaaatggataagtgttgttaaaatagtaaaatgtatttttgtaataccatttactgcctatgatatcaaaaggaataggttttattatttattagttgctgtaggtatttattataa

SEQ ID NO: 399893 - DNA, 697 bp, Cannabis indica
tttgtttgattaattaaaatcaagttgtaaataagttgatattgggatgtttttaacccaaaaaatgaatattaacattattaatattgaaataacaaaaatattacagaaaagtgtttaaatgttaggttcgttcattaaaagcatgttgtaattaggttgttattgagatattttcagggttaaaatgaatatatctactaaaaaacaaaatgtaattataaaataaagacaataaacatataaaaacacttgctaaaaataacaatttgtctatgattatcaatataatttgattataaaaataactacaactaaacaattagtcctctagctaaaaacaacaaagacataactaaatcaaattcttctttggaccctttggaggagtctcatcatcaatatcaacaaaatctatttttttgatgcgagcatacttgaagaataacacaactagcctatcacggtgtttctcaacatcaaatatggaagggattcaatgaagtattcgacaaacgaagccacaaaacaaccacagtcactggaaaactgttggattttgtgcttaaataaaactcatttcaatataatcaaatttaataattaataaagattagaaattacttttatattgtatggttcacatgatttatttcatgattatgtttaaataaattctattaagtccagaacatat

SEQ ID NO: 399894 - DNA, 605 bp, Cannabis indica
atttaattaaatcattaatgaaaattacttaattaaagtgaaaccaaaaataaatttacaaacttaaatttaatttttaaaataaaaaatttcgaaatatctgaaatttaaaataaaaaaatgcaaatttgaaattaaatggaaaatgattattaaaaaaaataaaatatactctcaacattattctaatttaagtttaactgaaattgaaaattttcaaacttaaatataattttctatttaattaaattcattaaaatagaaataattaagtattttgaataaaatcaacttaattattaattcttgttgccctttattttgtccaaaatacgtggaccaactttactgtgacacgtggattgaaaaagcaagactttgagataattgactaagtctcctttatcaaaaggatcagcatttaacatacctcccggagaaggcatgaaggtttcacatactcccggagagcaaggctataacgaagcatctccaggaggtatcacatcctatctaaacagtcacctcgcatttaatgccgcatgggagaaggcgtattgaaactgccataagtattaaagtatgatggcgtaaccccccttctg

SEQ ID NO: 399895 - DNA, 523 bp, Cannabis indica
agtataaatattttactaaaaatggcaatttatataattttctcttgttaaatttcattattattattattattattattattattgaatttttacctctacttaaaaaaatgatgttgaataactaagtaatttgaaactatactagctagaaataattagaatattgctcatgtagtatatgaaaccatgccaacactttatgtttagttttatagtacccgacaatactttatttaaattccaagtgatattcaattcaacccatttataattgggattttacaaaattaatactcatgtaaagtgggcaatctggcccataatttacataatagatcccatggatcattgggtctattggtcttggattcgaataaatagactttctgttcttcaacaaatttgtttttccatttttcatgaggggatgctatggttcaaatttagaggaaattacactctatactctttttatattgtcttcttttatttttacattctcttttaaaatctatcattt

SEQ ID NO: 399896 - DNA, 944 bp, Cannabis indica
acaacatcccgttatttgacaccataaaatatttagcttgaccagctaaaaactcttctcgaatcttcactaattccggatcagttaattgagcaactttaatttgtcccaacagatcagattgcaatgtcaaattatgaagtttgcctacaacaaactcaatgcctgatctgaccatgtcgtctactaactgaggtgaaatctttatcatactagtttcctgcacgggactcttcctacttagggcatcagccatcacattggccttcccaggatggtaaaggatttcacagtcgtaatccttaaccaagccaactaatgcctctgtctcatattcaaatctttctggataaagaagtatttaaggctcttatggtcagtataaatctcacatttttctccatagagataatgccgccaaatcttcaaagcaaacactacagtggcaagttctaaatcgtgagttaggtatcactgttcatatttctttaactgacggaaggcataagcgatgacccggtcagcctgcatcagtacacaacccagaccctgtctagatgcatcacaataaactacaaacttttctctatccgatggtagggctaatatcgaagatgtaatcaatctctgtttcaactcccgaaagcttgcttcacacataactgtccataaaaactactgattctttttggtgagtttggttaagggtgtttagatcttagaatatccattaacataccgacgataatagcgagccagacctaggaaacttctaacttctgtaactgtctttggtctcggccaatccctgacgaattcaatctttcctagatcaaccttgatcccatttttactaaaaatgtgcccaagaaaagacacctagatagcaagaactcgcacttcttgaattttgcatacagtttatgttctcgtagtcgttgcag

SEQ ID NO: 399897 - DNA, 520 bp, Cannabis indica
aatatacatatatatatatgtaatctaatataaaactaaacattcaaatattatctagtttatcacttcttgtgtaacataattgattaactaatagtaatctaggccaacaaaattaatcaatatatatagatataaaagttgatataaattttgataaaataataaaagtaatataaaataacaaaattttaactttttttttttttgtagaaaataacaaaactcaaacttgttcacattgaaataaataaaatgatataacatataataagaaaaaataattaaaataatgagcaagttatatttttcaattttctaaaaaaatatatatatattttctaatcctttataatacaattaaaaaaaaaaagaaaaggaacaaaaaaaagcaaaagcaaataaaattgttcataatattataatatgacaatactgtaatatgatataataataaacttgtataataaaataaaaactgaagaaaaaataagatgataataataataaatttgtacaa

SEQ ID NO: 399898 - DNA, 469 bp, Cannabis indica
atcaagtttcctcagcgtgtgtagcatcaggtgggcgagggaccagggcatctgcagggtcacgtgggcggcatcgtgtctgaaggcaggtgatcgtgcgcatcagacaaaggtctgtctaagttatccgcgtgcggatcatctagtctgaatccctgcatgccttgtcctcgaccatatgcacccgaaatttcaaaacttcataacttcttcgtttttcatcggaattgagttccgtaaaaatgaaaattgcttaatttttcacaaggaacgcaaataaaatattttcagaacgaaaataaaattattctcattgaaaatttttgtaattcacatacattcatcaagaaacacataaatcaacatgaacacatctaaatcaacactcaaacaatattcatcgttttaaatgcatattacatgtaagtaaatcattaccatggatctaaggccagttgttgggaatatt

SEQ ID NO: 399899 - DNA, 1085 bp, Cannabis indica
aaacagcacacgtgcgcacgctgccatccgtctgaccgagttggttgttgttgtgtaccttatttttaaaaaaaaattatttattaaattgttatttttatttaattaattaaaatagtttttaaatgcgtctaattaattagtaaacatagtcattttcttgtcctcttttttagcatcgctcccacgatctcacgctctattgttcccatgattagaaatatctttctttctattactaccttttgtgcattccctatataatgcatccaaactaatggaagaaacacatatttttctcacagaaaaaattatatacagttagatataattatattacaatatgtactccaagcagtagtgttttgttggatgtggtatttcgacggttctctatcgtgcaatagagctataatacagtagttcgactgggtaattttatcatgggaatgatgaggctgatagtctgcttgcataattttgggcagttttgtgagagtgacctagtctgtgactcaaactagattttaattcggtaatttcattttttttattttttgtagcaactattctaacaacatttaaatgagaagctcttgtaatttgatgagcaacttaattagtggaacatttaataaaatttgacaaaacattaactaaagaattcaaaagatatttggaatcattcacaacatctctaaacgtaaataacatcaccttaggactacgaactgcttggattaataccaggcaatcggtcttaactttactaactattgggaaatctctcttcaacaacaacaacacctcttttagagttatagatttagttgttagtccaagataggtttctaagaggggtgaattggaaatttaaactacttttaaaaatttaaaaatcccaaaggcaatttatgcaaatatttaaatttaatgcaatcacatagataaacactagtataagcaaataataaacttgaaatgtaaagagtttagggatagaaattgcaaactcaatttttacaagtttcggtagaactaagacacctatgtccttggtcttcaaagctatggacctagctttg

SEQ ID NO: 399900 - DNA, 749 bp, Cannabis indica
tgaagatgttccggaaagataaatgagagatctagaactgttatgctttgactttttccaaaatctaatcaaaacatcgtcgaattcaggcttgaatttttagctttattttcttgcacaattttctctattttaaatatcatgatatttttatctttttcccatcgttttctctgatattttctaatcttcttatatttaaatctgccaatataaaagataacaagcataaaaatgctctgaacacgattaaaactaaattaaaaatatattaatcttaatctaaaattaatactaaaattaacctaacagtggcacctgcccctgctatccaggccgaactagtggtggcagtgaatcggatggaacctctatatgaaaggttccgcaaggaagcacctttagtttttctgggaggcccggatgttatgaaagtcgagcaatggctaacagtgattactagagtcctgaattttatgggcgtcaccggtaacgatagggtggtctatgccacctttcaatttcaataagatgcattggtctggtgggacatggtgtccatgattcacgatgttacgagaatgacctgggaaaagttctaggaacttttcaatgctaagtattacaatgaagcagattgaagtgctaagagaaaagaattcactcatttgacttagaaagaaaatatgagtgttactgagtatacaacgcaatttgaccgtttgggaggttggcctcgggaattgtgc

SEQ ID NO: 399901 - DNA, 689 bp, Cannabis indica
aatggagaataaatagccatagctcatgttgttgttgttggattgtagcagtgtggggtggtggtggtgtaatattggttcattttttttttttaattttatttgcttcgatttataaccgaagtaaaaaaaccaattagcaacggtgcactactatttgctttagttatgaaccgaagcaaaaaaaaaaattctttttgaactgaagcaaaaaaactttttgcgtcagttctaaaatgaagctaaaaatatgactatttgcgtctacggttattgcatcggttataccgaccgacacaaattatttgtgtcacattaaaatcgaagcaaaaacccctttttgtagtagtgttaataaaaggggatcgcgaattaaagggaggtgggcagaatggaaccctagaaacacaagaagaaagctcttggaccgagcataggcgattcgtgacaatcctccatctagtttccttctattctcttgatttcttacgtttttatttgtgtttagtttaattatggatttgattataagctaaactgcttatttagggatttgatgaatattgattgatattattctatagattaatgttatagtgagatttctctcacctagaaactcgagacaagactcccatttaaaggacacgtatattcacatttccaatggaagctgaaatgtccataag

SEQ ID NO: 399902 - DNA, 764 bp, Cannabis indica
accacttcacttattcacgataaaattgattgaataaaatataataggactatatatattattgtaaaagttaacaagtaatatactatagggacataatcctatagtgtctaaagcttatgtggtaaaaaccactaatttttctttatatataatgatattgtccctaaaattaaacactaaaatattaaacaaaaaaatagtgacacttatttaagaaaggcatcaaatgaatgtatataaatataaaatatatggaagaagtttcaattgttacatatttaacatttactttttattcgttacatcattattaaatgactgtgattaatttataaattaattaattagttgtaaccgtgatataacctattttattttaggtgagttatcacatgtacttttttttagctttttttttaaaaaaaaaaaatttacggtttaagttgctccggtggtttttatatgaatttctatacgaattttttttacgatttaggttcatccgtttgttgctatagaggtttctgtgtagaattccttaaaaaaacaaaaaaaaaaactattttaaaatgtaaaaataaaaaaaaaaatctttattttatttgctataaataaaaaaaaaaaaatatttacgaacatttttatttgtacttttataaatattaattgtttaaaaaattttattatatcttttaattaagtaatatatttgtattacatagttaattatatttagtttaagtttaaagataaaattacac

SEQ ID NO: 399903 - DNA, 567 bp, Cannabis indica
aacctttcatacaggggttccatgcgatgtagtgccattattggttcggcctggacaacaggggcaggtgccacttgaatttctggagcaggcattgcaggagcaccctgcttacgtaaccgtcaaatctcattatcctgttcctcgattcgggcttgcattgctgcaaacctattttcccaatttcgggcatcctgagtatcttgggcggcttgagaaacctgtggcgggtcaatatcacccaggccacatgccctgcccctgggacctctacctcggccacggacatttgggggattctgagttccctggccaacatttgatccaaccgaattgccctggctcctggtatttcgcttggcgtccatactaatctgaacagcctgcgtaaccaagagctagcatggtcagacaatgatcaaagaaagacttaataatgccgcttatttggaaattaaaaacatgcctctattctactatcaggctactaacacacttcctaacaggcttttcttaaatcatactattaaaataagctactaaagcaataaaagcttactgaaccgt

SEQ ID NO: 399904 - DNA, 861 bp, Cannabis indica
caagtaaatagaattatacattttaattatcataaaaaaattaaacataaatttaatagtttaaaaaaagaataaacgatatgattcattttaattatcataaatatttaaaggggtgttcattagattaatttagtttgaattttatttttttttttcgaaccaaatcaatagtattagttttttaaaattcaaaactgaatttgaccaattaaatactcaaatcaaattaaaccaatccacttaaaaacgaattgacttagtttgaaaccgttatcttacctataatattattttttttacactttagccatgtaagactatttttaatattactatgtagaatactaactaattataaaaggttagaatgctaattgctatttgttgtcgtagatttacattatagcctagtcgtattacataccaagttcgaatcatatcctccccaaagtaaaaaaaaaataaataaatacaatagtatttagtgctattatgattcgtttgttacgttgtattacaccgtattatattatatagtattatattttatgtaaatttatattcggtattaatttttataagcatataaatatataatattttagtataaattaaaacttaacataatattatataaaaatatattatataatttaatttaatataataaaataggataatacaacataatacgaacactacaaaaaaatttacttttagttaaaacaaaacttgtgactaaaagtgaaaaaattgtgactaattataaattatggttcttatatattgtgactaaaaggtccgtggctaaaattattagtcacaaaaattacaaatttgttgtaactaaatgtattt

SEQ ID NO: 399905 - DNA, 1099 bp, Cannabis indica
ctttaatctgataatcctatattacatttgcctaatcagacaagcccgtgccatagcctggcacccatatattgcataattgcaaaacttaatcaggtgagcccgtgccaaaaacctgcacccatatatcacataattgcatcacctaatcaggtgagcccgtgccataacctggcaccaatatatcgcatcgcctaattaggcaagcccgtacctacacccggtacataattacatcacctaattaggtgagcctgtgccacaacctggcaccaatatatcgcatcgtctaatcagacgagcccgtacctacgtccgctactcatatatcactgttgcccgtacctaataaggtacgacgcccgacatatgacaacacctaaacaagtgaacctgtacctacgctcagtactcatatatcactgtcgctcatacctgataaggtacgatgcctggcatatcgcatcatctaatcaggtgagcatgtacctatgctcggtactcatatatcactaccgcccgtacctaataaggtacgatgcccaacatatcgcattcatggtatcatcacattattatttcttaatcaatcaatcttttcattatataacaataataaccatatctcaatattaatcaattcacaacaatactaattgcattacaaaacaacgtactatgcagtacaatatatttttcttacctttaatccaggttcatacatttcagacaactcaagtagagaactatccctgatgatcttagccctatgtcacaacaacggtaaattaataggtgtttatcccaaaacagtacttaatattcacataagacaatctaggattttctaccaaacctcgcagtataaatacactaaaataaaacttatattttggctctaaaatatataccatattgtagatctcgtcgcaagcttcgaaacgatatatagttagtccaaaatgaacacccgaatgaaaagttatgacaaaaatacgatttctgatcttttaggaatttctaaaaacggtgaaactcgaaaattctaaatttcgcactcaccgaaacactactaaaacttatccaaatcactccaaac

SEQ ID NO: 399906 - DNA, 869 bp, Cannabis indica
acagagttaaaaaactaggttttgggttaagattgagttggatgagaataagagaatcatgttccttttatagtatttcaactaggatttaggatttaattatacggattaaaaaagaataaaataatgggcagaaatacacactaatggccgaccacttaatgggcctcactagttataattttgccactttatttcaactatttatccttctttcaataatgctatatttttcaatttcaatcctataaatgtcaaaactatttatttaatcattatcaaataaaattgttacttatattatttattaattagacttaacaaagtctcttaattaataaataaactccaaaacttcttttcttcacaattaagaccttgcttagtgaaaattcataaataagacaaaatctaattttagaattataattgattaattaaaactaattaattaagtctggaagcagtattattacaactagtctagggacaatgggactatataatcaagctcccaataagtagaactagaatttaccaagtaaattctctaactattaattccttcttgcgccactatagattcagaattgcactcctaattatatagaacgctctatatgtaccaagatatagatacgctatgaattatctatcgttctaatccaaatattcaaatatcctctatagatgatctacatcaagtacggataaatttaccgttctacccttcaatatttatgcttaaaatcttaagctataaatgatatttcagtaaactaatataattattgaaatgagatctcaatcatttctctctattaagccaagctcgatgtaaatcaccgttcacttctaaatacttatag

SEQ ID NO: 399907 - DNA, 946 bp, Cannabis indica
aggatttacactaataaaatttgaacttatacatgaggagagtctaggtaattaggtatacgagtctaataaaattaataaaagtttagttttaattttgattatattatttggctcagagagggctgaaagttcaatgagattcacagcagttagatacacatgcaacattgatcaaaaatattacactgaatcttattattcattacctttattttatagatacaaattaaagattgcatgtgcttagatttaaatttttgaaaatgaaagaaatgacattattgggtgtctctatatatctcacacttttgagttgctcaactgcatttaaacaatatatataaatatatatatatatatagggtaattatatggtaggtcctagtatttttaccctatagtatagggaagaaaattcaaccaataagaattgaaagaaaagagaatgtataaagtgtttgtttacatatgtgtaggagattattacaatattttgtattattatcttattcttattttacattatgataaaatactttttttttttttatgtattatgaaatttgtatgtattatgaaatataattactggggttcattgaccacttttcaagtaaaactagcttaactgatattctttttgaaaatgaagcttaattgacgttaataactaatatactatatttattttaatatgtttttattattatatcaaaaataaaaaaataaataaaatttttaatcaaaacaataaataaataatattgggtatgtttaaagcccttaaagggctatttcgatagactcttatctgttttagcatttaagagaattttttaatctaatttttttttcatgattgtgtacgttatagtcatttagaatcacttgtaaatttttaaaaaattctgaatagtttacaatgccgaaaataagatttaaa

SEQ ID NO: 399908 - DNA, 779 bp, Cannabis indica
aatacgagtttcttaatataacttattatcatactaatagcacaaataatttaaacaaattttttttttaaaaaattattttatgggaatgcaacccaagtcccacattggctaggaatgggaagaattatgggtacataaggatggacactactccattagtatgaggtcttttggaaaggtgtccaaaataaaatcgtgagggtttaggcccaaaacggacaatatcatactaatgtgggagtcaaggtgaggtagcggcccgacaaggtgaaagaacgaggcccaacaagtggtatcaaagccaaaggttcaagcgctgggagagtgggctgcatttgcgatgtgaagaaaccctcaatgtgataatctcgcgattgaagatctatatggtgtcttgtatcgaatgtcttgtatcgaaagtctatctgatattgaggtagtcaggtggcgtgtcccgttgatgattacggcagtacaagatggagatcggtgttaggacctgtgtcgaaagtcttcctgacaaaggtgatggtcaggcgacgagttcccttggtgatagtggcggcataaggtggtttcgctagaggggaggccacaagtatgtggtccttgagaatgcagcccaagtctcacattggctaagaatgggaagaattatgagtatataaggatggacatgtaacgccccaatattttgccttattttaacaaaaatactattttcatgcataatttgaaaagataaaaaaaaataatttaaatacaacagtggattt

SEQ ID NO: 399909 - DNA, 555 bp, Cannabis indica
aatagggggctgggtagtctcctcctccacaaaaactcaagcccttgtggccaccatggcgacatgaggatcatacgggggtaccttgcgtagagtctattttgttcttgccataagtacgaggcgaacaagagacctacacaactgtcacctccccaattcaacacccaggactacctggatggaagaaataaggggaggtgagcaacctaacaaagctacagatatattcaaagcaaccgtacccgtaggtaccttctaggtaaagcaaagtgtacagggtcaactaacgacccggtaccgccttagatacactcactaagacatacactaagtcctaagttgcacaattgacaataatggactcattacctagccttatacagagtttccaagggaaaccacgcagaaggccaaggttgtatatgcctccaaggacattatgagaccctagccgaggtcaaaagagggagaaaaattggctgcccacttggaacattggccttggccggccatggttctaagtcctagtggtgagccagaccccaagaccca

SEQ ID NO: 399910 - DNA, 403 bp, Cannabis indica
ctttaggaatgaaaactttaatcttaaggctatattactatggaccataaatgattttccagcttttggaaatctttctggatacagtgtgaaagggtacaatgcatgcccgatttgtgaggagagaacatgttctaccgtcacctttgcaaggagaagaattgttagaaaagttgaataaagttcaattccaccttggaaagcgaaaattgacttcgaagaaaagaaaaggtcagcgtgagaaaagtgacgttgtcacaagtgaacatcaggggccatggaaaaagaagtcaataattttgagctcgaatattggaagcatttggcgttgcgtcataatctagacgtaatgcatattgagaagaatgtgtcagacagcttgcttaataccttgttcaatatt

SEQ ID NO: 399911 - DNA, 606 bp, Cannabis indica
taactcaattatagttaggaaaggaagtatatcgagttaataaattttaaaccctacaatgtaaatctacataaaagtggtgaagtcacttgtaaatagattcttctcggactcttactttctcacattctaaaatctcacttgaggaatattgaactcttagagaatataactttggagaagtctcatcaagcattgagattaataatacttcaagtgaactagtctattatagcacaaagagggtgaaccactataaaaattcgttgttcatcttgctcgtttacaatttttttagatctgttgacaaaaaaccgcatcaacaatttaaacaaaactatcattatttttagatatttggtttgaaatattattttattattattttgtattttaaaattatttgtatgtatatatatttttatacacaaaaacaacataaatactatagctacatttaacaaacgtacgtaatattcactcaattaacatatttgagattattatatatatgggtgaacttttaatgggtactacccatgaatgggtaaaattataaaattttgagtttttatacttaatttttctatctaattaaaaaaatct

SEQ ID NO: 399912 - DNA, 687 bp, Cannabis indica
ttaataattaaataaaataaataatcctaactttaaaatttttacggtcagagatcctaaaatttcaattcaaactaaaattaacaaatttttcaaaatttcatgttactttgccaaaaatacaattttaattaaaataaatatctaataagataaaatgttaaaactaacatttttctaatcttataatttaatttaataaaatatatttcaaaagtaacaaattttgaaaatatgatatagttagcaaatttgaaactttaactagattattttgaaattttattaatattttaatatctaagatcatttcaaatttaatattaaaataagtaatatctgatcttataattaaaataaattaaataaacaaaaatttcaaaattaaccataaggctagtttgtggaaaaatctaatgtttaaattcaaaggctactaatatgtaaaactaattttaattaattaaaaaattaataaaaattaattttattctgataattagatttttatttgaaaatttggattctactcaaaattttacaaaaatttgaattttgttttgttaacgcagattttcgttaaccaaattttagcctcatagtgataatacaacacagaaataataaagctatagaataaagtaaaatatgaacaccagatttttacgtgattttgcagttaaaatt

SEQ ID NO: 399913 - DNA, 805 bp, Cannabis indica
acacaaagacattgatagagatgtggaattgtggaatgaatgcatcgaagaagccagcagggctaagaagactaagcgcacgcgttaagatggcgttagagtttgagtggaggccagagggctgtgccaatgagacttagtagtcatgtgagtctgcgaaggacaagaggggtgctagagtttgcatgaagactagagggctgcttacatcgagggagccggtaaggagtgatgctcgctcgaatcaattggatggctgagtggacaatgcatgcatatggaaatcgacaaggggtgctatttcagatagttaactcgagagtcacatcctgcgggatgcacttttacatgggatggggtgcatgaagagttgggtggttaggcttttgcgtgtgggcatattgtcgaggacgccgacagatgaagtgggggagagaccctcacggttcactcaacagactagttattccttacaagcatcgagatgagcatcatggagattaattgttgttcaagatgtaaattcaagaagactcgggacacaggcagtgccatttatctagggtgaaagtctgcacgactcaggtactaagataacaccatcgcaatgttcgcctaaggtgaaagttagtaggactaaggtactaaggcaacataaaaatgtcgaggagcaaagagtcagaatgactgaggcaatagttcaacatcatcatcaaagtaacatttggaatggagggatcgtatgcgagtatgcggttagcttgcgagctataccttgagaggtattcctctaagagagaagttc

SEQ ID NO: 399914 - DNA, 842 bp, Cannabis indica
ataatgcattttcttccaacgtttataatgtggtagattgttgtagggtagcgtctcattctacaaaatccaatatattcatgttataattttcttccaatataattatgaatacaatataactattagtacttatagttatgttagctggaagataccatcttcttgcttttccacaagttttggtcctctcgtcattggttaataaagtagagaccgtagtcaacaactatataatgaaataaaattaatataaacaatgaaaccatcaaacaccttattcataatatagtcacattaattaccgttatttctacttcttttccagggccaaggtatcaaacatttgatcgtaaaagatgaatgtcactattccttacaatcacaggcctatacatgaaaaatgtgtaaattacgatatacatgaaaataaataatttaattaataatacaaaataatcataacacttactaagtatcattgaagtttgaatatatatactgtaacatatctctgtccttatttcttagtatattttctagtttaaaatcttcgaagaaaatattatctcctttggaagtatttatgggagacacattatctgttgatgatgaattattttctgctattgcacacaattcttcctcatacttccaaccaatattcatccgctttatctttttatcttcaatattttcctctaaatctatttctccattcctttttgttgtaagacactctctgatttctttcatttctttctctaaattttgattttatgctcaatgctatttctccattcatgatcattcatagacttcatactattaaaataataaga

SEQ ID NO: 399915 - DNA, 960 bp, Cannabis indica
tttcaaatttataggttcaatttaaattttttcaaatttaatttatttgttttattccaaaaaaaaaaattatttatttatttatttatttttcaaattttataaattaattaattaatttaaatttaaataaatcatatatccaacttgttacatgcttgtgtgttttacatattgtttaactattaaactatgtttttataaaacctattattgtttgatctaaattgtaatggttaacttgttaacagatccaatgatctgattttaactaatggttcaattgtcaataggtcaaataaataatttgtaataggtaaattttacaatcttctttcatctatgtataaacctagtaacttgataggatccatccaaatcagtgtgcatgtgtgagcctatatgttttgtttaggcttagatgcatataggtagctcctttaattttgtaattaaactggactaggttgctaaataaaatgatcacttttgatagattttatttaggcccaattagtaattgggcctattcaattaataacagttgctcattttaaggttaaattcctctcttttgggtcttgtgtgagagttaggggaccataccagtgggtacgacatattgaacccagccctccctcacatgaataaccccaactgtgaacgctcatttgcctgatttgaataacattactaggttaattaaactagtttaacctaataaaaattgattagcaacataattaattttgaaatatatgaaatgaatttttcatttaaatattttgaaattaatttaagcaaaagacacttagtttaatgaaactttttcaagataaactatatgtatttaactaaataaagaattataactaattagattcttttgatgtttaataatttaatatttcattaaatattttttttaagttgtaaattagttacttataactaattttt

SEQ ID NO: 399916 - DNA, 542 bp, Cannabis indica
attaattagaaatccttttctatttgggaaattagaggaaattaaagaaaaagtaaaattggagaaccctttctttctttctctctttcggctgggaaaaaaccagagggaatcaccctcaaatcttggtgttttgctggattgaagctaatgaatcaagcactctttaagccaaggtaaccctagacactcttagctaagttttctcaaggttttagttggtttcatgttgtgattttatgaattagtggctgttagggtttgggatgtttaggattcgaattttagggttcatttgagttggtttcaagttcttacagctggttttaatgtgttgtgttggatttatgcaagtttgagctttgagttcaaagctttgatctctaatggcataaattgattttgtatgtttttctgtgaaatattggttggattatgtcgtgtataccctaattcggtactctggaaggtttggttgcttttggtggagttttgagacagaaatgaaatttcttgggtgaactggtgcaaaccgggtaacc

SEQ ID NO: 399917 - DNA, 570 bp, Cannabis indica
tgtgaagaatccaatcaagtgaatgagtattgggctcaatcttgataatactctatcatagaaatgaataagggttagagatatgagtcatttaattcagttgcaactaatgtaaggtttcttaaactttatatgtgtttaaattccatgttttagaaatttgtgtttaggatgttaaacaacatacaaagtagttgtaacgccctaaataattaggcacgctacccaatatacttatgaaaccctaatccctcaatcgggattactaataaaattagcgcagaaattaaactttaatcacaaatggaatgaacataaaacctgtaataatttaaactttgaaatctaaaagttacagaagttgggatccctaaaatatttacaaaatactattacaagttcttttctagtagccgacctatgcgacaaaatagagtctcaaaaattacatcactggtagaccccaacccgcttggtctagtgtggcccgaacatgtacattcttcgtctagctccaacactcatggctgatcagaaacatctttaccctttcctgcacagtagagcacc

SEQ ID NO: 399918 - DNA, 523 bp, Cannabis indica
tcagacatgccaaagctaggaaatccaaatattcctaggttatatgagctcatgatagagcctaatctagaaatttgggaggactggtatgatagtgaagaggatttggaaagtacatggcagacatgtacttggaaaaaacctacaaaatttccatctcggaaaccatctggaaactccggagtcaaatttcggggtagaccagatataaatgatcaaaagaataagaaaaggatcggaaagaaaagaccgtttccaaaagaaacgaattcaaacaaccaaaacaaaatctagtaactctggaggagtttttaccaaaagagttacaggacaaggcaactggttgtgatgacagtgtgtcagattgctgcatgactttgttaacaaaagaagatcctgaatttacctcacttgaaagtgaaaaagaagtagatgaaattaccttgcaagacatgcagcaaaatttttttgcaaagaaggaaagagaagcgaaagagcttgaaaaagctaaacaagaccttca

SEQ ID NO: 399919 - DNA, 1443 bp, Cannabis indica
gttgattatataaaaggaaagttgacttccaaggttagaaagagtaagtcagacagatgcacatatgtgttagagcttattcatactgatatttgaaagccttttgttccacctgctatgggtggttataaatacttcatcaccttcattgatgatttttcccaatatggccacgttgagctcattcgtgaaaaatctgaatctttagatgccttaaagattttcaagacaaatgttgagcttcaaaagtgaaagaagattaaagttctcaattctgatataagtggagagtattatgggcattatgatgaaactggaaggaatcccggctttttgcaaaatacttgctggaatgtggtattgatgcaagatatacaatgccatggacacttcttgacatggtacgttgtatgttgattcattctagcttgccagaatttttatggggtgaggcattaaggactgctgcttatatcttgaatcaagtgcctagcaagtctatcccaaagacaccatacgagttgtggtcaggcaggaaagcaagtttgcgttatttttatgtttgggtatgtaaagctgaagcaaggacctataacccacaatctaagaagcttgatccgaagactattagtggctattttgtaggctacactattggttcgaggggttctagattctattgtccttctcacaccacctaagtgatagaatcagatagagttgtctattttgaagatgactttggttcaagtcaagggtcaagagaaattttattcagggaagaacgtatttatgtctatgtacttgttgcttccgcttccgctcctactaatgatcctgtgattgaacaaattccaacaaaagctcctgatgaacctcgaaatcatatgcaagatgaaaatcctgatattgagggtggtgaagttgtgttgagaagatcacagagagctcacaaacctgctattcatgatgactaccttgtctatttgcaagaatatgattatgatgtgggagatgcttctgagccagtttcttatcaagaagccatgaggagtcctcaatctaagctatggttgaatgcaatgacagatgagttaagttccatgtcacgaaacaaagtttggaatttagttgtcctaccgaaaggttgcagacccattgggtacaaatggctttacaagattaaacgtgactcaagtggttagtaaggtataaggctagacttgttgctaaagagtatagccagagagaaggtattgatttcaaagtaacattctcatctgtgtctaccaaagattctttgtgaatcatcatggctatggttgctcattttgatttggaacttgaacaaatggatgtgaaaactacttttctaaatggagatttgtatgaagatgtctacatgactcaacatgttggttttgagaagcctggcaaagaaca

SEQ ID NO: 399920 - DNA, 761 bp, Cannabis indica
aaaacaacttaaagttttgaacgaaaacttaccaacaaaaataaaaagatatagaatatagatttactcacactatacaacgatgattatgttagaattttttaaattaaagataaaacttcaatttattatttttaacaagagaaacttatatatcttttgaagcttttttttcctcagtatagtcaccattgtatcgaaactaaattgttatgtccaactattagagcaaaatcttccaagatagagatatactagtcaattaaaactgcaaaactaaaaaatatactaaaaatgatctttgactactcgatgatctgactaactaccaaaaaacaaaaaaaaaaaaaaaaaaatcaatccctgtcaaaatataaattatcacataatattaatccacaattaccgaaaatttaaaatatcaatataagttatattaacgaaaaaaaaaaaaaaaactcaaattctacttttaaaaaaggagaacttatttgacgaattctaagtgattccttcctaatagactttggggtgaactatgataaattctaagttgtagttattctggttgtaaatattaacgtacgtcatatattaagatattaaattaaagggtaaatagcggtataagtacccaaaattttgagtttgtaacaggcataaacccaataatttttttagtggcataagtacccaatatttgtaaaactgtaatttttctctatttttgtcaatacaggctccgttttaaatttattaaa

SEQ ID NO: 399921 - DNA, 1019 bp, Cannabis indica
ttttttgccgttttcattatgcactctccaaatgaatttaagagtttcattaattagatattcaatgctatttataactaatagactgcgagaggtaatgaattactcctattaattatatttgtaatactgaaccctattaattatccttaataatatcgatcattattattagggttattagtggtgattagcagtagtataggctgatggtttaaaaataattaataatattttataataattattaaattaaaatatattaaacttaatatttgattatacctataaaaacacaatattttgtaggggtattagatattaatggcgctatttagcatttctcatttaccgtgttttgggtgatattttacaataattgcaatatttttagtttttaaattttttatactaatctaattaacatttttttaatcaaacccaagataaatattaattagatttaaaaaaaaaaatcttctaatctaatccatttaagtgacaaaattaaatttaatttgtaatttaattaatttgattttttttaattgggattttagtttagaaagtaaattttactattaacttaaactaatacgaaaaaattacataaaacttaaatattattaatcatttaagtttaatggtactacatacaattatcagatttatagtatacaacagaaatattaaagtagctaataaaataaaagtaacaattaaaatgtctcaaaatattaaacatcattaatattaataagatattattattaataagatgtgctatgtagttttttttctctaaacaccaaacataatataatagcaatattggtaacctttagtttatttaattttttaaaagtaatgtacagttatgatgatatataatattaactaattataatttatatgtgtcaagtatagaaatataaaaaatatagcaagagtgtaaaacatgtattataagtattaaatcaaatataatgtatttgtgctattccatcttaataaataaa

SEQ ID NO: 399922 - DNA, 889 bp, Cannabis indica
tagaagttacttctgaaaatagaatcttcgctaaaatgaataaaaaactgtctcatcaaattgaaatttttgaattaaaaataaaacattatgaaactgaattttgcaataaagataaaagatactctattaaagaaggaacttaacaatctcaagaaaaatgtccaaatgcttaaccttagaccttttatttttgaggaagttcagaatgcaggtcaaagaggctttgctggtattggattagatagtactagaagttctagaattacgaaatttgtaacatctagtgttccaacaaattttcctgctgctgcaaatttgaagtttgttgcaacagataaagtctgtcactacaaaggctgtatctgcagaagaaaagtctccaataattacaaaaagtgtaatgccctgaccctcagggacgccacgtgtgtgctttttcaaacttatttcttactaatctattagtttaggaaaagtgtggtttaagtttaaaccctttcagattttaaattgcactaaaacttccatacaaagtaccattataatatggggattacctgttgataaaaatttctttataaaaaatttacaaaactactattacaaaatcaaggttacattttcaaacatagaaaaaggggtcgatcttgctttccagaagccaagataccacagctgatatgtacatcgctgggagacctctgactcatggccgaacatagcttctatcctccttacctgcaccatggagcacccgtgagtcacaatgactcggcatgaaaaactactagatagaaatcatagaaagtgctaccagttttcattacaatataatatacatattgaccttaagaccaatataagaacaaatacataagcactaaaa

SEQ ID NO: 399923 - DNA, 550 bp, Cannabis indica
tttaaaatttgtagagaaatgattttttcacactatttataatttatattattttttgccataattttttttagaattaaaatcaaattatttaaagaacatggtatatttatattagttttgttattttatttattttaaagtgatgtagattttttaattttttatgggttgttgtaggttgttgatatataaattttgttgtacaatatatttcaattttattgtatgatatattattattagtaaataactcgtgcttcgagacagatgtttaaatttttttatattatatatatgaaataaattatatattttatttgatgataactaagtaataaaattacattaaattttaattttattaatttttcgtataatttttttttgaaaaatatgagaagttagatgtaaaatcgggtcaatctgactcattgatttagaatctaagtcttatatgtgtcatgtttaagacaataacagagtatatactgacaaaattaaaaaaaaaatacagttttataagtatttggtacttatgtcactaaaa

SEQ ID NO: 399924 - DNA, 1063 bp, Cannabis indica
ttaagttaattaggatttttgcctattaaactttgtcatgtattaatcgtgctttttaaattttcaagtcgttaaaaattctcctaaaattattgaaattgttaaatttaagcactttggtttaattttattcaatttccctaatatgatattgtccatatactatattgtgccccctaaactttgatatttataaaatcatgtctttaaactttaacatgtatcgaattatgttacttaaattttcatcaacgttagtttttttctagtaaaattgaacaaaagtttttagatctaacaatcttaatagttcaagaaaaaattttaacgacctaaaaagttcaaaagacgtgattttgtatatgttaaagtttaagaagtaaaaatataaattaacttttaaattatgtacaaagcgactataaaaacttatcaaagaaattgattgatgatatatagaggtgcatggaagtagtattagtaggtcattgacttcgcttctaattaacaactttagaactaataaatggtgttaaccaataggcatcaataaggtactattggtttagtatgtgtcactaaaccaattttaaactaaggccaatgccaattggcgttcgtgtaggcaatagaaaatcaataattggtagaatttttttgtatgagtggtacttatacccttgaatttctaatgtcttatttggaaaataactacttcatatagatacccactttatattttaaaataggctaattaggatttttgtccccagaattttgacatgtattaaattatgccccctgaacttttaaggtcgtgaaaaatgcccccttaactattgagattgttgtttatgtactaaaccatgatcctcaggctttgatatctaccaaatcatgtccctcgaactttgacatgtactaaattatgtcccttgaattttcatccatgttagacttttttattaaaattggaaaaaagtccttaaatctaacaatctcaatagttcatggggtatttttgaaaaaccgtgtttttgcaaatgtcagttgtatataagaa

SEQ ID NO: 399925 - DNA, 689 bp, Cannabis indica
atataattacaattcaaattgtctagaaacaccataaactatattttatttgaagagaagtttctcgatgtcaccaaacacttcatcacaaccaatttgaacataaactaattaaaatacattcaacaagtttttggtatataaaatacattaaactgtataccctattctcattctcttcttctaatttctaatttttcccaagatcacaaaatcaacaaggaataataaataagatcagattttaaagtttaaagaacaacaagaaaaaaaaaaaaaagtattgaaccgatctaagaactaagaagcacccatgaaagaaactaggtgagcaaatatgattatgaagaaagaaggtacctgccttgtggcgaactaaagccgaatgttgctgctgcaccaacagccaccacaaatgacgaggagaggagaaggacgtcgttcaccggagagatggctgatgatgtcgtcacgatttagggaaagcaagagagagaaaggtgcgtgagtctaagggagagaagaagagatttagggtttcattctttctttaatattaaaagtaacctttttaaggtggtgtttggtttagtgatatataattgtaatagtatttaaggtggtgtttggtttagtgatatataattgtaatagtaataggaatagtaatgataatagtaataggatta

SEQ ID NO: 399926 - DNA, 1590 bp, Cannabis indica
atcgcgcggggccacttcaagcagtatgctaaaagacagggcaatggacataaccagcccattctgcccaacaacccaagcaactagggattactacctcctcctattgagggagaagacatccatgttatcttgggagggccgcaaattacgggagagagcaacaattcccgaaagaggtatgtgaaggaaataaaaaatgagcagtcagcatttgctccaaaaccttccaagaaggtaaaaactgaagaacctccaatcatatttggaggaggatgagaagaacgtgaggtaccctcacgtcgatcagttggtgattactatctagctcaccaatcagaggataaagacggtgttgatagatagcgggagttcagtgaacatcctttatagggaaaccctgaagaatatggggctcgaaaaggctgaattgaggccttgcatggtaaatctatgcggattcactggagacagtatcaccaatcaaggtataatcgagctcgcattaactttgggtgaggcacccctatccaccataattgtgcaagattttctggttgtcgacctgccatcggcttacaatatattattgggtcatccagcattgatcacactaggggtagatagttcgatcaagcatttgtccttgaagtttcaaacaccagagggtgtaggagttgtgcgaggcgatcaaatgcgagctcactattgctattgcatagaactgcaacacagaaaagccagtcaccagttagtggcagtctttgcagaggaaagcaaaaagaagaatgaagatcttgatcctcgaattcaagatgaaagaaagttattgaaactaattgaagaattggaagaagtttttcttgacccaggaaatcccacaaagtttgtttacattgggaagaacctggacgagtagttgaaatagcagctaataagtttcctaagggcaaaccaggatcaatttgcctagaaccatggagatatgatagggattgaccctaatattatctgccatcaattaaatgtcgatccaaactaccaagcaaagaggcagaaaaggagacccttggattctgagagacaaggggcactcaaacaggaagtagataagttattagttaatgactttatcgcgaggtgtttttcccctcgtggatagccaatcatgttctcgtcccaaaacctaacagggcttggagaacttgtattgatttctctgatctgaataaggcatgccaaaaggattgttttccactacccaggattgacctgttggtggatgcaactgttggacacgagcttatgtcattcatggatgcatattttggatataactagataaaaatgcatgtcccagatcaggaacatacgagcttcgtaacaaacatgggactttactgctacaaagtcatgttgtttgggctgaagaatgctggggcaacatataagcgattggtgaatgagatgttcgcgaatcagattggacaaaatatggaattttatgtcgatgatatgttaataaatcagtaaaaagtttgagtcataccacggaccttgcagaattctttgaaatattaaagaagtata

SEQ ID NO: 399927 - DNA, 527 bp, Cannabis indica
attggacttcggcatagggggattgggggatcactctggtccccttatgtctaactgaggccgggccagcccaagtctcttcccccggcttcgtccaaaacacctaccgtggggttcaccttccctaggagggcagttcccttaaaccctcttgaaatgcagagggagcaggcaaatagagccctaaaaagggcatctagagtcgtagaggctacaagtctttcggcaaacggtcgtgatgccggcagtctgcaaggcagagcttgcgaagaacatggacgtagtgcctccggcggggcagatgtcgaggctctggagagcccattggcctaaaggttggggcgagaggctgctctttttgctacagagctcttagaccagatggctgggagcgcctcgaaactgcccatggagacttgggcgtccgataacagcgcggatgctttcgtgctggctcacaatgcaaagctgcaagtcgttgttggaatttattttaccaggatcttagatctactcacaagtatgtt

SEQ ID NO: 399928 - DNA, 592 bp, Cannabis indica
ataacggggtgcctgtggatattaagatgttgcaaaagagattgagagctgtcttgctgagcacgacagggttcggattgagaatggagttagaccggagctgtgtcatggtgtggcggaaatcagatggggtctcccgaggcctggaagagtgagaggatttgtggattttgcatcggacagggaggttggggcagtagccgtggttctgtttgatgtctctggttcggttttggcttgtggtgcaaagaaagtaatggttcatgatgtcgttcaaggggaaatggaggccttgatttttggagtttctatggctattaatctgcagatagaagggggggtggattttcacacagataactctttgttggtaaagggtttgatggacaaaacatccccgtcttggaggtctcacttctcttttgccaaactctatgatctgttactttgctttgattattcggttagctggatttctcgtgttttaaataatgttgcgcatactcttgctagatggggcctgtcccattcttgtaacggtttattgcgtttttgggaggtgagtccccatgtgctcaccaaactttgtgtt

SEQ ID NO: 399929 - DNA, 867 bp, Cannabis indica
gcctagtccatgcgtctcgtaagttaaggccatacttctaggctcaccccataatagtgttaatcgatcagcccttgagacaagttttatcaaaaccatatgcttttggaagattgataaaatggtcgattgaactggggcagttcgacataacataccatccttgaacatccattaagggccaagctttggctgacttcttgatagaaggtataactctagaagaaattccacctgatcagcgaggcgagggaacgtggaggttatacgtggatggcacatccaacgagcaaggttcgggtgcatgggtaatattaatatcgccggaaggctttaagtttcactatgctctaagattccaatttgacgcatccaataacgaggctgaatatgaagccttaatcactgacttaaagatagcagaggcattgaaagttaaaaatctcatttttcatagtgattcgcaattgatcgtgaaccaggtcctcggggaagaccaggccaaaggcttaaaaatggcgaagtatttagagaaggtttggaagaccttggaaagattcgatgactttaaaatcgaacaaattccgagagacaaaactccaacactgacgccttagcgaaataagcctcgtagaatgacctggatgaactgaatctggttccggtagagatactgagcgagccaagtatacgtgaaactgaagacgtcgagatgatagatagctcgcaaacatggatgacacctattatcaattatttactcgacagacaacttccaaatgacaaaaacgaggtgcaaaaactattgtattcaatacctcgctacacaatgatcaaaaggcaaactatatagaagagggtattcaa

SEQ ID NO: 399930 - DNA, 611 bp, Cannabis indica
agagaataaaaattaaagacatcgagtgaaaagaaatatgtagtataatttctttctaatattaattacacaattatttttaaatgtatcgtaaatttttggttgattttcagaaagttgtggtagaagaaggaagaccagtgagagagaacttatttttttttttattatttaataaatcaattttcttcttaattattttaaatttgaaatgatttggtttttaaaaaatattttaaataataaaattttgaggaaattacggagaatatgacattttttctttaaatttcattaatatggaaaaattagagatttacttaacttatggcttttttacaatttaagttagttgtatggaaaaagatttccatatttttaagtttttattaaataaagccacattttcattttattaacctatgtttagagatttttaatattttttaaagtaaatcattaatatatatacatttatattatttttatattataattattttatttattttaactctacataatcattctttcttagcttaaatttctattttattttttctttaaggaaatctatttattaatatatgtagaaggtttattttattttt

SEQ ID NO: 399931 - DNA, 802 bp, Cannabis indica
ctttttattttattaagcgttcaacaaacatagtggcttatgcttttgcaagagtttccagtttatatcctgaatgtaattttagtatcgggaatgtcctaactgaattgctatcatgtttggtagcagaatttgaagtttaataaagcatattcatttcaattttttttttttaatttacccataatttctttaaaatttattaatctcctataattatattatagggttgagatgcaaaatggccctaaatttggtaactaagttagtaaatgtccactttttaaaaaaattaagaaaatggccaaatctaataaattagctaataaaaattataaaaatagatttatcacatatttttttaaaaaaaatatatataataacaaaattaagttacataatttttttagtattgcatattattatattgtaacaaaataaataaatatattagatcatttaaatatatacagcagtattagatatatcgtagtacagaaaattaatataccgtagtaataaaattatataccacaaagaaattataacaatactaaattaatactcaaaaaatatatatatcatgctaacaaaattatatatatcaccattaaaatatgaatacataccaaaaaatttatatacaataaaatagaaactaaatatcatattaaatataaataatatattatagacaacaaaaatcatataccatacaataaaacgtatatacctacaataaaaaataaaacaaaataatataatattattaaaaaaaattatatatatcatattaacaaaa

SEQ ID NO: 399932 - DNA, 657 bp, Cannabis indica
tatgagcttggagattagagaacaacacttagaacttagaactcctttgaaagagtagagacacacctatttatagttattggtgggatcccctttaagttggtattaaagccaactgttataattaataacagcttttttcagattcatctgatgagcatatagatggacaaactaacttgacaggttaagtgagtttaatcccaacaattccacttgattagattcacttaatctccaatccaaaagaaatgagtgaggacattaaggttgcgtttggttgggaagaatgaaaatataggaataagaatgagaataggctttggaataggaatggaatgggataaaatttaaaatgcaataaaaaaaaattgaattaaaaaattattaaatttttttaaatcttgtattggaatggtctttcattccaatagttttaaatgcaaccaaacaaaaaaataaaatgaaaattgtttcctttccatttcattagctccaaccaaacgccacttaaatgtcctgaatgctcaataagtttagacaatgtctaaacttgtctctagttacacttttagtaaaaatatctccagggttatcatgtgtgcttattttctccacttccaccttcttggatgacacaatatcccttatgaagtg

SEQ ID NO: 399933 - DNA, 501 bp, Cannabis indica
cgactttctagcgatattgtgcattgtttcgacaaattgttggcatgggtatgatttgctcgtcgaggtggttattttaatatatactatccctattttcgactacatttccagcacaccaatttctactgccaccgataattaatttacatcgcataggtgaggttttaaaactccaaagtcttaatatagtcatattatgtgtcgttagactcgattttgaaagtagaatgtaatgatgataattatttagccatttgatggtataggtgagagtgatatttaagattagactaagaaattggagctcaagacttgagagcttaagatcgttttttggacaaagtttaacgatttgggagagatagggactcaatttgcattattggacttgatttttatgttgaataacattagacatattctactttttatgatctgcaaattgtttgaaaaattaaaacttaatctacacatatttctggactattttggggcact

SEQ ID NO: 399934 - DNA, 758 bp, Cannabis indica
gacatatttagcgattctcaactggttgtgaatcaagtccttggtgaatacacaactcgaggtgaaaaaatggtggcctacttgagataaatcaaagacgtgctaagtcagctcaaaggctacacaatcaggcaaatccccaaagagcagaatgctacatcagatgcacttgcccatttagaaagcagtaccaagcttgtcgaggaaaacaacttccactaagccatttcgcctagcccgcttcttttttcggtgaaatttttgtagctctaccgctttttgacgactttctagcgatattgtgcactgtttcgacaaattgttggcataggtgtgatctgctcatcgaggtggttattttaatatataatatccatatttttgacaacattttcagtacaccaatttctactgccaccgataattaatttacactgcttaagtgaggttttagaactccaaagtcttaatatagtcatattatgtgtcattagactcgattttgaaagtagaatgtaatgatgataattatttagccatttgaaggtataggtgagagtgatatttaagattagactaagcacttggagctcatgacttgagagcttaagatcgttttttggacaaagtttaacgacttgggagagatatagggactcaatttgcattattggacttgatttttatgtgttgaataacattagacatattctaatttttatgatttgcaaattgtttaaaaaaatttaaaacttaat

SEQ ID NO: 399935 - DNA, 564 bp, Cannabis indica
gggtccgccccttttgttgggctgggaccattaagggcttaagaaggcccatcatttgcttgttcaattaaaagaaaaaaaaaaagaggaagcaagtgttgtagtgcttcgtaagcatcaagccaaagagaaaagaaagaaaaaagaaagggaaagaagagaaagaaagctagagagagaaaggggttttgttttgcattgaagatcaagtggtagattctcatccattttagctcaaattttgagtggtgaatccttgcaagatgctctaccaatctaccggttccgatttggcgattgtcctctctaaggtgctcttctacaatacccacttagtgagacccaaacttttctatttgtgtatccatcttttgagatgatgatgaaagttgtattggtgatccaagattgtttaatcttgatgttgttgtgaggctctagtttactagagaagaactttgtaatctcattattaaactttggtgatagtggatgatttgagcggactaaggtcccgtgatttttcccgcaatgggtttccacgtaaaaatcttggtgtctcac

SEQ ID NO: 399936 - DNA, 1215 bp, Cannabis indica
agttagttaactgacttttcttgttataaccgtgtgttagttagcttggttgttggtcgttaaagtttgtgtatataaactctgtaatctttttctgtatcaatacaagagattcatttttttttcctttgttcacaatcttcacattttcaattatttattaaattaattcatttaatagtaaaattaaaataattctcatcatttctatttttattttttttaatattctactaatacatatcattgaaaaaacaaatattaatattataatattttctttaataaaggaaaaagtgaagaattatttaaaaattaagagataggtgaggattatttagcctggtttattactaagcattacaataagtcaatattaaaatctaaaattcaaacccaccaatcttaatcacagaaaaagatatgtagaactatatatatacaccattttttaaaataaaaaaaaaatagtcatacatatctttattattggtgttataacgatgcttatgttttttgaattaagagttcataacaaaggaacagaaaataaaagacttaaaataaatgaatgaataaataaataaatttttcatttcaaataaataaataaataaataaattttgaatattcactaattaataatggccttgattttaatcatagtagttagtgggtctactgactgaaaattttgtggggtcgaactctctctctctctctctcactatcatataatcattctcaattgccaatttgatttttatatatatttttaattttataaatacaaaaattatatataaataaataaatataaatgttaaagtgtgcaaaattcatgccatcacgtatactatactaccaaaaataacaatatctagattgttatatacataaaaaaatattataacaaataataaaaaataggaaaaaattacataaattatttttgataaaaatttacatttctacgtttaaagtttttttttttgttttatatttttatggtattttttaaagacacaaaaaaattacataaaaataacgtataaataacaaaaattaaaaaaaaacaaaaataagagtaccatataaaatacattaaagactgtatttatgtaaataaatcttaaaaatcataaaatatttaaaattatatacaattatattttatatttttttagttatttttatgttttttttttaaatta

SEQ ID NO: 399937 - DNA, 539 bp, Cannabis indica
aaggtcttggcccgttgaaggaatatttgagtaggctcggtctgcatataaggagggatcctaacccactccgtgagaagctccgggcgatccatggcctaaaaaccggaggagagaagaagcagtgacgatactcgttcacgtgcttctgctggttgtaagggaccgggcgttcattcaatggatgggcccgaaggccataaaaactgtccttaagtttatctccctttttggggatagaaacgagttcataaaagtacaaaatttttgtcggactgggcgagccccagctccaggcagcataaaaaataaacaaggttgaaagcaggcggtaagcttggggaatgagttggtatggcgcaaggccgacaaatacaaggaaattaataaagtaatcttggagacagagcatggcctcgaccatcaggtgtgtgtggctccaggttctgaagcccccgtagttatggttgggcatctcctcatcccgaggcagccagtgataggtcccagaggtagaagtctaatttgagaattataat

SEQ ID NO: 399938 - DNA, 657 bp, Cannabis indica
tataatgtagttgagatattctctcaatttattaagagatttcctcaatcggttattagatgtaaatatctataactgaattcggttatattatttattaaaataattgaatataatttaataaatagatttgaatttaagtgattaattaaataaaatatttattgagtttatttaaatataccgtataacataagctctaaacataagttttagaataaaaatttcacgtagcttttttcaaagcctaaaaagggtttttaatagaaaatctttttctctctatcacataagaaattgttcttgatcatgtgttgagatttatacaagaacatcatatacaatttatcctagtagctcacactacttcttgtttggtggatccatttggaagactacagtgtgagatttattggatctaacttacgagaagttttgaggatagcatgatagccatcaagaggtattttttttctttcatacaattaatattttatatttaatgtatatacatcttgagatccttgagttgagactatggtacaatgttaattagataatttttttttgttgcgtacctaattttgtgcaacgcattaaaataagtaattatatgctactatgcttcctaacatgcattattaatcacatacaata

SEQ ID NO: 399939 - DNA, 580 bp, Cannabis indica
attcttacaacttctattttggggatctaataatgtgaataactaggaacatgatctacaattatagaatcctgacattcctagcggatcgaatgttggttccctttaagtattaatcctagaattgaaaagttttgcataaatttacattggatctaaattatactttcactagtgaattaacagtactaaaggataaagaagtaactataaggataaaacaataaatttgatcaaaactctttacaaactcacacaagaagggttaatcactagaattgattatatcaatagatactacagtaaaactttataaatataattctatatttactaagagttcaattctatatttttagtagagtaatcatgaaattaataaacaatattacttaattgatgaaattcaataaataaatctacattattggagcttagaattataggtccatggtctctagatcgccaccttaaataaactgtcaaggggtaggataaatgtaatatatggaagttcaaaaaaacctatttttaattgaaaaaaaatagtaattatttatttttttaaaaattaattaaa

SEQ ID NO: 399940 - DNA, 579 bp, Cannabis indica
ttctatttttctatttctattcaacaggtttaaataaaaaatgtataacataaagaactgaaaaatgtataatataaaacatacaagtttaaataaaaaattatattatgaatataaaactgaaaaagagatatgagaggacagaggagaacttaagaacaaatctcgacagtgagcaggtgggcatgggcggacacgggcaggggcatcggcggtcagatcttagaaaaatagaagagggatgaggagctgaagaggcactggcagcacagttcgcctgactgagttgaccgctgagatgagaacccgccggagaagaagaagcagtcgccggttttcttaggtttacaatttagtttacgaatggtaatatactctttttattttattttgttgttgttgctgctgttgagaggaggaaatcattggttctacaaacattcagagagaaccaaagaaatgggcaaccatttttcatgaaaacgatccaacctattatcacttggctctgtctgagagcaatttaacttttaattttaagtattaagttttaatattatttttcattgtaataaaaaa

SEQ ID NO: 399941 - DNA, 660 bp, Cannabis indica
ctatcttttttttatgtctgttttgccaatagccctatttttaagacaaggtgactggccaaccggtctttaaacttagaatatattttttattttttgaacaactggctgaccgggcatcctttaatctcgggattgaatgcttttgttattcttaatgaatttcatcctttgtttgtaattattgtgcaattgtgtttgttttgtttttttttaccaaatggtttgtacaagtataggtccccccaagtgaccgagcagagttatgactcttggtcacttggttttcataagtatttttttttgttcggagatttgggtacgaccagaccttttgtacgcattggatggtaaatttgtaacatgctatataactcgattccatttgaatttaaataaacatctttattcatttattggttggaaatatgtctgttaccgtagtaacttacatcaaagctattatgttgatctgatctttagcttagcataaacaaaacaaattgcagaaaatagaaaatcgtactttcaaaggtggtcatctgacctaaatacttgataattttatccaaaacgttgggtgtggtccgcccagaaggccattcacttaagagcaaatgttcttttattttgtatttgatatggtcatccgacctggta

SEQ ID NO: 399942 - DNA, 495 bp, Cannabis indica
tcacttagaataccgagtactcagaatatacactactaaatagacaaaaataaaagcaaaaataaaaagaaaaagaagagaattatagtggttcagttagagattggtctgttttgtccacttttgtaatgatttttacttagtttatttgatttggatcacttctttacattgaaagcaagtgtcatttaggattatataactgatcggttgtaaaatgtttttacaataaatgctagtatttaatcaaattaaacgtttaaggaataaatgaagaacaatttcattcgttcttgaattaagtgaagtaatgtatgcaacttgataagctgtgagtttcctgttcatattccaacacaagaactcgtaggtgttggaatatgttttaccaggatctagatttactaacaagtatgtttcattaacattctaatatgaatttctaaaagaatgaaagtaaacacatataaagtttcagaaaatcttacattgggt

SEQ ID NO: 399943 - DNA, 725 bp, Cannabis indica
ctacttggaaccaaaagagagcacaggaaggtagtggaaagtagtatactcagcaatggccctgtactatcctcaactcatgctgattacttactttaggaattcacaaaggatgagataaaaaaggccatattcagcatacctgcaaacaagtccccgggtccaaatggtttttctagtagcttctaccaagataattgggagctcattggagaggacatatgtgctgctgtgcgttcttttctgaattcaggtaacatcttgaaagaaataaactctaccataattacattggtgcctaaggtgaaatgtcctaactctgttaaagactttagacctatagcttgctgcaatgtgatttacaagattgcaaccaagctattgagttctagaatcaataacatccttccttcaataatatcacagactcaaggtggttttattaaagggagatttataggacataatatcttgatatgtcaagatttggtgaggcactatggtagaaaggcaaataagcctagctgcatgattaagttggatctacaaaaggcatatgacacagttgagtggagtttccttgaagagatgttagttggcttgaattttccctcaaaattcacccagctagtcatgaactgtattaccactcctagattctcattgatgttcaatggaactctacatgggttcttcgaggcaaaaaggggaattagacaaggtga

SEQ ID NO: 399944 - DNA, 584 bp, Cannabis indica
ttttttccaagtatgtaggtctgtgctaaaaagacaattttatgatagattgagatctttgaacctatttttgacaatgatttcatccttttcttgaagagcttatgaaatccaaaatgatagaaattgtttccagctttccaaaacatgttaaataatctgatttggagtccgaacgcgaaagttatgcatgatttattgagcaatgtcgaagcagtaaaatagcaatgaaaaatggcatgtggcgctatagcgcccaaattgctacgctatagcaccgattctgaaaaaaaaattgctaaaacaaagcctcgagaagtaccacatggcgctacagccccgggtcttctgcgctatagcgcaacacttatcttttttatgaaaaaaaatcttaattctaatggaattcatctatcttttctaggcctatataaagaaggaggtaaatcaaatttagggacgactggagagataaaaacaagcaactttgagattagaaaacacattgaaaagcaagagagaagagattcaaatcgatcatcatcaactttcatcattagagttcttttcttcttcttcttctt

SEQ ID NO: 399945 - DNA, 769 bp, Cannabis indica
gccatatttcactaacttctagcttttggtgacatccatcttgagaatggattgtctctttcttgctaaaatgccccatctaagttcagaagtttaccctcccaaactcataataccaggatgcaccaaccattttccatttgttcccaagaacttcaaacctcaattggaaccagaaatggtggattccaaggttgaggagcttctgaccaatccaaacaaggggaaccccgtagcccatgatgggtaatcctcaaaagtgatccttgaggtaagtgttattccttgcgaatggtagtttgagtcggttattattataagttttttgctccactatttttcctccacaggaatagacatagatcatgtgagcgatcttaaaggtcctcctcaggctgacaaggaatctcagcggaaagttggcgtgattttggacgagtctagaagggaagttggcgtggtttctatcaaagaatccagccaacccaagacccaaacctgcaccagaaaacctttgcgccaacctctttctggtatcgaggaatttcatgaggctgggaataaggactcaactgcacgaaatgggatcttatgatgaggagaatgagatatgtccagaggccaaggctctctacatgtagacagtctttctcgagccacgtgtagccggtctttctccaagctatgtgtagacggtctttctcaagccatatgaagacagtctttctcgagttcatcaacccccctctcattctttgtttaggaagat

SEQ ID NO: 399946 - DNA, 927 bp, Cannabis indica
taaatcatgtctcttgaacttttgaaattattaaaaatgccctctgaactattgagattgttgaatttaaagatttttgtccaattttagataaacaatctaacatggatgaaagttcaaggggcatgatttagtacatgtcgaaattcgaggggcatgatttggtagaaatcaaaatctggggagcatggtttagtacataaacaatcactaaaatagtttaattgaatgaaattagacaaaagttcttaaatctaacaatctcaataaatattgagtttttggtggttattgaagagtgaaaatctagctagctttattgaaaaaaggtaatcactaaaattgtaaaattatttatctagaagagttttaataatttagatattcatccgaagtgaagtaggttttgcgattaattgtactacggtcgagtgggtggaatatgcatgtttgatgggtttgaatatcttaaatattcatctgcaatacagtaagttctgtgaatacatatgctgcagtcggatgggtagataattctatattgttaatgttatttttttgtttcttgttttttgcatgtttaaaatttttgagaacgtatgattaaagtcgttatgttgctaaaattttagtagaattagaataaattttactaaaaatacataaatattaataacaaagtgtaaacaattagtaaaaattcatatataatgaatttaactaattaattactacgttctaacaattaattaaatatagcttttttaaaaaaaaatgaagaatatatataaattgaacgagtgcgaatagacattcataatcacaaataccaaagtattaaatcgacatggtcaataagtctagtagtgtggtaaggaattatgttcaacatgtgatcaatttaaaataacataatatccttatcag

SEQ ID NO: 399947 - DNA, 675 bp, Cannabis indica
ttagtagtacaaattcttgtgaaaagtggcaaaacatattctacgatgggtgcgggccacatttcataaaggggtaccactatcagaaatgtgtgattttcactgtttcgattaaaattattgttagtgcatgaaaactactttatctcgcgacgtgtccattagaaaattgatgcacaacattcttggcttcatcctcataaattttcacaaattttgagatgtgtagggtgagattttagcagaacactaacgagtgtaagagtaaagagagaacttgttaaaatttaccctgtaaagaagtatattttcaattttttaattaaggggccattttaacaaaatttcacgcgaaagcaatcttcatattcaattcttagggtggaaattaatatctgccattacattcgttgattcgtattctctaaggttaacacacgtcatcaattttttatgcattttaaattttatattattttgatccctattcccatacccctgaaccgtgaaccctaaaccccacacccctaaaccctcaaacccttaaaccgtaaaacactaaaccctaaatcctaaacgctagaacccaaacccgaacacccaacaccctgaaccctaacccctgaacacggacccctaggtggcatttggttagaggtaatgaaatggaatgga

SEQ ID NO: 399948 - DNA, 1157 bp, Cannabis indica
gtattcttctctctctctctctctctctctctctctctctactgctatgtaatattgatatagtaagactacatattacccatttttgctgagtccactgtacttcttttaggggtgagttgcaatacttcattggtgttcaacttgatggaagtgatcatgtggaacccctacggagtcgtctttcagagaaaacagagcaacaaagtgctaagttggtaaatgtctttaattttatcttgcgggatatccttatgatgtatttttccggacaataccactaacatagttttattaatatatttatattatggttttagtaccctgaatggaaacttactggtgtcttctgaaagccgtaaactgtgtgggcgtcatattgatatgttttaagagggtgccacttgtgtaatatcagctatagtgtgttgctttttatggtttaattttctaataaattcaatggatcataatagtaaaaagttttctgaaatattaggttcttctctgtcctattctatttattcaggatattgaaatagggctatcctactgaaaatgagtccatgtattccacattggttgaatttgtttggtttaagtagttttgtgtcccttattattctgtttcttgaacatatgttttctcttttcaggttaaagcaactgccgaaaatgttaatgatgctgtccgagaacttcctgatgccaatttggtaaggtactcttctctgtttacactggtagttatgtctccattattgcatccaatgacttcttgtttagattgaggtttcttttgtcaattctggatcatcagataatgatacatggagtgttcaattgttttgtgatccaacctcaaattttaatatccctatcctttttgatgaaaaccaaaacagaaagaatagcaattgatcaaatttgtttatttttaattttttagacagtctgttggttgttgttttggtcttaagaaatattaatatgacatgatctagaataataatgcaaactactcttgccattttttgtttaaacaactttctttaccattttgttccaacaactacctgtctaatattaatctacagatgtttgttgcattattttaatttcattttttaaaagaaaaattataatgattttgagaa

SEQ ID NO: 399949 - DNA, 1048 bp, Cannabis indica
tatttataattttttattcattattgtgaataagatatggaatttattagtgggacaccctaacatgtgagggatcactaacaaactttaaagcctatataaatatgataataagctagggtgaaagggagaatcacttacttactaaacggctgctaagaacaccacatccatttcttcacatttttgcctaagtcatccttactttgtcgattctaagcctctccttctcaaacaccattgacatacacattttctaagaacatggaccattctctttccttattcttattggtttattatttctaagaaccttacaaccaccatctttattagatttgtgaatattaggtctatcatgagccttgttttcataagtctcgatacagatttcacctaaaaatctattattgtattattgtctacacactcttgagaacataactttggtgtgtcaaatccattaataaaaacaaaagtagatgtagcctcattaccatcgcgacacggggagtgaaccactataaatcctcagcgtccaatttatttattgtagttttatttagtcaaattaattcatcgcaatccttttattttttacgatcttcttagatcagttgacgaaaaactgcgttaacagtttagtgctttcattgagagtggcgcggtgaaagtttgattgttttacctttggagaactcattaatttacctttctcaaaacaatggtgttgagtaccaggaagaccagttttgaggaggatatcaaagtcccaaggggggaagttaaccaaccccatagtgaaggaaccattgtccctccacaaccaatggagaggggacctctcagcgtcgagaaaagcgccccatgccacctatcccagaagatcaggggcaagtccaagactgtgaaagttcgtcatctccatctagggagcgcccacctgtcaggtccatacatgtgcatagtgttccaagaaaatgaaacattgcacgtccaactggcagaaagcctacgccacaacaaagagctgttggaaatattttac

SEQ ID NO: 399950 - DNA, 527 bp, Cannabis indica
atttatctgctgaaaatacaatacagatgtatattgtagtattattttttaaggttcattcttaatttttttatatttatatagtttttttgagtagagatagtcttcaccttacaaatagtttacagtaaaagttaatacttaattataataatagcgatataatatcttatagttgtgttgagtatgagtaatattttttctcaatatttatatataaagtcatggatattttgctccacgtgcgtagcacgtataaagattcactagtagaaactagaagttagaatgtgacgattgacagtagcttaatagatttaaatgtatcctaattctatgttgaaaatgtatgagataagattggtaactatgtggatactattagggtttatgtttgttgacgcagaaatcttgacacagatatttgaccacacccgtttactatattagtgagaataaattgaatgttaagtataagtaagagagatacaacaaatttatagttgttcatgttggaaattatttta

SEQ ID NO: 399951 - DNA, 996 bp, Cannabis indica
taactggaattaaaaaaatgaatgtcaactgtaacagtttttttttattttatttttttataaaaactgaaataatattaaagtagtcatttaattttacttttacaaaatctcacattctttaaaagtgttgtatgtatagattataactaaaagttttatttgataattatactttgtctcgaaattagtatttttcatattacgtgatcgataaacttatctttacttgattagttataatttttaaaatttaaatattttttaatttacattataaaataagacatatatataaaaaaaaaacaagtgaatttatgtgacattgtatctttttttctttctatttttaaaattggtgagattttagtattttatctaaaacatgtcatttaagctatttcaacttatcaaattctatttttctactctttaagttgttccaacttatatgataagtgtcttttagctcccggcgacaacgtgtaaaaaattagaatcaattgttagataactttggtggggctcataaatatagtgatcaaaagaagatttcttgggtgaatatgtcagcgtaaggcaatgggtgggctagaatttggagattttcaattttttaatcaagttcttttggctaaacaagtgtggagattatttctgtactcaaatttcttgcctacttaaattttgagacataaatatttgccaaattgttctatcctagaagccactaaaaaggttggtttatcttatctttggtcgagtttgatctagggattgaagtggcttaaatgggtcttgaagatccattgatgatggaactcaagtttgggcattcaatgtaatgactgcatgttaaattttgtattaataaagacaattaacattaattattgatattttataattatatatgattttatattgtttcgggtcccatttttaaaaatgggcattagaattataacttttcaattctggagattttattaaact

SEQ ID NO: 399952 - DNA, 505 bp, Cannabis indica
gatctcactctcagccaaacccttaccactattgttgtaccagcttttgacataaagctcgttcagccttgtattttctctaccacagaggtaagctaactaaaaaatataccattttatataaacagttataatatttcactcaaaatatcttaaaattaattactgataagtggagtagtctatatgactcaatactctactatatttattctatgtgagataatgtccacaatacgatatgatactattctttaaaacaaagatgtagggcctaagctaaaacggattacgccttacaacccacccaattcacggcctaaaatatatattttcctaaggcctaccggaagcttttgttatagtcaaaatagaaaaaattgtatcgtatgtacccactttacctgttttaattttttaattcatttctatattctttaagatatacatacttttatagaaaatgtgtatatcagtcttcattatactctttaagttaatgtaa

SEQ ID NO: 399953 - DNA, 647 bp, Cannabis indica
ttatttcattatttttggtaaatcgattaatactccactaatgatattttataacttgaatcttatttctttcatagattttattgatactttcttataaattgggtgtcaaccattacaataatttttaagaccaattctaacttttaaatatcaatgtgactgctactataaaagcaagggacacctttcccttgagtcaagtttctcgtttcaactactccataaatcctgattggtcgtagtcaaaatcagtctacacaagcttgaatggaagaaattcatccacattttaacacacatgctaacgtgcccgcaaaatgggacatgcaccatataatacaatattcacattttagagtgacaaaagcattcgactatgctagccggacgttctccgattcgatttaacattgaacacaacctgtcgaacaatctatttcgacaatggaacttataatttggggatttcgcaaatcaaaatttaaaagattctaccaaaatttatactctttaactcgagcgaaactcaacttaaagagtagggacaaacggtagaggtcaaaattgggttcaggctcaatatcacatgcgatgtttccaaagaatgctcaaataaaattgggttggactatttgactaattat

SEQ ID NO: 399954 - DNA, 745 bp, Cannabis indica
gactaagacccggactaggatctcgactagaacccagatctgggactgaaaccggggttggaaacccgaacctgaactcggactaggacttgaaccctgaccaggtcctagtctcggactgggacctagtacccaaacctggatggggaacctagacccgggacccgggcttcagaactggcactgagaccctggaattgaccctggacccacaccctgaactacgacccaaaccagaacctttgacccgaagtggaacaagactaggacccgaaaccagaaccttcgacccgaagcttggacctgacccatagtcgatgtttggatctgggacccatacctagactcaaacccaaacccggactcggacccaaacctagacccatacccgaacctgtaccctgtgactcgaaactggaaacggaccgggacctgggaacaagactagaggactaggacccgatctcggtcccggaactagaatctgtctaggacccaaacccaaacacagaccgagatgtggactcaaatcaaaaatcggatcgggactcgggacacaaacccgaacctagacatggacttggatctagactcggacgcaggacctggattgagattggagactcagacctggacccaggtcccagacctcgattagggacccaaacccaaaattagtaccagaatcacgacccaggacttggaatgggacccaagacccgaccccggtctctgtcccaaaccc

SEQ ID NO: 399955 - DNA, 378 bp, Cannabis indica
atattatcattatcattttctaatcttataatttaataaaattaaaataacaaaataaactaattttaaaatagatatggttaggctaatattattttaagaataaaataataaacaaataataattatccaaattatatgtcaaaatgtctcaaattaaaactttttcaaatttctacaaaaatatctaggtcatttaaatattatttataaatcttttataagtaaaatgataaaaaaaaaatatatatatatattatttttctaacttataatttgtaaacaatcaaatatttcacaaaataacctatttttgaatttatggttagaatgtctataaaaatatctaggtcaatttcaaatttattaattatttaa

SEQ ID NO: 399956 - DNA, 896 bp, Cannabis indica
ctccacgtttatatatatactacgtgtcttttaaacaagtggcccttgttcacaacttgcatgatactatactataattacgtagttaaatagtatgacatgcatgttttggcaacttctaattattttattaatatatactttttaatattcaagccactttctcttttgtatcaaactattattggaagttaaggttaaattaatacctcttaacagatgatttatttaattaattaagtgaggtactacggccgaagtacagtgcccaattgtgttttcggtatattaatctttttagagcttcaccaatacaaacaatttaataagtttgccaaaagtctccaaatcatcttatttgtcctataaagaatactcaaataggtagtagttttcaaaattaccatatcatggtcccacatattaattactttttatatataatttaattatataatttataatttttttttaaatataaatttaattcaattacactaactcgatgctctagctatattagcaacatcagggagattatattttaagaaaatacaatcagcatataaataagatgcttttgctatacaaattgtttacatataagagtttacatattaacaataccacataaattaatatagttcagatttggtaacacttttattttaattttttaacaacaaaattatttttaaaaaataaaatgggttaattatttaactatttttatttgaaaatgttaaaaataaacaacaaaaaggaatgtttcataactataatttttaattttaaaataaaataatgtgttttattaactatgttttaagtaaaataggtgtaggcaaggtctagaccaggggactagggccgacggtccgggccgattaaaggtt

SEQ ID NO: 399957 - DNA, 385 bp, Cannabis indica
acgactgttatatatatatatatatatatatatatatatatatttataaaaaacaactaactaaagtacctaatagattatgttgtattattaataataataaaaaaaaagtgactaccctatcacaaaactctccaatattttataaatatagaactaaacatatgatcaatgtccataaacatatatagtttatttaaaacaaacaaataaatataaattcaactacaatatatattaatgtagcaaaatatataaatcatcttcaattttatttacatcataagttatcaatcctacacaagtctaatttatacagtatactttgttagaccttattaagtcgggttgtggtaggggttgggatccaagagtcgggacatat

SEQ ID NO: 399958 - DNA, 574 bp, Cannabis indica
cccaagattatatcaaaatcagagaattgtagctcaatttggttggcggttaattaataactgtcaatccaaaaagataaagacctaatccaccgagtaaatacaattaggtctctagagggtaacagggtaccaaaccccgaagcacatacatcacatagtttatgcaaactctctattactctattcgatacataagaatgagtagcacctgaatcaaataatacagagtaagaacaaccgtttatggacaactgacctgtcaccactaatggactagcatcagcgacagcctgagtcatagtaaacagacgcccggattctgattgttgttcttctttggttcttctttcttagcccgcgaatagtctctaataaagtggccctccataccgcactggaaacaagtcttagcataacactcaccctgatggtgcttcttgcatttgggacactctaggtatgatctgaacgtagacccacgaccttgacagccaataaattgcaaaatagttgataatacataatttttagtttcaatccccggcaactatgccaaaaacttgttgtgaaa

SEQ ID NO: 399959 - DNA, 949 bp, Cannabis indica
ataccaataagaaattgacacatggataatgaattgacatttagcgatcaggtacctactaaagtatcagaaatataggttaggtattattatcgccaaagattaaacttaggtatttatttataaccaaatgttaaatttaacacatgtgttccacggacagagagttgttctctatctcggagtcttcaatgaacaaggagtggattctcgattctggatgcacttatcacatgtgtccaaatcaagagtcattttttaattataagtcagttgatggagatacagttctaatggataatgatcattcatgcagggtcattagaactgggaaggtggccatcaaatagtatgatggcgcaatcaaggtgctaatgaacgtatggcacatcttggaccttagacgaaacctcatatttctgggtgctcttaaggacgaaggatacagatacaagtccatgcatggaagtttgaggatcaccaaaggttctttggtagtgatgataggtgaaaagattaatggtttatatgttctccaaggagagattgtcccagctggagaagcaagtatggtgaaaggactagaatcatatatgaaattgtggcatcacagacttggacaaatcagtgaacaaggcctcaaagaattacataaacaaggtataattgaaaatttaaattcttgtgccttagcattttgtgaagcttgtgttctagggaaacaacataagttgaagttcattctagtaaggcacacgactaaaaaaatacttgagtatgcgcatgctgatctttgggggccatatagagtactgttggaatttattttaccaggatcttagatctactcacaagtatgttgttcaacaccctaaatatgaactttctaaaataataaattaaacccatataaagttaagaaaaccttacattgatgcagcggaattaa

SEQ ID NO: 399960 - DNA, 691 bp, Cannabis indica
cacttttatatagtatactttttaatctcaaactatatcaacttatccatgatgataactacttaaaaaaattgtaatttatgttatggaacgtttttagtttaatttttttaattttttatatttttatgggcaaagccaggctaggcctgctacttatactgggtataggtgcggcttgatataaattatattttgctattgtgattaattttgtctctgtgatatgattttgagtgtttttaacttgtctctgtgacatgattttgagtgttttattttagtcttgtttgtatggcatgattttgttttattttatttcattgttggtttttcattgtttttcgatggctcgccatcaaatcattgttagtggttgagagtgacaagttctctgtaaatgaagggttgttagtagtgcagttacgtatcttgcacaatagttgaatgcttaaacaacaatattgtatgaatctagtgcagcaatttctatatttttgtgtcctctaaacggtagatgaaactgaatataagtgttattaaaattaactatgatgttgtatttttttttcatctaattttattttaaatttttttgtctaaacgatctgagaattaagttgactgattatttgtactcgttttttctaatttctaatcacggtcgtgtctacaataaggagatatacta

SEQ ID NO: 399961 - DNA, 535 bp, Cannabis indica
gggtctgggttctgaggcccatgcctaagtccccaatccaggtccgtgtcctaggtcccgatttgggtccatgttcgggtttgggtcctagtcccaattttgattttgattcagtttctgggttcgggttatggtccaggtctgggttttggtcgaagtcctggtccgagtatgagtctgggtttgggtccaggttcggatccctgtatgggtctgcgttcgggtccaggtttgagttcggatcccgggtgtgggtccaagtctgggtctgggtcagggtctcggtccagatcttggtcccaagttttgatcccgatgttggtctgagtctgggttcgagtccaggttcgtatctggatccctatctaggtccgcgtatggatcttggatcaggtcctaggtctaggtctgggtccaggtttgggtccgggtcttggtcccggtctgtgtatatgaccgtgcatgggccagagttccggtctcaattcgggtttggggctagctcgagtttggttcaaggtctaggtttgggtcc

SEQ ID NO: 399962 - DNA, 794 bp, Cannabis indica
tcgtatttttccataaatcagagccttgtaatcgatcaagaacgtagaatcaagatttctgttgcaattcttgaagaaactttacacatcatccatgacgagattcaaattggagaaatatgatagaattaggggctttgcattatggaaagaaagtttgaaggaatcttagtgcaccagaaagtctccaaggttcttagagatgagaagttattggtagaaaagaaaccaaaagaaaaggcataaagggaggagatggcttactacaaaatcatcatgtacctgtcaaatagtgttcgaagaaaactcatcgcagagaagacatcaaaaggagtttgggacaagttagaagaactatatttaaaacgatcaattgctagcaagattaatttgctagaaaggttatacagttttagaatgatttttccctttctttagttaataatattgaaatttatatgagattattgtaggattgactaatataaatcacaaggttgatgaagaaagataggccatcattttgttgagatcgctcccaatcgcatatcaagaaatcaaagctgttatcaagcatagcagggacatgattgcattggaggatgttcttgtcacacttaagtcaaaggatttcaaattaaggttggagaagaaatgtaagatgaagtgtatttggcaagaggaagatcacccagaaagtaagcttgaagagtaaacaccatcactcccaataaaaaattgaaagtctacggagaaggaaacctgtaaatgttacttttgtggaagttccgaac

SEQ ID NO: 399963 - DNA, 768 bp, Cannabis indica
gagaggagagagagggaagagagaggaggagagagaggaagagaagggaagagagtaagagggtaagttttttttagtttttaactagttttttttttattttttaaaaaaataggtaaaataggaagttacattgaatcaatggaattaattgtacaattagttgagggtctaatttatatggggttttgtatgggaaaaaatgaaatttccctagtattattagccttcgttctttggtttgtaccgttcaatcacattacaaatttgcatatatgtaagtaattacaccagctaacatgtatatttaaagatactaaaccctaaataaatcacatatatatatacaagttattaaacaaaacttagcatattaggtcaaaaaaaccctaagtacaaaatgatttcctttggcaatagaagtcaccaacaacaagttctattgttctttcagctagatatctctacttaatcaacttttatatgcacaatcaacaattcatatagttccttgtcctcacctatgaatggtgtaagtgttgaaaatttattgggatcacaattgtatatataaaatatgtgttgagtcatcaaataaataagtcaaatttatgtggtttatattttggaataaaatttatgacttaaaagcatgattgtcatgattttaatatgtggatactataaagataattttaattagatgagaggccaaattaaaaataatcaaaaattattaattactgttttttcagttattaataaaca

SEQ ID NO: 399964 - DNA, 656 bp, Cannabis indica
accatggactgcgcctctttctttagctctccgaatgagttttgataaaacctcctgacacagaagaaataaaaagggggacatggggtctccttgtcgtaaacctctctgcgggattatctttttaagaggactgccattcaatagtactgaataggaaacacttgtgacacaagacatcaaaagcttcctactcctctcgtcaaaaccatttgcctcgaggactctgtcaagaaatgtccattccattttatcatatgccttatgcatatcgagttttactgccataagccctcccttacctttcttgtgtcgaatcttgtgaattatctcctgagtgagtatagatgactctccaatccacctaccaggaataaaggcggattggaaaggggagatcagatcattcatgagtggtctcaatctattagataagatttttgcaataaccttataggagaaattgcacaaacttatcggtctaaattgatccatactcatagggaattccacttttggaatgagacaaatgaaggtattgttgagtttaggattcatgactcccatagtgaagaattcctggactgaggctactatatttgctcccacgatatcccaatatttcctgaaaaagcaacctgaaaacccgtctggtc

SEQ ID NO: 399965 - DNA, 966 bp, Cannabis indica
ttttctgtttttttccctaaacaaaaatactcacttttagagcagctccaaagaaattacataatcaatatatgatgcacaatttgtctccaaggagactccaactttcactctatatttgtcgtgtgattacagtgcacaacatatatgtcgtggcgctgtagcaatgacattcacttttatatatatttatattaattttttaatttataaaattatcatttaatttatgattattattaattgtatttatgtaattaaaaatttaatttaggaaaattttataatgcacatcgttttttggtacaatgatgtacctctatctattttagtatctgaaagacgtttttagtttattttttttttcaaggtcgtgtacattaccattatttaagacttcctgtaaaaattttaaattaaaaaaaaaaattaacacgccagaaataaagttcaaactatatgttacatgcgtgattcttttatttggagaggtacattgtagaagtaccttttaatttaggaaaatttctctttttatgattaatacaacacctcatatcaattttgactccccttactaatttgtacctattaattcctttgattacatgaactttccatttgacccttttgtttttaatataattttcgctaaaatcgcgagatctcattttttggagtattctgtgtgttcgtatttttctcgaaagtttctcgatacgttctcgatgggttctcgatgtgaatgtctggaggtcagagaagatctttctcgacgggttgtcgataagttcttgaaaggttcttgactcgaatgtcccaaggtcagggaagacctttctcgaaagcttttcgataggttatcgaaaggttctccactcggatgtcccaaagttagggaagacctttctcgaaggcttttcaataggttctcgatagtttttcgaaatggcaaatgattttgta

SEQ ID NO: 399966 - DNA, 738 bp, Cannabis indica
tgtacctcctcttgttgcagtatcgccttcaatgaagatctgggagttaacggttcttgaaagtagtcgttctatgtggttcccaaaggttcgactcaacgatccccttcttcatcaaaaaattcaaaaggaggaagggcctcgtttcttccatcgattttgttttcttcacatcagaggaggaagggcctcgtttcttcttcttcacagtcactttttcagttgattttagcttaccctgctgcttagatcttgtcttagccatggcaccagctcagggagagctggaaggtcgaagagagagaaagctaattttaattttaattacaatttcctactctttgatttcttgaggtgtaagaaaagggatttttgcatgaattgtgattttggctgctgtagttgttgttagtgttgaatattattttctgaagtttagttatgttgtattgtgttgatttgagcatgatttaatggttgctagtaggtttaaccaagttttgagttttataactcaaactctgagctttaatggtgtttttcgattctgagcatgggtagttgttttgttgtttagaaatggtttattggggtataatataaaggtctggaaattttgagaaggtttggaaacgatttggttaggctttgattgttttttgggttttctggtaaaactggctaaccggtccgattacccggattttgcagcagggtatcccaaaaattcagctcgtc

SEQ ID NO: 399967 - DNA, 503 bp, Cannabis indica
acgttagttttttagtggattgctcaatatgatatcactctctacttaagtctaagtatagcatataatttatattaacctaaagaatatagtgacattatctataaaataggtatatttaaagaaaataaaataaaagtaaaaatcaaaacaaataaaataaagtggatatataaaatgtaattccttcgaaacgactgtatagatgggcttcgcattgggcctcagtggcactagcaggtcgtccgttttggagagtcagagtcatgattcattcttcatcaattatgcaatcaaaccaaccacaaacaagataatttaggctgctgcctgcattaattagggataataactccctcaattattttacatggggaccacaagaaaaataaaaaattaagagggagagggaagcctcctcctttggtttcaaatttttaataagaaaaattgccacttaagttctcaaaaatttatatttaatgtaaataaatttctaacct

SEQ ID NO: 399968 - DNA, 629 bp, Cannabis indica
catttccttgcaaacacacaaactatgaccatgaagtatatatacatatcatatataatccgaaagaaattcagacaaacagaagagaatgtatgggtttgtgactttttttgtgcagtgatagtgagcccattttacttcacatttacttacttcattgtatatttgtctttgttcgcaatattatgtggaaaatccggtttagtttagtggaaagaatgaggctttactaataggagcacttgttacgattgcatgatatcaatcttgattagcattaataagctatatctatttgtatatggtattttctccctttgtcttctctctttaattacaatgtccaactttatgattacatgacttttgagcacaataatgtgtagccactttggtatagctcaagtggttgggtgtgtgagtgtgtgagagatgtatagcgggatgagttgaaattcccattataacatttgaataacaatgtgtatattataggtttatttacacaattatgacatttttaacaagtttactttcataacatatatcgtttataaaataatttacaattaattaccgaatttttaagcaaaaaccactagaactaaaataaaactaatatttacgtg

SEQ ID NO: 399969 - DNA, 998 bp, Cannabis indica
actaagtaaaactaaaaaaataaaaaaaaaaaaaaaaaattaataaaaatcgttgggccagttgatggtcaggccagcctggtacatcttaacatattttcgaaattactatgttctttgcaaaacataacaaattatatctactaagtacaaaactcaaaactctccattatatgattttgataattatatgggaaatgacatttcaaatttcattctacacattttgacacatttttgaaaagaaaatgataaaagataccattagtacttagcattttcttacgtgtcaatatcgctatcagtccaactaattatcaagtcccatataatttaatataataatttttaagaagtattgctagtcaattacaagactacatgtctagaggtgctatgcctaacaacaatgctgttttgaaaagttcttaatattattagtaaatgtgtctacttttgtaaatcttaccgttaaaaattgagtatagctaatcatggccaactttcgaatagtgtcaccagaaacagtggatccaatagtgtaagcataatcattggcaccaatctcaccaacccaaaacaatgcatcatgaaaatcaccaactttgcaattcacatcctgagctttacacccaacattttcttccaaatacttatcgaaccattgaagttgagtttgaatagactgaagagtaatatcaagagtaagattgttcttaacaaagaactcatggtctatagcagtggaaccagccacagcaaagttgaccccattagctgaatttcccttaacatatctataaggaggcaagtaaggcaatgaaagtgattctgccacaaaatcaatcaccaaccgtccatctgagtatcgatttgttggatggtgaaaaaaggtcattccatatggagggtcggagccatgattaaagccacttggtccagaaactgacttggtgttgcctgtgtctgtaaaagagtcaccaaaggcatagattttc

SEQ ID NO: 399970 - DNA, 841 bp, Cannabis indica
aaataattaataaaatgtgtttagagtaataaataaaattctacaaatgtagagcatgaatagtaaattttaaagaaactttaatataaagaaggagtttagaacatctgttatagcgtgtttttggtcttagagattttatatatcaatggaagataatcaagatatattacaaatcaattgtaaaataatacaaggactaaaagattgattacatacatgttacaacacgcgcactatgtatatgtgtttatatatatatatatatatatatatatgaaagggaaaagagatgaataaattacactatattatataatatatatataatatgaaaaataaaaagaacactcactcacagccttgattatagaatagtggggatcactatgattggaacaaaatattacacctttgtccaaaatcttatttctcctatctctaaggactaagggaactctcatggaaatagctttgaaaattatcaagctttagcgttttctagcaaagtgttatttcgatagaaaacttctcatctcaatatgagcaccttagaccttattaattatatagtatttaggatatcaccattcgaaattcaaactcataacccccatagatgttatggagcaaatgtaactcacacatcataactcctatatcattaagaattttaaattaacatgtgtaacacctcttacacacaataattagaagaaaaattttctaatcatctgaaaaaaaatatactaaataaatattttgatcattgttatcaaatattaatatttaattatattaaattattactataattgtaacaccctaactatcttaggcg

SEQ ID NO: 399971 - DNA, 927 bp, Cannabis indica
gcaaaaattgggataaaattttctccctaagtctgtacaggacttccaaagttgcgtgtagactttatccgagctgattctgcttttggatggggacacgtgtcgaggcgaccgtccgagacttgatgtgaggctaactgggcgtccttttagttttcggctaataaatgctctgagacttaatatttcgaaatccgattttctctctccacggctgacggctgcacttgattattttttatttcccatattcgtttttaaggagggaagctgaggtgtttgaggttcctttgagatggttaccttttttcgtgacttacctataaataccaagcagcattggcacatacactcattttcgtcacctttcattgctaagtagacttcagagcgaaaagagagattcttaacttcaaagttgccgaagtgctcttatatagactacttgttgggttgacgttgctcgcacacagacatctgatctttgagtaagtctctggtttcctttatgcttatgtttgcatgtttatatgtcagctacatcctctactttgctgtagaaaaatgtttaggaaaccctaggcctagaaacctttgcgattctcctttatcatgttttcgtgggtttttacagtcataacatttgtttttgatctatgtaacatctatcttctatcttgcttactctaagcttcatgaacttttttgccctaactcaagaaaattttaacttcttgagttctgacttttcttcaaacataatcgttctttaatctgttgagtactcctggttagcatatttgcttgtttatcgttcgatattcttaccaaacactcatcttgtgcgttgtcttttgtagatgaactcaggtgagtcttggcacaacggcatcggatcgaccaggacctgcttcaacttctgcatga

SEQ ID NO: 399972 - DNA, 955 bp, Cannabis indica
tcttattcagcagaacatgcacactcagaattatatggtgcagaggagcttttttcatgagaatcaagtgcaacaattgaatttgctgatcataagaatgaatgtcggagttaaagagctcaattacttggcaatgccgccccgcttcaatccttatgaccagccacctccaccaaaccccttctgatggggctcaggtaagtctctctcaactgcaattttattttctcacattggggacaatgtgtatctttagtttgggaggggagagatttaatttttttcagtttttcattttttttctagttagtctttgttattgttagtgtcatgtgttgatatctgagctggaatattgattgaactactgttgtttacttgtgcaatggattggaattttaaccatgtgcttgagtcatgaactctttgaatggaattggatgtcgtgtaaagagtttgttcatttagatgtaaagcattgacttttgatgtgtatcacttttattctacttggattgtggaatgtttgcttgacatggaatagaacttgtgtgacatactctcttgaagaaaaaccttgatgatttttgcttggaaaatgatttaggaaaattttctttggatcgattgagcctttcgagatacctagaaagttttgtccttagtttacccaaagttgaggcttaacctgtttcataattctcaccacttaactgagcttaatttgttatctttaactactttcattctcaatgtaccttattatgccctaagcttttaatcaagtttggggggaatgaagtgttgtaagtgggaaatattttgaaagtaagagattgaaaaagaaatttacgtgaaatgcctctactataaaaaagaaaaaaaaaacacaaagtaataaatgtgataaattcttcttgagaaaaaaaaaattgaacaatgaggtgggcacata

SEQ ID NO: 399973 - DNA, 505 bp, Cannabis indica
aaaaataatagactatacataaacacttaagaaaagaagttaaatccattatataagtttgaaattatggtatttttataaaaagaatgggccacaaattatgtaagcttaaatagaaataaggggtaagttgaaaaataccaattttattaatcaattgattaaatttacctctaattttatatttaattgaaacatacctctttttatatgtattgtacccaaaatacccttacataagagagtcacatgaagagtatcttgaagtgataggggtaaatttggtacaatgtttgaaaaaagaggtaaaaatgatagacttttaaaaagtgggtaaaaataaaagagaacaatataaaaagggtatagagtgtaatttcctctagatagaaatgaacttggatgaatttgaagaatatccaatttttttatacattaactaaatttacattcaaatataccttttttttttaagtagtaatttgcggcaaaaatacctaagttt

SEQ ID NO: 399974 - DNA, 1115 bp, Cannabis indica
gcattttagtcatttcctttggtcagagttaagtgggagcctaggtttgtgacacctagcaccctatttgttcagcaaggattaacttagtcaatcctttactcattttagaaaaaacataaggaaaatacaaaaaaaatcaagaagctttctcttcctttctttctctcttcgaaccagctcaggacaggggattagcagctggtttttgagtgtttcagcaagggattcaagaagaaatcaagcaaaggtaagctctagcaactccttgccctagttcttgaatttaactttaggttaagtttgtgattttgtgatttagtggctgttagggttaggttgagttatgattcgaattctaggcttaatttgagttggtattagcctattgtagctggttttgattatttgattgggtgttgtgcaactttgagctttgagttcaaagctttgagctttaatggcaacttgagttgtaatggttttttctatgaaatactggctggaatatattgtgtatacccttattaggtactctggaaggtttcattgcatttggtggagaattgagcaacaaatgaaagactttgggaaacctggtgcaaaccggctagctggtttgccaagccacaaaaaccggctagccggttttggcagggttcctcgggcctttcattttctcaatttttgtctttacggtgcctcagttgggtgttttccaatttccagagttagaataacccattgagagtataacagaacctagggttttggttttgggtttcccgggattagggttttagtcatgtaacttactcggtttcaaaatgtgattagggcatcaatctatcatgagatttccgttcaggtcggccagcactcttgaattcggaaagaaggtaagaactgaatataatgtgtggtatgagtatttgaatgtatgtatatgtgtgtgtatatgcatgcttagattgttatttgcactaccaacacttgtttggttatgatacaaagtgcattggtatagtgagtgttgtttgtgagtacaatacattgataccaacacgagtacgagaaagtgctaaggtgtgcggtatatcagtcagtggtactca

SEQ ID NO: 399975 - DNA, 633 bp, Cannabis indica
tcaatagatgaaggctttttgatagtttgcttggctgcgccatcatttacgactagacgacgcttttttaccgaggtgtgccttgcaatagtcgcaagaaactccacaatagagtttacttcagcagttggaattggacagcttgagggcagtgtaatgccctaattattaggtacgctacccaagatacttaagagaaccctaatcccctaaacgggattactaataaaattagcacgaaaattaaactttaataacaaatggaatgaaaataaacttgtaataatttaaactttacaaactaaaagttacataagtcaggatcccaaaaatattttcaaaacactattacaagtcctcttccattggctgacctaaacagcaaaatagagtcacaaaatacatcactggtagaccccaacccgcttggtctagtgtggccccaacatgtacatacgccgtccaactcccatactcacggctgatcagaaacagctttaccctttcctgcacagtagagcacccgtgagccaagcccagcaagacagtataaatcataacacatatattatgcttattcacatatatgtctgtatagcacagacctgatcactatatcaacatgcccattta

SEQ ID NO: 399976 - DNA, 992 bp, Cannabis indica
ttttactgattttactaacatattatgcgatgtaaacctccatgtttcttctgatctgatttgggaacatctcattcaccaatcgttgatatgttgccctagcattcttcaacccaaatggcatgaccttgtggcagtaaagtcccatgttggttacgaagctcgtatgttcttgatctgggacatgcatttttatctggttatatccggaatatgcatccatgaatgacataagctcgtgcccatcagttacatccaccaactagtcaatcttgggtagtggaaaacaatcctttgggcacgtcttattcaaatcagagaattcaatacaagttctccaagttctgttggattttgggacaagaacaggattggctatccacgaaggataaaactcctcgcgtataaattcattggccaacaacgtatccacttcatgtttgagtgccccttgtctctcggaatccaagggtctcctcttctgtctctttgctgggtagtttggatcgacatttaaatgatggcagataatattagggtcaatccctatcatatccccatgactccaggcgaactgatcctggttcgccctcaagaaagttattagctgctattttcattgttcgtccacattcttcccaatgtagacacactttgtgggatttcctgggtccaaaataacttcttccaattaatcaattggtttcaataagtttctttcatcttgaattcgaggatcaaaatcttcattcttcttctcactttcttctgccaagactaccattaactagtgactggctttctagtgttgcagctctatgcaatagcaatcgcgagccatcatccgatcacctcgaactactcctatacccaccggtgtctgaaacttcagggataagtgcttgatcaaactaattgcccctagtccgatcaatgatgggcgacctagcaatatattgtaagttgttttggaatttattttaccaggatct

SEQ ID NO: 399977 - DNA, 1037 bp, Cannabis indica
attatttttaatctgtattttttaaaagtttaaatttccactcttggctctagtagtttccggtttagtaggattagtgtatgattggtcgttgtgcgaggcgttcctattattagagcattacaaagacgggcctttaagcgagcaattgttcaatcttaattgaatttaactagtaaacacccatttgcaccctatgaccaattttcctgaaggtaaattaaccaagacccaagtaccatttgcaactaaagcattcatttcttctatcattatagcaagccaaccaggatgagacattgcttcatgaacagttttaagaatagtgataaaatcaagagaagcaagaaaagatcaagaagaagaggatatatgattataagaaacagaagatgaaataggaaagtacattggcatttacctttacgtagtgcaatgggaagataatctttgagttctggatctgatgatgaagatgcaggtgcgggacatgaaacgggaggtggaggaggtggacgcctggtgtatactataggaggcctaggaagtggtggaggtggtggaggtataggcattgtgagagctatgaccgaggcaggtgaaggaacaagagactcgttagaacattgatcaggcgcagaggatgtcatagaatataccaacaaatcatcatcctccccttgagaagtaggagcgggtgaagacaataaataaggtgtattttctacaaaagtaacatcgatagaaacaagatatttgttaagactgggacaataatacctataccctttctaaagacgagaataactaagaaatacacacttcaatcacttgggatctaatttacttatccgtggacgaacatcatgaacaaagtaagtgccataaaaaaattcttggctcaataggaaatcatggcttgttgagaaaaataaatttgtaagggatttctgttggattaaaatcctattgtgggcacatatgtataatgtatatgctattataaagtgtgataaaaaattaagtgacaattatgt

SEQ ID NO: 399978 - DNA, 675 bp, Cannabis indica
cacatttttggccttcgaccggactttggtagaagatcaggagatctcccttctttcctcgcacaagttctctttttgatgggcttccgtcagtaaccgtcgtgcatatttttttcttcagctctcaatgaaagcaccaaaatatttaatgagttttttcagcaacaaaatatttttagttgatcttaatatctattcaattcaatatcacctagttgatcttagatcaaatgatctcaatcctgagatggttaggttctagttcagttgtattatttatgtttgtcaatctgttcgttaaagtccaccaatggatcttctcgtgacatatagattaaggacatggtagttcaattgagtgggagcgctaatcatagatacagaatatatagcttctatctggaaatcaaagtgaaatgataatttccttcgagctcgacttaatacaatggttgagtactcatttcagtaattatgttaggttactgaattatcattaatcgataactaagtgttttaaggataaaatacaatgaagggtgtaacgttaaatttgtccctactcaatgtagatcatctatagaggatcattgattattaggattataacaatagataatttcataacatatctatgtcgtggaacatatagagcactctatataattaagagtg

SEQ ID NO: 399979 - DNA, 814 bp, Cannabis indica
gaaaaaacattgagaaactaaaactagatttacaaaaataaaatttagtctcatcagttgttatctctaattgataacaattttaatgtttgaataagatgaattttcattcaaaaacaaataaataaaataaaatcagaatttgaataaattaataataaaaatgaatgaatttacaatatgtataaattaatcaaaaataatattttactatgttgtgtattaaattgatcagaaaaaattataattattttatttacctaagtattagaaaaggtaatcaaattttttctttttttttttttttggaaaaaaagcataatcaaaattaatgttttaattacactaaaaaaaaaaacaaatgttttaatttagcttaattgctaatattgttaaaaaaaaaaatgtaattatatttaatttataaattttgtgtggaggcatattttttaaattaataaaagtaaaataaattaggaaatatatattctttctaaaaataggaaaattttactcttttaaatgccccactaatttctatcattacaaaatttaataaataaacctttaaagtaaacatgacaagtagaagttgaattttggattttggggaaaaaaatcacctgtcccaattttcctatcccaaccctgtccttccaacaaataactgccacatgtctatctgttttctcattcatttaattcactaacatttacactacttctatttttttcggtcactttactttacccacaattacctcatgtaattaaatactcacttcttttatatatataggtggcgtttggtaac

SEQ ID NO: 399980 - DNA, 550 bp, Cannabis indica
gaatattcactatattaaaaaatatcaattaaaatttaaaggataaaacttatctatacaagtgccattaaaagtggtaaaaaaactatgttcaccaacaataagtgtaaacaaaacatataacatcacatgatacactatattaccaacaacaaaacaaaagaatttcaaaaaaaaaaaataatgaaataataataataaaaaaaagtgctatactcgaaattcagctacgcttcagaagttgacacatgttcaatgtatggaatatgaatcaattctaaatgatataacgatatcattaaatacatattgaataacttgttattatttaaaggataaatatataatattcaaaactcgttggctttatggtcaaaaacgagacaagaataataactattgatatgagattaacgagacatatgcatgcctcggaatatacaaacaagaaaggaatatttatccacctgagcagaatgaatgtatcaacataaactgtctcgcattatatatagcgagaagatcatctcgcattacaaaagccacaaag

SEQ ID NO: 399981 - DNA, 508 bp, Cannabis indica
caaaaattagtgacacttgaccaccatttgctaggatctgttggcttggctatattcctctcagcttggacatcttgctcatattcctcctcatgaaactcaaaatcttgttcatcattggcctgttgtgtcccatttctgtcttggtgttgtgatgttgttgggtcaataacattgggttggtttactggtatgtcaacacttgggtgaaatggattgggatggggtggtattgggtctaatgtagtgggctgaggtggtgttgggtcaattgtagtgggctgaggtggtattgggtcaattgtagtgggctgagtggtattgggtcaatggtagtgggctgatgtggtgttgggtcaaatgtagttggcaaagctggtgttgtgtcaaatggttgggcctgatgtggtgttgggtcaaatgcagtgggaaagtctggtgttgtgtcaaatgcacatggaaagtctggtgttgtgtcaaatctggtaggctgaggtggtgttggttc

SEQ ID NO: 399982 - DNA, 811 bp, Cannabis indica
aaaaatagggttaattattaaaataaaaagttaggccttatggtcattacaaataatatctgcatgggatagttagcacaacaaccattccagttaaattttgggcaaaaacccacttagctacattgtgagccgcagaattactaagtcgataaaggcaaaattgcaactcaacacttgtctagaaaatctattacaattcaaaacataattatcaatgctccagacaaaaacttttctttgcaaagtcttgataactatctcggaatcgctctctataatcacaaaattgtgcgcttcctcttcagtgctgtcttaagtgccagatggtaagctacaacttcaccaataagggcatcagagaaaatgagcttgttggaagcaacccacaaaacaattcctaagtgatcccgagccagagccacaacactcatcgacgaacttcccacttaacatcgcagttgattttgattcggtcctccagcggaggggagcaactctagtagtaggggaagtaaaaagttaggatccataatctgcataatatcgaatgatagagttaatataatgtatgatgctgctaaaattattgttgtgcatattgtggacaatgtcccacatggaataaatggtagagaattgagccatatataagaacatgggctactcaactcattgctaattggttttgagatggaaccccatgattctcaacatggtatcagagccatatcccttgcgggcaagtgatcatattcgatctgcacctatacagatagtgaccatgtccactctaatacggttcaagatt

SEQ ID NO: 399983 - DNA, 551 bp, Cannabis indica
ttttatagattttgtgctctttcatgtgataggttgtagttgtggatatgtgtcaatggtgtctgtattttttacagagttatcgctgacatatcgataggatatcaataggacgtcgatagatttgggtgtctgtttgaccattagaattgtatgtgttgttattgtatgtcgataggatatcgtatgtgtgtcgtcgataggatgtcgatatttgttaagtttattttttgccctaaattgtcgacaacttgtcgacagtatgtcgatatgttgtcaacaatgttgtgttgttactttaagtttgttactttcgactgaatatctacaggatgtagatattatgtcgacatggcttcgtaattgatgactgtttgatattatcgacaggacgtcaatattatgtcgacatggccttgtaattgatgactgtttgatattatcgactgaatatcgacaggatgtcgatattatgtcgacttgtttttgtaattgttgactgtttgataatgtccatgaaatatcgacatgatctcgatattgcatagttt

SEQ ID NO: 399984 - DNA, 1614 bp, Cannabis indica
aaataagtcaatagagtattaaattaattggaatctttaatatagaattactaagtacagtttactatacactatacttataatgtgtataattttgattcggatcacatatgtggatagacatgtagtaaaggtactatgtataattagattatgcatgactgggccaatatgtaataaacatctttcattaatgtgttctttaccatgaaagagttattcatattgatcatcattagtagatcaacgtgaatcctgagtatacatgaactcctatttgtgttcattaagttctttaattcactcgttaaagtttctcagagaagatgattcttacaacttctattttgggagcttaataacttgagtagcttggaacatgttatacaatagtataattcaagctttcctaacaaatctaatattagttcctatatagtgttaattctaagagtgctaacatttagatccaaatctataataagttatagattaactgatcactttgaattaatggtacataaggaatgaagagataattagcagggtaaaatgatattttgaccaactctaattatgaactaataattagagagcgaactgactatattgattatatcaatggactacaattaaaaattctgtaaatataattctatattatcaaagagtgcaattttatatttatagtggaatataatggatttaacaaaataagattatgctattgatgagattgataataatcaagtgtttattagagcttccaaatatatgtccatggtccctgagtcacttctataccatattgtacaggggaatgttttatttgatgaatgaattttgagtaagaattaatttatatcgagaataaattcttaaggaaaaatagtaatttgtgaaattatttttttgattaattatggcaattatgaattgtataattagtagtatttaactatgtagttttattggataaaaatatattaattatttatatataatattattcttaaataatattaaagagagaaatatattattttagagaaaataatatttattttaatccttgtgaaataagagattaatgagaattaattaattattacttattggtaaaataaataataaatcttatgtatagaaaaattgataaataaattttggatcttaaaatatggctcacacgtttaggctcaatccacatgtttagggtgacatataaagacaaatgattaatttagtttaattattttattggttaaaacaatttaaattaaattaaattaactaactatcttttaattattaattaaatgaattactggataattatttaattaaaaagataataattaaaatgaaagatttaactaatatttgttattcagttattagatatttatatttgaatttgaattctaattcgaatcaaattagatattttattttattttaaataaaagattaaaagattttatttataatactatataacaatagaaaataacctgagatatacggtaacaaagtgagagaaaaaaattggtttttacaactccctattccctctctcgcatgcctactctctctctctcttctctctctctc

SEQ ID NO: 399985 - DNA, 739 bp, Cannabis indica
agttggattgtttggaaactccaactgaacattttgagaactgcatttcatggatctgaaaattgaagtcaggacattagttttatgcaaattaaattagatttcttgttgaattttaattttgtagtaatttttctacactttttttcatgaattcgaaacagaccatgttttgattgattctggtcgttttctcgggtgaagtcgcaggaattaatagtggttctctttctggttgaatttttgtttcggttgcgttgggttgctgcgtggttgcccaagaagcatggatcctgagttgaaggtgtgtgtaagtggtatttgtgtaattttttttatttgggttgtatatttatttatttggccagctgaagtatttatagggttttttttttaataaatatggggaaaataatggactttatatggtaggaataaataatacaaaaacgatatggaaataaaaaacaaataataattaaaatatggaaaattaaacaaaagaacataaataaagatggtaaaatttataattaactatcgctaaaaaagtcgttagaaaagtcattgaaaaagtcatcggtgtcagaaaagtcaccggaaaagttactgataccgaaaaatttgctagaaaaatcagcaaagttgtcatcgtcgcaaaaaagtcaccgaacttaaatgtctcatatataaattaaaataaaactggttctatgaaataatgaataaaaataaataa

SEQ ID NO: 399986 - DNA, 727 bp, Cannabis indica
tttttgctccctgaactttgatatgtaccaaatcatgcttcttgaacttttttggctattaaaaatttaccctgaactattgagattgttggatttaaggacttttgttccaatttcattcaattttaccaattctagttcattgtccatgtactaaactatgttccctagaattttgattatctatcaaattatatctcttgaactttgacatgtgtcaaatcatgacccctgaattttcatccatattacaacttttgttactaaaattagacaaaaagtctttaaaatccaacaatttcaataatttcagggtagaaattttaatggtcttcaaagtttaggggcataaaattggtacagatgggataaaaattttaattagcccatatttaatgatttttttcttagaaaaaatagaattttttatttgactttgactaattaactaatgtcattattttagtaactgtaacatacaatacattcacgtgatttgtttgtgaaacactaagggaaatttgaaaaaatatgcataaaataccttaaaaatttttccctaatctaatacattttaaaatttaaaaaatatgaccactttacaataaacccaaaaatacccctctcattttcaaacctcaactctctctcttcctctatctctctcggttgttctctcaccatctcaccctcaccaacccttcctttttttttttttttcgttttt

SEQ ID NO: 399987 - DNA, 1205 bp, Cannabis indica
tggcttgattttctggcttagtggtggagtataatttgatgatttgtagataagatttttgtgtgcttttcatgtgtgaattcaaggtttaccataatattttgctgatgagttttaggttaaaaacatgctagaagtttaagttcttgtgtatgaatttttaatgagttatgctcaagtattaagctttattttaaaatgttaattgaatcttaattaaggtgtttgtatgctaaattttgagccttagtgtatatttcaaccctctgtataattatggataactcaattttatggtttgagagtttgattgggttttaggcttgaaatggtgtgttttagccatgtttttcgttgctagttttagatttttttctgggtttggaacctaggggtcgcggctcgcctcaagtttgtgacctgggattcaaacccaggtgtcgcggccccatgtggggagtgtcgcggcccgcccttcgtttttgggcagattcgaatgcgttattcgaatcctcatcactttgtgatccggactctattttaggagttctatatattgttagaaagctcattctgagctctatgtgaagatctgtgttttgaatgccaagtttatattatgtgaaagtggaattagggattaaccctatatttataaatcctagaatttatgagtaggattatcgacacttggtcaggagcacccagagatttggaatctccacaattgcgggacatcaggtaggacagtagttgcacatagagttatgcgcagtggcgcttatattggaaatgatatatgtgattaaatggaaatgttattaccctaacatgagcggtataatggcctagggttattaccctagtgaattattgttatgtaattgttatgccatgagattgcaatgtatgtaaatattcaaggattgtgcgttcaaggcataatcaggttggactcgataaccataaccgagatgaactattctaaggccttattgtaaatagacatgtgagcgtaacacgtagatctatgccatatagacataaataggcatgtgagcgcaacatgcatgtctgtgtcatacaagaaaaatgtgaaatgacattattacttatatgatatattaagtatgattatttgataatttattactatcttgtctgggctggggcgtcaccggtggcgtctactgtgcaggaaaggg

SEQ ID NO: 399988 - DNA, 619 bp, Cannabis indica
agttacttttattctacgtatttcttgaaggtcccatcttttctttacgtaatgaccttcaagggttcagagaggactttgtctttctcgatttttacccttgtttccttttcttcgcttatttgtaatgtcaccatctgtgggattcttgcacccgacctttgtcaaggaaaatcttctaaggctttcttgttgataaccatccggagggggcctctttccagcggttaggggacccccattcccttttttgacttagggttttgtttggggcctgactgttggaattttaaatctttttcagaaccaaaatgtccgcatccggttccaagtcttcacagagaggagggaaacgcctggccaccctggaggaggtgatgaagggtcccgtggcccaggaagggtataagccccgtgccaaggggtgggaagcggccgagcttcactctacccttacttgcccccaccagctggagcacattgtggtggtggcaggcatcaagcccgcgacttccgggacttaccaccgtccgccccgggacgcggagacgcctaatcacaattacggaggctttggagcttggagccaaacgcacttgatgactggggccatgcttcc

SEQ ID NO: 399989 - DNA, 675 bp, Cannabis indica
accatagtagcagcagtaagtttcagaattaattgattttacatcttgttagattgcttattagtattattttattagtatgatagtaaatcaataagtattatttgtcaaactacattttacgttattgtagttgacctgcatttactttttggggacaatcactattctattttgttattatttttcaataaaagagaaaagcacagtcgctcatgaaggctttatattcaaatccctacttgttggttatgtaaatattgttataacagcttttgaaagattgagttattttcgtatttttcaaactgacagttcttggcactcttttttctctctcctctttttaattatttaattatttatttaaacgataaaatgttatttcttaacctaaatatcttccaacataacattcaagtttttattttttagaagcattggcaaacaaagtatggatgtagaaaaatgtgatttaatgattaaatgataaaattaatgaataataaagtataaggtggagaaattatttttttctatttttccttattagtgtgtcattctgtatttaacaaagagtgccaataaaattaattctatttgtagtgctgtggaggacttaaacaattctgaggatgatctcaaaaagaatggtcctattattactacattaac

SEQ ID NO: 399990 - DNA, 765 bp, Cannabis indica
atctggctgttcgtcctgattttttaaggggtgtctcattttttctgggttattttttcccggaccttttcctatctcctggttcgtgagccacgaggtctaccccgtggtcttctctccaagttcaggttgattttgagcatccgtcccttgtgccgccctggctgaggctgcctcacgttctaactcagcgtttcgacgttgggcttcttccaaacggcgtctcagacgacgactttccgtttcataagttctttctccaacagatttgggcacctccacaattgtgtacttcatccctcgatccgaggttttgaccattcccacgccgagttctcctcaagcgtgttgtccgtgtactaggaccaacgttgggtcgagttctccgggaacgcgtggtccgtgcattggggccaccctcaggttgagccctcctggaacgggtgttccttctggactgcgggttggtagatcttttgaagcccataggctctttcccagaacgatgattggttttctcatgtggggtgttaacattttatgaattttaagccatgaaggagatgatttttcttcgaaagaagggaaggtttatctgagcttttttacagagactctcaatgaaagcaccaaactgttaacgcagatttttgttaactaaatttaagcctcacagtgatgatttcacacagaacaaataaaagctatagaaaagtaaagaatatgaacacagagtttttttttacgtggttttgtagttaaaat

SEQ ID NO: 399991 - DNA, 781 bp, Cannabis indica
ggaggactctctggaaggacatttgcgatttgtactcggatgagaattggttccgaatgggggattttaatgacatattggccaaagaagaaagagttgggcatagagtaaggtcatatccggactctgattttctgaattgtgtgcgattttgtaaacttgaagatgtaaaggctagtgggaactttttcacgtggactcacaagcagtctggatctgatagaatattctccaagattgataggattatggctaatcaatcttggattaatagatatgagtttgctgaagcagtatttttgaatgacggattgttcgatcattctccagctattttagctctacaccctgcaatgataggggaaagaagctttttatttaggatgtggaaatctcatcctaaatatgatgttcaactcaaagaagtttggaacttgaaatgtatggagagcaagatgttccaggttgtcaccaaaatgaaactgttcaagagtaaaattcgaattctgaacaaggaaggattctgcaacttattgcagcaggtagatgaagctaaatctgatttggaggctatccaaaaccagattcaacttcatcctcttgatcccctacttcatgtccaggagaaagaatgtcgagaaaagcttgtgagggttcaaaaggattataattctttcctttcgcaaaaggcaaagatgttgggttttgtgccctaaataaaacccatttcaatataatcagatttacttattaataaagatcagaaataacattttatgtt

SEQ ID NO: 399992 - DNA, 654 bp, Cannabis indica
tgcattgccgcagtatgtacaattattgacaagccaacaattcactgttcctccactttcgcttttcccttacttacacatggtatcaaactgatgaactaacaaactcagtaagatatacagaaactatatattaattaagacatgtaggagctccaatttttaggatataagttgaaatatatagactgaaaataatgtagatatctttgaatggtgaaattataaaattgcccaaaaatctcgtctttagcctatagccgcggctacataaagcttagtcgcgaccataggaaaattggaaagttcatgctctctggctggcctcctagtcacgaccataaaaaatggtggtcgcgactactgaagcaaatttgacagcgtcaacatctttcagtaaaatatgcataactttcacatatgaactctaaatgagttgattcaagatgcattagaaagaagaaaaagaaatataaagcttctatgttttgaatttttccaaaatctgaacacaacatagtcaaatttaggcttgaagttttagctttaatttcttgtaaaattttctctattctatagattgttacttttcgaaatttgatcaattaatacatttcaagtgtgaaacctgaaaccaaagaaaacaagtgtaat

SEQ ID NO: 399993 - DNA, 769 bp, Cannabis indica
ctgaaccttctccaaatatttttttcattcaacatttcacctggtatttgcctagaacttgattcacaatcaattgtgagtaactatagcacataagattcttgacttttaaaacttcagctattttcaaacaagctatcaaggcttcatattctgcctcgttgttcaaggtgtcaaattggaatcttagggcatagtgaaattaaagttatatagcgagattaatatcacccctgcactcgagccattttcattaaatgctccatccacgtacaacttccacgtttctacgtctcgctgggcaagtggattttcatatggaattatcccctctattagaaatcggcaaaagccgggcccttaatggatgtacttgggtgataagttatatggaactgccctagttcaatataccattttatcaaccttccagaattgtctggttttgacaaaacttgtcttagtggttgatcggttaacacctttatggggtgtgcttggaactaaggccttagttgttgagatgcatggattaggcataaggcaagtttttcaagagggagatatctcgactctgctcctagtaaccttttacttacatagtaaactagttgctggtgccttccctcttctcgctctaatactgcacaaatcgcattctctaagacagccaagtagaggagtaaagtctctctagttactggtttagccaaaactggaggtgttgatagatgtttctttatgtttttgaaggcttcctcgcactcgt

SEQ ID NO: 399994 - DNA, 704 bp, Cannabis indica
ctattgtaatgggctttagcttcctaatgaaatcataatcacaccacatctcatttgtaagagcttattacaagttttcatttcatttcataaatcaaaggttatccaatcatgtgtagaaatagaatgatgagatttatttgggtatggtggaaaaaaggatatggttgagaacttagcatatatagtgtgaatttgttctttaataatatgtacatacaatggttatataatggcacacacataagttttttcttttttacttggctcaagttttggccttagtaacatggtagagacttatatttcttcaaggctattaggacatgttttcttatgtaatagataaaaaaatatgaaacggatgactccaaaatttgaaagagaaaaagaaagattgtcattattttaagaatatattgttgtgttgaaactttaattctgtgtttaaaccttaatttatttacggttgaaatatgtgatttgcttgaacttgattcaaaatttttgtattagtattaggtgtgctcaattttgatgttcattgttttgggatattattaggacctttggtatattgttggtagcaatgaacatcaaaattgttttgggatatttgtaattttccattacctacatttgtgcttcattttataagcgacgcaatatgtaaaaaaaaatgtattttcgcaatggatatggca

SEQ ID NO: 399995 - DNA, 575 bp, Cannabis indica
tgcagggtcacaacaataccctagatcatgatcaggacaaattccgcactgcggtaaatctcgcgttcgaagaacaaagacgtatgtttaccgagtggagggatagagagatggaggcattaagggctcaccatgaagagattgaaaatcgtagtcggcaggctaccgtgctgatacggaaagcctaccaaactgtagatcagcaacctccaaatgtcattcccctgggtgagacggacgaagatccagcaatgaatacttctcagactacaaatggtcagccgcccaatccccgatcacgagttccactcgtgggcctagcggtaggcgggcagaccttgtctagtaattcatcaggagaagtcatacctgatggttctaaccagatcaatggtaccagtccactcatcaaccaagcgaatcaatcgctgaggcagccaggcacttctgtattcgaaaggttggggacgacccatgacctaaggaatgatctgaacagaaggaggggagtagacgatcagaatgttacgacaatcctgcagcccggaacccgtactcaaattctcgctcagaaa

SEQ ID NO: 399996 - DNA, 462 bp, Cannabis indica
gagaaaataaaggtcccgagcaagttttcaacactctaatgatagatcctcagctagcctcataaatggttaagaccaaaaattaagttttgataggaaaattacacaacttaacacttcaattagatttgtgggaaaggatcagaaagacataattgaaagttccagagctaattaaaattcaggatgaggtaatggcctgtcggcctaaggactttttcaatcataaataacgaaatgttactttttaaagctcgggtttgtgttccagattatggtgagcttagaaaggaatacttgatgaagctcacactacgccttattcgttacaccctgggaccaccaagaaatattaggatttgaaaaacctactatcgatggtgtgatatgaagaaagatgtggtgttggaaatttattttactaggatcttagatctactcactaagtatgttgtttaaaca

SEQ ID NO: 399997 - DNA, 656 bp, Cannabis indica
tcgtgtctgacccgttttgccaggcctagactattccattttgaaatgaaaaaaagatcattccaattcaagatttgaaaaaaaaaaattaataattcttttatcaattattgtatgcattttaaatattattctattccatttctatttttattctcattcctatttttatattttcattcatcccaaccaactaaacaccaataaaaatctgacatcaaactaataagttataataataaccttaacaaagaccaaaatgaatgaaatgcatatcattgaattgaatattcattctctctctctgatttttttaatattaaatattcaaaagttgggaaagcaatagtaaacggtcaattgaatttggtacaattgtaaatgataataaatatatttcgtcttcttttccaaatattaaccagatcaataatgttattgactcattctggttgttcatccgattcaatccgcacttttttggtcaaacaacatccaatctgcactaagtgcggatttcattttttggatccaatccaatccgcacaatagctcaaatccaatccaatccgcaaaagtgcggattggatcggttactttggattggttactttttaatattaaattatttattatttatgaaaaaaaatattttt

SEQ ID NO: 399998 - DNA, 693 bp, Cannabis indica
  modified_base (670)..(670): a, c, t, g, unknown or other
tttttttttttttggtttatttggttattgaatgttcgatgttattgttctataataaggatgttttagttttttcattaatttttttgtttaatatgttaattgaatgaagggctttgcatgatctgaatagtgttcatattctttatttagtaatgccatgaaattaacggacataacagttttaaagtatttaatttattataataacttgttaagaaccattaattaatcttctcttgcatgtcctttaatttcttattctttattgctatatttaattaaagacaatatcgtattaatagttattaataagaccctttgactttttaaacaagcactaatttaattaaattataaaataaaattaattcatgttttatttgatgattaaattagttaaaaaaaaatccatataagaaaaaaaattccataaaaaagttaagatttaggtaatttgttttaattgttatattatttataataatataatatatagattaaatatgtgtaataaactaataatatgtaacatatcacaatgtatattagttgtaactttttgtaacatttgggagttacttgttactatgagtaacctccaccatcatcaccacatcttaatttgaaattcttaatgcaataggagttatagtgtgtaggagttacntttgagtccataacatctatgtg

SEQ ID NO: 399999 - DNA, 507 bp, Cannabis indica
tccagacggagatgaagctcgtgtgtaagcttcagtgccgtcaaaaaccccaaaactagaaaaaaaattaaactcttcgttctctttctacaatagatggagagcaccaagcgaagccttcaccatcgtcgatcgaagcccgactaaagctccaacctatgtcgacctgcattgacctttgtccaccctttctatcgatgagaaagagagaaatgtcaaaagaaataggggatcggggacacgagagggagtgtcattgggggtttgggtttcttgaggttggggaataatggatttccgacgatagctcctcatgggaaaggatgctgcacaaagatgagggttagggtttcgatgggtgtggtatgtggaggatgaatgaatttcaacagaaaaagataaaaaaaaaatgaataagaaaaagaaaagaaaagaaaaaaaataaaatactttttataatttatttaatttataatattttaataagtaatattacgtggaccacta

SEQ ID NO: 400000 - DNA, 550 bp, Cannabis indica
tgaagaaccgtttatttttgtcgattttgtttagggatctcggatctcgataatttctgtagtaacagctaaagaactgttacatgatggatgtctagagtttttggccgtggtattggataccactcggcctgactctgttcgaccacaagacatcaaggtggttcgagaatttctagatgtctttccagatgaacttccgggcttaccacctcagagagaaattgattttgtcattgatttggcacctggagtagaacctgtttcgaaggctccttatagaatggctctagcagaacttaaagaattgaaaattcaactccaggggttgcttgacatagggtttacacggcctagtgtgtcaccctggggagctccagtactgtttgttaagaagaaagattggtcactgcgaatgtgcattgactaccgggaattgaataagctaacaataaagaataaatatcctttacctaggatcgatgatgtttttgatcaacttcagggaaagacagtcttttcaaagattgatctccgatcgggctatcat

SEQ ID NO: 400001 - DNA, 554 bp, Cannabis indica
acgtgaaatttgaaattatttggtaccctgagtccaaatttagtaacaaaatttaataatatgactaatctgccttttatatgtaatttagttattaaactttaaagtttggtcatatttataaatttcattgattaaatttgggtacaaagtactcagtttgtaattgtgataaaacttaaaaatagagtattaagtcagtatcttgataaaacccaatgagcatttgcttgatctttagacattataccagtcattggccccaaagaatgctaagtcaaactatttgcaaaacttttgtttcatgatagaagtcattatttcatttttaataaataaaattttaatgttgaatacttgttgtttacaataaataattgcgattcgtaattaatgtaattcaatatcattcaattgtgttcgtgtaaatgttttcagaatttgccgcatggaatgttacccccttggaaagatccatccttattggaagtgtgaaactcacctgaagatcgtccaacacagttcttactcggttcaagctttaattaatgcag

SEQ ID NO: 400002 - DNA, 1765 bp, Cannabis indica
attctcctcattccccactgccgagatctcattaggttgggtctccttttcctcatcttctaactctcgaatgatgcaattatggttcagttttctactcttgtctaccaccacgaaattgttttgcaggtcaatagaaatgtctatcaaatcagcattccacatatttctgtattggcccgagctctttagtccctttcctttcttcttgaaacatcttgggctgactcccatggaggttggagaattagcacgtcttcccctcttcctcttttctgttgaagagatcacagtagtcgatgcatctttccttgggtattaaagtgtcatgagctaaatgtgtagatactctaaatgatatttttaatttattgaggggctaaattagaaatacttaaaattaataacctagctatgaggttataaattggtagtggtccccaagaaataagagccaatttctattctcatcttcccccatcaagagagaaaattacaaaaccctaagtcttgttttcttggaagatcattaccgaaaatcaccacaaagattatctctacaagatggattaagattatcactattgatgaattaaggtatgcttccgctaattggcttcttctctttgaatcaacaaaggtattctttagatctatggttatacacttataattatatgtaatatgtttatttataaaattgaatattattattacatattttatgagtgataaagaaactaacttttatttttattttgagggggttacgatttgatagtgttactaattgacaaagatacgtcatcatttaaacagataatgggacagaacctaatagaatgactaaatttcttcaaatgtaaaggttcaagggagattcttaacaagtcgtatatcttaggagccaaaatcagtatggtcgaaagttcaggggataaaactgctaattattaaaaaatcaaaatatatgcattttagttagttacattatatatttgtaataaaagttgatatttataagcataatattaactttggtgtaatgcttaagctacttaacatctaggttagaggacaaggaccaaaagcattttttttcttttaagtttacttttggcccccttcacttaccaaaaaaaaaataacgccctcctcactttaaattctagatccgccactaaatttgatattgttagatttaaggacttttgtctaatttcattcaattttattaattcgatgattgtctatgtgctgaattatgctccccaaactttgattttcattaaatcatgcccttcaaactttagcatgtaccaaattatgtctcttgaactttgattcatgttagacttttcttactaaaattggacaaaaatctttaaatcgagcaatcttaatagtttaaggagaatttttaatggcctcaaaaaattcaagagcatgatttggtacatatcaaagtttaagaatacaaattttaggctaattaggatttttttccctgaacttttacatgttctaaattaggcatcctgaatttttttagtcgttaaaaattccccctgaattattgagattgttagatttaaggacttttgtctaatttcattcaattttactatttcagtgattgtttatgtactaaaccatgctccccatactttgatatctaccaaatcatactcctcgaactttgatatgtaataaattatgctccctaaactttcatctatattagaatttttttactaaaattgga

SEQ ID NO: 400003 - DNA, 1021 bp, Cannabis indica
cttcatcaaaaatggggaaatagatcattttggaggaaaaacaataattcctaggtataaataacatggcccagtgcccaggttgacacttggggctggccttgcgcccaggttgatattttgtcaacccaggctaattaaaattgagtttttcaagaattctttccaacatctctgtcttcagagaatattgagattcaactatttacggagaccaaaaaaaatttttaaagggccaaaagtgtggcccaggttgacacttggggctgggtccagcgcccagattgacattttgccaacctgggctattttcgatcaagttcagcaaaaagtgttctggatatttgtttcgttatcagaaataatgaggattcaaataaactcgaggagaaaaccacaatctcgagtccctggaaatagggcccagccgtcgggaatattttaccatgatatagatttactaacaagtatgttgaattaacatcctgaatatgaatacctctaatacgatgaaattaaacacataagagtttagaaaaccttacattgattgtagcggaataatatgactccttctgctcagatctctaacccttgttcctttctgtcacagagtattatcaagatctgagcttggatctctttctctcctttgagttggttaccaccgtctttcgcactatgattgagtacttgacttgctatgtgtgggcatggcactctatcactatggctcgattaatgaagaacaatgaaggagggttcgaaattctatagaaggtgtctctcatgtactagttgtctgacagagttagaaactagatttggtaggttgaagtcagtttttggatgagatgagagcataatgttccttttataatgtttcaactatggcgtaggtttgaattatatggaattaaaaaaaataaaatattaggcaaaaattacacatagtggtcgcccactaaagggccttttactagttacaattttgtcactttatttcaaccacttattcttc

SEQ ID NO: 400004 - DNA, 705 bp, Cannabis indica
tgtaaagtcattattgcccaagaggcatattcagtgtatgaggataagattgaacgatcacccctaatgtgaatgaagtgactacccccgacgaaaagatggataagttgttggaaattattttatcagcatcttaattaaatcctcatgtatgttggattataactataactataatctaacattctaagtatgaataactcgtcctttctagaaagttgttcactcgctgtaaccgatcacggaaggagtcgtgtggaatgatagttgggtctggaagggagttccagatgacctatcatgtcctctccaggctcaatcttcaagatagctagccctccccttccagctggctagttatccctcttggaatggtagatctgttgggattttatgccctaaataaaatctatttcaatataatcttatttgttatcaataaaagattataagtcatttatgtttacatgtattttttatgattatagtttaatatacaatttttgttaaatccagaacatattgcaattcacaattacagtgatgtcaacatagtggaaggtaattgtaattatatgcttcaaaaaattatgtcccatgattcattagtgcactaaatttacactggtgtgatagtcagtaataaagtttacttacaccttaaataagtgttatgtcctttccagagcattggtaaagtatgct

SEQ ID NO: 400005 - DNA, 503 bp, Cannabis indica
cgaaattactttccaaccccaaagagcaataaaaggtcaagccttagcagactttgtggtagaatgcacaggtaaggaagaaagcataccaaaaagcaacctcgaaccggtacaaacacctcacccaagtaacagtgaagataaggcaacctagaaactacacgtagacgggtcagctacagatcagctatctggtgcaggaattgcccttgtcacgcatgagggggaacacctgcacgctgcatcaagtttggattcaaaacatctaataacgaagccgactatgaagctctaatcgctggcctaaaactagccccgaagatgaaagtcgaacacattgaaatctgtagtgattcactattgctggtaaatcatgtattcggagaatacgaggctcggggagagaagatgatagcatatctgagaaaaatacatgatctgctcgcacaattcaaaagctacggtctcagacaaattccaagggaagaaagcacaactgcaga

SEQ ID NO: 400006 - DNA, 641 bp, Cannabis indica
cccctcagcgggagatagatttcatcattgatttaattcctggagcagaacctgtttcaaaggcaccctaccgaatggcacctgctgaattaaaagaactgaagatacaactccaagggatgttggatctagggttcactcggcctagtgtgtcaccttggggagccccagttctatttgtgaagaagaaagatggaactcttcggatgtgtatcgattatcgggagctgaataagttaaccattaagaataaatatcctctgcctagaattgacgatttgtttgatcaacttcagggcaaaacggtattctctaagattgacttgaggtctggatatcatcagttgagaattcgagaagaggatattccgaagacagccttccgaaccaggtatggtcttacgagttcctggttatgtctttcgggttaacaaatgcaccggcagcctttatggatctcatgaatagggtattcaaggatttcctcgataattttgtaattgtatttatcgacgatattcttgtgtactctcggtcagaagcagaacatgagcaacatcttcgaatggttctgcagcgacttagagatcataaactctatgcaaagttcaaaaagtgtgagttctggctgtcacaagtgt

SEQ ID NO: 400007 - DNA, 548 bp, Cannabis indica
tattacaacttaacaagtttgtatacacattttattagtcatgaattttgtggtatatatggttccttgctaggataatgatagtttgtccttgatttggggtctttatttttgaatggttgtgctcctttattataataaataaatgtattttatcgtttgtttcatcattttgatgtgagatcgattttaacatttatatcacctgcactgtaaagttattttatcttatctaaactcgaacataaatttattttatataaagtgtggttatataacaaaatttttagtttaacaacacattttttattattacgttaattttaacggaatatctcattaattaacaaaatattatttattaattttataatattattatatatatttaaaaataaaaattatataaatattttatataaagaaattttaatttaaatttaaagtacttaaaatattatagatatttttaatcatatttttaaagttattggtttaactttaaattaaaataaaaaaaaattatgtaaatattttatataaagaaa

SEQ ID NO: 400008 - DNA, 991 bp, Cannabis indica
aatctgattttatgaaatgatttaagtagataaaaacactttttatcattttaatatctcatttttacaaaatatcaaaaagaagaaaagatcacatttttggtctcttctctctctctctccttcaaaacccttggggaaaggcaatagcttggggtgtttttcagatggtttttactggttttaagttaattgttggaggatcctttgaaggtatagctttagtaaccttctctttagctttcttttgttttggagtaagaattttgcatgaattgttaattagggttctgtggttgttgttaatgtttgatatagttttcagaggttcaattatgttagattatgttgatctaagcttgaattgatggctgttattaggtttaatcatggtttgagttttagaactcaaacttggagctttaatgttgaaacttgattctgagcttgggtattagttttcttgcttggaaatggtttattggggtatattatgcaagtctggaaggtttggtaaggtttggagtcaaattgattacgttttcaaaaattttaggttacctcgtgaaaaaccggttaaccggttttacaagccttgtaaaactggttaaccggatcagaaaccggtttcctgcactttttcgtgttttcgattcgagttagtttcaaagctttggttggttaattccctgctagtttagggtattgccatattaagttgatgaagataggtttttggttcaaaacctaagtcccggttgtgatttagtgagtcacttattcatgttgttatcgatgtgatttaggagcctataattcgccgaataattgttccactcaagttggctgacacacctaaattcagaattgagataagattagtataatgtcatgcatatgtgattacatgtttagcgtacatgttagtttccatcagaataacatatcagggtatcggtggaggtgtacatagagttgcaccgagatacca

SEQ ID NO: 400009 - DNA, 860 bp, Cannabis indica
acaaattacacataccattaataatgcactcctactttagtaccataaaaaactaacagagaaatactatagacattctttaagtttattattattattattattattattattattattattattattattatatttgacataaaaattggttaaaaatttaataataatatacattgtagagagcttctacgatgcactcctactattttggcatctaaaatttttttttgtccattttttaaataatagtgtatgttatttagttacttgtatttctaatatagtaataaaatatacgtttataattagtattaagatataaaatttaaattatatatttttataataatattcttgaaataaaaattaaataaataaaatgaaacaaattaggcacacgctaacctcacctattattaaaaaaagtgagcactgtattccaaaataaaatttgtagtttcaaattttatagtatatcaaaaacaaatcttaatgactttttttaatagaacttttagcttttggatcttttattaataattaaacaatgacccagacccggacccgaatctggacccgggacctagactcggactcgggacctaaactcggaccgggattcgaattcggacccggaccgaacccaaacctgtaccaggacccgaacctgaactcggaccgggactcaggacccgaacccaaacccggaccgagacccggacccaaacccggactcagatctttacacaatctattaatacatgtcaatagcaaacatagtattgtatttaataatactaatacaaaattaaaatagatatacaattataagttaatattaaaattctttaaaaaaa

SEQ ID NO: 400010 - DNA, 1097 bp, Cannabis indica
taattcccccacttgatatcacccgaacttgtcctccatctcgtttatccgcaattggattggatcctcttactttggaccaagttgttggtgaagttaggtttattccgattcaagtgctctcgcagatctggttgggagtaattgctggcagatctcgtcttactcatagactgcgtcctactcatagaccgcatcctactcatagactttgtctttcagtggctcgtggatttacttgttcccatactttcccaatcattagctcgttgagcactttctcctcttctagttgatcggctatgggttctagatcaccttgaagtcacacttgcctcttcacgctctgttctttcctcccgatagtggtttgtcatatttccccccttagggtacgtacgagtcctcgctctatgggttttgggaagaacgttggtgattcctagcaggtgatctctgttctccggattgagttattagatcctcctcattttcatgaaggatttctcgttcatcagttttcggttgcctcctttctcgctattcattctgattctcagggagtgtctcattttccccgggttgctcttcctgggccttttcctgtctcctagttcgtgagccatgagttctgcttcgtggtcttctcactccaggtttaggttgattttgagcgtttgtcccctgcaccgctctagctgagactacctctcgttctaactcagcgtttcaacgctgcgcctctttcagacggcgtctcaggcagcgactttctgtttcataagttctttctcacatagattgggcacctctacggtttagctctttatcccttttctaggattctgaccattcccacgctgagttctcctcgagcacgttgtccgcgtactaggaccaacatcaggttgagttctccgaggacgtgtggtccgagcactaaggccatcctcaggttgagccctcctagaacggatgttccttctggactgtaaattggtagatcttctagactcatgggctcttttccagaacgatggttagtttcctcatgtggggtgttaatattctcacatcttcagccataaaggagaagg

SEQ ID NO: 400011 - DNA, 863 bp, Cannabis indica
acaacacaaggattatgaaaaggaatttcacctttcataacatgaagatcagagcggcaaaactccacaagctaacacagaaaaatcagatcattattactaaaaaaaataaatgagaaattgagagttgaattgggttaaaaatcaaacctttggttttgattaggatttcgttggctttgggtcttggaatttggaaattttccattgttaggggtttgttggtttcccagaaaacggcacctcgcatggtgttgaggccattggaagaagctgaggatgagaacaatgaagatgaagatgatgatgaagataatcttttggcgattcgaatcaaagcagagaaacccatttttggatagaaatgttgttaatatgaaattcttgtttgactcatatgattatcactctaagctcaaattatgatttagtagttttgattgatttaatccgtttcttcttaaaataatatttaaggcaaatttgctactaaaatatttgaaaattgaaactctttttttttttttaatttttttaaatgctgtttttttgtaatggcaaaattctaaatgttatctttttcttggtatttttggtatccaaaaaaatatgtgtttaagcttaattgcggtttacgacacgacacaacaaaatataaacaagaaatacattaactcgaaaacatgatagattaaaaagcattgtaatttaataataataacaataataaatatttatttatcaattaaaataattattattcaaattataataagtataattatttgttatataattatatgtaattattatttaaaaaagatataaaaataaataaaactataaaatacatatatatttta

SEQ ID NO: 400012 - DNA, 527 bp, Cannabis indica
gatgaatttctggattccaaatctatttccagatgtcacgagactccttaaaacgcttctcttgatccaacaaataagctcctttaacagaaaattcccctttacaatgtaattatcattgcactatttacttatatgaaaaaataatatagttttatacttacaaaatcatcattacttcatttatgtaagaacgaaataatataccattgttttatcaatacatcactcaattctattatctttccaaaaatgcttcattaaaattgaacctttttaaagaaaaatattatattgctcttaatatatattatcgtagaaatctaaaatatgatatttctgaaaatgaaaaatgggtttttgttttctgaataaaattgggccaaactatatggcaagtatatcttggaaccctcctcttgagttgggcctatccaataatactagggataatttcataaagggataatttcacagatatacaaaaacaacacaaaaaaatacaaaaatacagttttatagaattt

SEQ ID NO: 400013 - DNA, 1051 bp, Cannabis indica
ggagaacttctcccacaattttgtaaggaatgccaattaaggtaattggattttttattattttttattttatttttttaatattaaaatatataatgaaaatttttgccctttaaaatatgtcttgcaaaataactaccatataatatagtttaactcaaaagggcaatttagtcaatttaagcattccgattacgtttcctaataaataaacaagataaatcacaactattccatttctaaaaatttagtaaacaacatattacaaatattgattccgattatttttcatttattccgttacatttctctattaatttattccgattctgattactgtatagtaaacgtgccataagttacaaatataataaatataatattatctctataaatatcatttttattataaatttatgttagaactacttaaaatacatatatattgtttttggatttttttttgagacattatatgagttacacatatataaggcgttggttttttaaaatcctttagcttcgctttgatcagcgttggtagcgaattaacaccaaattaattattaccattaatgtttagttgtattttcctttattacattaatttagtttttcattcttgtagtcatatttttgtataaattggggttcaccccattgaaatgaacaactgagaaattctcattcagtgtctttttctctcttcatcttcttcttcttttcttcttatatattttatattattttataatgcgttatcagcacgagtctctgtccaaacttcaaggtaaatcttttgttaaaattcttgagttgttttaaggtcccgatacactaaatatatatttatatatatattcatctgagtgaaacaatttcaaaaacccttttttttatttcttttatttaatatctatatattatatgtgtatgtatatgttcttattcttatatgtttattattgatttcatatatatattatgttctttcatttataatatttattacaatatatgtgtgtctatgatatgatagagaaaatctata

SEQ ID NO: 400014 - DNA, 603 bp, Cannabis indica
atctcaactcaaaggaaatcactcaaggagtcatcaacttaaaattttgaaatccactattcaatagggaatggggattcaaattcctactctcagtaggaatgcttgaagaatagaaacaatttccgagattgtcaaaattgatgcccaccttgtagttttaagagaaacgagcttagttcacatcattaagtcaatctcacacaagtgtaaagttgacttgggaggcaaatgtttataccaagcgtagccttgatgatgtgaacatcaatgtttgacacgtggcaagaaagttgaaatctcagagttgagtagtcccgagtcatagcaggtcgacttgggagggtcccttgccttgtgccaagcttgactctaggaactctaggatggaagttcagacttcaataacttgaatcaaactcactatcttttagtattctgtatcataaagacatggagtgtaacgccctaaataattaggcacgctactcaataatcttataaaaccctaatcccctaattgggattactagtaacattagcgcggaaattaaacttttattacaaatagaatgaaaataaacttgtaatactttttcactt

SEQ ID NO: 400015 - DNA, 686 bp, Cannabis indica
taaaaatagtggtagagcggtggtcagttagagtatgcaactattatagggagctttatgtacgttgcccaatgtataaggcccgatatatcacttgcagtgagtaaacttagtaggtttactagtaatccaagtgtggatcattggaaggtagagttttgggttatctaaagaaaaccaaaaacctatgtcttcactactccaaaattccttcaattttagaaggatatactaatgcaagttggatagccaaccttggggataatttatccacaactaattgggtatttaccctaggtggaaaggcggtttcttaggggtccaaaaaataaacttacatttctcattccataatggaagcgaagtttatagctctagataccactgggaaagaggctgaatcgttaagagatctcttaattgagatttcatttattaaagaggatgtatctacaatatcaatatattgtgatagccaagcaacattagctagagcatatagtggagtatacaatgggaaatctagacatattagtctaagacatggatatgtaagtgagttgattcaaagaggagtcatctcaatatcttatgtgagatcaagtgaaaacttggcggatccgtttacgaaaccactaactagagatttagtggaaaagactattggattatattttaccaagatc

SEQ ID NO: 400016 - DNA, 2476 bp, Cannabis indica
tcctcggggatctgctgagtcattgcaggtacaaaatgcaagccccaggaggaccctgtattggggcccttggctcgacgaaccttggaagagcaacaatcagtcactccctagtcaagttgatgaggatggcgcttatgacccaaccagatatatgccgatcgtggaattagaaactagccatcttaggtgtcgattggaggaagaaaaccggcgtaatgccgagttggagcgtgaaatagctgccgtaaaagcaacgctgggagattgtacccaaaaacaacctgaccttgagaaaagagatttagaggcaaacctcgtggctcacaagtcaagaggcaggagatgacccaggggtatgctcagatctctcaagggatgcaacttgaggaaattgaaggaagactgggggtatagcctaggatacgtggaacatcggacaaaaatcgccaacccactattcagtctaataagaattaaacttgtgcaaacccttgtaggaagaaaaaagtgagtcaaacctttagaggaagggcagggtccggccacaatcatgacgagagtgatccacggaagtatctgaacctaaaaaagcctgacctctgtcacgactcgattcaagacaaaaggatttactccatttgcgaatgagtgggttggagaataagtccaaagtacatcacatcacgaaatccaggagacaattgtgacataatactgttggaaaacttgattcgaaagcctcgggatcaatgaaaaaagatgattccaaaaggctgcctaatgacaagaaacccaacaagtatatccctctttataccgaatacaccgagctcaatgaaacttgggaaaaaatctacctcgcatacgtacaagaagccatttttggcgagccaagacctatgaaacatgcgaggcacaagagggatccaagtaagcggtgtgaataccatgcttatattggtcataccacaaaagagtgtcgtcaattgaaagatgagatagaaagtctcatatcacaaggataccttcatcgatatataaaggggcaggaagatgcctatgattagctcaatctgcccaataactcgagcggctgaagattataaccctcttccacgagaagaagggacaatttggttatcttgagagggaaagggtcgcaagagtacaaaaggcagttactccggtaaaagcaaacttgaaaaagaattacgatctaagtatatactggcttgttatggttgccataactggacgtcaactagtggcagttgaagacagaactaaaccaaggattattcaacctggaaccctggtatatgtcagggattgaccctaaatattgaaacgattgtgggagaatgttggggattgaccctggacatcaaaactcgttttatcaaaaccagatgttcttgaaagattgataaaataaacaattgaactagggaagttcttttgagattaatgattgtaaatcacattactgatggaatattttgaattctaattgtgaataaaataatcatttctttcaaacaagtaattacaaagcgtaaagtctttaaaattacttgaggggcttatatgtatgattaaccagaattgatctggaaatacatagtacaatgcaagcccataacccatagtttcaaattttgaaaactttataaaagggcctcgaccaaacctttttgatggaagaggggtcgaactgttataactccctgactaaaccttttcgacagaagaggggttgaatcgctataacaccttgatcaaacctttttgacgagaaagggatcaaaccattgcaatttttgatttataacctatccgacgagagaggaaaatcaaaaattacgactagcacataaaattgaatactaacggttcgcgctagggggaagtattaaacgagacatccaaatgtcttgaaaaaaaatacttaaatccaacacgtgggtagaaattttaactactcatgtaagcaataaaaatatatataaaatgacaagttcattaaaaatatatttgaatgtgcttaaaatgggatcatttccgatgatcgagagatgaaattgatgacggttcacaaattgaggaatgagcaaataagctgctcgcacgtaaagtaggaaattaactacttaacgtcgaaagaaaggacaatcaatggaaacccctaataagctttatgcatgtaatagtttatattgtgaataaaacgcaagtaaacatccgcataataaagttcatacttaaaagtgtgaggcattaaaaaaaaagcaaagttggctgtccaaccttgcaaatatgtctttacaaaaaaaaggagataaataaacgaagtctacatgctgggagacttggacagagtttcttcttcttcctcaacctcgtcgtcttcttccatcttggtctttttgcagagagctaaagtttcctcttccttctcctccaagaagctagt

SEQ ID NO: 400017 - DNA, 543 bp, Cannabis indica
gctttcccttttctgagtacggggggaggtggccaagcaggagaaatgggctccctgatgtgaattgcatgttcgataggcttgggctgggttggaagctttttcctccttttgagcggagtcacctgctcttccttagcttcatcttcaggattcaagggctcctgagcatattgctttgcccttgcacctcccttcaacttaacttcgagcataagttgaatgagttcattctcctgatgaccttgttcagcccgttcagcaccagatttcctcttcctctccctcactggcttaggaatgaaatcctttggatagagcccgtacttcataaaattatcttcggaagtcaaccagatgatgttccggtcttcccccagcagtcgagcaagcttttgagctccatccctaagagcaagagtgaggggagggtggtgatatgttggaatctgatggaaccgagtctgggtgatgcccgcgccatccaccaagaagtcctcatcaaaaaaacgccctattttgctgatggctgagtcatcggtg

SEQ ID NO: 400018 - DNA, 753 bp, Cannabis indica
tttctttatttcattctcttcttgtaaaccctctaaaagaaatggcagtcctctggtcctttttgcacgttctgtcactacaaggcccattctcttttttctttcggcccacaactttggatcagtcttattatgtccaaaaaatatgacagcggacaattttttagggataatttcacaaatgcacaaaaacaataaaaaaatatcaaaaatacggttttacggaattttaaatatttttacgatttttttaattttatttacataaaatacggtcttttatgttgaaattttgtttatttgttgttaattttttgttatttgtatgttattttttgttgttattttcatgttacttttatgttgttttcttgttgattttatgttgttttcatgttattttttagaaaatcgtaaaaatgtaaaaaaaaaagacattcttcgaacgtaaaaatataaatattttgcaaaaaatagtgtcttatgtaattattccatttttttaagtccatactccatactctatgccatctgtgggggcacaatattaatgatattttgagtaacagtatttttcaaaacggaaaaaaaataaagttttctaattgggtaaatattattttggtgtgattaatttttttttttgaaaaaaaattatgggtgtatttgtccacgtttgctcatgtgtgactaatttgtgagattttttttgtttgacgcagcgatcaaaatcacatatgattaacaaaacag

SEQ ID NO: 400019 - DNA, 524 bp, Cannabis indica
cctctacagcaagctggaaaaggatgcaagagtgagtaaagtccttatgaaaaataatgaggaaaaaagtaaactacgaaatacttaccacagtcaaggagtggctgagatcctgaacttgaaagatggagttcaaggatgcacaagcaacgaaccgcttgggtgcacactgggttagctgagacacaaactcgccggtcaactccgcggaaaaaggggccaaggtgggcccgaggaaacgattgaaccaatccgatagggggtccaagtttagatcccacgggttatggtagttctgatcgttaagggtattttgtatttcatctcgcaaaaccctcctcaaaacctccacatcagcatgcccccaggagtactcgtccatggcgtagttatgtttggctatccggagctcctgcttcgcctcacctccaagaaccagagtcagcactatgttaagaggcactgtatattcctccgccttaaaagggatcccggaatcagggccaggggccggagtgtccact

SEQ ID NO: 400020 - DNA, 630 bp, Cannabis indica
atgaattgcagcaataaatcaacatgtatatttgagcctccactaggactttgttgttgctactgttgttggttttgttgaggctgagttctctagtggtagaaaccttactgctactgatttgaagactaccgttgatagttctgacgatgaccccctcattagttgaacccatagttattgttctgaggatagctcccaatggctttagcttgttccattggcaaactgttcacatccacggggcatgtgtcatatgtgtgagggcccccacattgttcacaagtaacttgagcctattttaccagagcaaccatcagctttgttagggcctctacttcgactgtcaacttggtgatggggtctatctcgtgcataccagcaaccttctttgtttggcttctttcagttgcccattgttggttgttcatagccattttttcaagcaaattgtaagccacgtttgcactttttctcataatttccccacaagctacgacatctataattgttctagtatgaccaattagcccattgtaaaaattgcgaaccaacatccacttttcgatcccatgatgtcaaaattttctaatgagatctttgaacttctcccaagcctcatagagagat

SEQ ID NO: 400021 - DNA, 569 bp, Cannabis indica
tttatgcttatctttgcatgtttgcattttgaatgcgccttctattgtactgtagaaaaatgtttaggaaaccctaggcttagaaacctctgcgattcttctttatcacgtcttcatgcgggtttacagccataatgcttgtttctaaactgcataatgtccatttttcatcttgcttattctaagtttcatgaacttttttgccctaactcaagaaaatttttgacttcttgagttctgacttttctttaacataatcgttctttaatctgttgattactcctggtcggcatatttgcttgtttattgttcgatattccaaccaaacactcatctcgtgtgttgtcttttgtagataaactcaggtgattcttgggaacttggacatcgaatttaccaggatctgcttcaacttctgcacgaggatcatccttgtctttgttctagtcctccttcctctagcgaaggacacacttctaaccctgtacctagccataaatgatggctcgtacaaagaaaaccacgcgtgtagctgacgcatctgatcctcaagtggctcggcacgccac

SEQ ID NO: 400022 - DNA, 637 bp, Cannabis indica
caaccacgaacatcaatcaaaggtcacgccttaccagactttgtggtagaatgcacaggaaaggaagaaagcataccagaaagcaaccccgagccggtacaaacacctcagccacgtaatagtgaagataagttgacctggaaactacatgtggacaggtcagctacagatcatctatctggtgcaggaattgcccttgtcacgcctaggggggaacaccaacacgctacagtcaagtttgggtttaaagaatttaatatcgaggtcgagtatgaagctctaattactggcctaaaactagcccgagacatgaaagccgaacacattgaaatctacagtgattcacagctggtggtaaatcatgtatctagagaatacgaggctcagggagaaaaaatgatagaatatctgaccaaaatacatgatttggtcgcataattcaaaagctacggtctcagagaaattccaagggaagaaaacacaactgcagacgtgcaggttagctcgattggcaagcagtaatgtaagtgacaaagcgaacttggttcctatctagttcctcgaagagcctagcatcactggcatggaagaaatcgaaatgattgatacttccacaaactggatgacaccaatagcc

SEQ ID NO: 400023 - DNA, 884 bp, Cannabis indica
aagttttatattattatttaatttacatttaaatattcttgatcactttttctttttttttttattcactatttcacatgtgaattatatgctacatacatataaaagtaaaattcatgctaaatttacatatgaactcatgaacaacaagattaaagttcacacatacctaaaacttttttttttctttttgaacaaaaaaacgttagaaaaaagaaaaattttaaacatatgaaatgttatattaagcttaaagacccactaattaaagggatttctttgtggtgactggttagtgcctttcttagcaaaacaatagggtcctctttgagtttgaatctatatattttgagagacttattatcaacatttttatgtttcattcaagttgttcaagcataaaataatattgttctttgactgaaattggactcaaatcctcagctaccaaaaactaaaaatactaatttataattatttgtaagtattaatataataatttggagcatatcccatatatattatttcaaactaaaatatatatatatgtgaatattaaattatactaataatatattacatgtaataataacaaatagactttaatatttcaaaaatgtaattatgtttaattaattagacatatctttatatattaaaagtgtctatctaacggcaagaatggtttaacgattctttttttttatttagcacttaacagactgttaacattaaacgttatcaaataaataaactcaataattaaacccaaaaaattaaacaatcttttttaaaattaaaaaaatatcttacccacatatctctctaacaaatcctacaatttttgaaatttttttacacagcttcattcaaatttcaaaaaa

SEQ ID NO: 400024 - DNA, 628 bp, Cannabis indica
taattaattaataacaggttaatataagctgagagtgttagaaaaatctagaaagcggacaagtaagagttcaccactcaaatatcaaaagcttatgttaggagataaaaaggtatacaatcagtttatttaccgttgaaattgtcaacactctactaataaatgctatatttttcgaattctgactataaacgcgctgcaacaaattattatttcataaatatatttttttccttaaaaatgaacacagggtaatgatgttgaagcagtaatatttggcactgaaattgacgctagagaaaacactttggaagtgttccacacttactacatcagcaacgcctatgtcaaaaaaacagccccgcctttcgataaaaagagagactacaaatatacttggacagtgaactcaagaacagaaatcgaagaaatccaaacagaagacaaccagatatcagcaccatattatgatttcattccgtttaatgacctgcatacacctaaagaattcagcaaaccaataggtatttacaatttgattttcataaatatatatgcctcattgactaactatttaatatttcaatttattagatattttggctattgctctcaaaatgaacccacc

SEQ ID NO: 400025 - DNA, 824 bp, Cannabis indica
gtaggaattgtattgtttttgagggattaaagtgtaaattccttaatttagttgtgatttatgtttgttgagcatggaataagattaaagattattttctagattagaattcatgatttgtttggaatattgttgctagaaaaaaaaaatatttgggtatgttgaaattaagctcaagttcaagagcttggattttatgagtttaagccatgattttgtgttgaattgtgggatttatttttggtaaattcaaagtcgtttttaggatttcattgagtttaaaatctgattgtaggtttgattttggttgtgtaaagcaagcttgagttcatggaactcaagcttggagctttaatgacactttttgattggtgaaattattgtatttgagttgtagaatatgtttaatatgttatatgatgatgctctagaaaatttggtggtgtttggggaagatttgagtaggttatgggggcttaaaaattgagttttttcgtattgttgcttcccagacaaccggaattccggttggttcagggctgttccaaccggaattctggttggactgtatccggaaaatgctgaattttgttttggccataacttttgattcgggactccgttttgggagttctttatatcgttggaaagctcgttccaagctctatgtgattatctatattttaaatgccaagaatatattttatgaatgtgaaattaggggctaaccctatttgtgaaaatcccagattgtgtgactaggattaccggcacatggttaggagcacccacggatttggaatctctactattgcgggacaaca

SEQ ID NO: 400026 - DNA, 1516 bp, Cannabis indica
atccaaaccaagggaaccccgttttattctttatttaggaagatgacttaatggtttgcccccagtggtatttttgtaaagacaagtttgtaacccaacttgggttttctcttatcttaaatgccttgtactcttttcattcaaacttaatacaattgtatttgcttgcgttttgtattcacaatgtaaacaactatattttgatcaaatgtaaagtacttttcggtttttccattgctcgtaatcttcctgtttaagtagttagttatctaccaaacttttgattttcgagtagttgtcaattctgcctcgctatggcagttataatctaccttaagcaaacttgaatatacttttaaccattttttcactttgtatattttagatttgcttgtatgaattgttaggttatctatccattttctaggttcaagtatttttatcaagatgtcttgatgtctcgtttagtactttcttagctcgcgcaaaccgttaatattcaattttatacgcgagttatgagttatatctcatttataatttctgattttcctttctcgtcagataggtttttaaacaaaaattataattgtttgatcccttcttcgtcaaaaaggtttgatcaggatgctataacaattcgacccctctcttgtcaaaaaggtttggtccggaagttataacaattcgactcttcttccgtcaaagaggtttagtcgagaacctttaaatttcaaaaaaaaaattatttttcaaatggtgggtttgcattgtaccatgtatttccatatgaattctggttagtcatacacaaatgccccttaagtaattttaaagagtaacactttgtaattacttaaataaaagaaatgattctctttattcatgactgaagttaaaattgtacatcagtaatgtgagttatatcatttatttattggtagtagggtcgcaaatgtttcacgttctagtagttctttattagcaagccattgagtcaagccaatttgcaaactccaattccaactactgcttcgatgacatatggaccctcccagttcgggttgaacactcctgcagatgcatctcttgtattagcaaatactcgtcttagcaccaagtctccaacattgaatactcttttcttgactcttttgttgaagtatcttgtaactcagtgttgatacgttgcgttggtgatttgcgactcaactcgtttttcatcaactagatctaaggaaaattatagaagttcctagttctcttcttgattataaaactctcttctgtgagtcgatatgttcacttcaacaggcagcattgcttccgagccaaatgccaatgagaaaggcgtgtgtcttgtttacgtcttctcggtagttctgtgagtctagagtacttgaggtagctcgtcgacccacctgcctttggcagcatctaacttcttctttatagtatcctttaaggttttgtttgttagcccaagatatgtttccaagaggggggtgaattggaa

SEQ ID NO: 400027 - DNA, 655 bp, Cannabis indica
ttggaaagggctttaggaacaatttatgaaggttctgaaatacgattttgtggaagcaacaattatgggcttgtgctagagctactacagtggaagaattcaaaaggagaatgaatgaattgaaggagacaaatgcaacagcttttgattggttgtccaaaaagtcacaatttgaatggaccaagtcccatttaggacttccactaagtgtgatatgttgttgaataatctttgtgagagtttcaactcagccatactggatggaagagacaaggcaataataactctattagagtatgtacgatactggctgatggatagaatgagaaagcaaagagaaagtgtcagtaagtggaaaaatctagtggggaagagaatctttgatatcctgcagaagaataggaagtttgcaatgaaatgtcagtgtacaaagtctgttggaggcttgttccaagtgacagtgtctactggccaggtggaatcaacaaatttggagaccaaaacatgctcttgcagatcttatgacctcacaggtattccctgtggtcatgcattagcttgttctacctggcaggcctaagaaatcaaggagaagagaagtagatgaacctccacctggtgcaactaaaatgaggagattcgggcagtctaacaa

SEQ ID NO: 400028 - DNA, 596 bp, Cannabis indica
aaaatatattagtttcaactttaaatattttaaatagtcatataaattatatgatatataaatatatatgatatataaatatatatgataaaaacttataaacatatatatatattaagaaaaaaaaactctcttaatcgggttgatcgggttagctcgggttgattgggcgagttggtattattttcaacccgcccaatataaagattgagcggttatatttttcgtcgggttatctcgattttgtttggacgggttattcggtttgggcggtttacaattacaaaaatttatgtacaaccttaatattaatcactttaataattataattagtttatttataataaaagcctcaaattatataaataaatttcccgacacaattattaaatatgaattaactctttaattcataattttaaactattttaaattaataggtaaattttaaactaccaagttaattctaaattaatcttagccagtttacatgctttcagtttcaaaaacaataaacacataaacagagaaaaatctttttttttttttttgaaataaaaatctttattaaacaaggtccttcaacaataaggac

SEQ ID NO: 400029 - DNA, 600 bp, Cannabis indica
ttaaaactcccttttaatttctcttggatttgttctggatggtaacttttttaatatttattaaaatataaattattttcacatacccaacaacaaattcaataaaacaaattattattgttttatatctccaacaataaattaaaataaacaaataaaacatgaaagagaaaagaattatatgtaaaaagttttgattagtttaatttaaattatatttttcttatatataaatatactagttagaagttggcacgtaaatattagttttatttaaagcttttgtattttttatttttagatgttgataactaaatgtataattatatgaccgatgtgttttataaaagtaaattgtatatcattctatttggtaagtaaaatataattgtatatataaaattataatatgtacattgttatctaaagtattatttaaccagtaaaattaaaatattaatacaggcataattataacacattgttacaccaaaaattaaacaacattttgcattgattggttattttttttctatagcataaaaataagcatattgcatactatggtgccgtttgctaatacttttattttttaatttt

SEQ ID NO: 400030 - DNA, 814 bp, Cannabis indica
taaacagagaatgaaattaattatagataactaatgcacgtaaactcgggattaaagctgtccggtcagcctgttgtctaaaaatgacaaatgattccaattttaaagaccgcttggtcggtcacgatgtcttaaaaaaggccttatggccagacaaataaaaaaaaaagaagaaagataaacagataagtgttcagacggctagagtcccaggctccttgtacgggtcttctaagccggtaggagctggaggatctattgtctagacaagcggcacgtcaacattcagaccggaggtagaagtggttgccttggactcttcataggccacttgggaagtacagtacacgagatacatatctttggctttgcccaggtaatcaaaatttgcgtgagggttagccttccaaaagtcataaaaaatcttgagaccggctgtctctaaggtgttcaccttccctttgagcctctctacctaagggtagctcctcctccttggactttatctctgcttccaacctgcgaaaaatagttcgaagaacctccctctcttcctggaggtcggtcacttctttggacatggaggtcatggcagcctcaagttggtcagaagcctcgagatctttggccagctcagccactttcttcttggcagtaagaagctttttttttaacttcacctagttccatttggacggctccgagtttaaccctggcttcatcagcgcccttcctggccaagtccactaacgccttcatggtgttggacatggcagcattcttggaggtagcagacttagctcgagaataagtg

SEQ ID NO: 400031 - DNA, 743 bp, Cannabis indica
tatttttatattctttaagttatgctttttataataagtattatattgaataataaataatgtgtaatattctaatttttatgtaatttaatatttttatgcatttattttttttaaaaaaactttactctaaacaagtgtattacactaatattattctaaaattaattactttaattatttaagggttatcaaaatatggaaaaaaactattcttataaaaggaacatacctcataccaaatgacgatgtgtgtatgagacatcataacggaaattttaatagaataaaaaaaagttatatgcaatgaaatgatgagaaaaggaatgaaaaaaataagagaaagaccaaaactatgggatggagaaaactaaattgagtagaggattgttagtttgaaatggcataatttttttatgagtaatttgcagaaaaatcccccaactatcattttacttgcaaaaaatcatcaataacttttgatccggttgcccgtttgaggctatttatttttttgaacttggtattttttcgccttctacgcatcccaaaccatcaaaaccatttcgtaaaaaaaaatgctattttgtatactaaaatcagattatgtacccttttcacctaattttttgtgttttatttttttattttatttaaaataaactaatagaattattttgttaagtattagaatcaatatttctgatgtatttgttaattctactacaatgaaatgtgcaata

SEQ ID NO: 400032 - DNA, 972 bp, Cannabis indica
tgctgacgggtataagccgaatgattgaagctgcaatcttttcacgaacaaagtgacagtccaattcaatatgcttagtgcgttcgtggaaggttgggttattagcaatgtgaatggctgattgattatcgcagtaaatgaatgcaggaaccggttgatgaatgtggagatcttggagcaaatattgtatccatgtgatttcgcttgtggtggcagctaaggcgcgatattctgcttcagcagagcttttggagatggttggttgtttcttagtcttccaagagataaggcagtcaccaataaagatgcaaaatcccgtagtggagcgacgtgtcattggacaagtagcccaatcagagtcggagaagccgcgtaggtgaagagtggacgtggatgagtaaaggattccttggcccggtgagcctttgaggtagcgaagaagatgatgcaaagctgtcaaatgaggtgtgcgtggtgaagacatgaactggctgagagtgttgacagcgaatgtgatgtcgggccgagataatgtcaaatatagaaggcgtccaatgacttgtctatagtgtgaagggttgtcaaggatgtcaccatcttgatcattgaggcgttggcgagggtccattggtgccttggctggtttactgtcggtataaccggtgtcatgaagtagttgaagtgtatacttgcgttgagagagaaagagatttgagttggctcttgcaatctcaaaaccgaggaaatacttgagggggccgagagttttgagcttgaaccttgcttgtaaggcatcttgtaagtggtgtagaagtggcaagttcggtccaacaagaataatatcgtcgacatatacaagtaacacaacaaaggtgttgtgtgttccccgagtaaaaagagtgtaatcagcttgtgattgggtgaaaccttcttgtaaaagagcattggtgagcttcttataccattgtcttg

SEQ ID NO: 400033 - DNA, 619 bp, Cannabis indica
taaacaaagtttaaccgaccaaaattaaaatttaaccaactaaatcaatgttcaactgaccaaatcaatcttcacatattaatactcacatataacctaatcaacaacttgatctaatttctttaagaactctggtcacaaaggcttttcgaatttcttcgtctatagacttgaattgaaggttgccacatattctggcttcttcaacatgtatgtcaacacatcaatcgatttcaacgaccacaacacataacacaagcatggaatttatactcagacaccctttaaagagagctcatcaccattcctcgacacctcttttgcatatttttaacttgtagttattttgtaggtagcacattacaacaactaacatgacaaaaaattgagcagcacttgtgttttcattttgaatatttggcataatctgtaattgagattttcaacagtaaaatttgatcaaaactgaaagtaaaaacagagaaacaacaccaaatattattatcatattatggaaatagtatgatatcaataacaaactgattataaaaacagagtaattaacacaattatcatatttgcaatagcaaagacacgcacctgataatgaaagtgaaat

SEQ ID NO: 400034 - DNA, 530 bp, Cannabis indica
aaataaataaataaaatctcaaaatattttactatttatgttttctttacatcccattaatgttttgaaaaattatattattagtagggtatttgaaattattagtaactaatatattaaaatatcatttttaaaatatgatttgataagaaataaaatgatttttcaagtgttagagaatattgttaaaacactaatcattttgtgtaataattctcttttaatattttacccaataaaatatagctaacttgacacattaatttgatattttatccaaaaatgccctatgtatatagaaaatgttatttttataattaaaaaaaatgtacaatatatattgttaatgaaatgtttgatcaactttcattaacaataatgctaaactagcttaatagtcaaataataaaagagtaaaaactaataattatgatgattattattaagactatttaagaattttgcctcctgaactataatatatgtttaatatattattgtgctcctaaatttttcagtccattaaaaat

SEQ ID NO: 400035 - DNA, 521 bp, Cannabis indica
aatgataactcatatccaatcctaaatgtacatccttatgttcaaatacagatgatcctactttcaagtaaatgtaggcatgttttctctttgcagagaatgattttgtcaaaaccactatgaacaagatacaaatttcatagatataatattgcggttatggtcctttgatgacttaggtttagttacaataaagagttcttagaatagtccaagtagatcctggtcacaaaatacaaaactcatattccatacataaacatacaattcgaatctattcacagaaaatagatattaacaacttgggaaagttatactgaatgttcaatgtttttttttgaaattgaaatttaaaatttctatttagaatctaaaatttaaaatcaaagatttaaatttatactaaattatccttgagtaatgattctttcttggaccaccactactgaatatggtttattcatgtgatgaagttttctcatccttatctatgtatggacttcttttttttttttttgtaa

SEQ ID NO: 400036 - DNA, 1188 bp, Cannabis indica
ccatacatctgatgctggtaaactttgccaatgccctggaaaggacataacacttacccaaggtgtaagaatacctatcgctgattatcatgtcagactaaatccattgaactgacaaatcagggaataaactttcgaacatataattaagattatattccactgtgttgacaacactataatcattatacaaattcatatgttctggacttaaatagaatttatacattatgtacatataatcatgaaataaatcatgtgaaccatgcaacattaaattttatttctgatctttattaataagtaaatctgattatattaaaatgggttttatttagggcacaaaacccaacacattcatcttaaaatgactgtcaacagagttatccactttgaagtagaagtataaggagtatcaacaactctatcccctttagtttgacattttgtatactccccaaataaagaatgtattctcaacaccatgtcatcaagagaatgagatttattttcaaagactatctaacatcattcgccccaaatataccaagtagcaacacaaaacatctcaaattcagattgagataaaatttcagcagccttgagaacaaattaattacaatagaatgtcattagatagtatattgatatttaataacttctaaaccttgttgaatccatgacaccaaaaaatagtatggctattagagtactaaactgaaattgggcaaaatgaatgagaaagtacattttttttctgtagtccaatcgaggttggaagaatttcatgagatctgctctaaataaagtttaatatttttttttttgtgataagtgggtctttcaaaacttgttccacgacgtagctataatatccttagaggagaattttccaagatattagtgtaattaaatataagagaattatattattcaccacattaatatatttaatactattatattaataatctatatttttatttaataacatatacaaacccttactattttaattaaagaaatattttaatcttagaattccttctcttgctagaagtttcctaaactaaaaagagaccagagaaggaatctttccttagaagaaaagagtaactaaagcacaaaatcaatataataaaaataatttaaatgctcaataaaaatgcacattaattaaaaaatatt

SEQ ID NO: 400037 - DNA, 606 bp, Cannabis indica
taagcttgagaattagattacataggtgttgattatggtttcaagttttgactttcgggaaagtagctgttaatccggagagtagatatcggaagcttgtgtggatccgaaaagcttgcgtggaagatttttaagaatctggaaggtgtttccaaataagcttgtaccgtgtatggattgtctctcctgcatagcttgttattaatccggaagaatatgagaatggaagaagttggctatgagtattttgatgatttagtatctatgtcattttttacaaagataaagactaccaagacaggtaaattcatttttgtcatgcatgatcttatagttgatttggctagaactatttccggaaaatataattgtttgttcgaggaaaatgatgacattgataggcttgagaagaagacacgtcaccttggatgtgacatggaaatttatattgataacaaaatatctaattatgattttgaaactactcgtttgcaaacctttttaacatttgattcaagatattctgaaatcaatatttctaaggaagtagtgcagaatctgctatcgatgttgaaatgtttgagagtattatcttttcgtggcctt

SEQ ID NO: 400038 - DNA, 562 bp, Cannabis indica
aatccaaatttgaatgccccgtgcaggtgttgtcccctagatgtgacaagggcaatccctgcaccaaacatttgatatgtagctaacccatctacgtttaatttccatgtaggtctgtcttcattattgtttggctaggattcttgtattggctccaggtgatactttgaaatgctttcttctttgcttgtgcactcaactacaaagtttgataaggcctgtcctttgattgttgtttggggttgaaaggttatttcatattgacccaattccactgcccatttgagtaaccgtccataagcgtcgggattttgtaatacttggcgtagtggttggtcagtgtatacccgaacaggatgagcctggaagtagggccttaacttccttgtttctaagattaggcagtaattaagcttttctatcaatgggtatcgtcctcagcttcaactgagtcgtttgtctcgatataatagactggagtgatgtacgttgtttaatttcttctgatcagcacgacactaacaacatattctgtaacagctaagtatattcctaattcttc

SEQ ID NO: 400039 - DNA, 542 bp, Cannabis indica
agagagagagagaatcgtgatgtgctccgtcaatcgaggttctggagagctagggttcttaggttttgagaattcgtgactgagagaggggaaattttgagtgagggggagggagagaggttttgagggttgagctccctggacactgtaggctccgggacgaggggaccagtcaacatgactaggttttcatgaaatctagatgtggacctttgattttagagatttctgacttcgaaagttttgagacaaattttagagctttgagaaaaatccaatggaggttttgttagtcgaggttttaatgtcttgtcggtcgtggttggggcttgttgctggagagtgctaaggttgggacttgccactaacgagtgttagggttgggtctggtgtcagtgtgtgttttaggagaaaggaaaaaaaaataaaaggtaagaaaagaaaataaaaggaaaggagaaagtaaaacaaattaggaaaattacctcatatactttattttttttttaattttttttttcaaatttacggtttgggtttct

SEQ ID NO: 400040 - DNA, 704 bp, Cannabis indica
gtaaaggtaacaatagtcagtcttgaaagccatctgcaaatttttctggtgtgcaggagggacaagcttcaggacatgatggacaaagtggataatgcaatgtgccaaatcaggatcttattcaaagtcttaccaatcagtcccaacagctcatgagtctcttatctcaaaaacctcaagaaactccaaaaacttctccaagttcagatcagcccctggtgtctcaattttttggtaagaattttcctattttgcataataggtggattatagacacaggagctacacatcatgtgtgtcctaatttatccttgtttacaaatattaagaaaagtacatgtctctctactgttaaccttccaaataatgcttgtgtgagagttaattgtgttggaaatattcaactttcacctgatattattcttatgaatgtgcttcatgttcctgattttagatacaatctattgtctgctccttcactaatcaaatctattggatgtcatttcaacttctctctcaatcattgtattatccaggacagtatgaagactcgaacgattgggatgggtcatcgaaatggggatctgtactacttgaacttgtcacataattccattcctgctgccattttttctgttattagtgactctactgttgttgatgataatgtttggcactatcgtttaggccatccctcatgtatc

SEQ ID NO: 400041 - DNA, 691 bp, Cannabis indica
cgccgcggcgactggagcttcaacttcatgggtttctgccttcatgatctagccgcggccacactaatctagccgcgaccagaagtgcatcacgcctcaaattggtgtttttgttggctcagctcgtcttttactggacttttgcatcccgagacctctattattactaagaacctgaaaacatagaaaacaagcgtaattccgtcctaaaacagtgataagcgaacataaaatcgatccaaaatataggctaaatatagcctaacaaattcccccaaactgaatctttactcgcccccgagtaaagctaggactcaaactaacaaaaacaatgtagtagataactaaactttccaacgattgaaatcctaccaccacctgcacaacttcaagcacataataacaagaatttcaactcgataactctaagaactcacttggatgcacaattcagaagtaagcaattcatacaaacacaaaacatcgcatttgacattcatatcacaaccattctacactttttgacattctgctaacccatgttcaataagtttggatgacatacctctctccactaatgttgacactttttctttagaatcaataggtctttttcagttataaaaatatggcttaggtacacgggtaggtgaaaagtcatttatgttacattataccataagcacaatta

SEQ ID NO: 400042 - DNA, 639 bp, Cannabis indica
taggtgagcctaaatgatcattctatctacccgtacctaagtttaacattacaagtctagaaagattttttgatttttggttgtgcattgatttttattagtggagaatagtaagtattgcaagcttatggaatatattgggttagtggatttatagttgtaattggcatgcataaattatttcaattgttagttaagtgctaattatagtttcatgaattgagtaaaagattgaggtgaatcaagggtgtgattgaattgaaattctgaattattataggtgaaatttttgctcataaccatattatttatcttacttgaaaattgatcatgtttcggttgattgacttgtttcatttaggttgtgctgtttttagttgttagtcttactcgagggcgagtaaggatttagtttgggggaaattgttatgatatttttagcctattatttttgttatttttagagttaatttttatctttattatcactttttgaaataaatttatgcatgttttctttaatttcaggtttcgacacttggaatgtataaattaatcaaatctcacaaaaagatgaactataaaatagagaaaattgtgtaagaaaataaagctgaaacttcaagcctaaattagact

SEQ ID NO: 400043 - DNA, 824 bp, Cannabis indica
gatatatataattgaatttactgttaattacaacttaaatttagaaatggaaatgagaatcttgaattaagctattacgtacaatcccattaaaagtataagtgtagacatttttttgatgaattaagtgtagatattgttaattattacgtacattcccattaaacctataagtgtagatatataatgtcacttttatcagcacggttgttactgagctggtaacttttatcaacgcattttgcaaactgtgctgacaaaaagatcaaagttttaccagcgcaaatttgcagtgactaaaatctaacttttactgaaaagtcatttctgccagtacttttcattttgtattggcaaaagttataataccaacgttgatttaccaacccgttttgccaacacatcagaagtaaattttattttaccaatgcaatatcaaacttttgccagtacaaaactgtgctggcaaaagtgacatttcttgtagtatatattgattggttttgggctttaaagctttgtaagtttatttgttgttttggtagtgcaagtgtggatacttgattattgtgatagttttttccacagttttgtattgtttgttcgtgtaaataaaattcttttacttacaaaaaaaaaaaaaaaaaaaagaaaaaagaaaagagagaagaagaagaatatgattaggaaatatagagattgggtggaagcatattccataaagctttgtaagtgattattttgtgttgtatagttatattattagttttgtagattaatatacagattccaatttaaccaaaaaaaaaaaaacaaagaaacaa

SEQ ID NO: 400044 - DNA, 960 bp, Cannabis indica
aagttatgtcaatttttttaattgtgggttgttggtgttatactcgaaattcggctgcacttcaaaagttcacgtgtcctgcagtggaatataaaccacttgatattataaaaatgtaagataaaataactcgttataaaggtttaatagaaaatattcacaactcgctgactatatagtcttaagcgagataaggataaaagctattaaaaccaatattgacgagatacacgactacctcggagtacatagtaaggaagatattcatttattcgagtagaataaatataatcacacggtgacctcgaattacatataacgagacagtcacctcgcaatcttaactcaaataaagagacataacgaggtgaaccatctgctaacacttagcattttttccacatcaagatggataaggaggataactcatgttaagcgagatacaatcgtccaaatcaacatttaccatcgaaataataaaaacaaaaggcagttaagcagttatctaatattatcccacatgaaattaaatgaaacgtggaaattgtccacgtttcacgaacaattacatttcaactgatcccaagaaaataactaccaatctatattcctataaataggggcaaattccacagaaaagacgacgagaattttaggagaaaaatattattattctgatattgtattttgtactcaaaatatcattaataagaaagactcgtagggtacgcaaattttaattgcaaaatcacgtaaaaacatatggagttattaatttatcagcatctctatgatatatttattacgaaaaagctcattaattttagttaacaaaaatctgcgttaacaattggtatatagattttattgtacagtatattgttgttttgttgtatagtatattattatttttagatgatatttattttttattttgctatgtataatagtggtatataa

SEQ ID NO: 400045 - DNA, 659 bp, Cannabis indica
ttatagttacactggagggcagttacttacaaatcaggctggtatcttacaacaataatcccctaaaattgtgggatttaatcacgtcccacgtaaaataaacggggttattatttaaaaatcacacagctgttatattgttccgcttttaccaggttaatgcatacctgtattaaatacgttgcaaagcatatcattctgggacatctcgctgggaacatagcaacaataactctggtagcgagctagagcttttcccatgtcttttcgaggttgataatataaatctcgttgtttatgcgattgaagacatagcgccccatttgactattgggaatagtttatcaagatctagatttactaacaagtatgttgattaacatcctaaatatgaattctctaaaataataaaaataaacacataagggtttaagaaaactgttaattccatttttggcatatttaattgacaaaaatattttattatttaatgtatatttcggctggcatatattgatatggtttccatatttgtgtaaatcaaacttgaaaggaaagttgtctagctttcctatttttggaaaaaaggtaaaaatggtaagtttggttacccatttcgtttttatctaaccagctgtgtaatctgatcttgtgttgag

SEQ ID NO: 400046 - DNA, 820 bp, Cannabis indica
taagaacgtgtgataagacatcaataagattcttatacattgaaatccaaaaatataaaatctgcacttactgcgaaatggattggatgaacaaccctattaagatgataaaagtggagataaaactacttcaaaaaaaaaaaaatgaaataaaataaaatagaaaaaaaaattaagtgttaaaaatccatcaattgaaggttgcaaggattgaactcatgtcacttagcatgagctagggcaacttaccatatgtggtagaataatttattgtataattttttttgtagggaatttattgtataatttttagggaatttatatattattgtgtatagaatgtaaatatatacatgtgttttttaatgtaatatgcattcactttttctaattatatatgttttttttttcctaaatagtacttaatattgattttatctaagtttatgtatcttaaaaaataaaattaattattacaaattttaaaactattaaattaattgaaatcttaaattaaatataagttaagaaaagaaaagaaaatattatttctaaagtattgaatttatgacattttaattattttaaattataaaattattataagttggatatgttatagttttttataagtataattattgttttaaaaataaatttaattaaaatatttttttatgtaaatttgaaataaaaaaatatatataattaaaactaaattttaaatagaaataaaattaaaagataaaaaaattaagtttggagtttgttagtgtaacctacaattaataatatttaatattaattataaataaaaaaa

SEQ ID NO: 400047 - DNA, 504 bp, Cannabis indica
aacctaaaaattatgttctgactacaggtcagaacttttttgcaggttatggacaccagaggtttagccttcgtccattttgtaaagaagtcaacagccaccacttcgtactttgctcctcctcgccctgtgggtggtgccccaatcaaatttatcccccatattgcaaatgggtaaggcgaggtcatcatccttagttccgttagtgttacgcgaggtatatgtgagaatctctaacatttatcgcatttcttgacaaatttgtggttgtcctcatttatggttggccagtaatatccttgtcgaataatcttttttgacaagctttgcctacctgcatggtccccacaaaagccttcatagggaacaacgatgacaatgcgggtgagatacggtgataaaaataagcgagatacaatgagacaacaagtgagatacaataataacaatagttctgaatgatcgagatatgaaaataatacattatgggaaacagcgtaattt

SEQ ID NO: 400048 - DNA, 559 bp, Cannabis indica
attgagtttaaggtagttttctttggcttcaatccttattttatttctgattttaagtgttgtaagagcatagaatgtggtgtggcttatgattatgaacttgtgatgcatgttcaagtatgttgggtttttttgagctttaatttcttgatcttgtttgggttaagtttggacagaatttaaaggaatttatttgtgtttttattctgttattgaaccctaaaattggtgtttgatgtatgagttcttgagcttgagttttatggaattaagctcaagttggagctttgattttcatgaattagtaatatgaaattatgggatttattgcgagaattaatgcatgaaataggttattttgaccctctaatatttgttagcaaccctatttgatgattcgagagtttggttgtgaattggggtgatttgattgtgttttcgagcagatttttgtgttcttgctattggttttctgggttttgaacccagatgccgcgacatggtatttagcatgtcgcggcgtgcccttttctttttgggcagatcctaatgcaaactt

SEQ ID NO: 400049 - DNA, 673 bp, Cannabis indica
tttttgacgattgtaactcaacaaatatgaaagaagatcaagttacaatgtttaagtttggacaaaaatctttccaaactaattcctcatcaagccctaaagcttcctttgccatatgatgtgcatgggtattgttatctcttgcagtatagcaaaaaaaacatctgggaaatgtgacaaggaattcttaatatccactatgacattcgcaagtgcagaaagttccttcttgtgactatgaatcttgttggccagctgctgagaatatgtaaaaatagtagaaagtaggaatcttacactgcagcaccagcttagacccgatctcagagccatagcctcagccatgatgggtggaaccttagctgacaaaggcaaagaaactccagctatcacctgtccattccaatccatatccactgctccaagcccaatcttactgttcttgtcattaatggctgctgcatctgtgtacaattggtaagatccttccttggcttgagttaccgctgtggtcgtgcgcaagtggcaagctggtacatcatcaattttcctagcctgtgcatccctgtattgaagcaaatagctactggcccattgcactaaatctgcagcatctgaatgaatattcctgaaaagctttttatttttaggttcccaaatagaccataaagta

SEQ ID NO: 400050 - DNA, 988 bp, Cannabis indica
aatagtgcctgaaggggcactggaagaagcccccccgggagtgaccaactgagaagaagtaggaggaggggaagcatcaggactatgggctccagcaagagtggccaagatttcgtccatgggtccggctgctgcaacaagaaaataggccaagtgttagaacatccatgaaagcagcatacacttagcaaaaaacaatcaagctagtcctaccctgactctctaattcggccctagcaaagtcccgaatcataacactagctgcatcatccccgagatagctgtccgaaggacggaaccagctagaagataaataggctgaagggtccaagggaatgggcaccggaggtccagaacccatccgggaccgacctaaataatcgcctaagtgggagaaataatactccttggcatgattcccccaccgagtggaaggcatcctaaacctatggagacgttcatcgaaccctataggcctaaggctagcatactcacggacggaagggacataatgtatcattaaaggggacttaccagaacccgaagtgctggcatcgggagcccccgtattcggtactgggaccacgggctttggtctgggggtccttcgctccaccggacccccaatacgaagggcccttccggcggccgcctgggccttagtgtaagcccgctcatgttccctcttgaagaggtacttctggtacttatcctccgccgtggcgatgatatcatcccagaataccttctctgcggccggagccctcacatccgggcagacgactttggaaaggttggagtcatccaccgactgatgccccaggataagtttggccttccgacagtgctccgtcgtgaccaactccccgacatcaagggccttcttgtcatacgtggcgaagatcttggcccattgtaggaaaagttgagtaggttcggtccgcatataaggggggatcctaacccactccgtgagaagctccagatg

SEQ ID NO: 400051 - DNA, 680 bp, Cannabis indica
atttatttaggtccaatacatgaatattcaacttaaagtctactattcttacaaaaaaaaaaaaaaaacttaaagtctactaattattgtattattgacaatttgacacttaattttttttttcatatttattttcaagtcttatggtattttgacaagttttgctcaaagtttgttgtatttgtgatagtttaattatttagtgatagtccaaaccgcataaaccacaaaaaccgcaccgcaccgcactattttttgcggtgcggtttttgcgggtttttaatttcgcggtgcgggtgcggtttgagaaatttgaaaaaccgcatgtgcgggttggtttgaaaaaatagtcaaaaaccgcaccacccgcaccgcgaacacccgtagtgatgacttcggtggtcatgggtgggtggtgggtgcggtttcggttgatgtgtgcttggaggtggtggtagcatgaagatgaaaaaaaaaaagtaaaacagaaattagaaaacaaaaaattaaaataattttacttcttaaaataattatattaagtgtaatagtgtaaatttgacatgtgtagaagtatatccacataagctatttatgatgatatttagccgagattaataaatgatacttaagtttgttaatggtttagtagtttgaaaaatttaccactaaaatttgaa

SEQ ID NO: 400052 - DNA, 1136 bp, Cannabis indica
attttgtaagtttttatctctatgagactctctcatacagtgactagttaaagataaatttacaaagtattacacaatgttagaagctcataaaataagaataaccttcactctaccctaccgggacaacattggattcttattttgatcaaataaaaggttactagaatggtgtccattttagatgagttgactactctattcaatgaatgatatcattgactctcgcctaccgggacaatgtattagtttgttgaaactttacaattatttaagatatgatattttttgtattttcacatacttttattacttactaaatgcttaataatttctgaattatgtatgaatttatattgaaccttcatgttattttttgttattaattgtagtataaattttgagtcttcattattagtcttacataatttgttattttaacgggacaaatcccaaaggattgtcatccattagacaaccaaaatagcgttagatctcgtcagataaatatttgtaaatgcgacatctagttgtacatccaaatatgacaacttagattagtgtctacaatatgaaacaatgaagaaatttataatataagaataactttgattgtcgcctaccgggacatcgttggattcttattttaatcgaaattatcctttattttcgtcttagctttttcattaagaaattgcttagaaagtatattattggataaatagtttataaatcatctgcttatgatgtcactctattttcttctttgaattggaatggcgcagatgactatattccagacattctatcccaaaatgatatgaattcaatcatagataatctcctccttgtacgtgcttagtggtggtccgagaaagaataattactcaagaaatatttggtataaatttaagtccttgactttatattttagatcccaaatagaaattttaaatttcagtttccaagaatgcattgaacaatatagtataactttcacaagttgttaatatccattttctgtcaatggatccgaactttatgtttaagtatattggattatgagttttgtattctgtgacctgaaccaacttgcactattctaagaactttttgttgtaactagacctaagtca

SEQ ID NO: 400053 - DNA, 1102 bp, Cannabis indica
ccttcctctctctcttcgaaacccacctagagctagctagggtggggttgtttttctgcatattaaagcttcttccagctggtgttaggagatcttaagctataggtaagtttctagtatcctcctctttgatttcttgaattgtaagaaaatggatttttgcatgaattgtgattttagctgttgtagttgctattagtgtggaatattgttttttgaaggttaattatgttgtattgtgttgatttgagcatgatctaatggctgttagtagagttaggcaagttttgaattttagaactcaaacttggagctgtgatggtgtttttcaattctgagcttggatagttgttttattgcttggaaaatgtttattggggtagttgtgccacatatgaccccatgaggaatcaaggaggacccaatccacataattttcctcctcagcatgaatcccaaggaaatatggagcatcctttgagtgacaacctccatagaggggacatgggagtttgtgtcacaatgttgcaaatcatgcattgggtaatcaaaactttgtggcacatggtagccatgacccatctccgcgactacctcatgctccaagtaatataggggtcgacgtcaaagaaaaaagggagaaccctcaccgagaaaggcaacaacctactcaagaaccgagttacccttcaaggtcacaaactaccgctacatattcccaactaggggcacaataaaatcatcaacaaaccttcctcgaagatagcgatagcaccgactcgctaaattactccataagtatttatgatgacattcaacattggtcctatcaagaacattccactaatcctcaataccatggggaaataccaagtaaaactatgtataggggcatctctaaaaaagaagattctaatttaacacatcctcatgttggtaaccgtgccaacatccctccttttcaaggagccaaccctcatgttggtaaccatgccaatattcctcctttccaaggagccaatcctcatgttggtagccgcaccaacatgcctcctcatcaaggagccactccacatgttggtaatgttggatatattttacc

SEQ ID NO: 400054 - DNA, 960 bp, Cannabis indica
gtaccatagagtcattgtatttggtcattatatggataaattgatttactaaatattcattacatgatttgatttttcgaattattatcaaaatattctgacaatttatgtgacgtagttattgatagagtatcttacttataaatatagggtctcgatcctcgaattcttcactcattctgtgcaaacaaaaaattctatttaaagagagtcgagagagcttgaaagcccaaattctgataccgaattaagttattactaggattgaagcttaaagatcaatgattggaggtattttggtcctttcatcgcatatacaattttgatatgtctatagtttatatatatcaatcttatatgctttatttttcttattaaaattaatctaacagttggtattagagcattttatctttgcattgatttatactctgagtttttcgtatatgagtatatatattattgattgttggattcgctaatgtctgtaaagaccgcttaactttaatttaaaaattagcagatacatagagtttaattatgaaacttgcctattagttatgaattattattttatggagatttatttgaattcagaatgcattatatatgtcatatatgaaattttatatttttgcatgttttgtgcccgacaacattagaacacagtatttggctattagaatcacagcttggtgtatttttagtatagcggggcaatatagttagacattgggaatttcgagaatagccgagattttagaattgaccaaattcattgaacgcggtgtttggctattggaattgtatgccaaattcaagaagtgcgagttttggctatcccaggtgtctcttcttggacacattgtcagtaaagatgggatcaaggtggatccggggaagattgtatccgtcagggattggccgagaccgaaaacagttacagaggttagaagtttc

SEQ ID NO: 400055 - DNA, 710 bp, Cannabis indica
catacgttgactatgaagttgaatgtatactaatgccattagattgttcatattatgaactttctcacataatataccaagctttgaagttggacaaaaccaagtatgagattgatctccaatttcaagtaagagaaggcatacctccaatttcaagtatgaactactttctttccatttttcagtgccaaaaaatgtgagtttgttaagttatggtttatatgttatttcaaaatacataatcatgaaatctttatggataaacaattggaaaataaaaagagattattttataacaaggtacaaatattgaaaaacattttatatgaaaatgggccatattctcaaggaatttaatgtgaattaatttcataccattacacatatattcattgatatatcatgttatcattacttgcctatataatatttgaatatagatatacatacattaatattctgttaaaataataatcttattgattaaaattattgctccacaaaaatgttaaattatagatatgagaaattgtatatatatatatactagcaaaaaactacgtgcgaggcacgtatactaaattttatgttaggttttttctatgctatttgaaagtgagattattattgaatactgaatgcaatatattagtgtttaaaaaagcttaatgatttaaatatgttcttaagttaatccaaaaataaactaa

SEQ ID NO: 400056 - DNA, 677 bp, Cannabis indica
ttgcctatgttgttagatatatgtgctctatatggtcatgaaaatgaagagttgaccagggttttggtaagtaaatgtcatagatggctgcgtgcttttgtcttagtagtttcataatctgatccatttccctcccttttattattattatttttggctggaagagttgtagattggctgtgttgaggggttgagagtaggattagaaatgacctgcctaaaattgtgtgacacagaattctgatgaaagccaacataaagagaattttaattttatttttcttttttgaaatgtttgatctttctttttatgtagttaagtagcagtcatacttgcacctttggctaattggtaatttaactgcactattgaatagatagttatgtttataagatttgttcaagaatgcaacagagtatctacacacttaagtaatttgcacattgatatattacaattttttttcttacccatcaaaccaatacatcacttgcttttgtgtggtactcgctgttttggctaattgatcatttatgttttaaactaatattcttactctttcttgtactaatcttcttcctctttaggtgaggaatgctttaaatgcccaacctattattcatgaaaatttggcttcagtagtgtcacagtttctgagcattactcacacaatgca

SEQ ID NO: 400057 - DNA, 838 bp, Cannabis indica
attttttttaaaaagaataaaacaaatgaaactacaatgattgtcgaatttaggggtgaaaatcggttggttatggtcggtttttacaattttataaccgaccggttggttacggtttttattttacgaaaatcgtaaccggccgtttagaaattataactgtataaaaccgaccgtacggttcttggcagtttttcggtttggcagttttaggcagttttggcggttttttgatttaaccatttttttatttcaaacaccaaaaccgaccgccatgtcaaagaaactgaaactgaaaccgaccgccgaattcgttgaaggcgaggaaccgaaaaattcagttacggtctggtcggtttgatggtcggttacggtttatcactttttatgaacacccctagccggatttgtcaccgatgccaaaaaaggcgtcggagtttgctgtcagctccagaaaagttgtcggagtaactgtcggcaccgagaaagtcaccagagttgctgccgacactggaaaaatcatcgaagttggcattatcaccggaaaaattaccaagaaactgatttctacatcaagaatttcttgatgaagaaaccagtttcttggtgatttttccggtaattgataatgccaattctgacgacttttccagcatcagcagcaactctgacgacgttttcggcaccgacagctactccggtgattttttcagcgccaacaacaaactctgatgactttttcagcatcagtgacaaataagactatctaaataaataaaaacattaaatatgggatttgaaaacctaatttacatatatatatatatggcatatcaaa

SEQ ID NO: 400058 - DNA, 900 bp, Cannabis indica
aagttggcactcgcgcttgggatcaggatgttgtccgagacttgtttgtttcacgtgatcaggaccttattttgtccattcagcttagtgattcagccgtaaatgatggttggaattggagacttgagacttgtgggaattattcggttaaaagtgtttataaattcttgcaagaatctaaaggtgcttggtgccgtgatgccaataataatttttgaaagcgtctggtcgttacaaatacctgctaagatcagtaacttcttatggagggctgcttcgggtgtgctcccaacttgttttcaactccaaaaacgtcatgttcccgtcaatgctgactgtccgttgtgtaacgctcatgtagaaaccgttcaacatgcgttggtggagtgtgagtttgctaaagctacttggaatcgcagcatggtcgacgtcggggttggggctgcaacattcagcagctggctgttggggatcttcggcagggggcacgaaggtgaaatggaggaagtggctatggtgagttgggctatttggtgcgcggaatgaatttgtttggcaaaagaagagttggtctgcattaaatattgttgcatcagctagaaacatgcttgatcagtataaatttgctcaaggaaggaagggtctttcgttgtctccgctgcatgatgggaggcgaaatcttgagcgttggaatgcacctgagttaaacaagatcaaaattaatgttgatggggctttatttgaacaagaggggcgttttggcatgggttgtgtatctcgaaatcatcatgatgttatggtagaagcattccagaaggagaagattggttgtgttcaacccgaaattgctgagataataggcattaaagaagctttgagttggattgcaactcattcgtg

SEQ ID NO: 400059 - DNA, 553 bp, Cannabis indica
agagagagagagagatggggtcccactattgggttttaggtttaggtttatattatttagtttatatatgtagggttttatgtgttattgtttaggcccttattgaattgggctttttttcctttcatttaatgcgttggtttataatagacgctaggttgtgtctattataaacagacgcaaatgttgaataagtcatttttaaactgtcgcaaatgttgaatatggcgtcagttccaaactaaaaaaaatcttattgtggtttttttgcgtcagtttttggcattcaccgacgtgttgactgacgcaaaaatacacttttgtagtagtgttcttgtacaatcgatgattacattatactatgcaagccagtcgattctcaatatagcatcaaaatcctctatgtttagttcaatcaaatcaaccgacaattcctttccctccacaaagtcatgagttcgaaattttagagaaaaagagagagagagagagaggcgaatagcttttctgaaagaaaccaatgttcaaagtcatgagtttcctgaagccaata

SEQ ID NO: 400060 - DNA, 2221 bp, Cannabis indica
tactccctgtatcacgataataatgtagctacgtctacttcgagtttttaatcctcacgagatgacattacagaaataggtcaagtatcaaagctccaataggaaaactagagagagaagctctgactttgtggatatagttttttggatgtgtaaaattagctaagggagctctcattttatagttgaaggagacccacaaaaaagggagaaaaatacaaattggatatttttgaccgtagatgatgatctaacggtgataattaactactgaaggtgatagtcatttttttagagcccggcgagacttgctgcgggtaatccgaagcttatttttgtaactcccttggggtggaatttgagattgatagctttagaattgcgattgaagtgttagacatgacttgataaatcattaaaatatattcgaaatgcaagttaaattgcgtcaattagataaatattaagtgagttatgactgttttactgaatgtagttcatgatgacccagcgtccaggttgacatccagcacccaagttgacatataatgtcgacctggatgttgggtaagtgaaaaaacgtccgggggatgtacattaagatgcctaagtgatattttgacatcacttagtctattttcgtgttctgcggaagctggtcaccaattttcagagatgttgctgttctgcagaaatgagagactcgaaattctccattttcgagtgagtttttccatgttgaaaatgagaaatgcaaagttatgagtttgacttctccgacttcatggatcttagttattgtgaaaaactagaaggaaggttgaaacagattagaattgaataagcaaaacccagcgcaccaggccatttgtcaacttgggcgtttggtaccctatttttgagctcccagcctcccaagttgtcgttttgatacttccaagattcttgaacttgagaacaaggtctcatatcccatttttgaccattacggatttaatggtcaaatcagatctgacatttgagtgttcgaaaccagcacattaggttgattatcaacttgggcgctcggcccagcactaggtcaacctgggagttggctctgtttctaggggcttgggtttgtggttttctccccgagtctgcttgaatattcataatttctaatgacgaaaaaaatggccaaaataatttttcgagaacttgattagaaacaacccagtgccaagtgtcaacctgggcactaggtcccagttatggtctttcaaaagttccgtttggtcctctaatatagtttaatcttaatcttttctgaaaatagagaagattctcggaagagttctaaaaaaacttcatcaaaattggcctaagttgacaaaatgtcaacatcttgtttttggcacccagggagtgttgtttcttccccaaaagtacctacttcccttttttttgatggagaagaagataatgattgggcattgggtgcccgggaaccaggtgcttcgtgtgcttagaaataaacttgctctgaatttgattttgatgccttaaaaatgtatgtggtatgtctagtcgatgtcccaatgtagtttgacccatttgtactaagacggtcctggaaactaaaatcctagtcgggaatgtcaacttgggcgctggggaaaaccctaggtgcctaggttggcttctagtgtgtaggttcgtgtcatttcagctcctggggcttggatttgcaccatgacttcatggcacagaatgctgaaagatagtgagttggatccaaattattgaggtctgaactttcatcttggagctcccgaagttaacttgggcgcatggctagggtcccctccaaggtcgactgctatgacttgggtctactcaactcagtgatgtcatgtttcttgccacgtgtcaaacactgatgtccacgtgatcaggaaaagttttcgggttaacactcttaaactttgtcactaaaaagttatcccctatacttatatgtgtattaaataaaccttttatattttagacagttataaaaaattagtgttaggttacattttgtcaattttctcacttatcttactaatgttgcataatattgtctaatttagtttcttacctaagcaaactaaaatagaaataaattttacaaaattttattttaatttaatcattaatatatgttttaaattttttctttgataatgaaattagtttc

SEQ ID NO: 400061 - DNA, 529 bp, Cannabis indica
tagctgtaactttttaattttaagctcatcttttggtctattaagatttattttattagctgtaactttttaattttaattttaagctaatcttttgattagtcggaccaagtccatgcacgtaatagaactaaatggtggagaaattaagctaagtaattaccttctatattttaatttattaaaatttgtattcatttcaaattattttacattaaattatactttttggttatcaattagattttttatatttagtaattaacaggttgatttgtgcgtcaattatgtctttataattgtattaatttcattcaccttttcaaaatcttaaataattttatgtcaatcttacctgttatattttattaattatttcttttaaaaattctttatatgattgatagtcaactagcatttttaattatattaacaaaaatttatgtatataatattttctaagttcgatttttacaagtttatagttttgaaaggtgaatttcttttgtgatttcttggtatttattta

SEQ ID NO: 400062 - DNA, 558 bp, Cannabis indica
tattatttaatagagtgaatctatattcttaaaaagaatgtaccgatacactttctatttattttggcatctatttttttagaataatttacaatataaaaaataatgttcaaacagtctattttacatgcatataaaataaaatagttactcgtgtaatatcttgtttgaaagttgttttcaacgtgttaaacttttctaaatttcttaaaattttatagaatgttttaaataagtataatttaatgacatgagaaaaaatttgactaaaaaattattttggatacttaaaataatagcaatgtatcagtacatccattttaaataagtgcattatagaatttttttaataataattaattattttaaaataaataaataaatattaacttttataaattaattttctaaatttaaaaaaaagggaaataccaaagcaaatagagatataaagtaggggtgggcatcatccaatccaatccaattaaaccgaaccgattcaatccaatccaattacaaaaagttggatatccaattacaattggattggactggatg

SEQ ID NO: 400063 - DNA, 598 bp, Cannabis indica
taaaaaaattaatttaaaaaattctaatataactaatagtatagtatatatgtttatatgtacactaactcattttaattgtatgcacctccaccatttaactaattaaaatataaaaagaaatgctttcataagtgagagcaaagtgatgctctcacgtaaatatttttatatataaaatatggcaattaaatgacagttgttggtttaactttttttttaacgtttcttttttaaaaagaaaataaattaaccaaaggttaccttgacttcaccatctcaaacaaaatcttatcaaacgacttagttgaagttcaatccaatcgcttgtggttcgagaatttttagatgtttttcttgatgaacttccaagtttaccactgcacaaagaaattgattttattattgatttggcacctagagcataattggtttctaaggccccctacagaatgtctccagcggaagttaaggaattaaaaattcagcttcaggggttgctcgacctagggttttcacgaccttgtgtgtcaccctggggagctcccgtattatttgtcaagaagaaagatggatatatttcactgtgctgacgaca

SEQ ID NO: 400064 - DNA, 1159 bp, Cannabis indica
taatttaatcttgctgaataatatagctaagtgtcataaacctagatagccacctatcccttcattggcattttactaaaatgcccataaatccattacaaatgcatttttcaaaactacgggtaaaatggtcaaattctataaccccgctcaacctcggtattctattttctttaaaatatatcgcactaaaaaaataaggttctatattacccatgtgatcaaactaaccatccatcgcattttccattatcgtcgagcaaaaattataaaaataacataattcacatatagttcatataatacacctagagtttaataaaatctctgaaattgagaaattataactctaatgtccacttctaacaatggggaccatagaaaattaaattcataaataattataaaaatatcataaattagtgctaattgcttttactaatccaaattactaaagcagtcattacataatgcttgtttatctcaagtagttgccagtctccaagacgagagagagggtctctagactcttcttcgcaagttggaggatgaggtcaaggacaagaagaccagggaggaggagctcgaaactgaggttaaaagccaaaaatccaaggtggaggagcttaggaagagggtggacaccttagagaaagctagtctcgagatcttttatgaattctggaaggctaatcccaaagcaaattttgaataccttggcacttctaaagacatgtttctcaaccacttcatggctcaggcgaccaatgagaatcctgaggcgaccacttccacttatcctatggatcagaatgttgaggctccttctgtctagaccgatgatcctccggctccttcagacctagctgatccttacaaagagcatgggactccagctgtctgatttccttttctttactatcttgtttttttatatgtttgtttggctagtaagccttattttgagactaaatgattggccaagcagtctttaaacttggaacatctttcattttttaaacaactggctaaccaagcagcctttaatcccgggtttgaatgctttgttatccttaatgaatttcgttccttatttataatcattgtgcaactatgttcgttttgttttttaccaaatgctttgtacaggtataggtgc

SEQ ID NO: 400065 - DNA, 528 bp, Cannabis indica
aataaatatataagaaacacatccaatgggtaaaaccgattcaatccaacatccaatggatgttgaatcgattggatgacgaaattaattggatcagattggatggtaaaatctaacatccaatatatgattgaatcggatctggataggcctaaaaacattggatgtgatccaatgaacacccctagatttcgctaagttaattcttaaaaaatcgcgtattcggtattttaaaatacaatcaatcgaaagggttaatccaatccaaacaataaaaaaggaaggatttcttttaagaaagggattaaagaaaacgaaattcaaagtagaagtaaaagaaaagaatttatcatctatttgtagcattttgatttattcaaaacctttttctttatcttattttcattgcaaaatgttgtatttctcagcctacctttttttatttctagaatctccaaaaagggtattgttaataatctcgcaggtactgaaaccattagaagaacacccaataatttatttggtact

SEQ ID NO: 400066 - DNA, 1032 bp, Cannabis indica
aagacaaagtctatcagtgggacgcggtctatgagtaaaacgagatctgccagcaattactcccaaccagatctgtgagagcacttgaattagaagaaacctgaccttcgccaacagcttagtccaaagcaagaggatccaatccaattgcggataaacgagttggaggagtagttcaggagatatcaagtgggggaattagggaaatcatctggatacgactcttacgaggagcgcgagccgtatcacccagatattatgaataccccttttccttcagaattcaaaaacccgcatgtcttgtcctataacaaaaccaaagatccagtctcgcatttgaataactttaacacgataatgcgagcgagtaacgtgatgaacaatttacgctgtattttgttccctacctcgcttgttggagcaatgagtagctggttcaaaaggttcactcatcattcaataatttcttgggagcagttgtctagggattttaagaagtaatttcaagccgctagggataggcaacccaaagcggcctcgctaaccaatataaagcatcagcctgacgaaacacttaaggcgtacttaagtcattttagcacagttgctgctagggttagaaacttggatgacagaacgcaacttacagccctttaggcggggatctccactgatccattaaccgccgggggcgagttgtgggatgatttacaaggacgtccggtaagaaacatcaccgagttcaacgagagggctcaggtgtttgtccgaaaggaagaaggccgaaaggaaatgaacttgttgaaaacaggctcgggaggtaaacccagcaatgtttccacagggactgcttcacgagaatcgataactcgggggcttctggtccgaaaagaaaggacggaattagggaaccgtcgaaggatagaaagaaataaaagaagcatgacaaatacatgacagtgtatactatttataccgagcttaatgaaactcgggaaaatatttaccttacacgtgagcagaaggtagcct

SEQ ID NO: 400067 - DNA, 530 bp, Cannabis indica
tagaagatctggtcgaggtaaaacagatgccaggggaacccctctgaacttatataagcagatttatgacaaaagctaccaaggttaaggggttgtcgaagaaggaaggttggccgctatactgtggggcattgagccacttggagaactgtggaaggatattaagaggttgatcgtgggatcaatggctgaatttttggaccgagcagaaggatttattaagtttgaagaagttgttcggcgtgtagacattgtcagacaaaagaagatccaactacgtaccacctcggcatgagcatccgctaacagtccacaatatcctggcagttcgaattcgaatgggaagaggtgtaataacaatggtaggcagggcaacagaaagaaaggcaagttcattggtaataccgaacagcaccccagggaaaatgccttaaattttactgccttttctatcctaacagacgacctagagacaatatatgcaacaactcagtctatggtcccatgcaagaaaccctctcccatgaaga

SEQ ID NO: 400068 - DNA, 594 bp, Cannabis indica
aagaatgtaaggcatgttttagaattgcgccttaatctaatctctgtaaatgccttagatgagcaagggtaccacaggtatttcggtaaaaagaattggaaactttgtaaagggtcaatgatccttgcgagatgagagttatgttgttcattgtacaagagttatgggaaggcttgcagcaatagtattaatgtagcaaatgacacttcaccaaatttatggcacaaacgacttgtactaaggtactatatcgaatccttgtgagcattacttattcagaaagcagcatagagtttcatttaagagttcctatgctatcaaaaaggaggtaatcaagcgagtttagtctgattttggtcccatagaagttgaatccttcgcaggagctaagcattttgtaactttcatagataatgatgcatgaagaatgatgtgggtctaaatgataaagaagaaagaccaggtgtttggatttttccaagaatttcatgctatggtagaaagagaaagtggaatgtatttaaagtgtctcaaaatggagaatggaggtgaatatacttctcatgagtttagaaactattgctctaaacatgg

SEQ ID NO: 400069 - DNA, 646 bp, Cannabis indica
tattcaataagttaattagtctactcattatacataaaggagactactaattaaggttgataatcatagcttccgtcttaaaataagtggagtagtcacatttttatatttgactcaacattttattatttaatttattccatataaaataaagtatgaacactacccaaaaaagagtattataattttatttaaattaaaataagtgagattttattcaaaaaaaaaataaaaaaaaataagtgagatttaatattaagttatactaatattgatattacacctcacagagtgttaggtatcatgggtgccctttagcatttctaaaaataaaattatcactaatttagtttttagtaaaaaaaaatttagttacaaataaatttttgcgactaaattaaaagtgacctttaataaatactaaaatgtgaccgaagcaattggggtccaagaggctttgagttggatcaaagatcattcgtgcctcagtgtggttttagaaatggattatctttaggttgtacaagctatccgtagctctgtggttatgctttccttgtttggcaaagttgttagtgattgcaagaatttattaagtattttgcgtaatgtttctttttattttgtaaaacgatcagcaaatgta

SEQ ID NO: 400070 - DNA, 572 bp, Cannabis indica
ttatttttttttgtaaaaataatgatgattaaaactgatctttgcctctcttactcattttgcattttatatgtgtggatatattagttttttttttattcttattttccattctccttccatgttcatcttcttcttcatttttctttttttattttcttatattttgtgtttataaaattacacatgtttctagtttttatttttggctaattaggatttttcctcccgaactttgacatgtaccaaatcatactccctgaactttcttggccgttaaaaattcccactaaactattgaaattgttagatttaatgacttttgtctaatttcattcaattttactattttagtgattgtttatgtactaaatcgtgctccccagagttttatatctaccaagtcatgcccctcaaactttgatatgttagtaatcatgccccgtgaactttcatccatgttagaatttttttactaaaattagacaaaagtccttaaatctaacaatctcaatagttggttaaaatagaatatttttcaaattaggtggttacaacttaattttaatatt

SEQ ID NO: 400071 - DNA, 586 bp, Cannabis indica
tgttcggggttggaaaataattttgtactgacccaactacaccgcccacttgagtagctgtccagaggcgtccagcttttgcaatatttagcgtaatggttggtcaatgtacacccgaataggatgagcttgaaaatagggccttaactttcttgttgctagagtaaggcagtaaatgagtttctctatcggtaggtatcggctttcagcctcaatgagtcttttattgatgtaatagactcggtgttgtaggttgttctcttctctgattagcacggcactcacagggtgctctgtgacagctaagtatattccaagttctctcaatctagaggttttgagagtatgggaggttttgcgagttgtgcttttagctctcgaaaagctttttcacattcctccaaccacttgaattgcttgtttcctcgcaggatattgaagaatgggacacacttatctgttgattttgaaacgaattcgttgagtgcggcgatccgaccagtcaaactttgcacttccttggttttagttggtgacttcatatccaggagggcttgaatcttctctggattggcttcaattcctc

SEQ ID NO: 400072 - DNA, 392 bp, Cannabis indica
cgaatgttaccattaagatgtaacatcttgcatgaccagtacgtcgccgattggtgggtggaccgggacgccgaactgagtcgactactctaggatgcgactcagtcggagaagagaaccagtcgccgtcgccagtcttgaagaagaagaagcgtgcgtgcctaccgtgcgtggtaatggtttaagggtagggtgggtgactccgtgactgggtgtgggtgacgacgactcgagtcgactggtgtgggtgagggcgagtcggtgacgacgagtccagttccagtccactgaactgaagtgaagacgaatagtgttggaaattattttatatgactccttccgttaagatctctaacccttgtatcctttctgtcccagagtattatcaagat

SEQ ID NO: 400073 - DNA, 697 bp, Cannabis indica
agagagactttttagttttttttttcacatcaataggtatgtggttggaatttggacaggctgaggaagtgggtaattgggttgggctaggccggctggaggaaatgggtgttgtgggtctaattttttttaaagggttaaatggctggcaggttttgggccctaggcacgggcctagtctgcctaggcccagggctggccctgcctggagcatagcctgtttcgaaagcgccataaaaaatgtctccagcggaactcaaggagctaaaaatataactttaggggatgcttgatttagggtttacccgacctagtgtatcgccctggggagctctggttttatttgtaaaaaagaaggatggttccatccgaatgtgtattgattatcgggaattaaacaaactaacaattaagaataagtatctgttgcccaagattgatgatttatttgatcagcttcaagggagggaaaactgtattttcaaagattgacctacgatctggttatcatcagctgaggatttgagaagaagatataccaaagattgcgttttgaaccagatacgggcactatgagtttttggtaatgtcattcggattgacaaatgctccggtggcctttaagatctcatgaaaagagtattcaaggatttcctcgataactgtgttatagtgtttatcgatgacattcttgtgt

SEQ ID NO: 400074 - DNA, 683 bp, Cannabis indica
ttcaaataataacatctagacaaaagaaacaaaagtcaaaataaaattaaaaaaaaaaaaaacaaattacaaataaattgacaaggtaatgtgtaaatggtgttttctctttattatctcttcctatgattcaaaatatagtatagtgaaaaatataactcttgtatttatagacaactccggatcattgttgtaagaaatctaattgatgtagtttcatattaaatatatggacacttcgagatgtttgttttttctttccgggtagggatattttgttaatacattaattaataatcttatggtaataagaagttgaagaatatgatagtaatgatggagtttagtacaagctaacatatctcttaatattttaataattattattttaagtttttaataaataatattattttacattacaatttttttttttttgtccaatttattttttctcaagaaaattacactttattattctttaaactcttaaaaaagacatttttctttcttctaacaacaatgaaacttaaatctaagtaatatctttatatataaaatgtaatacctttttttgtagagacgtcacgtgtgattttataaattagtttaatactaatagattaattaattattaaaaaccgtgattataataaaaatttgactaaaataaaacattaaaa

SEQ ID NO: 400075 - DNA, 783 bp, Cannabis indica
tgacttgagtttatctttaattcatttgattactgtcttgtctttgcccattattaacatatcatctacatagagtagaagatacacaactattgactcttctaggtgcttaaaatacaaacagtgatcaaactttgaccttgtgaaagaaatctcctgaacatagctatcaaatcgtttgttccattatcgtggtgattgcttaaggccatatagggacttttccaacttacaaactatttcttttccatcttgttccatctgaaatccaggtgattgctccatgtatatctcttcatctagataaccatttagaaacatagttttaacatcaagctgctccatttctaaaccttgctgagttgccattgacaacataagtctaatggtcttatacttcaccacaggtgagaacacctcggtgttatctatcccttccacctgagtgaaacctttggcaactaatcttgccttaaaccttactggctcatcttctgtcacactttctttaatctttagaatccatttacatgaaatcaccttcttgtactcaggtcttggaaccaatacccatgtcttgtcctttctaagtgagcttaattcatcatccacagcccaagaccactccttcttgtactttctatttaaagtcctcttttatactcaatggttctggtatgtcacatgaatgatctattgacaaagcataggcaatcagacagcctctgcaaaccttgctggtatatggatttctcttctggttctatctctagcaagctggta

SEQ ID NO: 400076 - DNA, 911 bp, Cannabis indica
gaagcagaagcatggaaaaacttgctattctaataaccatcttggagtcagagctgcttagaacgttgacaccagtaaatctcacgttggtgaagagcagtagccaaactatttttctcacccacatacaagctacatgcctgaggatcacttttacccttcaagcacttaagggccaccttaacattattaatacgctgcttgaaaatttcagtaacagaatcaccccaacatgctaaattttcaccacaaataacaagcttttcttggaccaaagccccttcattagttttctagctgttttttacaatttgaaaacacatgggatcaaataacaaagcattctcaaatctaaaagacttgaaagaaacaccatgttggtgagtgtgcttttcaagaaaaatagtagaatggtctgatgaggaatagtctaaattaaacaacttcattgaggaatataaagacaatttttaatttactgtaacaatattaacttgtgaacaattactaataacaatgattataattacaaattattaattttgtttgcacttaatgagagtctgaatctgattcgttcagatatagagccattaagattatttgttttttactttttccaaccacttttttactcttaatatgtatgaatgaattagaagtgtatattttctttcctaagagcatcttcaattgaggtgcaaataagtggtgaaaaattaaaatatagctcatttaatgtgctctaatggtgtgccaaaaagtgatgtaaatttggcacatagaaaattttgtgccaaatttgacataatatttgctatgatgtaaaatttacaccacaataaatgcactactttttcatttacatttatgtcatttctattattttattagtatatttaactatcaca

SEQ ID NO: 400077 - DNA, 1074 bp, Cannabis indica
gggtccaaggtctaggtctgggtccaggtattggtctagcttcgagtctttgtccgagtcacagatcaagacatcgactatgggtcttgtccaagcccctgttctcggatcctgggacaagatttggatcctaatcacgggtcccagtcgagtttcaattcatgccctaggtcccgctctgggtatgggtctaggtgtgggacggagaatggggtccagtttttggtctcaatcccagttctgggtcccgagtcctgttcaatgttcgagtctgagttcaggtttaggttcgggtcctgagtcccggcttaggtacaggtttaggttttggacccaatcccgcggtgggtctaatccgagtccgggtccaggtccggttacagttttgggtctggatccaagtcctggtcctggccctattcctcggtcccgatccgcttctagtttcggttccagtttcaagtaacggggtacggctttgggtcaagttttggttcgagtctaggttcggttcctgatttgggtccggggcaaggttcaggtctgagttttggtctcggttagggtccgtggctgggtctggtttcgagttcggattcgggtttaggtcccggtaccgttccaagatcccggtctggttccagttcaagtttcggttttggttcccgtgtgtgggactgggtctttgtatgtgtccgggtcctagtttgagttcgagtttgggtttgggttctggtctaagtcctagatccagacaccgactacgggtctggtcaaagcatcgagtcccgaatcccaagtcccagaggtaggtcctaagtccaagtttgggtctggggtcgagtcccggatcccgatccaagatttgaggcccaagttctggtcctatttcgtgggcccgattcccagctctgggttccccatctatatttggatcgtaggtcccgatctgggtcaaagttcgtgtttcggttaaggttcgggtccgatctgagtcctggtccggatttgggttcgggtctaagtttgggtcccagtcccagtctgggtccgggtttcaggtcccaggtctga

SEQ ID NO: 400078 - DNA, 564 bp, Cannabis indica
caaaataaaattttagacataaatccaggagtcttttatactccttgtggatgtcatagtcttaatttgacattatgtgacatgactgaatcatgtagtaaagctagagatttttttggagttatccagcgcatatatacgatttttgccaattctactaagagatggaaaattttcaaagataatgtgaaatgattgactccaaaatcattgtcacccactcgttgagaaagtcgtgtagatagtgttaaagctataagattttaattatcagaatttaaagaaactttacttgaagtgtcaaaaaaaaagatgaacttgattctaaaataagaagtgaagcaaaatccttggcaacaaatgagcttggagattttgagtttttaatagcaattattatttggtttgaagtattatctgctatgaatttagttagcaagcttttacaatcaaaagatatgcttattgatgctaatatggaaaaaataaaagggttaatttcttttttttttttttgaaaaatatagagaaacacgtttttatgatgccttgaatagtgctaag

SEQ ID NO: 400079 - DNA, 1159 bp, Cannabis indica
ggtaaaaatgaaagtgtcatagaagaccaaaaaacggtatgaaaagataaaatggctttaaattaaaccctcgtggccgaaccctattgtgggccctacgggttttaattttgccactttattaaataacatatctttctttctcaaatactatataaataccaattttatttatttaacaattacaattaattattaagtaaaattaccatttaatttatatattcgttagacctatcaaagtctcttaattaataaataaattctaaaatctcatttcttctcaattaagtccatgctaagtgaaaattcataaataagatatagtctaatttcaaattctaattgatcaattaaaacaatttaactgagtctacaaactaatattatatcaactagtgcggagaccatgaacctatataattaagctcccattaagtagttctagaatttaccaagtaaattctctatcttattaattccttctgactccactatagattcagaattgcactcctgattatatagaatgctctatatgtttcaaatatagataagctattaattatctattatttcaatccaaataatcaatgatcctctattgatgatctacatcgagtagggataattttactgttctacccttcaatgtatttttatccttaaaatacttagctccttgtaaataatattttaataaactaatataattattgaaatgagtaccccaccatttaatctcgtttagccaagctcaaagaaaatcatcgtttgacttctatgtatttatagaagctatagattcggtatatatgattagcgctcctactcaattgtactatcatattctcaagatgtaagtattgggaagatccaattagtcaactttaacgaataagtcaaagaacataaataatacaattgaaccagaacctaaccatctcaggattgaaataattgatctaagatcaagtaagtgatatttacttagaaagatattactaataagtttataatatcttttatatgtgaatatcgatccagtccgatgtataacaatacatccaatacaagcttactttaccaatgccttggaaaagacataccactatctaagtgtaagtaaaccacattgttgattatcatatcagtagaa

SEQ ID NO: 400080 - DNA, 543 bp, Cannabis indica
aaatatagtataattactagattatataaatacactatctacttatctagtaattacatggttacttctatacggaaaaaaataaaaaaaaatatattcaataccaaaaatatcattttaaaatatcaaatatatatataataataataatactatagcaatttaacaattaatttacttctcattctcccaactttactaataatattaaactacataaataattctcactttcccctttatccttcctaattaatttatccattttcctctccatcttcctaccaaacataatctaaatggaccaaatcgaaacacatatcaaagctacaccctttttttaaaaaggttagatttttgcccctgaactttgacatgtaccaaattatgccatctgaactattgagattgttagatttaaggatttttttccaattttagtaaaaaagtctaacatggatgaaagttcaggggtcataatttagtacatgtcaaagtttaagggacatgatttgatagatatcaaagtctggggagcatggt

SEQ ID NO: 400081 - DNA, 1346 bp, Cannabis indica
ttgaaaagtagaacttgttgtccgggtttaaactcttttctaaccaagtttctgtcatgccacctcttggtcatttctttgtagatctttgcattctcatatgagttaaccatcaatctaattgaattacaactgtcagattttgacataatcctgggaatggattttctgtctaagtatggggcaacaatcgatcgtaagcggaagatggtggtgtttgagcccgacactactagcccgacagtgtttgtgggtaaagtttaggggacgtgcatacatagaataacacttttaaaagctaaagatctgatgtgtagagcttgtttgggattcctagtcactgcagtggataccagccaacctgtgtcatttggacatgagagtacaagattagtgtgtgagttccttgacgtctttcctaaagatctatcgagattaccaccttcctgagagattgaatttgtgattgagttagttgcgagagcagaaccagtatcaaaagtaccgtatcgaatggctccagtaaaattgaaagaactaaagatccaactctaggagttacttaacttggggtttattagaccgagttactctccttagggtgctctggtactattcgtaaagaagaaagacgggtcactgcgaatgtgtattgattatcgagagttgaaccagctcactatcaagaacaagtatcctctacctcgaattgacgacctatttgatcaattgaaggggaagacagtcttttccaagatcgatcttcgctcaggttaccatcaactgagaatttgagaggaagatatcccgaaaactgtgttccgtactcggtatggacattatgagtttctattgatgtccttttaactcaccaatgctccaacgacatttatggacctcatgaatcgggtgttaaaggattacctagacaggtgtgtgatcgtgtttattgatgatattttaatctattctaagtcagaagaggaacatgaattacatcttagattagtattgcagaggctacgagatcacaaggtgtacgctaagtttaaaaagtgtgagttttggttatcacgtgtctcttttctagggcacatagtggataagaatgggattatggttgatccggccaagatcaaagctgtttgggattggccaacaccaaaatcagctacagaagttagaagctttttgggtttagctgggtattattgtcggttcgttgagggtttttcaaagattatcgtacccctaacagagctaacccgaaataatttgaagtgtgtttgagctgatcggtgtgaaaaaagttttctggagttaaagctgttaggctaaaattagtc

SEQ ID NO: 400082 - DNA, 1144 bp, Cannabis indica
ctatttaagatatcctacaaaatgttgagaaattcggaataattaacagtatataaaacaatattcaaacagtctattttaaacgcgtataaaataaaatagtcacgtgtgccacatactgcttgaacgtaattttcagcgtgttaaatttttttgaattttttaaaattttgcaggatgtcttaaataagtataatttacatgaccatgagaaaaaatttgactaaaaaattattttggatactaaaatagatagagatatatcggtgtatctcttttaatggggtgtattataaaatgatgcctaattgagcttgggtagtgaggctttttctcttgcctaattgactgggtcgataaaggggccacgtgcgctagtgttggataataaacgacgggtgttgccttcttctttcaagccgatgataagagcatctctaatggtaaaattttagtggatgtttagtgaggtggacatattatctggcaaaatattgagatgttatatcattgaagagaaaaatatgtcattctagaaatttgcatggatgctatgttgtagcattgatgctattctttttttttttaataaaaaattgaagctaaaaaaatattgtagctaaaaattaagatatatattaaataataatgactgagatcataattatagtatttttaaagagtcttatacattagagtatttctagaagtaagagtgtcaaacataatgtggaagagagataaaataaaatattatattttctaaatgatgtgtaaatttttagcatccttaaaggattttaccattggagatgctcattttttataatcaagttctaatgtgtattgtgattagtaataatacaattcaaagaacatttatttatttaacaaaatgaacatgattctttgttactgtacaatgaatgttgtcgtaatggcaccatagttagaaataggaaaatttacaaaaatattgaattttgggggcagtattacatttatactgctacgcgaagtttttacaaaaatacagtaatatttttaacataagtcacaatgtgccatgtggcactttcagatttgttacactttttggagttagttaagttagttgataaggggacttattgttggaaattat

SEQ ID NO: 400083 - DNA, 523 bp, Cannabis indica
aattgcttattttatcaatcctccgcgagcgcctggttttgataaaacggtttttgatgttcagggtcaatctctaacatactcccccaattgtttcaatatccatggtcaatccctaacatatcctggggttccaggtaaagtaatcttggttttagttctgtcttcaactgccactagttgacgtccagttatggcgaccatagcgagccaataactactgaggtcgcaattcttttacaaatttgttttatcggagtaactgccccttgtattcttgtgaatcactcccttttgagataactgggtatcccttcctcttaaagaggaaggttataacctcgggtcgctcgagttattgggcagatcgagctgattatggacatcgtcccgcccctttatatattgttgaaagcgtccttgtgatatgagaccttctatctcatctttcagctgatgacattctttcgtggtataaccaatatctccatgatattcacaccgtttagttggatcccattta

SEQ ID NO: 400084 - DNA, 619 bp, Cannabis indica
taaattatgtttagtatattagtttttaatttcatattaaatttagtaacatattattttagtaatatattaaaatataaatatttaactttatatttacattatttagcttttgacgttttttttagaaaatcaattgaaagtaatcaacaagttaaattgtaaatatatatgtttatttttaaatattcataaaattgtatagaattatgtaattatgttttttttagcacattttttataatattgtacatttacttgtatataaataaaaattgcccatcataaatacattaataatatcccgaattctttaacttgtggacaacggaagttccgtgaatctcttgaactttcaagcctttaagcaaatgggactacatgagaaggatctgcgaccagtcgtgtcgagcatctatggtttcacgagagataccattgctttaaaggaaatgatcaaactcccgattactctcggaaccgcacatgttgtggctaagtcgatggctgacttcgccgtcatcgatcaacactcggcatataatgctgtgattggtcgtcctatcctgaaggagatgaagattgtgacgtccatttatcatctcaccatgaagttccc

SEQ ID NO: 400085 - DNA, 528 bp, Cannabis indica
gtttaaagtttaaactattataacttagagaactaatccgcgtttcgcgcgatattgtatatgttgggattatataccctaaataaaatccatttcaatatgatctcatttgctatcaataaaagattagaaatcatttatataatgccttgacccttagggatgccacgtgtgtgtgtttttacaaacttatttctcactaatctattagtttagaaaaagtgtggtttaattaaatacttttttgattaagttgaaataaaacttttatactaaatacaccataatacggggatccattgtttataaaaattcttttacaataggttacatttccaaacatagaaaagaagtcgatcctgcttcccagaagccaagacaccacagctgatatgtacatcgctggaagacctctgactcatggctgaacacagcttctaacttccttacctgcaccacgaagtacccatgagtcacaatgactcagcaagaaaagctactaaataaaatcatagaaagtgctagcaa

SEQ ID NO: 400086 - DNA, 813 bp, Cannabis indica
ttttaatatcttgtgagctttataaatgaaaattaaaataccaaatgataaaagaattattaaatggaaaatataaattgacattttatttataaaaatatctctataaagtgtggacaacatttatatttttttatgtgcttttaattaccaaaatactttttacactatcacttacacaatcagaccatggttgttggatggttgttgggtaattggccgaaggttgcattagacgaatgtttcaattagatgaaggttgctgggtggctggccgaatattgcattagacgaaggtttcaatcaaatgaaggttgctgggtggttggctaaaggttgcatcagacgaaggtttcattcagacgaaataactgttagcaaaatgtttatgcaactgtaatgcaactattatgaaacattaaaaatcagaacaatatttccacgtacgtaactctatctatatttctcttcacgatttaatatttagaaaataacgaaaatacaccatgataaatattttactatagtattggtgtaatttttttttattatacttgagtttgattatttggaaactccagttcaactttttgagatctgcattttgtggatctgaaaattgaaatcaggacattagttttattcaaattaaactgtatttccggttgaattttagtttcgtagtagttttttttccatgaattcgaaagggaaatttcaatttttgaccctaataatacaacctatatcaaaatttatacccctttataatttgtacaaatttagtccattaattacatgaacttcccattt

SEQ ID NO: 400087 - DNA, 375 bp, Cannabis indica
tgtcatatagtctgttgggcttattggctgcctaagaagttgaaataaatggttcactttcttattgccttagaaacagtttacctgaaatttgaaaatgaatagagattgtataaaatttaatattgtaatgtgaaggagtccactctcagagttatttttttttttttttgaataggtctcagagatttttataggttagcaattagatgataaattgattcgttcccttaatttattaggtgtgaatgttatagcataccattcttgagccaatgcttcatatttatttagaagttatataataaataaataacttatatttatataataaatagttttattctttgtgttctataacacttatttaaatag

SEQ ID NO: 400088 - DNA, 550 bp, Cannabis indica
aagtctattagtgcagtttgttccaaagtctacaaaattatgttgatgcttataatgtttctggtaaccatatccgctttgttgatttgttatgttttgcctttttcaggatctaagtccgttgtgatttgattgcttgtcatcgaggttgaagatctttatttattgtgcctatgcttccaattttcatattcctattttggtgttttttggatatgatctaaagtatcttgtcatattctggatctatagtcctagtaatgaggatttgcatatgcctttgttatgatctacttgttttctaataacttctgtaccattgttattttggtatggtttatttatatgtagtttatgagacgcatgccacaatttcataatttgcattagctattaactttgtgcaaggtggtatgcaatttggaaatttagtaaataaatttgatggtcagaatgagaaacatgcccatccatagcatagcagtgagtattaaacaataatttgagcttgagaatatagtcacaaatagagagtccaactttcttgaga

SEQ ID NO: 400089 - DNA, 804 bp, Cannabis indica
aaaaaaaattactattattaagtagtacatcgatatgtcattaaacaccttatgttgccaataacaagtacaagaaattttttactaaaaaaatagtatatatataaaataaaagtgaatatatataaattttttacaagataataaagaatttttttattgtaacatctatttatatataaatgttatagatatatgcatattatatcaatatttttagtataaatatgaatatataataacagtatagttatttttttttttaaatttttaaattttaaatttaaatttattatacatatttctcttatcatttattttatattaaatatatctataaaacataattttttttatattgcaatttaaatttaaaattattatacatatgtaaaaatatctttatattatctttttttactaaaaaatatagttctattgttactttttgaaaaaaaaaaaaaaaaaaggtgatatttttaaaataataaaaagtgatataaaattaatagtattacaataattaaattaacattataattaacaatatttgaagtattactatatattttttttttatataaatgacacttaaattaaatttttcaataaaaaatatttttatttattaaataatataaaaaaaaataaattatataaccaatattaaattttttgaatataactaaatgggtaaataccattttggaccctgtgttttgcaaaagttataaattagaccttgtgttttgttaaatgacaaaatggaccctgtattttctaaaatagtaaaaattggaccct

SEQ ID NO: 400090 - DNA, 770 bp, Cannabis indica
aaataaaaaaaaattaaacaaatacctcttacacccaccttcaacccacgattcatgcttcctgagattgaaacctttgtctgatgcaaccttcgggcaaccacccaacaacctaaaacaactgaaatgcaatccaatcagaaagagaaccaccattaatttcggcgacttcacttgagaagacgaacgaaatcaatcaaaatagaggttgtttcgaattcatgaaaaaaaaaaaagttaataggtggtatacacattaagtgatggtgattgtatgtgtaagtgatagtgtaagaagtattttggtaattaaaagtacataaaaagtataaatgttgtctacactttataaaaatatttttgtaaataaaagatcaatttgtattaaccattaatgtattttaaatgatagaaatcttaattatataaacccccacctaatttagtgttgatatgattattagttgatgtgtagtaatttagtaacttacactcaaaaaataaacctcaattatatttttatattttagaacgttaattttgttagcaaatcatattaatgaataacaacttcaagtgctttactgtacacaaagaagaagggaatacaacgtcaacatctttttctgtgaggggttcaagagcagtcgtctgagagtggtttggctcaacgacgtcctccgtttcagatttttgttttcatttattaatttactattattagtttaattccaattaatgtttttatgtggttagaattataaggagtt

SEQ ID NO: 400091 - DNA, 510 bp, Cannabis indica
tgaagttttctgtttttgttgatctttttaggtaattgttttttaagtactgtgaatgtgacatttcatcatcatttgattacttctctactaatatttttgtactcatcttccaaataagttcatttctctcgtgttgaatgatttgaaggcaccaaattgaaaacatgttatcagtatagcagttaattgccttattgtgaaatgcaatcacgttatctattcatggcaaatgttattattaacattctttttaattgtatttatttgtaggttttgtggttaagcatcaagaatctaaattgaagggagaacacgattttttccaagtcttgagctagaggtatatataatttttctatcttttaattaattattaataaacatgttagaggagtttgaatatcttaaatattcatccgtagtgaagtaggttctgcgaatacatgtgctgcggtcggatgggtggaatttaatttttttgttgtggattgttatatgttttgattt

SEQ ID NO: 400092 - DNA, 595 bp, Cannabis indica
ctttattatctttcaatcgttatgaactacttgtcgcttatcaaaatagactcactgtcgttggctaaaagcgaggtcaatattttggttctttcattgagagcaaaatcaagaatcactcttcattctaaatctaaccacaaatacgatggtggtacaaactcgtaggagtatggttgatccggcaaatccacaagcgatggatcctgcattgcagaacccaagaaacacaagggttctgcccgctattaaccctgaacagccgtcgaacgcgggtcatggtgctatgactcctgtggatgaaatcgcgcttggtgtgcaagagactgggaataccagttcagcacccagccagggcattcataacacagccgttacgcctgcgaccaacgttcgaacgaccattggagatgatactgagatccaaaacctccgcacttctcttggactcatgcaaggtcataccaacaccctacatcatgatcaggaggaactccgcgctgcggtaaatcttgcgttcgaggaacaaagacgcatgtttaccgaatggagggacaaagagatggaagggctaagggctcatcatgcagagatc

SEQ ID NO: 400093 - DNA, 698 bp, Cannabis indica
gtaaagcatgctatgtaaacaactgataaactagagtacaatatgcgaagaacttacataaggttcgggaactgggtgttggtgttgatcgctggcaaaaagacgattggcagtgacgaaggaaaatgagtaagaaattaatggtgtttgagggtttcttctctctccggaaaacttgagaaaatttggtgtaatgctgaaagtaaccaaatgaagtgagaaggttggcttttataggccaaagtatatgtgaaacagctgtgatcagctaccatcgaacggctgggaaagcgatcgattcgcattctatagatccaacggttggattgaatcgtcatcaagacggtagaaacgcttgagtgcccttctgacacccattaatgcgtcgttataataaatggacaagaaacgaattgatgcctgcgaaagtgaataactgcaataatgatggtcattaaatacaccatcacgtgcccaaggcatgtgccaggaaaccgaggaggcaaccggaggcatctaaacaagtcttgttcacttcataattaaacaaggcttgggggtaaatgttgcccctgattttgcccaaaatacgtggaccaaccggatgatgacacgtgggtaagaagggtttagcattttaataaaacagctaagtcttcttaaagcaaaggattactttaggcatgcctcccggagaa

SEQ ID NO: 400094 - DNA, 557 bp, Cannabis indica
cggaaaattgttttatgataatgacattcacatagataattagcctgtaaacttttaaattcattttcagtttcataacacactaaattattgactaaattagtatgcattaaattttatattatcactagtgatagattttgaatctacaccaatttagtgtagtattttttttttttactatttaattcttattttattttattttaaaaaataatattacattttagttttcaaattaaaatttatcaacaaaaataataattgatttataacactaacatatttgaaagtataaaataaaaaataaaaaaaatactaatattaaataaaataaaaataacacaacataaaactaaaaaaataacattaaattataaaaatattgactatatgaactttaagtattttaataatcttgatattgttagtgaattttttttggcgaagctcttgttttcccattttgaaaatggttatatttattaggatcaattatagattttttataaaaaaaatataaaatctaaatccttcatttttttttaatttaaaat

SEQ ID NO: 400095 - DNA, 739 bp, Cannabis indica
caaaacgtaaagataattcgggtgcatgggttgactgagatactggtttggatgatcttatggtttcttattttcacgggcttttttcctcttcccaaaccaactggagagaagtcacaagcagcgtgcaaactcgtgtatcatcccagcaaaatgttgagctactgttagcggtttcagatgaagaacttcagaaagctttgttccaaatgcatccggataaatctccagggcctgatggaatgaccccagatttttttcagaagtgttggccgattgtaaaggacgatgtcatcaacatggttaagtaattttttcatactagttcccttcctacagaccttaacaagaccattttggtcttaatccctaaaaagaagcagcgtatggatatgggagatttaagaccgattgcgctatgcaatattctgtacaagattctgtccaaagtggttgctaatagactttagagtactatgtcgtctctcatatctgatactcaaagtgtatttttgcaaggccggttgatctcggataacatcatgattgcttatgagattatgcatcatttgaagggaaacggagagggagggatggttatatggcactcaagctagatgttagtaaagcctatgataagcttggaggggggttatctccgggcgatgatggtaaggatggggctttgatgggtctctgggattaactgttatgcaaatgtgtatgttctgtttcctat

SEQ ID NO: 400096 - DNA, 571 bp, Cannabis indica
ctatgaccacaacaaaaataatctacacaaaacttaaaattacagcaacaaaagtttacatgagagtatataaatatatatatgtatatacatactatatgctacaattgattatcagattgccattgaaataaataaatcaatttttctcattagcttcattaggaaaaaaaaccaaaaaataaaataatagctgaccttcaattaccatagagagaatagtttcaacattaatgtcagcagtttatttggatttgaagataacagaaggacgagtgaaaggtctcttctgttgtactaaccttccttattattcaaaaaacacgaaaaataagagtactttttttggaagatagaatctaagtggctatactcgaaatactacaagtggaatgttttcataattttatcaatgaaaatatttcataaaatctcaaaagtattatatatgtatgttaacgtagattttcgttaaccaaatttgagcctcacgataataattcaacacagaaaaaataaaagctatagaaaaataacatatgaacacagggttttttacgtggttttgcag

SEQ ID NO: 400097 - DNA, 755 bp, Cannabis indica
tgtatgattggaataaattaaccaatccattttagcgcgtatatataatccaacaataaggctgtcttccatttagaggtacttcacatgtactggtcctaccatacattaatctgtatattaattagatcactgttatttcattttttttttttgtttgcatcctaattaaagtaaggcatttctcaagtttttatacttttgagagtgaattataattttttttcatacgttccatatgatagttctaataggtaattctgttttcaagaatttatgaatattttatagcatcaattgaaattcaaaataatttattttacgtataaaataaaatagacatgcatacataaatactgatttctgttagaaaattattgtgctccaatagaaataccaaaccaataaaattacaactctataacaaataatacaaaggacaaaaatataaattaaataatgttacaacaccaaacaaaatataaacataaaatatagagaatatgaagagaagagaagaattacaactcaaagtaataagctacacataaaacacaacatatatatatataaatagcatatatatataagagatgtgagagcaatctcaacaccatatacaccacaagtgtataataggggaatcacaaaacttgaacaaggtcttacacctttgtccaaaagcttatctccccctaccacaagcacttagggaaaaaaaagaatgaaatgactttctggatttatcaagccta

SEQ ID NO: 400098 - DNA, 576 bp, Cannabis indica
taaaacaaagactttaaaaataccaaaaattttcgggtccgaacggtgtttttcagattttttttttacatttctttgttttccaaaataggttttcatgcttaccaatactatatgattgtagtgatgtataggaattgaaataaataccgaaaacgaaacttaaaatcggaacaaacacggaccgaaaatactaaaatttccacgtgtttatatatatacgtatataatgtatatattgcataaaacattataaatataaaggaaagtattataatcaatattatacaataaaacgtatgtataatacatatataaacatatatacgtatatatatatagaaccatatataatatatatataaatgaataaatagaatatatatgtataagaattctcggaagtatatatataatatatatgatataatgaatagttcaatgaaaaatatatatatagatatgtataaaccaaccaaatatgaatatatatatatatatatatgaacactgtatatgtacatatatatgtgaaactcaaataaaatcaaggtagagataaaaccgctctgatac

SEQ ID NO: 400099 - DNA, 556 bp, Cannabis indica
ctttggtttttctggttccttcggtttttctggatcttttggtttttctgatgagggtttttttgatgaggaaaaacacattttcattttcatcctagaaaacatagttgtgataattatgaatggaaaataattagtgaagaaagaagtgatatgaaaaatctctacaatgatatatatttgagaatatattaaaccctaaacttattttccctatttagggggaactatacgcatagtttgttaagtatataatttgttaatttttttaaaaaaaaaattgcttattaaatttgaaaattgatgaacgataaggaagtttattaagtatttatttatttatttttaaattaaaaaaacccaacgattttgcttcttatgcttcttttagcctaaacctttcgtatacaaaattttctatattgagtatgaacatagtttgataggcactacgaattagaatgccctactaacatccatgatatttgggtagctaaagaaacaattcttcttatggctattttttttttaataaaaataaattatgctttaaaaa

SEQ ID NO: 400100 - DNA, 633 bp, Cannabis indica
taatttgatataatagaaactagaaattaacattcaataatgagattaaaaattcaatgtctcaggttttgaaataaccctaactaaaagcaaactactcgaaactagacattataatgaaaatcataataaaatagtaaagagtttaagaagaagaaaacaactatgatgaagaacacttcaaacccacgaccttcgtctcttccttgctctctctctaagtttcaatctcaatttggtagctttttgggttctaaaattcgtagcctattatgtcctatttatagtgttagaaaatatctcactaaaaaaagataatctccttttaaaaaaaaaaaaagataaaaaattcgaaaactgcccaaattgttaccccccaccgtagccacgggtagcctcatcgcggcgacaaagtcctcgccgcggagagccattctgtggtcgcggcgacaactcctgacaccatatctttttatttttttttcttttttgtctcgctatggcgagccttcaaccttccctacagcaacaactcacgggtttgtgctcttcatggactttcaaaattctagaaaaatgttgttttggcacatcattccatccactaacatcacctagcataaaaaataacaa

SEQ ID NO: 400101 - DNA, 777 bp, Cannabis indica
attgatgcctcgccttgcgcatccactgccttatggtttctcgttaatatatgaggcaagagtttgtatatctttgtcttgcgtaagacaatatagtcagcaagttgtaaatatattctgtcacgtccgcatgtaatgagttattctatttttaaatataattacccttacacgcattgatccatattctttctactttgacacgtgtcttccgttgaaatggtaggcgaatttctagtataacaatataatataatatcttaatttaaaattttgatatttctaatcttttaatttaataattaaatataacaaaaaaaataaagaagattgaaaataagatattttgatggttatgatattatttaataattaaattaaaaaaaaatcctatgtttgaaaattttgccaaaattaacaaacttttcaaaatttcatgttattttgccaaaaaatatttcaattaaaataaagatctaataagataaaatgtcaaaactaacatttttctaatcttataatttaatttaataaaatatatttcaaaaataataaattttaaaaatctaatatggttagcaaatttgaaattttaactagattctttctaaattttagtaatattttaatatcaaaataagatcatttcaaatttaataataagtaatatttgatcttataattaaaataaataaaataaaaaaataatcaaaaaatttctaaattaaccataaggctagtttgtggaaaaatcaaaattttaaattcaaaggctac

SEQ ID NO: 400102 - DNA, 550 bp, Cannabis indica
gtaaatcctctaggaaatcccaacacaccgtatcatacgctttgctaatatccaccttgatagcacatcttggagaaactcctttcctcttataattcttcaacaagtcttgcaccatcattacattatgagctatagacctcccttgaacaaaggccccctgattttgattaactaaattaggaaggacctgagcaaggcgagagcaaagaagctttgagatacatttgtacaacgttgtgcaataggctattggtctgtagtcaactgcctttgaaggattctcaatttttgggataagagtgatcattgttgcatgaagttcaggaggcattctacccgttcggaagaagtcttttatagcatcactgatatcattccccaaatctacccacaaagctttgaaaaatcctaaaccaaatccatctggaccaggagatttcgaatcaggaatgctgaaaagagctttttttatctcctttttagtaaatggcttcagcagccccacttgatcatcaagactaagcttagccccatgatcaatacaact

SEQ ID NO: 400103 - DNA, 1205 bp, Cannabis indica
aagaaattcaaagtatgctctaaagttgcgattttatccgatcttccttatcagaaatgatttcttgatataaaaaattatttcttttaatttttatttcgttgtcactttgacttttgtttagtatgatagtttatattatgttttagttctcttttttttttctcttttatttatttatttattttttattattcttagaatttaagtcctttaaaaaaatcataaaatacaaaaaacaacagtttaatattatatatgacacaaactaaaattgttctgtctagaaaagttggtttttaaataaggtttgtgttagtgtaccctccaccttatctgcgaatctcggttctgtctgggcaaggttgggacgaagcggtaccttggcaacctttccaactggcctgggaatatttttgtgttagtcattgtaatattgtatttttgtgctctttactataacaaaataatactaataaaataattaaaaaaaaaaggttcaaactagagtggatgagtaactcttcttttgacgaaaccacttctggtgaaaactcttccaatccatccactactccttctcccgttcacacaataatcggtaatcctttcgccatgaataataataatgaagcacaacagagaacacttaatgattaccttcatcctactcatacttccataccatcacgttttatatttccacctaatatgccaaatcttggtgtcaaacccggcattattcaacttttaccgacttttcgtggaatggaaaataaaaatccatatgtgcatattagagaattcgagaagttgttgacccttctatgaccgagcaaccatcaatgtgttggaattattttaaataatatgtctcctcccactcagatttctaacccttgattcctttctatcgcagagtataatcaagatctgagcccgaatgtccttctttgttaactctgaattctacgcagccttcctcactatgattaaggtattacttgatgtgtgtgagcactactctattacttagagggacttcgaaaaacagagaaggaagagagagagagagtgggggcttcaagaatgtttttgagtgaaagaaaataatgctgtaaagtgtgtgtcaaacctgaagcctttaccttctatttatagaagaccacatagggttatggctgaattacttggcattaaaaaat

SEQ ID NO: 400104 - DNA, 890 bp, Cannabis indica
ttttatactatttcactcactgttatgataaaattatatggaataaaaaatgataaaataatggccaattaaaccctatagtggtcgaccatgtagataggccccactaattataatttggccattttttaactatttatttattatttcacaaatcatattttccaattttaatcctataaatgccaaaattatttatttaataattataattaattatcaaataaaattatcatttatataatttattaattagactccacaaagtctcttacttaacaaataaaccgtaatatctattttcttcacaattgagccataacttcgtgaaaattcataaataagacagtataattttagaattataatttatttattaaaattaattaactgagtcttacaagcagtatgtctcaacaagtgtggggaccatgggcctatataatcaagcttccaataagtaaccctagaatttaccaagtaaattctctaacttattaatacctccttgaacccgtatggatttggaattgcactcataattatatagagcgctccatatatgttccatgatatagatacactatgaaattatctataattataatcttaataatgaatgatcctctatagataatctacatcgagtagggacaaattactgttacacccttcaatgtattttatccttaaaatatttagctacctataaatgatattttagtaaactaatataattactaaaatgagtactaaaccatttatctctattaagctaagcttcaaggaaatcatcattttacttctatgtccagatagaagctatagatttctgtatctatgattagtgctcccactcaattgaactaccatgtccttaatctatatgt

SEQ ID NO: 400105 - DNA, 886 bp, Cannabis indica
ataagcattgataaaatttttgacaacaaacctaacgtttctgtctggtcacatgaggatatggtcggaatagatccttctatcatttcgcacatcaaaaatattaatcccaacttctgaccagttcaacaaaagcgcaggctattggacaaatagcgagctctagccctaaaagaagaagtagaaaagctacgcaacaacaatttcataattgaagctttctacccagcttgggttgcaaatcccgtactggtaccaaaactgaagaagaaatggcgagtgtgtattgatttcccagacctcaataaagcatgccccaaagactgttttccacttccaagaatcgatcagctcgtggatgcaacagcagggcatgaaatattaagcttcatggatgcttatttggggtacaatcagatcaaaatgcatccaccagaccaagaacatataagtttccaaacaaatatgggtatatattgctacaatgtaatgctgtttggtctaaaaaatgctggagcaacataccaaagattggtaaacaaattgtttaaagaccagatcgggcgaaatattgaagtgtatgtggatgacatgctcgtcaaatccaggaaggctgtggggcacatagatgacctggacgaatgcttcaaagtcctcaggaagtacaatatgaaactaaatcccttgaagtgctcctttggaatcagcttgggaaagtttttgggcttcattgtcaatgcccgaggaattgaagccaatccagagaagattcaagccctccaggatatgaagtcgccaactaaaaccaaggaagtgcaaagttttactggtcggatcgccgcacttagaagatttgtttcaaaatcaacagacaagtgtgtcccat

SEQ ID NO: 400106 - DNA, 574 bp, Cannabis indica
tgagtaggttcagtccgtgcataaggatggatcctaacccactccgtgagaagcttcggatgctccacagcctagaacccggaggagaagaagaaacggtgacggtattccttaacatacttctagaagttaaaagggaccgggccctcattcaaaggatgggcccgaaaaccgtaaaaaccgtccttaaacttatctccctttttagggacggaaacgagttcgtaaaaatacaaaatctctgccggactgggagagccccagccccgggcagagtaaaaaataaataagcctgaaagtaggcggtaagcttggggaataagttggtatggcgcgaggccgacaaatacaagaaaattaataaagtaatcttaaaggggaagcatgaccccagccatcaagtgcatctgactccaggctccaaagcccccgtagttatgattgggcgtctccgcatcccagggcagccagtggtacgtcccggaggtcgcaagcttgatacctgccaccaccacgatgtgttccagctagtgaggacaggtcagggtagagtgaagctcggccgcttcccacc

SEQ ID NO: 400107 - DNA, 527 bp, Cannabis indica
tacaattagtactacaaactacaatagtagataaatgcaaaaatagaatatattatatataatagaagtgaaatgtaaaaaaaaaaaagtaaactcatagtcgggttgggcaggttgtttcggtttaattgggcgggttggacctctttttaactcgcccaattaacagattgggcgatttataattttgtcgggttttttcggtttgtattttttgtcaggtttttcggtttggtttgggcggtttataaaaattaatgtacacccctgataaaaactttgtaaaagttttgattgattgcctatgttacttttgtcacagttttttttacttaaaatatttatgttttttttttgaaatttgggtatagcccacatgatctcttattcctagattatatatgtgtttatatatatatatatatatactagatatatatgtttttatatatatatatattagattgatgttacgtgcaatagtacatattattagttttttaattaggttcaattaagtgatgtta

SEQ ID NO: 400108 - DNA, 725 bp, Cannabis indica
acccttaaattaggtgggccctacggaataattactaaagttatatattttttataacttcgattatttttatataatttttcatcaaatttttacataaaaattatataaaaaattcattagaactattaaattttaaatattattactactattaaatatgagactttcacatgtcacgcttttagaatagattatttatgcttatgtatcatactttccaagtttgtcatgtcgtgtcgtgtttaaattaatatatttcgtgtcttatcgtacttaagcttataattttcgtgctatgttgtgccaattcgtaatatccgtgttgtgtttaaatttatatttttttttatatttaatcgtacttgtacctctctattcatatcgattttgtaccgtatcaaaaaaaaagtctgtacataagataaatgggattggatagtatagattgtataggacatattgtttttatgaggagaggtctcccacttagaaaaattacttcaaattgaactaatgaccctttgaagaagacaaataatgagttaaaaagatcattataaaactatatatataaaaaaaagaaccttaaaagtttacaacatatgacatatatgagtggctaacattggataaaattattattactttattaccctaactaatatcttctaacaataattatcctcttattcacaatattgtaacgtattattacaaccaca

SEQ ID NO: 400109 - DNA, 853 bp, Cannabis indica
tatggcaaccattgagaatgagcaggtggaaaaaggacagaaacaggggtcaatgcaggttattggtgctgcaaacagtgaatggatgactccaaaaagaaaaggaatgaagattgctaatgtagttgagacaagagctatagagaatttcaaaaatggatatgaagtcttacaagagactatcgatgggaacttggatccgcctatttccattacttttaatggaggtgtgtaatatcctaggttggaatgtgaggggaatgaataagagagaaaagcaaaaagcgattctcgatgtttttaggatgaataaagtggggttaggagctttgtttgaaacaaaggtgaaacatgacaaagtgaaggagatggtagaaaataactttccaaattgggagttttattctagccacctcatctcgggtagaattttaattctttggcagtccaaattcgttcaagtagaaatattacatgaagatgctcaacttatccattgtaaaatcaaagtttgtggtcataaggatatctttcttgtcacggcggtttatggtagtaactcaaaagaggaaaggaaggctctatggacaaagttaagtagtattggtcacccgaatttgccttgggtaattctaggagactttaatgctatgttctcttatgaagatagaaatgggggtagacaaatccaagccaaggacattgaagatgctcaagattggctagccatgggccaagtggaggaattcaagtgttcgggttcctatttcacgtggtctaataaacatgagattggtgatcttattttctctaagctcgatcgtatgtttgttaacaaattgtggatggatgt

SEQ ID NO: 400110 - DNA, 720 bp, Cannabis indica
tcaataaaataaaatgataatttgatatcatttttttctaattttataatttaaattaaaaaaaaaaaataacaaaatttaaaagctagcataatatcctatttctattcaaaatatcatgattaaactaagctaattgtaaatttaaataaggtcaatttattagagaaaatttaaaaatattaaatatcaggccttaaatttaaaaataagataagataatcaaattttaaaaataagataattaattaagtaaaaaatatagatttttacctattttcaaattcaaatttcactaatatcttaaattaattttaaaaaaataataatttaattctgatgattagatttgaaatttgaaaaataaaaatcaaaatacaaaactacacaaaaaatccgacattaattccatgaaaaagcatggaaaaaatgaagaaaattgaataaaattgcaagttgtacggatggtatgcacccgcgcgcgctcagccattctgcgtgtggacgaggggaattcagacatcccgagcgtgtttctttagacacactgtgtctgaacacgcgtatgaccgagtaaaactcggtgtccgcgcgcgtaaaggtgtgtgaccacccctggtttatttccaaaacttcaaaaaatcataactaattcaaataaaattggaattaagttctagtaaaaaaatgaattgctttaattttttccaaactatccaa

SEQ ID NO: 400111 - DNA, 576 bp, Cannabis indica
aaaaatatctgctcgatctaggaattatgtcattaatcccacagttagtctttttatatccttttacaactctcctagaggttcaatacctcccattattgcggccagccttcctttttcggtcagccccttaacctttgctactccaatcatgaacctgctgatgtaagctcttaaaggttctccttgtatttgattcacttctatcaggtcttctaaatgagagggaagctgacgagaagaggaaaattgtgcatggaatttagatgagaaagaaatcaatgaagtgaatttccttggagctagtttgaagtaccattgttaggcagcctttgttaatgtagttgggaagattctgcaccgtacatcaactttcaccccttgaaagtccatttgcatctcaaagtatttcaagtgagataaaggatcttctttgcctgtgtacatcttccatattggcattttgaacttgggggtaggtcgagagcattgatttctggagagaatggtaatcctcttgcccaatcaagttcaagatctatgagttttggatcgttcaggccttgtacgatgctc

SEQ ID NO: 400112 - DNA, 479 bp, Cannabis indica
gtctattgatataattaattctaatgattagccatccatgtgtaggttcataattagttttggtcaaattaacatttcacccttctaattacttcttcatcatttaataccattaattcattagtggaagtataatttagacctcttttaaatttgtgcacaacattccagttctagaattaacacttaaagagaactagcattcgatatgttaagaaagtcaggattcattaattgtaaattatgttctcagccatccacattattagattcccaaaacagaagttgtaagaatcatcttctatgagaaactttaacgagtgaatcaaaaaaactaataacatgaactaagagttcatgataaccaatggttatgttcaacttagttgtattacttatattcttcaagttgttcgtggaagctaactaatggttctggcagatatttacattttgggaacatagtagttcaattgagt

SEQ ID NO: 400113 - DNA, 824 bp, Cannabis indica
aaaataaataaataactaaatatttaactaagagaaaacttagctaaacatgaaactaaggtgaggacacacgaatgaggaggacttccctctactggtagtattgcctcaagtgctcactattccatgctcgcggcacttgctccccattaaggcgagcttgtacactccaggccttaagactattttgatctaatacggtccttcccaattgggtacaaggaccccagccgtcgggtcatgcattactaagaacacccttcctaacaccaagtttcctgttgtaaattctctatttcgaacacgagagtcataatacttctttacccgttattggtgagcagcattacataattgtgactcctctcttctttcatcgagtaagtttagtacttcctctaggattaggtggttacgatgttgttcatagtattgatttcggtgtgaggtgacttgtgtctcaactgggagcatggcttcactcccataggtgagtgagaagggagaatgccctgtgtggttctgtgtgaggtcctataggaccagagtacttgtgggagctccttcgaccatcttcctttggcagcctctaggcgcttctttaatgtagtcttcaatgttacgtttacagcctcaacctgtccattagcttgtgggtgagctactgaagcaaaactcttgactataccattcttcttacaaaactctctaaataaatcactattgaattgttttccattatctgatactattttttgtggaactccatagagacatacaatgctcttcacgacgaagtcgagtaccttttttgaagttatggt

SEQ ID NO: 400114 - DNA, 465 bp, Cannabis indica
tttttgctggtgtaccgtgtttggagaagacgatctcaaaccggccatttcgagacgaaatatcagtgatattttgctcctttgaggttcaggaatccttgggaatattttttaatcgaaaagacgcatcgaaacgggctatagaagactttggagctcgccggcgccggagaagacgattacaccggcgtaactccagcgaccacgatcttggcatatcttaggtatttttcccatatttttttttgtagattttgattctacatatttttttagggtgtttggtaaagtttcataattttcttgcaattatttgatttatttgtcaaattaattagaaaaaatagttagattactcaaaaaaatctaaatttattttatatgattatttatgagatataaactgctacaaaattggtagatttgaattttagtcaattttgtatttttcatgaattatttgtg

SEQ ID NO: 400115 - DNA, 783 bp, Cannabis indica
tcctcctacctctggttatggtatgggtggtagtgattcgaccactgaccagaaaacaagggcaccatctgcacttggtggctcaaatcagaacaagagattccgagagaaccagggtcaaggcaaccatcagggtggttctgaaacccaatatacttacctagaatgtcccagttgtaagaagcatcatctgggtgagtgtagtgggagaggatgtttctagtatggtttgcctggacactataagagagattgtccgcagctcaagaaagaagaatagaacgtagcaccaaagcccagtctagcaagggtgtttcctcttactcagacgacgcagaagccaatccctcaattgttacaagttagctctcggtcaacaactcttacttctctgtattgtttaaatctggggctactcattcctagttggcggccaaaatttttgataaattgggtagaccgtatgatagttatgagaaagggtttggaaccctactgcttggcggagaattagttatctccaaaaggtgggtttggtctatgtcgatcagaattgaggatagggagttgagtgctgatttggtagaattgggcttggcagattttgatatcataattggaatggatttcttgtccaaatattcaggtagtattgattgtaagcagaggatggtgatcttccaacccaagggtgaggaaccatttgtatttgtgggatcatttaagggatcccgaattccaataatctcggtattgaaagctagagaattattacaagatgga

SEQ ID NO: 400116 - DNA, 670 bp, Cannabis indica
ggtatcagaaccaaacaaaaaaatattgttgtctcccttttaatctttatttgggacctttcaggcaatgtgtgccagtttttagtgttggagagtttgatttatttcaaaaatctaaaaacttctcgatgtgcacacccaaaaattttcttgtttggccttatgggattctttcaactgtcatgtcaactgaaaaaaaatttctggtggcgtagacatcaatgtttgacacgtgacaagaaagataacatctcaaagttgagtagtcccaagttatagcagtcaatctaggaaggctccctagcactgctcccaagttaactttgagaactctggaatgggtgttcagattctcgtaagtcatttttgactcactatccttcagtattctataccatgaagacatgaataaactaattctaggccctgggagctgagaataaatgaatcaacacctcaaaaattaatttgggcacatagggtttcacatagcgcccatgttgacaatcccaaataggatttcagtttctgggaccttcttagtgcaaatggatcaaaatttatattgggacatgaactagacataccatgaacagatttgaggcatcataattgttaggttataattagcctatgtttcgggtctttaaagttagcattatctcgtcta

SEQ ID NO: 400117 - DNA, 686 bp, Cannabis indica
ccaagaaaaatgcagaaatcagggttccagcatttctagccacggcagatttattcctggccacggctaaatactcttggcagaaagacgatttggagctagtgtcagtagccgaggcgagctgttccaccgttgtagccacatcatcactcgccgcagcgagggaagccatggccgcggcgagatcccgttcaaagtaagggcagtttcgtcttttgaatccgaggaacgagaaataaaaagaaaactgcgaagagaattaaggagaagcgattttgagaaatataaagcagtgaagagcggctggaggagcaaagtggagacccagattcatttcaccaacaatttctttcttccttcctttttaatttctttatgttaaattctatttctggaatggttatggatttgaacatgcgctaaactcccatttagggaagatgatgaaagtttgttaaagtttgccctagttaatgttaattgtcattcctgttcattctgactgtgaaattatccttatttgtgttatttccatgtttaagcttgatcaccttttgcatgttctatgatctcaattcgaaatataaaaagtgagaattgagaatgctaaaatttggataacctaggtttatgtgaaacgaaggtatttgcatgacttatgtgacaatttagattattgcttaatg

SEQ ID NO: 400118 - DNA, 1240 bp, Cannabis indica
agttattaattaacccaaagtgtgaatcataaccagtctttacagaaagattttgagcagcgctatccaactcatggcctggaacttgcagcagtggtgtttgccctgaagatttggcgacactgcttatatggtgaatgttgtgagatttatactgaccacaaaatggtcaagtactttttcactcaaaaagatctgaacatgagacaaaggcggtggttagagttagtgaaagactattgtgaaatcttgtatcaccctggaaaggcaaatgttgtggaagatgccttgagttggaaaggacctgattcgactttcaatatggtaatgatttctcctcagttagccttggatatgtctagggaaaatattgagtttgtgattgggaaattgcataatgtgacacttcagtcagacttgttggaaaggattagaatggcacaactacaagaccttaaactgcttaaaacttgagaagatgtcttagcaggttttgatctctagtagtgggatgttgttgtttaaatctcgagtgtgtgttcccagtaatactgagcttaagaaagaaattttggatgaagctcacactaccccttactcattgcctccgggaaccaccaagatgtatcaagatctaaagccttatttctggtggtacggaatgaaaagggatgtggtggattatgtgaccaagtgcctaacctgccagcaaattaaagtagaacatcagcgactagcaagattatttcagccattatcacttccagaatggaggtgggaggacattgcaatggattttgtgtttggtttgcccaggaccacaggaatgtacgactcagttttggtcctagtggatcgctttacaaagtcagctcatttctggcatgtaaaggtaacgtatacagtagatcagtatgctgacttgtatgtgaaaaagattgttcgccttcatggggtaccaaagtctattgtctcagatagagaccctaaatttacctcgaaattttgggtgagtttacagaagtccatgggaacttgtaacgccctaaaatagttaggcacgctacccaaaaatgcttatgaaaccctaatcccctaatcgggattactaaccaaaatagcgcagaatttaaacttttatattaaacagaatgaaaataaacttgtaatatatttaaactttcaaaatagttgggatcccaaaaatatttacaaatgctagtacaagtcatttcttttt

SEQ ID NO: 400119 - DNA, 607 bp, Cannabis indica
tttctattcttttttattttaccctagtggacaagtgtccttcgcttttatggtcatacttttgtacctacatatatactactctttaccaattacattatgatttgaagaatatacaacatttgcttattgattttgacatggtatcagagcacttacaactccttcaatggcgtctgaaattaatacaacttctacactttacttgcaaatcaacagccccaaaatggccaaacaaaaatagtacagacaaacactacttctgtttctttctcgcaattctcttcacattttcctttagtaaaccatctccattaaacttgatgaaaataactatctggtttggaagatgcaaatgctcaatattgtcatcaccaacaacctagagagcttcatcgacagcagctcagtttgccctcttcaatttcttcccaatgagcctactcaacctaaccctaattttatgtctttgcacaaattaaatcagttgcttatgagctggatgtatgcctccacctatgacgacatgcttggatagatcatagccttctccactgctactgagatttggtcttcactggaacaaatttatgttggaaattatttt

SEQ ID NO: 400120 - DNA, 1086 bp, Cannabis indica
  modified_base (10)..(10): a, c, t, g, unknown or other
aacaaaaaanaaaaaaaaaatgtatatggaaatgaattattaagaattaagattttattttaaaattaattaataataagtggagtttatctatatccttataaatgagtaaatgactcaatattattatatatatatgtttcatgtgagaaatatataatttaatatctcctttatagtagttttctctatcaatcttgaattactttattatttatttactcacttattatttaatattgtttcaagtgtggagatacatgtattatctagtaaattacgtgtgaatcaaatagccacaacaattatctcaaaatcaattaataatgaatgaatcaattcctcatcctttataaatatagctcaaaaaaattatatttgttctatatagaacattataaaccattaatatatatataaatatataataaaaagtaaaagaaaaaaagtcaaaagcaaatatatataaatatatatatactaaattaatgttacaataaatcacgcatatttttatttttagttatggtgtgttttaattttaaatttcataataaataagttaattaaaattgaacaatatatatgagaattgagatccaaacaaataataaaagagacacatgcatgatcgtaatcgtattattaattattattattattatcatgtgtcaagaagcaaatacatgtatatataatgatatatgtatacatagatcatataaattaatttcgtttgtaaagaaattaatatattaattatgaattgggttttcttttaattcatgataacaactgcaccaaaggctcttaattatactatatttaattattatataaatattaaatacactcttattcacacaaattctaaaacgaaatgtcaagaaaggtttctttgttatctatgtatctaattatgcaatgtatattattgagtatgttttgaattaatggctatatatagttgcgtgtacatataacatggggtcatatatatatatatatatatatggaagaggtttcaatggttacatttttatgtaaccatcatgattacatttttttaagccattagattactat

SEQ ID NO: 400121 - DNA, 587 bp, Cannabis indica
ttttttttttgttaaggaatatgttctcaaaagattggaaccataaaaaaaaaataagaacctctgaaaaaatattaactcccacattacattaattgacacaatcaacacttcatttagcattgttataaagtatcatagtgtccaacattttacaattaatgagtacaatttagtatccaaaatatattaataatagtaagtcatgtcactctagtaacaagtctcttcctcgttacttttctagttttctttattaaataaaactctcttgtcaaaaaataataataatgacacagaaattggcagtttaaatatttaaatttatggcgatctcaataaataaataaatttaattttttataataataatacttaaattatatttactaaatagtaagtgtcattatgtacataattttttttgtatttctatattttaattaatttttaaacaaaaaaataaaaataaaatattattaccatctacaaataaaacatgaaatttatttgcaattcatcctgcaaattactttaataaaactctcttgccacgtcatatatatggaccccacaggagcctatca

SEQ ID NO: 400122 - DNA, 886 bp, Cannabis indica
ccaaacaaaaagtttttagaccgaggttcagacccaatggaaacatgatcaagttgtggactaaggttttcttcgtcagaaagcggggaaattttgagtttctgggttgggagtagacatttctagggtgatggtgttggaatatattttaccaggacctaaatttactaacaaatatgtttttaacatcctaagcataaacttctaaaacgatataaaataaacacataaaaggtacgagaaaccttacattggttgcagcgaaattaaatgactccttccgctcagatctctaacccttgtatcctttctgtagtagagtatcaccaagatttgagcccaacactctttctgttatttggattcttcacagtcttacacactatgattgaggaccaacttgctatgggtggaaatgcactcaatctctaaggctcgaatttgatagtgaagaaggctataggatttcgaattagaaggaagaaaagaagaagaagaagtctcaaaaacctagttgtcaaagagaatcaaaactaggtttaaagcatttgaagcattagttggataatgacaccattcttttccttttatactaattcacatagggttagagttgatttatttggaataaaaaatgataaatatagagcaaaaataggctctagtggccggccatgaagtgggcccaacactagttagatttttgccatttttcttaaccatttatctatttttcacaaataccactttttttcactttcaactctataaatgccaaaactatttatttaataattaaaataatgatcaaatatttttcaaaaaaaataaagatcaaataaaattatcatttagtatatttattaattagactccacaaagtctc

SEQ ID NO: 400123 - DNA, 638 bp, Cannabis indica
ttttttttttttctgaaaggagattatttattttctaaatttgttaaaataagattttaagtttaatttttgataatttttttaatattacatacataaaaaatgtaactaattttattattaataaatttattttgattaaaaaaattagaattttatttatattaatttataaaatataaaatttattatattatttaataaaatagaaaatttaattaataacttttacaacatctaaaatcagtatatttatataaaattatggagttgttgagaacttgaaaatattgagtagcatgataatgatttgattgtcgttacttgttatatctggtcatatgtaactctcattatgacactttttttcatttgtttgttttaatattacttcaagtcaagttttaatattttaaaaatgcccttcaaattaatattatttggggatgctgatttgttgtttggatcaaaatattatataattaaaggcacaacaactggattaatttgcttgaaaattcatttcgggattttttttttaaataatttaaaggctaattagtaatatcctcctgaactttgacatgtagtaaatcgtgcccctgaactttttttgccattaaaaatttcccttgaac

SEQ ID NO: 400124 - DNA, 991 bp, Cannabis indica
atatatatatatatatgtacctttttcttatactaaaaagaaattatataccagctaagaggtagcttaatatattatgagagacttttcaatacatgaattggagaatgaattattatgtagatgaaatgaaaattaattaaaaggtaaatatttagtaatttacttatatttagtcttaggaaatacaaatatttccttcttttttgcttttgataatcaccaatttattacattaaaaatggtgaaatagaaaaggtaaaacaatgcataaaatggtatgttgtgagagagtttcaatattgcaatgttgactatgattttgatattttcaattaagaatgaaatatttaaataaataaatattattagctgtataattaaatacaattttaatttacaaaactagaaatgaacttacaactcattttttctgtatttttgttcttttggacattacaagtgaattaaatattattatagcttcacaatattaatacatttgactagtacttattggcaattaacatatgcatgtgttgacacttgtatttttttcctaagaatgaattgcctttttttttctccttttctgctttctgataactttttttattgaattaatgacacgtttcattatttagaatcaaaataaattaataaaaaaaattgtaacgaaataaatcagtattgccattaaaatattagaaattatgttcactatatttagtaagggtatatagtggcataagtatctaatgttttaagtttgtaagtggcataaactcaataattttttttagctgcataagtacccaatgtttaactgtaattttcttccagttttattagtatagagtctgttattgtcttaaacatgacacatgtaagactcaaattctagattatttggtctggacgaaaatatgtagtatcagttacttccaaatctttttttaataaatttaaaacggagcctgtactgacgaaa

SEQ ID NO: 400125 - DNA, 786 bp, Cannabis indica
caataacgttattcctagctttataaattcaattaatacaaaggtacaattattactacgtttaatgggtgcatgttaataacaactgtatagttattataatgttgtatatctagttagggttgtgttgattggttggagatataaatggcttgtttttttaggtaactttttttaaaataactaattgactgtaaaaaagaagtagtaatattgaagtactatgcttggtattattattaataatacaatttgatattaaatttctctacatattttaatttaatatttattataaaaatattattaattatatataatgtgtgttcttaatatcactaaaaatattagatcatgcgcctaattatgactttgtgaagcttaaaccaaaattagtttaagaaaataaataatcaatcgaatttgacatgaaagatttgattgattgactgattgtataaccgtctcatgcggagtggattgattttatatatatatatagggcaagactatggtaggacctagcaaaagttccctaccggtagggtactttttttaaccattcattttagttcgtgtggttattatgacataagatgtatactcttacgataagactgcttgtatacaattaaaactttatacatattataataatatttattttttaaaaaatatattaataattaaaaaatttattaatttttattttaaattattattattttttataaagttaatttgaattgtttttatataggtatatatattttcaaaaaataattt

SEQ ID NO: 400126 - DNA, 500 bp, Cannabis indica
taattaaattaaattatataaatgttttagtattggatatgtaatagtattggatatgtaataaatatattagattattaaatatatatataatagtactatttggtatatcgttgaaaattaatatactatagtaataaaattatataacataaagaaattataacaatattaaaactagaaatagaaaatttgaatgagtatcgtcatgaaaaaatttgtcgatgatttttttgatgttgatcaacaatcaattataacttaataatattatgtggaaaaataattgttaaaattctgtaaatcaactttacaacaactaaatgaatatattaataaaactaaccatactataatcttttttttttaaaagagttttatgttggattgtggatatgaaacacctgcaaatatcataaaaatcattgtatcattgacaatttgtaaccattgatatgtctagttttaaagcgttagtaaaatgttaatgcaactacaat

SEQ ID NO: 400127 - DNA, 1363 bp, Cannabis indica
ttaaaaactagatgcatgacttgaataaacatagaaaacaaccctattacataaaaaactagtttaagtaataattttttagttataatatgaaatttttttatagattaaatataaatttctaagtcacaacaaaaattattaatttgtgattaaaatataatatttaaatataagttgttactggtttagttttagtcacaaacaaatataaatgaaataaaaatacatttaatcacatcaaattataatttttgtgattaatacatttgactaccttttaataataataacatagaaataataatttataattaattaattgtaataattttttcaattttaaactaaatttttattatgactaatgtaagatttttaatagtgccggccaccgcatgcttggcagtggaccaaacattaacatatagaaaacttctattttggatcttaacataaaattgttttacttaggtatagtgagacatgtagcaaaatatttgtactcaagaaattctcatatatatatatatatatatagtattattagaacgacttgtttggtaagtcgtataagaatcgtatttgataaaataataaataaggttatatttggataaaacaatataatgtattaattattaggactaaaatttttaatacaatgtaagttgtattatttaaaacataaataatctgtattagcttgtgtataataatatttacaaaggatcaggggtcaatccaaatttctaacctaaacaacgaccagaacccaggaccccaaatttagacccaaacccagacctaggaccaggacccgagactggatccagacccaaacccaggatcagacccggacttagacccagatctagacctgaacttgggacctagactcaaatctggactcaggactcgaacccaaacatgagtttcgaaattggaactaaactcgagtcctgaaaccagaaccagacctagatcccagaactggaattggatccgagtctcggaaccaaaaccagactcacgtcccgaaactagaactggaaccgggtttcgaaaataaaatcaaaactgggcttgagctccgagacctagacccagactcggaacccagacgtggacttgagacctagactcgggactcgactggtagtcggtaatcgggtggagtttattgaaaatatattataactttacataatctattaatacaagtcaatatcaaacatggtatggtattaaataatactaatacaatacaatctaatccaatctaatctaacacaatacaatataatacgacataccaaacgacccctaaatgaatatattctcattcaagaccattaaaaaa

SEQ ID NO: 400128 - DNA, 787 bp, Cannabis indica
atcatatcacctaatcaggtgcgcttatatatcaccttgcctaatcaagcaaacccatgccatagtctgacattcttatgctgcattgcataatcaggcaaactcataccatagtctggtattcttatgccgcattgcacaatcaagcaaaatcataccatagtctaacattcatatatcacatcacctaatcaggtgagcttgtatatcacattcacattattattgcctaatcagacaatcgataattatgaaacctatcatgccatgtggtacattatatttttcttacctttcatccatattcatgcatgttggccaacccaagtggagaaacctccctgatgatcttgccctatgtcacaacaacggtaaccaataagtgtttattccaaaacactgcttaacacttgtgtaagacaatctacaattttctaccaaaccttacggtacaaatacactaaaataaaacttatattttggctctaaaacatacatcatattgtagagctcgtcgcaagtttcaaaacattatatagaacatccaaaaccgacaccgagtgaaaaattatgacaaaaatatgattctcgattttcccgaaattcccagaaacagcaaaccggtttggaaacggttaaccgtttcaccgcgaaccggtggaccggtttggcagtaacataggtcaaaacttctaatttttgcactcaccgaaacaccaccgaaacatatccaaatcattccaaacttcacagcacacatatataccataaatacaacaatccttac

SEQ ID NO: 400129 - DNA, 984 bp, Cannabis indica
tgaaagaggatgaacggtctacgatccaacctatagaaacacaagcttcatccaatggttagggagttcaacgatccacgcgcatcttcacaattaatgcccccaaaaatcgaggtaaagattaatgatgaagatgctatttttatattttcgcgcaagaaaaagtgaacaaccgtcaaaataaagtcgtttctagtaagtaactcctcgatggtcgtgtccttccaccaccatgcgactgacacatggatatactacaatcaaagacaaaagtcaccttccacgatcgattaacacctagaaagtcatgatattatctctcatcccccacatgtccacactgaaggagtgatgcaagcttccaccatacgtagcattctagaagcttaggggataaatgttaaccgcattttcgacagtggacacgtgtaatccaggtcaacatccaaggcccatcaataggtctcccaaagaagataaagtgggccaagtccatttagacaggaccttccaagaacgtacttcaactttgtgatcatagaaccttctgcctttgacagctcttgtccagaagtaggttcaataccgtgaggctagaagggtaagacaacgtgttcccgaaagactggtttggtttttcctttttattcctacgcataaataaggaaatatttgtttgccaaatctcacatcaagctaaaaggggaaacttcttataatagatatcaagcaattaattcacagttaactgcccacaatcatagtactcaattttgactaaatccaactgaatccaatctacctagtcagcatataatctcctttgtggactggacctcatgaggcagcccaactatgtaattcattgtaaactccccaatagagggaaaagataaactaaatataattctaaaactactataaataataagtgaatcttatggattaagggttgaatttccttgcaatacttgctcaggcaaa

SEQ ID NO: 400130 - DNA, 551 bp, Cannabis indica
tctggttgcgttgcagattgaatcgattgaggtttcttcatcatctccgttcgtgacgtggggctttaggtatacaccaggtggtatttttgtaatttttccaatgtgggctatataaatattgaatgggccggcccatagtaatattgtaatatttttccctttttagaattttcctgtttttttccctttataatatttattaattagactccacaaagtttcttagtaaacaaataaactctaaatcctatttcttcacaatcaagccataacttagtgaacattcataaactagacatagtctaattttagaattataagttattaattaaaatcaattaactgagtcttacaagtagtttgtctcaactagtatggggaccatgggcctatataaccgagctttcaataaaaagatctagaatttaccaagtaaattcctaacttattagttcctccttgcaccactatagatttggaattgcactctcaattatataaaatgctctatatgttccacgatatagatacgctatgagttatccatt

SEQ ID NO: 400131 - DNA, 760 bp, Cannabis indica
ttgttgtatgttcattcatacataacgtaactcttttttaccattgattcactcatagtcacaatacaattcaacattaaaaaaaaaaaggtcaccatttgtattttcattgcattgctcatatattgatatattgatatacaatatttgtttatttgacaaaagggtaaaaaaaaaactccttttagtggtccactttgatttctaaagttatgtgacttatgtcttgcattttttttttatgactttactatattatcggaaaaaaaaatgatattaatacattattgtactcatatcattaattttgtttgtaatttttatagggtcctattaaaaattacaaatacaaatcaggagcccaaaaaaaggagaaattaaggaagtcttgcaaaaaaatcaggttggttctcttaataagtattttaaaacaaataatgtagacaattttgtcgtgaatgacattgagaatcaatttgatattgaaagtaatgagaatgagaaaacttcaagtaatgtgaatgaaaatgaagaattgaatcaaactgttaatgagaatgagaaaagttcaagtgatgtgaatgaaaatgaagaactgaatcaaacagtgaatgagaatgagaaaacttcaagtggtgtattcaactttccttttgatattgatgatccaggaaattgggataggattggtcatattaatatgacaaattttatagttgaaagaggtccaaaaagagtcattaaggatgagtttactagg

SEQ ID NO: 400132 - DNA, 724 bp, Cannabis indica
  modified_base (12)..(12): a, c, t, g, unknown or other
aagtttttaaanaattttttttttcatattttttgaattatgttattttgttatacatttatgaaaaagccttaatacaatatgttcaatatggatgctttacacattgttcttaattttatacatggtgtaattctttgttttatatttttgctaacaaattatattaagttgtgttattatattgttttattacagaattttttctccatttactcatcacacactctctccatacatctcaatctaaccatcataaccatacatatgtttgttatatacaatattttttttctccatcttatttttttttcatgtcaaatttcctttttgatttcaaaaattcaatttggaccatcaaattatatccatttgttcatactttctcttcatctttatttcattattataattgtactttatgtatatatgacaaacttattgagaatatagtgacaactataagtaagatatattgataacataacctctttaaaaaaaaaaagataacataacgactttaaatatagtgtcatctataagtgagatacggtgatgacaacaattttaaaaggttaattaggattttggccacctaaacttcaacatgtaccaaatcatgccccctgaacttttaaggtcgttaaaaatgcgccttgaactattgagattgttggatttaaggactttttccaattttagtaaaaaaaaatctaacatggat

SEQ ID NO: 400133 - DNA, 595 bp, Cannabis indica
tatatattttattctattaatatgtctttactttcctcactttcaatgtttgggatttattcatatcaaactacatcattattattattaaagttaatttcttttgatggaatataattattaaagttaattagtagtacaatatatcttatagtataaaaggaactccgtttgaatataaaatatagaactcaagttagagctcgggactatatttttattgatagccacgtctatatttttgagaaattataattcttgtttacattgtagtttccaacaaaaacaaggttcggtagtcttaaaataatatttatatataagatgtatgaattatttttctcattgtcaattagtttcgaaataaaatctcataaactttactatacaatcctaaattctaatacagtattagagccaaataaaactatctaagccaaaaagtattgccgtgagccaagtaccgtcagtctaaaaagacgagtcaaacgagattttaattcaatagttaaatttaaatttctatacttaatttagcaacttaattaaaaaaaaaaatctttcttttacactatatcaaaaatatttaactcaa

SEQ ID NO: 400134 - DNA, 648 bp, Cannabis indica
cttgtacacacaccaagctatccatttccaacacgatattgtcccaggaatgagttgcaatccaactcaaaacttctttgatgcatatgatctcagcaattttgagttggacacaaccaatcttcttcttgaaagcttctaacatagtaccatgatgatctcaagctacacaacccgccccaaaccgtccctcttgttcaaataaagccccatcaacattaactttgatcttgtttaacacaggtgcaatccagtgctcatgattccaccccccccccccaatcattaaaggagacaacgaaagacccttccttctttgagcgattttgtattgatcaagcatgtttttagctgatgtaacaatatttaaagcaagcaaactcttcctttgccaaacaaattcattccgcgcacgccaaatagcccaacttaccaccaccacttcctccatttcaccttctcgacccctggtgaaaatccccaacaaccagctgctgaatgttgcagccccagccccgacgtccaccatgttgcgattccaagctacttttgtaaacgaaaattcaaccaacgcatgctgaatagtttctgtattagacttgcacaaagggcattctgcactgacgggaacatgatgttggaaattat

SEQ ID NO: 400135 - DNA, 611 bp, Cannabis indica
atttcatcgttttggtgtcttctgttttgcgaaagtttagggttttcattttaaaatttcattgggttttcttcggatttttagggctttagttttgtttgatcaattttattttgttcttttgtgggtttggcattttagtttgtttcttattactttcatttcatgtttgttgtgttttatattctgcttgtgtttctagttttttttttagatattttgaaacatctgttttcgttttagtgtctctaatcagtgggttttagttttcttttagttttttaatagtttaatctgtttatgtgtgatgtgttttgggaatattattaggtatagttgtttgcagttcttttttaggtaacaattcgattttagatgtttgtactttatattcgtagagttgtttctgtttgtgagtttatttttagttttgttatagttttattatagtttgtatacttgtttatttgcaatttatatttattgttgccatatttgttaatttgtaggtctgggattacaaatttagtccctctgattattacagatccaagtgtgtttgcactagcaatttttctgtgattagtagttcgtcataatatgtgatttct

SEQ ID NO: 400136 - DNA, 861 bp, Cannabis indica
gtacatggagagcgagattcaaacttaataggtcagggcgaggctgtgaccagagaatggaatgatgccatgtcggagaacactcgcgtaatcaaagaagctgaggaggtgaagagggcccacaaggttgagcttgaagctgctaagtaggaggcaaaagataaggccgatgcatgctagaaacttcaagaggaataccagaaactccaagaggaacatgcagccaaagtaacactcaatgggaaagaagctgaaaccattgagcgatacaatgttgttggactacgttccatctaccaagactggatggcaaatccaaggatggatacgagtttcttgggaaagtctgagggggaagtccttgcttactgcgagaaggctaagaaagaagacgagaaagccgaggcagaagaagaagaagaagaattgtccaagtttcctaccatgtaggcttggtttatatttattattattttttttatctaggaaaatggccttaaggcttagacaatggtttgccccttatgacacttttgtaaagacaaatttgtaaggttggatggccaacttttcttttattttctcttttatcgaatgcttcgtacttttgaacttaatatatttgtttgttttcgttttcattcacaactcaaacaattatattttgatcagatttaaaatactttaagcctttccattgctcgtaatttcctttgatattatttaaatagttaataatctactatgtgcgcgagcagttattatctgctatgcttttgatttgcaagcagtcattaattatgcttcgcataaacagttataatctgtttttaagcaaacttgaatatacttttaatgatt

SEQ ID NO: 400137 - DNA, 711 bp, Cannabis indica
catgagagaactaaacatattgagatagcttatcacatagttatagaaaaggtgcaagagggagttgtcaaaactgtgcatgtttcatctaaggatcaacttgctcacattctaactaaacccctatttcctaatcagtttaagagcatcaaagacaagatgggactaaagaacagctatagtccatcttgagggggagtgtcaaaagtcgttagcttgttttagttagttagttggtttgcttagatgttataactgtaagagtttgttactgctagttgtagtttgttggttctttctctttctgttattagcagctatattcatggactgtgatctcttgtattttcattttagactgaatgaatatagcagctacattttctttctcctttttctcttgttttctctgttttctctctattttctttgctggttttaccagctaataaaattcatatatgaaaacagatttctttttggcatatttatagtattttttatgtgagaaaaatattaaaaaataagaaaataaatatttggagaaatttatttaaatatatttttaattaatcaaacaatctatctatatatataaaggagaagtatgaggcggtgatgtggcactttaaaattgcttcaatgacttctatctattttctcattaattctcttattttattaattttaatttagtctatataaattctt

SEQ ID NO: 400138 - DNA, 780 bp, Cannabis indica
cagttcatccaaatcttttatatttattgccattaattataattattattcctctctttagttttttaatctttgactcacatatttgtataaataagggatcaccttattaaaatgaagtgttgaaaaattttcattcagttctatttctctattcatcttcttcttcttcttcttctttcgttttttttttttatattattcataataatttataacacgttaccagcacgagtctctgtctaatataatattatttgttaaattttttgaattatttcaaagtcgtgatacacaaaatatatttatatatatattcatctgattgaaataatttcaaaaactcttttacttttctcttctttttctttattatttatatattatatatgtgtatatgttcttattctcatctttatatatatatttatgtcttcttattatttataatatattttatataatttgtgcatataatgtaagagaaaatatatataaattatgcatatatcttgaagattatatattctatataaaatcttgcatatatctcgaagattatacaaatataatattcatcatataattgactaaaatataataaaagagttgatatatatatgttcttatattctttgatgacaataaaaatcatgtctaatattattatagatttggataaatatttcttgaagtaaatattttatttatatgtaatataactaaataatcattgaaataattattattgatgcaaatttatagtgagtttttgaatac

SEQ ID NO: 400139 - DNA, 584 bp, Cannabis indica
ccacaacaaacctcaaatacagcaacaagaacctatttccaactaaaattaaacttagaaattgacttccaacacaaacaaaccctaatagcccctatacttcaaaattgcataatcaaaccaaacttcaagttaagaaactaaagaactagggtgctagagcttacctccacttggaaacactaagatcttttgctgaatttccaaaaaaaatgaagaatcaaggtgttgttctcctggttttggtggtgcatgagtaaagagagagaaagagaaaggatttttctcaaattttgtttttctttatttttttcttacttttcctaaatgagtaaagggtttgtgattacttcttgctgaaattaaaatgactaggtgtcaaatccctaagcagccacctatttcccccacttgccaaattaccaatttgcccatggcgcttaaacttaagctaattcaagcctaggggtaaaatagtcaaaaaccataaccccgctcaaacctagttgttgaccgagattttcggcaactactaaaatatgattataatattgagctgtaagaaagtgagagaaggattttta

SEQ ID NO: 400140 - DNA, 1239 bp, Cannabis indica
taactacaataattcaatgaaaaaaaatagattttaaaaaaaatgttgaatatggaaatagataaagagtatatcaaaatatatctacaagcatttccaaaagttaaaattaatttgttctttcacatatgttttgaaggtggaggaagtggagaataaggttgaggactttcttgaagaccaaaccaataagaaaggggaagacaaaaccgatgagaagtaatgaaacaatgattagtgatataatgataatgtagttattagttgtacgttaattgaggagtgtttgtaattataatttattataaattatgtattaaattaatgacgaaatattataaattaaatattttatttaagggaaaattgttctttgagaacaagtaagtacatttgatattgttttttgaaaatagtttttaaaccaacttttaatagtttaatgcaagatgtaaaatttgtgtttagtttggcataaaaattaaatttatgttatatttagtttattatttataattgtgctccaataaaaaatgtaaaaaatataattattattgatcataatttaatattgtattgaaaatctataaatattattatttttttattttttattacttaaataattgtaatatagtaaataaagaagataaaattatgtaaaaaaattattaataataattagtaacattataataaataaaaaaaatgtagaatttattgtgagcagagcaatgctctaccatcctaaaatatatatttcaagtatcttttaaactttctcatggaaactaagttagctcccaaaatttattacagaaactcagcatagcctagaaaaaatacaacttttgaaagagtaattacaaataaatcttcaaagttgaaactaagctattatcaaaattataaaatataccttaatgtactaactattatcatcaataggtattttttagctaaaaatgggaagagtacttatctttttttcaatattctgttgatttacgttagtgaatggtgattttctaccgttagtcttccctctcatatgaatgtttcgagaaaaattaaaggagacgtttaagaggaaagaaagccctctgcccatctgttgggtccgcccctttattggtgggctggaccaataagggcttaggcccattttatttgaatcaattaaagaaaaaaaaaagaagaaaggaagcacgagtgcttcgtgagcagcaagaaagaaaa

SEQ ID NO: 400141 - DNA, 989 bp, Cannabis indica
aaatccaagaacaacaccactttcatgtttttcaacaattaaaaaccagcaagaaattcaattgaattcaatgaaagagagctacctcaagccttaatcaagaattaagcataagcacaccaaaatctaagttcaactccaagcaattcctccaaatcaagaaattgaaacaaaagagggcttatgagagtgaagggttcgggtttggggtagagaacactagaaaattacatttcaattcttaaaaattcatctcctttattagttatccagagaaggtcaaaatgaccattttacccctagggctaaaaagcatactcttttacacataagggcaatttagtcattcatgcatatttataccccaaataaatttttcagattcacccataaataaaaatgccaaataatacaatcaaatttgcatttcaggcccgaaccccgttcggcccgaaatacccggttgtgactataccatgccaacctgtcagaacacacctgaaaagacaacacatgaatactatataataatatagttctattaagtatgtaattaaattaatatcatcaatttacccttctcaggtcataattactaaaatgcccctggctcaccaacggggtcttaacatataattaatcaattaaattctcatatattgaactttataataatataattcctcaattattcataattatctaattagggttttgctaatccatttcttaatttcagggtattacagttattctcgaccaaggaaatcccacgaaatgtgtgtacattggttagaacctggacgagcagctcaaatagcaattaataagctttttgaaagcgaaccaggatcaattcgcctggagtcaaggggatatgatagggatcgatagtaagattatctaccatcatttaaatgttgatccaaactacccagcgaagagacaaaaaaggaggcccttagattccaagaatcaaggggcactaa

SEQ ID NO: 400142 - DNA, 802 bp, Cannabis indica
tgaattcacatcaaacaatgacattttgtaattttactatttctttcgtagcgtcaacacaatacttctcatccattgtgctatgtagggagtgcaaaaatgagactactttcgacttcatattaacttctgcaccaaactaaagtggtggaccttctaccgtcaaaatcggcacaaacatctataattgataagaaaaatagtaaagtcataaatacattcaaattatagaccatatagcaattcgacactacaattaatgaaattatttgaacacatcgataccaatattcatcattaacataaatcagttttcaaattaacaagtaagaagacaactatgtatatgatgaagtaccttcaggtacttattcaagttgtcttcataaaacagttttgaccatcttgttcttttgcaattctcttcacattaaacgaacccagagttttttgctgcgaatacattgtttattttgtcaactaacagaaactagtaataatctaaccaaacataagtaatacaaaaaataaattaagttgtataacaaagccattaccgagatacgggtgggcatgtaccaaacacaaggttggttaggtagtcgggtttcacgctcgtacttgttcatgatttgagaataacagtcaatgatctgcaataaaataaaatatgaatgagacatgtacacgaaataaaacctatttagtaacccattacactcacggttccctcaacttctcgtaagggtcacaacgatgccatgcaccttttgtccacttcatactttccatattttgcaag

SEQ ID NO: 400143 - DNA, 802 bp, Cannabis indica
agtttgggtttaggtttgggttcggcaacttcccaggtgtgggttctagtcctagacctggtctgattcatagtctgggtccgagatcgtgtttggatcccagtctgtgtccaggtctggatctgggtacagatccgggtccgggtcttgggttcaaacacttactacgggttaggccgaaacctcaagtctagattcggatctcgatcttattccagtttaggtccaaggtcttgggacgcatcatctgaatgtatttaagtccaggtttggggttgtgtcccggtacttaggtcttgcgttttgggtccaaggttgtgtcccgtgtctcgagtctggggtcgagttttggatctcggtcccggttttgcagcccagtttcgggtcaaagtcccctatctaggtctggatccttagtccaagtttggttccaggatcgagtttggggcctaggtcccccttctaggttcggatcctaggtcccggtctaggtccaagtttaggttcgggtttgaatcccgagtttgggtccaagtctatgtcctggtctgagtcctagtcccttctcgagttcgagtctggattgtgctctgggttctaatcaaattctaggtcccagaggtggttttggtgtgggttccggtccgagtttaggtcctgagtctaggcctaggttagggtctgtatccgggtcttggtttgggggctgggatccaatctcgttatgggtatttttttgtactcgtgtcaaggttagggtttaggatttagggttttgggtttagtgtttagggatttaggg

SEQ ID NO: 400144 - DNA, 641 bp, Cannabis indica
cttagaagaatatcattttgattaacgagtaaataacatattacatactattttcacatcgagataggtagattaacgtaaaagattaaaataactaaatattttggttattacaatctaccctccttaaaggaattacatcgtcaaaatttacttacttgagaataactcggggtactgattctgcatgtccttctccaactcccatgtcgcttctctatcaaaactatcacttcacaggattttgactaagggtatagacttatttcgtaaaacctttattcccttttctatcacgcgcagaaggcgtgccataaagctcatgtcctactgcaagttcaagttctcgtacttaagcacatgtgtcagatcaggtacatacttccgtaacatgaagttgggggtagggccaaatggtaggctacttgaccaactctgtccagtatgtcaaaaggacctataaatcttgggcttaactttccccttttttcgaaacgcataatccccttcataggtgataccttcaagaacactaagtcccctacggaaaactcaacctcccgtcttttcagatctacataacatttctgtctactttgggcggtaagcatcctttgccgtatcttttcaactgcttctga

SEQ ID NO: 400145 - DNA, 786 bp, Cannabis indica
gtcatcaaaattggcatagtcactggaaatgctgctggcaccgggaaagtcaccagagttgtttctggtgctgaaaaagtcatcggaattggcattatcgccaaaaaaatcacaaaaaaaaactagtttcttggtgatttttctagtattttttccggcgacaatgccaattccaatgaatttcccagagtttgctgtcggtaccaaaaaagtcacgggagtagctgccggtgttggaaaagtcgtcggagttgctgccaacgccaaaaaagtcgtcagaattgacatgtcgtcaaaaaaatcaccgaaaaaattatcaagaaactggttttttcatcaactggtttcttgactatcttggtaattttttttggtgattattccaattccgatgaattttttgaagtttgatgtcggtgctggaaagtcgcctaagtagttgtcagtgtcagataagtcgtcagaattggcattgtcactggaaagatcaccaagaaagtggtttcttcatcaagaaaccggtttcttaatgccaatttcgacgaatttttcggtgttgacggaaactctgatgacttttccagcaccgaccgctactctagtaatttttccagcacggtagcaaatttcggcgactttttttgcatcagtgacaaataaaactaactaaacaaataaaaacattaaatatgggattaaaaacttaatttacatatatatgacatatcaaataccataaaaagacctaaaaacaaaaaaataccatataaattggtcaaacttaaa

SEQ ID NO: 400146 - DNA, 554 bp, Cannabis indica
tcgagcccttaaatggaaaacactattaaaactcagacctaagctttaaaatcgctatcccgctactaccggagagcttagatcgctaggttttagattgaaaaatgaaaaacaataaatataagggagagagagttttatcgaagaggaagaatgagggtttgttcgtttcgtttttgtttatactaatgtaacttataatatataataaacttttttaaaaaatgataagttttatatacataaaaataatattataataataatataatgatcataatataatatttataataatattaataaaaattttattattaatagttatcttattatttcttagccactaacaaaatttatttctaaagtatttggccaacttcgataccctggtatttctaaaattaacttatcccaataatctcatcaatatttctaactaaaaccgttgggatatttttaggccttccaatcgggtttttcaagatcgtcgaacctgaaaactatttttaattccactatatagctcatattacattcacacatgctatata

SEQ ID NO: 400147 - DNA, 691 bp, Cannabis indica
aaataataattttgtcaaccagttacatataataggaagttacctagattaaacataaattgtagaaaggagttgcaaattcttgaaagatgataaagataaattttgtaactctttccatattatcactattaataaattagtaaaagatgttactaattgtgtttggatgtgaatgaatgataactattaaaaatatagttgttgaacacttaattttgttcacttataaggtatataaatagttcaaaatcaagtttgaggacttggcaaagtttgacgatgacccctcaatggaagttatggctgaacaacgtgctcttgggcaaaccgaggccaaaacgacaaattctcgcaaggataaaggtaaaggaaaagtaggtgaacccacatagaagtctgctcctaaacctcctcaaaaggacacaaatctggtcggccagccctctaagacgtagaaggccactggtgctttcgagcctggacacccttctactcttagaggcaaaaccatgcctaaaggatagagtacgaaagtacttaagcccaaagggcagaaaaactaccctagtgattctgtcaaccaggacgaaaggatgactgacaggcattctaaagacagttgtgttggaatatattttaccaggatctagatttactaacaagtgtgtttttaacatcctaatatgaa

SEQ ID NO: 400148 - DNA, 581 bp, Cannabis indica
tatttttgtaagttttcttattttaatcattcaactaacatctttagttattgattattctcttataaacatatcaactcgattcaaatgttttcaaaactaccataaattataacaaattacaaaaatatcatctttatgtttcggttcatattttagatatctagcaagtctatatatcgtaattaaacaaatattatcagactctaatgatgtctaatatcaccataaagtatcatattactatagtatagttaaatttcaggttttaatttaataattataataaaaaatagcaatgatcatatggaaaaattaatacttctttcgtctcaatgccatgtttattttagatttttttttttttctatttctatatttgcattatcctaattctactatcaaaataacatatatatatatatatactagatgagagttacgtggcgagccacgtaaatattagttttatataagttctagtagtttttgtttaaaaatttagtaactaagcaacgacaacaataatagtagatagatctatttaagtttttcatatttgtaaagattataaatctaaa

SEQ ID NO: 400149 - DNA, 998 bp, Cannabis indica
taagtttaagttagttcttgttatgagttttgtgattttggaactgtggtattaagttgagtttaaattatgtttataggtctgatttagggcttacttgagtttagattaagtgtatttgatggctgcttgattaggaattggaaaatttagttaaaaaacctaatttttattctagcatggtgaattgtgtaattggatgaattaatgtgaatgaatgttttgaacatgttgcatttgtaatattaaactgttctggagagtttgaacaggtttggaagtgatttggttgggttttggagcatcaaaccagagatttcctatttctgcagcagggaaaaccagttaaccggtttcacatgcatagtgaaaccggtcaaccgattttggcaacagggaaaccctagttttaggcttccaaattgattttgttcggggtattttcccagagcttagaataggatatcttaatgatgtttgaattattccgaatcagtggagagttagatatgtccggttatgaagttagggttattctaaagtttggaataagttgtttattgagctttgttgtcatgacataggacccgggattgtcaagctttgactccacttgaggtcagcatgtacactaaatttttggacagaggtaagaaaagtattcaataccatatatggttagcgttataactgttacagttcgattatgatcaaaatctcggtatgtgtttgttgtaacttaatctcaaacgagattaacgatatgtattcactgtgactcaattatgatcgagggaaataataggaaacgattattgtcattgtgactcgattatgattgaggaaaaggataggaaacgattattattgttgtgactcgattataattgagggtaatgttatgaaacgattattatcgttgtgactcgataatgatcgagtataagaaattgtcattaccgttatgagtaattactcctgaaaccgcggataggttt

SEQ ID NO: 400150 - DNA, 770 bp, Cannabis indica
agtcgttgaggcatgtcgttgggaacagttttgtataaaaaaaatttgcagctgaaaaccctcatttcatctcgcctctctccataatttttctaattttcactcagcctctccccctaatcagtccactccgcccatcctcagccgcccgttgtcaccggtcgtcgtcgtcgactggagtggagccgaacattcgactaccaccaccacaaccttcgactggtattttttgaaattattttagtttaaatagattgaaaaaatatatatatattatatgctaaaaaaaataatatatgttatatacggtttttacaaatatatatatattatattttttaatttttttaaacagaatatgttattatttttttttatttattattgtgaagttgtgattataatttattttatgtgtttgtttgtgaatgtggtggcagtccaccttcctctgcctgaagctacgacagccaccacgttcctccgcctgaagcttcgcgcgttagcccagcaccgttcgtcagcccacctccggcggccatttttgaggtatactctatttttaatatgtatagattgttttatatttatatatgtgtttatatgtttagatataattttgttgtgtaaatatttgtatttatttcagatatatgcttaaatatatatgtatttgagatatatgtatatatttttaacaatgtatgtattttgttgttataagtgattgtaactttttttttctttttaatatttatgtgaataatctg

SEQ ID NO: 400151 - DNA, 733 bp, Cannabis indica
atatatgtgtgtatatatatatgatgatgtgtgtcatttacaatttacttttgtttttatatatatatagctttcggcgcctatatatgtatgagatccacaagggccactaatttaaccatttcttccatttttctttgaccattaatattgttttgactagaatcactatagatatacaattaattcttcattaatatatggcaataggtgtgagttttattaattttttacccttaatataattaagggtgcgtttgaaaagcggtcaaaccacaatgtaattggatttgtgtgtaattggaggtaattacacaatttgacatgtttgtctgaccatgtaagctgtgtaattggaaataattgagaggttccaattacactctccaattctcatgaccccccatgaaaattgaatgtaattacactgtgtaattactaaaaattttccatattaaacattagctattaaaaaatattattttcctatctaattactaactattttgccaaacaagatattaggaattcatgtgtaattaccacctcatattcaaacacaccttgcattttaaaatatagtgtaattactaaactgtataattaccaccctagtaattactctacctataattacacagttacttccaaacacaccttaattaattcgatgataaacatgacttgtagctatatgttcaaaaatattagtgtaagaatatatatatatata

SEQ ID NO: 400152 - DNA, 812 bp, Cannabis indica
cttcttatatattttatattattactttatagcacgttattagcacgagtctctaccctagcttcaaggtaaatattttgttgaagttcttgagttgtttcaaggtcacgatacattaaatatatattcatatacgtacttttagtgacaatattttgctcacaacataaattttttgtgacttttttagtcacaacaaaaagttacttgtgactaaagcatagtatttagttacgagttgtcactaatttagttttagtcataacaaatattgtgactaaaaatacatttagtcacaacaaattgtaatgtttgtgactaatatttttagccacggaccttttagtcacaacacaacaatgataatttataattagccacaacttttttatctttagtcacaaattttgttgtgactaaaagtaaatttttttgtagtaattatctaactgaaataatttcaagaacctttttttccttttctttttttttctatatattatatacgtatgtatatattttttatatatttattattgattttatttatatatattatgttcttcttatttataatatttacaatatatgtgtgcttatgatatgatagagaaaatcgatataaattatacatatatcgagaaaattatgtatcctcgataaaatattacatatatcctgaagattatgcatcctcaataaaatcttgcatatatcttgaagattatgcaaatataatatttatcatataactgactgaaatataattaaatagatgaatacatgatcatatatatgttattgtattcttt

SEQ ID NO: 400153 - DNA, 622 bp, Cannabis indica
gtcttattctactatatttgatactgtatttcgtttttgtgtcttcactctcccatatctctatttataaaattattttccatctttctatttttttttctaaatttaatagtatcttttatgtaagttcagtcattgttttttatatgtaagttagacttattaatttattttaggtatatttataatattatatgtcatttttactaatagaagtaatttgtcgatttatgatatataatatgataagctgtcaaattagaagtgagattcaatttatgcaagattaattaatttatgtttttaacatatatatcttcctaattaatagtgtagaattgcaactctgttctgaattaaaaaagaacataattctaaataatttcggtttggagtgggcttttaaatagtctctaatttatgtccaatcataaattaggtagtacatgaataacagggaaaattcgaaaattatttttttaaattacatattaattaaatatattctaaaataattttaattgataaatatttttttttgtaatcaaagtactaaatagaaccttacctaacttattaaaagggaaacttacaaaaatactggaattttggttaactttta

SEQ ID NO: 400154 - DNA, 559 bp, Cannabis indica
gttatgatcattcttacaggattattgaaaatgggaaggttgccatcaaacagtatgatggcagaatcaaggtgctgacgaatgcaaggcacatcccgaagcttagatgaaacctcatatccctgggtgcgcttgaagatgaaggatatggatacaaatccattcacaaaagcttaaggatcaccaaaagttctttgatagtgatgaaaggagaaaaaaatcaatggtttatatgttctccaaggagaaactgtcccagccggagagacaagtatggtgaaagggctagaattagatatgaagttgtggcatcacagacttggacatatcagtgaacaaggcctcaaagaattgcaacaaataaggtataattgaaaatttaaattcatgtaaccttaccattttgtgaagcttgtgttttagggaaacaacataagctgaaattcactccgacaatgcataccactaagaagataactcaaatatgtgcatgctgatctttgggggtcataaaaagtgcctctgcactccagtatgcaatattttctttcaatagttg

SEQ ID NO: 400155 - DNA, 1123 bp, Cannabis indica
tttaggcgagagtcaaggatattaccacttgaatagagttgtcagcccctcaaaaataatactattttagcaaccttttattcgatcaaaataagaacccaatgttgtctcttttagagagagacaacgtcattcttattttatgagcttctacaattttattatattttgtaaaccctattctgagcagtcactatttgagtgatcgttattaagaataaaaaatttataataatatttatctttcaaagttctgcggtgttaaaatgtctaatgaatataacatctattagggatgaatctcattaaaaataataatcatgaagaaccaacaatggagatcgaatatcttaaaaactaaagctcattattttaaaagatattgtatttttgttttgatatcaaaattaattaatttaagttggtccaaattaattaaaaattaattttatctcaatttaattttatataaatctatttaatcataatttaaaattaattaattttagaccaacttaaattagagtatttttgttgcggatatgttagacctagatactcccactctatttgtaataatgacgtaaatggtctgcattccaggcgcgagggatttttgagccatccattctcttgagttgaaatattctatttactactttatgttgtatctcatagggtccgtcctagttaggtcttaagactcccactcctgattcttacgaagcaggtatgactcttctcaagacgagatctccaatgtcaaatgtacaacttttgactttagaattaaagtacctacaaaagttctaatagaaatataaattatagtattattattataaaaaaaaaataacttaggtatttatctgcagtttagagttaaatttaaatatttacatcacaaattactctataatttaatataataatttttaaaaattactgctaaacaattgtaagaaaatatgtttagaaaatattaagcactattagtgcccaatagcaatactttttagttaatagcgattgcataaaataaaaaaagaaaagttaagtgcatgtttggcatcataactaaaaaactgtttttgtttttaaaaacagaaaattatttttaaaa

SEQ ID NO: 400156 - DNA, 748 bp, Cannabis indica
taacaattgtaaatattaagggagtttcaccgcaaatatcccatctctcacccttacaactcccagggtttcactttctctgtgtctcacccgttcaaagcttaagctccaaggtttgccggtttaaatccataacaacttactcattgatcaacatcatcaaatggagcttttgattctataaatgtagatatttgcttgcattgagtatatatatcactactacaatatgagcctttagcttccctttttcaacccattttataaaaaggaagctaaaggttgtgaaaatacctgcattgacattttgaggcggttttttggtaaaaactataggtgtagaatttatatatatctatgccgtcggttgggggttggggtaaaatgagtgattttagattaaccatatagcgtcggttatttggtattaaccgatgccatatgtgccacgtgtcgaacaacggctgcatatatggcatcggttaaaaccaaataaccgatgccatagggttatatatcagaaccccagcttcgtcttcctcatttcacaacttgttgaacacgaagaacatagcagcccaaacctacgaaagaaccctcgccaaccaccactaaaacaacctcattctcctttataccattttaccccattttgtcttcaaatcttctattttcaataccttaacctatactgtaaaaaacgttgggtttttccccctatacatcaaaccgaacctattataaaaaa

SEQ ID NO: 400157 - DNA, 837 bp, Cannabis indica
gcaaagccgaacaaacccttatagagaatccatccaaattcattgctttctctttcctgactgatgacttgaagaccatctacatggctacttagtcagtagttccgtacaagaaatctgctcccatgaaaaaggacataagtaagagggacatgtccaagttttgccattttcatggagactatggccatgacaccaatgaatgcaacaatttgaagtgggaatttgaattcctattaagaaaaaataacctgcacatacaaaaatatgtcaaggccaactagaatcagagagccagccagacagacaataacttagatttattattgccaccaccagtagatgggcatttgcaagtcatcattgatggctcgcatatagctggagatttgggcaaagctcgggaaaggtatgcccaaaccttacagcatgagcaaaaagaaatggtcctggccgcagaagaaaggaagccaaaaataccacgggtaggggaacccacaataaaattcaatgaagaagatgctgtcaaggtttgcttcccgcacaatgatccattagtcgtggaagtacaaatggtcaataaaaacagtggctcgtactatgatagataatggagcctcagcaaatattctgttcaaaacgccatatgaaaaaatggggccccaactcaaagatctaatcccttacctccagctcgtatatggtttcttgagccagagcattgcacctttaggtaaaatttgcctacccctcattgttgggaacgctccgaagagcacaactttgatggcacaatttttggtattggatgttccatcagcctttaacgtcatgcta

SEQ ID NO: 400158 - DNA, 549 bp, Cannabis indica
tatgtctctaccttacaggaatcaaaccaaaatttgttaaatctgatctttttgtttttggaagttatgtctctaccttacaggaatctgttaattcaagaaaggacagtactgctgatatagaaaagaaatagcacggtatcagttttataattttaaagggaatagaagacgattcacttctatttgccatttttttagaataaaaggccacatttaacctgaatgtgttactatacaaaatatatttaaatctaattattttggaaataaatatgtttctcaaaaacaaaaatgagttgttaaaaataaatgcttagtaggggtgtgcagaaagtcatccaatccaattccaaccgaccgatccaatcctaaccgatccaatagaatcggatatccaatcataattggatcggatcggatgcaaattttaaaaatccaattggatcagatcggatattggatgagacatccgatccaatgaataaccgatccaatccaatccaatatcattcaatgtccatccaatcatatttaatatttataatt

SEQ ID NO: 400159 - DNA, 704 bp, Cannabis indica
tttaaggtcaagtagggtataaactttcataccaattgggtatccaatgaatgcacaagcctgagatctcagagaaaatttgtgccttgagttttccaaggtgaaagcataggcaaggcaaccaaaggtacggagatgatcatatgaaggtaacctgttatacaacaactcaaaagaagacttaaggttaagtaaaacagatggtgtgcgatttaacaagtaaacagttgtattaataaaataactccaatacccaagagataaacgagattgaaaagcaagagagcgggcgacattcaatatatgttgatgcttgtgttcaacaacaaaattttgttgtggtctttcaacacaagagtgataaggaagaatacctttaattgtaaaaaaaagatggcaagtttagttctttcgcattatcacatcgtatgcctttaatggaaatagaaaattgattgagtatataagcataaaattgaggtataataatgttgacatcaaatttatttttaagcatttaaacccaagtaaatctagtgtgatcatcaacaatagtaagaaaatatcgataaccttctatgctggttttgtgaaaaggacctcaaatatccaaatgaattaagtcaaaagcagtaggggccacgttattagccgaattaaaaagtagtcttttttgcttagctaaatgacatacatgacaagga

SEQ ID NO: 400160 - DNA, 963 bp, Cannabis indica
aatatactaaattttttattttattttttcattacattattggtgacataaaattcacatcattatttaagaaacgtgtattaaatttaatattttgacatatatttaaaagaaaaatattccaagcaaagacggagctacattgtagtttatggggccttaacccccaaatattttacaaatttttataatgaaaattttataaatttattacttaattttttttttaaaaaaaaaaaaaatagtttaatagcctttcttaaatttgttttgcatattggcccctgtttttttttttttttaaataaagtagagtaattttgttatgattttacaaatactcattattattttcttttaaaaaaatatatacattaaaagaaagcaaaaaagcattccatcgtagagtatttaatatctatactattattgttgtaattaaatatcaaatcttatttatatttaaattagttaaacataaacaatatagtgtactttatagcaatgctttaaaaaaaatgttgataaaagtgcaactaaccctatatttcactcagaactattattagagtttggtattattttaatgtttaacctcaacaaccactctaattttgtactttaatttggccaaaatgtaaatatcttgggtttgcaaacaatatatggattcaagaaggaccaaactgcaaaacaagcctaactcataggcacacagagaccacaagacaatacatgaagccaaacaaaaatggaatctaactgaagatcattccctatattccctcttccaaaaaaactcaagtaataataagggttttttcctttcatttttacattttaaatcaaattttatttttatttttttgcatttttatgaaaattcacataacaacaaataaaacaatttaaatcgtaatcaaaattcaatccacatagcaacccacatagaaactaacgaaa

SEQ ID NO: 400161 - DNA, 900 bp, Cannabis indica
acagaaatcgaccaggtaaactctatttctctctttacactttatgttttgttgtttttcacttgatctgttctcgatctaactccttctttattttcttgtccatgtacttcccctttttcgagcttctcaccatgagaactgatttctcatgtttgggatcttggagcagaagactaaaactagggtttacttcttctctctctctctctctctctttctttctctgatctgtttttctggcttagatcttaggttatttgcttttgttttctgtttatatagtgtagtagagtcggttgatcaaggcttaggagttagttacaatttcagttgtaactaactactaagtcttgatccactaaatgcaaagtaacctaggatcgagtctatttatctgtttctgtttgtgtttgctgatgtggatatttgtaagtatactggactggttataagtgaaatttattcaacaattcatttgatcctatcatttcttaaacatatatattttgtcacgcaatcacaaaacagtaatagtagtactatatctttctcttacataaaagcccacaactttacttataactattctaataattatcatcaacactacacatctaatggaccctttgaggccaaagtttttgtcaaattttttgaggtatctctttctcatggcatatgctactttttgtagttgaaattgactaagtatatccggctctgagggtaggcgggctaggcgcacgcttcgggcccctgaacgctcaaggtcccgaaattgtgaaaaaaaatattaatatatagataaatgcaatgtttccgcttcaagcctccattgggtccttcccccctcggaataatggctcttatacacgggtacgccactctggctgcttc

SEQ ID NO: 400162 - DNA, 1169 bp, Cannabis indica
gttactagtaatgtatattgtaactggaaaagcctgatttagagggataaaatagtttcaaaaacatgcataaggtgttgatgaggtagctataaattctttagtttatacactactagaaaaactcgtttagtgacacacattgagtaactctaaaactatttagtgacacttcaacacgcgtcattgatgagggtgattggaaagacagtttttagttttagtgacacttcacacgtgtcactgaaccctttatattcactttttgcgcgtcactataggcgtatagagtcaggttttgtcagactaaaaaggtaacaaccacacacatgaagtgtcacttatatttcctttttttttcttttttttttatttttaattaatattttgaagatatagtgacacacaaaaagtcactatacttattcaatttatttattttaataaattttttgagattgggttttattttatttatttatttatttatttattttaataattaatatacttatacatcagatttgttttattttaattttcatataaaaaagacataaaaagtgtataaatacaattacattcaataaccaaaaattaatttacagaaagtaaaaataaaaaaaaataaagttattgaacaaaaaatattcctttgaaaaaatacaaagccttgttcaaaaaatttaatcattaagaaacacagcaaataaacctaacaagtattgacaaatatccattgaaacataaaacatttttttgaaaaatacccaaaaatatcgcaagagtagatattccaaggttgttgaggagggctgccctcaattgagagaggtagattgatctcttgaggatgagagggcatgatttggcgattcatctgatataacctgctgcctcaattactcaataacagattaacaatagaaaatagaaggaaacatcacagtgagtgttattgaattcaagtaaaaagattacaagatagagcctacaaggctcttgctgaagagagagaaatctcaataccagcataaaccccataaaccccccaaacagtactttaacaaacttgcaatctcactcacaattacaatcataccctttaaccgtataaaaccaaactacccttaagcattaacatttttacctctcctagcataagtgaa

SEQ ID NO: 400163 - DNA, 735 bp, Cannabis indica
caagaacaaagaacacaatgtttactctcttgaagctcttataatgaaacctctgagtatgctctcttagatttttctatagtaattctttcgacccctataccagtgagaatggatcactatttataggtctaaatgcttgagggaatttctcttttgcttacaatatcaatagttggtaagaacgtatattacatatttagaatacactgattgtgggatttggacagcttgtcatatctctgtgatacgatcccagacttatagggattgcttttatgcttcacaatgcaagtcttggaattgctaagtgctgatgcgctgctcgaattgtctactgctcggctgggaagacatcatccgtgcaggtgtatggtgagctctgttcggaacatttcttcagcaagatgtagggaattaggtccacgtgtcaccagcatgtgctgccacgtcatagtgtaaaaaatgggataacaatggttatatctatttgaccattacaacaatatgatgaagttgtcatgtacctcttaaattatacacatcattaaattgatgatagtgattcttgaagaaatataaagtttgatatacataatagtaactcctgaagagtatatatgttttggagaataatataactattttattcgtgtatattaaaataaaacttgtaatgattacttatatgttgtagtgattttacattaccttatgaaaatttcattgaaatac

SEQ ID NO: 400164 - DNA, 579 bp, Cannabis indica
ctttagagattccctttaagttcaagaatcctacctaacatcaatacagtgggaaagaagactcgttgtctcatatccactactttaaagtgcaaaccgatctaaaaggggtaagagatgacgtccgatgtagaattttccctgccacgttgacaggtctagctcagtgatggtacctcatgcttgtttctaaatctatcgattcatggaagagcttgtggatacttttagaagtcagttcgctccatatagacaacgccaaatcgaacctaatgattcggtagatgtgaaacaacaagacaacaaatccctcaaggactacattcaacagttcttagaggtagccactatgaccaaaatacttagcgaggatgaaagggtcatgcaacttgtagctggactcaaggagatgagtcctctatggtgaaactttcatctcaaactagtccacaccatgatgacatcctagatagagctgatggctttatgaaactagaaaaagttgtttctcgagctaaactcaaaaatcaagaagaataaataccagactcccctgctcctgacactaaaatgcaaagg

SEQ ID NO: 400165 - DNA, 1522 bp, Cannabis indica
gacccaaaaacccactcgacccactcaatcgacccacgcgagacccactcgaacccagtcgacccacgagacccactcgatcctagtcgacccagtctccgttcaccatcatccccgccaccgtccacgaacccactcaaacacttgaaccaggtttggcttccctttattttttttttgttatttatcctttaaatttagaatttgtgataaaactgatatacgtaaattattaaatttttgatttgtaagtttttgtgtttggagaagaatctaggttagggggaattagttttttttttggattttggttgtttgagcaattttatgcgattaatgtgcaattttgtgcgatgacattgtagttctatttgtatgattttcaattttgtgcgagtttgtgcgatttgccagtgtggatttgagcgatatttatgcgattgcttctacgtgcaccatttgagcgatatttatgcgattgtttctgcgagtttgtgcgattttgtgggacttatattgcatctgaaacattgtaggatgtttgggcgatatttatgcgatatgtatgcaatgtcattctggattttgtgtctttacaatttgtgcaatttatgtgtgattgctgtgtgatgtatgtgcaatttatattctaattaataataatctttgtttgtaaatgtagatggctccagaactcattctcctattttcagagcatttttttggggcgtatcacttacatagggaacaggtactttgcttcaataaaggctacgttcgaagcctttaacttgattgagaaggtgaaggaaactccctttggagttttttggaatgccaatgatctgaaattctccagggtgattgtgcatcaattactattgaggaaaaagaacgtgagtgaggtcaaaaatgatgaagtgtggttttacatggtaaaaccgaaaccaaatttgggcagtctgagttagatttgatcacatgcctaaagatgagcggtggcccctccacagaagaattgagtacactatgtgagtctgatcggatactgcgggagtacctcaataatgcgaaaagggttacttttaaaaccctttggctagcttttgaggcgtgcaatgttgcaaatgatgtgtacaagctagggctgtgtgcatttgttgaaggtttgttgctatcaagggctgagggtgtttatatatggacaaatatgctaaagttagtagaaaatgtagacaagttcttcgagtatccttggggcctcctttcttatcagaagttgtggtcatgcataactaaaagtatgattgaccttaggaagatctacatggataaggtctttactaagaaagataagacgaagaagaaagagaagaaggagaaaaaaaattgctcaaccagatctgaagtacaatgtctatggatatgcaccggcgctgcaatattgggcctttgaggtgatgcaagatttggggaagaagtatggccagtgcagatggactagattccctcgaatgttgaa

SEQ ID NO: 400166 - DNA, 751 bp, Cannabis indica
cattattaaatgaggctacatttgaggaaatttcctagctatattcagcagcagccactcaaacatctattattggcaatgacgtcactgttatgttgttgttgtagttgttgttgtagtcttattcttcttctctgttcggattcttaaatcttcattgtttgcaaggactttatactaataaatgtaattctctgcagaggaaaaagtttatcaatgaaagtgaatccttaagggagcaaatttcaaaattagaggaacttttgtaaagcaagtagaatatgttagaggtatatatttactattcaagcaataaataaattttgccgcactaattaattttgtttcttaactttgcaggcatatcatgaagtattatctttcaatattatttggtgatagtgtttagtgtagttcacttttaaggtatataggaacttgttcatctgctaaaccagacatatacatcgaaatagaagcatcaaagtaggggcatatatgctttactgatttttcaggtgagattttatagtactgttatattatgtttatctcctctcactgctgtagatccctctctgttgcaagataatgcagagtggaactttcataatggctaaattgtagtgacagctatgtattgctgctgattttaataatttttctataattctttcacagatcatgcctacagatgctcaaaggatgttttaagagtttgaggggtttgtgcttctagcttctgagttgg

SEQ ID NO: 400167 - DNA, 583 bp, Cannabis indica
agaagacacacagagattgatgaagtgaaccacaacaatttttttaatgattcatataatatatccaagaattttcattccctacatttcacgaaattaccacaagcatttaaagcattggctcccgagaagcttctcatacacctcaataataatgcagtaagctctgatacattccaccaggcgaacccctgggcacaggcggaggttggctatgctgagctggtaaagaagatgaagttaaaccatactgtgaatggtctaggtagcttggtcctgcagaactgggaggcatcgaaccactaaaatctccggtcattggactgctgtacgaacctggaaagttactattatatccaatactttgaaggcggcacctggttacccatagacggcgacccataattattagcaagcagtggttgaggagggctctgtccatgatgtcctccacttcaaacacactttcaaactattgccattaagtcccttttttctttctcctaatcaattttatttttcactttttaaatatttaaataaaaaaaaattaaataatgaaattttaattatgaaattatat

SEQ ID NO: 400168 - DNA, 689 bp, Cannabis indica
aattttcccactcacatttactggcagacttaattttagaattgaggtaagattagtatttagatgcacatatgcacatttttagatatacatgttttatgatatcgtttacctagtatactagagatagcagtatggatgtacatatagttacatttagatactgatatttagtgatactagagtgcaataccctaattaatagaacaccatgtgtcgtgattacagtatgctaattctgttaatcgacgtctactaagccaagtgaattaaaataaaacaacttataaaatacaaacagcttgtagtaactaattttaatttaaaccaaaataatattacaaatttgggatcccgtaaaatcttttaaaaatattacatgttgtgtacatgtaagctgacctaagtagaaaaatgagatttatatagcaattattgggaatattttaccatgatataggtttattaataaatatgttgattaatatcctaaatatgaatatctctgaaacaatgaaattaaacacataagagtttaaaaaaccatacattagttgcagcggaatataatgactctttctgttcaagatctctagcccttgattcctttctgtagcagagcattatcaagatctgaacctggatcctttctctccttcgggtttgattaccaccgtcttactcactat

SEQ ID NO: 400169 - DNA, 1454 bp, Cannabis indica
ccctcctaaggttcgaaattttgtttggcgtatctataatggttggcttccggtttaacgatggtgcttagggactcagggtaggaagatagaaccatggtgttgcggctgtgggactgagtaagaaacaatagaacatgggctatggttctgtccaacagtaaaggaaatatggcagcattttttgatgtggaagaccattaaaaggtggaaaggcgaaacaaaggacatgctcatggctataaagcaacaaacaactcaagcagattttttaatgttcattatactctcttggctcatttggaataggaggaacaaaaaaagactcaaccttcattttcttcctaacaatttatggtgcaggtgggctcaattagagatggattttatgatgcacaacaactccaaaatggatcagttgctgaagccgactaccacaccagatggtgggtgggatcctcctcaccctgggactttttgcatcaatagtgatgcgagtgttcattagtaaagaagcgaaccttggattgggagctgtcattaggaaccacgaaggggctgtgttggctgctgaaatcaagcagcaaagaggctattacacggttgaattggcggaggttttggctcttagaatgggcattcatcttgcatctaaagtgaaggcctacccgttcatcatccaaactgactgtctttgggcagccagctatttgaacgacaattatcaagccaaaacggattggagcgcgctgcttgacgacattcgagagtcccctgattttcacaattgcgtggcagtaaagcatataggaagaaagaaaaacagggctgctcacttattggccaaagaggctttgtttgcaaattgtaataagttgtggttgggagaatatcccttttgtgcgtctgccggtttaatggcggacttgccgaactttgtgtaatccttttgttagttaatatacatatttacaaaaaaaaaataataataactaggcaacgataccgcgcctcgcgcggttgtttaaaaatcatttatttatgttgtaaaaaataaaatttaaatttaatatattaaaagaaaaaaatattaattaattaatatattaatattttatgaaaaaattaaaatttataattttaatatgttaaaatattaaaatatgtgaaagatttaatttttttaaaaaacaaaattactttaaactaaataaaccacaaaataaataatttaaaattgacaaattttagagagtcaactcatcatctttgtaatttgcattttacatataaggagcattgaaaaataaaaacccaaaatctaataagtaaaataaatttagagaaatagtttaaaaaataaatatatcgtcaaatatacaaaacaatagaatctctcatatatatatgagattagttattaagtaaatatgttacaacaacaacaacaacaa

SEQ ID NO: 400170 - DNA, 1107 bp, Cannabis indica
tgttcttgatgattttagatgagaatttgaagtattattgtgcatgaaatgtgattttatactatgaattttatggtgatagtcagctgaagttttgtttgggtatttaggttcatggatatgagaattttggtaatttttgctcaagtttggagcctatatggaatattgtttaaatttgaattttgaagcatgcttatggtggattagagcttaaaatatgtgagttagctctctgttatgttgataactattgtgggattaattctggtggttgtacatgtttttgattgaatttgggtatgtttgagcataatttttgaagctgaaaagtgggtttccgggttttttaacccagtggtcgcgactatcataggtctggtcgcgaccatgacaatggcgtttgttaatttttttgggttttgttttcaccataactttttactcgagactccgtttgagacgttctttatatcgttggaaagctcgttttgagctctatgtgattatttgtaatttgaatgccaattttatattttgtggaagtggatttagggattaacccaatacttgtgaatctcaaaaattgtgattaggattaccggtacttggttaggagcacccggggatttggaatctttacgtttgtgggacatcaggtaagacaatagttagcacgtagagtatgcgcggtggcgcctagattgaaaatgatatatgtgggtaattgggaaccgagattagggttatcaccctaacatgagcagtttaatggtctagggttattaccctagtgattaataatgtgaatgcgctatgccatgttatatataagtgtatattaagatttaggattatgcgttcaaggcataatcgggtaggattcgtaactaaaatcaagatgaatcgttctaaggccttattgtatttagacgtgtgagtgtaacacgtaggtctatgccacatagacataaataggagtgtgagcgtaacacgcgggtctgtgttatataggccaatgtgaaatggtattattgtttatgtgatatgttaattatgattattgataattatactgtattgctgggcttggctcacgggtgctct

SEQ ID NO: 400171 - DNA, 1242 bp, Cannabis indica
ttatgtagtccattttttttaataaataacttactttgagatccaacattcaccaatcactcaaatacatatccataaattgcatctcaatttataagctttttccccattatgggtgagtacgcatttccatcattacttaacaagataatcttttcccaaattttcaatagtctcctgatataccatattgactatccagccagttaaaagcactttccataattaccgtatcaccataagcaatcaaagtaatcttctttaccttagtgatacaaccactctccctgacattctttataagttaccttggtaacgtctccgcttcaagcctacattgggccccttacaaccatggaataatggctcttatacaagagtgcatcactttagctacttcctagactgacgactggccctaaagactgatccaagtgtttctaacgtgctttattctaactcacacgcttcatggggaaacttcctatatgtaatcaccccaagtcaaggatacttaactgtggagttcattcacgatgggttaccgaaacaggatacttcttgctaatataggtagtcccaaacaattcattcaagtcctcaacaccatgtagtcccatgcatacataatctcaaaatcactacatacaacctttccttaggaaatgtggattatacagctcctaacctttccttcgcggatcacacggctctaattgtcacagcttgactcatgccccctagtagtgaatatatccacccacacaatcatcgcctttaattcacttagggtttcagacaatattcataaattgtcccactaacactaacactagatcactttatatcaaaagatttcgttctccaaatcaattagaaggatacccccattaactactcatatcctatgttccacttgggaatattagcaaatttaactcatattgttattttctaatctgtctaccctgtcagatgagttaccactaaataacatacaagcactgtccatttagatattttgatatcccctcattgagtatataatgtttgatatcgatatcaattgaaacaacaactataatattacccataagattctaacttaagtcagttgaataaccgatacttagcacttggacaggatttgtacacttttcttctttaacaacagtctttcataactgtgggaaagttcttttcagatgacccactaccacacaataataagatctggctcta

SEQ ID NO: 400172 - DNA, 609 bp, Cannabis indica
ttttgaaacttccgtaagtacttgaccattaagtgactaacagctaagtacttacgaaagtttcaaaaatataacttaagtaatattacggttaaaatgactaagagtttaaatttatatatttacaccacaaatttctccatatataataactcatttttaaactactagtacgagtaatttaatatagtgatccaacctagctactcgtaaaagtgtcagttataataataacacacaacaatatttctttactacttttctcagaaaatataacacgcataatattaataatattatagaaagaatatacgttataataataattgtctgattttatatttatgtatattgccctagataaatatatctataaataacctattatatttattaatgatcataaatatttgtagtactatatatatagagagagagctatatatagccagcaatatatatcgacttagtatataaaaattaaagttccaagtgagtagagagtaagaaaattagatgcaattagaactgcatgaatttatatatatgtatatatatcatgatatataacagagaaagagagctatatatacaacgaaaaatatatat

SEQ ID NO: 400173 - DNA, 920 bp, Cannabis indica
ggtctctttccctctgttgcttcgtgttttcatgactggtttgctgagttttggtcaaaaaaagagacggagcagttgaagaatttttgatggtgggatggtcaagttggaaagctcgtaatgagcttttatggaagaattgctcgcggtcagttgctgatgttgttgctgtggcacataacgttcttgatcaattgcgatatgctcagtctcgtcgtattgagccgctgctatacaaacctgttattgttggcagcaaagattgttggactaaatccgtgttagatatgattaagattaatgtggatggagcaactttttcaatagagaatgcgtgtggaactagttttattgctaggacttgtgatggtactatcatggaggcttttgctatgtattcaattggtggtttacaagcaacaatggctgagatattgagttcaggaggccctaagttggataaagaggaagattttgaacaatgttgtggtagaaactgactgttttgtggccattcaagctcttattagctttgttgaaatgtcatctatcttcggtcttctcgtccaagattgcaaaaagctcttatttttctttgaacaatgttaaagtttgtcatgttaaacgatctgctaacaaagtcgcacattgttttgttaaaatactgtaaactcagaatatagccctaattaattcatgagaatcaaacaatagaatatagattagcggaagcgtatcggagtccatagaatcgatctttgattggtatgatcttccaattttgcatcaaaacctttgaaaccttattttcctgatgatggggattcaagaactctggaaaaaatactgatacgatgcaaaatggggacccatacctgttatattaccaactgttacaacagttggtaatatttattaat

SEQ ID NO: 400174 - DNA, 649 bp, Cannabis indica
tttgagatgagaaatagaaagggtgagggagggtcggtttaggccaagaaaaatcagaaagtaatgcatttcattttaccaaaaatcccattttgttgaaaatagaataaatggtcaaaaagaccaaaatgcccctagggtcaccaaatcacatattcatgaaacaagggtataattatcattttatcacatatcatactcaaataaattcagattattcaatcaatcatagaatgccaaaataaaatcccaaaaatatatttcggccccgaacccgattcgatccgaaataccgattgtgactataccgcgccaacttgttagaaaatacatgtagaaagacaaaacaagtatacaatataataatatcgtccataagcatgcaataatattaaaattacagttttacccttctcgggtcaaaattacgaaattgcccctggctttccaacggggtcttaacatgtcatttatctgattaattcacatataataaaaaatataatgatataattccatattaatacatatttaactagttagagttcgctaatccgttttcttaatcttaaggtattacaattattccctctttatagaaatttcgtcctaaattttacctgaagaactctggatatttctgctgcat

SEQ ID NO: 400175 - DNA, 695 bp, Cannabis indica
aacctttgttaactggaagaaacaaatagaaaattagtctggaaggaagattaagaaactaaggactgataatggattagagtattgctcagatcagttcacaaagtttccgcaagacaatggcattgctagacacaaaacagttgtgaagacgccacaataaaatgggattgcaaagagaatgaacagaacattgctagagagggtgagatgtatgctaaagggtgctggtttagacaagaaattttggggagaggcactgcaaactgcatgctatctcattaatagatgcccttcaacaacactaagatttaaaactcctaagagttttggataggtgaagtacctagatatgatcatctaaagtctttggctgcactgcttttgctcacattaaacaagataaattagagcctagagccatcaaatgcttattcttgggttaccttgatggtgtcaagggttataaattgtggtgtctagaagatggacacaagaagtgtatcattagcagagatgtggtgtttaaagagcatgaaatggcaatgaaacttgccaatacagagaacattcatgagaagcaaagtgttgagcttcagaaagaccaagagaatgcagaaattactgatcaggtggatacacctacaacacacagagaacctagttcagatgaagagcaaggacaagaacaagtg

SEQ ID NO: 400176 - DNA, 551 bp, Cannabis indica
ggctcaatgggtcggactgtacatagcagtgtatttcgcccttgagtcaatcttatctcgctgtgagtgtgataagtattttttttttttttgaaaattagcgtcgatatgcattagataaagaaacataatcagacctcacggtcattacaaagcaggttctctggtaaggaggagaccggaatacagccaaacctttggtgggtaaaagcccacttagccacattatgggtgtaagtgtcatgtctttgtgtggcaaattatgtaaatacttttgtttagtatttctgcttcagtattatttgtctaacatcttttctgtagttagttgcatttgatttcactaagttcattttagtgccatgtcagctttctgcgtctttgttagtttatgccagctgtactttgctggttggttagttagtgagattttattatctttaggatataaattctgttatgtctgttgttctaacgaactctcttcggttagaatcattttcttaattcttgctctgctagggcacaatatctctttgttttgttttgtt

SEQ ID NO: 400177 - DNA, 1010 bp, Cannabis indica
ggttgcccgatggttatccatggagcatggatcctgggttgaaagtgtttgtaagaggcatttttgtatttttttttatttgagatgtatatttgtttatttggccaactagaagtatttttgtaatattattatttttttggtcaaaactgaaaaaaagccctaatttttcgtcaaatgtgaaagaaacgattctttcctttgttgcatttatctgttatatttggtattaactagatccaccaccatcttgaattgcacttaacgatttatacctatatcatatttttatttgacttataccactttgatagtaatataaaccaaaatattgatacaaatatatcttcattataaataagtgatagttgtgcacttaacggttatacttgttcatgttttattcccaagaattaatctaatatacttctattatcaatattatttcatattcaaaatatttgttaaatataatatttaaaattatttaaaaataaaatagaaaaattgatattgattatattgtggaagtttttttttaatgagaatatattgtaaaagttagatgtaaaaatagaattaacatttttgccatatattttgaaaaatagcaaaaggctaacctattttagatctatatggataataggataaaagtaatgatacacccacacacattttacactaaaatattatacacagttatgtgtcaagaattttaaatctaccatattgctttgacatgggtcacacaaactaaaatctcttgccaagtagtatgtaaagttttggtgtaaaaaatgtgtctgttagagagtctcgcattgctaatgtgtagaaagataatagaatatataagaggaatgagctactgctactcctcccattaccaattggttttgagatggaaccccatgattctcatcatggtattagagccatattcctcacgggcaaatagtgaccatgtccactctgatacggttcaagattgatgagcaaaaatagcc

SEQ ID NO: 400178 - DNA, 1053 bp, Cannabis indica
ggaccaataccgggaccaacggttcgaacatagatggcggagctggacccgagaattgggacctggaactaggaccaagacctaaaacgtgatcctggacccatcacctaggacttgactactgggacctgaccccggacccgaacctagacccagacctaagacccggcctgagacccgagacccgaactggaacaagatcgggacacgagaccaagatctagatctagaccttggacctgacccatagtcagtgtcaagatctaagacaaagactcggatatgtacccgaacccaaacatggaccgggatccaaactcgaacctaaaccagaatcagacccgaacccagacccgaactctgaccggaacccaagcccaaactcgtgtacagaatcagaattggaccaggaccgagactaggaactagacctgtgatcggaactggagccaaacccaaacctaaacccaaacttggacaaaaactcataccgagacttggaggcatcctgagactcaaatcccaggaccaggcctgggacctagactaggaccaccacctggacccatacccgtactaggatcgagacccggactaggatccaaacaaagggcagggcccgagaccccaaccctaacttggaccccgaccgagacataggacccaaacatagataggggacccagacctaagacttgggcccccaaacaaatatgttatcccaatttttgcactctcacgtggcatcacgagaatggtgacacgtggagtccacttggaacatctgctcgggaagacaggccgagcaagatgcctcgctggcatatccagagcaagatattcagcgatccgcgtagagcaaccaaaacttagcggatttagctttcgcatcatgagtcatcagcacaatccctataacccagggattaatttacgtggatatggcatacacacgatcccactatcaatgtattcatcctcaatcccatgatccttgcattcagcattgatccaacgatctttctatctatatgcattgtaacgagagaggaa

SEQ ID NO: 400179 - DNA, 710 bp, Cannabis indica
gaaagaacttgataatcttaagaaaaatgtttagattcgaaattcaaaatttgaaatttgggatgtcacaaaattagggtgtatagttggagtttttcttttcttaaggggtcctttttcgaaaaccccctttggagtacttttctattctcactgcccactcaaacaacttacctagccaccaatctcaaaaatcccaacatttggtcagcgaaatctctgcgtgtggggctcaaacgtcacctgaagcttttgtgcacatccccatgtgctggcacatggaagcgcgtgtgacggcattgacgacattctttttttggttttttactcaattcttctaagcctactcgcatctatctcaggttgtaatttggtattgtttgccttattcgtgtttgggtgttcattctttggtgttcgctttctttcttttctctttcaattgtattcgctttcgagattatgacagagataaaattagattcaaaattagtggttgtttttgatgtggttcccgtgatgtctaaaatcacggaccataaattgattggtttgaattatttagaatggagtaagacgattcaactgtatctgaagagtattgacaaagatgattacttgattgacaatcttcccaatgaaaaaggcgattcaaggaaaatatggctctatgaggatgctcacttgttccttcaaattcgaaattctat

SEQ ID NO: 400180 - DNA, 1439 bp, Cannabis indica
atactaattttgattttcaatcatacaaagagggtcgaaagacgacatctaggtcagtatttactcttggtggaggagctatagtttggagaagcattaagcaaaccagtattgtagattcaaccatggaagtcaaatatagagcaacttgcaaagcagctaaggaagcgatttggttgaagaaattctacactgctctagaagtagttccagaagtagaaaactactggtgctctattgtgacagtagtggaccagtggccaactccaaggaaccaacgagtcacaagaggcaagaacattgagagaatgtaccatctactaagagatatagtagaaagaggtgatatgacggtcttaaagattgcatcagaacataacttggcaaatccattcataaagacgctaccaacaaaatcttttatgggtcatataactaatatgggactaagggagatgcccagattgcttttagggtaagtgggagatttttagggtttatttcttgaaaagcctataaagaaatttttttattattaataaagagttgaacattttaatatatacatgaatattaaattattaatatttattattaaataatttatatatgaatatcgaatttcttattcatatatgaggttgtgacttggagctgtacaaagaactaagatcacttagccatgaataaaatagtcagcaacatattaaagttatgaaatctttaatcagtggttgctaatacggttcactgatgcccgttcttcggtacaagtaatctcggttcaaattacggatgtagtatgacattaaagtgaaggtgttgtatataatagagattatatatgacaatgaccgatatgaataaagttgtctttatctaacatgccctttactataaagactgaattcatattataacgatgatcattagtagatcggcctaaatcctgagtaattatgaactcatgttcatgttattagtttctttgattcacttgttaaagtttctcaaagaagatgattcttacaacttctattttgggaatctaataatatggatggctggaaacatgatctgcaattatagaatcttaactttcctaatagattaaatgttggttccctttaagtgttaattctagaactgaaaatttgttcacaaatttagatgggacctaaattatacttctactagtgaattaatggtactaaaggatcaagaagtaattataagagtaaaacagtaatttgaccaaaactaattacaaactaacacatagagggctaatcactggaattaattgtatcaatggacgctgcagttaactcagtaaatgtaattctatgattactaagagtgcaattgcatatttatagtggagtaatcatgcaattaataaacaaagattatttggttgatgagactcgataaataat

SEQ ID NO: 400181 - DNA, 1009 bp, Cannabis indica
tatagttttttgtctattcagttctttagattcgagcaaacctttgtacgcattgaatggtaaattaataacttgctaatatattgacacgatcaatattaaatagacatatttattcatttattggtcggaatattttttgttaccgtagtaacttacataaaagttattatattgatctaatctgatctttagctaaatttaaacaaaataaattgcacttaaaagaaattttactttcaaaggtggtcatctgacctaagtacttaatcgtttcattcgaacctttgggcaaggtccgcccagaaggccatttacttaaaagtaaatgttctataattttgtacttagagtggtcattcgaccttgtacttttattggtaacactttcttaaatgttctccattccaaaaccttggaactagaatgagtttcatatttttgtcataccgcccaagtatatccgctcttgattcgagaatttcaaccacctgatatggccattcccagtttagtccgaacacaccagtcgtgctgtctttcgttttcaaaaatactcttttgaggaccatatctcccacaaaaatttctatgccttcacttgcttgttaaagtaccgagctatcttttgttgatgggccaccaactttaggtttgctgcagctcatttttctttgatttcgtcaagtgattttgctaggagggcacggttagcctcttgatcataggtcaatcttctatgtgacggaggttctaattctacaggcagcataggtttataaccataggccatatcgaatggagtttgtccagttgttgttttttttaagctgtgcggtatgaccatagtacttctggaagttcttccaactagtttcctttagcatcttcaaattgtttttccaaaacatctttaagtgtcttattgactgcttctacttgaccattttcctgaaggtgtgccactgcaaagaaactcttatgactccatggttcacacagaatcagt

SEQ ID NO: 400182 - DNA, 710 bp, Cannabis indica
gaagccaatcggtcgaccggttcttaatggcctccctgaactggaattctgattcagtgcaggaatttttaaaattccataactctaccaaatcaaccacaaaccaattcaaactttccagacctcctctaaataccccaaataacaattcaaaagcaacaaaacaacccagcatgcacagaatgaaaatccaccatgtgagctccaagctttgagttcaaaactcaatcttcgttaaatcccactatcaaccactacaactagcttaattcagtctaaaacaacataagaaatatcctgaaaccaaactcaaacataaaaacaaaattttaccattgaaatccaaagttttcagtctaaaaatctatactagattaaatccaactaacaaccatgaaacctgcttgaatcatcattttaaaacataactaagcttcaaaaatcaataacaaacacaaacaacagccaaagccacaaattcatccaacatgcaacaattcatttttctaaaacttcaagaaaacgaagagaagcttgattaaatattacctcaacttgaattactctaagattcgatgaaaacttgctgaactgatgaacaaagtaaaccctagcagccctaggattttcgagagagagaaagagaatttgatagagaaagaaatgtgaatttttttttctttttctttgattttttgaaaaatgaagaa

SEQ ID NO: 400183 - DNA, 790 bp, Cannabis indica
aaggatctttttcaaggtgtgggattgatttgtagcttgaggtaaccctaattacctttttttttaggattcttgtgttataagcttgcttttggtatatgattttatgttttgatggctgttagggttaaaatgttttatattttgttttctaagtttgatttgagttagaatgatgatctagctgctagttttgagttgtcagtttgtggatgaacaagtttgggtttgaaaactcaaacttggttcatccatggcatgtttttgtttgatctgttttcctgagttctactggtttgattatattgtgtatgccctaattaggtgctctagatggtttggttgcatttggtggagttttgagcaagaaatggggtttttgggtgaactagtgcaaaccggctagccgattttaccagttaccggctagccggttttggcagggtacccgaatgctccattttttctattctcgtccatttcagtgtcgtagttgggtgtttccctatttcctgagttagtgtaatctctagggatataacagaacctagagttgtaggtttgggtttccttggattaggctttcgatcatgtgatttacccggtttcattatgtgattagggcatccatctagcacgagactttccgttcaggtcagctagcacacttgaatctggaaagaaggtaaaaattgtatataatttgtgatatggatatgcgaatgtatgtatatgtttagtgtatatgcatgcttatatgttgtgatacataccctaccaacacttgtac

SEQ ID NO: 400184 - DNA, 807 bp, Cannabis indica
aaaagagtagtttccaaatttgtctcgttgctgctcactaagtttttttttttttaagtagtgacttttgggtcaaattactaaagtaatagacaaaagtgaaataattaaatttcctttcctatttcttaaatattttaatttttttattttgttaaacaagtttagtcagttaacgtgtctatccttttttgtctactgtagtttgcttttaatgggatcaaattataaaataaagctaatatataggggttctataggttagagtattctacataagcaatatatttatgttaatattatgataagaaaaattaatgagatgcactttcaatggctgaacaagtgtgagaatgatcacaatatctaaaactatataaaaatagtcaatatgattatggaaccaatggagattcaatagtacttatatatatatttataggttgagtgatatactttttgcatgtacaagttctcgaacttaaatcaactactgcctttctgcaatcatcacgaacttcgaacaaaacatcatatttgaaagtattaatattagaatttatagtcaagttaagtaacttctaatttaaagttgagaataataccatcatcttcaatgagtatttgtagttatcatttaagattacttcatgtttgcttgtcaaccttgtgagaattgcttcggctatatttttgatttttttccggctccattcttgcaccaaacttcttaaacattctaccgtagtacaaattggtaggtcccttacttcaacaattgcagaattcaaaaattttacaatgttg

SEQ ID NO: 400185 - DNA, 1161 bp, Cannabis indica
ttcatggatggtgcatccaatgatcagggctcgggttcaggggtaatcttaatttttccagaaggctttaagtttcattatgctttgagatttcaatttgatgcatcaaacaacgaggttgaatatgaagccttgatcgttggcttgaagatagctgaggcgttgaaggttaggaatctcatatgtcatagtgattcgcaactgattgtaaatcaggttctcgaggaataccaggctaagggcctgaaaatggctaagtacttagacaaggttcagaagaacttggaaaatttcaattactttaaaatcgagcaaatcccaagagaacaaaactctaacactaatgccttagcaaaactagcctcacagagcgatttggatgaattaaactttgttctggtagaggtgctaaacgatccaagtatatgtgaaaaagaaaatgtcgagatgatagatagctcacctacttggatgaatcctataattagctatctactcgacaggcaacttctaactgacaagagcaaggcatgaaaactcatatatacagtacctatctacacaatagtcgaaggtaaactatacagaagaggttattccatgcctctacttcgatgtgttcttcctatagaagcaaacgagatcatcagaaaaattcatgagggcttttgcggggatcgtgcaggttggtagagtctatctaaaaagatcattagacaaggatattactggctaacgatcaataaggacactacgagtttgtcaaaaaatgtgatgagtgtagagattttcacatatacctcaagtaccatcaacaaaactaaggatgatgacctcgccttacgcttttgctatatgggagattgatttaattagggcacttcacacagggcgagggggagccaagtgttgggttttatgccctaaataaaactcatttcatataatcagatttacttattaataaagatcagaaataacattttctgttgcatggttcacatgatttatttcatgattataggtatataatgtatgaattctttttaagtccagaacatataagttggttaaagattatagtgttgtcagcacagtggaatataatcttcatcatatgttcaaaagtttattccctgatttgtcagaacactggattta

SEQ ID NO: 400186 - DNA, 690 bp, Cannabis indica
tgtaaagaagtggttagctgataaagtccaaatgatgaatttaggagaagcaagctatgttctcgggatcaaaatctatagagataaaaagaggagaacattagcactttctcaagcaacttatatagataaggtgctagaaagattcttaatggggaatttcaagaaatgacagttacgtctagacatggaattactctatgcaaggatcaatgtccaaaaactcctcaagaggaagaggaatgagaaagtacccttatgcatcagtagttgggagcttattatatgcaatgttgtgtacaaggcctaacatatgctacattgtagggattgttagtcgttatcaatctaatctaggtttggaacactagattgcagtaaagcacattctcaagtatcttcggagaatgagagatctcatgcttgtatattctagttgagagttaaatcctactagatatacttattctaattttcaatcagacaaagatagtcaaaagtcgacatttggttcaatatttactattggtggaggagttgtagtctggagaagcattaagaaaactagtattgtagattcaaccatggaagccgaatatatagtgtgcttgtgaagcagctaaggaagcaagtttggttgaagaaattctacatagcattggaagtagttctagaagtagaaaaaccact

SEQ ID NO: 400187 - DNA, 758 bp, Cannabis indica
taataaagtataggctttcatacaatatagatatccaatgaaaatggagtcacgactacgaggagtgaacttgtgtctttttgagactaatgtggagccataagccaagcagccgcaggtcctcaaatggtcatattgggggggtttggtgtatagaatttcataggatgtaagcccttttagtaaggcaacaaagggtgtcctatttaacaaataggttacagttcggatgatatatgaccaatagactagaggtagattagattgaaaacatagagcttgagctatgtttaagatatgttcgtgttttctttctaatactgagttttgttgtggtctttccacacaagaatgatagtgaatgatacctttagaggcaaaaaaaagaggccaagtttaattctttggcattgtccgatcgaactactttgattggagtggaaaattgagtgcaaatcaagttgtaaaagttcattagaaccgtgggagaatcaactttagtttttaggatgtatgtccatgtgaatgttgatttgtcatctacaatggtaagaaaatacctataaccttcaacactaatgatgttgaaaggggcccatatatccatgtgggttaagtcaaagatattatcgaaaaattattgttagatatgaagggaagtcatttttgtttagctaaagggcatattgagcaatgctgatcagaattggcagaaaaagaagagtcaatctttttattaaaaacattggaaatgtaca

SEQ ID NO: 400188 - DNA, 547 bp, Cannabis indica
ggtgaagatgccattagaaaccacaattaggggcttttgttctttgttgttttgtgttttgaggggctgtgtttagttgactagtttaaaataatgagataatactacttttgctgtaaaaaagtctctatcccacttcatcaaatgattattatttattgtatttttatggaattaggaacaaaaaatttctatgaacaagtgagctattcctatttctaatttgtactctcctaatttacgttgtataacttgcaaacaaaaaattctttaaatattctatttattggtgtttttttaaaggatcattaagagaaaaccactccaattttattttttttaagagatatttgtagttaagctacttaaactttaaattttttaacacttaatcacaaaaattaaaattttaaacggcaaaaacctactaaactaaatatttcgtttttgctcttcacacttccatctaaaaaatactcagttaaagtgtcatattggactgtccatgtgtacacgtggtacatttttagtggtccacataatatta

SEQ ID NO: 400189 - DNA, 844 bp, Cannabis indica
ggttttttcactgtcaaaagttcttataatcacttacaatcggtcaatggtagttggaattcctctatggaggatgatgtttggaagattttatagaagattaaagccccttttaaggttttacatttcgtttggaaagctctttcgggttgtttgcctacacgtactaaactttatagtaaacatgttccggtagacttacattgtgtgttgtgcaatcatggggacgagtcaattttccatgttttggttcaatgctcctttgctcattcatgttggctccgatctgcgttaggagttggccattctgtagcaaacaatttttttgattggtttatggaagtgtcggcagtaggcaatatggggttggtggaagaagctgtcatggttggttgggcaatttagaaggctcgaaatgatatgctttggaatggtagaagttgtagtgctgctgatgttgtttggctggctcgtaccactcttcgacaatggacgtgtgctcagtctaagcggttgggctcacttttcctggcttccaatcgcactgatacaagagaatactagtctaaaccggctgctagtcagttaaaagttaatgtggatggggcgatttttgaagatacaaatgagatcggtacgggttttgtagcacgcgactgtgatggtaaagtgattgaggcattttcaactctttcttctgtcggttgccaacccgagattgcagaaattctaagtgtcaaagaggcacttagttggataaagaggaataacaagtcacatgtcattttagagacggattgcattttagtattcaagctatccttagttcggtatttatgccttc

SEQ ID NO: 400190 - DNA, 627 bp, Cannabis indica
actagggtctagagtttaggatcatggacctagtatttcgggtatgaggttttaagtctggggtttggtattttggttttagggtttgggtttggggtttgggatttggggtatggtgtttttgtgtttggggtttttaggtttgttgttttctggagtagggtttggggtttagggtttgatgtttgggattttgagattttacggtttagggttttggggtttggggtttgggatttgggttttagggtttggggtttggggtattgcagtattggcgtttggggtttgggaatcgatatgggaatgtgctggggaatagaaatgggaaaaggaatggaaattggaatgggaatgagcatgggtaagggaatgggaatggggattgagaatgggaatgggccagggaatgggaatgggaatgagaatggaaatgggaatgggccggggaatgggaatgggaatgggaacgggcccgggaatggaaatgggaatgggaatgggaatataaatgggaatgggctagggaatgggagtgggagtgggaatgggaatggaaatgtgaatgggaatgggaatgggaatgggaatatgaatgcgaatgcaaatgggaataggaatgggaat

SEQ ID NO: 400191 - DNA, 578 bp, Cannabis indica
ttttttttcttaatttatttattagaacaaaattattttttacttaaaaactttattaatttaatgtgatgtgagactaactattgaagttatttttttttttttgtaagaaaatgtgacaaatctcacgaagatgagagaaaaaataaaaaaaaataatattattttagaataaaataaatattttgacaactacaaatgttgtccatattcgaggaactctaaagaatttctttccaaaattcaagaaaaaaaagagtaaattgcggcataaatacttaatgttttagattttatacacttaaatacagtatctttatttttagaggcaaaaatactcaatgtcacgattctcttacacccgttactactactttcgttaacgcataaatatggatacgtgaaggatctagatgcattacatttatttatttttattttaaaacttaatattcttaatatcaaaaactaaatgctacttgtttaaaaaaatccagttctcataataattttcacctgtactgcactgattcactcagttataataatttagttttgcatctctcttattttttttt

SEQ ID NO: 400192 - DNA, 1125 bp, Cannabis indica
aaaataatttccaacagatagacctattcggaaattgcacgtggacaggtcagctactgatcaactgtccggtgtagggattgcccttgtcacacatgggggcaaaatctggatggggcagttaaatttggattcaaagtttccaacaatgaagcagagtatgaagccctcattactggcttgaaacttgctcgagactacacactaaacacattaagatctgtagtgattcacaattggtagtgaatcatgtgtcgagggagtacgaggctcgggaggagaaaataatagcttatctaagcaaaatacattatctgctcgcacaattcaagggttacactctcatgcaaatcccaagagaagaaaacacaattgttaatgcatgagcccgacttgcgagcaacaccataactgataaggctaatttagtcccaattcaattcctagaagagctcagcatcacctgtgcagaggaaattgaaatgatagacacatgcccgacctggatgacacccattgtagcctacctcaatactggagaacttccaaatgatagaaataaagctcggaagatgagaaggaaggttgtatggtacatcatcgtagaaggagtaatgtatagaaggggattctctatgccatgacttagatgtgttacaaaagaagaagctgcacggcttctgttggaactacatgatggattctgtggcaaccatgcagctgggcaaagcctatcgaagtaatactaaggcaaggatatttctggccgaccatgatggatgattcaaaggcctatgtaaagaaatgtgataaataccaaagatttttaaagataacctgtgcaccacctaacgagctaactcagatgcaaagtccttggcctttcgctatttggggaattgacctagttggaaaatttcctaaagataagggtggaatacaatatgcagtggtcgcagttgattattttacaaagtggacaaaagtcgagccattggcaacaattacatctaagaaagtattggacttcatggtgaaaagtataatatgtcgattcggacacccagacaaaatagtctcaggcaatggcaaacagtttgatagccaattgttcacagatttcta

SEQ ID NO: 400193 - DNA, 886 bp, Cannabis indica
ttcacattatttatttctaagatttatatattttaatatataaaaactatttaaaatctttgaacatagagttatttcgcaattatagtgatgtcatcacagtaaaagaaattatgattatatgatttaaacttatttagtcctgaaatttttcagtacactgaatttacactgacatgtggtttacttacactaagataagtgaatatctttttcagggtattaacaaaataaacttgtatcaaatgtaggctatacatcaaactacaccgataatgacagtggaaaaaatatcataaacttaccgttatatattttctaagtcaatatcacttagttaattatagatcaatttatctcaatcctaagatggttaagatttaacctaattgtagcattaaagttctttgacttattcgttaccgacttccgttggactagcccatacttacatcttaggaactcggtagagtaattgagtgagagtgttaatcatagatatggacatctataacttctatgtttgtctagaattgaaacgatagtttcttttgagcttgactaaatacaataaatgatagatctcttactttggtaattatattagtttaccaaaatatcatttacaatgagctaagtattttaaagataaaatacattgaaggataaaacagtaattttcttcctactcaatgtagactgtccctagaggatcattgattatcgtgatctaaataattattatcgtgtatatatgttggatataaaaagcgttctatgtaatcaatgttagactatatatatagtgtatgtaatatagcatatataaatgatatgaaatgcggaaaataaaccgtaatcatatcaataatatatgcaatgaaag

SEQ ID NO: 400194 - DNA, 687 bp, Cannabis indica
ctttcggtgagatttatagtctcagcaagtcaaaaattaacattcaagtaactgttgaagtactctctgttaataagaactgtgactgtcaaaaatgaagtgttatgccttcaaacaaagaaggaaagaggcgtacattgtcgacctcggagagataagggaaaagctccagctcgctatcaaggtctatggtattgagttctcgtcgacacatcccagagcgccaagaattaaaatgtgtttgaatacacgattatttttgacctagtaaaagcaggtaaatcacaactgtgtgatattcaaataataacagcatttatactacatgatatgtaatcaaaccctcacaattttagggaataaatgttgtaaagattacagtcaactttgtaattaatgcctactatgtgattataaataggggcaagttagattaaaaaaagagacgaaaaaatcataagaaaaaggtccttgaaagttatcagaaatctaataagattgactcgtggactatgcagaattttaactgcaaaaccacgtaaaaaaatcatttgtgttgatactttttcctttattgattttatttttctttgtgagattatcactattaggctcaatttttggttaacgaaaatttgcgttaacatgtgataaacctaataacatcatagggcccatccaaatcat

SEQ ID NO: 400195 - DNA, 872 bp, Cannabis indica
ggggagaatctttctctttgttttctccctaatttgtgtgggtccatcagtttttccctttccaaaatttagtaaacaattgtatgggaatcaataccataccattcattctcattcccttcaaagatggaattcctctcccctagtatcaaaataaaaataaaaataagtctatgttttctgttttttttttttggtttaaaaagaagtttaaaatacgatattaagtataatttctcatgtatgctatatatacttatgaattttataattaacaatttttaggatttttttttaaatataatattaacattttataattaatgcatatataaaaatttgattggttcaaactcttcccatggcaatatatataaagagaaaatatatgcatgtgcaaattaagtaaaatataaaaatgatgatacaaaatatataaaatataaaacacaattaataaggtctttaattacaatcaaataaaaacaatacatgcatatacagaatttgttcggtaaagaacccatatatataattaagtaaattacattaaatctacgaattcaatggcaaaagaaaaaattatgaattaattacagtcaaatatttatatattaattaattggataattaattgcatttaattaattaaattattgcaaaagatttggttttgctggatcactacattactagtctctcccatgcaaagcactataaatatatgtgcaaacatgaagaatttacaaagcaatattaatcagttcttacacaattttcatatattcatttatatatataaattataattattcaaaaaagaaaaatgggaaagtcatttccacttgtagcaatttttgtttttgcaatgg

SEQ ID NO: 400196 - DNA, 827 bp, Cannabis indica
tttttatatatatatataatggtgaaaattttaaatgtagtattttaaaaatataattgggttttttttaataaaatattaaatatagtatcttaaaaaataattaagtattttatttaaaaatagttatatttttaataaataatagtaaaataaaaaaattgtatttttacaaaataaatttaggatctttttgttaaagagttttttagtcttgtttggggagctttggatgtgggcccctagtgcaccactcttgagccgacgctgaatgagtctcatgctttctagctcagcacgtgtgtggcgagcgaaagcaactaactcatacttaagtatatgaaaaatgaaaactacacatttcttttttttttctccttagagtctaaaatgttaaaaaaaaaactgaaagtaaacttgtaaaaaataaaatacccgaaaatataatgtataaaatttgaagaaactatagcatacttcttttttcatattttgaaaagaaatctctattttacaacatgttagagcaactccaaagagccttcaaatttaaggttgcaatgggtaatcttctccaacgtagcagcatatttacatcatatatgcagtctttgctgcagtgcactgcatatatgcagtagcactgtagcaactgcatatttttttttattattattattaatatttaatagctgatttttgtttatatatattgtttaatattaaaatatattatattttattaatataataaataaaatatattttttggtgtaaattttagtgttgtggttggagtgaaaatactttttgacaccaaatttagt

SEQ ID NO: 400197 - DNA, 448 bp, Cannabis indica
cttgccgtgacaaactgtctctgaaaactgacttgtaacttattccaacagtccactaatcctggcatagacattttgcgtcattactgaccctcatgacggtcatcaccctgttaaatcgggacagatggtcactagggtccgaatctcctgtgtaagttgccatttcgggcatcgtaaaatttttggggagctctgcttccaatatgtgttgggcgcatggcccccggtcctcgtaatcagagtcggagtcatcccctttctgtctccgggagactctagcgatgtctttgcggagtattgctaattcagccaagattccttcgttcaagactctagcgatgtctttgcggagtattgctaattcagtctataagacaatattatttcatctgtatatgacctagtaacatgatgggaaacacaaagggagtgctcggccatagag

SEQ ID NO: 400198 - DNA, 593 bp, Cannabis indica
ggatgcctcgctggcatatacaaaatggaatactcgatgagccgtgcagaatgagcaacacttaacgacttcagcttaacccatcatgagtcaccagctcaatccctataactcagggatcaacttatgtggatgtggcatacacacgatcccactatcagtgtattcagcctcaatcccacgatccttgcattcagcattgatcgcacgatctttctgtttatgcgcattgtaacgagagaggaaactcttcctcctcaagtttccagccctataaatagtgaggaatgttcactaggcaaagggtcgaaaaaacagtacctgagaaattgtatgccgaaacgctataagctaaggctatctaagaattatatatttagagatattattgtaagagctataagaaaaggaaacttcttccttattcttaagtcaatacaactaacgaggattaggctattaccgaactgctcggggctgaacctctataaaatttctgtgtcttattattgctttactacatattcttattacgacatatcgtttatcgcttatcaaaaagactcattctcgttggctaaaagcaaagtcaa

SEQ ID NO: 400199 - DNA, 540 bp, Cannabis indica
tcaattctgagaagaggtgcttgtaagatcgtgactaatggtgagaatacaaatgtttgaggggatccctggattcctcattgtaaaggtttttgcccaaaaaccaagcaggggagatcattctaaactcactcgggtagctgatttgatgctatccaatggacaatgggacatcaataaactgaaggaaacttttgatcaggaaactattgctgctattttaaaagggggccacccttcaggtcagggcgttgacagatggatatggactctaacaagtaatgggtgattctcgtgcaaatcaacttatctagttcaagctttagatagagccccccagtgcgaggtggctccgaacctctggaatcgactgtggaatagcaaagttctggaacgacacaaggtcttgtggtggtgtatcctgtctaatgctttacccataagatccttgattaataaaagattccatattgaggatactagttgccctctgtgtggtaccggggaagaatccatggagcacctgttcctttcctgtga

SEQ ID NO: 400200 - DNA, 544 bp, Cannabis indica
gtgtcttgatctggaactcgaagaaggaccaaaagttggaccaggacctagacctagacctagtcatgggacctgaaacaaaaaaatgaaacagaacgtgactaggaccctagaacaggactggaaccgtgaccacgacctggacctggaccgggacctagaagtagaccataatacagccccagaactatggctcaaacacggtcctagacccagtccctcacccaaactaggattgagactcgaacctgaacccaaacccaaacttgggattcgatcccggacccagacaaagcccttgacctaaacaaggattcagactaaactggacacgaacccagacctggacacgaataccgaccaagacccaaacccagaccgggatcgaaacacggggcctggacccggacccagacgcaaacctaggacccagacccaagacccgaacctggacccaaactcagacttagatccagactgagatccaaaaaactcatacccagactcggactaagacttggaccccgaccccaaccttgaccca

SEQ ID NO: 400201 - DNA, 569 bp, Cannabis indica
aaaaaaaatatataataaataattatcgtctcgtcatacattgaaaattgaaaattaaattacaaaattaattactcctaaaaatagtttcaagaagatgaaatgaaataaggaaaataactaaagtaaacaaaccggtttggtagttgtttgttttctaatattttgagaatatgtaattttatgggccataatatagttaagtaggcatttacccacaactagtttggtcgactttctattttcgccattcttataaacattttatgcaatgatcgtgaggtctaattttctcttctaatgaacgttttttacttttttaaaaaaaaaaacaagcaacaacaatttgtagattaatcactaagggggcgttttgtatgaggtgttcaaaataatttgattataggaaatattatgaaggagaatatgattatagggaaatgtgtaaactgtatttggttgtgtagggtaatatgtaatcatattcccgttaattaaattaaattggttggctgagtacaggaatcttatatattattttaaaaaaataaaataaaaatattttttat

SEQ ID NO: 400202 - DNA, 527 bp, Cannabis indica
tggttcacgacagaatttctcttggaatgcgtgctaatggctataaacagttaattttcaccccaacactatataaactcgattttctctcaaaaaattaagttcgctgagcatttatgtcatacacctaacctattcaagtgagattaatgagcttccaagtttaaaaatgcaacaaacacttttcacacactttgagtcaaaatttgtgtttattcatcttaagtgtgcttgcttatcactctaagtttctattgtattatcatacttttagagtgattttacttgtaatttcaaatacattttcatattgtgattgaggtgaggttggcaccgatattgtaaacaacccggttatagtgagattgtcactacaacaatttgagaaagagttagtagtcctcggcggagcaaaactattgtaagaggtttgaaaacaccttggtgaaaatttcctggttgtaagggttagtcaagtccgttaacttggctcgatattagaactcaaagctaggtccatagctttg

SEQ ID NO: 400203 - DNA, 602 bp, Cannabis indica
tgtcaggaacttctggagaaaatggtgagtagaatcaggtcttggagttcaagaaacttatcgtacatgggaagagtgactttgatcaattctgtgttgatttccatccacacttattggtctcaaataatgatcttgcctaagaagctactcaaagatatagaagctatttgccgttccttcttatggaaaggcattcaaggaggagtagggcctggtttgatagcatgggagagtgtatgtaattcaaagaaatcggggggattaggcttcagaaacattcagaactggaatactgctgcacttggtaggtacgtttgggatatagcaagcaagaaagattgcttatttgtgagatggatacatgctgtctatttgaaggatcaacaatggtgggagtataatactcctaccgattgtagctggtattggaagaagattgttggagtcaaaaatcgattgaaagagaagactgatgctgctggttttttactgcagaaatacaaaattcagcagggatacaatctgttattctctaacagtgaggaagtttcttggcatagagatgtctgggataggcttattattccaaagcataaatt

SEQ ID NO: 400204 - DNA, 953 bp, Cannabis indica
aaaggtaaaggaaaggctaaggctgagcagcattgagtccggagcttgaaggtgattgtacatgtcaagatggtacgacctggagagtttggtctcgggacgacttgggcttcattttgtagtcgctgtacaacatgtttataaagtctattttgaatgtgtaaataagtttaaaaatgggatcccaacatttgtgtagttaaatttttgtagttataaaagttaaaagttgatcaaaagttttaatttattacgattttcaagaaaaccctttgattagcaaaggagtgcacagttgttaaaagagaactgtagcacgcttaatcattagggtgttacaggtttttaattagaatttgagattgacatccaattattgatccagtctaattagaatcaaacttttaacatccaatttttttataattagattggattgaatcggttcagttcggttcaattggattgaattgagtattgtccactttaatttttaatcacaacaaatttgacactaaaagagaaagttataactaaatataaattattattcttatattacaaataaaaggtctgtggctaatagtattagtcacaaaatcacaatttgttgttactaaatgtatttttaattataatatttattatgattaaaattaaattattgacaatttttatctaaactaggtgaatgtacgtgccgagccacgtattgatagttttatttaagattttagtctttttaagattttgaatatattttatttttaaagatttcaaattttttgtttgaaaaaattaaatatttatatttgaaatattatttaataatgtattaaaaataatattagtgtaattataaaattgtaaataaatttattattagagtagtagattattctatttagtctttttttaacatagcattgtaatgtaagtttatatctataaat

SEQ ID NO: 400205 - DNA, 743 bp, Cannabis indica
aagtatctgaggattcgcttagctactccatagtgaacttgacttggatcatgcattagctgctccatagtgaacttgacttgtacattatgtttggtcttgtagtagttagatatagtaggctgccaatttagacttcaaaattttgattcatcaacttttggtgagccatcttctttcttgagagctttattattgtttagtggagttgatacagttttgcatccttccatttttaatttcttcaatagtgtctccgtatacttcttttgtgagatgaagatcccatattccttttgagttatttcgatcccgagaaagtagtgcattatgcccaagtcagtcatctcgaaactcttcatcacgtcttctttaaacttctttatcatcttctcattattgcctgtgtagatgagattatcaacgtataaagagataattagtgtatcattcataccttgtgtcttgatgtacaatgttggctcacttttgcttctcctgaatccttggtcggtaaagtagctatcaattctgctataccaggctcgcagagcttgctttaggctatataaagcccttttcaatctaaaaactttatcttcttgtccttgtgccacgaacccttgaggttgctccacataaatttcttctttaagataaccattaaggaatactgacttcacatcgagttgaaaaatcttttatttcttctaggcagctagagctattaaagccctaatagt

SEQ ID NO: 400206 - DNA, 555 bp, Cannabis indica
ggtatcagaaccaaacaaaaaaaatactgttgtctcccttttaatctctatttgggacctttcaggcaatgtgtgccagtttttagtgttggggagtttgatctgtttcaaaaatctaaaaacttctcgacgtgcacatccagaaattttcttatttggccttgtgggattctttgaactgtcatgtcaactcaaaaaaatttcctggtggcgtggacatcaatgtttgacacgtgacaagaaagataacatctcaaagttgagtagtctcaagtcatagcagtcaatctaggaaggctccctactgctcccaagttaactttgagaactctagaatgggtgttcagattctcgtaagtcatttttgacttactatctttcattattctataccatgaagacatgaataaaccaattctaggccctgagagctgagaataaattaatcaacacctcagaaattaacttgggcacgtagggtttcacatagtgcccatgttgacaatcccaaataggattttaatttctgggaccgtcttagtgcaaatgggtcaa

SEQ ID NO: 400207 - DNA, 593 bp, Cannabis indica
cctattgctccaactaggggcctccgacaaggggatcttttgtctcctatttgttcattctctgtgcagaaggtctctctactttgttgagaaagtatgaaagacaaggttggatccatgggtgcaaggtggctaatggggcacctcgagtttctcatatgcttttcgcggatgacagctacctgtattgtcaagcatcagaagtcgaagctcatcgggttcgtgaatgttgaccaagtttgaaagagcttcaggacaagaggtgaatttatcaaagtcatccattttcttcagtactaatactactaccacggtcaaaaatgttattagccagagccttcaaatgagtattgcaactgaggatagtttctacttggggcttccaagcaccatgtcccgcaaaaaaattgttgttcttggctacctcaaagataaagtcaggaaaaggctgcaacaatgggaaggcaagttcctctcaagggctggaaaggaagttttggtgaagactctggcccaagcactaccgagttatgcgatgagtgtttttcttctcccaaaagaaattagtcggagcattgaaagtatgatggcaa

SEQ ID NO: 400208 - DNA, 543 bp, Cannabis indica
tatattactgataagaagcagtgtattaagatatctcaactggttgagaaatgcttaaaaagtgatggtttgagaataaatttgtattggtttagatttgaataggtggttatcagtatgatgatgttgataagttcataagttggatattgattggtgggacaaggaagagttatatgtgtttaatttttatgtgtgtagtaaaagaggaataagtgtttaaagtttgttttggtaattgaaatagtgatgttgataagtacttgttgatttagtatatgggaatggttttgcttagaagagaaggttgtatgagaaggtaataagctttattgatagtttgaatgttggttgtttggtgttggttgttacactagctcatcaacccaagcttggtatttatcgcgagctaaggttgatatgggatttttattaaaaagaattaattacaattactatgggattttaaaagttcttctgttaaatatggcacttttaagtttgactaatttatatagtatttttttaggtctttttatggta

SEQ ID NO: 400209 - DNA, 1311 bp, Cannabis indica
tttgcttacaatgtctataatcgaaaggacattcattacataaatagaatacacaaaattggggattgagacagcatgccgtatccatctaattcaatcccatgattgtagggattgcctttgtgcttggacttcacgatatcattctgaagtaagtcttggtgagtagttcagaaagccaaacttgcccctgtttgggagttttccctttaccatgttcaagaaattagagatcatatgcgcggatgttacgtgaagtctgtttgggaaactcatctacgcccagatgcaagaaatgctggacacgtgtcacccgtgtatgctaccacgtcatagtgccaaaaaatgggataaaatttgcccccaagtttgcgtggggactttgatgtcacacgtggacttcactcggtttggatgcacgtgttcgaagtgcctattgacaatctgatgtgactctcaccaagggtctcttcagttttttgtctcattaatgctgactgacatgtacctcgagccaccccttaaaattagcacgtttgacagttaccattcaagtacttaagttcataacgttcacttttggggggaaatcgaagttttcaaattttgaaatgatcattttgcctcacttattggcttataatagggatgaaatccctaatcaacaacttttagccattttcaatcttgaaaaatcagagcaagaaaccttttcctctgaaatctttcaaagaatccctagaaaccaccgaacaacatcatccgagtcactataaagcttcaaacattgagtaagttcttcatttctttcctcctttatgcatgaatatttgattttttttgggttttttattgcaaaacacaatagctcttgaacttgttctgggaaaatcatagtaaatttaggtttaggaatgtgaaatcttgactatgcttaaccacgttgcttgagtatgattgcgtttcgatttcgtttccacaaaactaaccagggttcactaattgagcgagggggagaaaatgatagcttatctgagcaagatacaagatctgctcgcacaattcaagggttacaccctcaggcaaattccaagagaagaaaacacaactgttgatgccttggcccgacttgtgagcagtaccataacaaataaggccaatttagtccctattcaattcttggaagagcccaacatcacttgtgcagaggaaatccaaaagataggcacagcttcgaactggataacacccatagcagcctacctcaatactagaaaacttccaaatgatagaaatgaagctcaaaagatg

SEQ ID NO: 400210 - DNA, 635 bp, Cannabis indica
aaaccttcctctagtccctcgagtctgttcccaactgaggaagccttgtcctgcaacggtagaaggcgaagataatgctcaagcctctccttctatcccaaatatcagtggccgcatgaggagaccttccattgtggttcccagacttcgtcccgacgacgctacgattcagatgctagagtctgtgcacgacaatattgacctccttgttcgacaaactgtaactattgaggtggtgcgtgacatgtccaactacgaaggtgattctgccactagaggagtccaagatatccttcgggtaagtgatggactattcatcaaaatgtattgataatggcctatcttctcatgtgcacactcatatttatatgatctcacttccttttattgtgctaacaccctttcattctcttattttttagggtgtaactcaattcatcgtctccaaatcttaattcttcaaatttacaagagaaactggctaccgcagaagcagccctgaaggagcagaagaagctctccaattgcaacacacacaacatcataatattatcatatgggtctgttcaaaaaagtgaataagtatatatataaaaaaaaagagaaaggaaccttcagagtcataatcattgagc

SEQ ID NO: 400211 - DNA, 762 bp, Cannabis indica
gttccatccccatttggctagaagtttaagaataggataatgaataccattttatttaagagtggaattaatttaagttagtaaactacagcttatatgacctagcttatattccataatacaaaattttaattgctcatcctaatataaaacatattaaaatgagagtaaatgtatacctgatagttaacaattaagtgcttatgtagaatttatacgcaaaaataaattatatcatgactcaaaacataaataatatcagtgtattatgttgaatattttgccattataagacattcattcaaacaactaattagattgtgtaaactataatttagaaaaagagaaatgtaaataaatggacctatttctaactctatagatagctaatgtcctttttttttaaataataaagtaaatttccttttttattttttaatacctaaaatacccttcattatataaaaggtattatatgttttattcctttaatagaaattatgaaaaacaataaatcaaaacctctctactgaatttttgtcaactattttttattatataaaaggtattatatattttattcttttagattttgctgctgttgttgttgtctaatatgttatttaaccatataattaattttttattaatatatcgtatgatatacaaacaatataccttaaaccaatatacatatatcacaaacttaaactaatatactattaaatgaattattttccacaatatacagtagcatacaaa

SEQ ID NO: 400212 - DNA, 619 bp, Cannabis indica
aacttctaatatttgactgtagtttaggttgaatttcactctcatgtgtagagaatgtttgtgtattctcccctcctttttctttctctaaccaccactttcttttattctacagaaagggagttttacttggagaatctcctaagcaaccccgttatccctattaaatgggggtaaagaacgaggtgcttctaaagttaaaacttttgagaagcagccaaaggccctagaaagaaaagagaaatctaagaagaagattgaggcactaaagaagtctaagaaggatttgaaggctgaggttgaaaccttatagaaaaatctactttgaccacattgagaaagcccaaaaggaactagattaggcgaaggaagcctttaaaattgatgcttgtgagagggtcaaaaaaatgggtaaacattcaatctatagagcttgggttgtcaataggagcatggatgtaacaccctaatgctaaggcatgcaacagtgctttttcaattatagtgctatctttgctaatcaaagatttttctcgaaaaacgtgtcaaattaaaactttttataataaatattaaactttataatttacataattatttacaaacatcgggatcccgt

SEQ ID NO: 400213 - DNA, 928 bp, Cannabis indica
aatttcttttaaattttttcagctgaactaaaaattctacaattaaactataattaaattagtaaaaattattagtaaatattcctttttaattacattccactctattttttcaaataatttatttatctagcactaatataatataaatttatttcaatttagaagttcagaacaaaaaataaaagaataaatatgatttaaccccttaaactatgatcttggtagaattttatcctctgaaattttagacttacttattttaagtttaatttcaattaaaaatatatatatatataaatataatttagaactttataatccaataataaataaatattagtttagtccaatctaattctcatgatctcataataaaattcactaaaaataaaagttaattaatacgcattgacaattttatttgcgtttagataaatgagaatcaatattttagattcttaaatttttttttctttaatctcatgtgttaaatgtatattaaatcaattaatatatatttttaaataaaatatattaaatatataaaattataaatgtattttaaaaatatataaatataattggatgacagttggatgataattggatcgatttggtcagttatccattggatcgaatgtctcatccaacaactgatccgatctgattggatttttaaaatttacatctgatccgatccaattatgattggatatctgattctattggatcggttgggattggatcggtcggttgtaattggattggatgaatttctgcacacccctatgtatgtgcattcttagagctactgtttctattaggagtgggcatcatccaatccaatccaattgaaccaaatcgatccaatccaatgctaaatacaaaaaagtggaatatccaattacaattggattggattgga

SEQ ID NO: 400214 - DNA, 607 bp, Cannabis indica
aagaaaatttctggtattccaagaattattcagcggacttgtagcagccagctgactttcaaaatttaaaagactacgatttctatgtctccaaagacaaggtatttcagtttgtttgttttttttttggtttattcttagttgttttgttgttgttttattttttaaagagtaactcttattgatattttcatttttatgttttttctcagttgcaactatctaatatgaaacccacttctgctgagttcaaatcattgaaattgagtagtttcaagtttgacacttattataattcttacaagagtatgtctgtttcggaacaatcttctgtggttgagagtgacatatttgttaagcttaatggtttttctaaaaatgttgatggtttggagcttaagattgatttactacatacttcccagcagaagatttcatctgatttggttgagttgaaagagtttgtttcttttgttgctcaaatggctataatgcagacacatttttcttctatttttgctgattctgctgctaatgtatgctagttttttatggttgttttctagtttatttttagttgtgttcatctgatatttgcttacatttt

SEQ ID NO: 400215 - DNA, 518 bp, Cannabis indica
ggtgacacgtgaaatcgactccgcatatcttctcgcaagatacaggccgtacaggatacctcatatggttgctcaagatgaaacagtaagcaacccgcgtagaacgacaaacacttagagaatttagctttcgcatcgtgagtcatcaaggaaatccctttaacttggggataaaattacagagatatggcaagctgtccaaatcccacgatcagtgtattctgtatttactatgcaatctttttgcttaaatcaattgtaacgagaaggtaaataattcctctccaagctcatagccctatatatagtgatgcatattcactgggcaaagggtcgaaaacattctagttgagagtttttatctaagaattcacattcaaagatactattgtaagagctataagaaaaggaacatttctccatgttcttgagtcaatacaaataacgaggattaggctattacagaactgctcggggctgaacatctataaaattcttgtgtctttatattactttat

SEQ ID NO: 400216 - DNA, 1331 bp, Cannabis indica
ttttttttttttttttatagataagaccatttcatatctcatattgtccatctacattttatccatcaagtttatatatcatatctgttatctcaaatttgtccactgatatggtatgttcacgtaagtcaagataaagtacatgtggaatataattttgccaatagcaagataaagtctccttacaaggtatggcaaaaccgtcaagcaacaagcgaaagaagttaaacgagttgttaaggagctgtaccaccatgtctggctgaccaaggggagtctataggctggccagggtttgagcacaagttggccagtcaaaatgtgactttcagaccaagggagggtccgatcgaccaacgaagcctgacctctgcaaggaaaaggtgtacaaaggttggcctccacctacaaaggctggtctcaactcaccaaggttggccatcacctactaagactagccaacacatgcaaggacttgaccgactctggacaaagctggcaggaacatgacctgccagaccctaataggagcatggctggtcagaccctagaaggcacatggcccgccagacctcaacctgcagacattgtatggccagccagcctgcatcttgcaggtgcatggctgaccaacttttgcctaggaggacattaatgtgcagccttcattcgtggacagcaagtcaagcaatggactgggccttaacaacctacggaaatagaagaaaaatatatattttcaagaggcaatttagtcatttgtattttattaattaattaattatgtaaataatgctttatttacctatttctaagaatattaggcatgtaatctctactataagaagagcattagcctatctctaaaaccttaagtcattaagcctctaagctccctaagctctcaactctaagtctgaaatcttaatcttcttttctctctctttgctacacgcccaaaaggctctctccctctctctcacatgcctccaaggctttatctctctctcattagagacttgcctactgattcatacattgtaatcttaagagagctacttcagatcccatcattatagtgatagtaggttattacccgctaactaagggggtcgaacctttataaaatcctgtgtctatttatttttctattctaattatgtaacacgtggcaagcatcaacatcacattcgactccactgtcagttggtcaatttctaaggtcaaccatatctatcaagtttatatcgactttatttattataaaaaatttcacagatagtaatgggtcgtaatcaattagttaaaattctttttgacgatgatctttt

SEQ ID NO: 400217 - DNA, 525 bp, Cannabis indica
atttttctatataaaacaccagccaaatgtgtccctcctagtaaaggagcatttaaaaattttctagaaaaaaaaaaaaaagtaatttagtaataaatattaggtcaaaaaaattacaaaaatacaaaaataagttatcttcttttttgttctatactattttttatgatgttatgattattggagttcgggcttcctcgctctctcaactctctttagatggaatttgctgaatgaattcagaatgagtgaggagctcggggaccgagaccctatatttataggtgagatactccatcagtatctgtgccacattaattgtcagaatattttgacaattaattcaggaaatcaaatcaggtaatgaatatagaaatctgaccatatatagaatattacataattgattttgtccagatttaatgaatataaaatattcatttatcagaaaatcaattatttatttatttccttaaatagaaaatcattttcttaattagaaaataatttccataataaaaatat

SEQ ID NO: 400218 - DNA, 535 bp, Cannabis indica
tcagtggtaataagctaaaaccaactcaaattaactctacaatttgagctacaacttagcctaaccctaacagccactaatactcaaaatcacatatttaaaccaagtaaaacttcaagaactaaggggtagagaagctagggcttacctttgctaagaaatcctttaatccctgctgaatcaccaaaaaaccagcatcaattccccttgtcctgggcttgttcgaagatggagtgggaaaggaagagagcttctttcattatttttttttttttttttttattctttttctttgattttttctttaatttctctaaatgaaataagggttaaaaccttaaccttggatgaaataattaatgttaggtgtcatctaattaggcagccacctaatcaacttaaatagcaaattactaaattgccctccaagttacaacttaggtatttcacaaactaggggtaaaatggtcaaattccataacctcacacaacctcgatatttattttctctaaaatatttcccactaagaaataa

SEQ ID NO: 400219 - DNA, 538 bp, Cannabis indica
cacaaacacatgtaaaaataaaggtgtttggtaaaataatctctgatattgacaataacaccctcaaatcttcacatagttctttttgcatatttgaagtgttatttgttttttgtttgtttgatatcaagatggattgccactatgttgacatattgcaagtttttattatttcaaataattttaatgacttaaatattatgatggcgtttaataatacttttttaatcagttttctgtttttaaaattaaaaaagtaaaaatatttttcaaaaacatgttctataaaactgtttttacttttcaattttttaattaaaaatcaaaattttaaaaacaaaaaaaagtcactttcaatattattttttaaacagttttttttcttaatcaatattttggactccgaccagacccggacccaaatcccctccccacggccctagcgctgaacccggcttctgacccgaacccgaatccgaccctaggcataaacccgacttaaataaaatacaaaaaataaaaatgaaaatgaacttta

SEQ ID NO: 400220 - DNA, 549 bp, Cannabis indica
aaaataaattccaacagttatcacttcttacttgcaggaatacaatgaaattcaatctaaagttcttccatattttaaagtttctacacaaggtagccccctacaaacatcactgaagacacaatcctacctcttcctggattgtataagctaagcgtagacgcggcagtgcagagccacaacaatacacatggttatggggctgtagttcaggatcacaaaggccttgtggtagccagttttcactcttctgcagtctcaagaacacaaccaatttttgcagaagctaaagctcttttaagagctttaacatggtgcaaggcggtgcatttcccccctcggtttgattgtctctgactgtcaattgctcatcaccaaaattgtagagaagcaacagaactattcagctctttcagacaaagtttggcatatcatctcctctgaaatttcgtattttaatattcccagtttaattatttaattaagtgattaattaaatgcggaataatgaaactggtactgaaaacagtttttccgtagttacagaat

SEQ ID NO: 400221 - DNA, 653 bp, Cannabis indica
atcaagctccgagccacttgcattccatcgcaagcccttggccctttgcagtgtggggcatttgcatgccataatattaattaacataaaaaaaaaaatatgcacacgtacctcttctaatttaaaatgatcacgttaactttgtaacaatccttgctagtaaccaaaacactaataataacattgaaaataaactattaaaataggtaatagaaatgacaatcatcatgatcaagctaataataataataataataagtatagtttactttgcttattattctctttcttatgtttgagatttgaaaatgccactagaaaattattattttccaataaagtaatgatttagagagtagacaacatagtattaaaaaaaaagtttcatgtaaactttgactatcaaaaaaggtcaaaacttgattagcttttctattattgtattaaaactaaaattataatttataatatttgttttttaaaagatttttatcatgctaaaaaatattttaattttcatatttagattaaagctctagatacaaaatagagtatacccaaattttaattaattttttgctctttcaatttttttgagttgtactcaacaaattctattttaaaataatctaaaataacaaaaaaaaaaaaac

SEQ ID NO: 400222 - DNA, 595 bp, Cannabis indica
tataataatgatagtgtaaatcgctgaaattgcactgcaccacaccgcactatgtttttacgatttgactttgcaattttaatatctcgtttatatgattgcagtttgagaaattacaaaaatcacatataatttaatttgaaaataaaaaaatacaacccccaccacacgttaacataaaaaattaaaaaagttgtccaactattatgccccttacctactccacgttatagttgccataataatttcgtaatatttatttaatgtccattaaaatgtccaaaactataccacataaaaatatattatttactaaataaaaatataggaaaattctacaatgcactcctttgaaatagatatattgatgcacctctatctattttagcatccgaaataattttttagtcaatttttttctcatggtcatgtacgttatagttatttaagacatcctaccaaattttaaaaaatttggaaaagtttaacacgccaaaaattatgttcaaacaatgtgttgtacgcgtgactattttattttaaacgcgtgtaaaatagactgtttgaatattgttttctatattgtaaattactc

SEQ ID NO: 400223 - DNA, 1459 bp, Cannabis indica
cctagactcgaacccaggacccgaaccgggatgggagactcagtcctgcacccaggacctagacctagattggggacctaaactcaaaattagaaccaaaatcaagactcaggactaggactgagaccaaagacccaaccccggtctcggtcccaaacccggacacgaacatagacagggacccaggatccgaattgaaatgagaccgggacccaagattgggatccggatcttgacccacgacctggaacaattttctagaccaggacccaaacccaaacttggaccccgagacctgaaataggaacaagaaccagaataaggaccctagaacatgaattggaccttgatccaaaaccggatcaagacacggaaccgaacacagacccagacccagactaggatcaataacaggatccaggcccgaacgcggacccagacttgcgccaggacctgggccctaggactcgtgacccgagacctggaccagaacccatttccataccaaaactcgaacatagacccaaacccagacccagaccaagacctggacacaaacacggactgaaaactgggcccaacccaaacccagacctagacctggacccagacccggactcgtaccaaaactaggactcaaactcaggacccagacccgaacatagatcaggactcggacttagatccagactaggaccgagaactgaacttggactagaactcagactgggaccgagccgagacttgaagtagacctggacccgggaacgggactggaaccgtaaccagaacttagacttagaactagaaccgtaacaggacttaaacctagaccagaactgtaaccagaccaggtgacagactccaaccaagacctagacccgaatcgagacccaaacctagatcccaactcatacctagactcagtgccgaacctagacccaaactcagacccaaacatggaacaagaatcgggacacgaaattggggccgggacctagaaccgcaccccagtcttggtcccgaacccaaactcggacttgggacccgggacctgaactggaactagaccaggacaggtgaccgggaccagatcagggactcaaagcaggacccgaacccgaacctgaaccaggacccaaacgcaaaccctgacccagacccgagagacggaactagaacctgaacaagaactgcaaaaccaggacctttgaacaagactaggactgtgaccaggacctagaccaaaacctagaaccgaactcggacctagccccaaacccaaagcgagactaaaccttgagcccaaacacgatcatgtacccagattgggagcgagagccagacctggacctagacctgggacccaatccaagacccagactcggacctagatagggattcagatacgaacctagactcaaaccaaaacccaaacccaggtcgggatcgaaactcg

SEQ ID NO: 400224 - DNA, 1204 bp, Cannabis indica
aaaatatctatatattacgttataatatgttttataagttgttttcgtaataaagtttataatagtgtataattatataaagttttcaagaaattacgtggggtactcactctaagttggtcattttaattttgggacaagttgaggaattggggataattgctgcgaaaattccaaaaaaattagaggtgatggagattagtctccaacctcaaaaattagcggtaatagtgcctaaggttacattttttgtaagtccgttggtccctaatttaattgatcggtcaaccccgaataaaatgtcacgtgttaattttttattggtccaaattataattttaattaaaaacaatttaaataaaataaaaaactaaaaaaatatatattttaaaatcataaatttattttattttattttatttttcttttttttctatttttttattttttttttcttctttgtcttccccgacctttaccccaaccttcacccacccaacagtaaatcaaaaccacctcgactttcacccaccctatctcaagatttgctagttcgaaattatcccaacagtgatttcaagggcactaaacaaaactagaacccttataatggctactgcccaagttcacttaagctccactgtgcacggtggtcaactaccatcatcgacagtgcatatagaaatcaaccacgagatttggaagatctcttagggctcgtttggttggaggtaatgaaaacaatggaataagaataggaataggattaaattgtttggttagatttatggaatcaataattgaatacatattcttatgtttggttgactatataatggaatggaataaattaattttaaacaaaaataccattatttttaaaacatgattaagaaattaaattaaatatattcaacttatatatatatttttttaaaaaaaattgatatatattaaaaaaattgatatatatttaaaaaaaaattgatacgtattaaaaaaattaatatttatttaaaaaatttgatatatataaatttatatttattgaatttactataaaatattacttcttaaaaaaaaaactaacatatatttttttaaaaaaaacctatataatcacatgaaaattttaattttaaaaaaactatataatcataatttttttaaaaaaaaacctgagatcaaacattgtccatacata

SEQ ID NO: 400225 - DNA, 1131 bp, Cannabis indica
ctttattttttttttttttagtttagctgcctggttgtttattattaattatattatcttctcaccttattaattaattacaatatatataactggtaagtacgtacgttaaataaaactagctattacgtggtttaatattgtatataaacagatcatgtataaacgtacgttgaactctatttcttgttgatatgtatacataaaaagctgataagtttttacccatcatatatgcatatgtctatgtatataataacatagattttaaccacttggggctagctcaagtggccatagttgggtgtgtgagtgttggaggtcctgggttcgagtcccaggtaagacatgatgtaatatataaacgcttgaaatcaaaaaaaaaaacaaaaaaaaataaacaatagattttagatacaagcttgcatagaaattcatattgttgtgttatgtatttactaaattaacagatcttacaagccttgacataaccgctttctttgagaattcctactagttttcgttaataatacatatatacagaaactagtttgttagtatatattgatgatgcatatctgtctatacatgtatttgaaattttcttgaaatatttttagctatatatattgtatatgacctgcaaatatttatttgaaacttccaccagcttgtcattagattgatatgtattaagtctatatttaattttactgtgtatatatatattaattataattaggcttcaaaacttattttgtgattttggcactgtaaactatttaaaaatcttgaaattttgcgtgtaaattatttaaaaatcttgaaattttgcgtgtaaattattttgttatactagcaaaaaactacgtgcgaggcacgtatactaaattttatgctagttttttttttatgttatttgaaagtgatacaattaaaaattaaagaaaaaatattattagttattaggtgagattattattatgtgtatctaaatattatagtttataatattgtcaattaaaagtgaataccgaatgcaatatattagtgtttaagaaagtttgatgatttaaatatgttcttaagttaatccaaaaataaattaaaaattgatgttccaatacttaa

SEQ ID NO: 400226 - DNA, 996 bp, Cannabis indica
caggttccacctatgggccaagcggtgggcggtcagaccttatctggtaatttgtcaggaggggttatacctaataactctgcccagactagcggttctggccaagttctcggccaaaccaatcagtcactgagacaacttggtgtgtctatatttaatatattgggaaaagctcatgatctcagagatgatctaaatagaagaagagggttagacgaacaatatgttgcactagccactcagcccgaggcccgcgctcaagatccagctcaatgagatcttgacgtggcattggtcggccaagaggacgaacaagttcatccatccgtgtaggcacagtttgatgaactgaaaaacatgttccaaggtctggccggtcaaaagctcaatgatctctgttatcccaatttttgcactctgacgtggcatcacacgatggtgacacgtggaatcaactttgagtatctgtacggagggtatagtccgagcaggatgcctcgtaggcttatctggagcaaagcgatcagcaatccgcgcagagccatcaacacttagtgaattcagctttggcatcgtgagtcatcaaagaaatccctataacttggggatcagatcacagagatatggcaagctgtccaaatcccacgatcagtgtattctgcatttatcatgcaatctttctggtaatatccattgtaacgagaagggaaacacttcctcttcaagttcatagtcctataaatagtgatgcatgttcactgggcaaaggacgagagattttaccctagagataccatctaagaattcatattcagagatactgttgtaagagctataataaaaggaacctttctccttgttcttgagtcaatacaaataacgaggattaagttattaccgaactgctcgaggctgaacctctataaaattcttgtgtcttttacatttcgcttttaccatatatcgattgctataaattagctatcgcttactaaa

SEQ ID NO: 400227 - DNA, 597 bp, Cannabis indica
aatacgtgtcatgccattcgatagaaaaatatgggtcatgtactcatgtcatgctaatatttttagtagtaggtgctatatttcttaaacacattaatccatttttatatttttcgcttaaatttgtactttactttttcatatattttttattataattactaattaaactatgtttctaaagcttaatctagttatatttgtataacttttgaacaatattttacagatattaatatttaaaaaattatttaacattatttagaatttgaaaatattagttataaatattcaaattttatataatcttatttttttttatgttttaatagtttaattatatttatttcttttttcaatcattctatcaattttacccctatcacttcacgatattctacattcttctctaatcaaaattttgtttaaacttttccacaagactacacatctatctccaaataacacacaatctattatatttaaaattatatcttaattaatcatgtgagggtgtgagaataatttgggtataatactcataaaaaaatatgtttaaattaaattttatttaaagataaatttaattaatgtata

SEQ ID NO: 400228 - DNA, 546 bp, Cannabis indica
atagtccacctacccacgtctatacacagcgacacatccagcaatcggtagcggcgacccacacatctgacgactaacgactcaaatggaccctgagatctccaccaacaaaaccttaaaggattgaacagattccatggttgttggagatctagatctgcaccgtaattggagctccactgcctggtcccgaactcttacatattctgaggtgagcttcatctttcttttcaaattaattttgtagactccatactaattttgtgcacttcatcccgtagttgtgttgtttgaatgacacatttttttctttctttctttttaaagaaatggaagatctatatatatggatattgctttaatttttgtgcttaaaaaactgcaatatcagttggtgaacaagatttgatatgcgatcatagtagttaaatataagtagacactcaaactattctcttaattgaataattgacaaatagaccagtataactggtaaattttctatgtaacctgaaacctgatcgagactagctcaagtgatatata

SEQ ID NO: 400229 - DNA, 524 bp, Cannabis indica
cacttccactcaggaagtgccaaaggctgtaacaaacctgacggtctctggtgttcaacctcgatctgttgacatgttaagctccgagatatgaattctaccacattctccttcatcctgctccaccagaaatagggtttaagatcttggtacatcttggtggtgcaaggatgcaaggagtatagagtggtatgagcctcttcaagaattttgtttctaagttccgcactatttggaacacaaactcgggtcttaaataacagcatcccattatctgacactgtaaaatctctggcttgaccaccggaaacctcttccttgatcttcactaattttggatcaattaaatgagcaactttaattcgttctaacaaatcagattacagcgtcaagttatgaagtttgcctacaacaaactcgatgcttgatctaaccatgtcctctactaactgaagtgaaatctgaatcatactagttacctgcccgagacccttcatgctcagggcatcagccactacattggc

SEQ ID NO: 400230 - DNA, 963 bp, Cannabis indica
ggactactgactgtcacaactcctattttttttggcgctgtaccatttcgtccaaaaattacagttaagtgtcacagtggactgtccacgtgtacacactcgtacacgtgacaaatttttagtggctcacgtaatattaatttataaatatataaaaaaattaaaaaatcataaaaaataattttaaaatattttcttttaaggatattggctgctaaacacccgaattttaaaatttttaacacttaaccacaaaagtcattatatatgtgtcattttttttattagtaccaattaaaaattgacatgtgacaatttacttaacacttaagagctaggtatttacaaaacttttagaattataacttaaatattattactgctaaaaattaaacttaagtatttatttacatctgaagttaaaattaaatatttatgccgcacattattaattttaaaattttcaaaaaatttacaaaaatataggaatcttataaaaataaattaaaaaacgggaaatttgattttctatacttaaaaaacttaatttttttttaaaccaatacattttacactacaaaaaatatgacaattttttgaaaaccccaaaaataccccccctcataactcaaaccatttctctctcctccctcaaactctcagccgactttgtctgcacccaccaccctcacccacgagcaacccacgacagccaccaccctcacccacgagcaacccacggcagccaccaccctcacccacgaaaaccccaaccccgacgaccctcacccacgctcaacccacggcacccacgaaaaccccaacccccgctcaacccacggcacccacgaatcgccgccccaaccccaacgacggtcgaagccccagcccccttctccaccgcggtcgaagccccagccccagccccccaatcggaccccatggtccgaccatcggacctgg

SEQ ID NO: 400231 - DNA, 633 bp, Cannabis indica
attttctgggatattacatttacgatctgggtttctaaagtagtttctctggtggtttctatgtgggttgctatacggattttgattgcgatttaagttgcttcgttagttgcaataggaatttttatataaattttcgtaaaaatataaaaaaaaatattttgatgtgtaaaaataaaaaaatccttaattattatagtaaatattatatattaatattaatttattgtataatactaactatttttccaagtacaacaataaaaatttataagtaatttttacttaatatttaaacacaccatgtatttttaaaatagtgtactgcatgcacaataataattatagagttacttctaaactcacatttaaagaattttagatctagtactcacatttaaagaattttagggtcaattagatcctacaattaaaagtaagataacaaataaataaatattatggtgccgtttggtaacacttttgtgttttaattttttaatcacaaaatgaaagtaaaattttttatttctaaaaattttgtttttgaaaaacaaaaatacgttttgttactacttttcttttttaattttaaaaacagaaaacaaaagtgtgttctgtaaagtttatttt

SEQ ID NO: 400232 - DNA, 652 bp, Cannabis indica
gttctaaactcaaggatctttgaagatacctgcaaggtgaaatgcttctccaaagcgctccagatttgtctcgctgtgttgcatccaaccatgcgtgtaaggagactttctgtcattgaagataggagccaagaaactaaaagctgatcttgaacctcccattcaagaaaagcagggttgaagttgttcgaggcttgatctgcatcattaagaaactgaggaggaggagcacgatcttgaatgaacattagcagtctgtttcctcgaattgcagcaagaacttgctgtttccacaagagaaaattgtggtcatttagccgaatagacatgttgtgattgaaataaacaggattgaactcatcagaattgtttcttgatcgagttggaataggagctccattctgttgatttgcaggtctgctggagttcgaattgatctgagtgttggatcctacgttcgccatattgaccgacaatggaggaaatggctctgataccatattgaatctcttcgccattgttgaacaacaatcaaacacagtagcaggacatgaagaagagaacagaacaaagagaaagaaacgaaaaagaaagaggaagaaagacagagaaagaaggattgaaacaaagagcaatcatatctattcagatt

SEQ ID NO: 400233 - DNA, 1068 bp, Cannabis indica
aaaaaaaaaaaaaaaagggagaaataattatagtaggttagtgatgaaacgcaagtacatacatcgttaaaaatatagctagacattaataattcaacaaataaataaaaattacagttcaataatgttgacaatttacaaatcatttttcccttcgttttcatttttattagatccatgacctaaaacacagtagctactacatttatcttttggtcccaatatatattattgtaggctattacatatagcattattaataagagtttggccagctaggtagctagaacttaataagggaccatgtgaagtggctcccctctggattaattcttgaagttggataaattaccatcactacccctcatcgttatcatgatatataatacattataccaatggttattgtggtgatgatgatgatcatgatggagaagaagaattagatgaagaagaagaagaagcagccaaaatggggttcattttccaaatcaatgagcatggttttggtactcaattacatggagaagaaaatagacaaaaaggaggacctaataacatggactattcctctcttcatttcatatatatcccataaattgtacaatataaaatatacattatatccccttcatagttcattcccctagtaatatagtaatatagtagtggcccataacataatttctgctgcacgtgtctttcacgtgaaccccatgtaaatgtctgtgatctagatttgaccttggattaattgggatatgaatcgtgatcatatgcgattgagagaattattaattaataatatagataaactgtaaagtaaaaatttttgaaattttattttacttgtgcgaaatacattacggagtgtatgataaattaaaaaaaactttaaaaataaacatatgcaaaatcttaaaatcaaaatctttaaaaacaaaaccaaatcaaacaaaattctcaatcatccaataaaaaaaaatctgtaatttttaaaattttaacatccaaaattttaaaatcacacaaataataataatgataaaatattagataaaataatat

SEQ ID NO: 400234 - DNA, 1127 bp, Cannabis indica
atggagtacgatttataagataaactgcagtatcaatgacatgactccaataaggtaaggataagtgagactgaaataataatgctctaccaacatttaatatgtgttgatgtttacgctcaactacagaattttgttgaggacgaccaacgcaagaattattgattgagattccattggtggcgtagaaagctgttagattgagctctttagcattgtcacaacgagcaactttaatgactgaaaattgagtggcgatgagagaaaaaaattgaggaataatgaaagaaacatcatatttagaagtgagcatgtatacccaagtatagcgagaaaaatcatcaacaatagttaaaaatatatcggtaaccttcaatactagtaacatgaaaaggaccccatatatcaagatgtattaaatcaaaagcagaactagcaaaattattactagatggaaaaggaagtcgcctttgtttagcaaaatgacatatggaacacataaattgtaaggcttttcacaaaattacaaatgattatttaagatagtaacaatgttcataaaaggacggccaaggcggaaatgccaggtgttgaccgaggttttcggaaaccaacttaataatatatataagaaagctgtaggaagtttaatgcatgagatttttacgtggttggggcattaataagccttagtccacgagtcttttttatttatgagagtatttattacagagaatgttcttggtagttttttctctctttaattctcataagcccagaattctcgacccctgtcttagtgtgtttgggggtatttatagtgtttttctggggtgatccctagaaccgaactacttgtctttctgtgtagtttcagtaggggcacatattcccagcagatacaaaatgggaaaatacatggcctataccctaggtaccttagggggttaggtggatataatcctttatcccttcttgactgatgtgatccctcataaagtagccgtcacgaggctcattaatcatagcgtaatagctgcagcataggggttacgccgtcagacttaattaatacgtcttctcccatgcggcattaaaatgcgaggtgactgttcaaatgggggtct

SEQ ID NO: 400235 - DNA, 598 bp, Cannabis indica
ggcaaatttgatttttttatgcatatattaacttaaatttgatttgtaaacttatatgtattaatgttagttaaataggttaacatttctcttttttccaaaataccctctttatttttaaatagccactgtctttctactctctttttctctttcggtttctttatcttctctaaacgaaaacttaaacccccaccaattttctatttgaggattcaggcgacccaaccaccatcacaacccacgacccaaataccacccttctccaccacccacgaagactgcaattgactgtgactaacggattgaagacccctttctccacaaccactgcgacccacggactcaatgtcaaaggttactattttttaatctgtaatttctgagttagaaaatgtattttctaaacaggctcgatacaggttcgatgcatccccaatgcaggcccaatgaattgtgatgcaaaaattggatccgaatttaagacaaaggcccgatataggacccgatggggcccaatgaccagtcaatatttttgaataattttgaataagtggactcattttagtccaattaatgcataaaaatcaaatttccc

SEQ ID NO: 400236 - DNA, 695 bp, Cannabis indica
gaacaaacagtgaactagtatacaagatacgaaaagcttacataaagtgtggaagctagacgttggtgttgatcgccggtaaaaggttaactggcaacggcaaaggaataagagcaggaaatctatgatgtttgaggtttcttttctctaggaaactttgagaaaattttggtaaaatgctgaaagtaaccaaatgaggcaagaaggttgacttttataggccagaacatgtgtgaagacagttgtgatcagccaccatcgaacggctgggatagcaatcaattcgaattctgtagatctaacggttggatcaaatcgtcatcaaggcggtgaaaacgtttgagtacccgtctgacacccatttaatgcgctgtatcaataaatggacaagaaacgaatcgacacctgcaaaaagcaaataactgcagtaatgatggtcattaatacaccaccacgcgcccaaagcacgtgctaggaagctgataaagcaactggaggcatctaagcaagccttgttcacttcataactaaacaaggttgggggtaaatgttgcccctaattttgcccaaaatacgtggaccaaccggatgagaacacgtagatagaaaggatttagcgttcgaataaatcagctaagtctccttaagccaggattaccttagacatgcctcacagagaaggcatgtaagtctca

SEQ ID NO: 400237 - DNA, 522 bp, Cannabis indica
aaatagtgatctactctcactggacaagggggtcaagaaactgatctaagaattcatattcagagatattattgtaagagctctaagaaaaggaatcattatattttttgttcttaagtcaatacaaactaaggggagtaggctattaccgaattgctctgggtcgaacctctataaaacttttgtgtctttatttatttcattatattacatatatactatactacttgtcacttgcaatcaagactcactgtcgttggccaaaagcgaggtcaatagtgtgtaacaaataatttccatgaaatgctagaatctgagaagatggtttacttataacatttgcattttccttacaatttttaggatggagaaaaaaaaggtgagagtgattgtaatgtagaatcagcactatatgcacataacagttgtattaaaagggaataaatatcatactattattccataatagatttttcctcaaacttactagtgttgggttttatgccctaaataaaactcttt

SEQ ID NO: 400238 - DNA, 827 bp, Cannabis indica
aataaggtgtaattatatataagaaaaagatggaaagaacaaaacctcgcggaaattccatcgggttttctgtgagaatctttctgaggcctagatttcttctcttgtgctacaggaagtgcgtttttgggcaagccgagaatgtctttggcatccatattctataaaagtaaggaattgattggagtttgtaaggtgaaattcatgtatggaatcagttgaaatggtggagaattttgaaatggattcaggtgatgaagtgaagtaaggagtgatttgattaggtaaattttagggttttcgagcgccaaagattttgatttacaggtagaagaagaagaagaagacgaagaagggaatggagtagtgtttactgttgttcaagttgaggagaaaagcgacgtcgtttcacttataaaactcaaaacgaatgtcgtaaaagtaacttgttaggaaggaaattttattcacacattcattttaataatttttattttatataaaatatatatctttaattaatgtagttttttcatttttacacttcaaactaattttttttgcatttttatgaaattctacatacaaactcctattgcaactgcaacttaaattccaaccaaaaatcgtatagaaactcctattgcaactagcgctgcaactattttagaaactcaaaccataaatttgaaaaaaaaaaatagtatataaagtaattcccattaattatattaaattttttttactttttctttcaatttatattcttaaaaaatatatttattaaataaaaataaattatattttaaatataacaaaaacaaaat

SEQ ID NO: 400239 - DNA, 504 bp, Cannabis indica
aatctttaatttattgctccattgtatttccattttttttcaaaaaaataatacaatatctcacttagggcccgtttaataccgtttattatattatattatattatattgtattaatattaatattatttgatacaatactatgtttagtattaacttgtattaataaattatgtaaaattgtaatatagtttcaatacactcaaccccaacactacgggttgggtcccgggtcctcagtctgggtttgggtcctgggttcgagttcgagtccggattcggattcgaaatttgagtcaggtctaggtccgagtctgcttctcgagttcgggtctggatctgagtctcgagttcgggacagagtctcgtgtttgggtcaaaaattaggattaaccacgaatcttttgtaaaaattataatataagctaatatagattatttgttatgcatcaaataatataacttacattgtattaaaattttggtcgtaataattaatataat

SEQ ID NO: 400240 - DNA, 925 bp, Cannabis indica
tggtcaacgtccactaacttggagtcttttgcataaagtattctataatgctcctaatcttccttggtttgttattggagattttaattcttacttgctttatagtgataaaattggtagtaattatcataatgttactgatatggatgcgtttgccctttttttggataaatttaaactttctcctatggattttcttggtaataagtttacttggaaacatggacctacttatgaacatttggattgggctgtatgctctgactcttgggtcgatttgtttcctagtgctattttgcattaggtttttttggctcggatcatagagtattaaaagttgatcttaagttagatactttttctattcccactcgttctaagaagagatttcattttgagaatgtttggttagaaaatgaggatttttatcaaactgttcagcgttcttggttgagtcattcacattataataactcgaattttgctagttttttggataaacaagaatcttgtatttctgcattaaagtcttggaatgtatctacgaatagtatgtttaaaaataagatagctgcccttaatagacgtattgctgatcttcaaaatcatgttcctttagaagagagtcatgtggctgagattaagattttacaatctcagttggatgctttcttgtacaaggaggaagtatattggagacagcgtgctcgtgttaactggcttaatgctggggacaataacactaagtttttccatagatttgcttctaagaggaaaaaaactaatactattaaatttcttaaaactgatcatggagaggttgtaaatagcttagatgggattagtagtattgtttcttcatattttgccaatcttttcaaacccaaggctgtgattctggttctgttgatcagattctttctgt

SEQ ID NO: 400241 - DNA, 572 bp, Cannabis indica
caaatagaatctagtaaatttattgatatatataaggaagactatatgaaatgaaatgaattgttattccaatatacaaaaagaaaaatgaaaatttatttcaatatgctaaaataaactaataaatttattagcatatacgatgatagactatacgaaaaggctactatgtaaacaaagaatgaaaatttgtttcaataatgtcaaataaactaataagtttatttgacatatatgactataggcgtatatgccaaataaacttatgagcaagacatttcatgtgtgtactttgtatacaaccggatttgatgtgtcaacctaaaaaaatagactaattagtttattattttataggcacacattgtgtttgaaacaaaaaataaattgttgttccaatatacacgaaaaatagactaataggtttcttggcttatatcattatgtttgattttatagtttactctgtattgaaaaaaaataaaatgttgttccaacaaacaataactagtaggtttattaacatatataatggtactatatgaaattaaatgaaatgttgttctaatata

SEQ ID NO: 400242 - DNA, 1101 bp, Cannabis indica
aaacggcagcgttttaatcaacatgataccaactcttgtgtcgtttagatccatgggttaaagactctccaagaagagtatagaaaccctaacactcaaacacaatacactctcagcctcacaactcaaaaccctagcagagcaagttctcttcaagaacttgctcgattctaagcacaaaacccagaatcacacccacacacacacaaatttaggtttagcaaaatgaaaaacaagtaagggagagaaaacaccaagaaatttgtttgagagttcacccaaaactaggctacgtctccgtcgagctcatctcagagtagcttgatatccactatcaacaatgtcgatttacaagttttggagcttcctgtcacataagaacgaccaggtaaactcggttctctcttttgtacactttttgcttttgttttctttctgatttgttctcgatctaactcagtttctgtttgctgtgcatgtacttccttccctctgtttcctcaccacgagagctccattctcgtttctggatcttggagctgaggtcttcaacactagggtttactccttctctctttctctctatcttctctgatctgtattgtctgcctgtaattgctttagttttgtgtttaataatacttgtaatgagtcgattgatcacagatctaggagttagttacaataacagttgtaactaactcctatttcttgatccagtagaggtgaagccacctaggattgagtccaacttgtttatttcaattgttaagttgctgatgtggatatttgtgttaagggactggttatgagggaaatttaaccaacattggctaattcaaaaaaaaaggaatcattagcatttcggaaattctacaacaatctctgatagctcataattggcacaatatctagaatgatctaatgacaactcatgattgggaaataatctggtgtgaggaaggctattttataacatgctccctccaacttgacttaaatgactaaccacggcaagcttgtccttcaggtaggaaaattgattaattgaaatggctttttatgaaaatgtctgcaatttactctgttgtaggaatgtac

SEQ ID NO: 400243 - DNA, 632 bp, Cannabis indica
ttgaatggtttctatggctgttggatatgattttagtaagatgaagttaaaatgagttttcttcacttgaatatgtaattttaactcaatggttgaattgttgttagtggatgggttgaatactttgatttatgctaaatatactattctggagctgtgtatcaggtttggtgaagatttggttcgagcttggggaaaggaaccctagatttcctggcctgccaaaaccggtccaccggttggttctggtgtgccagaactggtcaaccggttgccttgcaggggaaattttttgggttttcatcaggatttggttttggctcggggttttacccaatatctattttaggttatttatgtgtagtatgaaattttatggggtgttggagattaggttttgtcaggttttaggaattaggtttatcttagagattttggttaaagtatttattgagagttgttatcatgacataagacccgggattgtcaagctttgattctatttagatgggatgcacgctaaacttctggactgaggtaagaaaagtattaaatactgtataaagttaatattatgattgttacagtatcgattaagattgaaatctcgatatatgttgtcgtactaatct

SEQ ID NO: 400244 - DNA, 704 bp, Cannabis indica
aaaagaaaaataaaataaaattttgttttgtttttattttattttaaaatttttaaataaattattatttgaaccattaaaaaattgacacgtggcattttatttgggcttaacagattagttagaaagagggaccaacgaacttactgaaaacgtgaccttgaggactattaccaaaaattttcgaagttggaaactaatctgcatcaaccctaatagcatctccaatcatgctctctaaacacattctctagctaaaatagggagtgagtcttaaaaaaaatgcgctccaactatgaaaaaatggctctctgtaacagagaatggatatggagctctctaaatatagggagctccctacttttttactaaattttttttaatattattttaatccaaaacactattattttttaggatttttttttatttttacactttaaaattagtttttttttttttttttttttttttgtaatttttactagaattctacacagaaatcctatagcaactaacatagcaacttaaatcgcaaccaaaatccgtataacaactcacatagaaactaccggagcaacccaaaccgtaaatttaaaaaagaaaagttaaaaaatagtatataagataattattcttatttttttattatttcatcaaattaatttatatttaataaatttaaattagggtaaataccattt

SEQ ID NO: 400245 - DNA, 964 bp, Cannabis indica
ttaaccttagtccacgagttagtttcttcgccttttaggaattttgtgatgtgtttagaatatttttgcaaaaaatcctaactctatactctaattttctctcgtagaagaagaagacgaagagtaatcttagcagagttttaactttgtaggttctgatctatccattgtatggaaataaaagggtatttatagggttagtggcaggtatggacatgcccatgacctgcctaagatttttgctaaaaacctactattgggataaattacatgcaaaatgagagctaaccatgggtcccttgcaagctattgtgctcgtttgtgccgcaattggataatggggaccatttgtactatatagacacgtatcatatataggtttaacctttaaaagtagaggtcatgtgtcacccaaagctttcacctttaaaagtagaggattgtaatattcgtatgttaaacaggtggtggaggtgtgtgcactaggggtgtacatcagtcggtttagtcagtttacgttacattttatttgacccaatgtaaagatcgggttacaaaatcctaagtgcaacccgcctaaattaaaaaaaaagtttcaacccatccaatgaatttgtcggtttagtcgggctaacccgtccaaactgagcactaatgtttattttttttcacattcaattgttatattttagttatagtgataatgagataaatacaaagattggatttaaagttcaaatcatctttcatacaaaaaatatagtagtttgaactttttattttttataaatatgtatataaattatataaattataaattatatataaacaaaacatatatatataaactctcttaatcgggttattttgggttagttcgggttgattgggcgagttgatattattttcaacccgtctaatataaagattgagcgggttatattttcgtcgggtttttcggttt

SEQ ID NO: 400246 - DNA, 1535 bp, Cannabis indica
aactgggttagatctggtatataccaccagggtaaaccatcgaaagaacgtaatgtatggattacgtatatatgttaatagggttctgcgtgtaaggcataatcaggttaggctcggtaaccaaaaccgagataaaccctactaagtccttattataaatagacgtgtgagagcaacacgtaggtctacgccacgtagacataaataggcatgtgagcacaacatgcaggtctatatcaaatagacaaatagttcagtggcactattaattacgtgttatacatgttgagattaagggttatgcaatcaaggcataatcaagttggagtcggtaaccagaaccgagatgaaccattctaaggccttattgtatttagacgtgtgagagcaacacgtaggtctatgtcacgtaggcataaatagacgtgtgtaagcaacacgtaggtctgcgccacatggacataaataggcacatgaacgcaacatacaggtctgtgtcacctagacatatatgaacgacattactgtttaatagcatgatgagcatttattgatatgatttatattgtcttgctgggcttggctcacggggtgctctactgtgcaagaaagggtaagacttgttgatcagccatgagtgtaggagctggacgaagaatgtacatgtccaggccacatcagaccaagcgggttggggtctaccagcattgtgtttttgagactctattttgctgcttaggctgactgaaagaaaaggacttataataatattttgtaaatgtttttgggatcccaacttctgtaacttttagattataaagttaaaatattacaagtttacttttattctgtttgatattaaagtttaaattccgtgctaattttattagtgatcccattcaggggattaggatttcttaaataacttaggtagcgtgcctaattatttagggcgttacaatttggtatcaaagtgccaaggtttttaaacttcctgtagaccggctgaacatgtacattcatcgtcagagataagctcgactcatggtgccgtaagtattgagagtaaatactttactgtttatgtgatcatctatttaccattttccattttaggcagtatgcgagcatctagactatttatgtgttatgcgatgccatgctttaaatgctataagattaagtgtttatttctatggagttaatagttgagttagggtttaaaggcaataagtgcgtaagtgtggtattggtgccagactcgctggggttgttgattatttggttatttttataatggaccctctttaatcatccagcagactacagggcgagctagtagagcctggtctaccaaaccaatcctctggcactgcctccacctccgcagaatccaggggataatgcggggattggcaatgctaatcctgctgactggcagcagatgttccaagaaatgcgaggtatcatacttcgtcaagaagaagagttgcgacgattaaggaaaccggatgcccctattgatcaagtgttac

SEQ ID NO: 400247 - DNA, 959 bp, Cannabis indica
ggaaaatgggcggtatgaacaagacatttgcgattatgattgactatgagatttttattttttgtcaaaataaaaaaaaaatagctgtattgagagagaagttcgaaaagtcatacctttatttttacgggcgtcgagcgtgattttgtggtcagattcgaccaccattactgagatttggccgcgcatctaggcaaagagataggcgacgcgcaggtcgcgcatctgggcagagagagaggggaggcgctccatatgtctaggccaccggagaggaagaaagagaaaagaaggataggtgggcgaggtcgccggaggtggctgggagtactggggcagctacaggagagagagagagaggcgagataaagaagagaaaagttagggttttttgttatgtggtctgattgtttaagaagagaaagagagaggtgatgaatatataaattactttttttatttttattttttcagattgtaatttagttagggtttgattaatttttttttatttatttatttattttgaattacagttgtattaacttttttttttaaaaaaaaaatagggtattgatgtagtgacgcgccatgtgtgtcagtgcacatttacccactcgggcttggcgtgtcactataagtcttaatttttcaaattaataaaaaattaaaaaaaaaaattaatctttagtgacactctgtattttcagtgacacatattgcaagagactaacactgaacatttagagtctaattgtgcatgtcactaaatatcactcctatctatttagtgacccgcacttttgtgcgtgtcactaaatagtgtcactaaaaggctaaattgtagtagtgatctagttgttcatcaattcatgacaccttagattagtatttacaatatgaaacaagaagattgtataaataagattactttgactctcgctaatcagagcatcgtt

SEQ ID NO: 400248 - DNA, 614 bp, Cannabis indica
tttcatggaaaaattttgtaattaacaatcaatcatcaaaacacacataaaccaatatgaacacatccaaatcaacacaattgacaatttcatcattctaaatccatatttcatgaaagtaaatcattaccatggctctgaagcaagttgttgggattattttacaaggatttagatttacttacaagtatgttgaattgacatcctaaatatgaatatctctaaaacaataaaattaaacacataagagtttagaaaaccttacattgattgcagcagaataataatgactccttccgcttcaaatctgtaacccttgttcctttctgtcgcagagtattatcaagattggagcttgaatctctttctctctttccgggttggttaccaccttctttcgcactatgattgagtacttcacttgctatgtgtgggcatggcactctaccactatgggtgaattcatgaagaccaatgaaggagggttcgaaaactgtatagaatgtgtctctcatctactagttgtctgattgagttagaaactagatttgggaggttgaagattgttggatgagatgagagcatcatcttccttttatagtgtttcaactagg

SEQ ID NO: 400249 - DNA, 531 bp, Cannabis indica
cagtgactgaagaacaaattaagatgcgttgaaggatgaagttaaagagtggtttactatctcccacctggtacgataacatggaatgacatgaaaactgtattcttagagcgttactttcttgaatctaaagttggaagtatccgaaaagaaatatgcgacatcagaccagtttcacgggagtccttgtatgaatattaggagcgtttcaagaggttgtgtgctagttgccctcatcatcagattagcgaacaactcctcatttaatacttttatgaaggtctcttaccatttgataggagtatgatagatgtagccagtggaagagcactagttgacaagactcctggagtagccagcagcttaattgctaatatggctgccaactcacaacaatttggcattcaccaagatgttatgccaccaaagaaagttaatgaagtgagtgttgggttttgtgccctaaataaaacccattttaatataattagatttactaattaataaagatcagaaataacattttatgtt

SEQ ID NO: 400250 - DNA, 652 bp, Cannabis indica
aagaagtttagggtgaaatgtaatgctgaaggatgtaacttgatgctctatgcatatgtgaagcaagatgggaaaacattcagggtaaacaaatgtcaacctaagcatgagagttgtggcattgttttggataatagacatattactacacaatggctaccagaacaattcagagacacattcagatgacatccatcaattgagtacaagtccttcttggagataatcaaagacacaaaatattctaaagtaactaccacaaagttttatagggcaaagaacatagcaaaggtagaactagaaggcacagtcattgaacagtatgcaatcttggaggattacttcaaacaactcttggagaccaatctaggtagcactgccaaaattaagtgtgagatacaaggtgataaaagaatattccaaagctgctatgtctgtctacatacttgcaaggaagggtttaaaaatgggtgtaggccatttataggacttgatgggtgctttttgaaggggttttgcaaaggagtcttgctggttgctattggaattgatgcaacaaattttatatttccaatagcctatgctgtcactgagaaagagacaaccaacaactggagttggtttttagagttattaagagatgacttgagtc

SEQ ID NO: 400251 - DNA, 689 bp, Cannabis indica
tattacaaccttttagttaattttttatccttgaaaatatattttggaatatttttttttaatttttttacgggggtattagttatgcttacaacatcatccctgtaaatttttgaaaattttccaatagtttacagtgccaaaaatacgtttgaagttttttgaatgcgcgtggtaaactggaatattagacactctgtttttggtactgtaaacttttcgaaattttttaaaaatttaccggaatgatactgtaactataacgaatactgctatgaaaaaaaatatttcggcatgtgattttggacgtaaaggttgactaagaggttgtaatagaaggttgtaattagcatttctcttttatgaaatccttttatatgtgcagttacatttttatatttgagcattgttattaggcaccaaatatttttcatagatagcatcttatataattggttagcgatagagcattactattaggcactagtgatgcatagcaccttctcgacatatcgcgttgcgattggctagcgatactctctagaagttattatattaaattatatgggacctgatacttagttagaccaataacgatattgacacataggagggtgctaagcaccactggtgccctttagcatttctcgttagcgatattctctaaaaaaaaattaagttatataaga

SEQ ID NO: 400252 - DNA, 998 bp, Cannabis indica
aagttaagatttttgcttggcggatcattcatgatgctctaccggttgctacttcacttgtgcgtagaaagatcattaccgattccacatgttccatttgtaaacaagcttgggaatcaatgggacatgctctatttagctgcaagtatgctaaggcagtttggagagttcaaaatttcaagtttgattggcaaaagtgtacatcaatacgaaatggtgattacttattacatctctcaactatttacaccaagttagagatggaacacatcttttgtacactttgggctatttggactgaacaaaacaaggtggttcatggcggcaaagcaagaacatctcaggacttatccatttttgcctctgtgttcatacagaactttcaagctgcccaatggaaacccactgctgctactgtgactgcaccagcaacatcacaccagcaggataattctactgcaacactggctccaattccgtggtctccaccaacacatggcgcccacaaactcaattttgatgcggctgttgactcctcaacaaaaattactggtgtgggagctgttctgcgagatgaaaatagttttgttgtggctgccctgtcaatgccgattgtagacaatttaaaatcacacgaaatggaggtcaaagcactttttcatagtctcaattagactgttcaacatcaattcccaattatgcaaattgagacagatgcgtttatggtggcaaacgctttaaaagctcccttcaatccaaattcttctttttcagatttattagtggatgttaatagtctcttatccttttttcctaatgtaattgtttcacatattaaacatttggcaaataaagcggcacatggtcttgctaaatttgcattagggttggatgaggcttgttcttggttggagattattcctccgcctatttactctgttattgtaaacgattcactgtttgtttaataataacaagtatttttcctcaaaaaaaaa

SEQ ID NO: 400253 - DNA, 1244 bp, Cannabis indica
gccccattgcagccattgttttaattccagcaaacaatgtgctgaagccgcacataagaagaataaatgctcagtgttttcttggtgttggttgcacaagacacaagtatcatcctacactatgttatgagctttcaaccttgcttttgttctcagccagttatgcattgctaaccagaaaatatagcagtatttatgaacatttagccttccccaaacttctctatcccaagtgatcttcggctgaactgggcaaatcaacttatacccttcagcaatggtatatcgggttccaacaaatcgctgaatatccatcatgctcgcgatttgatcctttgcattcaccacctatttccaataccagctgccattttgtgggaacttataatcccctcaatcttcctgtttaatatatacactatgtatccatcgaacccacaaattatcttctttatttgctaatgccaagacatacttgtataaagcagcttgattccactctggtattttcctgaaaccaaaacccccttccttctttggagagcaaaccttctcccatgccacaagtcctgcaccttgcatcgtgctttggcccttccaaaggaaggaacaacatattgcttctagtccagtaattactttccttggaagcttcatgatttgactccaacaagtgtgtatggatagtaggacagagttgatgagaacagctctacctacaaatgaaatgtttctagaactccaaattttaattctagctgccatcttttctgcaagtaaagtacattctttccctgaaatcttcttagacatataggaattcccaagtacttgaaaggaagaacttgcctaccaaaaccagttgcattgattatcctctgaatttcagcttcttgcataccactacaataaaaagctgactttgatgggttcggttgaagtcccgatgtgagagagaacaattttaaaccttgcatcatgaagtacacactcttaaaatcaccatgacaaaagagaagtacatcatttgcaaagcttaaatggttgagttgtaggcttccacatctttcatggaacttgaattcctgcttctgcccaatcttagtcataatccttgagagatactccattccaagcacaaatagcaagggggagaggggatccccctgccttaaacctcttttagattcaaaaaatccatgcattgttccattgaacattatagagaactttggagtcctaac

SEQ ID NO: 400254 - DNA, 522 bp, Cannabis indica
tggattacatactgaaatttcttgcatagggacatttgttttaagtcctgaccttgttcttgagaatgttttatatgtgccttctttcaagtgcaatttgttgtcagtcaattccttaacaaccacaactaactgcactttcttattctctaatggcaattgtgtcatccaggacactttgaagaccaaggtgattaggatgggtagaaagtttggcaacctgtattacttgaattgtaatcaaaatagtgatagaaagtttgtttctgtttcttcttcatttctgaataaaaaatttctaacgaaactgtgtggcactatagattgggccatccatcttgtgtaaaagttcatcatttgaataaagctttaaagtttcatgttgattctaattccctattctattattccatttgttactatgcaaaacaaaaaaaattgcccttcatttctaatcataatgttgctgaaaagtgttttgatgtgattcatgttgacatttgggcccttataacaccatga

SEQ ID NO: 400255 - DNA, 893 bp, Cannabis indica
taagactttgtattgcatttatttcaagattattaagtggtatcagaatatctaaagttaagaccattttattttttcatacaaagtgatgagatatcttcaagatacgaaatattatatttatacatattttattgagatgaattgacattctggaaatatagttaacttattagattccaacgtacttaactagctataatcaacatttgattacgcccttaagttaattgttatttctattataaaagtcacattcatttattattttcaagatacaaatatatagtgtattgtagagttttatactaggcctagactttagatttatatttcaggctattagaaaagttttgcaatcttctggcagaaatttcttgttgaagctagcagcttatcaacattaagtatttagctataaagaggcgtgataagtggtcaataagcatgcaattcctgaattgggtgatcacatatccttgactaaatgaatgtcgcaacacaaatttaaggatcgtaaactaaatatgagattcagttagcccttatatatgcagtttttagttgtacaactaaaattattcaatgaaactctaattttgatattttttttatattcatgtgtaccttaattttatttgaaaaaattatctttagaggaccaggataaacataagatttaggatttatttgcttaattatatttgccacgtaaagtacattgttatataatgaatacattgtaatacatgacaaataatactccccatataaagagaatctatttctatgattcatatgtttattgtgtaatgaggaacatttgatttacttggtaaatctaaatactgaccgaatgaaagaatattagaatatttttatattaagcataa

SEQ ID NO: 400256 - DNA, 1057 bp, Cannabis indica
agacaaactccataaattgacaatctgatctattagacaaaattaaagccactcagttaactaattcgaaactaatgaagatccaataagaggttttagctggtcaagctaaagattttacggtgtcagattatgggatgctgttgtaaaaaactagagtttgtgttctaagtagtgtggatgaggaagctcatatcactccatactcactgcatcttggcactaccaagatgtatcaagatttaagctccttttactggttgtgcaggatgaagaaatatgtggttgaatttgtatcccagtgtttaacttgtaacagattaaggctgagcatcagagacctgcaggattagtgcagccaccgacacttcctgagtggaagtgcgaggatgtcaccattgatttcgtggctgggttacctaggaccacaggaatgtatgattctatttgggtcgtggtaaatcgatttacaaaatctgtacattttcaaccaatgaagataaccttatagtggatcagtacgcagagttatacgtgaaagaaatagtgaggttacatggaccccgagtccattatgtcgggtagagatctgaagttcatctcgaaattctggcagagtctccaacgggccatgggtaccaaactaaagttcaatacaactttccatcctaagattggtggacagtctgaaaggataatctagataacagaagatatgttacgtgcttgtgtgttggattttgaaggctcatggagcaagtacctgtcgctgataaagttttcatagaacaacagttatcatagtattacagtaatggctccctatgagatgttgtatggcaggaagtgtagatctccaattcactgggatgaaactagagaaaggaaatacctaggtctggaatcaatgcaacagactaatgaagctatagaaaagaataagaccagaatgcttgccttgaagagtaggtaaaagagctatgcagttctgaagcgtagaaatgtagaggatcatgtattcctacgggtgtctccaatgaagggatcaaacatttcg

SEQ ID NO: 400257 - DNA, 758 bp, Cannabis indica
cttaaaatgccttagttcattatgatatatcatgtcatccatatgctctttggtatgagattagttttcacctaggtttctactgtattacatgtggaatgttttgttttaatattctttttatctttttatttgataatcataagtagaaactccagtgacagaattgtgttttttttcttcaaggaaatgagtatagaaatttagtaatggtttaccatgatgcaaagttagggagtgatgctccgttaaaaataaaattattttgttcatatataatgcttaggcatccttgattgtattatttctgttgtttcttttacttctttcttattctacttagagttgcttgttcacattatgttttcacattctaaaaatgaccagttattgttgttatgaagtattgttcttagttgtagtaatttaaaagggtttgacaagagttgtaaagtgatattgacttagtacaaccaaaagaataataaatatggaacactcttatttttttattattaattaggaaaacttttcttttttaattgtacgttgaattggtgtgacttgaacaatactgtcacgatacttcagaagttgcttgcttaaagaaatagtatatatttctatattattattatttttttgattgtaagttctggcaagtctctgaactcatctcaagctactaaaattgataagttgactagttaaattgatttcgtatagtaattttgtacaactttcagtgtaggatgttt

SEQ ID NO: 400258 - DNA, 749 bp, Cannabis indica
aagatatcatatatatttttagtataaattcaaaagatattttagtttaagctatacataatttccttaaaaaaattatacataatttagtgattgttttttatgtatgattatatgttagaacatgttaaattgtcaaactaacacttaataagttaatttgtccaagaaaaaaacctaataaactaacaactcaaacatttcaatttttataattcttattcatataatctaacaattattatattataatgaaaaagaatatatattatctatatatttgataaataattttattgttgtaagtaaagttaaaaagagaaaaaaattttacataaatgttttttattaaattaatcataattatttatatattattatatatttgtatgactaaaagtaattatatatattgctattgttccgtattttgttaaagttaaattttgttagttataaaaaaaattctaaaattttaatgaagattcagagatcctattgatgagataaatttttctattcctctttattaaatcaatttaaatttattaatattagtttatattttaatttactgaactcttatttttattataatatttttgtagagactgttataatcattcaagcagattttataaatgtgagtctaaagtagctgtttgttgtttggtctactttcacactttaagattgattgtaatttggcattgagctttgctttctctatgtttacactgatgtaagat

SEQ ID NO: 400259 - DNA, 587 bp, Cannabis indica
aaatccaactttccactacatttatgcaattagtgttttttcatcatgtcatgttatctagatttgttggacttttaattgtcttggagcttgagtgtttccactatcttgcatgttttggaggttggtctccttttgttttgaatagatcgtttcagttaacaaaaaaagacaacaatgcaagacaaatcaattgcggattagttggtttactcaccatatatataaatatatacttaagaaggttacttattattactatattatatatatgctattttgatattattatattatttgtatacatttaaagtaatttatcacattggacagtatacataatattccattttgactgaggatgaattttagatcttttaatgtaactattgatctaatcgaaatatattaatacactatatagtcttacaatgtaatttttatattaatcattcaaacaaattgtaatacaacagacaaaattaaagatagacaatcctttaatcagaaaaatctctatccacaaatagagtaaattattaggccaaaacattaaagaccttattactctaagggaaattggaaac

SEQ ID NO: 400260 - DNA, 605 bp, Cannabis indica
tttctcaatttttgtccattttaatgtcatggctgggtgtttccctatttcctgagttggtgtaacctttaaagaatatagcaaaacctagggttatgggttcgggtttcctagaattagggttttaatcatgtaacttatctgatttcataatgtgattagggcatccatctagcacgagacttttcgttcaggtcggcccgcacacttgaatctggaaagaaggtaagaactgcatacaatgtgtgatatcaatatctgagtgtatgtatatgttatgtgtatatgcatgcctaaagtgttagttgcactaccaacacttgtacagtaaaggtacagggtgcattggcatagctaatgttatttgagagtccattacagtgataccagcagaagtacaggaaagtactgagggtgtgtggtatatcacttagtggtactcaggttatgtaataaaccctaccaacactcgtacagtgaggtacgaagtgtatgtggtatagtggttgtaccctagtatttaacgttcttactcatcttttgagccttgtaaataggtgtatgggcgcctaaatcaagtcgaaaattatatgatatattatatg

SEQ ID NO: 400261 - DNA, 522 bp, Cannabis indica
aaaaatcagaaagtaatgcattttattttaccaaaaagcccattttgttgaaaatagaataaatggtcaaaaagaccaaaatacccatagagtcaccaaaccacatattcatgaaacaagagtataattatcattttatcacatatcacactcaaataaattcagattattcaatcaatcatagaatgccaaaataaaatcccaaaaatatatttcggccccgaacctggttggtctgaaatactcgattgtgactataccgcgccaacttgtcagaaaatacttgtagaaagacaaaacaagtatactataaaataatatagtccataagcatgcaataagattaaaattacagttttacccttctcgggtcaaaagtacaaaaatacccctggctcaccaacggggtcttaacatgtcatttatctgattaattcacatataataaattatataatgatataattctatattaatacatatttaactagttagggttcgctaatctgttgtcttaatctt

SEQ ID NO: 400262 - DNA, 1039 bp, Cannabis indica
ttcaaagcactgcccctcgggaaaccggtgatggagcatcccttggtaatcaatgtggctggtcacctactgtacttagggctgagcataatacattagttacattccaagcctcctgtcttaatttttatacgtggaattctattctcgtggaccgcattgctcataagtttgacaattggtatcctagattgcacgtccagattaactatcacgagtcattttatggtatagccgagcaataagttactatggaagatagggaaggtcacatagatgcgaactgggatttagaaccaatcgagccttttgatatatttaaaattacaggctgtagggattttagcgcatgttattgtccttttaccccttcatctagtgatagctcgccttctagtaattttggtaaatcccttaggttgaaaattatactcctcccctttttaattggcttttataatgattgtaatgcctcgtcttgttttgcatacatgggttatgaagacattctggaccgtaaggggaagaaaaggacatcaaaccctagagtccctactactgtcgtagtggttcttcccaagaagcaaaggaaagccactgcccataagaaaaaatcactggccgagcctattgatcttgaggttttagacaatgagatccaagagcaagttcctcctccagctgttcccaatgtcgatgcccctcatcccgaggcaacccccactactgcctctttcagtcaggccatagagaccctgtcggtcacagctggggaagctagttctgaattttccaaggcatatggggtcgcatgtcggcgtaaacttcaaactctccttcccccaaattgggattttctcaatcttaggagtccagaagagatgcattgaaggagcttggactatcacttcatggtacgtcgacttttttattataattatataatctttttatacctcttttatattcatctgtttgtaattctccaggcttcttttgcttcttttgtttccaatcgactactctctgagcgactcga

SEQ ID NO: 400263 - DNA, 636 bp, Cannabis indica
gacctctttgtggtggtcttggggtggtgcacactgacctcaacatggtggtctcagggtagtgaaccccaaggtccccaaccaccttcttggcacgctaaaaaaatctatttatcttgaggtgcggtaacctgaggtttgattatcaaaacgtctgattactttggctaaaggtggggtatcccaacgtccaattacttaggtcgggtatcctgatgtctgattacctcggggtggagcatcttgacatccaattacttcgggtaccccgacgtccgattacttaggtcaggtacccccgacgtccaattagcttagggtggtgttataaccgaaattcgggtaccatctcagtggaagacacgtgtcaagataaagggaatgcggatcgattatgtaactttttatggaataactcattaattgtgtaagtagcagagtatattcacaacccattgactgtaaagttttatgcgaggaaaagatatacaaattgttgcttagtatattaacgagaaaccatatgtcattaaaggcatatagcgaggcatcaagtacgttacatccggggagacgaaagcgacgcatatcgaccgcgaaaacacttagtacataacgtgcaaactaagtataaca

SEQ ID NO: 400264 - DNA, 767 bp, Cannabis indica
caaatttttgttcaagagcgcgcaaaacaaagaacgaggtagtgtagttggcaactgatgcaagaatggtttccgatatggaggatcgcagccaagagagaagtaactaatccttgtgtcgccattaaagatacttaggattcgaattaccattaagcagagttgttggaggaagaactccggtgaacaagatctcatcgagatcatgtccaattatagtaggaattacttgtgacttccaagaaaggaagttcacacgatcaagcttgatcgtaagagaggaagacaaagaattggaaaaaggatttcaagatccagtagcagcggactgtaagacaggggcctgaggagcttgagttgcaggtgtcatggcaggggcctgaggatcggaggtagatgaagacatggtcttggctcaagacttctgataccatgtagagaaagaaagtagggagaaagaaaacacagagaaaattaattgcaaaagctcactattattattgataaccattgtatttatacataacgaagaagccagaaaaatagagcattaagctcataacaaaaagattaactaccttaattaactaaatacacttaactaacctatgctaacagaaaactaactatgattagttaatagtgttaacataaagaagtattttgggtttgtagatagagggagctcccctgacagtggtaaaggagccatatctccctcttcagtacaatcgaatgctttcttcttccgtctatcaggatgattt

SEQ ID NO: 400265 - DNA, 554 bp, Cannabis indica
cacgtaaaaattgggtgttcatatttttataatttttcttggttgaatcatttttgtgaggctcaaatttggttaaccaaaatctgcgttaacaatattactttaaatatacacatatatcaaatatgtatattgctttaaattaaaataagacaaaaatttacgtagttcatcaaattgtatttgcctacgtcgatagctaacagtcagttgtgcatctttattaatgtgaaatattacaaggatcaagagcaaatgatgtctatcttctttcaaaaatgatcaatcttggacatatgtggtgacctagattaggttagttttctgtgtgtatttcgtagataagtgatgtgtattagacaatataattgtgtttgtaagaagatagaaatgactgtgaatagaagaagttatgattcgtagaagaaccttggtgagctgatgtgttggaaggtagtgtggacagttttgttttcataaaggttatgaaataagcagcctggtttttataggagcttgctaaataggcagcctgatttttataggagcttgct

SEQ ID NO: 400266 - DNA, 612 bp, Cannabis indica
caccacgtcaaaaaaaaaaatgtgtactatccttagagcacccccaacacattctctactctatcatttaaaataaaataattaataattatgccctctaaactttcgatactacctgatactagcctctaaaatatacaacttgttaaaaattcctcttaaaatataacaactacataattatgcttgttctgttaagttctatttcttctactgttaaaaattagtatttttactcctaaaactttgaccaatataaaatttaacccaattttattaaaaaattaattttaaaaattataatgtttgaaaaaaattaataaagatgattaaaaaacctaataaaaatattaaaaatatattaagtttatttaagaaagaaacctaaactattctaaaaaaaattattttcaaattttattatatttaatatgtatcttaaaaattaaattaaaattattgaaaatctaataaataatttaaacaaagtaagtttttttaaagaaaaaatcaagcttatttatatatgtatatgaactcatgttttaaaaactaaagaaaaataattaaaaattcaataaagataaagataaaaaattattttgaaaaaaa

SEQ ID NO: 400267 - DNA, 556 bp, Cannabis indica
ctttactccgtaagttgactttatattggtgattgaattcactaatgttcataatatataatcaaataaaatcatggaattattatgtattacttaaaaaagaaattacaaagatgtaaaagatataaaagatatatacgtgtatactatcatttatgtctgtctctaagtgtgaaagacagagtagaagacttcaaaggcattcaaaataggaggcagagttgaattttgaagcttaacgagtgaaaaattgtattgactaaaaccagaattgcctgaagtgctaaatatggtggtcgtgtttcggtagagaggagcaatatcttcaaaccagagctctccattaacaataacattgaataatcttgattgattaggttggagtaattgagtttctgtgaagtacatataaaaatacaaaacagcattctggttaggggaaaacacagaaaattccaatgggtcgctttcgttgatgggcgttgcagccgtgctcatcacaatagatggtggccggtagtatctctggctttgaggatatttcgttgtactaatt

SEQ ID NO: 400268 - DNA, 2097 bp, Cannabis indica
acatttaatttattataatattatactaaattgactagaacggaattaaattatttatttatatgattttagaaaggtaatgaaaatggtttaaattgattgaattatctttcatagaaatatttatttcttttatttgtttattttaaaattaaattataaaaatatataaataaatttcaaaaataattatatatgtgattgataaatattttttatcaatgatattatacttgtaacaattcacaccaaaatgataaaacttcattcaacaccaaaatgataaaaatttcattcaacaccaaaatgataaaatttcattcaacaccaaaataatctcataattttttattttggggatcctcttacttgtcacaatttttgtgatttcattcataagtttcttgatcctttgtctgtggcctcttaagagttgatttaggtgattatgtggagaatctagtttaggaggaacaagaaggttcataatgataatgcgattgctccagatattgtggtttcttggagtcgtgattttcttgctgattaccagagattagacaattctcctagtgcttctcactcggtgggagctttccgtcccctacaaatgcttcttctagttttgtttgggtgtcccctagtagggggacaatgaagagcaatgttaatgctactctcaacgcttccactgatagatgtagtttgggtatggtggttcgtgactccagaggtgaggttatggtttctgttgtttgacatattttgggtgccttctctcctgaaatggcagaagctttagctttaaaaaatgttgtcatccaatgctgtttattagattttcagaatgtaatttttgaatttgattgtttgaatatggttttgaagtttaataccgagtattttggctatttttttaggtttagttttagtagattttagacatagtattttttgaatttcactacgctagtctctctttctgctctagatctattaatgttgttgcccattcattggataaatatgccttgtcggaagttattaacaaggtttggtagccttgttatccttctggtatccatgatctcatttaacatgagattaattaattgaatcattatcccccattttctcttcaagctcattgcttgaaaggtggtcttaggggttttctttaaaaaaaaataaatacagaataaaaagagaaaaaatctcataatacattcacacacacatatatatacaccttaagaacatggtagtacaatttagtgagagcgctaaccataaatatgaaatctatagcttctataactatttgaagtgaaatgttaatttcttttgagcttggcttaatgcgataaatgattgagacctcatttcagtaattacaaatatcatttacaaataggtaagtgttttaaggatacaatacattaaaaggtaaaacagtaaatttgtccctactcaatgtagatcatctataaaagatcttggactattttagattgaaacaataggtaattcaaaatcgcatctatttttagtaatagagcgttttatataattaagggtgcaatttcaaatcggagtcgggagaaattaataagttagaaaatttacttagtaaattttgaatctacttagtaaattttagatctacttaatgaaaatttattaatccacttagcccattaaaggttttggctaagtggattaataaatgaaaactttacacatatatactcatagaagaaaataattacaaaaacattagtaagaaaataatatactcaaacttataaaaatttaggataaatgcttcagtagaggtattaaaaatgattttatatagaattattttttttttttaaaaataggtgtggttgtttcattttatgtccatgtttaattttatttattttctttatttattttttataattatttgtctaaaaatacttatatccaccaaaaaaaaaacttatttttttaggttagtatataatttgtaagagaagagatgtatagaaatttttttcattgttctttgacttctaccatcatagaattttttgagtctcaactgattta

SEQ ID NO: 400269 - DNA, 1114 bp, Cannabis indica
tttttttttttttgaaaaaatacgaatttcatttataaaaatccactcttatagaagaactaaaaaatcaaggacaaatatctgttcaaatacaatctcctaaactagtgatagaggttaccagtatatggacaacaccattcgctaattgtggaatgacactacaagaaccactaccaacaacagctaataaagaatagatatctactaaaatagactaaaaattaaaattaatgtaaagcttattaatccaaccaattatcacagtagaatcactattaataatggagatattaaaaaaaactgatgcgcaagaaccaagcccaaacgaatggtaagcagctctgccacattgaccgagaaatcacctaacacacctgatgaccatgccaaccaaaccacaccctctgcatcccgtatcactccccctcctcaaaattatctaagcatccatcactagagcaaaggattcaagaggaggtggcatccattgactagatcagtttacaactgggtttgcaaggcccaatcccaaatgaaggcctcgccgatcatactccttgaactctgccagatgattattggctaagcttggaacaatatctaatcttgactgcttgttgctaaaataatactgagtttttatcatgccacagccactaaagggttgttatcatcaattcaaaagcctcacgggatagcctctcaaagagtaatatgagaatttcctgcattgtcccatatgcactggacggagtaccaatggagcatcgaccacacccccaaccgatgccacactggaatcaaaccagaacagaaaaatagagcatgctcaggagtttcagcttcttctccacactaagaacaacaaagaggtacccgaactttttgggagataagttgtgttgctactagtaaaggccagccaagagaagcctataggccaaccagggtgaccctataggccggcaggatctctgcacaagctggtcgaccaagagaagcctataggccaactagggtgaccctataggccggaaagatctgtgcacaaggtggccgaccaagaagtgactttcggacctaaggagactccgttcgaccaagagaacct

SEQ ID NO: 400270 - DNA, 957 bp, Cannabis indica
ttgagaggaagctctatactctgtatttagtagtagcagattcacaattgaagatacagcaacaaaagggactttttatctcagtttttacacatagaaaaaaataaaaagtgggataaaaacttttgatctcacttttacatttggagccttaaaaaaaaaattgaacaagggccttgtttggcaaacggataaaaaacagtgtttgaaagagctaattttattcatttgccaaacgcaactttaatttttaagtgggactttttatctcgattttttatgtaaaaatcgggataacaaaacccacaatatctgggccttttaatgttgttgggcctttacacatataaaaagaacattaggttttagggtttcatttacacatctcattccctcccagccgtctctctctcctatcactccctaagtggtggtgaaatctttctctcagatattttttttcttcttcgtgctcaagcatctcaatctctgaaacgatctgctattttttttttctacaacctccaaagctcgagcaacgactggaccaaaaaattgacgacaaatgacgaaggctctgctatttttttcttcatttgatatcttgatccagccactccaactgtagatccgatatcccaacctcgaaaacccaaggttgacatcactttaactctttttttgtaaagatcgcttagctttaatttggaaattagcagataaatatggctttattatgaaaattatttattaatattgaattaattatttatgatgtttaatttgaatttagaatgcattttcatgtcacatatagaaatttcataatttttcatattttggtgcccgacaacattggaacgcggtgtatggcttttagaatcacatcttagtatttttagtatagcgggacaatagttagacatttagaatgtcgggaatagacgggattttaga

SEQ ID NO: 400271 - DNA, 1144 bp, Cannabis indica
atttaatgatagtccaaactgcacaaccgcataaaccacaccgcactgcaccattttttgcggtgcggtttttggagttttaaagtttcgcggtgcgggtgcggttcgagaaattgaaaaaaccgcatgtgcaggttggtttgaaaaatagtcaaaaactgcaccacccgcaccacgaacacccctacttgcacctcccttcaacttagcttcgagcttaagttgaatgagctcattcccctgatgagctcgttcggtccggccagcaccaaatttcctcttcttccccgtcacggacttaggagtaaagtccttgggatagagcccgtacctcacaaagttatcttcgaaggtcaactggataatattccgatcttcccccagcagtcgggcaagtttttgagctctatccctaagagcaagagtgaggggaggacggtgatatgttggaatctgctggaaccaagtccgagtaatgcccgcgccatccaccatgaagtattcatcagcaaaacgccctatcaagctgatggtcgtgtcattcgtgcccatcaaccacttgaagcctggttgagagaaatagaagtaccccgacctgcctttcttgggggtggacttcaaatcaaagaaccaggaaacttcgtgaggagaaggagtaccccactcctaggaagcgtagaggataaaagggcccttaggagtgaactgggccgagcagaggacgaagaagtccgccacatccttgaagtatttatgcaagggcatcaacgctccttgctggccatgggcacccgaacatccccttgtcagggtttgtggcacgattattgtgggcgggaatgtagtagtccagctcacccaagtatccgccctggtcaagagtttgaaggtgcgccttcgtaatcttggacgaaggacttacccatctggcacccaaggcaccctgccttctatgaggaaccgccgtagcgagctccttattgacgtagtccacgccctctaccaggacgtctccgtcagcatcgactggctccccagtctcgttgtactccccataatttgggggttcaacctctgcctcttcctcctcctcggagggactgccggtgtaatatcccaataagtctaatggtaaataattata

SEQ ID NO: 400272 - DNA, 624 bp, Cannabis indica
tagatatttgttgatttaatgatgttttagcattttatttttattattagttaacctaaacctattacaatacgatagttcataatcttgatttttatcaaatcctaaactatcatagttttatttttctctgcaaaccagtcaaagcctcattcttcatcatggttgctcatctcaacccttcaatacttcttcttatttttctaccttcattcttaaacttttggatttctaatcaaggcttgtgggcttcagacatcacattgaaagttataaagaggtaggaaatattttcttgctcaataatgctagatgtaatttagggttcaaacatattatgtttgttttagaaaaacaagtttcagtaaagttctcatatctctctcgatattgatccgtttttagcgtatttttgtattgttggaaagcggatgtactacttgaagtctgtttgggatattcatctccgtccaggtgcaaataatattggatacatatcacttgaatatgttgccacgtcatagtgtaaaaaatgggataacatatatatattgtttaattttttctaaaaaaaaatcaaataatttttttattttaatttatttgtcatagtatttaaaatac

SEQ ID NO: 400273 - DNA, 1818 bp, Cannabis indica
ttggtaggcagtccaataatcggtgtatgctatgacagcttgggggaattgtcttctcaaagatgtcaccaagtttaagattggctacgttgtgagtataaatttggttgtttacactcttcacacaacctatgttgtctctatcatttttggaggataattttatagtcaaaggtaagcaacctgtcattgaaagccttgaaccacaacatactttgcacctttctttaacaatgtctgtagaactcagtaagttatacatcaaaaataagaagagcattaagattatgaaaacatagatagaattaaatggtctagagtaaactcattattttcaccacctatttgaatattgattatgtttccttaccaaaagattgatattaaaattatatctatagaaaagtacaaaactcaaaactttatcatgatatggttttgataattatatgcaaaatgactttctaaatttacttaatattaataaaaggtgtctattttattgattattcgttaactcaagtaaattttaccgttaaaaattgagtatagctattcatcactaactttcgaatagtatcactagaaaaagtggatccaaaagtgtaagcataatcatttgcaccaatctcaccaacccaaaacaatgaatcatcgatgtcagcaactctacactttacatcgtgagctttacacccaacattttcttccaagtacttatcaaaccaaagaagctgagtctgaatagactcgggggtagtatcaagagtaaggtcgttcttaacaaaaaactcatggtctatagcagtggaaccaactatagcaaagttgactctgttaggtaaatttcccttaacatatttataaggaggcaagaaaggcaatgatagtgattgtaccacaaagtcaatgaccaaccgtccatttgcgtatcgatttgttggatggtgaaaaaagtcattccgtatggagggttagagccatagataaagccacctggcctaggaactgacctggtgttgcccgtgtctgtaaaagagtccccaaaggcatagattttcttaaagggaagtagatttgttttggttattgcaatggagaatggaaaacaaaggatcataatagtgactattatattgatcatagtcatgattggatgagaagagatatttaaaatcacagttaaaaactttaacgtaatatatatgaagcgatttaaaaaaatatgtgcagctaagtatactttttttagtttgaagattttttgtttatttattgagaatggtgttaagtatatatcttgattaaatatgtgaggaagttttacataatcatatctcaatgcatacaaatagtaagatcgaggtttgctttgtactgattttgttattaaataaaaaaaacgcactctcacaaatagaaaattttctcttttttgttagttttttggtttcatattgtgggtgtaccacgattagcaccctcttgtttttctcatgtgagaattaaaaattacatacattttggtttttaagttcaataaaagaaaaaaaatatgtttggcatgacagccattagaagttaaatgaaagaaaatataattgaaaagttatttttaaagctttaaaatatcattagtaaatggatatatcaataaaaattaagattgcttttctataacacttttccaatgagttttgttattgtattaattaaaaaaattaaaatattttctaaaaaaatagtctaaactattttcaccttttaacattcaaaatgaaaatgaaattcttttttttttcttaaaaaaattatttt

SEQ ID NO: 400274 - DNA, 891 bp, Cannabis indica
ttttttctttttggataaaaaaaaaagtcatttattagtgacatataattttggcatctttaaattattattttctaattttgattctttttattttctaaacttaatagttatataaagtaatttatgcttttttcttacaacaatatatacatatagtttaaactttaacatataaaaattaaattatttttttagttaggtgaaatgttggtggagttcaatatatatttgaaagctctttcactatatatgtttttttcaaaaaataaataaattaatttatacatttttcttgtataatttgtatatatagtttaaacttcaataattaaaaattagtgatgagtgtagtgatattttaaaattattattttgtaatgttgattctttttattttataaaaactaatgattaaataaactaaattatgcatttttcttgcataatttgtacgtatagtttaaactttaatatgtaaaaattaaattaaactatccttagttttattttaataataactttttctatgaatatttatttgaaattttatatagaatttagaatactttgcttaatttggtatttttacattcaagtttattaatttaattctactatttaacaatgttaagtataactttttttttttatttttttagtactatatataagaaaataaaatatatactatttcttcattgctttcaaaaaaaaaaaaaaaaaacctaaaaatatactaatttggtggtaagtatttttattttaagtagataactcattttttcctttctatatataatataaatttaaaagagcaaaacatcaacacttaataaattttgtatcattaaatatttaatcttgtattttttttttgtaaggaattac

SEQ ID NO: 400275 - DNA, 1859 bp, Cannabis indica
aaaattgacaaccctagctgccctggtggattcgaaagagagagagagagtttgagaggaaatgtaaattttttgtccaaattttgatttttcataaaatgaattaacaaaaggttgattttatctaaaataatcagccaagaattaaacaaaattcagattactaaatgtaactaagtctactaaaggacaaaatacatagggggcaaaatgaccattttgcccctcccacactaaaacaacataaaagggtactaagggtattttgggaaaaattctaaattcccgactatcctcgacatttccaatgtctaactataaccccccactatacaaaaaatactaagatgtgattctaatagccaaacaccgcgttccgatgttgctgggcactgaacatgcaaaaatatgaaatttctatatatgacatataaaatgcattatgaattcaaataaaatatcataaattaataatttagaattaataaataaattccataattaaaccctaattaactgctaatgtccaaatttaagctaagcgttctttacaactatcccccacttaaaaggatttcttcctcaaaatcgaacctgaataactttggatattgagctctcatgtctgattctaactcccaggtggcttcctccaccttgttatttctccagagcactttgactagagctatggtcttgttccgaagaaccttatcttttttgtcaaggatctgaactggttgttcttcataagacatatctgattgcagcttaagactctcataactaagtacatgagctgggtctgaaacgtattttctcagcatagagacatgaaatacgttgtgaattactgaaagagctggaggcaaagctaattgatacgccacttgtccaagccacttgtccaaccttctcgagaatctcgaaaggtcctataaatctagggcataacttgcctcttttcccgaaacgtttgatccccttcattggagaaactcgtaaaaacacatgatcccctacttggaactcaacatttctgcgttttggatctgcattactcttttgcctagtttgagaagcaagcattctagctttaatcttctcaattgcctcattggtccgttgcacagattcaggacctaggtatttcttttcccctgtctcatcccaatggatgggaaatctacacttctggccatataacagttcatagtgagccatcgctatagtactctgataactgctgttgtacgagacctctattaatggtagatacatactccaagagccttcaaaatccataacacaggctcgtaacatatcttccagtatctgaattgtcctttcggactgtccatcagtctgaggatggaatgttgaactaaatttcagttttgtaccaatagcccgttgcaaactctgccaaaatttggaggtaaacttcggatctcaaaccgaaactatggactttggcacaccatgtagccttactatttctttgacatacaaatctgctaactgatccactgtatatgttgttttaactggtagaaaatgtgcagacttcgtgaatcgatctaccacaatccaattagaatcaaataaacctgtggttctaggtaacccaaccacatgagtccattgtgatgtcctcccacttctacacaggtaaggttaaaggctgcgacaaccctgctggtctctgatgttcagccttgatctgttgacaggttaagcatctcgatacgaattctaccacattcttcttcatttcgctccaccagatgtaaggtttaagatcctgatacattttggtggtgccgggatgtaggaaaatatggagtggtatgagcctc

SEQ ID NO: 400276 - DNA, 679 bp, Cannabis indica
attaattcataccaactgcttgatgaagacatcatctttaataatgacgaatttcaatccagagaaatcaacgatgaattggatgtagaaattccagaggaagatgttacaacgtcagacagacttaatactgagcaacaccaagtatacaatgcagtaatggaaagtatttcatcaaaaaaatgcaatgcgttcttcgtggacgggcctggtgggacaggtaaaacatacctatacaaggcattgcttgcaaacgtacgatctaatggtgtcgtggcactcgcaactgcttcatcaggtgtggtagcatctattcttcccggaggtcgtacagctcactcacgttttaagcttccactcgatgccgatggaaaaagcacatcctgtgtcagcaaacagaatgcacttgcaaaactactttgtgcagtaaaattaattatatgggacaaggctccaatgacccgaaagcagcacatagaagcgttagataaaatgctataagacattaacgatacaaccttaccatttagcgaaaaggtgattgtttttggaggagatttttgacaggtgttacctgtggtacaaaaaaggaacgagataggagcagataaattctagcttggtttattcatacctgtggtctacattgactaaatttcgactaattcaaaatatgaga

SEQ ID NO: 400277 - DNA, 610 bp, Cannabis indica
agtatgttcttgtcactgtatatttgtccttctcgatctcaagcaccatgtaatctgtgattatctccatttcctcatcccttctcttttttgttgcttcattggattgctctattataaagtctgcaacttgttcagccatggcaaacatgttgggggcaattgtatactgacagtaatcatgatttgaatcttgtccttcaatatcagattgttggttgaatggttcgtcatgtatttgtagaaccagttcctccactgtcttcgtttgctcttgtattggttggtctgaagattgattttccactgtttgtatagccatttcttctgtagttgtgatgcatagtggagaatcagttactccagcttgtgattttctcagctcaatgtagaacttgagagaattgtcactcagtagcttcatcggtgttgtccccggtgatatctggtaggatatgtctatgttgcttctgctgcagttgatctctgtttttatcagctccatcaagtttgctagtgatgaattggttggaattaattcccgtcattgtgtagtcatcataatttgtattttccctccattgacccccatatttgatgacacacatga

SEQ ID NO: 400278 - DNA, 548 bp, Cannabis indica
tcgacataaataatcaatgctgttaattttctaccaacttagtgttttataaaaaaagtatgattacattggcactgagtgtaaccatctcctttcaacacttttctaaacctgtcaaaccaggcttgaggggattgcttgtggtcgtagagagattttttagtttgcacacttttccctttgagaaccggtcttcaaattctggaggaatgtccatgtgtacttcttccacaaggtcaccattaagaaaagcattctatacgtcaagttggaataaaggccattcattgttgactgcaatagataagagaactcggatggtgttcaacttagcaacaagagcaaatctcttggtaatcaatgccatatgattaggtgaatcctttagccactaatcaggctttgaatctttcaatgctcccattagctttatacttgaccaagaagatccatttacaaccaactgtgcgtttgccattacgcagatctgtgatgatccatgttttattttttttcaagtgctttaattcctccattgtggcagcatt

SEQ ID NO: 400279 - DNA, 504 bp, Cannabis indica
aataaataagttataaataattctaaactatctatctagcaaaaccaaaatctttaaaaatttagaaacatatttgtatactaataataaaaaaattactataataacatttcatcttattaaatctaaaaaaaaaaaaatcatcttatctttgactacaatttcatattattaaaataattaagaaaaaagctaattagaattttttgtcctccaaactttgacatataccaaatcgtactctcaaacttttcaagttgttaaaagttttccgcgaactattgaaattgttagattcaagaactttcgtctcattttactaacaatagcctgatatggatgaaagttcaagaaatacgatttaatacacgttaaagtttttggggcaaaatttggtacatatcaaaatttaaaggacacgatttagtacatggacagttgtcacgttagtaaaattgaacagagttaaaaaaaagtcattgaatccaacaatctcaagagttc

SEQ ID NO: 400280 - DNA, 851 bp, Cannabis indica
cagctactgagttctttcaggtaggtaatatggcttaatttccccatttttgtggaacttgcaattgatgtgtttagattagatgggttttacataatgttcttataggatgtagtgtgtacttaagtccttctaagttagctttgatttaaaattatgcacactatgttagagtgtggtgttttacacataaaatgtttaaattttttgaacatttcataaatatcatgggtcactttcactaatcaacccccatatcgcgagccccaaaagaaaaacattataaagaacatgagttacttcactgatcactaattagcttttagatggaacctgacgatacatgctatatgaagttggatgttattcattctgattgctgttgtgtaatgttgttgagtatgactgacctattgtcttcaattttcacttgtagaaagccataagtgttactccacaaatggcatatcagctgatacaggtaaagttcccacattcgtttgacatcatacgttttctctttggcggttgaaagtccattttcttccttcaaacttgacttggtttggttcactactaattcctgcactgatgaacttttagattttgagatcagagaatatcgaattcgtggtggctccatatgaggctgatgcacaattagcatacttatccaatcttgagccagaacaaggtggaatttcagcagtgattacagaggatagtgatcttatagcatatggttgcgaagctgtaagaactttctctaccttagcttcaaggattaaaaaagttcttctaggagaatttggatgaaaaataaaatgtcatactcaacaacattacacaac

SEQ ID NO: 400281 - DNA, 1168 bp, Cannabis indica
gctttctctatcctgactgacgatctggaaaccatctacatggccactcagtcagtggttccgtacaagaaacctgctcccatgaaaaaggacataagtaagcgggacatgtccaaattttgccattttcatggagactgtggccatgacaccaatgaatgcaacaatttaaagcgagaaattgaattcctaataagaaaaaataacccacacgtacaaaaatatgtcaaggctgaccagaatcagagggccgcccagacagataataagcaagacttagtattgcctccacagtagatgggcatttgcaagtcatcattgggggtctgcatatagctggagattcgagcaaagctcgggaaaggtatgcccgaaccttacaacccgaacaaaaagaagtggtgctggccgtagaagaaaggaaaccaaaaataccacgggtaggggaacccactataacattgaatgaagaggatgctgtcaaggttcgcttcccacacaatgatccattaattgtggaagtacaggttactaacaaaacagtggcccgcactatgatagacaatggagcctcaacaaatatcctgttcaaaacgccatatgaaaaaatggggcctcaactcaaagatttgatccgttgcctccagcccgtatacggtttctccagccagagtgttgcacttttagggcaaatttgcttacccctcactgttgggaaagctccaaagagcataactatgatggcacaatttttggtgttggatgttccatcagcttttaacgtcatgttgggccgaccaaccttatacgacttaaaagttgttacatcgatattccattcgtgcatcaagttcccaacaaagaatggggtagggtgcctgagagaaaaccaacaagttgcacgggaatgttacaaccttgccctaactaaggctaaaaaggaagaatcgtccagtcaaagttcggacaagggaaagagcattgccaaatagggaaccgcccaaggcggggacgaagatgtggatccctaacttggggaaccaaatacaaatgttcgaccgatggaaaaattagaacagattggaattgacccaagtgttcctaccagaaaactcaaaattggataaggtttgtttctcgaagtaaaatcagcactgataaaatttct

SEQ ID NO: 400282 - DNA, 705 bp, Cannabis indica
ggtgtgtttcttagaaagaagcccagcgagccacaatgatggctaatggcagaccagagcactttctaagcatctctatcgctactttctttcttccttttttcatcatcacttgagtctgaatatatccattgaaaataaacaaaaagaattatgatttaagtaatggaggcttacatattactactagattttcatcatgtcaaacatatgcctaaatataattaaattgaactctgccacttagcttttatctcactaatgccaatataatatgtattagaatacttagaacaatattcttatgaaactctggcaaagctaaacatatatctgtttaacacactaggaacatatacaaagccaacgaatttgacattataaatataaatggtagcaaagattaaaaaaaataaagaagaagaagaagaagataattatgaccattgagttaaaaagaatgaagtatagtatattacttgcaggatctgttccaatagaagagcacttgttctgaaatagttcccaactctccttgtcattgagcaaatgaggttcatggatgaaaccatgtggatctgcatgcaaagctacatccttattccgagtagtgagtaagatcttgctatgtgtgtccccttgagtagtagggaatacatgttttagaagatcccatgttgtagtggtccatatatcatcaagaac

SEQ ID NO: 400283 - DNA, 548 bp, Cannabis indica
atattataaactagggaactaaggtattcacaatttttgtaatctggtattagtggtatgaaatgtatatttcattagagttattaaatttaggggtgtgctcaaagttatctgatccaattataattgattgataggggtgtgtaaaaagtgatctaatctaattacaaccgattgatccaatctcaactgatccaatagaatcgaatatccaattataattggatcggattggatgtaaattttgaaaatccaattagatcgaatcaatggttggatgggacatctaatctaatggataaccgaccaaaccgatccaattattatccaatcatcatctaattatatttatataatttaaaatacatttataattttatttatttaatatattttatttgaaaatatatattaattgaattaatatataatttaacacatgagattaatgaaaaaaatcttagatctaaaatattaattctcatcttcctaaacgctaataaaattgaataaattttatttttagcagttttattatgagatcatga

SEQ ID NO: 400284 - DNA, 1380 bp, Cannabis indica
caactgtatctcgatccagtacagaagctgagtacatgagtttagctagcatcactgcagagatcacctggatacagtctctactttctgaacttaaagtctcaattcctcgatcaccaactgtctggtgtgataactccagcacagttcagatggcagccaaccctatactacatgctagaactaaacatattgaattggatctacgctttgtgcgagaaaaggttctggcaaaaactcttgctgtcaaacacactcctgcttatgatcagacatcaaatattctaactaaagcattgtccaacaacagatttgtatttcccagagacaaactcaaagtcgagtctctctccaccttgagtttgaaggggactgttaagaataatacttaataattgtaataacagtttttctgttttctgttatgtctgttggggttcaaagatattcttgtcctttcccttttattgtttatttcctgtatataaaggatgtaatcactttgctttaatcaatgagaatcagtttattccttttcttgctttatttcgtttccttactctcttgcccctttggtatgttgatttgtttccatatccatatatactgcaatttatatcctaatgaatttcggtcctcttagtatcttgatttgtttccatatactgcaacaagtaaccatggagtgttataaattctaatattgcatgtaaaaattcaaattatagtacttctataatatctaatatattacattatttgataatatataccgacaaaaagataaaatctacatttgataaaaatactaatacacacatctgtataccatgtataaacatatattaatatatataatactcataaaacaacacacatatttttattagaatcatttcattcaatcttcaggcaatgaactcaaataaaattcacatatacgagtagaagaatatgagtagattactcaaatgttgtcaacacaaaaacaagaacaggccaaaccataaataaaataaaatagattaattaagcataaagatataagaactaaggaataaagaagtagaagcatacacaacccactacctagactagacatgagacatcattacgactttctccttcttcataatagtggtgttgtggtgtgaacaaacaatggtttatgtggcataaaacaaagaatatataaacgaccttcacgattaagagtataagagcatgtttggtattgttttctgttttttatttttaaaaatttgtttttcgtaaatgaaaaaaaaataagtttttgtaagtttttaaaaacaagttatgtttgcttagtgttttttaaaaactaatattggctaaaagtgaattggtttttaaaactag

SEQ ID NO: 400285 - DNA, 583 bp, Cannabis indica
tttatacaccttatacattatagaaatagcttctcaacaactatatttctatagctaccattgaatcacattcaaatacaattagtaactcaatttattaattaagagtgataatatagagaggagttgcaaagttcgttattattatctttcaaggattttcaactatattttatgatttatgttcaaactatataacttcctatacctatataattcttttcttaacttttttttttcaatggggcaaccgccctctgttgtcttcatgtgagtgcgtcggtgagcgtggttagcaactacttaaacaatattaatttgtagtattataaattatttaatttttttttaaaaaaataagttaaaagttaactaatatatacactattataaaaaaaagggtaaatagtagcataagtacccaaagttttatgtttgtaagcggcataaacccaatgtttatttttagcggtataagtacctaatgtttgtaaaactgtaatttttctctaattttgtcagtacagactctgatattgtcttaaacagggcacatataaagcctaaatttttgatcatcggg

SEQ ID NO: 400286 - DNA, 703 bp, Cannabis indica
tctccatccgtatgcttaaggtactttattacttaagttttttttcaatattttttatctttctacaaattttttttatcaaatatgtaaaacataatgaaaaactccataacataacatagaatatgtgtttagttttagagtttcaaatcctcaatgtccttggatgtacgacgacgagcgtacaaacaacgttgatgattgattcctcacaaacatttttgaattagctgaattttttcatattaaatttaacaagatttttgtaaatctcttatttattattttagataatagaaacaataataaaattattataaatttattatcaagtttattataaacttattataaattttactagagtagttttatacatctttttgaaatttactgttattttactcttaacaatttttaatttcttaggttgaccaaaaaagtgaaagaattattgatttcattgcattatgttgtctttctattgcttagaagtcaatggacaaacgtttctccatccgtatcttaaggtattttattgaataattacttaaaattttttcaatattttttatcattctactaaaacaattttatcaaatagataatatataaagaagcactccataacataatacaaaatatgtgtttactattggaatttcaaatcctcaatgcccttggatgtactacgacgagcgta

SEQ ID NO: 400287 - DNA, 1056 bp, Cannabis indica
tcaattattactctactataaatgtagaattgtactatttgacaatataaaattatgtttatagaattcttacttgtagtctattaaaataatcaatattagttcacctttcaattattatttcataattagatttggttaatgtatcattttacccttctaattatctcttgattcatattaatacaatgtgaatagttaatccataactcattataaatttggatctaactgttacctttcttaaaattaacactacattgaaactaatattcgatctgttgaaaaagttttgattccactattgtataacatgttctcaagtactcatattataaagcttaaaaaacagaagttgtaagaatcatcttctctgagaaactttaacgagtgaaataaagaactcaatgaacacaaacatgagttcatgtatatactcaagattcaactattaatgatcacccattgggatatgataaattctttttatggtaaactaaaagttaatgaaagatatttattacatatcggttcagtcatgcataatctaattatacacagtacttttattgcttgtccatctacatatgtgatccgaatcaaaatcacacatgctagaagtattgtgtctagtaaactgtacttaccagtttcatattaaaaattttctagaaatttaatatactattgaattattttattcatatcatataatcttgattctcttgtacacccttacaagattataccttctccatatgaataatgaattttcagatatttaataattgaactgatataactaatatataatttatcataaagtctctctcttttgagtgtgttatacgtatgaggtggtgaaaagtccttgttttgaatcagattttatatgtgtgtgctgtggtgttcctgctgcgtttaagattgttgaggagtactcccagtggtgtttgctgcgggtgttatggcttctagcagtcatgtgttgggtaatcttgctgatcaatatgagaatttccagattgatgatgaagaagaaggtgttctgatcga

SEQ ID NO: 400288 - DNA, 501 bp, Cannabis indica
aacttgttgactaattacgtttttttttactattgcgtacggttataaaatgaagcatagatgaggtaatagaaattacaaatttccctacaattttccgacctacattttaaatttagaatcgtttgtataacagtaaaagtatatataatcgatgactataaaactaactataactaaatacaaattcaaaaatgttaaaagtaacgattataaaacttagataaatattttataattagtaatcaattttatgatcgataacaaggtgtttctcgtccgtccatgtctggttcccggaatccatttatcaaatcacgtacgatgccggcggccaaacctcctcaatctgatcgatcttttatatattattctctatcattgtgtgcccagcttttcaaaatttcgaccaatattgtatatagatgaattataaattgttgataactctagacattagagttattttcacattttttttaactaaaattggcttagttc

SEQ ID NO: 400289 - DNA, 852 bp, Cannabis indica
ctctctctctctctctctctctctctctctctctctctctctctatatatatatatatatatatatctacacgcaacacactactatgtgtgtggttgtgtgatttttcccaatctctattatagtgtttcataagttgagatacactgtaattaaaaaagttcattcatcttataagatatataagctcattctcatcttaagtgttgaggttgatctagaaaatttggtgtggattcttcatcaagcccgcaaagctttggatttgatgatcgaacaattatatgaaaagatgcaaggatttcctgatagacattaagaggtaatatccttatcctaaaattacccagatatgacttggatgaggaactagaacatttccatcctgacataataaacacaccatacccaagatgattcaaaaaccctcatatgtccccatatgatggtactatggatctcgtgagccatttgagtaattttaaaactattatgcaagccagcaatgtaggtgatgcgtgtcgtaagccacaacaaatttactaatatttaattctaatacctcaaattattttagtataattgtaagtaagggtcgatcccacgaggactatgattactttattatcctctattaaacagaaattaaagggaagttttaagttgtaattaaatagcataaaaaaagataaaaacaaagaaaaattgagaatacgatatgagaaactagttaaaggttatttgccacccttgacaatcgttcatgattcctattaatgaatgtaattttcagtttccaatcaaactattaatcccgcagataatgctaaagcagtcaattatctcaatctc

SEQ ID NO: 400290 - DNA, 581 bp, Cannabis indica
aagaagttggctactaaggataagccgaaaccaggaaatacttagcagcaggttactgaagtggtttctgcttctgtttctgagcctgaaaataggttggatgagtccacacaggtgcaagcaacaaccgaggtaaatggtcagggggtttggcataaacccaaaaagactattcaggggaacattaagaaaaatctgagtgttagtgatgaattacagcagcagcaggtagttatgaactcttttagtgctttacaacaaggcagtagggaggaagctaatctagatcatgagcaagaagggcacaagatttctactcaattaccccatggatagttgccagatagcgtgttggaatgttaggggtattaacaataaggagaagcaagaagttgttgctgaattttgtaaagttaataaagtaggagttggtgcttttttagagaccaaactcaaagagaataagattaaagagatgatggataataggtttgtcaattgggattattacacaagtgccactatagaaggaagacttttgattgtttggagaaaaggctatgttcgaacattagttattg

SEQ ID NO: 400291 - DNA, 557 bp, Cannabis indica
gccccatataagaagcccgtgccaatgaagaaagatgtcaggaagagagacatgacaaagttttgtcaattccacagagactacggccacgacactaacgaatgcaacaacttgaagcgagaaattgaattcctgataaggaaaaacaacccacacctgcacaagtatgtcaagaccgatcagggtcagaggaacgacaataaacaagatttactacctccacccgtagacggacatctgcaagtcatcgttggaggcatgcatattactggagattccggcaaagctcgggagaggaatgcccgaacagcccaacacgaataagaggaagttatcctggccgtagaagaaaggaagccccaaattccacgagcaggagggcctaccataaccttcaacgatgaagatgctgtcaaaatcagatttctgcacaatgacgtgctggtcgtggaagtccagatagccaataaaattgtgtctcctgcctgtctatggttctggtcaaaaagtcgcacctctaggacaaattcgtctacccctcgctgttggacaagctc

SEQ ID NO: 400292 - DNA, 938 bp, Cannabis indica
tatggtatgggtgtaattatttaaagagttggaacatgttgaatggatatttttgtttgagctatttgatttaactagaaatataactagttctgtaacataatgaataaaaacaaataacacgaaataactcaaaccggttataattaaaataaaatcagttatataacataatgaatgggtatttttgaagtagatatggtatgagtgtaattatttggtgggttggagcatgttgaatggatatttttgtttgagctatttgatttaactagtttttgtgtgtgtttttattttagttgctaggaaccaatttttttgtcttaattttttaagtagttaataaatataaccgttttttatattatatttgagttattgtgtgttattatttgtgtttatttattatattatggaactggttcttttcatatttatgcctcaataatttttgaatttgatcataattgattttatgaggtattatgtgttattaggttatttattgtagaactagttttgtttttaatttatgtttcagttttttaggaattgatttcccttttattttttaattgtaatcggtttgaattattacgtgttacttgtttgtatttattatgttatataaccagctttgagttatttcgtgttacagtagaacctctattcaagaatagacttgggactaagcaaattatattctaattgagaggttataactaaataaagttatactagaaaaaaaaattaaaatactaaaaaatatcaatgtaacaataataacaataaataattattaatactacattataatagaattattttagagtaaatataatagtaatacatatgttacaatttggaataaaattattaattttatgtaaataaatttacaaaacatatgtatatatttgattaagatgtaattattc

SEQ ID NO: 400293 - DNA, 629 bp, Cannabis indica
atatatatatatatattgatagaaaactctcacaaaatttttaaaaaatagaacggaaataatataaaaatactttttcattttcctttatcaaggtaaaaaataaaatacttatttttatctctgatttgaccatttaaataatttaaactaaacttaataaaaaaaaaatatagcgaaaaatgctaaaataaaaaaaaatcattttataaaaatattatgttctaatatactaaaattgaaacaataaaaacataacaaaaaatatatatataatcaagagtgttcaagtagtcatataggatattgacaatcactttttatatatataaaaaaaaataaaacagaaaattttaacttttgaacaaataaacattaagagaaaatattttagttataaaatattaattttaagttgaacaaataacaatgtaagaatattgaatagtataaataatttttttttttcataaatatgtataaaaatattaattactaaaaataaaatatttataagatacttataggataaaacattgactaagaaaataaacgtacgtaactaaagtattatccatatagataatacatacaagtttttaaatatgtgtcataaaattagaaaaata

SEQ ID NO: 400294 - DNA, 817 bp, Cannabis indica
atctcttcgatcaacttcagggagagacgttcttttcaaagattaatctcccatcgggctatcatcagttgagaatctgagagggggacattccaaagacagctttccgcactagatatggacattatgaatttctggttatgtcttttggactgaccaatgttcccacagctttcatggacctgatgaatatggtattcaaggatttcctcgatatatgtgtaattgtatttatcgaagatatccttgtgtactctcaatcaaaagaggagcatgaacaaaatctcttgatggttctgaaatgacttcgagaacataagttttacgccaaattcaagaagtgcaaattatggctatctcaggtatccttccttgggcacattgttagtaaagacgagatcaaggtggatccagggaagatagaatccttcatggattggccaagaccggaaacagttacagaagttaaaagcttctttggtttggctggttattatcgtcggttcgtagaagggttttccaaaatttcaacacccttaacggatctcactaaaaagaatcagcgtcttgtgtggacggataagtgcgaagcaagctttcaggagctgaaatagagattaatcacagctccagtgttagccttaccttttgataaagagaagtttgtggtatactgtgatgcattaagacagggtctggggtgtgtactgatgcaggctgatcgggttattgcctacgcctctcgtcagttgaatgattaagaacagtggtacccaactcatgacctagaacttgccgcagtagtttttgctttgaa

SEQ ID NO: 400295 - DNA, 652 bp, Cannabis indica
cttgtccatttccctgaggcctgtatactacaagaagcttttgatgattttattcttctcgcagaattcattgaacaagtcgccatcaaattgggttccattatcgaatactatcttcatgggaattccaaacctccagataacgtttttgacgacaaagtcaaggactttcttgcaggttatggaaatgaggggcttggcctccgtccatttagtgaagaagttgattgctactaccgcatacttagctcctccttgcccagtgcttaatgccccaattaggtcaataccccatatagcaaatgggtagggtgaggtcatcattctatgttttgttggcggtacgcgaggtatatgtgaaaacctctgacacttatcacatttcttgacaaactcgtgtgtgtccttattgatcgttggctattaatatccttgtctaatgatcttcttagacaagctttgccagcccgcgttatccccacagaagccctcatgaatttttctgatgatttcattcgcttctgcaaggagaacacaccgaagtagggcattgagtaccctcttctatacaatttgcctttgatcattgtgtagcgaggctctaaatataatagttttcgtgcctcgtttttgtcatttggaagttgtccgt

SEQ ID NO: 400296 - DNA, 546 bp, Cannabis indica
ttttaactggatttatttttagctgttttggagtatacctctcttttttcagtagttttatgtcttttttttttcttttcaaaatcaatttatgtgtattaattataattggtaagcccaattgttggttgtttttactttcttgccattgtagacgtcttcattgacgtttttgttttttgggggcttgctttatgatgctgctttgagaaatagaatgggttttatttaatgtcaggagactacttggaggacttacacatattagattagcattatgtttggtgagagggaaggaaatgaggaaggagggaaaatgaaaacttaggtgttgatgcaatcttttgtaattgatttaagaagatcgtacaaaataagaggattgcgataaatttatttgactaaataaaaccgttataaataatatagacaccagagaattataattgttcactctcatgttacgatgaaaatggggttatgtctacttttatttttattgattagattcgacacagtagatttatgttcttaagagtgtgtaga

SEQ ID NO: 400297 - DNA, 994 bp, Cannabis indica
catataattgggctaaaattaaactctaatgtcgaattttacttatggactttagagttagatttttgtcactttatttcagctaatgaaactaaagttccaaattttagcaattttctcatctaattatttaaataccaattttattttaataattataaataattaccaaataaaatacaatttaaatatgtttattaattagacccacaacgagtgctaattcataaataaacccctatttctcttttcttctcaaaattgtccaaagttggtgaaaattctcaaataagacatagtatatttttgaattctaattgacttattaaattaattagttaagtctacaagatgatattatcccagacagtgtggggaccacgggccgatgcaaccaagctcctaataagtagaactaaaatttatcgagcaaattttctatcttattagttgctcctaatttcactatagattcagaattgcattcttgattacatagaacgctctatatactaaatatagatacactatgtattatccattgtttcaattacaacaatcattgatcctctatagactgttaaaattgaatatggacaaaattactgttttacccttcaatatatttaatgcttcaaacacttagctacttgtaaataatatttcaggaaactaatataattaccaaaattagtgctctatcatttatcgcgttaagaaaaaatctaaggaaactatcgtttcacttctaaatagttatagaagctacagatgtccaaatatatgattaacactcccactcaattgcactatcgagttcctaagatgtaagtattgagctggttctacggtaagcttataacgaacaagtctaagaacttgtgcaacacacttaagtcagagcttaactatctcaagattgcgatcaaatgatctatgatcaactaagtgacattgactaagaaaagataaaatagtaagtttatgatatctt

SEQ ID NO: 400298 - DNA, 942 bp, Cannabis indica
aaagtggttgcagctctagttgtaataggagtttctatacgatttttaattgcaataggggtttctctgtagaaatttcgtaaaaaatagacaaaaaaaaaaaaaaaaaaaatcaaatctggtttgaagtgtaaaaaatgaaaaaaaccccaaaaaaaattatggaattttttttggaaaaaaaagttaaaagaatatagaaaaatgggagttatatttgcactcaaaactcaaaagactaaaaaataagtatgatggtatgagtacacctcagttttattttattttcagaaaaaagttaaaatatatttttattgtttagtgaaattattaaaatagataagttctatttttattattttaataaatatattcccacacattaatgaaactaaaattgttttttggtgcctgaaactgttctaaaagaataaattcatgtgtaagttaataattacggtgtattaattatactatactttaaaatataatgtggtatgtgttgttaatgatatatgaatttttaatattttgtttgacaaaataattagtaattatacaagaatataatattttttttaatagttaatatttaaaataaaaaaaaaaataataattatatggtataattacactcaattctcatgggagccatgagattcatagagtgtaattggaacctcttaattactcttaattacacaattacagtgtaattatatacatggtgagacaaacatgtcaaattatgtaattaccttcaattacactcaaatctaattataccatgacaaaataacaagtggaataataaaattcaagaaacactgttatttttagtgatacttatttaatatgggagataatctaataaaaagataacaacaacatgtgattggtaaagtttattgagaaagtttattgtccatttaaaggcatatt

SEQ ID NO: 400299 - DNA, 1549 bp, Cannabis indica
attttgttttattattttacggttattttataaaaagatagtatttttataaaaaaaattcgtgtggcagtaaaattgtaaatttttactaaaaatccagtatttttataaaaataccttttgcatttaaaagattttgattataacataatgggccgggaggaacggaacacggtttggatgtaagtcgtaagatgtagaagccatagctcaataaggaaaaaaaaaaacttagagcttactattctgtacaaaagaaaaaaaaattgaaaaatgctaaggtatcaacatcgccaaaagacatattgttttgagagcacatctaatagagagttgtaaaaatagttgattgctatatttgaacatatcttttgttcaagaaaaatgaagttctaattttgttatataaaatgtgtaatgaagaataaactaaacttgcatgcaccacaataaatatcacatttttttattacctaatttgccactaatttataatttttattaaataaaatctttttttaaacattttattattcatttaaatatagatttgttttatatatagtttcaataaaaatagtttcatttaggttaaatatgatattaagttgtgtacagtttttagatttttaacctcttcctctcgttttttgcttttaccgatcacctccaacactatgctccactttcattttatgtgaatcaaataaattgtcatttaaaaattttacaatatttttaacattagtctctaattacaatgttattagttattggttcttggtttcttagttattggttttggggtattagtagtttattacagtggagagtggcgtggttgagggggtccttcttttttcatttttggttatatttatttagtaaataattaattataattcattttaaagtattgttcacgatcaggctttgcccaaagatgattctcctgcccaattttcttagtttttacagtgttagaacatccttgccgggaacatatatagtttgcatagtataagtaccctactagtactactcatgaattgcaacagaaccgatgctacattttgttttatctaattttgtacaactagattttgcgggatgagctctctacttaattaacagcttgttccatattttattttatctttttttcacattattttaaataagtttatttttaaaaatattttattgtataatattctttaaaaatattataattatgatttcacatattattatttaatatttattttaatttttagttaaaataattttttaatttcaattttttatagcatccatgtaaatttttcgaataatattattttttatctaataatatagcatattaatatttttttcacataatatatcaagggaaacttacaaaaatactagaattttggttattttttacaaaaatattgtcacacgaaatttttttcaaaaatactgtatttttgtaaacactattagaacagagaacagaagaactcaaaacaacagtagaacaactaaaaaacaccagtagaac

SEQ ID NO: 400300 - DNA, 1176 bp, Cannabis indica
aataaaagaaaaaattagatagagatgatagagaagaagaagaatagatataagtaagatgacagagaagcacgtgtgtagtccatacatacaacatgaaaacgtacttggcaaacgaaacgtactctccatctccattatatattgtgccttaaatcgaatgattgggttgtggctgcaatcattgaagtcgtgctctttacaacaacaatacaccaaacacctctctctctcctatttttttttcactttttaaaataccaacctatcttcttcttatactactttattattattattattattatttattttaatactgtttaatataattggtgtttcggatgagatataccatcatataattcataattatttaaaaagaaaatgaaaattgaaaatttaaaatataagtttgtgtattttcaagtcatgactattagagggcgattggtacgtgtaataaatttaaaataatcttaataattagcaagaaattacaatataaatataattaattatctaaaaacttataaatatgtttaattgtacatgaaaattaatgtataattagattaatgttagttaaattattttgtttggcttataacacaataatatgataaattgggtatagaaagtaaatttaaaagggaaatttgataatttatgctaaaaaattagatagggtgtttaattatacccaattatcacacataaaaaagctataccaatctttcaattttcttccaaaaatatccctgtcttttcaaacttctcacattccctctaactctattctctctcttctttccctctccccacccacgctgcaaacaactaccaaaacccacgaaccccaatcgcagacgaccaccagacgaccacgaacccacaaacccacgaacccacgacgacgacgaacccacgaacccacggccaccagacgaccagaccacgaaccgtcgaacccttgaacccacgacaacccagacgaaccctcgaacccactccaatcgaccccatcgacgaacgcccgagcgaacaaggagacccagtcgaatcccaccaaccccaatcgcagcaatccaggttagtttttgtggaattttttctttgaatttctcctttaaaatgcatcatttgtggttgaatctggtattgaattgaaagttg

SEQ ID NO: 400301 - DNA, 643 bp, Cannabis indica
tttttatatcatctgacaggtaactgtgtaaacttattagttattttatgtagaaattaaaatagcaaaagcaaaaactgtttctaggttcttcgaggaaattaaagaaagggctagattgcattttaatgagtatagtgcataggaaacttacaggcacagactactttcaattttcaaatatatatttatatgtcctttttctatttctgtgtgtaattaatctcctgtgacgcattttctaatttctatagacgaattaagggaatcttcttttaagatccaaatctcatatgtaatactactcttaccattaaaaacaaaaacccaattgttaacaaaaatcattattatttttacaattgtacgtgtataatactaatcagttggttttcctcaaagaaaaaaaaaagactatgtgactggtctcaacgaacatatcaaaattatactattattgacaccttaccttaagcaatactcctaaaagactcttttattctatattcgttattgtactttcacagattgtaattcgtgatgtacgatatctgtcaaatgaaagaattatttgatctgacggctaagattgatctagaaataataaggattaaaaagtagaaacgtaccctgacactcattt

SEQ ID NO: 400302 - DNA, 998 bp, Cannabis indica
tttgatgttattggcctagtcaaccataactacttcttgctcaacccctattacagctctttccaatctttctctctttctgttctgtctgcaagtcttctctatttcaggataataagcaatctggcagttgctcttggacgtcgcataaactagttgttcttgagaaaagaggaaaaaaaaaagcttgacacaaacaaaattagtacaaaaatcaaaaagaaaaaccaaattaaaacaaaatttaattttttataaatattaactaacaatccccatgaacgatgctaaaaacttgttgtggtatttttaactcgcaagtatgcgtatcgttaacaagttatagactcaaaaagagtgaggtcgatcatacaagggttgtagttaagtactttaaaattaaacttttacttctatttggctatatcgaatttaagagaaaatttaaactagaaaaacaataaaattaataaaaacataaagcaagtaaattaatatgtaaattgacgatgattgaaggttggggttattgattttaattatatctctctattatggtctaacatgattcagttccttttaccaaattctatacaatagcaagtttactcaattaatttatagttttctcagatatataaatctcaattacatgcaaatttttttactctcgtgataaattaaatatgtaaaaggaattaaacacaaaaactctataagctatccaaaccacataaatactctcgtcctatatcaaaatttgtttctattttactatagtataattgacactcacttctcagatttcacataaaaatcataaatatttaattggtgatcaagcaattaaaagtaattaagtacgaataaaatctaaattatttttgctctctaatttttgttccctctaattgcttgctaattaaaagttttcgagttttttgagctcgcaaaatgtactaaaaacattaataatagtgtgtttatataggctaaaa

SEQ ID NO: 400303 - DNA, 646 bp, Cannabis indica
gtagttattgatcgactatagatagtttgttaatcattgttattgaacacgagtagtgcctattatattttagatgtgattccctacgattagttaacgatattttttaaaaattattatattgaattatataaaattcgatatttaattgtaccactagcaatacaatacctaagatggtactaggaactagtaatacattttagcatttttctgtgagtattgttattacacgctagtagtgccgaacaccttttataggtggggctctattattggttagcgatatttcttaaaagctattttttttaaattatataggactcaatacttaactataccaataacgatattacactaaggagagtactaggcaccaatagtattttttggcagtttttttctctgctgctacaactgctttgaaggcattattagtacctcatgtagctcaagctgttgatgttttttaagggatgcttctctgtctccgccttggctcctttcatattcagacgtaggtgtaggtaatatttagtttggtagaatgtaatagtaattgttgaccgaggttttcggcaactaataaatatgattataatattgagctgtaagaaagtgagagaaggattttcacgtggttggg

SEQ ID NO: 400304 - DNA, 1287 bp, Cannabis indica
tctagaagtatggtggtggagaagctaagggtagtcgtgggctttgagggggctatttcttttgatgttcaaggcaaaagtggtggagtagcgttactatggaggcatgagaatgaagctcaactattgggctatggtcgggattatatcgatgtagagattgttggggacaatggtcaaaagtggcggttgacgggtctttatggggaaccaaatagaagttatcgcaaacgaacttggaatcttattcgggatttaaaagctaagtctgttttaccttggtgtattattggggacctcaataatgttacttctcaatccgacaaacgtggaggtaatagctatcctaattggttaattgatgggttttgtgatactttatctgattgtgaattgatcgatttggagttgtgtggttatccctttacttgggagcgtggaagaggtagtccggattggattgaagtgagaattgatagagctttagtgagccaatcttggctgaatttatttccatccgcaaagttatggaatcttgaaactacaacctcagatcattgcccaattcatctagttcccaccactccgttgggaattgtcaaagccaaaatttttcgttttgaaaattcttggcttaaagagcctctttgttacaagatcatcgaggatgtttggagtgctaacttgggtagtcatgttatggagaaaatcaaaaggtgcagcgatgttttacttacttggggcaaagactactctggaaactttcaagaaagattgaccaaatgtaaagcggagttgagaaaatggaagaatggccgtgacccattggcggtgcagaaatacaaagaagcagaggttgattttaataatgtgctattgcaaaaggaaattttttggaaacaacggagtaagcaactttggttgcgagaaggtgatcgtaattccaaatattttcatgccatggcttcgtctcggcggcgtaataattccattcagaagcttcggtctacttctgggaattgggaaacttgggatggtggcctcccgagcttgattactagttactttgcagacttatttactccgggagttgttgagggagtggatcatgttgctacggtttcaggaagggtgtctgaggttcaaaattccatgttactggagcctctatctgatgaagaaatcaagaaagctttgttccaaatgcatccagataagtcccctggacctgacggcatgactccgggtttttttcaaaaattatggccggttgtgggtggtgatgtg

SEQ ID NO: 400305 - DNA, 739 bp, Cannabis indica
gtataaatgtaaaatttgaaaaatattagtacttggtgtaaattttcttaaaataaatatcggtagaaattatctacaatattaatcaaaccacttaattaataatcgatatatggtattaacaaacaaaagagaaattctataaaaataacacatgtgttggcacatgttgcccttaattttgctcaaaatatgtggatcaatatgatgacgacacgtggatctaagaggcgtgactcttaaatcaatcgactaagtctcttggcttcaggagtgtcaataggaaggtacctcccggaggagatgtgaaggctccacatactcccggaggtcagagccatgataaaacaccttcgggagatactggactctatttgaacggtcacctcgcatttaatgccgcatggaagaaaacgtattggaactaccataagcaataagtctgacggcgtaaccccccttttgcagctattacgctatgagtaataaggctagtgactgctactttatgagggatcacatcaatgaagaagggataaaagactatatccacctaacccctaagatacttaaggtataggtcatgtatttcttattttatatccgctgggaatatgtgcccctactgaaactacacagaaagagaagtgattcaattctagggatccccctagaaaaaacactataaatatcccccccccctcccaaaacacactaagacaggggtcgagaattctgg

SEQ ID NO: 400306 - DNA, 785 bp, Cannabis indica
aatgctgatccaagtaatactgtagggtctaaaataaccgacgccatatgtacattatgacgttagctattttatagtaaccgacaccatatgtaccttatggcgtcagttcgtagcaaataaccgacgccatataccccctaacaaccaacgccatataccccctaacaatcgacgccaaattctgtaataatttttttttcttcagtttatttaatttcatttaatttatttaaagtaaatatttattaatttatatattatattatttaatttaaatttaaattaaatatttattttttaaaaggtaaattaaatattatttaaattaattttataattagccgatatacctaatttcatttcatagaaataattaaataaaatacaattaaatattacacaaatatcgtaaaattagtcaaattattaacaagttaataaacctaactacaagaagctagggaagaaaaattcttaggccttttagcatcaatcgtccaagtcttcgtgaatcaccgccatcaaccgttatatccactgtcgctgtattggtaataaattggtttttgaattatattgctgcttgtctccaaaactcaaaaaaaaagtaaaaatttatattagtttatatatgttattatttgttattataataaatactataatcaataattaaaatttactgttttttgatcttgtatataacgattggggttcgcacgtgcgacgatgtcagtcatgtatttcaaaacataaaaattattgttgggattaaactcact

SEQ ID NO: 400307 - DNA, 576 bp, Cannabis indica
agaggaccgaaagagcgtttccgagcaccaagaacctggagggagaggaagaagggggcagaaatgtcctcccattgatttgagaaatcagattaacgggaaccaaggtgatctccgggatcacctacaccaaaagaaatacggacccgcggtctccacgggaacgttaaatgaaggaagcatggcagaacttgccatatttcgaaaagacatcgcccgagtctcccgaagacagaaaggcgatgactccgactctgattgtgaggaccgggagccatgtgccaaacacatcctggaagcagagctccccaaaaattttaagatgcccgagatggcagcttataccgggaactctaatccaagtgatcacctgtcacggttcaatcgggtcatgacagtcatgagggtcagcaatgacgccaagtgtttgtgcttcccacttactctaagtggatccgcggaagagtggttcaagaaactggaaccaggatccgtagattgctggaataagttgcaaaccagcttcaggaggcaatttgtcgccgcaagaaaagtcaacctggaggtcagcgcctt

SEQ ID NO: 400308 - DNA, 607 bp, Cannabis indica
catataacttaaaaaagaaaattgctaataggcatcactgcgtcataccgttattggtgtaattaagtatcatgtctcatataacttaataaaataacttttagagaataccgctaaccaatcatggagcacttatagaaaggtgctgggcaccactggtgcccaatagcaatgctcgttaagaaaatagcttttagggaatattgctgaccaatcatgagacgccacctatagaaggtattgggcccaataacaatgctcaaaacataaatatccatttgaataaaagactagctagataccaaatcataacttacccttaaattcaatactattaatgaaacatcaaatatagttaatgtctcaaaaaagtttcataacaaatttaaatattataaaagtctattgattatgggactattctatacttatatgtctaatcaaagtttcataacaaatttaaatattatagatattacagtaaattctaatatgtctaatcaaagttcagtatcggtcccttccgatgtatactccatacatccgatgttggtaaactttgcaaatttcttggaaaggacgtaacacttatccaaggtgtaagaat

SEQ ID NO: 400309 - DNA, 617 bp, Cannabis indica
tattgtacacttctcaagggtagtaattataatggctgaatacttagaatatagattagtaaacaattagcatcaattaataatattatgtgatgtgggccctattttcaagaaatagacagttgaattataatttcttaattcctaaatattttttaaataatggttgtattatatttgatagacatgaattttgatatttttatgatttatgcctagtaacggtagaattgggacgtgttattgttacgaaaaatataaacaatacgcaagttcacgtaatcaagtagtaaactcacacaggtgaggtcgaaccacagggaattgaactgaatatcactaaactagatttatgattctatttggcagataaaaagaattttaataaagtttgaaataaagataatcaagaaaattaaagaaagcagtaaaattgtttaattaaggatgagaaattagggaaaagaatcatgttgatttaattacccaattgttaatgctaattactactctctttctaaatgtgaataatagattataaaattaacctaactcttttcagattttttaggctctaaattacatgttacctaatcatctctgaatttgactaacat

SEQ ID NO: 400310 - DNA, 1166 bp, Cannabis indica
aagcagataagttagtggaagatactgagtaaaaagatagcccttgcccagaggtgcccttaagatattgtagtattctatgagcagcagtgagccagtgaggtggggagcccttggattggatagaaatggacttagtttatttacggtaaaagagatatcacgttgtataatggttaagtaaaggagtttacaaatgaggttgcggtagatttttggattttcttatagttttccaacatcggatgagagccgaatgttgggtttcattggggtgggagcagcgaaagctcctaaataacctatgtcagtcaaaagtttcaagttgaatagtcgttaagagaccgatatcccagaggaagaacgatcaatttccaatcctaagaaaaagcgtaaaggacccaggtctttaagctgaaacacagagttaagttactgtttaaaagatgtaacagcagcatcattattacaggtaatcacaatgtcatcaacatatattcattgggcgagaaaaattcctttatcattttttatgagcaaggtgtggtctgagagagattgagtgaaactagtggatagaagataattgctgagttttgtgtaccattatctagaggcttgtttcaagccataaagacttttgggtaacttacaaacaacatttgggggaatttatctcttgggtttataccctttcgggagtgtcatatagacagtttcatttaaatctccatgaagagagacattgtcaatatcaagttggtacagagaccaattattaatggccgcaatggcaagcataagttttagggtatttaactttgcaacagtggcaaaggtgtgaaaataatcaataccttatttttggttgaaacctttggcaaccaatcgtgctttacagcgataaactgagccatcaacattgtatttgattttgtataccaatttgcagccaatggcctggtggccatcaggaagagtgacaacaatccaagtgtcattggcttcaagagcatcagtatcagtatccatggctttttgccatatgggatcttttgctgccattttgtagctggtaggttcaaaaaaggaatgggcagcaaaagccgctgctcgaaagtgttgtgttaacctattataagacaaatatttattaatagggtgag

SEQ ID NO: 400311 - DNA, 826 bp, Cannabis indica
cctcaaatcaaccatattcatattccatccaaatcagaccaaatcccaaatcaaaacccacacagatctcttttagattaatgtatttgtattttatattcatatataattttaataatatatatatatatttatgtttatatgtatatatttttatttatttttggggttacgagaatggtagaatggtgatggtgatggtgatggtaagatttggggtttgggtaaggatttggtgtgtgaagtctaggattggtatcatgtggccttggtatatattctaattttagtgtaatttaattttgtgtgtgggttgaaattgtatttctatcttgtgtaatatttttcttcttacaactaaaatatatttttacttttttttcttcactaatccactctctttttatctttattatttatttatttatcttaacttagaagatttgtaggacttagtgatctctatattttctttaatttggttgaactattattctctagttagtaataaaattatcttctatgaaatagaaatccattatttggagaggttgcaaaattaagccagttagttgccataaaatgcttaggtgttactcttatagttttgtttcatatcactacaagattgaattctttttacttgtgtcaaagtttagattgtctaatagttatgattaattaaaaatggactgcatattgattttttataattttgtaaataattttactgtattgactcaaactagttaaacttaggggtgttcacaaagtatccgatccaatccaatccgcaaaatgcggatatccgcacttgtgcggattg

SEQ ID NO: 400312 - DNA, 770 bp, Cannabis indica
taacttttttttgacttaaagtgtttatatattacaaccatgcataacttgggactcgaacccaggacctctaacacacacgcactcttctatgaccacttgagctagcctacaagtggttctatttagttataacttgtcaattagaatataatttatttaattccaaatgtatttttagatagaagttctactatatagagaaagtataagaaacatttttacattttataattgaatgaaaccttctcctcccattaaccaacaaatctcattactccatgaggtgtactctaattatagggaatattgtaggaaaacaattatgtttggttgtgtacaattatatttaattagatttttgttaatggaaggacattatttagtacgataatcttatatattatttttaaataaattaaaaaataattttttattaatgtattttaaattaattatacatcaaaataaaataattatttataaagcagttatatttattaattagtaaatacaaaatattattgtatttttattaattaaaataaatattatataaaatatttatatatattttttgacaaagtgattagaatcactaatgaatttgcaagacgtaaactttttttaaaatatctaattgtttagccaaaaaatatgcttagccaaatcgaagaccaaaaaaaaataaagattgtgaaccatcatttgacagaactatcctcgaaaaatttagacaatacacttatgactgttggatatattttacc

SEQ ID NO: 400313 - DNA, 654 bp, Cannabis indica
ctttaatgtaattgaagaaaaaaattagaaagttgaacatttgattctttggatttgtcgggagagagagatagcctattttaaattcagtagttccggcaatggatgttgaaatcttgtcggagccaaagagatgatgtcgtgtgaattgtgaagctttagaatagcatgtttttctggaatagtagtttttttttttttggaatagcagttttttcttaaaagtatcctatatttacaaataaaatgtcatttaaccgtataaatggaataaatttttgtacaccgtatatttgaataatattttagcaacctgtgtacaattaaaaacagcccaaataaaaatagaaaactaaatttatatatataataattttagtaatgataataataatataaatatctttacatataaataatatagtgtatgtgaatataaatatacatcttttttagtttttataataaatattagtttatatatttaaaagtgtatactttggatgtattataggaaaaaatgactgacattgaaagttcaaaagaagaaattccatcaacatatggatgaaataaaggagtaataatacccacaggacctattgactttttttttttttttttaattaagcgtttatatattacaatgcataa

SEQ ID NO: 400314 - DNA, 596 bp, Cannabis indica
ttttaaaaccgcgcaacgcgcggcttttgtttcctagtttgatataaatagtagtaaaataattcatttatttatatcctacactataataccacaaaggttttaagctatgtaagacttttcacaaagaatatctactaaatagtcatatcaagattcttacaataaattaaaaagaatataaaaataagaaagaaaaaaaaatatttgtagaagaaatttataaagatggttcgccacctctctatattttacaattatataaattcatagattcacaattatatacatattaataatgttaaatatatttaaataataattacaataaatttatatgaactacttgactaaaattaaaaaatacaaaaatatattttacattcacttagaaaaattataacataaacctaaatttggtattaaatcaacaacaaaaaactactattttaacactaattttttttttcaattctaaccacaacactaaaaattacaccaaattttatattctttattattttattattttattagtataataagaatattttaatactaaatatatatatatatataattatttactttttttt

SEQ ID NO: 400315 - DNA, 1172 bp, Cannabis indica
gtcttgtttgttttttttttttagattctcaactattgatatgaaaaattagcatttccaatcacccaaagatgggcatattgacatagcttaagaccccgagttagatgaaattaatatacagaggctaacgacgaagtacctcttaatcagaggaagccaatacacagggtgtaagtgataaaaataagagttaatactattttagattttgtgttaaattacaaaatagattctatattttttaaaatagtaaaaatagaattttgaactcaatttttaacaattttttttaatataatcaactagacaacaattcttagcatgaacttatgcagaaaatgtaactaattttgtcataacatctctatataaggttattactaagttttattttgacaaaaaaatcagttcaagatcttagaaaatatagggtttattttgtcatttaacaaaatagaaggtctaatcggcaacttttgcaaaattcagtatccaaaatattatttaccctaaaaataatctcatggataaggaaataacttcattcattataaacaaatatgatctcatgaaataattcttaagtttattctctaaaaagtctgtaaagacaattctgcttattaaataagagttgaacattttgatatattcgtgaatgttaaattattaatatttattattgaataatttatatacaaatatcagaaaattcattattcatacatacatgaggctatgccttgtagctgtatagagaactaagatcacttagtcataaataaaatagtcaacaacacattagaatttaggaatgtttaatcaatggttgctaatacggttcattgatgtccgctctttagtgcaagtaatctcagttcggattattcatgttgtatgacatctaaatcaaggtgttgtatataatagagattatatatgacaagaactgatatgaataaagttatatttatcaaacttacttttcactagaaatacctaattcatatcataaagatgatcaatagtagattggtgtaaatcccgagtaatcatgaattcatgttcatgttagtttctttgattcatttgttaaaacttctcaaagaagatgattcttacaacttctattttgagaatctaataatgtggatgactgagaacatgat

SEQ ID NO: 400316 - DNA, 1553 bp, Cannabis indica
tatcaagctcaaattattgttgagagctacatgcacgtgtacctatcttttaatctaaattataattcaaattttgaataaggttatttgatggtactaacacatgcacatgtgccacccatattgtaccactaattttatatttaataccaccttggctactactactactataaatattactataaaatagtatcttactacaatgcatatcacttcctaaatggaaaaataataccgatgacaataataatattgataaatcgctctcttaatccaataaatcttcaagtccgtaataaagtccaattaataagaataacataatcttcatgatgagtgctattagaaataaaaaaaaaatattaattttgtaataagtaacttattctatgcaattactatttccacatcgagatttatcatcataataataaaaaataataactaaatattttggttattacaatctaccctccttaaaggaatttcgtcctcgaaatttacttacttgagaataactcggggtactgattctgcatgtccttctccaactcccatgtcgcttctctatcagaactatcactccacaggattttaactaagggtatagtcttatttcgtaagacttttgttcctttttctatcacgcgcacagggcgtgccatataactcatgtcctgctgcaagttcaagttctcgtatttaagcacatgtgtcggatcaggtacatacttacgtaacatggaaatgtggaaaacattatgcgtttctgctaatgttggcggtagggccaaacggtaagctacctgaccaactctgtccagtatctcaaaaggacctataaatcttgggcttaactttcccctttttccgaaacgcataatccccttcataggtgataccttcaagaacactaagtcccctacagaaaactcaacctcccgtcttttcagatctgcataacttttctgtctactttgggcggtgagcatcctttgccgtatcttttcaactgcttctgaagcttctcttactgcttctggacctaaatagcgtctttctccaacttcatcccaatgaagcggtgacctacattttcgtccatacaacatctcatatggtgccattttgattgtggcttgatagctattattgtaggagaactccattaggggtaaatacttgctccacgagccagtgaagtctagtgcacacgctcgaagcatatcctcgagtatttggatggtgcgttcagattgtccatctgtttggggatgaaatgctgtacttaatttcaatcgcgtccccattgccttatgtagactctcccagaacttggaggtgaatactgaacctctatcagagactatcgtctttggaactccatgcagcctcaatatctcttgcacgtacaggtcagcatactgctctgcgttgtaagtagactttactggaacaaagtgtgctgacttggtgagtctgtctataattacccaaattgagtcgtgttgcttggttgttcggggtagtcctgtcacaaaatccatggc

SEQ ID NO: 400317 - DNA, 544 bp, Cannabis indica
aatgccagattcagaggtcaaaaagggtgctggattgttcgggtttcagtaggcagaatgtgccttttaggtaccttggcatacctatttgtgctaagaaaatctcagctgatgaatgtacaagtcttattcaaaagatgacagcaagaattcacacatggagctcaaggaatctgtcctttgcaggccgagtggtgctcatcaatgctgttttattgactatccacacttattggagccaaatattgatcctcccaaagaaggtaatatctgaaattgagaagatttgtaggtgctttttatggaagggtcaaagcaatatgaatggttcgggtagtgtagcctgggaaacattgtgtaaatcaaagaaagaaggaggtttggggctgttggatattaaagaatggaacttaacagctattatgaagcatgtatgggctgtggcgaacaagaaggataatctatggataaagtggatccactgtgtctatgttaagcaagaggattggtggagctataaagctccatcaaattgcagctggta

SEQ ID NO: 400318 - DNA, 905 bp, Cannabis indica
agttaacttatacaattgttgttaccagctgcaaataagacaagttaaactgaatgtgtgaaaattgaaccttcatctactagcaataattatgataaagccattatgattccacatgacataattgcaaataaagaagtaattaaaccttcaggtaacaagtctattataattcaagaataatgtcaaaaacattcctaaaaaaagtcggcttatataaattttgtttatatgtaatgcacaaaagtttacaaaaccagtatctgaagaaaatactggaaatcaaggcactaataataataagaggccttcatcttctggacttggcatagcttctgaagcagccatgaagttcttctcagacaatccttacttccaagtaaaattgaaaccatataatgtgggtggacatgcacaagtggtatgtagaaagtgttgctcattcatatcattctgaataaagtgacatatacattattatcgtgacatgaatattgattcttgtttgtgcagtatattccattggcttatgcaaatccttggtttgagaaaaagccacaaactgtcactctttgggttggtgaggattattggcatgtgactgtaactcttaataaggcatcaaacattggtggattagagtataggttttctgctggatggcgtgcatttgcacgagacaactctcttaacccaagtgatgtatgcatctttgacctgatcaagaagaataaacctgagattaaagttactatatttagacaaagtgaaagtagtatggctcaagaataatttgttgtaattatgttgccaaattttctactcatttaattaggtagctataattgtcccttatttaatatcaggactaaaatggttgtaaatttgtgattctgttaagccat

SEQ ID NO: 400319 - DNA, 625 bp, Cannabis indica
ggcagaatttgggggtccatcttgacttttcctaggaccccaatttagttttttctatttacatagggtatttccatgatgtatatcaataggaaaagttttagttgtaaatttaagtccccgaaagtgttagggcaacacttattttttttttttggaaatgtgacttagggccttcgattacctgcagctatttccactaaagttgaccggcgcacctaaaatcaaaattgaggtaagactagtgtagcacacatacatatgtacatgttatttttatgttttgcagatgtatgacatatccgttagagtgatagttagtgtatatatgattggctcttgatatcgtgaatgtatgtgtttggcaatttagaaagtatgaacaaatgctaccaacactagtacgctagattattgagtgaatgtggtattatggttggttatacttttgaaagcatgaactagtgctgctaacactagtacaccggagtactgagtgcatgtggtattatggctagttgtacttatagtatggattgatgctaccaacactagtacgactagagtactaagtgcatgtggtattatggtcaattatactatggtcaagaacgttcaagactca

SEQ ID NO: 400320 - DNA, 700 bp, Cannabis indica
tccttagagaaccagcaacatttagagttcttcagctgggttttgtggattatagtttgttcttggtggatcttttgaaggtaaccccctttagtaccttttctcttagttttcttaagcttaaagtaaaagattttacttgaattatgaattagggttctgaagtttttagagttgtttgtttgggttttctaatgatatattatggtggtttgagctgatttgaacttaattggtaggttattttgatgtttagacaaggtttgagttttagaactcaaactttggtctctaatggtgaagtttgattttgagcatgttatgttgttctattgcttagaatatgtcttttggggtataatatgcaggtctcgagagtttggttaagtttggaatccatttggtttgggtttggaatgttttgcattttctgggtaaaatcggctaactggttttacaatgcttgtaaaaccgcttactcggattttacagtaggtttcccaaaaaattcaactcgtcgattcgtactagtttcaggtttctggttaattaattccctgccagtttagggtattgccatattaagttgcaatagataggcttttggcataaaacgcaagtcccagttgtgatttggcgagtcacttattcgtgttgttatcgatgtgatttaggaacctataatttgccgagcagttgt

SEQ ID NO: 400321 - DNA, 801 bp, Cannabis indica
attgtattttatcattctatttttttttattatttaagtttaatttttattcatttatcattatattttaactttagctaaattttaattttttttttaaaaaaaatagtccaatttattctaaaactaaacgcaaaattacttttaacataatcctatccatctcaagtgtaattataattacgtgtttgggttcatattcttcccagcttgacacgtgtcttcctctaatgtgctagctgaattttatgtactcgagggtgaaactatacctatggctaaggtagatacagtaaaaggcttagaaagtgatatgcagctatggcatcaaaggcgcggacatatgagtgaacaaggcatgagggaattgtacaagaagggagtcattgaaaagcttcagacatgtgcattaccattctgtgagactcgtgtttatggcaagcaacacaagatcaagtttacaacagtaactcacaacacagagagagtcctagagtatgtgcatgctgacctttggggaccaagtagaatcccaacacatttaggtaaacactacttcctatctattgttgatgattttaatagatgtgtttggacctacttacttgaaaccaaagatgagtgtctagaacagtttaagatttggaaagctttggtggaaaataaaacaaacttaaaggttaagacacttagaaccgataatggtctagaattcatcaacactgagtttgataggttgtgtaatgagcatgggataactaggcataggatagttataaaaactccacaacagaatggagt

SEQ ID NO: 400322 - DNA, 671 bp, Cannabis indica
aaagaaggtgtggtaaaggataacaagtgtgttgctgatctcttaacacccacgggtgggtgggatatgggaaagctccatagtctctttgaccatgagaccatttcggctattctcaaggatggaattcctcatggtagtggcaaggatagttggttatggactttggaaagttttaagcgaaaatttcacattaggaatattaaaaataaatgcaaaacacaatttcacctatgctgaatttatagaataagagtttattaatttaagttcgacccatccaagattataagaataatctcttaattacaatccttttatttaaaagaaataccttttgattccaattacaatgacattaaataattaaaataaatttggaaaatttggggtaaatttggaattgcagctgaactcagtccatttaattaaccgagctgcctacataccttctttctgaaggatcaagccacttgtagttcagaatgcggtattttagaatttagatataaggattcatgtagataaccacttttaggaatcctgtgctattttgagaatttggaaaaattcctaggtgtatgaccttttatggaattttgagagttgtgttttataccaatttgcggtatcggggactgcacttagtcttagcaactaagttgcctacg

SEQ ID NO: 400323 - DNA, 743 bp, Cannabis indica
cttgaaaagttttgtgagtggtccgggcagaagatcaataaactcaagacttctatattctttagcaaaaatacccctgatggtatgaggagaggaattaaggaagctctgggtatagcttctcctgaaggggttacaaagtatctggggttacccctgttcagatctagacaaaaagatgctgactttaacttcattcttgacaatcccacgtccaagttgcaaggctggaaggccaaaacattatcaaaagctggtcgggctacacttattaagtcggtgggcttgtctatgcctatttatgctatgcagacaaccaaactgtcaaatcgccttgtgaatcagattgatggcctaactcgtgatttctggtggggctttgagaaaggaaaccatggtcttcaccttagagcctgggacaaactttgccttcccaaatcgttgggaggcctgggttttcggaaaactaaggaaatgaatctttctttcttggctaagtggggttggaacttattaacgggcaagcagtcgttatgctcaaagatcctgaagactaagtaccttagaggaagagagtttctcaactgcaattataaagattctgactcctggttttggaaaaatgtagttaaagcaagctcaatccttcggaaaggggcatgtaaaagggtggcagatggaagagatactagtatctggtgggatccttggatcccccacttgaaaggtttcgtcccgaaacc

SEQ ID NO: 400324 - DNA, 575 bp, Cannabis indica
aattttctctttttgactcatttcttcaaagtgcctggcaacttttggatggcagacatgccgctttaagttggcttggtctcctcttttttcccttttgacaagggattgtgctagtaagatgtggtttacttcttggtcacagtagaccaaaagtatgagagcaaactgttggcagattgggcaatccagggtacagaccaggtggccagccacgttggaaccttgcctggccatttagatgatgccatggccgaccatcctatagaggtagaggttagccaggttggccaaccttttggaggccaggtcgatgatgcagtttgatcccttctacacttggttggctttgcccccagatgattgccattgaggtggtattgggataccaaatatgtgcgttatcttattcagaatgggatacccagcagctatcccccttacctctgctttctggcaaggtttttgttaagagctatgttgctataggtgtatccatgttggttatctagcatgtccatttcttttgaaataaggatgcttagttctttgaagaactgagcgggtaccaagtt

SEQ ID NO: 400325 - DNA, 515 bp, Cannabis indica
tataagtttgttatgaatttgtttcataagcttaattttaatttgtatatttttcattgtataatatcgcttaattttaaaattttgaaacggatattctttacattgcatagtacatttatatatatatatataatttactttttatggttaaaataaataaaaataaatttttataattttattatttttattaatgttttgtttaatagatatttattagttttttaaaatcaaattaaacaataaatcaatgtgaatttaatttttaaattaatttagtatatatatattttcttagtttgaagatatttaagaaatttttttaaatatgttacgattataaatttatttttgagagatttttgtttttttttattattattaaataatataaattataaaaaaaatactttaaaaataaacattatgttcaagttgcgtgcaaccctttatgggcagttaatgattttcttgctcgaagtagtttgtttggatagagtggtcaatgatac

SEQ ID NO: 400326 - DNA, 1213 bp, Cannabis indica
aatcaatggtgaagcctctatacttgataacgtagagttatatatgacccacttcaaatcccaacttaagcccatacatttttatctctaatatatttatactaattatatatacaggtctttgtttttattagcaagttttagtttttttttttttttcttaatattgagaggacgaaattaaatttaggacctactatgtaaagtcactaaagtatgtctataatcaaattcaatagcacatggtaataaagctcacgacatctaacactttgtattgtaacatattgtaataatgttttttttaaaaacaaaaaacataattaagataaaagaaattaaagggaaaataagggttctacttgcaacccataaaataataagtacaccttattattaaatgaaaataaatttaaataatttttaaaaattacttttaatattttttcagagttttttttttcacattattttatattaattttaatatttattttgattttatttttatattttttttctaaatgatgatatatttttttaagaaaattttatttatttttttattgtatatttaaaatataatttatttttatttgataagtatattatttaagaatataaattgaaaaaaaaaaggttaaattttatataacataaacataattactaaaggaaaataagtatattatttaaattttatataatataaacatttccgaaaatcataattactaaagtcaatgatcactaaccacaattattaattttctagctaatagttctgttgtctatctattaccatatatagagaggtccaaacaccatcaccatccctatatatatatatatatgtaggaaatttaagatagaaatttactatcttgaccctacaccaacaaaacaaacaaatcagaatttaaggtcaatttcgacctttccctgttcactttgacttttcaaagttaaccccaaaacgaccccgttttgtctttgaacaaaacctaggaatggatcgagaaccttctcatttccttcctttctctctgaaatgctagaaaccctagcagagagattctcaaagagaaactcgaagccaaaccctagaaacccagaaatcccaaacacaaacccagcaaaaagatcagatctacaatgatctgatctttacacccatacacacacaaaagctatagagatttaaagttagaaa

SEQ ID NO: 400327 - DNA, 603 bp, Cannabis indica
tcaacttttttttatcgaatataaaaggggtaattcatgtatcacatttatgatagttgtacccatttgtgaaatgtaatccgaacccatctcggaatattttttgccactactcacaatgagttcgtgctcctaagacgtgaatatgaagatttaattcgcgttgaatttggttaaaatggcccataattcaagaattgaaaatattcttcttttcaaggtaaattttaacaagttttttttcttactcttacactcgttagtattctattaaaatctcaccctacacatctcaaaaaattatgaaatttcacagagacgaagtcaagaccgttatgcatcaattttctattggataagttgacaaataaagtagttttcatgcactaacaatcattttaatcgaaatattgaaaatctcacatttctgatagtggtaccgctttgtgaaatgtggcccggaccaatctcggaatattttttgccactagtcacaatgaattcgtactattaagaattgaatatgaacattggattcatgttaaatttggttaaaatggccccttaattaaaaaattgaaaaatattcttcttctcaaggta

SEQ ID NO: 400328 - DNA, 825 bp, Cannabis indica
aaaatttcaaaaaaaaaaaaatcggccacaattagcggcgaacagtagagtccaccgccgctaattatgataattgttgtagtgtaaaaatataaattttaacaaaaaaaaaaaaatagatagagtaaataaattgtaacctaattctttaaaactctgctatatatatatgatgtatactaaataataataataacattaaattgatattaattcgtaaatagcaaaactatattaacatttaatccacaattaattaatatatttattctaaaattaattacatactacttatttttaataataaattaaaaaatatcaactatcaattagttattaaaatatatttaaccattttaatattattaaccttttttttttgttactattacatttttgggtgactattcaatagttatattttaaggttacatttttttataacctactataacatgtcacttacaggtaaactttctatttttagacttaaataaattaatttttaattaaaatatttaataaaacttttttagaaattaatataatttttttttattttaaaaaataaatcaaatcaagttagtatcaggttacaagtaatttattaattatttttattaaatttttaaattaatcataaccgtctaataatgattcaatgattaaaaataaatgtaactatcatggttacatatttaatgtaactgtaagaatcgttcttttctgtagtgataaattatgtccagttgcattccagttgcgtctgggactcgtagtgttttgtctggggttcgtactgttagtgttagtccacgtcagcaa

SEQ ID NO: 400329 - DNA, 697 bp, Cannabis indica
aaggatccctccagatattagtcatccttccattagtcacagttttacaagccccttttattaaaatagattttgctttcacacatttttccagaaccatgaatccgagtccttgtagctacatctgagaaagtccttccccttaaggtacttggcttccaaaattttgcaacataaggattgaaatctatatgacaaattccaaccccacttggcaaggaatgccagattcatttccttcgttttccaaaaacctaatccacccaaacactttaggaaggcacaacttatcccaagcctttagatggagaccatgatttcctctttcaaaaccccaccagaaatctcggactaaaccatcaatcctcgaaaccattcgaccagatagttttgtggtttgcatggcatatataggcatcgataaacccacagacttaattagggtagcacggccggccttcgacaaagtcttagccttccaaccctgcaatttataagtgagattgtccagaataaagttaaagtcagcatccttctaacgagacctgaaaagaggcaaccccaagtaatttatagaaccttccggtgaattaatgcccaacacttcctttatccctctcctcattgtaacgccccgatttctcgagacgtcacactagctagtctgtttaaaaccatttaagataaagacaataaa

SEQ ID NO: 400330 - DNA, 620 bp, Cannabis indica
ttagtaccgaactaatcgcgtatcttgacactgctaattaaattgataggacttcgccggtcatgggctttgattggattgggggttgccctaagtgtgtttttaaggcttgaaaagcctcctcgcatttttcagtccattagaacttcttattgccttttaaaacctgaaaaaactctttgcatttatcagaagatcgcgatataaagcgatttagagcggcgactttaccagtaaggctttggacttcttttggcttagttggtgatggcatctccaccaacgccctgatcttcgcggggtttgcctctattccctgttgattaaccatgaattcgaggaatttcccagagccaactccaaaaatgcactttaaagggtgacatggtctttcgcatgttgagattttacgagcatatcgtcaacatatacttcaatggtgttcccgataagatctgcgaacatcatatttacaagtcgttgatatgtcgcacatgtgtttatcaaaccaaaaggcattactttataacaatatagacctcgatcagtaatgaacgaggtatgctcctggtctggttcatacatcgggatttgattatatcccgagtatgcgtccataa

SEQ ID NO: 400331 - DNA, 725 bp, Cannabis indica
ggcagggaactgacaaaattggtcaattcaattgtcccaaactgcccagattgaattgcccagtgagccacaaagtcggctacaccattgagacttctcggaacccaagtagcctcccataactccacacggtgagcaatggtgtgaaacctttgcaccagcggttggatgttgtgattgagatccttaatctttgaatgatcagtggtaattgcttcaattgcgcctttagagtccgactgaaaaataacattgttgtagttcagacttacagctacttcggccccctagtttatagcaaccacttcacccgcgagtggttcactatactgcagctttttagtggatatatttaagacgaccccttcctcattcctaaacactgctgcaccaaatgagaaggtttctcctatggctacgtcagtgttacacattgtccatcctgctggggggggggggggaagccatttgttgtgaattggaggttgtgcattgtgaacctcacacatttccattagccttcaattgattctttggagaaggatgtgtatcggtgtgatcgtgttttgatgaacacgggcatttctttcctgccagattttttcaaaaatgatcgcagctccatttaatatcatgttgatgttgggttttatgccctaaataaaactcatttcaatataatcagagttacttattaatatagatcagaaataacatttaatgtt

SEQ ID NO: 400332 - DNA, 777 bp, Cannabis indica
aaaaaaaaatcaatgaaaaataataaaaaaaatgaatacttgcaacaatttaagtgtgggggaatagtaagttttatgaaaaaaaaaaagatacaagattgaattgttgaggagagtgattggggaatacaaataggaattatttgagagaatgttgtatatgtatgctatggtgtgatttgagcctaaattaaccttctttatctacctttcaccctagccttacattataagcccataaagtcctattgatctttaaattatgtgtgattacattagtggagaatggtttgataattaagcttatggagtggattttcgttgaaatacacatttattttgagacaaatattgattgttgacatgcatgaattaatttgaatgttagtagtatgatgatttgattgaacacacacacaaaaattgggtttgaaaagtaatttatcttgagttgaaattctaatgattgaagagtttggattttcttggacttataagtggatgtacaatttttgaaactaaaattatttttcataaagaccgatttgtttaagtatcattcattaacttactcgaggacgagcaagagtcaagtgtgggggaatttgatgagtccatatttatcttataaatatgattaatttatttattaatattcttaaattgattctttaaattattgattagtgtgattttaatttgttaggttattttaaatactattcatccatttagagtcttttggagggattttaacatattttggtggaaaatagt

SEQ ID NO: 400333 - DNA, 619 bp, Cannabis indica
ataaacaggggatccctaatagtctttaaaatggaaatctttattttgaattaaattaaagatttaaattaaacaacacttttccaaaatttatagattagtgataataagtttataaaagcacacacatggcgtctctgagggtcagggcgttacagtgatgccttggcaaaagaagccatttattacttgggtgcaaggtgctaagtttgccagttggagccccatcttttcataggttgatttgtaaataatgttggaggaggctccactgtccaccatgcacctggcaaccgtcatgacactgatatatattgtaatgacaaagggatcattgtgtgggaagttgacttgggcatcacctcctgtctaaaagagatggcagtctctccaagcttgagttgcttagagcctctttctttgacgactaggatgtcacttttaggctcgtgacggagagtttgaacatatcattccctagccttactagtcttgcatgcaatgtggggtctgccaattatgactcccaagttacccaccactagtggtggcatagggtctccattctgagcagcttgtgcctgagcttggtcaatctgcacataacgacacaagtggg

SEQ ID NO: 400334 - DNA, 505 bp, Cannabis indica
ctttaatggtgaattaggtttctgtgtttgaaactgagatttattgcttgaattttgttcattatggtatatacaggtgttctagaagctattgtggagtttggagttgaattgaagtgttagggatgtttttggatgttcttgcactaaaccggtcgaccaaccattgtaggaaccgatcgatcggttggtcccgagaaaaccccattgaaccgaaatttcggttggggaaccggtctaccggttgggacagtttatgaaaccctagttttctcgtttttgtgatatttagagtattatcatgttatgaatctccgtctatcattaaatatctcgaacccacaactggagatatatttatggcacgttttgatgattgtcattttgatgagacaagtttcccatcattagggggaggcgaaaagaaatagctagaaaaaaatttatatagaatgcacaatcattatctcaatttgatcctcatacaaatcaatgtgaacttgaa

SEQ ID NO: 400335 - DNA, 509 bp, Cannabis indica
ctattttactgaatgtagttcatgacccaacacccaagctgagctagaaatgagaaatacaaagttgttaatttgacttctctaacttcatagatctttgtcattgtgaaaaattagatagatggtcgaaacaacatcaaattcggataagcaaaacctagcacaccatgccttttgtcaacctgggtgctccgtacttactcttgaactcccaagatctcaattttgatacttccaagactctgaacttgacgaagaggtctccaaccctgcttttgaccattttggattcaatggtcacatcgaattcggcatttgagcaattgaagccagtgtcctaagctgattgtcaacttgggcgatgggcccaacactaagtctacctaggggctgggtcccgtttctaggggctcgaatttgtagttttctcagtgagtttgcttgaatcttcattatttttgatgatgaaaaaaacacccataacactttttgctgaacttgatcggaaa

SEQ ID NO: 400336 - DNA, 591 bp, Cannabis indica
tttatgccgcaaattactcgtaattatacatacaaagtttaaaatgtaccactaactcttgctttagtattttttttaaaaaatatttcaaagctctcgagaatttctttttaaggtgaaatactaagtatgtgctgttatttttttttaattatttgtacaaataagaaataaatagcatcatttcaaaaaattaatttaatataaaaatataatattcaatttatttctaagcacaaataatagttcttattacaaaattctcaatttattatcaaatttgtactatatttaatatatttaaacaattttattcaaacttatattaataataaaataataaataaaaaattataatttatttaatggttatataaatattatagaaaaatattttttaaccctaaatcattattagaatatcatataagtaataatatttaattatttaaatttatttatatgtataataatattaatacaatgtaaaggccttcaaaataatttttcaatactaaaggtagggtgcgtttggtaacacatttttaattaattttctgtttttttaattaaaaaggtgaaaatattttc

SEQ ID NO: 400337 - DNA, 924 bp, Cannabis indica
ggctcgtaacatatcttctagtacctgaattgtcctttcaaattgtccatcagtctgaggatggaacactgtactaaatttcagtttggtacccatagcccgcggtaaacttgccagaatttagaagtaaacttccgatctctatccaaaataatagactttggtacaccatctaatcttactatttccttaacatacaaattagcacactgatccactgtaaaggttgttttaactggtagaaaatgtgctgacttcgtgaatcgatttaccacaacccaaattgaatcaaataaactcgtggttttaggtaatccaaccacaaagtccatggtgatatcctcccacttccactcaagaagtgtcaaaggctgcaacaaacttgccggtctctagtgttcaaccttgatctggtaacaggttaggcattgcgacacgaattctaccacattcttcttcatcccgctccaccaaaagtagggtttaagatcttggtacatcttggtggtgccaggatgcaaggagtatggagtggtatgatcttcttcaagaatttcatttctatgttctgcactatttgggacacaaactctggtcttaaacaacagtatcccactatctgacactgtaaaatctatggcttgaccagctcaaacctcttctctgatcttcactaattctggattagttaacgtactgagcagctttaattcgttttaacagatcaaattacagcgtcaagttatgaagtttacctataacaaattcgatgcttgatctgaccatgtcctctgctaactgaggtgaaatttgaatcatattagttacctgcctgggactcttcctgctcagagcatcagccactacattggccttcccaggatggtaaaggattttacagtcataatctttaaccaactctaa

SEQ ID NO: 400338 - DNA, 689 bp, Cannabis indica
aaagatattgtatgatattcattaaatacaaatttagtcatattcagagtttttaatttagaaagaaaaaaaaatcagattaagaaactcattgtatatttttgacctaagaaaataaaatcccactaattcttttatcaaagttacacaaaaattaaataaaataatattaaaataattaataacatgttccacaacttattataatcctatacatcttcactatccaaccaatcaaaactaaaaaaatatgctctcatgagtgagagaaaaagtaatgctcccacctaagattttttctatatttatgtgtatagtggcaaatatcaagatgttacaaaactcaaaggttgtgagtgatataagttataactccacacaacatattaaaagaaaaatataaatagtattatatcgattatgtatcacttataaatagtattaactgcacaatatgtaaaccttaattattttaatatattaatagggacaggatttggtcccgttatgccaaaatagggaatacaatccctgattgtactgtagccgttggattgaattgggggttgatctaagggctggggttaaaggtaaggggaagttagggggggaaaatggtaaccggttggttttttgtattttaaattaattaatttttaaaaaaagtgacaccgattgacgtttgatgt

SEQ ID NO: 400339 - DNA, 835 bp, Cannabis indica
tctatggactcatacttcttgatttccttctgatgagcctcttcctcagccttgagaaacttagtcagctcatccccctggtcggtgagagagtgatttggtctacgaaagccttcccttttatcttcaagctccttgactctcttggtttcttcttcaagtgcattctctaactcgtcaaaaagttccatctccaactcggtcactttctggttcgtagcacttagaagcttgtttgccttacccagttgctcctctttcttctcgagctcttcccttacgtcctgggtagccttatagagttccttagaggaaatctcgacttaagatgctaaagactttgcaatgcgtgagcttaaggttcacctggaggaagaagtgaagttagaaattagtgatcgtcatatattgagctaaaacaaaagacttgtaaaaatcttaccttcatccactctccgaggagccctctgaccattatttacaccctaaatttatcgacccccttcagcttctcattggtttcaaacattacccaatcttggtaacatttcaccatctccttgactttctttggctcgaagtagagagggacaagcgtttcagaagactgccttgattcggtggaaggagcaatgggtggccgggtgtgagctagagtcttcgtggctggctcgatggattgtggagttggattgtccagaattataatttttgtttgttagacttgacctcaactagtcagcgcatcaggaactacttccttgactgaaggggtcttctctccctagatggaggaagtctgtctatgagtattggcaggaaactcccgagcaga

SEQ ID NO: 400340 - DNA, 595 bp, Cannabis indica
aaaatcctgaagaaaggaaacctttgttcatttctaacgatttgcctgtagccatacgagctgaatggatagaattactgcataggtatcgagatgtgttcgcttggacatatgaagatatgcctgggttagaccctaggttggttactcacaaattaagcatattatctgaggcaaaacctgtaaagcaaacttcaaggaattataggccagaagtacaacttcagatcaaggcagaaattgaaaagttattaagagcaaatttattcgtacgtgcaagcatccgatatggctagctaacattgttccagtgaagaagaagaatggaaaaataagaatttgcgttgattatcgggatcttaataaagcctgtccaaaagatgactttcctttgccaaatcttgatactttagtcgatgcaacagcaaattgtgaaatgttttcttttatggatgggtttagcgggtacaaccaaatccagatggccaaggaagatgcagagaaaacggcatttcgaaccccgttcggaaacttctactacactgtcatgccgtttggcctgaaaaatgctggtgccacatatcaaagagcaatg

SEQ ID NO: 400341 - DNA, 529 bp, Cannabis indica
atcgatgtacacctttatagggtatgcctagaagtatgaacttagctttctggaagctaagataagttgtaggttagcttctccatgtgtaggtaccaactttcagcatcgattagcctcttgctaatgtagtatacagggtgttgtacactgtcttcttcttttatgaggacaacactcatagcatgttctgtgactactaggtacacgcctagctcttcattgtcgagggcttttaacaacacgggtggttgagctaatcgtttcttcaactatttgaatgcaatttcacattcctctatccactcaaatttttggtgcctcaaagaatgttgaagaagggtacacatttatttgtagacttggacataaatctgcttagtgcaacaatgcttcctgttaggctttatacttctttgatggttgtgggcgacttcatgtccaaaaaggcttggatctttatagggtttatttctattcccctagcattgactatgaagcaaaggaatttacccgagcctactctaaa

SEQ ID NO: 400342 - DNA, 815 bp, Cannabis indica
aaattatacgaaagagaaggagatatgaaggatttaccctatgctatggttctaagatgtttaatgtacgtgatcgtgagcacgagaccgaatatatctcacgttttaagaatcttaagtcggttcatgtccaatctgggcatggaacattcgaaagccctaaatggttattgagatatttgaagggcacttagaattatagtttgacctatgaaaaagaaaaatgataataagaattgaaagggttcgtggacacggactacgccttgaatagaaataccaaaaaatcaaccacttcctacaatttcttgatgttatacccgaaatttggctattaatcagaagctgacgtgtatcctacaaaaggaatatgaatcggcttaaagaaaatactaattaaattgcataaataaaaagcaatttaaaataactcattccaattaattaaagttgatagtattattcaaactcgatgactacgtgagaatatgcgagaaaagaataaataactattaacagatataattgacgaggcaatatgttcgtctcggatagagagagtaaataataagaacgtgcaagacaagacctcaacaatcttgcatcttattgacccgcatactttagaataaaagcttacaactgatcgacccacatatatgagcagaatgaaaacaactacactaaccttctcgctttctacgcgacgtagtagtcatctcactaatatcatgataacatgagaatgctgcgagaagaagcatgtctacacttgcattttttcctctaaaaaaagataagaaggataactcata

SEQ ID NO: 400343 - DNA, 811 bp, Cannabis indica
tctaaggagattcatctatctttccaagcaatataaatagaatatttttaggctacgaatttcagaatcctagagctaccaaattgagatagaaacttagagagagaacaaggaagagacagagattgcggcttcgaagtagttctttcttttttcttaaactcttactatctattatgattatcgttataatatctagttttgagtaattttcttttagttaagggttattttaaaacccgagacatgcattcttaatttcattattgaatgttaatttctagtttctattatatcaaattgtttctttttcttctatgctcaaagtcatggttattgttttatcttgtttatatggcactaaattgggttttactttaatcgaccgtcatcttatgattactattcacctaatagtctaggagtctaagtgtttgtgataaattataatttctaatattttccaaggtatttttaattgtgatgaagaataggacttaggttaaatgaattatatgcttcattaatttattgtctggattagtctatctccataaatcttaaagctttatctaagttaaataaattgtatgtttcgtgaatttactgcttagataaaagagttaattattgagtgcttcgccttgattacatgtaataggaagattgtgataattgactgcttcaacattctctacgggattaatagtttgattggaaattgaataacattcattaataggaattaggaatgatcgttgaggatggcgaataacctttaactagtttttcatatcataatctcaatttt

SEQ ID NO: 400344 - DNA, 855 bp, Cannabis indica
accggtcttggaagaggaagttcactcagcggtgtttcaaatgtaccctgataagtctccgggtcctgatgggatgacacctgcgttttatcagaagtgctggcatattgtgggtcatgatgtggttcgacttgttcagaactttttccggaataaggtgatgcctaaagatcttaatgctaccaatcttgtgcttattccgaagaagaaaacgcctgtagttatgggagatttgagacccattgctctgtgtaatgtgctttacaaagttatttctaaagttttggctaaccgtctcaagggtttactgtctaaggtgatttctgagtttcagagtgctttcattccgggtcgtctcatcacggacaatgttttggtctcgtttgagatcctccactacttgagacgtaaacagcaaggtaaacacggttgtatggctcttaagttggatatgagcaaggcttacgatagaatggagtggtcttttttgcattctatcttgcttcgcatgggtttctccactggctgggtttcgatgataatggagtgtctgcatactatttcttacaacattgtccatgggggagaggttcttgggccgattgttccaactagagggattcgtcagggggatcctatttcaccatatcttttcatcatctgcgcagagggtctctcagcactaattcggctttatgaagaaaagaagtggatccatggttgtcgtgtggctcgtagagccccttatgtcactcacatgttgtttgcagatgatagttttctttattgctcggccactatggatgaggctcatcgtgtcttggagttgttgcataagtttgaggaggcttcggg

SEQ ID NO: 400345 - DNA, 1127 bp, Cannabis indica
aaatctagactctggtaaaataacatccaatagagtagccctgatgacatgaacatccatgtttgacacgtggcaagaaagatggcatctcagagttgagtagtcccgagttatagtaagtcggtctgggaggggttaggttgactttgggaactctaggatggaagtttggacttcaataacttgaatccaacccactatattttagtattctataccgtgaagacatggagcagtcaaatctatgtcccgggagctaaaattacatgaatctgcaccccaaaagtcaacttgggcacctagggtttcacccagcgcctaggttgacatcctcaactagaactttattttttaggaccgtcttagtgcaaattggtcaaactttgtattgggacatgaccaagacataccaaggacatatgtgaggcatgaaaattagagtcagagaaagttcatttttgagcacccggtgcccgggcccaatttatcaatctgggcaacttaggttgacaatttatcaatctgggcaacttttaagcatcaaattgacgatccaacttttgcatcatctttgtcttcatcaaaaagggggaaataggtacttttagggaagaaataatacatcctaggtgccagaagcaagccccagtgcccaggttgacacttggggctaacctagcacctaagttgacacttggcgctagcctagcacctaggttgacacctggggctagcttagcacctaggttgacacctgggctgatctagcacccatgttgacacctagggctggcctagcgcccatgttgacacctagggctggcccaacacccaagttgatacctggggctggcctagcacccaggttgatattttgtcaacctaggccaattttaatgatgttttttgagctcttctgagcatcttctttgttttttgcaaatattacgatttaactatttttaaggaccaaactaaacttctaaagggccataactaggacctagtgcccagattgacatattgtcaacctgggtatttccaatcaagctctcaaaaaagtgttatgggtatttcttctatcataaaagataatgaagatttaagtaaactcggggagaaaacca

SEQ ID NO: 400346 - DNA, 374 bp, Cannabis indica
aattataatattaatgccaaattgaagcccgaaaatatattttgggccctgaacccgattcggcctaaaatacccggttctactataccgcgccaacttgtcaaaaaatacatgcataaagacagaacgaatatactatataataatacagtccataagcacgatataacattaaaattacggtttacctttcttgggtcaaaattacgaaaatatccctggctcacctacggggtcttaacatgtcatttatcaatataattcatatatattgaattagggatattagcggctaaaccacctgaactttactgtttgtaacacttaaccataaaaattgaattttcggtggctaaactacctaaaccctggtt

SEQ ID NO: 400347 - DNA, 1049 bp, Cannabis indica
gagagctgaacaaattaaccattaaaactaataccctttgcctagaattgacgatctcttcgatcaacttcagggtaagatagtattctctaagattgatttgagttcctggttttgtcattttggttaacaaatgctccgacagcctttatggatctcatgaatagggtattcaaggatttccttgataactttataattttgtttatcgatgatatccttgtgtactctccgtcaaaagcagaacatgagcagcatcttcgtatggttctgcaatagctcggagatcataaactctatgtgaagtttaaaaagtgtgagttttagctgtcacatgtgtcttttcagggacatattatcgggaaagacaggaatatggtagacccaggaaagattgaagcagtgaagaactggcctagaccaaaaacagttactgacatacgaagtttcctcgatttaacaggctactatcggcattttgtagaaggattctctagcattgcaatactattgtcttagttaaccagaaagaatcagcggtttgtgttgttagataagtgtgagaaaagcttccaagaattgaaacaacggttgattacagctctagttttagccatgctatctgatcaagaaaagtttgtagagtattgtgatgcatccaagcagggtttaggctatgtgttaatgcaatcagagaaggtcatagcatgtgcctcacgacaactgaaagactacgagcagggttatcacacaaatgacttagaactggtagaagttgtgtttgctttgaagatttggcgacattatttatacggtgaatggtgtgaaatttatactgaccacaagagtctcaagtactttttcattcaaaaagatctcaacatgaaacaaaggcggtgattagagttggtgaaagactatgattgtgaaattttgtatcaccccgggaaggctgttgtggcagatgcctttagttgaaaaggaccttatcatatttttagtatggtaatgatttctcctcaattagcctcgaatatgtctagggcaaa

SEQ ID NO: 400348 - DNA, 463 bp, Cannabis indica
gggaaggagattgctttctagatcagggaaggagttgttaataaaaattgtggctcaatctcttcctagtatgcaatgaatgtgttttttgctacctgtggaaacttgcaatgagatggagcaattgatgtgtaagttttagtggtgatcgttggagaacaacaagggaatccattggaaaaagtaggatagattgacggtacataagtctaaaggtggtatgggatttcgcaacttgcatgactttaacttgagtttgctttgtaaacaaggatggagattgtttagtcatccggactcacttgtcagcaagatttttaaagctaggtactaccgtaatggtaccttcttaaatgttgagttagggagcaatccaagtttcgtgtggcgaagtatttatgaaactcaagagattgttcgaaaaaaaggcgagatgcagagttggtgatggttctcgaattaa

SEQ ID NO: 400349 - DNA, 683 bp, Cannabis indica
tgctctactatagacaggaatcaagggatagatattttaatggaaggagtcattacattctgctgccatcaatgtaaggatttcttaatctcttatgtgtttatttcattattttaagaaattcatatttaggatgttagattatagaattataattaacatgcatgttagtatatctagatcctggtaaaataagttcgaacagggtgcacatattattataaaaaaacaaaatctttcatgtggaagaaggagaagcgtcatgcacgtgggccctacacgtgacagtccttgtccctccactcgcatgttaggcactattggctaaatattatatattgaagacaaaaacaaataactatctaatatatattgtgcttacaactagtgtgtatgtgtcaaagtaattaatctctctttcttgtctgaaatccttagctactaatctagctttgaaagtttgaataatgtcatcaatgtgatttttattgaatactcacttgtatccaatttttttaaaaccaaatatagtttcatcatgtatttttgcctatttcctagagggatttttgttgggttttatgccctaaataaaactctttacaatctgattagttatcaatataagaaatttgaagtgattgatgtttgcatgaaatttacatgctaatggtttaaatatg

SEQ ID NO: 400350 - DNA, 633 bp, Cannabis indica
tatatatatattttggtatgtatgcatatttaaatagtggtatatataattttgtagcatgatatatatttttgagtattaatttagtattattaattttttgtggtatataattttatgactaaagtatattaatttttaataatacgatatatcaaatattgttgtatatatttaataatttaatatatttatttattttgtttttacaatataataatatgcaatattttttttgaaacaaagattgcaactttcattaaagcaaatcagctaacaaaatagcttccaaaccagaagggacagaccccctactggaaatacgatcaggacatgaaccagaagaacgagctaaccagttagccgcttggttcccagatcgtttaacaaactgaactgaaatatgaaaattagaaaaggaccgtataagattaatacaatccgaaataataagaccaagaggagaaagaatgtggctcttgctattgatagcattaaccaacacaagacaatccgactccaaaatcaccgctgtagggcaaaagtcctcaaaagtcctaccttctccccaacaggatttgacccaactcaaagcctccttcatggatacttaattaattattatatatatat

SEQ ID NO: 400351 - DNA, 526 bp, Cannabis indica
cggagttgagttttacttgacgagttttctcttgacgaagtacttcataacagaatctcctatatgctagtagtagtaattctcttgttgtattgtgttaagatggatttgttatgagaattcagtttgagattctgtgcttgcttcaatttcacttgctgtagttgtataactaattgaagtatgtgcttccttgaggcaccataatggtgaactaactcagttggaaagaaatgaatggttatgttaggatacagttggttggatttctgttcactgataaaccaatttggaattgtttattcttttaatgctacctaactcaatatagtttatgctacgtaatttaggttgttggattttcatgactgaagcacactaagtataagctaaattaacgcttctgcattactttaattgatattagcttagcttctgctgatcgccttagtttagttttcttgttgtatcgtaggagatatgctcttttgtaactatgcatcttttctcttctttctctgctttt

SEQ ID NO: 400352 - DNA, 605 bp, Cannabis indica
ttaatcgggcagccagcaaactgagcagcacgccaacacttagcaaatttagctttcgcatcgtgagtcaccaaagaaatccctataactttggtatgagatcatagagatatggcaagttgtcagaatcccataattagtgtattctgtatttaatctgcaatcttcccatttatatcaattgtaaccataagggaaatacttccctcccaagcttatagccctataaatagtgattcatactcactgggcaaagggtcgaaaaacttatctaagtattcatattcagagatactattgtaagaactctgagaaaagggattattttccttgttcttaagtcaatacaaactaggaggattaggctattaccgaattgctcggggctgaacctctataaaattctcgtgtctttatttgctttactatattgcatacacattatactatttgtcgcttacaaattagactcactgtcgttaggtaaaagcgaggtcaaatataattccacaataatacacatttaactagttagggtttgctaatccattttcttaatcttagggtattacaattaccccctccttatagaaatttcgtcccga

SEQ ID NO: 400353 - DNA, 686 bp, Cannabis indica
gcacccaatcaaatcagggcacaagcaacagagataactccactagtttcctaaaattactactattagaaaatgattactcaactatacctgaaactatgaaatattactaatatgtagagaatttatataaattataagagaggacaaataattaaaatccaaaatattggcattatagatgatttcaaaatgcaattaaagtccttaaagacttaattttcttagtaagagagtggcattcaaaattcaaaagacaatggaagaactcaagtaattttaccagctacaccaaagtatgtgtggtaaacatcaactgcatcatctggtctatctgaaattcctccattttcaacgtcctgagattacaaaagtcaaccaaaaatcttgaaggtgatctggaagataagagtaattcgcttagttataagtttacctggcagtccaagatgaacttcacaagtttttccttattgatccaatgtactctgtcaatcatgatcaggctagaagaacccaccacgaatagccgacctggttaagaaaacgaaattcaacagattagctcaaatgattcaagataagttgagaggtgttatattatttttaatataataatatgtagattaaaatgtggtaatatatattattatgtgaataatatatattaagtgtatggtaattaa

SEQ ID NO: 400354 - DNA, 2003 bp, Cannabis indica
ctggtcccacataatgcgagttataattatgagatcagactttaattatgctcgcatcatctcgttgattctagctcaggcgaggtttaaacccgaggagtctcccatggacatctcagtttctcttggaaaactgaatacacgtgtcctctaaacaggagtctggtctcgagtttctaggtgagagaaatctcaccataacacttatgcatccagccaactgaaagggtatgagcagcggtatcctactcatgataatgaactggcagtagtcgtttttgcactaaaagtttggcatcattatctgtatggcaaaaagtacaaaatctacactaaccacaagagtaatactttttcacccagaaggatttaaatatgaggcaacgtcgatggttagaactagttaaagattatgactgtgagattctctaccaccctataacaacaaatgtggtagcggatgctctaagttgaaaaggtccagggcaagtctatgaattaaagaagatttcagcagagttggctgaagatatgactagagcgggaattgagtttgtggtcggaaaacttgctaacatcactctacagtctgatttactaggaagaattagatcggcccagcaaagtgattctgagctataggggtacaaagagaagttagaagtcagaccgacaaaagacttttcacttttgtcagatgggttattacgatataagagcatggtttgtgtaccggctgacaaaaatatcaaataggagattcttgatgagtctcatactacaccgcactccttacacccaggaacaactaaaatgtatcatgatgtgaaggtcatgtactggtgaccaggtatgaaaagtgacattgttgagtatgtgttgaaatgcctaacttgaccgcaaattaaagcagagcatcaaagaccgatgggtttgcttcagcctctaaagattcccgagtggaagtgggaagacatcaccatggattttatggtgggattacccaaaatgatagggtactgtgactttatttgggtgattgtggattgatatacaaagtcaacacactttttactagtgcgaacaacgtatacagtagatctttatgctaatctatacatcaaggaggtagttcggcttcatggtgccccaaagttgatactttcggatcgagatccaaagtttatgtccaagtgccgggaaagtctgcaacgagcaatgggtaccaaattaaagtttagtacagccttctatccttaaactgacggtcagtctgagaggaccattcagataattgaggatatgctaagagcgtgtgtgatggattttgaaagttcttggaacaagaatcttcctctgatcgagttttcttatagcaatagttattagagtactattggcatggcaccatacaagatactttatggaagaaagtgtcgttcgcccattcacttggatgaagctggtgaacgtaggtatcttggacctgaggtagtacaaagaacgagtgaggctattgagaagattcgagctcgtatgcttgcctcccaaagtagacaaaagagctatgctgatccaaagcgtagagatattgaattccaagttagggattttgttttccttcgggtgtccccaatgaagggaatttagaggtttggaaagaggtgatttattggcctgtttgagattcttgaaagagttggttaggtagcttatcagctagctttacctcctgctctatctggggttcataacgcgtttcacgttttgatgctacaaaagtatgtgtctaatacgattcatgttttaagttatgaagatatcgagcttcaaactaatctgtcatatgaggaacaaccaatttagatcctggaccagaaggaaaaggtgttgcaaaacaagacttctgcttaggggtgtacatcaaaccgcttaaaccgctcaaaccgcccgcaccgcaaaaaaactgtggtttgaaattcttcgcggtgcggttgcggttt

SEQ ID NO: 400355 - DNA, 839 bp, Cannabis indica
tctcagactcaacaaagagtggcgagagaggtatggagcttaagaggccacaaggccacaaagaagaggaacctgcgggcgtcttggtacggcaagaaagagacgactccgcgggagtcgttcaacatgttaccctctcgaaggccaagagagatttaggtcacgaacaacccaaagccgtgatgctaatcgtaatgccataccacaacgaccttctcgtgagaacgacaaccatggcaggaggagcgagcatcctccatcacaacaacgacagcgtgtaacaacctcaggtcgtgagaataggaggaacaatgcaccccctcctacacagtaaaaacttggagggacgcacaactactgccccacaagacaatgctgcagatcccccacgaggaggctcccgtgagagacgggcacaacacgcaataatgggatcccaccatctcaaccatctccaacacctagggatattggttttgatgagaggggaagagaccatgttcgaaaccctccttcaccaatcaggaaagaaatgatccattctaaaaatggatctcactaaagagccagaaggtttgtgaaaaataacaagcttgagtcaccattttgtacacgaagtccactgacaagaaaaccaaagactgagaaatctaacggttggaagttgtgcaaaatatgaataggcgattcataatgactctcgaaaccgtacaactgccaaaattaaatgatgcgttatttccaagaaaagatcttaacggaaatgccctttgtaattattaaaaagccttttttttactaaaaatgaatttttttaaggggcaattattatacctaaa

SEQ ID NO: 400356 - DNA, 962 bp, Cannabis indica
tttatttttatttatactatatacaaaagaatatatataaagtaatatttaagtttaatttaattttttattattttttttgttgtagtttttttttaattgttttactcgatggaataacctcaatacatatcattttaaaatgagagattttctaattagatagataaaataagaaaaatgaattttttgaaagaaaataagaaaaaaaattgagtttgatttaaatattttaaatataaatatagttagagtataaaaaagagatattttttaatatttttttaattaagtaattaaattaaatttagaaatttaatatttttaaaattaaatttattaaatggataagtgttgcatatattaataaatatatacaatataaatatgtgtaatgtatgatatgcgtcaagtaagcaagcagataaaattatgcgcttcagagaatttaattccttgactggctagactcatactccaataatatttttcgaaatgattatatgtccaataattagtatataggaataatcttccggtttttttttttttttaaaaaaaaatatatgtatatataggggttttatgaagagttcctcacttcaatgtgaggtttgagatccctcaagtaagaccaaaggaaatacagtagtagcataagtttattgacctcctacaaccaattgtataacccaatagtacacattttgatgtcaaaataattatattttaattaattttttcttttttgaagtaaaaatataattttaagagttacttttgtaatttaattttgggaaatttgcggcaaaagtccctaaaaaggtcactttgatgcagattagtccccaacctctaaaaataacggcaataatccttaaggtcacaatttttatttgtctgttagtcctaattttaactgagacgttttctttttttaaattaccacgtgtcaaaatatt

SEQ ID NO: 400357 - DNA, 497 bp, Cannabis indica
ggtattttctactttatttaaaagtgataaaattaataattgaagaaaaaaaaattcaaaaaaaaataataattgaagaaaaaatattattaattattaggtgaaattataatataatatatgatacacatatacattccaaaaccttcctcacgtctctttacttttgaattgtgaatccaaatggttataaacaataaacaccgtacattataaactggtaacaataagtaacaataagtacggttacaaaccttgcctttttttaaaataaaataaaataactgaagaccatccatctcctctgattttgatagaaaacaatcagagtaaaataattatatcttaaagagtaatcacagaaatttgaaggaagaaattgcccaaaagccatttagatattataatgactatttaccttcaaatagtatattaaatcctcattatcatctaatgagagtgtcaagttttctagaatcatactgataaagtacatt

SEQ ID NO: 400358 - DNA, 837 bp, Cannabis indica
tttttcttttcctttattcttcacttcttgcccacaagttactttctcccccaaatccactctcgttctcttctccctctcccggcctctaagctttagcaatggcccaacaagcacaacccatcctgcatgttgttaaccccaaagcctcacgtccaccgcaccctgaagcctttattctagagtatgacaatgatcgactaaggggatttcttcttttaaagtttagggttttgctcaaggatatggaatttcttatttgtttgggtaattattaaataagagaaagaaaattcctcaaaattattaaatataattaaaagtaagatttaaaatttatctgtgaaaatttagaggctgtttggaataggttaatgctagtaaggtaatggtaatgtgaaacattaccttgtttgttttgaggatttagctttggaatgttattcccctagtaatataactacccttaagaagggtaatgtccatactttaaaaaagggtaagattgaattattacctttcattatattaatttgaatagcatttttgaattaataaacaaatttaattactaataagattatcatttattataaataaaatattacaatatatatatttactctgtgagatcgtttttttttaactgagttatttttatattattagcaataacatatatatatatttattatacataaattttatacggatggtgtacataaatgacatagcgaacaaaaataaataacatagtgataaaatatatagaaatgttcattttaattaataaaaaatacaataaaatttagggtttttattttttatttttacact

SEQ ID NO: 400359 - DNA, 1076 bp, Cannabis indica
agtttctgaattcttttcaatacaattgttatttcactcgctcaaccacacccccaattttgactacaacgaacaataatcaatactatgaaattgataatccgcattgactaattaaacatactgaaattattgatgaaaatatataaatcagcagagaaaaaaaaacaaacaaaaaggaaacatcaagggtcaatcggtaaattgatcccatatatggattaaaagaaacctggaagtgggttgggagcgagcggaggaagaaggcaggcccggatctgaaggtggatttggggattggatgaagtcttcgtgttgaagctgattcattaggctaggagatgaactgtttgggttgagcaagttgagacctttaacgcagtagaagagaagagcttatctatcaaatatctggtctttcgccgttgttcttcttaccggtaattttgaactcttttttaattaacatggatacaatacttggacgacaatatctacaaacactttattctctttttttatttttctttttttaaaaaaaaaaataaaaaatcactaaccatgcttaaaattttaccccacgtcaaattttaattttagtttctaaataattttaggatatttacggtataaatatcataagtttttgattttatacacttaaataccacacgttttttttcgacgaattaaatatcttaagttacattacactttcgttacttctgtcactatttttctattaaatcctatcaaacatagagtatttacggcataaatactttatgttttaaatttcatacacttatatatcacatgtttttacttctggtggattaaatacttaaattacatttacattacattcatcactacaagtctcttaaatcctattataaggaattttttttaatattatacttaaaattgattttatttataaaaataccttcaacaaatttatttgcaaaaatattaacgtgtcacgtcatctaattttattggttactacaataaatattataatatcgtatatttaaaaaatttctagtatctaagtaaatttactttaaata

SEQ ID NO: 400360 - DNA, 739 bp, Cannabis indica
tggttaggtgaaatgtcttttctgggacattaacaaagtaaacttgtaaggatgtatagggtttacatcggacgagatcgatattgatagtagaatagatatcttaagttactgttatatcttttctaagtcaatattgcttagttgatcttagatcaattgatgtcaatcctgagatggtttagctttaagctagttgtattattagagttctttgacttgttcattactggcttacccgtcggtataactcatacttatatcttgggaactcgataatataactgagtgggagccttaatcatagataaagacatttatagcttctatgattatttagaagtaaaatgatagtttcctttgagcttggctaaatgagttaaatggtggaggactcattttagtaattaaattagtttactgaaatatcatttataaagagctaagtgtttaaaagataaaatgtactgaggggtaaaaaagtaattttgtccataatcgatgtagaccatctatagaggatcattgattagtttgattgaaataatagatgatttataatatatctatattagatatataaagcattctatgtaatcaagagtgtaattgtgagtctatagtagagtcatgataaattagtaagttaagaaatttacttggtaaatttattagaatatttttagcctatctgtcgaatcactttttagagttatttttcttctttgttgttactttt

SEQ ID NO: 400361 - DNA, 449 bp, Cannabis indica
tagctttttcaaaaattcttcaataagttatttcttaactccttaccaaacatctttttgtcacaattttttgagaagcaacttttaacttttccaaaaactataacaaactggccctaaatcaactctagtctctaaatgttctacaatcttattatttcagtaataatatattctattaatgataatcctacaatcaaattaatatttattagttagcagtcttataatatgtatatatcaataaaaaattataaaaaatatttaatattagttaatacaattaattaacttaatatatctctcatattaaatgtgattatttaacgaaattattagtttaacaatttttttaagttaaagttaatatatataaatattaatttaaatttgaattaaacgttaattcatgtaactatctaacggaaatattggtttaaatttttttt

SEQ ID NO: 400362 - DNA, 1122 bp, Cannabis indica
acttttttggaaagtgcagccataacttcgcctttgtaattacgcactactgcaccaattcctaatgtcagacccccgaaagagtttctttatgtaattttaataaaaaattcctttttttttttaatttgaattttttgaatttgaaaaaatgtgctctcccttccctttccgctcccctcccctccaataatccttcctaccaaacaaaagaatttaatcaccttcttctccactccctccaagtcccaactccaaacctctccatccctccataaattctctctaaattctctctacccaataccaaacataggctaaaactatatatatataggagttgctgtagttgaaccttctatcgttgcttcggcaactatatattataatatacagtacttatatctctctcttcagtttcgtagttatcttcttatttttcaccacagctaatactaatagctattcttccctattgatttcgtaacttgcgattctcttcgctgatcagagcaaagaaattctctccggttatcgtttcgatttcccttcaccatggcttacgaggatgatccgtacgtcttcctcttcttttccttctaaaaggattagggtttcgttcgattcaattcaattcaactcatagttattgttggtttcaggtaccgagatgagaatggcgagccactgatggactacgacgacgtgccttccgataccgatcaaaccccggagcgcaatcagcacctcttagatgacgatctccttgaggatgatgattggcaaggcgcgcgagagcggtcacagaccccggtccatggcactgcgtccggctcgaaatcgaagcccagaaagaggcttattaagaaaagccattccactagggaggatgttgtggccccggaatttatcgatgatgaggacggcgatgttgacgcttttgttggggatgggtcagatggaaagaggaagaagcttggtgggggtgggaaggagaaaggacataagggggaaaagaagtttgggaacaaagctgggtcgagttcgcggttgtcgaagaggggattctcggataaagcggctagggatcaggatggtgaggtcaaggagctgtgggatact

SEQ ID NO: 400363 - DNA, 307 bp, Cannabis indica
aaataaaaattattaaaataagtatttttataaattttttttggtggaaacagaactaccatactataattttactttagctttttttggggggggttctgtttgtattctgtaaaataataagtacaccctattattagaaaaactaattaggatttttacctcctgaattttgatactgtatcaaattacattccctgaacttttaaggtcattaaaaatactcccggaactattgagattgtcggacttaaggatttttgtccaattttagtgaaaaaagtctaatcatggatgaaagttcagg

SEQ ID NO: 400364 - DNA, 605 bp, Cannabis indica
gtttttgttggacatatttttatcttttcatgtttttgtctttggcccttaaataaacaaaaagggggagtaatagtttgtttataatttcttgtttcccaactttggatcctttttccagggggaattgggtttagtacttgtgattacttggattaaaagttagcttgttatttcgatttttgattgtgttactcaggatgagtttttgtttgttcttgctaactttgatttgtaggtacttctttgttaaaaaatattttgattatctaaagtgtcaaagagggagattgtaaagtcattttttgacaatttagatgccaaaatttttttattttatggtgagacttctttgcattcataaccgattttctcaccttgatttttcgatttttattgctcttttctatgttaggaaagattaattttcagctggacttttcttgtatggaaacttcttgtaagagaagcaattctcttatggaaagttgatttttaaaggaaactttgattattgctatattccttattaaattcgattatgtcttaatgtaattagattatacagactgtttatggcaggaatcaagacccaatacaagatc

SEQ ID NO: 400365 - DNA, 600 bp, Cannabis indica
atataataactataaaacaatacaatataacaattaaaataataagtggaacaacaaaaaacaactgtagaataacagtaaaaacttaacacaatacacagtacaaaacttatatagtatatttgaaggaaaaatacagtatttttgaaaaaattccgtacccccgtaaaaaagaaaaaagttgcaaatttcagtatgtagtgtaaaaatcccgctaagaaattgaggatatttgtgggtggccctcaaaagttgaatttaggaaaatgaccccttttggttgtgtggtttttttttcaaacttggttgtgtactttttgttttaccaatttaaattttctcagtgtggtttttgcgggtgtaagatctcgtggtatagttacaaattattaaattataaaaatcacatatgtaatttggttttaataaaattttataactcgcaccgcaaacacccttaataataaaactggtaataaaatagtttttttgtagctacagaaaacaactctgtaacttcagaagaaaccagaaaaacaatcactgcagaaaagtaaaaacacacaaggtttttatacgtggtttcaacaatcctttcag

SEQ ID NO: 400366 - DNA, 1238 bp, Cannabis indica
gcccaaggccttcttggaggtgattgtgttcatgggttcaacttttaaccatttggtgaagtagttaacaaccactataccgcatttcactcctcctttactacttggtaaagaccccactaagtcaattcctcatactgccaaaagaccaaggacttctcatcaaagtaatctcaattggtggtgcacatggaacctttgtgtatcgctaatattgttcacatttttgaaaatattcaatacattatttcttcatcgttggccaaaattacccttgacaaagaatcttttttgaaaggcttagtccaaaagtgtggtctctgcaaacccccacccccccccccccgtgaactttgtggacaatggtgcttatctcagttatggctatgcatttaagatatggtatatgtaaccccctgtagtaaagctctctatctaaaattatgtacctaggagctttgtattgaatcttcttggcagtagccttgtcatctggaagctccccatagttcaaaaattgatatatcagccctatgcaggaatttgagtgatcaattacagtctttaccccttgtgtttcaatacatggagtttatagatggttaatttgttaggttttatgccctaaataaaactatattttaatgtaatctttatctttaaatatcactaaagaaacagaagtatttttcatcacattgtgtgtcatttggttcatattatcattcacttatttatttgatttaaaaattcatccaaacccatatcacatttatattcttgtttattgtgccgtcagcacagtagaaagtaatcaagattatgtgattaaatatgttttcctagatttatcagtacactgggttgaactgatatgaaaatctacaacatagtttacttgcaccttggataagtgctatgttctttccagagcattggttaaagtaaagcttgagttgggtgcatggagtatgcatcggaagggaccgatattgaactttgattcagatacattaaactcaccgtaatatctattcaattcaatatcacctaactaatcctagatcaaatgatcttaatcctgatatggttaggctcgatctcaggagtattatacatgttcttttgatttgttagttaagcctacttttggatcagggtgatacgtacattttgggaacatggtagtacaattgagtgggagtgctaaaacatagatatggaaatctatagcttct

SEQ ID NO: 400367 - DNA, 412 bp, Cannabis indica
aaaaaaaaaaaaaagaagagaaaatcagttcttaaaatactaaaacataaattaaaaataaaactagttctacaacaaaatgagtaaaaacgaataacacataatacctcataaactggttataattttaaaaaaagtggggatcaattctaaaaatactgaggcatccagttccataacaaaataaataaaaacaaataacatacaataactcaaaatataatattaaaaaagtggttatatttataaactagatataaatttaagacacagaaattagtttcgtaaagcaactaaaataaaaacttacacataaaaattagttaaataaaataaataaatcaaaaatcggttcattgaattaactaaatcaaaaatcaattctcgaaataactaaattaaaaacaagttc

SEQ ID NO: 400368 - DNA, 1257 bp, Cannabis indica
ttcgatctgatccaattcatttcaagcatctaattggatgttggattgtatcggttctatccattagatgtatttcatgtattgcagtaattcaagtttatctattttagatctagtattttttgcatcagatcggatccatctaatattttagatccagtatttaagattgcattaagtctaggttaccctaagattcgtcttgtaacaccacgatattttgccttattttataaaatactatttctaacgcattaattgaaaagactcaaaactgtttagaaatacacagcggattttacaataaatatgcaaaaagtgaatgatcattcatattttaaaaaaataagtagttgtgtgcattataaatttacaacatccccctgaacttagattactttactatctgaaaacaaaatcaaggctccaccggcgttctagaccgtttgttcgtccatagcccctcgcagtatacatattagaactgacccagctcatcacgcttatattcaatgttccctgtctattgtctatataagagaaagtaaaggagtgagctaaaagcccaataagaaaatacttaataactaattctagctatttaataattataaataattatcaaataaaattactatttaaatatatttattaattagaccctccaaggcctctcaattaataaataaacttttaattctattttcttctcaattaagccattccttggtgaaaattcacaaacaagatatagtctttttagaattttaatagattaattaaaaccaattaactgagactataaaacattaatattattccagttagtgtggagactatgaccctatgtaattaagcttccagcaagtagatcttaaatttaccaagtaaatttcttaacttattaattcctactgactccactatagatttggaattgcaatcttaattacatagagtgctctattaccaaaaataaatgcgatttgaattacccatgtttcaatccaaatagtcaaatatcctctatagatgatctacatcgagtgagaataaatttaccattctacttttcaatgtattttatccttaaaacactagctagttgtaaattatatttcagtaaaataatataattaataaaatgaggcctcaatcattcatcgcgttaagccaagctcgaaggaaatcatcgtctcaattctaatagttatagaagctatagattctatatctatgattagcgctctcactcaa

SEQ ID NO: 400369 - DNA, 1328 bp, Cannabis indica
gacaagatctaccagcaattactgccaaccggatctgcgacaacacttgaatcgaaagaaaccttaccttcatcaacagcttggtccaaagcaagaggatccaatctaattgcggataaatgagctggaggacaagtttaggagatatcaagtggggaaattagagaaactatcttgatacgactctgacgaggaacttgagccgtatcacccagatattacgaataccgcttttcctttcggatttaaaaacccacatgtctcatcttatgacggaaccacaaatccagtctcgcatttgaataactttaacacaataatgcgagcgagtaatgtgacgaacaatttacgctttattttgttccccacctcacttgttggagcagcgagtaggtggtttaacaagtttacttatcattcaataaattcctgggagcagttgtccagggatttcaagaagcaatttcaagctgctagggataggcgacccgaagtggcctcgctaaccaatataaagcagcagcttgacgagacacttaaggcatacttaagtcattttagcacggctgccgctagggttagaaatttggatgatagcacacagcttacagccatttgagctgggatctctactaatccattaagtgcagggcgcgacttgtgggatgacttacaaggacgtccggtgagaagtttcactaagttcaacgaaagggctcaggtgtttgtccggaaggaagaagctcgaaaggaaatgaacttgttgaaaacaagcttaggaagcaaacccggcaatgtttcaacaggtactgcttccacgagaatcgataactcagggccttctggtccaaacaaaaaggacagaattaaggaaccgtcgaatgatagaaagaaacaatagaagcatgacaaatacctgtaagtgtatactatttataccgaacttaatgaaactcgggagaatatttacctcgcacatcagcagaaggtggccttcgataaaccctagcctatgaggaattcaaggagcaaaagagatccaaacaaatattgtaaatccataaggatattgggcatacgaacgatgaatgtcgccaaagtaaagacgaaatagaaagtcacatcgctcgatgtcattttaaacagtacgtgaaaagacagggccagggatacaaccagcccggtctgcccaataacccaaacgaccaggggttacaacctattcctggtgaaggagaggacatcctggttattttgggagggccacatatcgcatgagaaagtaataattcccaaaaaagatatgtgaaagagataaagaacgagca

SEQ ID NO: 400370 - DNA, 728 bp, Cannabis indica
aattcaaggagaatttttaacagttcacgagtatgatttgatgcatgtcaaagtttgaaaagacaaaaatcctaattagcctttacttttcgattctccatagatatatttttaaaacattttatgatttaaatgtataatttttttagccaaaaattttaagaattatttcataaatattaaaaaaaacaaaaatattacaaaaatacatgtatatatatttttaatatttttacgaatttgatatttttttgtaaacatatagacatttttcatttcattaattgtttaaataacaacattatactatgttgttttcatgttgcttttatatttgtagtatgttattttaataggttctgtaaaaaatataattaaaaaaatatgtaaattaatatattagaaaaattctgcacacttcttaaaaggagtctactaatacataccctatctgtttcagcatctactaatacataccctatctgtttcagcatctgaaaaaaataatttaatctaatttttttgatgatcgtctacgttgtaattatttaggatatcatgcaaaattttaaaaaattcagaaatatttaataagtcaaaaataagattcaaacaagattcaaacagtctattttacatgcgtataaaataaaagaatctcgcatgtaacatactatttgaactcaattttcggcgtgttaatttttttttttttgaatctctcaaaa

SEQ ID NO: 400371 - DNA, 663 bp, Cannabis indica
cctttaggctttctagacctttttctagcatacacaaaagtaagtagaggcctatcagtgtgttggcttgttggatcagattcagaacgtttgattagattaaggtgacaagtacatagtctgatttagtacaaaacaaatgcaaatatgggacaaagtaaagcagtcaattactcactctaaaactatttctactatgagtcttctcttgtcatatgagtaaatgatttatgcaactaaaattgtacaacaaaacataatttactattaagttaatttaaatttttatctcaactttaacatgtatataataataatattatttattactattgagtgaaaattattatgtggataaagaataattttaaattattttttaatttggtggtaaacatcttactttataagataataaaagatggattttgaaaagttacatcttttattggattataagagataatcatctcatatttaagataaggaaaagtgaattatgagagttacacttttataaaacttgtattatcataaacaagaacaattaagatcatagtgatccaaacttggaagagtaaatttagagtcaaaataaagtgaatcaatgtggattcaaaaaaaatatgaaaagataattagcttgttgactggaagttcttc

SEQ ID NO: 400372 - DNA, 502 bp, Cannabis indica
caaatatcctccttcaattacattatgcacattttttaaaacattttacttatgtgaccatgagttaaagatatagttgaagtacaatgatctatttaataattttgagttatctgaaatctaatttaataacattaaacatataaacatataaacatcagctataagaatgcatatacatattttcataattcattattagattgttatttatgtatttatttttttgtctaaactcttgaactaggccaaatctaaatcgtgttagtattacatcaacaaattatttatcgaaataaataaaatataattacaggtgattattgcagcaattttataaattcgagaaaatttttgctaaaaaagcaatcatgaaacaaaactttataatgatcataaggaagacaaatcctatttacccatcgttttacctttgtaattaaatttaactttgttaaaagtacggatgcatgtaacttaggtggtggagttgaaggctttc

SEQ ID NO: 400373 - DNA, 804 bp, Cannabis indica
tatacaatgccaggtacaccccaatagaatggaattgctaaaaaaaaaaagaatcgcacacttcttgatatggtacattgtatgattctagcttaccagagtttttatggggtgaggcattaaggactgtcgcttatatcttgaatcaagtgcctagcaagtcggttccaaagacgccatacgagctgtagtcaggcaacaaatcgagtttgcatcattttcacgtttagggatgcaaagctgaggtaaggccttataaccctaagtctaagaagctggatttgaagattatcagtgggagttttatatgctacattattaattcgagaggttctaggttctattgtccctctcacaccaccagggtgatggaatcagaccaagctctctattttgaggataaatttggttcaagttaagggtcaagagaaattgtattcagggaagagcgtttctatttccttgtacctgttgcatccgcttccgcttctaatcctactaatgatcctgtgattgaacaaattccaatagaagctcatggtgaaccttaagatccaatacaagatgaaaatcttgatttgggggacgatgaggttgtggtgagaagatcacaaagagcctgtaggcctgctattcctgatgtgggagatgattctgagccagccagttaccaagaagcagtgaatagtcctaaatctgcattgtgagtggatgcaatgaaagaagaattaagttctatggagttggttgaactacccaaaggttgtagacccatcgggtgcaaatgggtgtataagatcaaac

SEQ ID NO: 400374 - DNA, 596 bp, Cannabis indica
aagtttgtgggtttgacgaagatggggacaggttcgtgtggttccaacggggatggggacgggttcgtggtttgacgaagatgaggttttggctttgtgggtgtggagatctcgcaggttgatagtcggggccacgcttcgaagttgcagtggagatctcaaatctggtttaaggttggagaaacacatatgagatcttgggggtgtagatctagaatttttgtatatatgaatgtgtgttttgtttgatctagctttgtttaaatttagttttaattttatttaatttttttagtgcgattattttgatatgaaaagtagggtgaagtggtggtggttgttgcagtggtggtgatggtatatataatgaatgaagaagataaatagaaaaaaataatgaagactatctctaacaaagaaaaagaaagaaatatattaaaaaatagggtttttttttttatttttacacttcaaaactaggttttttttttttttttttgaattttttaggggaattctacatagaaactcttattgcaaccagcgctacaacttaaattgcaacaaaaaatcgtatagaaacccctattgcaact

SEQ ID NO: 400375 - DNA, 680 bp, Cannabis indica
aggtagagttttttagccaaggatttcttcatatagattgaagacaacatgttccagaggcctagggccttttcttcatcaacaacttccctcagaacctcatctccaagactgagcaagatagcactgtgtgcttttgtttcaatttccagcttctttctcttgtcatcaatcaggtccaatgcataaggatccagagcctcataaatcccttgatgcaccagaaaggctctcattttaattctctacaagctgaaatcattggagccagtgaatttgtccacctcgaaccttgcagaagtcatttcagatcaggttcttgaagcttgaatttgattcttgatgactcgaatttggttcttgaaagtttggggatgaatcttgatcacttgaatgctgttcttgatcttcaaagacagccttgctctgataccatttgtggtgaaaaacaccctcaatacttggccaaaccagtgccaattaacaacaagaacagcaaaaacataacaagcaaacaagattaaattcaaaccataaactaaaacaagtaaaatgaaacttaataagactttagttttgaatcaaaatagaaaactatattcaattgtcaagtacctttacaatccgattcatgcactcaattgagtctaagtgttacacattacatatcaaacctcaca

SEQ ID NO: 400376 - DNA, 865 bp, Cannabis indica
tcttgcaaaatcaggatgtctgcagtcaaagtctttccacgcggcagaatcaacaggatgacgcataacaccattttctctcacacgaccaatacgatgccataccatctctttggatgtatgtcttgaactgtataatcttttcaatcgaggagtcaacggaaagtaacgcatcactttaagcgctactttttttccacttgtgtcctcattaatccatctactggtcccgaacacttggcaaaaatctttcgaggcatgctcattgtaaaataaacaacaattgttcatgcattgttcatgcacacgtggattgattcataccctaatcctaattttcctagttttttcttcgcctcatactgtgttgcaggaattttattatcctttggaaatgcaaacttgaaaaacttcaacaattcatcaaagatataatttggtatttttcccaaatttttcaagtgcatcaactttgctataaagttgagggaggatatccaatcgcaaccaggatacaactctgcatcaatctcctcaaacatgtcatcataatattgacccctctgcatgtcatcatcactagctcttttgtcatcatttataggagggaagaaatcttcaatgacatccaccatctcatctgcatcgacattgatgttagcctcgacgggttcatccgactccccatggtaaatccacctctcataattgctttcaaaaccctttgtgaagatgtgtgcctccacaatattcaaaggatgcaatctagtattcttgcatttaacagaaggacagaaaattcttccgtcacaatctttgtgtttagacgcaagtgttgggttttatgccctaaataaaactcttt

SEQ ID NO: 400377 - DNA, 668 bp, Cannabis indica
ctagcaagagtaggtgtattaaaaggcccccatatgtctatatggatgagatcaaaattatgagctgcaatattatgatgagaaacaaaaggaagccttttttgcttagcataatggtacacagaacaatgaacatcaggaatggaattattgtaaaattgcaaagtttattcatagaatgatttttgatacaactaggatggcccatcctatagtgccaaacagtttggtcacttattctagaatcagacaaagaaaagataagaggtacactgattttagaatcacaatgaatgtaataaagcctgccaatcttctcacccatcccaatcatttgcctcttcaaattgtcctgaatgtcaaagtttttatcatgaaagaaaaaggaataagcagcagtatctgttagtgtggaaacagacaacaaattatgctgaaatgctggaacataaagaacattatgcagaggcaaattaggaaaaatattcacatcaccaataccttcaactttgatactaccaccatgtggtaacttgacatgagtaatagaattatcaatatgaagattatggaataattttctgtcacaacaaacatggtgcgtagcaccggtatcaataatccatctagattaagaaagaaaagaattctcaccagagaaatgagag

SEQ ID NO: 400378 - DNA, 599 bp, Cannabis indica
ttttttgttttttcccaaaaatttataatcctctattttaatattgtaatcatgtaattgacatgaaatgtgatattcttatttaattggagaagtatggcattcatgatttatgtgtgaacgatcatatttgtacccatatacactttcaataatttttcatcattttctcctttaattaatataggtcatgaaaagattttccatctttaactctatgtttgaaaattgaacttttgtgttaaaaaaaagtgagaaaaatataagaaaagaaaaataaaaaaaaaataaaagaataaattctcattagtacgaaaaaaattacatgaaaaatcacttgaatcaacaagattttccataacaaatataaaaaataaattcttttttttattcttaacatttttaattttttacattttctttatctttttatttcttcacttaaatccaactttcgaaaataaccaaaaaaaaaaaaaaatgttttcattcactttttgctgtgtggagtttttcatttgtttaggtttagttgaacgtttgcatttaatcttagatttgttagttttattagttttttttttctggaaaatgttatt

SEQ ID NO: 400379 - DNA, 710 bp, Cannabis indica
gaatatactcttatacaatgaaaacaaaatagataagagtttagaaaaccttacattgattggagtggaataatatgactccttccattcagatttctagtccacgattcctttctgtcacagagcattatcaagaactgaacctagatctccttctctccttcgggttggttaccaccatgttctgcactatgattgagtacttgacttgctatgtgtgggcatgacactctatcactatggccaaattggttgaagaacaatgaaggaggtttcaaaattctatagaaggtgtctctcatctactagttgtcagagaaagaaaactaggtttgatttggttgaagtcaatagttggatgagatgagagcatcatgttccttttatagtgtttcaactaaggcttaagttggaattatatgaattaaaaaagaataaaatattgggcaaaaatcaccactaatggtcggccacttaatggaccattctctagttacaattttgcatctttatttcaaccacttatcctttttcaataataccatatcttccaatatcaatccgataaatgccaaccctatttattttataattataattaattatcaaataaaattttcatttatattatttattaattagaccatacaaagtctcttaattaacaaatagaccccaaaaccttttttcttcacaattaagctcttact

SEQ ID NO: 400380 - DNA, 671 bp, Cannabis indica
aaccccacattcctatattcttcttctctactctagtattattttttattattactacaaagtacgtacttttctctatgatgcttgctgatgataatgtcactatgactacagtaatattcaagaaggctccatggatggagatgacgacgacgatgatgatggttgtgattatgctccagctgcctgattttatattatattatatatataattaatgccctgtaaactataattaagggatcgatttaaaatcagagcaaaattttcttatagtataggatatgctacgcagttgaggaggatatgccctcatgagctcccttcctatacgtaattgttaatgagagggtgacatcttaattaagaactgtgctgtctgtcacgattgaatatatctaggatccatatatattggccatattcaatttttttacaaattaaaataatatcgtacgtgtataatgagtactataataatatttccaatacttcatgcatgccgagtaagcttgatcgtcttaatatttccgatcgatcgggcggcattattttttattttaaggaatattgcgggcgcagagatgtttaagcagcgtgcagctatattatatattattttatataatataatatttagattaatatataattaagttataaataattaa

SEQ ID NO: 400381 - DNA, 517 bp, Cannabis indica
acatttcttcgtctcaatgtttattcaaatgtttgtcttaaaaagatctatccattccgagtgcccactttttaatttccaactccatgagtgaaatctttagccgtgaataaatattttcaaacacttgtggggttaatagagctgagacttctacttggtacatttttcaaaagcatttatgtgttatagtttgcggtaaaaaggttcaggtttgatgcacacactcacaactctagatttatttaaagtaattttgtaaagtttttattgacttgttactaacattttgtttgaatacttgtgcaatttttaaaaattttgaccagaaaaatatcatgttaatattctttatgttcgcttgaattgctagagactagcaaaaagctagttaggggttgtgattaaggctcaaattggtacattttaagtctttaattatgcatatataattaatataaattgaatattttataattttaatgataaatttgtttttattagaaatatttaattt

SEQ ID NO: 400382 - DNA, 564 bp, Cannabis indica
gttataccataaaagtgaagactatgagatttagagggtcaagatcagcgagctactccacactcaaaaatatttctgtgatggacgaggtgcttggtgtaggtacttcactcgaggttctaatggccaacaatatgaatacttcccatgggtgcacggagacatggtgaacacgagtaatcagttcaactctctctacacatgtcactctaaggaagaatattttgaaggaaatagttggtatagtactacgagtagctactcatggagcaaatgctcgagagacgaaactatcgtcatactggaaaaatccccatagtttccaacaaggccacacgaccaggaaacaaccataggactaaggtcgatcaatgccttagataaattgtaagataatagagcatgcatgacaacatcaacatgaagcggccaattgatacgcacatcaccacacatgatgttgttagcccaagatatgtttccaagaggggggtgaattggaaatttaaactaatttcggaaaattaaaacttttaacacaaaattatgcaattagtcaattaa

SEQ ID NO: 400383 - DNA, 1084 bp, Cannabis indica
gtatcgactatagctgacggttttcagctgttgggaattcttttataacgatatttttctacagtcgcctattctacccagtattcatgacgctcgtataggcaacaattttaaataccattgagaattctttacccgatgatgtaaaaatatcaggaattttgagttttttagtagtgagataatataagtaataaatattcaaaaaagatcatttgtctataagttttaaaatgagaaaatttactaacatagacctataatttatggttattttctataatttccctataggaaccgattttatttccacattaatatataataccaataatattaaataataatttgcacttttgaggttaaacatgtaatttacaactacaattataagaataaaatagggtacaattgtaattgtataagattctaatattttattattagtatttcaaatagagtagtttgtatttctgtacaactattttgtatcaagcacaaatatgatctatcaagtaacatgtgacaataaaaaaaaattaactactgaaaaaactactaaattatttattaataattcttttgtttaaccaaattaataataatttaatagttttttgagtagctaatattttttattttaattattttacaggtgtttattaagatttttagaaatcgactaagatgagagctgaggaattaactttattagtaaacaatggagaaagagatttttacatggttcgtatattaatatattattgttcatgtatcacttgtatttagttgaatgaccttgatgtattacaatgagaatcttacaagctcaagcaccctagcttcttgctatattatttttacattaattttgcactttgaaaaatctctctcctttgttggaattattttacctcgatctagatttactacaatgtatgttgtttaacatcctaatatgaatttcgaaaacaatgtaaataaacacatataaagtttaagaaaccttacattgattgcagcgtgttgtgaaaattctattgctttataattgcgcaagtgtacacaatcacaaacaagtaat

SEQ ID NO: 400384 - DNA, 749 bp, Cannabis indica
ttgtttttttcctcatgtttttttgtttcaactgatacaggaatgggattacatatatgatcagaagaatctcttcattgcgaaagccttttcgactgctacattccaggttatagaaaatattaagtcttgcctttcacctgaacagcttgaaatgttttccaaaacctgttttggacatttcttgaagcttcctgattttaaagttcaaccgcaagtgtttcatgggttgttgttgcgggaggttcaacaacctaatgatgctgaattgtgggttataatacgcggtgttaggattaggtttagcattgaggagtttgctttgataactggtttagattgtgaaggtgattgtagtgtgttagattttaagcaagacgttaatagtctttgtgagaaatattggccaacttcatcctctatcactaaagaatctgttagggaatgtttcaccaccaagaggtggggtgattctgatgaggatgctgttaagttggcagttttgtattttgtggaatggtttttgcttagtggcactaagcataaaaatgtacctaggtctattttagatgttgtagacagtgggaggtacgatgaatttgcttggggacggagttcttttgaactgactatttcgtcattgaagggtaagcttgacagttgggttgaaagtgttagaaaggcaaggagttcggggaagaggccgagtgttttttacactttgattggttgtcctcatgtttttcaaa

SEQ ID NO: 400385 - DNA, 919 bp, Cannabis indica
cctttttcatgggagcatgttttctgtacaggaaaacagattgggttggcatgtagattgtctctgggtcatcagttaggacagagaaggcagtgactttagaggttttctctaggggtttgttcagctttggaactttcccttcttcccgttgccttgcctgccattgttattgaatcttttgctgcttggagttgaactgctaggatactgtgggttctgagcagatgctcctgcggaagggacctacagttggcccgacctaggttcaacatctgctcgctgaatggcctcttcgagcttgataaacccatttgcttggtctaaaaactctgccataaatcctacatggccacttttcttgatgtctttccacagttctcccagtacttcaatgccccccagtatggcggctagcatcctcttcagttaaccttgctacttttgtagcttctatcatgaactgcttatgtaggctctaaaaggctctcctggtctttgtttcactttgaccaggtctataaaatgtaatgggagttgacaagaagaagaaaactgcacatggaactctcaagagaaagctttccatgaattaaaccttcctggtggtaacttaaaatgctattgttgtgcgacctctgaaagtgtggcagggaaaactctacaccgcacatcacctcttaccccttgcaaatccatttgcatttcaaaatatttaagatccgactaaggatcctccttccctgtgtacatcttctaagtcgacattttgaacttgaggggtagttctaagacgttgatctttggagtaaaaggggattcgcgtgcccgaactagctcgagatcagtgagtttttggccagccaggccttggaacatattttttagttaatctaaatgtgcttgcacagatgggtga

SEQ ID NO: 400386 - DNA, 1011 bp, Cannabis indica
tgccctaaataaaacctttttttaattaaaatcttggatattcatttatcaataaagaaacaaatttatttcattacttgtttaatgtgttatttagttcacatatttgtaatcaagattatgttattaaatgtattcctgtgatttagctgtacacagtgtttaactgatatgatgatctataatgtagtttacttgtacctttgataatttctatattctttctagggcattggttaaagtaagcttgggttggatgtatggagtatacatcagaaggtgccgatattaaacttggataagatataataaacttactgtagtatctatctaattcaatatcacctagttgatcttagatcaaatgatctcaatcctgagatggttatgttctagttcaattatattatttatgttcttcaatctattcgtaaaagtcgaccaattgatcttctcttgacatacatattaaggacatggtagtttaattgagtgagagcactaatcatagatatggaatctatagcttttatctagacataaaagtgaaatgattatttcctttgagcttggcttaatagagataaatggttgagtactcaatttagtaattaaattagtttactaaaatatcatttatcgatagctaagtattttaaggataaaattcattgaaggatgtaaaagtaaaattatccctactcgatgttgatcatctatagcggatcattgattattaggattataacaatggataattcatagcatatctacatcgtggaacatacagagcgttctatataattaagagtgcaattccaaatctatagtggtgcaaggaagaattaataagttagagaatttacttggtaaattctacagctatttattggaagcttgattatatagccccatggtccccacattagttgacacaatagtgcttgtaaaactcaattaattagttttaattaatcaattacaattctaaaattagactatgacttattt

SEQ ID NO: 400387 - DNA, 658 bp, Cannabis indica
atatatataagtctaaataatattttttatcgttcatctttgaagaataatttgatttaattattttatttatgcatttgacttataaaaaaataaatatatatatagaaatagatataaaagaaagtttaaacgaaggtgagacgacatcctataaatcaaatgattcataaaaaattaaaagagttattaaattgttaattgcacaaataatagtaggtagtaaataaaattatgatgcatgaaattatatattcatcatacttataaatataaaaggctaaaatttaatatttatagttattaattattttttattgaaatagatataattttatttttttcatataaattttaattataatgttcttaaataaatactcaaagtgtagactatatttgttttaataaaaagagatcaggtagcaataatatttatatttcctttatattattgtttattttttctatttatattttatattttatcggttttactattttgtacttctaatctttcattaaaattcttttatattgttaatttttatcaaactgtaattttatataaaaatttaataaattattcaactattcatatatatctttatatattaaagcttcatagttttttttttgagtcgcctctcaactactt

SEQ ID NO: 400388 - DNA, 769 bp, Cannabis indica
ataataaaataagtaaataaatttaaatattttaaagaatataactaataaatttgttataaagtatcactacaaaaactataattcccgtcgactcttaaattgtttttaggaccatcgctaatgaaaattgagtgtttaaaagtgtcgactatagtagactattcacgatgtttttaaacactcgtgcacttttcttgacggtttaaatgagttacaagctaagaaaggaaatagggttttaaagggcatcccgatggtttgaaatcataggggaggcgatagtgttatagccgacgattttaaaccgtcgactatagtatctcctactagttttaaaccgttaggtaatgtggtttaaaaatcccgtcaatttttcaagtgaaactcccatttcagccctcattttgattcatttggctcaatttttcaatttaaaccaatttgtctgctctctctctctctcgctccctttcctccaatccaccatcacaatgtttgaaaacttattttacaaagatctagatttactaacatgtatgctgattataattctataatctaacatcctaaatatgaaatttctaaaaatgataaataaaacacataagagattaaaaaaatccttacagtgatggcagtggaataatatctcattccatttagatctctaatccttgattcatgtttgtagcataacatttagaattgaattagaagaaataagaggaagaagtctcaagtgttggatattattttaccaggatct

SEQ ID NO: 400389 - DNA, 1221 bp, Cannabis indica
atcttttcataggtggtcttgaattagatgttggaggaggctcatcttgttggctatctggacctccactaccaacgggtcgttgtgtgaaaatctgattttgacagcatcttcatcgttgaaggttatggtgggttctcctgcacgtgggattttaggcttcctttcttctacgaccaggatcacttcttcttgctcgtgttgtacagttcaagcataactttctcgagctttgcctgaatctccaactatgtgcgggcctccaaagataacttgcagatgtccatccaccggtggaggtagcaagtcttggttgttatcacccctctgattctgatcggccttgacatacttctatatatgcgggttatttatccttatcaagaatttaatttctcgctttagattgttgcattcattggtgtcgtggccgtagtctccatggaatcgacaaaacttggtcatgtctctcttgctgacatcttttttcatgggcgcgggcttcttgtacggggctagtgattgagtggccatgtaaacaccttctatatccttagtcaagatggtaaatgcagtatacttggcttgattctctcggggagcttgtttgattttgccagtgaactttccctttttcccattcccttgcctattattgttgctggaacgtttaccatttgaacttgaattgcttcggtaatgagggagctggacggatgtcccagtggaaggagcttttgacttgccaggtttttgctcaccttctactcgctgaatagcctcttcaagtttgataaagcctacaacacggtcaagaaaatcactcatcgagtctaccggtccgttcttccttatgtccttccagagctcaccaaggacttcaatgccccccaatatcgcggacaactttccgtcttcggttactcgtgaaaccttagtcgcctccgtcacgaatctgttgatgtaggctcggagaggctcgcttggtctttgcttgacttcgaccaggtctcctaggtgcaatggaagttggcgagaggaggaaaattgtgcatggaattccgaggacaaagctttccatgagttgaactttccaggtgccagcttgaaataccattgctaggcggcttccgagagggtggcaggaaaaattttgcaacatccgtctcctcgtactccttgcagatccattttcatctcgaaatacttgaggtgggacag

SEQ ID NO: 400390 - DNA, 566 bp, Cannabis indica
attttgttaattttttttttggttgtttttatgtttttgtgaaataattaccaattatttatttatttaactaattttttaatatataaataaaataaaaaaaaaaaaaaaaaaaaaaaaaagtaaaactaggtggtaaaaacaagacctgatagttgattctttctttctacatatgtatgtgtgtatatctctattcactcttcactgaccaagaatgtgataggtaccccattatagagttttcaattatttatttactgtggtagatatagaggtaggtgaatgaaccgtaaattcaccaagatagacagagtgagagaatgatcacacccaagaaaaaaagttgaaatttcgaactgctttaaagaaaaagaaaaattggggagaaatatttgtgtgtaatgaggataaataaatgacaatgaataaataattccactagctatatagccttgttactattagaaaaagatcactgagtgaaacttgttggattaaaaatcctaagtgggcacatatgtataatgtatatgctattataaagtgtgatacaaaattaagtg

SEQ ID NO: 400391 - DNA, 954 bp, Cannabis indica
tagttgcatacatcaaaagtgtataagaatatatcccaaagtcttttaagaaggatggagttactgtgcatgaattaatgattgagaagtgtgtttcgttttggttgtatgtgctgaagaacaacattttttttaagaaactttgcttttgtatatttttctaaacttctctctagttaacttcatatgtatcttgtacgagatattgaatattataattttttttaattgtttataacttttagtatattaagaaacaactattattatattttcaatttatacatcgagtatttgtataattatatttttttatttaaaaaaaatagttgttagtagttttttttaaactattaacaaatatttaataacgatataaaaaaccataaaaaattgataatttaaggaatctataaattttaacaactgaaactcaacgtgtacaaacaacgtgaaagcaacatgctcaagaaattatgaaactaaacaacgtgtttacaactttaaaataactgtaaaacaacaaataatgttactactaaatataagtaatttttcttcatatttacagtctctttctatcaatacacttacttgatttaaaatcaacataatgtgttctcttatcatttttcatgtttagatgtaagagataaagttaagtttttattttaacatgtaaagctatattcctttaattgttaaacaactagtgtagtgtatgaacaattcataacaaattttacaaaaacatgaaaataacttgatattatataatattttcaagttgaaataataagatgttgcaaaaacaacataaaagaaacttcacaataacatgaaaataacttaattattcttttgtagatattgtgtatttttttttttatttttgttgttttcaatcaaaaaaatatcaattgatgaaaaaataattaaagcaaacacacaaaa

SEQ ID NO: 400392 - DNA, 539 bp, Cannabis indica
caagtcaagagaaatccccctcaagcaagagaatgtccacatagtatgtgaatttcaagaagtttttctgaaagacctaccagggctacccccagatagagagatagaatttgtgattgagttggcaccaggcactgcaccaatctcgagggctccatactgtatggctcctaatgaattgaaggaattgaaggctcaactacaagatcttttaaacaaagtgtttatcagactaaattactcaacttggggtgcgccagtgttgtttgtcaagaaggacaatagtatgcagatgtgtatagactaccgagagctgaacaaagtgactataaagaacaaatatctcttgtctcgcatcgatgacttgtttgattagttacaaggggtgatcgtcttctcaaaaatcgacttgagatctggttaccaccaatgtgcgagaggaagatatagcaaagacgatatttcgaacacggtacgggcattatgaatttctagtgatgtcatttgggttaacaaatgccccaacaaccttcatggat

SEQ ID NO: 400393 - DNA, 418 bp, Cannabis indica
tcaactaatgtatgacttcttcgaccaaggcatcgcacccttgggatacattggactgcctctgatagccaaggaaatcccacaataagaatgttgatggcacaatttgtagtaatcgatgtgccattagccttcaatgcgatgataggccgtcctgccctgtacgaccagaaggtagtaatgtccatctaccacctggttcttaaattcctaacaaggcatggggtgggatgtttaagggaagaccaacatgttggaattattttaccgtgatctagatttactatcatgtatgttgtttaacatcctaatatgaatttctaaaataatgtaaataaacacatataaagtttaagaaaccttatagtgggtgtagcaaaattaaatgactccttctgctcagatctctaacctttgt

SEQ ID NO: 400394 - DNA, 609 bp, Cannabis indica
cttattaatcgcatgccatccttgtccttaatggtgaaatctcatctaaaattctttttcctaataagttattgtttccagttgctcctcgagtatttggcagtatttgttttgctcgcgatgtccgcccatctgtcaccaaattagaccctaaggcactaaagtgtgtctttcttggttattcttgtcttcagaaagggtataggtgttattatcctgatctcaacaaatatcttatttctattgatgttacctctgtagaaaatacaccttatttttcatcttctactactcctactagtcagggggaggatgatgatttgttggtttattctgtcacatcctctacgcctgatacatgttctggcaagtctcttgttccttcacctgcctcggttgtcacccccacaatgtctacagctccaccacctccaccactccctcgacctcctatagtatacacgaggtgcccccctcctccactttctgtttcatgtccttcacctgcatctttgtcattagattcgaaaatcaaagatgatcttcccattgcactacgtaaaggtaaacaccaatgtacttttcttatttcttcttttgtttcttata

SEQ ID NO: 400395 - DNA, 742 bp, Cannabis indica
gatttggcatcagtttttaagcctttgccgttggttattagggcatatgtcatcgattactagtatataattgataccatagtgtatttatggcatcgattatttttaaataaccgacgctatattgtacactatgtcgtcggttatgttcgaccctttagcgtcccctggatcaacatcaatagcaaattttgctaaaatcgacgctgaagggccttaaaaactgcctctaaagcccagatttgtagtagtgtacagaaaaatgatgttgcataatattttatcaacacaaaaggaagtaataatgaagaaagttattgcttactacaaccctacaatttttgttatttgggtatagttaaacacactacatttgatatggatatcaagataatggattgattgaaatgcacttctagttttatattagtgcaagtgggagtttgttgggattttatgccctaaataaaacttatttcattataatcttatttgttatcaatagaagattagagtcatttaagtttacatgttattttcatgattatggtttaatatacaatttctgataaatctagaacatatagttattcacaattatagtggtgtcatcacagtggaaagtaatcgtgattatatgctccaaagtttaagtctcatgatcagtgcactggatttacactgacatgataaacagcgataaagtttacttacactttggataagtggtatgtcctttcca

SEQ ID NO: 400396 - DNA, 607 bp, Cannabis indica
tatatactaatataaacatttacttctttatacagtttcgggaaaagaagacacatgatccaaaaactaaattgttaccgtttcagtaacagtggatagaacgattattggcagtgattcacgaaggcttggacgattgatgctgaaatgtataagactttttcttccctagcttatttttttaggttaacttgtaattaaatttattaacttgttaacacttagactaattttaaaatatttgtgtaatataattgtaatttttgcttccataaaatttatttaagtatattggctaatcataaaattaatttgaataatatttaatttaactttaaaaaataaatatttaatttaatttaaatataaattaacaaatatataatttaaacaaattaaacttctgaatttattataggttttaaactggaaaaataaattaattattgaagatttggcatcagtttttaagcctttgccgttggttattagggcatatgtcatcgattactagtatataattgataccatagtgtatttatggcatcgattatttttaaataaccgacgctatattgtacactatgtcgtcggttatgttcgaccc

SEQ ID NO: 400397 - DNA, 665 bp, Cannabis indica
atgaagaattccagaggaagattggcatggtttcaggtggatttcgaaaggaagttggcgtggtttctatcagagaatccacccaaccaaagaccctaacctgtgccaggagatctttgcgtcagcctctctcccctgttgagaaatttcctgaggctaggaaatagatctcggcttcaggaaatgggatcttctgatgatgaggggaatgaggtctatgcagagatcaaggctctctacgtttagctagtctttctaaagatatgtgtagtcggtctttctccgagctacttgtagacggtctttttaaagctatataaagacggtctttctcaagttcatcggcgtcctctctcatcgttttcttaagagaatgacttaatggtttgcccctagtggcatttttgtaaagacaagtttgtaacaagtctttggtttttcttatcttaaatgtcgtgtactgttttcattcaaacttaatacaattgtattttcttgtttttttattcacaatgtaaaaaactatatgatcaaatatacagcacttttgggtttctccattgctcataatcttcttgtttaagtagttagtaatctaccaaactttatgattttcgagctattatcgatttcctcgcaattgcagttataatctgccttaagca

SEQ ID NO: 400398 - DNA, 742 bp, Cannabis indica
taaaggatttttggagttcttaattatcgttgttgatattttcattgtttttttcttaccatcaaatagtgatggatttttcggatcttatcgtatctaacaagaaaaaggctatgtttcccaaagatttctaatttgatatggcttttggacccaaattctataacttttaatttttgctttaaaatttttatgatttactatgcagtgtaatacattacatattaattccgttgtattttaaaatataaagtgtgtttgaatatcaaatagtaattatatgtgaatttctattatcatgtttgacaaaattgttgataattatacaataaattaatatactagaatatttaatatgaaattttttaataatatacttaaaatataaattatttacaaaaatactttaataaatctcaattataataatacattgctacatcattgaaaaatatcttaattctaatataatacgcttgaaacaaaattaatctcaaattctatttttttttattattatttttttgagttttcaaaagtaatcttttagttacttgtgatgttgataagaaactaattagttacttttacgtaaaaataattattttaaaattatataatttgagattacaatttttttttttaccttttaaaacattatttaaaatatcttaataatcaattagctattttaagttatattgtgctatcttattatttaaaatatatttaggtaacctta

SEQ ID NO: 400399 - DNA, 555 bp, Cannabis indica
agagagagagaggagtagtacgggtgagggtgaggtagtttctaggtgttataggttatggattatggagaagaaaacaaaaaataatttaatattatttaaaaatttattatacaagaagagaattctaatttgtgtaaaaagaagtctaatttttgtaaaaaaaaaaaaaattcattataaataatatagttaaatgatttaactgttaaaataattatagtagggaattatataaaaaattatttataaatattaattgctaaaagagttcatgttaaatatttaattaactattttgaaaaataattaattataattaactaattctaaaaaaaaatttatagcctaaaaaattataataaccgttgaatattaataataacatttaatctgtataaaataacattaggaaattctataatgcactcccttaaaaaagatatatcgatacatctctttctgttttagtatccgaaataattttttagtcaaattttttctcatggtcatgtaaattatagttatttaaggtatcctgcaaaattttaagaa

SEQ ID NO: 400400 - DNA, 507 bp, Cannabis indica
gtccgatggggggtccgatgggggagattgatgggtctgattgtgtctaatatggggtccaatgagggaggtccgattgtgtaaataggggtaaagcggacaatatcatactaatgtgggagtcaaggtgaggtagcggacaatatcatactaatgtgggagtcaaggtgaggtagcggctcgacaaggtggaagagcagggcccaacaagtggtatcagagccaaaggttcaagcgctaggatagtgggatgcatttgcgatttctgaaagataccctcgatgtgatgacctcgcgattgaagatctatatggtgccttgtaacgaaagtttatctgatatggaggtagtcaggtagcgtgtcccgttgatgattacggtggtacaatatggagagatcgatgttaggacctgtgtcgaaagtcttcctgaaaaaggtgatggtcaggcggcgagttcccttggtgatagtggcggcataaggtagtttcgctggaggggagacca

SEQ ID NO: 400401 - DNA, 638 bp, Cannabis indica
taaaacttataataataaggttcgccggagaagtcaccgagaaagtcattggtgaccaaaaaaaccatgaaaaagtcatcggtgtaggaaaagtcaccgaaaaaattagtgtcatcgaaaaagttaccagaaaagtcactgtcgccggaaaagtcactagaaaagtcattgttgctagaaaaaatcaacagaagtaaatttcttagattaaacaaaaaataaaaccggttttataacattatgaataaaaacaaattattcaaaccagttataattgaaatataaccggttctgtaacataatgaataaaaataaataatacaaaataacttaaaacagttataattaaaattgaactggttcaataacagtgttataataaataaaaataaataacaaaaaataactcaaaccggttataactataatagaaccagttatataacataatgaatagaaacaagtaacacgcaactcaaatcgattacaattgaaaattaaaaagaaaattagttcctaaaatactgaaacataaattaaaaataaaactagttccataacaaaatacctcataacacataatacctcataaaatcgattatattttttttaaaaaaaatgggatcaattctaaaaaa

SEQ ID NO: 400402 - DNA, 931 bp, Cannabis indica
agaacacgaggaatcttgttgctgattcttttgcaaaatcgaggagacaaagacgggataatctcgtacagccaaataagaaatgcaataggaaatcctttaagcttgtaacccttctcaatcatcttcttcttagcaagatgttcaaaggtattttccatcttttaatgcaatcttcaagtgataaaaagtcttttcccacaataatttcccccatccaaaccgattaaacacttcaatgtaatcatccccattaaccatagcaaatataaagttgtcaatctttttcccttggggataaccatacaaatacccagcaaagaagtatacaagagctatcttcacataatcttcgtcatctttcaacgcaccactgaagaaaacactagcaacttccttcaccgtaagcttctcagtaagcccatgcatacaaaaaataccctccttgtaagcaagcaacttctttgatttgaagagatcaacatcataggatttagtacaatccaaaccggttattagggaaaactcttcaattccaaaacgaatagccttgtctcccaatttgaaccaaagctcaacatcatccctttcggtgtgaatctgccgcaaaagaacgagatgaatcagctgtatctgatagttaaagttgctcacatcaagaaaatggccaaatggagacttgcgaaacaactccttctgatcatctgaaaggttctcattgatatcatcaatgacattataaggattgtaaagttgaggtttcccagcaaacatcttcttaacatcaattttaaaataatattcccgtgagagaaaaaacaatataaacaatcgaaattaaaattacgaaaaaaaaaaatcaaaaattggttacccaccacaaagagaaaaactaaaaacttaaaataaaaacatatatattataaaaaaa

SEQ ID NO: 400403 - DNA, 1115 bp, Cannabis indica
taagtatgcaattccagtgctgttgttgcattaatcaaatgattaagagaattaatccctataaattaatattgtgatgatgtttataaactatgtaagtttacttataaaccaaagttttagggtgttgtcggtggcttctgaggaccctggttagtctttagtagctaggctatgatggagcttgttgttttgaactttcactgtcttacattttgttccaaaaggctattgtttcttgtccttctttgcttattttaaaattccacttttaactcttggccactagaaactatagcctccacaatcaagtgcttaatgtgtgttttttattattcttcttttaataaaacttaattattactacactaatgtaatgtcattacaatatcttactttttacctgtttcctactaaaactttggacagctttagttctttctttattttatgaggccatttatataaaatactacacatatccatgtaaatatatagaaagtttgttgtattatttttgcttctacaagcaagtgtacgtatcatctagatggataaagatcctatagcacaattttataattatttattaatttttttaaaagaatgtgtaatcattataattatagtatgcatatttgattatttttcttcaaaatttttaattaataatggagtaatttgtgacataaatatttaagtttaactttcgattatagataattaaaattaatttttgacggtaatattacttaagttatatttttgaaatttctatagtacttgaccattaagtgttaagtcaatggtcacctgactgtcctgatctaagtcattaaatttttattatttaaaaaattaatttaaatatattaatagataatgacttgacacttaatagttaacacttactgaagttacataaatataatttaaatattattattaataaaaaattaaaatttattcttaaatattaatcgacgtaaattagtgttaattaatttagtgtttaaattaagatttaaataatatgttctataaatatgtataatgtgtgtattattgtattgtatattttttattttagatttttgagatgaatttatatgtat

SEQ ID NO: 400404 - DNA, 814 bp, Cannabis indica
cgtactgatgtggtagcagttaagtcatacaatctaatagcctagcatatatctgatggcatctctatgcaactttatgtacacctcactaatgccatgatatgctattttgatggctatagatttgcctaacatatatatgttgatatctcggcgcaactctatatacacctcactgatatcttgatatgttattttgacagaaactaacatgtacgctaaacatgtatacataaatgcaaccattatactaatcttacctcactttcaaattcaagtgtaccggtcaacgtgagtgaaacagctgctcgacaatttatagcccctaaaccacattattcgtaaaactggtgagtgacccgctaaatcacttttcggggacttaaacttgaaactaaaagtttccctatcaatggataacatggtgtaacaccctaactaatttaggcatgttagcgtgatttttaacatattgtgcaggtcgttgctaatcaacgagattaacaaaaaacgtgatgaattaaaatttacttatttaattagaaacataaagtaatatatttataaaattttgggatcccgtttacaaaatacatttacaaaagtttgatattcatatacaaaagttttgtcgcctagcgactatacagcaaaagccctcatgtccaaaagatcgtacgctccaggcctaaccgccccgacatatacaatcttcatctgctcgctctcacagttgctcagccttagtcttgcccttacctacaaatggaaatagcaccgtgagtcgacagactcagtaagaaaaacataacat

SEQ ID NO: 400405 - DNA, 1283 bp, Cannabis indica
tcctaacatgctttaatattcaagtaaatattaaacaagtatgggcttactgaacagtgagccgagctttctttgatgagcttcggtagacaaacatggcagctctgaaaccaaaattgtaacgccctaatgctaaggcacactatagtgaattttcaattatagtgctatctttgctaattaaagaatttactcgaaaatcgtgtcaattttaaaaaaacttttatattaaatactaaactttatatctttacaaaattatttacaagtatcgggatcccatttttacacttttatacaaaatacaaaaaatgcataaccagatcgcacaacaactataaaataataaccccagatgtcccgagaccgaacactctaggccgcgctgccacgacatgtacaacctcatctcagcaaggctcacacttgttcagctatcgcctttcctttacctacacatggaagtagaactgagtcgacaaattcagtaagaaaagcacataacatatcatataatactgagttttatctaggttcccatacacctatttagaaggattaatagatgagtaagaatgttttaactaggatacgaccatgtaccatgtaccacatgcacttattatacatactagtgtaggtaaggtatggaccgcactttgagtaatgttaagtgttgtaccacagacaccttgtaccttcccatactagtggtggtaacaccacgatgtacttacaaacatcatacactttaccaatgcactttgtaccgttaccgtacaagtgttggtagtgtatgaatcacaacaatcaggcatatatatattaacacatacataaattcgaatatccatatcacacattatacatagttcttaccttctttcctgactcaaatgaaatagtcgacctgaaaggaaagtcctgtgctgaatggatgccctaattgttggattttttgccctcaataaaacccattacaatctaattagatatcaatttaagaaatttgaagtgatttatgtttgcatgaatttttcatgcttatggtttaatatgttttaatatatgcacaaaatctgttaagtccagaacatatatttatgcacaattacagtattatgaacacagtggaatgtgattgtgattatatgattgaaaagactaagtccctgtttcatcagtgttttggatttacactgatgtgataatcaacgatgttgtgtacttacacttggagtaagtgttatgttctttccagagcattggtaaagtatactagt

SEQ ID NO: 400406 - DNA, 661 bp, Cannabis indica
gtcaagagagctgtaaaaaataatcaaaacatttttcagaaaactgaaagacaaggattaatgtaactgagcaagaggaaaataatcgcttacgaagtctacaaaaggtggttgtgccgattggggaaagactagatgtccaaaagaagttgtctttgaaagacactttgtttggcaagtccacaatgattttaggctcgctggaatgagtaccaagataatagaagccccttgtagcatttttcctcactggaatagccttaaccgaataaagatactcaatgggacaaccccaaggtgatttatgtaatccttgaagtagtctcgaagagggagtatggcccctgcactaatatgctccaagctccaggcgcccatgccagtcgagccactggtactagtctcaccactggcccctagggtacctcttgaaaagcgcacaggggggaaacaactgaactcaccctctagcactgacctaacttggcatgatcgcccaagttcgattccacaggtcttcagtatatcacctatgtagcctgagatagatcgcaccttcgattatatcaactcagcttcaaaggtgactctggggtccttggagtctttgatgtatgtggcttgggaggcattatttcaaagtccaagtcacctggttcaa

SEQ ID NO: 400407 - DNA, 534 bp, Cannabis indica
gcgcttaggacaatgccctgtccaagttttctcatctaaagggctgttttgtctgaagcatgggccatgtgcgtgctggacaggctgcatgcagcctccttggccgagttttctcgacctgtccccttagtgtgcgtgcgcggatggtatgcagtgcttaccatccgcatcaaacccaattttttcgtttttcttcattttttcatgctttttcatgaaattaatttcgaatttgtgtgtaattttgtatttatatttttatttttcatatttcaaatctatatcagaattaaattaattaatattttttaaaataatttaagatattcgtgaaatttaaagcttgaaaatagctaaaaatctatctttttgcttaattagttatcttattttttaaaatttgattattttatcttatttttaaatttaaggtcagatatttaatattttaaattatttaatttttttttaataaaatgaccttatttgaaatttaaaataaaattattttaatcatgaaattttaaattgaaa

SEQ ID NO: 400408 - DNA, 501 bp, Cannabis indica
tttttaaaaaaaaaaagatattagacttcttgagaagcacatattgagcatgtggcattgaactaacacctcattagtaaatacaacaaatagttttttacaaaaaaaaaaaaagaagataactctaataatacaaattcttaatgtatttttctataaataatttttttttataaaaaaaatactgttgcccttgactttgcccaaaatacgtggagctggataaggatgacacgtggagctgagaggaccagtttttatctatgtcttagacaatagaagagtgcctctgggaaggtgcctcccggaggaggcatgagaaggatcttcacgctcccagaggccaaggacatattaaggcagtttcgggaggtactagactctattgaacaatcacctcgcatttaatgtcgcatgggggaagacgcattgaaactaccataaacgatataacagatggcgtaaccccccctttttagctattatgctatgattaatgag

SEQ ID NO: 400409 - DNA, 622 bp, Cannabis indica
ccttccttcacggaaaccaaagcttgcttcataaaatttcaacatgactcgcatgcacgctgatctttgtgcatgaaagatcactaggggtacgacacgtcttcaaccctccttcccgcaagagaaggactgtttgaagtatgtcacatgtcggatggtgtttcaccctttggtctcttttaagcgaagtcatcttttgcatttttatgcaactttagctttcccccacggaagccaaagcttgctttataaaaactcaacatgactctcgcatgcacgttgttcttcatgcatgaaagatcactaagggtacgacacatcttcaaccctccttcccgaaagacgaaggactaattgaagtctatcacatgcccagtgatgcttcaccctttagtctcttttaagcgaagtcatcgcttgattttctatgcaactttagcgttccctcatgaaaggtagagcttgcttcataaaaattcaacatgactctcccatgcacattgttcttcgtgcatgaaagatcactaggggtatggtacatcttcaaccatccttcccggaagagaaggactgcttgaagtctgtcacacacccagtgatgtttcaccctttggtctctttt

SEQ ID NO: 400410 - DNA, 873 bp, Cannabis indica
cataaaacccaacagaagggtctgagcaggtcaatagtatgattaatatttcatcacagttagcagaggacatggtcagatcagacattgagtttgttgtacgcaaacttcataatatgacgctgcaatctgatacgttagaatgaattaaaactgttcaattaactgatccataattagtgaagatccgagaagaggttttaactggtcaagctaaagattttacggtatcaattaacagaatattgttttataagaccagggtttgtgttccaagtagtgcagaacttaaaagtgagattctcgaggaagctcatactactccatatccactacatcctggcactaccaagatgtatcaagatcttagaccctacttttggtggtgtgcgatgaagaaggatgtggtagaatttttatccagtgtttaacttgccaatagatcaaggctgaacatcagagaccgacagggttatagcagccactaacacttcctgagtggaagtgggaggatgtcactttggactttgtggttggcttacctaaaaccacggtaatgtacgatttgatttgggttgtggtagatcaatttacgaagtctgcacattttctaccggtaaaaaacaacctttacagtggatcagtatgtagatttatacgtgaaagagatagtgaggttacatggcgctccaaagtccattatatcggatagagatccgaagttcacttcaaaattctggcagagtcttcagcgggctatggatactaaactgaaattcaatacagctttccatcctctaactaatggacagcccgaaaggacaattcagatactggaagacatgttacaagcatgtgtgatggattttgaag

SEQ ID NO: 400411 - DNA, 833 bp, Cannabis indica
atgccatttcattaatcttaaaatcttaatatcaaatttaagtgaaattaaacttgaactttatagattctttatgataaaaaattaaaaaaaaaaaaatcaatacctaaaataaaattaggtatacgtggtttggcacgtaacattcatttagattttcttggctgaggttaacggggttgaatccccaatttatttttatctataatttaaccccattagataattttttttggctgaattaacggggttgaatccccaatttatttttatctataattttctttttccaaatctcaaacacaatttatagcatgccaactcatggaatccctaatttatatcgcatgaagcccctgtatatcgcatgaagttcgaaatgacgaggaagaaggtgagaaatgaaaatgaaaatcaccttcaaccattctatgcctaacttatgaaattaaagtttcaatcaacttgattttcaatcgataacgatgagttgacgacaggtgaacgatttcagatgaatgagaccagtacattcgcccaaattaaagcttcaattgacttgattttcaattgttaacgatgagtcgacttgattttctactctaactgcgggatttcataagtagttttttttaattaaattcattgttcacaccaagtcttatcatcttaaatgaaaataaataactatttgcaggaatactgctattttgtcgacactatcatatacaatttattcacagaaaaatagacaatccaattatatgcggacttagctagaatgaaaagtgcaaaatacaaacattacattattgtctctgtgcaagcaaatg

SEQ ID NO: 400412 - DNA, 1826 bp, Cannabis indica
acctccagtacctacaaccatcaacgaaaaagtgacattttgtcccatgggaccactttgtaaacaaggccattagatcctataaatacctgccatctcagatgtggagggggttggaaaatcatacttgtaaaactatatagagaggaataagaacttactccattttaaggtggtaatatgggtttgtgtttcatcttcttctccattccatttctgaaactaaagctcaagttggttttctgaccataagtgttaacgcaaattttcgttaaccaaaatttgagcctcacagttataatttcacacagaaaaatgaaagtagtaaagtaagaggtatgaaaacaaatgatttttttacgtggttttgcagttaaaattctgcataggccacgagacaatcttattagatttctgatagtttttcaaggctttttgatcttacttgccactatttataatcacatagtaggcagttatttacaaagttgactgtaatatttacaatgttttcccctgaaatcatgggatttgattacatatcacgtagtataattgcggttattacttgaaaatcacacagctgtgataatcctgcttttaatgggtcaaaattatcatgtatctaaatatgtctttaattgtagcgttctgggatgtcttgacaggaacttggttccaatgaccttgatagagagctggagcttttcccctatcttcccgaggtcgatgatatacaccttgttgtctctttgtttgaagacttaatgcttcattctgttaatcgcagttcttatcaatagagagttccttggtagacatttaaatgtcagcttctgactcgtcaagattataagtctcactgagaagatgtctgaagttaactggaagaagttacaggaatgggccttcttatagccagataggcacctcacttattatgtctcgagtccactcgactgttgtagttagtttgtgcattttacactaagtgttatcacagtcgatatgcgtcgctttcctgctcccagatgtaacggagttgatgccttgctttatacatccaatgacacatggtttctcgttaatacactaaacaacagtttgtatatcttttcctcgcataagaccttatagtcagcgagttgcaagtatactctgttacttacgcaattaatgagttattccattaatagtgatttcatcgatccatattccctttatcttgacacatgtcctccgttgaaatggtagccaaattttgggtataacaattgccccttaaaaagtccgtttttaataaaaagtgttttttaataattacagagggcattttcatcataatcccctttggaaaaatgcatcctttgattctaggggttgtatgatttcgagggtcattatgaaccgtcttttcatcttctgccccacccccaactgttatatttcccaacctttggacttcttgtcactagactttgagtatgaaaatggtggcttaagcttgctatattccacacaattttgggtttttgtttagttttatcttgagattgaattgtcattctctcgttaagatgccccatctgagtttagaaatttgttcctctaaattcataacaccaaaatttgccaactacctctcttctctatacgttcccaggaacttcaaacctcaacttgaattgggaaagaaggattccaagactgaggagctttcgatcaatccaaacaaaggaaaggtcgttgtcgttatgggcgatcctcacaagtgattcttgacggtaagtattatcccttgtgaatggtggtttgaactggattat

SEQ ID NO: 400413 - DNA, 931 bp, Cannabis indica
ttttgatatgagttatattattaagggcaaataatgaaaatttcccaattaaaaatcatactcagaatattgtcacaacttactaactttactttatcacaaaacattaaaaggtccaaggttgcatgtgactttcttaagtcgcggtctcaccatatgagaataattttttttattgtgactattctaagttatattttttttttaaaaaaaataagtattcttaattgtttttttttttgttattttaaaagattataaatgtaattatttgctagggattaaaatattatatgattatttattgccaaaaatatatttaatttagttatttttttttataattatttaaaattacataatttaaattactttgtaagaaaaatattaatcatgagattagataacgaaataactttatatttttttttttaaaaaaaaagactgcaaaaataacataactttttaaaataatagttattatattatttctaatactaaaaaaattatctttagtctttacgtttttaattaatgatataataatatttagttttttaaaatttattattatttctaatactgaaatggaatacagagtcttttagaaaaaaaaaatacacataaattacacaatatatatattgtctcaatttaattatatatacacataattctctttattatattgtattgtatgattatcaatatgtagacgtgattatatagataataattatcaaatgcataacttaaaaataaaaaagcattatttatttgaaaatatgcttggtgataccaacataacacaatgattattttcacaaatatttcaagtgaaataaaatattaattggagggtaaatttagcttaatttttttttaattaaatatatagtgaagactaattatataactcaattagaaatac

SEQ ID NO: 400414 - DNA, 595 bp, Cannabis indica
aagacctctggcgattctcctccgccaatgcaccaaaccttcaaatccctccgccactccatctcggtcggtcctctcatctctgccttctctatctctcgccaggttcctgtctcctctgccctttctttccctctcattccctctcagtcggtcaacctccttcttctccaatggtggcgacagccctttgttcttcctcatcatcttctccttaggtgagaaccatcgtcttcaatcatcatcctcaatatttttatttgctaagtataagttttaatctatattgtatataatctgtgtattttataatacctatttaggttaaatcaaattttatttggggcttaacgattgaggtttcttggtctatttctatatcaactaacccgttctcctcattttctggtgagttaaaatatgtttatattttggtaatttataagattgtgtattttatttgacctattatagtcgatatattttgttctgtatttgtgcttagttttttcctctcaaattaagatagtaatagtagtaattcaaaggaataaggccttgcatcggccaagttagtaatttacgaaggtcaaca

SEQ ID NO: 400415 - DNA, 628 bp, Cannabis indica
gcctggccagaaccacccagtgtttcatttattcctttggcaaagcctttgtttttacccaatgtcacaatttcttttgaactagatgacttggattttgaaattatacctcccaagccacgtacgtctaaaactcctcagtgtcaccttcgaggctgagttaatagaatcgaaggttcaatctatctttggctatacgggcaagatgctaaagacctgtcgaattgcaattgggcaattgtgccaggttaggtcagtacgagagggtgaacttagttgctacccctgcacgctttgtcagcagtaacccaagaaccagtggtgagattagtactagtggttcaactagtatgggtgcttggagtcttaagcatatttgtgcagtggccatcctccctcttcgagactacttcaaggattacataaatcacattgggcttgccccattctagctgaatcccatctcctacatgattcttactagtttgaaagtcttgtacaaaattatgaattggggttgtcccacgcctgtagagattcagtatctttactcagttaaagccgttccatcgaggaagaacgttgcagcaggctttttcaatcttggtactcatgctagcgagccaaa

SEQ ID NO: 400416 - DNA, 1246 bp, Cannabis indica
acttatgctcctatagctaagttcaacacactaaaactactctttgctcttgctaccactaaaaattagcaccttcatcacatggacatagacaatgcattcctccatggtgatttaaaagaggatatgtacatgaaaatacctcaaggttacactcccaaaggggtgataccacaaaatcctatttgtaaattaaacaaaagcttgtatggtttaaaacaagcatctagacagtggtatgctaaactaagctccactctcattacacaaggatttcaacagtccaaaaatgaccattccttatttataaagaacacatcgaatgctttccttgacttacttatatatgttgatgacattattgtagctactaacaacatcaatgtcctcaatcaatttattgctacccttaattcaacattcaagctcaaagaccttggaagcttgtcgtttttcttaggacttgaagttgctcgctgcaacaagggcatctcagtctcccaaagaccattcactatgaaactgcttcaatacacaggccaccttggctcaaaaacttgcttccacacccaatggagccaaacacccaagttgagcaatgaaaccgggggatctcattcccaatccaaagcaatacataagtcttataggcaagctcatatatcttaccatcactcgccctgaaattagctatgttgtcaacaattaagccaataccttcaggcacctcgacatccccatttacaagcaacatttagagttgtcaattacctcaaaaactctccaggttaaggcttattctaccatgctgcaacaccagaacccctgcaacttcatgcctttacttatgcgaattggggggcttgcccagattcgaggatatcaatatcaggatactgtgtttttttggggcactctcttttatcatggaaatctaagaaacaaaaaattgtctttgggtcctctgctgaagccgagtacagatcaatagcacgctacctatgaactcacttggctcacatccatactcaaagacttcaatgtttctattaaacttccttccattttatattgtgataacaatgctgccatccacattgcttaaaaacccagtatatcatgaaagaacaaagcatgtggaaatcgattgccatatagttcgagagaagatcacaaatggaactctacaaatgaaccatgtctcttctcagaataacttagttaatgtgttaagtaacctctcttc

SEQ ID NO: 400417 - DNA, 1051 bp, Cannabis indica
tccaataccatggtactagaacgtgttgctttttttcatcatacttacctaatttgtatgctccggatttgagacctttgaccacttgatatggtccttcctagttaggtccaagtacacctgccttactgtctttggtgtttaagaatacccttcttaggaccatatatcccacgaagaatttctgagccttcacttatttgttgaaatattgagctactttttgttgatgggccatcagcttcaagtttgcagtggctcgtctctcttcgatttcatcaaatgatttggccaggattacgtgattggtatcttggttttacatcaatcttctatgggatggtggctcgagttctacaggcagcatagcttcatatccgtacaccataacgaacggtgtctgtcccgtggtcattttctcagttgtccgatatgaccatagaacttcaggaagctcttttggccaattcgctttggcatcttcgagttttttcttcagtgtatccttcaaggtcttgttgactgcttcaacttgaccattcgcttgaggatgggaaacttttgatgataccatggttcacacaaaattcagtgaaggattggctgtcaaactgcttgccattgtctgaaactatcttgtacggcagtccgaaccggcaaattatgttcttcacaatacagtcttgaactttctttgatgtaatggttacgagtggttcggcttctatccatttagtgaagtaatcaaccgctaccactgcatactgcactcctcctttgcctttgggtaattgtccgatcaggtcagttccccaaatggcaaaggaccacagactttacatctgagtcaactcgttaggtggagctccaggtatctttgaaaatctctggcatttgtcacacttcttaacataggcttttgaatcttcaatcatcgttggccagaaataaccttgccttagaattttcttagataaatggcggcatgatttccacaaaattgatcgtgcacttcagattggagtcgtccagcttcttcttgagtaacaca

SEQ ID NO: 400418 - DNA, 723 bp, Cannabis indica
tgtaataccatacgaaggtattgttcatgagcttcttctaaaataaactagaatgtcatcaataaatacaattacaaagttatcgatgaagtccttaaacaccgtattcattaagtctataaatgttgctggtgcattagtcaacccgaaggaaatcataagaaactcgtagtgcccatgtcgagtatgaaaggcagttttgagaatatcctcttcccaaattctcaactggtaataaccagatcgaagatcaatcttagagaagatggtctttccctgtaactaatcaaacaaatcatctatccttggcaaatgatatctattctttattgtcaacttgttcaattctcgataatcaatgcacatacgtaacgacccgtccttcttcttgacaaacaaaactggtgcaccacaaggagagatactcggccttgtgaatcccagatcaagtaggttctgtaattgggctttcaattccttcaattctgccagtacaattctatacggggccctaaaaactggctccctggtactaattcaatctcaaagtcaatctctctctttggtggtaatcccggtaactcttctaggaatacatttggaaattcacgtactactcgaaccttttctggtccctcaagtatatctttcgtggtatccaacacactagcaaggtaccccatacatccttcttgcaataattccctggtcttaagtgccgat

SEQ ID NO: 400419 - DNA, 438 bp, Cannabis indica
taatataaggaaattatcttggtatctataattagttaaataaagtttgaattattcacaattttcaataaactcgttgattagcaatgagctgcacaattaagttaaaaatcatgttaacacgcctaaactagtatggtgttacactattggtttacctcactctgttgttcactcaagatgctcattcccgataaacttagctgtaatggggactctatttatcaacactctaagtcagccctttaccttgaagttagatcgcaacaatttcccattgtgaaaaataatagtctcaaccatcatacgagggcactagtctagatagtttctgttggaaattattttaccaggatcttaaatctactcacaagtatgtttattaacatcctaaatatgaactttctaaaacgatgacattaaacacatataaagttt

SEQ ID NO: 400420 - DNA, 651 bp, Cannabis indica
tttgaaaattagaaaaatctggggtggtgtcaccccacgtacacgcacggatccccttgatttcagggggtgacgtgcgcattcggacaagccctctctgagatttctcagtcaagttgggttgttttgtctaaaaatttccccctgtgccgtgttttctcagccaaggtcccctacgtgctcgcgcggatggtatgcattgcataccatccgccccaaatacaatttttttttttccatttttcattttttcatgttttttatggaattaattttgaattttttgtgtaattttgtatttagatttttatttttcatatttcaattctaattattagaattaaattaattagtattttttaaaattaatttaagatattagtgaaatttgaagcttaaaaataggtaaaaatctatcttttttgcttaattagttatcttatttttaaattttgattattttatcttatttttaaatttaaggtcagatttttcatattttatattatttaaatttttttatttaaatgaccttatttgaaatttaaaatgagattattttaatcatgaaatttgaaattgaaataggatagtttcgctaacttttaaattttgttatttttatttaaattaaattgtaaaattagaaaa

SEQ ID NO: 400421 - DNA, 1266 bp, Cannabis indica
taagaatggagaagattaatcacttgttgagcttctctattatttgccttgcaatagacatagctatcatcagcgaaaagcatatgagataccgcaggcgccccacgagccactctacagccagtaataagttgacgtctttcataatttttcaaaagagccgacagtccttcagcacagatgagaaataaatatggagacaaagggtctccctgatgcaacccctaccaggcgtgataggacccaaagaatgtccaccatgaatcacattatacgtcacagtagaaacacatgtcataaccagagatacaaatcgggtaccaaaccccatatgaagcatcagattttcaataaagctccattcaactcgatcataagatttactcatgtcaagtttaatagccatgtacccatcttttccccttctttttcgtttgagataatgcataatttcaaatgagaccataacattatgagatatcaaacgaccaggaagaaatgtactctgcgtgtcagaaatcaccaaaggcagaacactttttaatctgttcgcaagcaccttagaaataattttatacagaacattacacaaggagattgaccgaacatcagtcatcaccacaggttgcttctttttcggaataagaacaatattagtatgatttaccttgctagggaaagatccttcaagaaagaagtccttcacaaacttggtaacatcactaccaaccgtagtccaatatttttgatagaagcccggtgtcataccatccggccccagagatttatctgggtgcatgtgaaagagagctcgtctgacttcatcatcaacaaccagttcaactaacatgtcattgtgctcaggtgtaaccatgacaggagtacaatgtaaaatcttagcaaaattcacatcagaggacgaaaaaagttgtgaaaaataatcacttacaagagaatcaagtccattctgcaagtcaaaccatacaccatcctcattcttcattttctgaattgagtttctgcgcctccttgtcgtaacagtagcatggaagtacttcgagttactatcgccctcccggagccaaagttgtttgctcctttgtttccaaaagatttctttctgtagaagaatgtcattgagcttagtaaccgcctgcttatagttgtccaccgagaccacatcccgacccttcttccatcttcgaatattctgcttacattccttgatgcggtgagaaaaattaccagtataatcttttccccaca

SEQ ID NO: 400422 - DNA, 1217 bp, Cannabis indica
gccgtggtcgtgtttcgaggggtggtcaggaggaaccacctcaggctccgattgattgggagcaaaggtttgctgagatgcaagccataattgagcagcaagaagaggagattcgaagactcaggcagcgggatgcttctgttgagccttcccccgcaaccaactgctgcggttcctgcagctcctgcggtgccagtagagtagcatgttgctggtaatcgtatggaacctttgtatgaaaagttcaggaagcaagcacctccagtgtttgtgggaggtcctgacgtacttaaagcaaaacagtggttgactgttattgaaatttcaatttcaagaggatgctttgttgtggtgggagatggtatccctcaccaaggatattgccagaatgacctgggataattctgggatttgtttaatgccaaatattataatgaggcggtccgcagtgcaaagcggaaagaattcgttgagttggtacaaggcgaaggtatgtcagtgactgaatacaccgccaagtttgatcgcttggctaagttagcctctgggatcgtaccaacagatttcagtgagaaggagaagtatttggcagggctgaatgccaagattaggcatgatctggttatcacaacattcgatactacaacctatgcagaaatggttgataaggctcttcgagttgaaggagcaataaaaattttgcatgaaacccgagtgactcctagtgctggtggaaccactactctccctatttctggccttggaaaggagagtggtgattccactctaaagcaaaagaagaggactttcccttcttcggggagttcagggcaaggtaaaaggtttcgaggaaaccagaataaagggggacgtcagacttactcctatcctgagtgcccgcgctgtaagaaacatcatcccgggacttgcaaccggagagcttgcttccaatgtggatcagtggggcacctcaagaaagattgtccctaattgaagaaagaggaaccaaagcctgaagccaaacctgcacctgctcgtgtatttgctattactcaggctgatgctgccgccagcccttcggtggtcacatgtcagcttcttatcaacagttttgtttttactgttttatttgattcgggtgctactcgatcttatgtgtcatcgagagttcttaattagcttgatagacctagtgatgtttttgagatgggatttgg

SEQ ID NO: 400423 - DNA, 549 bp, Cannabis indica
tcagtaggcactttgtctatctctatctgtccatgtgtaactttatccctgataaaatgatattttatctcaatgtgttttgtcctgtcatgaaaaacatggtttttgcacaaatagattctgctctgactatcagagtagattataggcaccttttccactaactttagttcctccataagtcctttcgaccatagggcctctttaatagcttctgtagtagctatatattcaaattcagtagtggataaagccactactggttgtaattgtaccttccaactagtaaaatttcccgctattaagaaaaagtaggctgaagtaaatcttctagtgtccctgtcccctgcataatctgcatttgtgaaccctttgatgagtgcatatttatcttataaatatgattaatttatttattaatattcttaaattgattctttaaattattgattagtgtgattttaatttgttaggttattttaaatactattcatccatttagagttttttggaggaattttaacatattttggtggaaaataatggaag

SEQ ID NO: 400424 - DNA, 661 bp, Cannabis indica
tcttctacacccacgaatagaacgaccacagcaataccaaaacagccagaaaacaactactaattctggcgagattgagtaaaaatagtaaaatcgacgtcaaataaataatcaagacaaaataactgtaaaaataacactaaaacaaatcaaacaaaacaaaaagaaaaaaagattaaaaaaaaaaactaacaatcttctatacagtctcaacaccagatgcaatgacggctatatttgcaagtccagtccttaaaaattagaataaaaaaattactaaaacaacacaaaaacaaatataaacaatgaagcacatatagccacttagaaaaatataaaagaactacatacctaaaaaactttttgccagtgagcttgtttaatgtatttataggacaatgagaatgaaaaatcacaaaaacaaccatagagaagggaaaaaaaatgttatttatagcctctattttttcacactcacggatagaaccaccacaacaacacaagaacatctaaaaactaactataattttggggagatggagtaagaacagtgaaatcgacgtcaaataaataaattgtggcaaaataacaataaaacaacactaaaaaaataaaaaataaaaacaaaagaaaaaaaactaaaaaccaatactctacacaa

SEQ ID NO: 400425 - DNA, 729 bp, Cannabis indica
atgggtgcaatggtggaggctatgcttcgtggggatgggaatggtgaggttagggttaagttattaagtgttaatggatgatttgggggttttctgatgaaagaaaaataaaataaaaaataaaatagagtaaaaaaaaaaaataaaaatagaaatcaaaatactacaatatgtgtttatttatattagtatatattgatgtatgttatatgtatatttatgtaagtaaaagaattttttttttcaaacccctgcttcaattgaactcccagtattttaaacacaacttaatactcccagcagttacagcatcactacagcattactttagcaatttcatttttttgccatccctgcttcaaaatgctgaagtgatgctgatccaatgctgtactggggtctattgcttcaacatacaaatctgctcacaccatattgcagcagtccctttttttctgtcattccattctttgcacctgaaatcaagatcaccacaccattgcaaattcattagtaacgagaaaattagaattatatatatgtagttgtgtaagtgtgtatatatgtatatttatatattatatttttttcttttgttctttttgtttttcttttttttttcttagggttgcctttcattttgaattttttttttttttttcattttttttcttcaaattctaattcttttttttttcttttttcttttggtctaccgtccaactttac

SEQ ID NO: 400426 - DNA, 641 bp, Cannabis indica
tcaaaaaaaataataaaattttttaaaaattagataaaatcttaaattaattaaaaaatattaattttacttaaaaaatattttcaaattaaattttatctatcaacacctatcttaaaaaatcaaaccaaaattattgagaatctaataaataatctaaatgaactaatattttttgagaaaaaacaaacttatttatatttataaactcatacaaataaaaaaaaataattaaaaattctgttgcctcagattttttccaaaatacggggcagctgctgcgtgcgacacatagatctcaaagaacacccactcacaaaaattggttaagtcatagacaaagaagtgcatctcacggagtgagcctcccggagaggagcataaaacacgcatttactctccgagaggctggaaatgtaacaatgcatctccgggagggaaagagatcgttcgaacagtcatttcgcatttaatgctgcatggaggaaacgtatcagaatacctccataagaggatttgacagatggtgtaagcctcttttacggcgattacaccataatcgacgaatttagtgacgactccattatgaagactcacatcaatcaaggaaggataaaagattatattcacctaatccctaa

SEQ ID NO: 400427 - DNA, 680 bp, Cannabis indica
ttcccagcctcaagaaattcctctataccagaaagaggttgatgcaaaggtcttttggcgcaggtttggatcttgggttggctggattctctgatagaaatcacgccaacttccttcccagattcatctacaaccatgccaaccttcctctggaattctttatcagcctgaggagaaccttttaaatcacccacaagatctatgatcacttgagaggatcgaccatggaaagctacggggttcccctagtttggattggtcggaagctccaaagccttggaatccattgttttcggcaccgattgaggtttgaagtccttgggaacaaatggaaatgggttggtgagtttgggtattatgagtttgggaggatgaacttctgaactcagaagggatatttgggcaggaaagaaatgatccattctgaaaatggatctcactaaagagccaaaggtttatgaaaaatgagaagcttgagtcgcccttttatacacaaagtccagtgacaagaaagttaagtattgaaaaatacaacggtagagagaagtgcagaatatgaagagacgattcataatgacccttacgaaaccgtacaattgtccaaaatcaaaggatgcaattttttccaagaaaagatctttatgaaaatgccctctttaattattaaaaatctcttttta

SEQ ID NO: 400428 - DNA, 626 bp, Cannabis indica
atttttgtaaactttctcgtattttttagtatttttgtaaatttcgtttttaatatggaaagacccaaatcatgccagttgccttaaaagattaaaatatacaaagaacaggaaaagtggtgttgatgactcccaatcctaataagatgaaatcatggattagtttttattctaaaattttaactgaaagaatacatatcattcaagtaatcttaaaatgtgtatttcatctatagcaatgacaacaatgaatctgtgcatggttctatgctcaaatttttaagtgaacgactcaacgataaatttgaagaattaaagatctagaaatcagcattgatcattataaaatactgaaaatttagatccttttaagcacatatacttctgaagagctctgcattcctctacattattaaagattatttaatagttacaccaaatatataacaatcataatgttttcataataaacatgattaatatttattggaattttctacttttggagtttggaaatttgaaaaaaaaattgagtttgtgttatatttagcccactattttataaatatcccaatacacaatatgtaaaataagaaaaaataattgattatattgaaagtcatttc

SEQ ID NO: 400429 - DNA, 751 bp, Cannabis indica
ataaagcagattacgttgtgtttgctgttaaaagagaaatactattttgcttaattgaataataaaattagtatcaaatatttttaaatttatttttatgtatattatttttaaaagaaatataagaaattttataatacaccctttaaaagaaatgtactgatacatctttatttattttagttgatatatctttatttattttagtgtccgaaataatttattagttacattttttctcgtagtcatgtaaattttaattatttaagatctcttaaaaattttaaccaatataaaagaatttaacacgctaaaaattgtgttcaaatagtatcttgcacgcgtaattattttattttatacgcgtgtaaaatagactgtttgaacattattttctatatcataaattatttcaaaattttcaaaattttataggatatcttaaatagctataacgtacatgaatatgaaaaaaaaaatcagactaaaaaattatataaataaaaaatcagacaattgttttttaaaatatacattatagtgaaaaaaattagaaactaaatatttcttacacaaaataaagatctaaaatagaaagaaaataataaatctataaaaaaattatcatataattttaaaacaactatcatcaccgtatctcatttatagttaccattgtatttaaagttgatttcatcaccgtatctcacttataatcatcattaatattttttctaataagtttactttg

SEQ ID NO: 400430 - DNA, 657 bp, Cannabis indica
tttccgaaacatcttgaatcgttggattctgagggagttatggccaaaatactatcagccgacgcagtagaaaaatcaccgtcgaaacgtgaaactccaacacgggtcgcgacatgataaagctgggccacgacccgtccccctaaactgcacaaaaattgtctttttctctcacgtggatgttggtagtttcctaattcaaataggcatttaacatgtgcatttttctatctttttagtccctgaaagcctatataaagggtgaaccggagttgatttcagtgaagcaatttcagaaggaaataaacagagaatacagatgcgaatttcagagatcaactgcaatattggaggcattcttcagagggttttcagtttttttcttctctattttcttctcttttcttaaagttaatatgtgtgattgtgctttcataaacatgagtagctaaacatttaattagggtttagatagagattgtttaacattattttatggttttaatatgatttattttctccctaatttttatgtattctatttcattcgtgcttaattacttttaattgtttggccatcaattaactgttttatgatttcgatgcgagatctgagaagtgagtgtcgattatgctatagtgaaatagaactgaatt

SEQ ID NO: 400431 - DNA, 658 bp, Cannabis indica
agtcatataagataattttaatataaaatttcaaaattaaaaggtaatgctatctttaatttaaaatacacccaatattaaaatatttaaccttataattaaataatatataaacattaaaggaattaataaattttaaaatctgaccataacttaaaaaaaaaaataatacaatttataaatttaaacctcaaaaatatcaaaattaataataatctcataaaaaataaatattattaattcgtaaatttgatatttaagtttaaatattaaaaataatattttaaattgatattagggtttgaaaaattagaaaaattcaaaaatttgaggaaaaattcaaaaatttgtggaaaaattccacaaaaatcaaaatttttggtacaagatgcatctactgccaacaaggaggtcgcatgcagtagaagtgcgagctggtgggattgcagggtgtgtgagcggcataactcggcaggtgtagcatcaggacatgggcgtggcaacatcatgtgtgtctaaaggttgggcgagacacgacttcaaacaaaaattatttgggtcgcgcgtgcatcaatcctccttgtccgagatgctggtgcgatcgagcacccatctcgacacctatatgcatctgattttcaagcaaccagaactttct

SEQ ID NO: 400432 - DNA, 748 bp, Cannabis indica
tttttgatttttggaggcaacttcaaggaccataaaactttccaaaagtcggaagcttcactctctgaacccgtgcctttcaattcttgttgcagaacatatgcactcttgacagagtacattccattgacttccttagaccaacaaagcacatccgactgctggtgtatccttaatggaatttgcaaaatcagtctttgatccctctcctcaaataaatcttcaaggatatccacatcccaagaggccatgtccatggacattaaattactcaccttagcaagatgaagagctggatgagaggaaattacacacggttgtacctgatctggcagccaaggttcattcaaaacgtcaatagtagagccatttcccacactccaacgaactcccgcacgaacaagggcttgagcttcccaaatactacgccatacgaagcttggattgttccctaaagtggccgagaggtatgatccattggggaagtaacgagccttgaaaatccgagatactaaagactcggctcttgttaaaaaacgccaaccttgttttcccaagagagccaaattaaaatcatgtaaattccgaaaaccaaggcccccattactcttgctattgcacatacgatcccaagacatccaaggaatacccttattctcttttgatgagctcttccaccaaaatctcgccatggtactctcaatatctctctaatttccaacggaagtaagaatacattcatagcata

SEQ ID NO: 400433 - DNA, 278 bp, Cannabis indica
atccaaaatacaaaattcgcacttaggctatcttttgtaggaaggagggagagtaagatggatggagagttttgaaaggatggggagtaggagaaataaaaatgatagttactctctttcatatttataccccattattaaaaaaaaaataaacctaaataattttaaaaaattactcttaatataattctaaaaggttaattagtaatttttccccctgaactttgatatgtaaaaatcgtgccccctgaacttttttggccgttagaaattctctc

SEQ ID NO: 400434 - DNA, 702 bp, Cannabis indica
tttttaacgaaagaggggtcaaaatgatataacttcctgaccaaacttttttacgagagaggggtcgaattattatagcatcctgatcaaacctttttgacgaagaagggatcaaataactataatttttgattaaaaacgtatctgacgggaaagggaaatcaaaagttataacttgcgtataaatctgaatattaacggttcgctcaagataggaaagtactaaacgagacatcaagacgtcttgataaaaatacttaaacctaataaatggatagataatttaactattcatacaagcaatcaaaaatatacaaagtgataaaatcattaaaagtatattcaagtttgcttaaggcaaattataactgccatagcgaggcagaattgacaactgctcgaaaatcaaaagtttggtagataactaactgcttaaacaagaaaattacgagcaatggaaaaactcaaaaagtactttacatttgatcaaaatataattgcttacattgtgaataaaaacgcaagcaaacacaattatattaagttcgaacaaagtacaaggcatttaagataagaaaaaccccaggttggtttacaacttgtctttacaaaaatgtcgttaggggcaaaccattaagccattttctgtgaaagtacatcacggacaaaatcgtatccctatatttgtaataaaaaatgata

SEQ ID NO: 400435 - DNA, 898 bp, Cannabis indica
atggtcatttgagagtctttggggtgcagagtatttgttaatattcctaaagatgagagattcaagcttgatgataagggaaaaccaagtattttcttggggtacagtcatgtagagtttgggtacagattgtgggatccagtgaacaagaagattattagaagcaaggatgtggtgttttttgaagatcaaatgtttaaaggcagtggcaaagttcagaagcaaaagtcccctgttaatgttcctatgagtactagctcagttccttcacccatagtgcatgatgatcatgggggagatgaataggaaaaccatgaagagcatgtcaatgaagaggcacacgaataagaagatcgtggtgagaatattaattatgatgttcctacaattaatgatgatggtgagccaactgaacaggatcaagaagcacctccaccaccaccagttgagactccagtaaggagatccacaagagagcgtaaaccaacttcaagatacaatcctcatgagtatgtaatgctcactgatgggggagagccaaaaacttaccaagaagccattctacatgagtataagaatgagtgggatggagccatgcaagaagagatgggatccctgcatgaaaatcacacatatgacttggtgaagttgcctaaagggaagaaagctctcaagaacaaatgggtttacaggcataagactgaaaacaatggctcacaacggtacaaggcacgattggttgtgaaagggttcagtcagaagaaaggtattgactttgaagaaatattttctcttgtgaaaatgtcctctattagagttgttcttggtttagctgctcgcttgaatttagaagtagaacaacttgatgtgaaaactacatttcttcatggtgacttgg

SEQ ID NO: 400436 - DNA, 540 bp, Cannabis indica
ctgagttagatgggagacaaacttgctggtcatctccgaggaaaagggagccaaggtgggcccgagaaagcgattgaaccagtgtgtcagtggatccatgttcaggtcccacggattccagaaggcctcctcgttgagagtgttttgctgctcctcccgtaagattctcttcaaggcctccacctcggcatgcccccggctgtactcgtcaagggcgtaattgtacttagccacccgaaggttcttcctctcttcatcaccagggactggagtcaacactatgccgtgaggcacagtgtattcctccgcctcggaaggaatcccagagtcatggctcgaggccggagtgtccaccctacggggccgcttggaaggctccgcctccaccatctttccctttcgcttacgctcaagggcggccgggtcctcttcttcacctgcttcaacttcctcaagaccttcctcctcgtccaccaagacaatagtgcccgaaggggcattggaggaggacctcccgggaatgaccaactgagaagcagc

SEQ ID NO: 400437 - DNA, 989 bp, Cannabis indica
gactagtgcaaaaagagctgaaatttttgttacaaaattatatgtaattaattataagtgattatgaatttcaatataaattttgtaatactgagaacctacacgagtacaaaagacattaaactagaatatgtttttaataaatcatgcaacacagcaatcaattaaaataataccgtataatttaattgagacatctctaatgaacaccataagaattataattagtttaatgaattaaataattggtacacttaattttcaaattttgacaaaaaaactaaaaataaaatgaaaaaaaaaattacagcattacagataaacttaaaagcacttatattcagttttatccaccgctcagaagacacaacagtaaaaaatattgcggcatgttcattcaacatcgtagcttgagcaccaaattattgtacaaaatacgtaactgcactactaataatccattcaataacagagaacttgttattttcaactactaatagcaatttgatgacaacaacaaaaaaaactaacaataaaactatgtcacacagatacgactaaaacactcaaaatatgtcacagagacaacaccaaaacatctaaaatcatgtcacagagacaacaccaaaacatctaaaatcatgtcacagagacaagactaatcacaataacataaattgaatcgcaatagtaaaacacaaccccaaccaagtcgtatttatgtccaaagaacatcggcgggcctgtaaaaaaaagacaatcaccttctataaatataaatgtatacattaaaacgtttaatatttagggtagaataagttagaatatttttaagggaaattaccccatatactatatttttaactttctttcaaatttacggtttgggtttctaaagtggttgcagcgctagttgcaataggggtttctatacaattttttgttacaatttaagttgcggcgctagttgcaatagagatttccatgta

SEQ ID NO: 400438 - DNA, 641 bp, Cannabis indica
acttttcccgctcctctctcttttggtgtttcaccgtagctatggcgaaaagagcgaaaaatggccgggaaagggaaatcgaagggcaagaaagctggtccctcatcctcagatagagtcattaagactcgatctatggatactgtactgggattcaagaactagaagttgaggaagctgaagatccaatggaacaatgccatcaccaaatggaacagtatgttgaaaaagtcttctctctggaggaatcagaggaattgattattaggcagggtgagattcgccaagacttctctgactggcttactgttgcgaatcgagctactctagatgttaattctgggaagaggatttctcccccgattctcagatctaacatagtcaggaacctggaatcttcgttcgatcagggaaggaaggaacaaagaggaaggtcaagattgagtttgccgatatcgaagatgaagttaatttcttgcaaccatctgtggtttgttatgttattggagctaatcctccaattagcctagaggaagggttcgtgtggagaatctggaaggatgaggttgttaaggttggattgctagccaaaggcatcttcattatcagatttcaaactttagaacaaagagacaaagtga

SEQ ID NO: 400439 - DNA, 1065 bp, Cannabis indica
tagaaggctatgttgatgttgatatgcatcaaatagggataacagaaagtctactattgcttatgtgttcatggtcaacaaaagctacatatgttggaaatcacaataataaccagtggtggcactgtcaactacacaatctgaattcatggcaaccactgaagctttcaaggaagctatttggttacatggaatactataagagctgcatctactcaaagacaaagggacagtctattttgatagtttgtcatcaattcacctatgtaaagagcaagcacattaacattagactacactagattcaagagaagattgaggacagggttctggaattggaaaaggtgcacacaagtgacaaccctgctgacatgggaactaaggttctcactttcagcaaactgatgcattgtctcagttcgctgaacattggtacttgctgaacatattgagatatcaacatcatcaaggcttctgtgaaaagatagctagaagattgctttagagaatcaaggtggaaatttgtggaagttgatcctctaaaccaacctaaaaactaactcacttacacttaactaacttttggttatgttagttagttagttggtgccagttttgcacctattttctagctgtgagttgtacctataaataggctactcttttcacttctgtaaggtgagaattaagagagagtttagagagtgagtgcttagttttctaagctgtgaaaccatgttcttgaaggggtcaataacagagggtgtactcgggtaggagttgagaaactgagactgtttctttggtgtgtttctcgagtgttgcagagcagtgttgctcttgaattggtacttgtatttctactctcttgttctccatgttaatgaaagaattggtgatgttttctcagctggagtatggcgagggatcgaattgatctctaggaccggaaccaggataaatcttgttgtctctttttagctcaattcagttttgttactttgtgttgttaactggtttatttgtgtgttattgttgttcaagttgttgatttaatgcaggttt

SEQ ID NO: 400440 - DNA, 687 bp, Cannabis indica
atgctcgcttcattgaataaactgaaaaagttacactgagttaaagggtaggattatcgaattctaaataggaattttttttttctccaagtattgcctatgaaagagatacatagagagggatgttaaacctaaattcattaggctttttgatactagagtaagtaggtcaggtagcctattaggtagcctttactcatgccttgatcataatatataatgtgtttcatatctccatgctgagaaaatatgtgtcagactcaacccatattttgagctgtaataatgttaagcttcagacaaatttattatatgggaaaaacatcttatttaggttttatactagaaaaaggaagtactatggaatgagacaattccacaagttaaaaaagtgttgtagagaaactaaaagatagaaataatagcttgagatttagaatcatgaatacgaaggtattatctcgaattgtttaaataaatttcaaggacaaaatttctataaagaggggatggttgtagtatcccaaaaacctaattatgaataattaggatttattatatattgtgggtgaattaagtagtgatgaatatgattatgatcctgctaacttaatttagcataaattataaattttgctataatggaataaatatgcgtaattttttaattacagagatttatttgaa

SEQ ID NO: 400441 - DNA, 721 bp, Cannabis indica
ttaagacttgaagtcatcccaatgcgctatctcccatcggcatgtgctctttgaaccattcggcttacagtgtcccatacaacactagtgttcccataaacacaaaaatgcccatacatgccgcaaactagctcagtcttgatctcagcctacacccctgcatattgtctatctgtagcttgtagcaatcatgcaagtcttcacactgaacaaccaatatgttgtagtgtttccctctggattcacacaccaaaagtgaacaagtaccctgattcttcaaacacatgaattagtgggctcccccacttcaacttgggaaaaacttctctcttaaaggaatacccctcaagatatagctcgcaagctacccgcatacggttgctccgttccaaatgttactttgatgaagatgttgaactaatgcctcggtcattcacactcttcgcccctcgacatttctatgttgccttagtaccttagttctgctgactttcaccttaggccaacattgccatggtgttatcttagtacctgagtcgtagactttcaccctagataatcggcactgcctgtgtcccgagtcttcttgactttacatcctaaacaacaatcaatctctagctatgatacccatttcgatgcttgtaatgaataactagtctattgagtgaaccgtgaaggtctctcccccactttatttgttggtgtcctcgacaacatg

SEQ ID NO: 400442 - DNA, 606 bp, Cannabis indica
tggtcaccatgcaccactcccactccatctggcatttggaactttaaagataggtgcttgatcaaactgactaccccttgtccgatcagtgctggacgacccaacaatatgttgtaagccgagggcaggtcggcaaccaagaagtcttgcataatagtagcagttaacggtgcctcgcctacagttaatgcgagctcgattatgccaaggctagcaatgctatcctcggtgaatccgtaaagattcaccatacaaggccttaacttggcctttttgagccccattttctttagagtttctttataaatgatatttactgagctcccattgtctattaacactctcttgatcctcttattggcgagttgaatggttatgaccagcggatcgacgtgaggatatctgacgttcttctcgtcctccgcggtaaatgtaatggcaggttcctcagttttcaccttcttggaaggttctgaggcaaagaccgacttctcgttatttatttccttcacatatatcttttgagtgttattcctttcccatgcaatatgcggccctcccaaaataaccaggatgtcctctccttccacaggaataggttgtaac

SEQ ID NO: 400443 - DNA, 662 bp, Cannabis indica
taataaaaaattaaaaaagtaatgcatgaagaaagagaataagagaacacaaaaaataggatatgagatcataattatacattttgatagttaaatatatctattctatataaagtgtgtctatataacagaatttcagtgttatgagaaattcatgagtgactttttatttatattaaaaataaaatagtttatgagaaatttatgaatcactctttatttatatataataaaataaataaaataaatcttgacaatatccttacataatccaactattctacaccatattttgaaaagttatcaatatgatttggggtatcgctgaaagtgtttcataaataattagttctacgcatgcatgcgtggatttatatataagagtttttatgaattataattttgatactataaattatttgaaaattaatttaaatacataaagtgtttcataaataattagttttacgaaaacatagtttatattccttcaatgataaaaaaaaaacataatttagatcttgaataaataaaaatgacaccttaatttaaaaatctcactatataaatatggagagaattattataaaaggaaaagggagagttgtttgggcatgcatgatccataaaatgttggaaaaaattctcattacaagagagaa

SEQ ID NO: 400444 - DNA, 551 bp, Cannabis indica
ttgcatatggaatcatccctaatattccaaaaaagattaggctattatgctaaccattctcataaaatttataaagagaaaagatgagaagaaaagtgaagagaaattttgctataatttctctactctaaaaattacattaaaaattaccctttacaaataaaatgagcttctatttatagaatctcaaaatgattaaaaagaaaattacaaataaaattgggttacaaaataaataataaaaacaataaaaatctgattagtgacatgattaattttattatccaaagtattatctcatacctagtggcagggacggagggactttagcccatgtgtgggctaaagccctcactcaaatatatacatcaaattttttatatgtagatatatacatatattaattcactttgttcaatttattaaagtccaattcacaaaagccctcactcaatatcttaatcatgattcatgagcctactcttattctaatcaagcccattttaaaagtagtccaatacaaataataaaaaaataatactttattaaaa

SEQ ID NO: 400445 - DNA, 537 bp, Cannabis indica
gaaagaagaatggttcctgctcgaatttggaatcactacaaccaagtttctgttgagatatctccagattcaacaattaaatacgtgtttaatacacggtatttctgacccagtaaaagcgggaaaataggagctatatgattttcaaaatcatacactgcatttacattttgttcaacactatttttactcaactgatccgaacacacacaagacacaacaccagccttaatgtcaatgtcaaaaacacacaactcacttacataaaaaaaaaaaagaaacccccacgcaccttacccgaatcctaaccttcatttaaaaaatatttttttttctagaaaaaaaaaaacaaagataaacatatttaaaatatacaattgacttggaaactagggagctgattggttcatgatttgaaaactatattttaaaaatttgatattctgaaataaaaatttgaattttgtaattggaaacatgtttccaaaaatgtgattggttcagtgtttctcaacaatttttgaatgttaaaatatt

SEQ ID NO: 400446 - DNA, 661 bp, Cannabis indica
attttattataattatttacgtagacctacattcatatatatatatatatataataaaactatatatattcttaataatgaattatatttgaataagtaaacattaactttttaatttttctatccataaaaattagtgcctgtattaatatttttgtcatatacttctacgtatgattatctatatatatatatatatgtatatcaatgttaataaataattttgaaaaattcagggggagccacagctcctgttggggtgtatgtagctccgcccctgattataagagtacataaaaatttaggataaatctctatctaaacacaaatttttaccgaattaagaacagattttaccaatgtatgcgctacactattggcaacatgcagaatagcacagtactaccaacagtaactaaaaaaaaattaatctcattaataacaaattcaaaaatatcattagactcagaacaattaacccagctaacaattctagaatcagtttctcggttgtccacttaacccgtgtggggtaggggtgttcacaaagtatccgatccaatccaatctgcacgatctaatccaatctaatccgcaaaatgcagatatccgcacttgtgcggattggattggattgaaaaatctaaaatccgcacttgtg

SEQ ID NO: 400447 - DNA, 649 bp, Cannabis indica
taaccggtagccaatctctatgtgctcaagtattgaatgcgaagtacctccggggaaaagactttctctcttgcaggtataaaaattctgattcttggttttggaaaaatgttgtcaaggctaattctatcttgaaaaaaggggcttgtaagttgattgctaacggagaatcaacggaaatctggtcagacccgtggattcctcactctaaaggcttttgcccgaagcgtagaaggggtgcccctaccaactttaatcgtgtggcggagttagtctgtaataatggacattgggacctacaaaagctgaagcttctgtttgagaaggacactgttgcggccattttgaaagggggtcacccctctggtgtaggtcaagatagatgggtttggacgctggaaagtaatgggcagttctcgtgtaagtctgcttatctatcccaagccctggaaagagctcctcactgtgatgtcgcgccaaagctttggaataaactgtggaatagcaaaatcttggagcgacacaaagtcatgtggtggagcatcttatctaatgctcttccggtaagagatgttataggaaaacgtttccatatagaggacttgagctgccccctttgtggcgtgggggaagaatctgttgaacacct

SEQ ID NO: 400448 - DNA, 798 bp, Cannabis indica
taaagtttccttcagctttaaacgttccctcattgtgcatttctaaaagtgattcaatcaattttgtgtcttcttcctctgtccaaaatctcttattctgtcctggacctttgacttttgaagtatctcttgagcaagccatctaataataataataataataaactataaacatatcataaatatgatataataaaatatttacaaaatttgcaacatattatccaatcataatttaaaattacatcttgataacaagccatccgataataataacaataataataataccaaactttataaacatagtcataaacttcatatattaaaatatttataaatttgtaacatattatccaatcaaaatccaaaactacaacttaaaagcaagtcatctaataatagtaacaaacaaacattatgttattttacatcctaatttgcatgcctacgatttctccactcattatacatttgctctgctaagttcattctccaagtactccattcatcagaaggttctattctagttattccactaatatcatcctcaatagttacttgatcatttgattgtggctcttgcgatattgtattgaaaggatcattaggcatttctctcctaataaaattatgtaatagacaacatgccataataattcgagtttgagtttttatggagtaaaatgaaggacttctaaggatggcccaacgattttttaagacaccaaagcatctttcaatcacatttcttgccgcggaatgcttcatattaaaaaattcttttggattctttgg

SEQ ID NO: 400449 - DNA, 564 bp, Cannabis indica
ctttgtgggattttctggatcaaaaataactttctccaattcctcaattggttttaacaggttcttttcatcttgaacttgaggatctagatcctcctcctgtttctcgcgttccttagttgtaactaccattaattgatggccgacttttttattttgtagctctatgcgatagaattcccaagccaatagttggtcacctcgcactacacctacacctgctagtgtttgaaactttaaagataggtgtttaattgaactaaccgccccaagtccaattaatgctggatgacccaacaatatgttgtaggccgatggtaagtcaacaactagaaaatctttcatcaatgttgtggatataggtggctcacccagagttaatgggagtttgataattccttgattggcgacactatccccagtgaatccacacaaattcacaggttttaactttgcattttgcaatcccattttcttcagtgtattcttgtaaaggatattcactgaacttccattatccacaaccaccctttttattcttttattggcgagctggattgtaat

SEQ ID NO: 400450 - DNA, 951 bp, Cannabis indica
gggaaaaatgaccattttgcccctcccacactatgaatcatgaaatggctctaaagggtattttgggaaattataaattcctgactgatcccgacattctcaatgtctaacaataccgtcccgctatactaaaatactaagacgtgattctactgagccatacaccgcgttctaatgttgccgggcactgatcaagaaaaaatatgagatttcactatatgccatataatatgcattctgaattcaaataaatcatcataaataaataatttaatattaataaataattttcataattaaacactaattatctgctagtttccaaatttaaactaagcggtctttacacggttgctcacgcagaaagaagcttttcaaaattgaagctgatcaaatcttatctacggtcaacgatgtcccaagaaagattgagtggtttggctatgttatctattgaaaaagatatagctggaaaacttgattatacaagtttaattagtacatttgcatcacaaaaagcaagacgaatcatgttcacatagtacttttgaacaagtaaattattttgcttatttttattctactttattttgtgattaaagggccccataattttctttcgccttaggccccaaattgtctaggaccggcccttgctcaatcaccactaattacgtagttataatgtagttacatgatcagaataatacacaaaactctgtaattaccttcaattacatccatctctaattttccctggctttccaaatccgtcgttatgtatttttaattaaaatgtattatttttttttaaaatcacaccaaacataatatttatccaattaccaaaatcttattatgagattaaaaattggtaactactataatgtcatgtttactaataagcaatgagaatcaattgtaagggagtcattcctttacatttgattc

SEQ ID NO: 400451 - DNA, 918 bp, Cannabis indica
acaattacgcacacacaacttatgctccctaaaactgaaaaccctcatgcgtataaacttaccttcaccagatttggcggctgaccatttgcagtttgggaagtattcatcgctggatcttcgtacgtctcacccacaaggatgacactcggaggttgctgacctacagtttggtaggcttttcgatttagcacagtagcttgcggactacgattttcaatctctgtattatgagcccttaacgcttccatctctttgtctctccacttggcaaagacacgcctttgttcctcgaacgcgagatttaccgcagtgcggagttcttcctgatcatgatttagggtattgacatgaccctgcacaagtccaagagcagcacggaggttttgtaactcagtatcatctccaatggttgtttgagtgttggtagcaggcggaacgactatgttatgaatgccctggttgggtgctgaactagtctcctgcacaccaggcgcgatttcatctacaggagtcgttacaccgtgacccacatttgctgattgttcaggattaacagctagcagaacccttgcatttcctaggttctgcaatgtaggatccaccgtctgtggatttgttggatcaaccaggcccctacgagtctgtaccaccatcgtacttgtggttagattttgaatgaagagcgattcttgattctgctctcaatgaaagcaccaaaatgttgacctctcttttagccaacgacagtgagtcttatttagtaagggataagtaatttatagcaatcgatatatagtaaagcaatgtaaagacacaagaattttatagaggttctgccccgagcagttcggtaatagcctaatcctcgttatttgtattgactcaagaataaggagaaaggttccttttcttata

SEQ ID NO: 400452 - DNA, 564 bp, Cannabis indica
atagaatttcaaatttcccaaaatatttcagtagattttttttatctgttttaatatttagaatattttttagtttatttttataaatttgtatattatagttatttaagattacaattgttttttataaaacttctaatcatttatattactaaaaataaaatttaaatattttgttgggtatttgatttttagctctctaaaatatataaaaaaaaaaaaaaatctaaataattataagatgcagatcataaaaaaaaaaaaaaaattaaaatattcttttaaaagttgaataccaaaataaatatatcaagatttatcacattttcacttcatttattttatacaagttttcttttgttatagctttgatactaatttatgtcattctaatttaatatatcagaattatttttttaattatatctaattgaaaaaaaagttttatttcttaaaaccttaaaataattaaatattccttgtccaaaaaaaactaaattaataatttagcccctttcttctgagtttttaaatagatgaaaggataataattattgttactta

SEQ ID NO: 400453 - DNA, 1171 bp, Cannabis indica
gaatcacccaaccaaggctctaaaactaacacgagttgacgaatcgaacaatttaggaaacctgcccctcttcaggttaaccggttttacaagaccagtttaatcggttaaccagtttgcactaggtttccccaaacaatttgaatcttgctcaaaatatgcccaaaccttccagagcaactataataacctcaaacaacataatcaaagcaataaaattcagaaatacacccagaatcaaaatatgccatggatgaaccaagcttgagttttcaaacttaaacttgtgcatccaccacgccaaactctcaaactagcaactagaactcaaactcaactcaaaatgaacatagaaatcaaactacaattcattcaaaccctaacaaccactatactttaaaattacacacttaaacaaaaatcaaagcttcaaattacacaaggattagagctctagggttacctttgattaacaccacttggattcagataatacctcctcaaaattcactccaaaaatcctcctggttgttcttgcaaggctcaaagaggagagagagagagagtaagaaaatttgggttttcttccttttctttataattaattgaattttctttaatttcctcaacaacaaaatgctatacttagctgaattattaaaaatggtcagctgccatgctaagaagaagtcatgtaatccccttaataaaatgaccaaaatgcccttgttctttaaacttaagcaattttaaacctaggggtaaaatggtcaaaaaccataaccctgcacaaactcggtattctattcatctcaaatatttatcccactaagaaaaagattctagacttacccatgtgactctaacgagcatccatcgcattttccgtcatccccgagcaaaaaccataaaatttacataattcatatataacacaaataatacttctagagtttaataaaatttctgaaattgagaaattataactctaatgcccatttctaataatgggatccacaacataataaatatatgcataattctaaaaatatcaataatcaaggacaattgtctcatgacgaaaaaatgcaactcattttagtaccacgatactaggaatggagaacatttaaggaaatactaccaatgagtactcaagtcggtagaccac

SEQ ID NO: 400454 - DNA, 503 bp, Cannabis indica
tgggagatagtaggagcggagcgagaaatagaaatcccatggaaagagttagagtgggctttagcgtttatggtcccagaaagaccttcagcaaccaggaggaaaagatagggtgagagaggatcaccctgacgaattccacgagtgggtaaaatttggtgagagagacaattgttaatgcggagacggaaagaaacagaggaaaggcagttgagaatgagagagataagagggtcggggaaaccaaaatggtgtaggatgtgctcaatgtaagcccattccactttgtcgaaagctttttccatatctagcttcagagcagcccaacccactttcccatgcttacggttggtgatcgcgtgaatgacttcattggcaataatgatattatcgaaaataatgcgatctgagagaaaagcgccctggttatgggaaataagatccgggagagtagttttgaggcgattggcaatggttttagaaactaccttgtagagagtgga

SEQ ID NO: 400455 - DNA, 531 bp, Cannabis indica
taatttaaaaatctaatatatatcatacaaatatatgttaaaacttaataaatcaaatttatattttattcttatatgtaaggagaatataagttaaaataaaattatgcatatttttttacatataatttttttttcttcttcttttaaaattgttatttattatattattttattattagttatgtgagtaaagatattttttttagtaaatattaaataattcaatattaaaaagtaagcaattcaaaataactgatccaatccgcacttttgtagttaactatagtaaagtatgcttctgaactatatatctctcttatattaaatgtggttaactaacgaaaattgttagtttaacgttttttattttatttttccgttagaattcacggttaaaattaacattgttaaatcaatcaattaaataattattttttaaaataatatgtagtttcaaatatctaaattttttaatttaaaagtaccaagaaaatttgataatttcatataccattttttaattttttt

SEQ ID NO: 400456 - DNA, 977 bp, Cannabis indica
ttattttatttttaagttaatttggcgatcttattgttgttactcgcttaagtgaattagtagatattgtattgagccaagtattattattgagcactagtcaccttacaattgattagaacatcttgagaatgctttaaagaatgcttgttaatatagatctatttttaacagcttttaatgagtatatactgttaaagtgaaaaagaatactaaaaaaaatgtctaacaatatcatattttatatctttttttcttattcttatgctcttagggctagtttgggtcgagtgtattgttaatatattataattttatacaatttattaatacaagttaatattaaatataatattatattaaataattttaatacaatataatttaatctaacacaatataatataatacaatacaacgtactaaatgaatccttagagaataacacagtcggtaatgcttttattccttaaattttttttgggataagttgaaaactactcctttttattacacattaattaaatataacttcaaaataattttaattgacaaatactctcttttataatcaaagtaccaaatataacttcacataacttataaaaaattagagtttctaatacacataatggaaatttaatctataaaattgggtataaattaaagaataataaaataaaaagagtaatttgcggcataaatacctaagtttaactctaaattataaataaatacctaaatttaatttttggtggtaataatacttaagttatatttttggaactctgtaggtacctaaccgttaaatattgtatcattatccacgtgtcattttcttattggtatatttaaaataatttttttttaaaaaaaataaaaaaaatttaacttagaccaataaggaattaccacgtggcaatttacttaacaattaaccgtcagatacctacaaaagtttcagaattataacttag

SEQ ID NO: 400457 - DNA, 673 bp, Cannabis indica
aagcgggggcgttacatccattatctatgtattttgagtcaacatgcattttgaagaatgtctatggcactttcattatcatgcacgatgacaaataagcaagcaatgaggaacactagacaacatatcatgtgtatatcatatattaggacaaaaacatcattttctttgtttaaacccaagaatcaataataaattgtttagaagacataccataacactaataatagggaataagctcttaaagataagttgatgatttaatattgttgtttcttttggttaaaacttttgaaatagcagtaaaacccccaatatttgatttatccagtgatgcactattacataggataacattgtccatcaaataactaacataaccaaatctcttcttaagactgagcacccatcagataaaactaaatagtgagttttagaaaaattgacaatgtaatttgcatcacaaagttggcttatgcttatcaagtttgccttgagccctttcacatacaatacttcaataagatgtgcaactccactcagcaccaagtgtcctctcccaataatctggcccttatttccatcaccaaaagtgatagctccctcctttgcttctttataattgactaacaatttcttattgctagtcaacgattagttactagtcgttgcc

SEQ ID NO: 400458 - DNA, 686 bp, Cannabis indica
tcaatgcaaaccttctcactacatttgtcaattcagtcttatttgtatacaacttaccaacgtgtatttcccttgaaggtgtaccactagagaagttgtataaatattaatttcctctatgtcttctcttgtccacacaataggtttgaatttgtacaaactttaaaatcaaatggtacagtactacaaggaggacctggttggctgctactagtgcctggtgtttggtgattttcactacgaggggttcttttttcttgctctgtcctttggttccttggaggtaattgaggtagttctgacctcaaagcatgtacctctacagcctcatcaacttacaagtccacatcaccatccccattcaaatctaccacatgatcattgttgtagaagggagcatcaaactcattaaactagtcaaatgcattgtcaaccatgtcctcatctatattagtagggttctgctcatttaaacttactgctagatctgtttttgggacaaaactcctaacaaaacttcttggggagggggcagttggcgaagtaggccccaacatcgcatgcctcttaaccttagtcacaaacaatgacagcaagttcttcacacttatttttgccttcattcttaagaataatcttacttgactatctttcactaaaatctctggcggtatcatattaccttt

SEQ ID NO: 400459 - DNA, 594 bp, Cannabis indica
gttttccaaatttttcaatggtaaatttgttcatattaaatcatgaagagacatgtagatagagttacgtacgtggaaacactattatgattttttaatgtttcataacagttgcattactcttgcattaatattttgctaacaattatttctccacatattaacagttgcattactcttgcattaataattgttacattacagtctcatcacagttttcttgaagttgacttcttctttcccttctagctgtcgaagttgaatttttttaggcaaaggcaccttcgacttcttcttcactagacgacgaccaccattagccatagggggagcaaaatcggagttatcgtcgtcgatgactaagcatttccctttagccttgttaacaactgatttatgaccaatttttttaggtttttttcggcaatggagatggagaagatgaagatgatatataaaagaattgataaaagaggcaattggaagaaccaaatggcaaaggttatgggtgggaggtggtttttgtgggttttaaacgtaggtttcaaaagtataatgactggaagatagctttgaaatgaaaaattgagaaag

SEQ ID NO: 400460 - DNA, 641 bp, Cannabis indica
taaagtgttgagattttttcatcgctatcacatttccatgttaccttatttatcgtttgtggaaaactgtaaatttttagttacccttaggaatatttccattctcgaagcttgaagactaaaacagaatgtcacatctcggatgatatggaactctccattcttacttaggaagaagagctaaattggagggtcacaaatcgatatgcccaatacttagctcttgttgtattgaagttttggattttccaacccccaatagtgattgtcacatggattggtatggtacacattttccatcttactcccagttccgtgtatgtcattgttggaactttcattatgggagctttaaaagggctgtcaatatctttcagggatatattctcgtacattaggaagactgcaaacaatccgagtgctaatcgttcttagcactcgttttatgacagatgcatagtcgaaggctttgatgttagatatttatatgtataaactgaaacatacatgattataaacaaagtgcagaattaataaatcatatatgcagtataatttaaggatcgaaatacctctatccattgaatctttgagctttagtcccacataagcatgatctgcaaaagaaactgattgatgtg

SEQ ID NO: 400461 - DNA, 598 bp, Cannabis indica
ttccttttttttacaaactttaagcacaacctcttgtttcttctctttattgaggcctctaacattccaacacattacattgcagcaattcataaaaaatgaaccaaagacccatctccctgtgtcccactctccctattttgcaacatttcgaaagtattcttagctttgtgatgctctccatgctccctaaccacttgcttagccttgagaagatgagctctttttggtgtttcccaactttcctcagcctctcccactctttcaactccagacttcatagccccaagacttgaatctctttctacctctcggcctcttacttcccctgccttctgttggggaatagctccatccttccccccttctttacccaatcttacctctacattattcttgccatcatctcccattactataaccttcttagcattagtttgagcatcattttcacctttcttctcctcaccagcccctcctcctttcacatcctttttaacccattgcttagcctcacctttcctacactccgccatgatatgcccaaaacccccacaacttttgcactaactggaaaccattcatagtccacccctgc

SEQ ID NO: 400462 - DNA, 561 bp, Cannabis indica
aaaaaaaaattgaagaacaaaaataggaggaaaaatggatgtgggattgtggatatagaagtgaggttactaattttttttaaaaaaaaaaactgaaaaagaaatgaaaaataataggaaaaagaagaaaaaaaagatggaagtgattgatggttaattgatgagtgataggggtgatgcacgtgtctcatgcatgggggagtgtgcatgtggtatatgtgtaataaagtaaagattaaatgtaaaaatgttactttaaccgtgtgtaagtatttatataataaagattctattttgtatttttgatgtaaaaatttctataatttttaaatgaaggctatttttaattcgtccttaaaatattaaatataatgtattttcacattatatttattttaatgaaatactaaaattatacttataaataattttgtttacagactacagtgtctcaccaaattaattagtcagtactgtatattacactattcttttttttagtttttaaaaattaaattatacttttaagaaaaaaaattaaataattatatatatttagta

SEQ ID NO: 400463 - DNA, 481 bp, Cannabis indica
aaataagattttctcagaactttgtttctccattgatgaatttaggatttaaaatcttttaacgagaactgttctttttttaaaaaaacaatgttttttacaatctctatttgcccaaaaactcactatcttttttaaattcattgccaaataaataaaaggtaaaatgtgacactgatttttgtgatgaaaaaatggcattactttaaaattttatgatattattaaaatgtcactaataaaatatcccatctcaacacaatgaactaattgataatacaaatctgttagctatcacttttttaaattcattgaaaaataataaattggattaccttttcgcattcattgcaaataaatgggacgatttttatgatgaattttaatgtgatgcaaaaatgataatttaggtggcgtttggtaacacttttttaatcagttttttgtttttaaaagtagaaaagtaaaaatatttttcaaa

SEQ ID NO: 400464 - DNA, 1216 bp, Cannabis indica
taaataaattaaaatttgaaaattcgttgggtatttgaatttcatttttgaattttagatatttaggagatttgttagatttcaaatatttttcaaatattttcgaacaacctaaattttaaattctacttaagatattttttaaatattttattttaaaataaaaatatcttaacctactttccagatatttgttacatgcttcaatgtttatttaattatttatttatttaaattttttaacaaacctattatttatttgatctaaattgttatgattaacatgttgatagatccaatcatctgattttaatcatagtccagttgtaaatagatcttataaataatttgtaacagataaattttataatttctttcatctgtgataaaccttgtaacatgatagggctcatccaaatcatttgacctgtgtaagcctatatgtttgcttttgggtttagatgcatataagaagcccatttaagtttgattaattaaatggattaggttcctaaaataaaaatatcaccttgatagttttatttagacctaattagtattgggcttatttaatgaataacaattatttaattaatggttaaatttctctcctttggggcttgtctgagagtaaggggccatagtaatagagtacatgcccaccaatagtaagtctagtacacattcaaagtgtgtaagattttgaagaatccaaacaactaaaggagatcaggcttagatcttgataatactccgtgacaaaaaggaacaagggcttagagatctgagtggaaggagttattctattccgctgcaatcaatgtaaggtttcttaaactttatatgtgtttcaattctattgttttagaaattcttatttaggatgttaagtaatatacatggtagtaaatctagatcctagtaaaataatccccaacatgaccatctaaattattaagttggaccaacaataaagattcaaaattgatacttcataatcaataacataaatgaaagcaatattcaatataaattctattcacatgtatttggaaaattattaacacataatcaagtatggaaaatataagaaaaatactaaaactaaacatattttaaattttctaaagttatcaactaaatgatatacagtgtcccgtctaggtgagagttaaagatatcactagttaaatagagtagtgagctcttctaaaat

SEQ ID NO: 400465 - DNA, 689 bp, Cannabis indica
tcaagttcagaaaccttggaagtctcaaaacgagatctcgagagctcaggaatggtaccgagtgcccaagttgacaaaggcctggtgcactgggttttgcttatttgattctgatttcgtttcaaccatccatctagttgttcacaataactaagatccatgaagtcaaagaagtcaaattcataagttcgcatttctcatttccaacgtggaaaactcacttggaaatgaagagttcgagtctctcatttctatagaacaacaacatctctaagaattggtgacaagcttcgccagaatatagaaacaggctaagtgatgtcaaaatatcacttagacaccttaaagtacatcctttggaaatttttgcacttatccaacgtcaaggtggacgtcatatgtcaacctgggcactgggatgtcaacctgtgcgttggatgtcaacctgggtgctgggtcatgaactgccttcagtaaaataattataactcactcaatattgatctgattgactcgattcaacttgcatttcaaagctaattgaatgctatatcaagttatgtctctcacttcacttataattttaaagctatcgtcgtcaaatttcaccccaagggagttacaaaaataagatgcaagttacccacagtaagacctgccaggctccaaaaaatcactatcaccaccaa

SEQ ID NO: 400466 - DNA, 718 bp, Cannabis indica
ttattattatttgaaatcaaatgaataacagaattcaaagaaagatctcaaaatataggtttctaagccatggtattctatctttgaaaaaagtgagtggtattctatctttgaaaaaagtttgaaggcttcaactgataaatattgacaaaatcaactaggaatcaaattttgttaatgaaaataacagaattaattcctatatgcaacaattttaactaatatttcatcttcaaatgtttcacatatatatataacaatatttgtttcttctatttttatgtacatatttttttttataattttaaattaccgtccaaataaaatcttaaattatttttctcatcacacatattatatagcaaagcaaacaaatcttcttcctccaagtgggatgaggagatcaaggaggaataaggtagtgcaagaatgcttgatcggtggttcgagaggtaagacccagtgtggtgttgtgccatcgtcagcaaagcacgtaacgaaagagaaattagttgtttcatcgagttgtgttttggatctccacagatcactcctcagcgtctcttattattattattattgattttcttcttcatgcttctgtcgttgattttctttttttcattatcatatgttaatttatttggatatattaaaattttatttggtatcattagcaaatgattcttttttccatgcatattttctttgatctcct

SEQ ID NO: 400467 - DNA, 526 bp, Cannabis indica
tactttcaatcttttcttctcagttaaatagagattaaaacaatactctagtaaatcgtggatcaggaaggaactttaaatctatgactcaaccaaattcatcaaatacctaaatccctcataccccacatgactaaatggaagctcatccatatatcatcctagcaattggcttttctaattttttctacattatatatttgtgcagtgagttcctacaccccgacccacttctctttttttcacaaaaattcagtgtcttctgcttcttatccatgttagaaggaaagaatttgcaaacacttatgtgtgctaacaaatttgatgtcccattttttttctatgactacatgcataatctttcttgcagtaattactgatagctttaatattattttatccttcacatcttttgtgaaatgatcccaagcaggagatggatgtttaacaggtttgcgtttacttggtagattagagtcattatttgtagatgttggcgatggtaattcatcacttgatggttcca

SEQ ID NO: 400468 - DNA, 787 bp, Cannabis indica
ccacatacaaataatgtatttgtaaacatgttattatagttagcaatattgttgttgtatttttttttaaagaatattgttgttataattttagtacgttaatttattaaaaaaattgtttcattactttgttaagcagattgtgcaatatcattataatgtacctacctatcattatactgttacgtaaatttaattttggttagtttttttgttaatgcattattaagcatatttaaaaataaaaatagaaaataattaaaataataatatgacatataacaacgtttgtgtaaaaagtgttgttgtatttatatttataatttcttaaatagcatcacttttaattaaggtgttgctatatgctatttataatatgttaaatactatgataaggcaacacttgtaaaagtgttgtttaaactcatatcttttagcaacagtttaggaggcaacacttgtaaaagtgttgccttttattttttcttacttaaaaaaagtgttaccataagatatttttgtagtatatctacacatattctaactacagaaacataactcaaacatcaatagaaactatagaactcaatctctcaacacatgaataatttcctaactcgatcttcaagaaaaccaaaggaaaagttatctagaagcttaccttagctcgaattcacttagagctgctacaaattgaaaagatttgaagaacaatttcagaaccctagctggtctaggggattaaaaaagagagagagtcgaaggagagagtgttatgtaatttttt

SEQ ID NO: 400469 - DNA, 676 bp, Cannabis indica
ccatgtcagctttttatgtgtttgttagtatgtgccagctgtacttagctggttggttagttagtcgagttttattatcttcaggatatatattctgttgcttctgttttctaactaactctcttcggttagaattatcttcttgattatggctctgctagggcaaaatatttctttgtcttgttttgttgtttgtagatagatattcctgatgtcttcctgaggttgaagatggagattgaatctgcttgatctgaagggagttcagatttcagtgctgaaggttgttcagctgtgtgaatgcaaggtgttcttgtgtactgagatctaaatgagtttagatctcaaaacttgagtgtgttcaagtgttaggtaacattgtataaaagtcaatttagattacattgtttgatttggataatcagaactggaatttgtaattgaattgattttatagtggatgttactttacccagttcaagggaacccaagcactactcggttggaatgcgtttccaatgcagaggaagcttgtaaattttgtgttctttgattttaaattctgttcagatcttagaactaatcaatctgttgagattaatcaattagaattcgtagtaattaggactttcaattggtatcagagctagctttttcatgtaaagaaattgtgatc

SEQ ID NO: 400470 - DNA, 788 bp, Cannabis indica
tttttttttttgttttctttcgagttgtctacactattttgttgatgtccagttgatttacatatgtagatagtgttgttatgcaattattttttagttgttattaagtttttttttttttaataattaagttattttatcaatacaaaaatgagtataaaataatttgtttatggtattacttttaatttttaagattatttgtgtgttgtttataagtttgttttgagttgacataatttgttggtacccaatttatttttaggaattattacataagacattatttttacgtttaaagatttttttatatatatttttacggtttttcatagaaacaacatgaaaacaacaagaaaactacataaaagtaacatgaaaataatatttaaataacatcaaaataacaacaaaaaatgacatgcagataacaaaaaaatcgacaacaaattaacaataaaagaccgtattttctgtaaataaaatcaaaaaaattgtaaaaatttataaaattccgtgaaatcgtatttttgtaattttttttgttgtttttgtatttgtgaaattatcccttatttttattttacaattgagttgtcattgttatttaattttttagcttaaaaaaataaatatatatttaatttttgtatggatatacatattttataatttaaaatatattttattttacatattcttttgtagattttatttagtaaccttgctttattaattttttattaaatatttaaaataataaaagtgttggtcatataaataaaaaa

SEQ ID NO: 400471 - DNA, 655 bp, Cannabis indica
aaagtttttcagaacaccgaagaaacccgagcgggaaagttgtccaccaactgggaaggaccgtaccgagtgataaacccgacgggaaatggggcatacaggctgtccaccatggacgaagccgacatcacaagaagctggaatgcaaggtacctcaagaaattctatgtataaattaaaagttaggaactttaaagtacatggaaaccgtcatcaaaatttctccttaaaataaataaaaatgaggggaattcggaaagtattgtccaagttaaaaaagaaaggaataaacaccttttacggaaggcaacaaaaaataccttttacggaaggcaacaaaaaagaccttttacgaaaggcaatgcaaagacctttcacgaaaggcaacataaaagaccttttcacaaaaggcaagaataagaccattcgatacgataatatataaggcacaaaaatcataaaaggacaaccagcaaatacaacataaaaaaaaaacacaacaaaaactccattcgaaatataaacgtatggacaagcaagtatatgtcgagaaacaacggaatttaaaattatcattaataaaaacaaaaaaaaggaaagttttatgaaaagagagtacttactctattttcaaaaaactagggggagtagtggc

SEQ ID NO: 400472 - DNA, 866 bp, Cannabis indica
tatagcgcatgtcgaagagagttggcagatggctgaattttacaacaacaaggtattcacaaaatttgtgtaatatgccatattctttcatgatagaagttaatatgagttttatgttaaaaaaatatatgagttttatgtttaaaaaaaagtcaccacaaaagaaagcaaaatgctgaaaattaaggttaatttcatgtctgttaacgtaacacttttgatgtttactagtttaacatcattgttgcatgccttattttctttacaacatattagtcccacaatttgtttcttttgtacaaaaattcaaggctatgtcatctagataaaatgattctgtattcaactattaaaagacaagcatagtcctagcccccccaaaaaaaaaaaaactacaagcaaagttctcttttgaaagaaaagaccagcaaagtttatgattacttgaaatgataattttcttttgttctgttttgaagagccatctgaatttgagaatgtttacccttaaagcatcttcagtaataacaattatccaagtacaaactgaatatctacactagattattatcaaattaacaatcgaatttattcagactgataagatcctacgattggatcaaattgaatttagcgaagttggtcagaaattacaccctagtaccctacagtaacagatgttggagaaatctgatagctctccaatagagcaccagcttgaaacctaatatttttttttttggatatcccctaaacttttgctaaccttttgtcccctcaaaacacaaattacaatcaacccaaatcaaactaattaccagcaaagaaatcacgatgctaatagagatatatgcagaaaaacttcc

SEQ ID NO: 400473 - DNA, 720 bp, Cannabis indica
agaggctgggcacaactatttatgttttagaaataagtgacattttttttttacttttatattttaaactattattttcttatgttgttattgaacttagagtccaatatttttttatttttttaaaaatatgagatctcattgtgtgtcttttaaatttttaaataaatattttatttggtatattaaagaatttcttttataagatttaaatggactctagaagtaacgtctcgagaaatcggggcgttacagccaggttcttctgcgttcgaaaggttgggaacaccccgtgacctaagggacgacctaaacagaagaaggggaacagacgagcagaatactacaacgaatgtgcactctggatcccatactcaaatccccactcagaaagatgctgacgtagcccaacccgaccagaatgccaatgaagtcagcccagccgtgcaggcccagcttgacaaactaaagaatatgtttcatggcatggccgggcagcgtaacaatgatttggagttagaccgtgcacgcggaactcccttctcgccagaaatcaacctcctgccactgcctcacaagttcaagatgccaacgtggaagatgtacactaggagagaagatcctctatctcatctcaagtatttcaagatgcaaatggatctacaaggagtgcgaggagacgtatgttgcgaaatcttccccgcaactctgtcagaggcc

SEQ ID NO: 400474 - DNA, 794 bp, Cannabis indica
gattggaacagctattttataaacactcctagtttatctaatgaaagttacatttgttaaaaaaaaaaaagataattacataagacactattttttgtaaaaaaattatacttttacatttaaagattttttttttttttactatttttacggttttttcctaaacaacgggaaactaatataaagtaattagaaataacatccaaataacatcaaaataataacaaaaataaacatacaaataacaaaatacaacaacaaattagtaagagtacaacatttttctgtaaataaaatcataaaaatggtaaaaatatttaaaatttcgtacaactgtattttgtatttttttattgtttttatgtatttttgaaataatactaaaaaaaaattattacatagaaaatataaattgacattttatttacaaaaatacctccataatgtaaagtcaacatttataccttttatgtaaatttaattaccaaaataccacttacacaatcagacgatgattgcagagtgtttgttgtgcagtggttgcatcggatgaaagtttcaatcaaacgatggttgcagggtggttgctaggtggttggccgaaggttgcatcagacgaaagtttcaatcagatgaaagattttgagtggttggtcgaaggtggcattagacgaaggtttcaatcagacggaataactgttagcaaaatgtttatacaactgtaatgcaactgttgtgaaacattaaaaaccagaattgtgtttccactcatgtaactctatctacatgtctct

SEQ ID NO: 400475 - DNA, 1144 bp, Cannabis indica
ataatgtgtgttactatatatctgaaggtcaactaaaacttatttaattttaaaaatatataaatatatagtgacacacaaagaaaacccacaaggtgggtcaacaaaagattacaaataaaaaataaaagtaaaaaaaattaaaaagactaaaaaaaagttgaaggacatgtgcaacggttccttctttctctcttaatatatttattaaaagcaacaaaagaaaaagataaaaaaaataaaaaataaaataaatgggggtacaaaagggatatgttgaaaccctaattaattaatctcattctttttgtttgaaacaaaccctaaatctcatcatcttcccacatcctcccgtatctatctatctttccctttgtttactgcgtctggtctggagtgaccacggctggacagtcgtgctccggccatggcttcctcaacccaagaaaatccaaagccccaatatctctctcatctatctttcctatttcccttgcgcggtgatgctgccaggcctttctccgaactacggttgtccaaattgaccacatgatgctcgcaacacctggaatctcaaacggcagtggtttcctctttcgttcgcacgccatcaacgaggatgagctaatcggaggtgactacttttctctccctctggtttcctcatgtggcctgagctccgatcttcttcctaaacgacgaacgtccagcatcaccgacgagccaaacggaggtcaccgctgcttgggtttttatgggatttgatattaggcatataaaaaattttgtattttattgtttaaagatttaagaatcttaattttattttaaatgtatgtttatgctcatttattttactgttatgagatttgttttactgttcaattgagttataaattttgattaagttttactaattttgtttcatgatttgtatatattttgtggtattttgatgtattggtttacattaattcataattgatatataattaattaaattatatcattaagtatattcttatcaaaatattgttaattaaattattataataaattttacaatatataatctgaataaaaaataatatttattttttttaaaaaaaaaacatacaatgacactctgtaagagtatctaata

SEQ ID NO: 400476 - DNA, 953 bp, Cannabis indica
caaaattataattaaaaaaattatatttattgtgtgttaaatttggcataatattatatcttatactaaatttaatacacatttctcatgataaataatatttgagagctaattttttgttaaaatactaaaatatatcactacactattttagtatatgttctaatattaacaaattaataagttgattaagtaggtgtgtaagtgtgacgtgacaaaggaattatagagccgaaagaaacgtttgaagatatactctctcttattttattatgacttggatgagaattgagacgtgacaccatgaaatcatgtatatcttaatactcagaatatcaccaaaaaccacagcacaattttccaactacacatatttccgttttagttaatcagtccatagtcccttgtgatgtttgtattaccttatattattatcatatacaactatacaagaaatgaagaaagaataacacagaaagagattcaaaacattatatgaatgtgtgaaaaactgtgtttttccatttaacttgcgattgtagaatgcagaattacagtaataagacagttgtagaaataaatagtacatataatttaaaacttgatacaaaaaagtatacatgatatcagtattttttcaaaaactatttaacaaatatataatgaagattaaaattatatgagattaatatatattatgtgttggaggttatattgtatcatatatagtataataatatacataaaattataacatatgaggagttacaaatttgaaaatagattgtaacttaaggatcaaaattgataaatatgtaattatatgagttgttacatatgagagttatggaattaatgagataagtttctagttgttagaaattgttacaatactcaattatatcatttaaatgggtattgggacgttgggaaaagatttaactcggagagga

SEQ ID NO: 400477 - DNA, 771 bp, Cannabis indica
tatttagggtataaaattcaacatatacaatattgcggaatgaaaagaattaggaaatgaagaaagttatataattattgaactagatgaatgaatgacaatgtagtatcaagtatatgtaggtcaaaggggagttgactaactaaccgaataagtaaactaataacaaatgaataatcgtagagcttaactaacacaaagaaaaccgactcaatattccaacttgtaagaaccagtattttctgtagtgacaagttatatccagttgcgtctgagattcatagtgttttgtctgaagtttgtaatgttagtgttagtccacgtcagcaaagatattttaggttttaattgttcaaatggtaacatctgtctatttcggtattcttagtttagctgggtataaatacaacttcttggtattatgttgatgaacctttttattggtgattaggaattacgtttctttcttgtttcgtctatatgttccatggcaggtgatctttgaacttggaggtattaattcaaagttgcagatcagagcttgaagatgttgagttcacactgaaggaatttttagtatcatcttcatcaccagatctgaagggagttcagattgaataaaactgttgaagagagctcatcattcacacaaggggatcttgtgtctccaatcaagggtcttagttggtatgggtatagattcactgtattttgtaaaagagtgtattatttacaatattgttggttttgtaagatacatctttgaatata

SEQ ID NO: 400478 - DNA, 1280 bp, Cannabis indica
tttactatttggattagaacgattgaccatcgcgtatctatatcttggtacatatagagcgttctatataattaagagtgcaattctgaatctatagttgcgcaatgaggaactaataagttagagaatttacttgtgagataatcctgcttgtagactcagttaattagttttaattaatcaattataattctataattttactatgtcttatttatgaattttcattaagtaatggcttaattgtgaagaaaagaagttttagaatttatttattaattaatagactttgttaagtctaattaataaataagataaatggtaattttatttgttaattacttataattattatataaatagttttgacatttataagatggaaatcagaaaaatatggcattattgaaagaaaaaaataaatagttgaataaaatggtaaaattgtaactagtgaagcccactactatggtctgccacttaagcatgattttcgcatattatttttgtcttttttaatccatataattaaatcataaaccatagaaaaaatactataaaaggaacatgatgctctcattctcattcaatctatctgaagctagtttcattctctgtcagacaactagtaaatgagagctccttctataataatttgaaaccccttctattgttcttcactaattcaagcctttagtgatagtaccatgaccactcatagcaagtcaagtactcaatcatagtgcgaaagaagatagttaaccaaactgaaagagagaagatctaggtttagatcttgatgatgctctgtgatagaaatgaatcaagggctagagatctgaacagaaggagtcatattattctactgccatcaatgtaaggttttgtaaactttatatgtgcttatttcatcgtattaggaaatttatatttagagtattagattatagaattataatcaacatagatattagtaaatctagatcttggtaaaataagttccaacaaattgcctcagagccatggtaacgctttactttcatgaaagatagatttaaaacgataaatttaatgatttggatgtgttcatgttggtttctatgcttatctgatgaatgtttgttcattacgaatttttgacaaaaaatatttttagtttcataatggaagtattttttttcttgaaggtagatgaaaaattaatcaatttaggcttttacggactcaatttggatttaaattaaattagttatgatttttttaagtttaaaaaaaatatc

SEQ ID NO: 400479 - DNA, 887 bp, Cannabis indica
tttttaaccattgatgttttaacttttactcatcttaaacaaatattaaaattattattgatgaacaactaaattattttaggtaaaaaaactaatcttataaggtgaacaaaaaaaatatttctatgctaatttttaatctaaaacataattaaaataaaataaatacacaaatgtaaaactcaacatattacaacacataatttcatgagttataagaaatatttcttacaaatgtactacgaaacataaagtaacgtactcagtacgtgaaattttgtacacaagttttacttaacattatgcagaaacaataaacgtacacggtacgtgatataatgtactcaactaccatcgcacaaacatatagaagatatgaaggaataaaaagacgaaaataaccttactacaacaacatggacccactatctgcagtacgtttgtactattaactaccccaaacagtaacttcgttgtaccttttcgtaccttaactaccacaaacagtaaacacattgtaccttttttattttttaactaaaaaatcaaattgacaaccggtaaataaacctacaacaaccggttgtcaaataaattaaaaaattaaaatacattttaagataccttaagacccacctaccgtacaacggattgcaattcgtgtttttcaactctgggcacaaaattattggatcctaactatagtattattgaaaagataataagtaaaattcaagattattattattaataataataaagagtataatataaattattatttaataattataaagataattattattggattttttttcattttttttaattttaaaatagttttttttttttttacaaaaattcacaaagcagctgaagtaatc

SEQ ID NO: 400480 - DNA, 809 bp, Cannabis indica
atgtggagctgctttagaacatcgagaaatctccaaaattggccatcgtcttgttgcgtcttgaaccgttgaggaaatggtggaggtggcttttgcaaatacttttctgcagcagaatgctgatcggatgctgtaactactggggaaatttcagcaactgaaattgctggttttttcttaatttccttctctttttggattgaagagggctccttactgcctgttccacccacatttgactcaagaatttttccacttctcaaggttaccgcgttgcaatattctttgccatctcttcttgggttttcggtgtcactaggcaaagtgccttgtggtctattcttcaaatcattagctaattgccccaattgaatttgaagattccgaagagatgctgcctgactttcgattacagcgttagtcttggccatataatctctcattaagctctccaaagaactagtttcagagccttgaggttggtgtggttgttgagaaaatcccggtggaaatgattgttttccttgtgcttgtgctccacttgaacttgccccttgacctccccatgaaaagtttggatgatgctttcatgccggattgtaggagtttgagtatagattgttgttgcggttgaagttttgattacccacatagcaaaccgaagctggatttgaaggtcaattttcaaaaagtatgcccatcaccacaatacacacaagaagtttttgccctttgaatggcagcggctggttgtacacttcctcccatgttcatgttcttcaaaatgttggtcattgaggccatttgag

SEQ ID NO: 400481 - DNA, 591 bp, Cannabis indica
ttttttatgctactatatataattgcagagagtgacttgaatcacgctatgataatcgtcgacgcagaaaaatttctagttaacaaactaattgtctagtcaaatatatagaaagtcagaatatgaatcactactagcaaagtaacttatataagactaagttatcttaaaaatttaaacaactaattggaccaaaactacctacaaaatatatatagatatagaaaagtggtcggattagcacactatacaatgataatgttgtgaatttttaaattaaagataaaacacaattattatggcgtattctatatttagttaaaaaatttaaaagaataagagcatgtttggtattgctttctgttttttgttttcaaaaaattatttttagaaatgagaacaaaaaatagtttttgaagtttttaaaaataaatcatgtttggttagtgttttttaaaaacaatattaactaaaagtaattggtttttaaaacagaaaacaacattttgttgttttcaaaattcttattttttgtaactttgttttctgaaaactgttttaaaaaaaaaaggctaaacaagccaaattgtt

SEQ ID NO: 400482 - DNA, 752 bp, Cannabis indica
tcattatttgttaattaatttctaggaatcattttttaaaatgataaaggtataatttttgtctactcaagggtacaaagttaggtgatgtttgctttgaggtatttaattacgatgctttatttaacactgtaaatatagattgtaatggataaagtaacttgtatgtatactataatatcctcactgttattacaattaatatttcaaatttaaataaaagtaacaagatagggcaaaatagtgatttcttaacaatgtagtcaacattacaatttttttaaaaataaaagcaatcaaacaactaacattacaaaattgcaactaggcaccattaagtggaactcaactctgatgatttcctcccgcggcttgattttgttggagtatctggcgcacccgtggtcggtacctcaaatatcagaacactcatcccacaatggccttgtggaccgcgagaggtggagcctcagttgggtggcaaatttgactgtgttggaagtagttccatccagcctagtccacccattcgaagccactaacaaaattttttgaatttaaatatagtacatacataaaaatttttagaaacaaatactaataatagatcgttgaaataagaagatataaagagttgagttattacccgaaatttttatgaaatgatttattggatagttgaaattcctttgatgcacctacaacacacggatgttgtaacaccctaactaacataggcgtattacgtgatt

SEQ ID NO: 400483 - DNA, 713 bp, Cannabis indica
aaaaaaaaatcttttgggctgatcttagctagtgatgctaattcatgatgatccaatggtgaaaatcgtcaatttttgtactttgaatctcgtccgtcggattatttttgggttatttgctcaaaaaattgcaactttgttgaggatgaattttggacccaaattttttcaaattgcgatgtgaatgtgagacaaaacttgatagatctttgaaatatagttgaaacacaagttgaatcacatgaattggattaatattgtgtgagttatgactgttttactaaatgttgttcagcaccctgcggccaggttagtaacccaacgcccatgttgacacctagcgctctgttgacattctgacgtcaatttagatgctaggtgagtgctaaaatgtcccaaagttgtatgttttgatgcctaagtgattgttagtttttatagtctatattagagctataaaagtggaagcaaaattttgataaaataatttttatccaatatgaaccataagcccaaggatctcaacataatgtatgtagattaaatctaactactgaaagaaattcaataacctcttgatgcctatattatttcttttcgtataacgatcagacatcaaatccaagaacttgattgaagaatccacaccttgatctttcaagccagcctcagcactcaagaatatagtgtgctattagatcttattggatgaa

SEQ ID NO: 400484 - DNA, 595 bp, Cannabis indica
cacaagaatgcaccaacaactttcctctgtgtacgttcccacgaacttcaaacctcaatttaaatttgaaacgaaagattccaaggctgaggatcttctgatcaatccaaaccaacgagatgccattgattgtcgatcctcacaagagatttttgagggtaagtatcatccctcgtgtatggtggtttgacttgggttatattttttttatctccgtctccataggaatggacatagattttgagagccagtttagaggtcctcctcaggctgacaaggaatcagtacgagttctccaagttctgttgggctttgggacgagaacaggattgggaatttacgagggataaaacacctcgcgtataaagtcattgactagtagtttgtccacttcctgttttagtgcctcttgtctcttggagtccaagggcctccttttctgcctcttcgctgggtagtttggatcgacatttagatgttggcagataatattagggccaatccctatcatatctccatggttccaggcgaactaatcctgattcgcccttaagaaacttattagatgctattttagctgcttgtccaggttctt

SEQ ID NO: 400485 - DNA, 730 bp, Cannabis indica
atagaaacaatatcatccatggtcaaaaagttcaacatccattcgaaatttgggcaaagtctcaagcctacatctttaattttcaatagcaccaacttcctactgctccttctaaatcaacaacatcaggtgttgctaactatgagccatggaagccacccctcctaacaatcttaaaatgagtgtcgatgtggtgattgatacatcaaagaacaaattaagagtgtgtgctttaattcgtgactctcaagggttcgacaagactgctttttccaagccttttgtaggcaatttttgacttagaagctgaagccaaggctttgtttcaaggtctcgtatgggcaagaaaccttcattttcatgtggatttcattgagactgattctttgctattggcgaattcaattaatcgtcaaatattaggccattcttcttttcaagatatggtggctgatgttaaaaattaattatcctatctcttttcagtttgtgtatctcgtgttaggcaagatgctaaccaagacgctcatagtttagctaaacaagatttagtgttggataatgattgtacttggttagaggatattccttctgccattttctttattgttgtaaatgactatgtttaatttataataacagtcttttctaaaaaaaattattttatttaaaatgattttttttatttttattttaataatttatttaaaagtattaattgcgtggacaa

SEQ ID NO: 400486 - DNA, 1171 bp, Cannabis indica
ttatcttttttgtctaggatctggactgactattcttcgtaagataagtctgattgcagctcaggattgtcataacttagtacatgagaagaaattgaaacgtacttccgtaacattgaaaaatgaaatacgttgtgaactgctgaaagagttaacggcaaagctaaacggtatgccacttgtccaaccttctcaagaatctcgaaaggtcctataaacctagggcataatttgcctcttttctcaaaacatttaatctgttgcacatgaacacctacttgaaactctacatttttgcgtttcggatctgcgtaactcttttgcctactgagggaggcaaacattctggccttaatcttttctattgcttcattagtccgttgcactgattatggactcagatatttgttctctcctgtttaatcccagtgaattggagatctacattttctgccatataaaaattcataaggagccatccctattgtactctgataactgttattgtaagagaactctatcagtggtagatacttactccaggagccctcgaaatccataacacaggctcgtaacatgtcttctagtatttgaattgtcctttcaacctgtccatcagactgaggatggaaagctgtattgaatttaagtttggtacccatagcccgctaaagactcttcaagaatttagaggtaaacttcagatccctatccaaaattatagactttggaacaccatgtaatcttactatctctatgacatacaaatatgcatactgatccactgtaaaggttgtttttactagtagaaaatgtgcacattttgtgaattgatctactagaacacaaattgaatcaaataaacctatgcttgtaggtaatccaacgacaaagtcgatggtgatatccttccacttccactaaggaagtgtctgttatcccaaatttggcactctaacgtggcatcacgagaatggtgacacgtggactctacttggagtatctgttcagagcaatatgccgagtaggatgcctcgctggcatatccagaatggaatacttaacgagcagtgcagaatgatcaaaacttagcgaatttagcttaacgcatcatgagcaaccagctaaattcctacaactcacggatcaacttacgtggatgtggcataca

SEQ ID NO: 400487 - DNA, 850 bp, Cannabis indica
ggtctggccccagtttttgggtctgggtcggggtccgagtctttatctgggtccaagtcttgatcttggtttatgtcccaagtcacaggtcttggtctgggtctttaatgccctaattcattaggctcgctacctaagatacttaagaaaccctaatcccctgaacgggattactagtaaagttagcgcagaaattaaactttaaatacaaatgaagttaaaataaacttgtaataataattttagcttcacaaagtaaaagttacaaatgtcgggatcccaacaatatttttacagaacattatcacatgtccgttctactggccgacctaagcggcaaaatagaatcacaaaattcatcgctggttgacccccaacccacttggtctagtttggctcgaacatgtacatgcaccgtccaactcccttactcatggctgatcagaaatagctttaccctttcctacacagtagagcacccgtgagccaagcctagcaagacagtataatatatcaataccatgtttatcacactaaacaacattaatgccattctgatatgcctgtgtgacacagacctgcatgttatgctcacatgcctatttatgcctacgtaatgtagacctacgtgatgtgctcacacgtctaaatacaataaggccttataacagttcctctcggttctagttaccgagtcctgttggaaattattttaccaggatcttagatctactcacaagtacgttgattaacaccctaaatatgaacttctaaaacgattataaataaacacatataaagtatgagaaaccttacatgggtgcagcagaatcatatgtctccttccact

SEQ ID NO: 400488 - DNA, 1183 bp, Cannabis indica
aaaataaagtcattgctcgaattgacagctaggatggaaagtttctttctcgtgctggaaaaagaaatcttactcaaaacagtcatccaatctttgccaacatatgctatgaattgtttttcttattccgattggtacttgtaatgagatagaaaaattgatggctagtttctggtggaagactaactctagtaaagggtgaggcattatctagatgtcgtgggatcgcttagcaactcctaaagaagaaggtggaatggggtttaggcatctccatgattttaatctcgccatgcttgccaaacaaggttggcgattattgtgcaagcccgacgctcttgttggtagagtctacaaagcaaagtactttccaaattctgatttcatttcatctgatctcggacataacccaagctttgtgtggcgtagtatttggggtgctaagaacttggttcggcttggggctgcccgtgttattggtgatggtacaagtactaaaatcctcggttctccttggctaccatcaacaagtaacagatatgtatcttctacccatcctgggcttagcacacatactgttagttcactatttgcaacaaacatgttatgttgggatgctgaagtagtctgtgacttgttttcttcccaagaagctgatctaattctcaacattccactaagctctactgctagacctgactgctggtcttggacagcagaacataatggaaagtttactgtgagaagtgcttataatcttctgcagagtcaaaaaccagtcagtccaaggccaaacaactctggtttttggcgtaaattttggcatttgaagatacctcccaaagttctgaatttttgtggcgagctatagcaggttctctcccaacctgtgcgaatcttgtcactaaacatgtcccaatttcttcaaattgtcccgtctgtcaaacaatagcccatgcactgctgtcttgcgattttgctgaagcttgttggaatagttttggacggcctgtgctgattgacttatcttcctcgtttggctactcgtttgagcagctgctgcacacttgcgatactgattttatctgtcgtgcaacaactctttgttgggccttgtggaaagcccgaaatcaagttgtctggaaaaaacacaagcctaatgttaaagaagttatggtcaatt

SEQ ID NO: 400489 - DNA, 633 bp, Cannabis indica
caaatatggatttaaaaaaggtaactttaatgaatccactgatgcatgcagtcaattaaggaaaaatatatcaaatcaaatatggatttgtaaagtctaggacgcatttccacaaacagttatcgtgcatgagacgagagtgatcgtacaagaagtaaataaaagacataaacttactaagaaaatcaacgatgagacggccatcgcagaagcggccagagggtttgaggaagtaggtttggcagaaattactaagatgattttttttaatttaaaaaaaaaggattgtttaattttttgggtttaattattgggtttatttattaacgagagatcaaacttattaacatcgttaaatttaagagaatattcttttatttttaaggtttattctgttaaaccaagaaatgccgttagatagacacttttaatatataaagatatgttaattaaaatcaaaggattaattaaggattaaataattaattaaagggctgtatttttataatctacataatatattttagagttatttgcggcacaactccctaaagtaggaaaatttttgcaaataacccccaattctaaaattttgcggtaagactccctaaactcaagttctgttagcactta

SEQ ID NO: 400490 - DNA, 542 bp, Cannabis indica
acactaatatatccaatataccctaagtcggccttatgcattggcgtgctagactcgtgcttaagccctacactttgcgggaggcccaaataaaaaataaaaacttcattaggtttttatttaaataaaattatgtgtaatattgtaaacaataaatattcactggttgggatgtatgacacagtacacaattatgtgagtttaagtcttataatactttttttaagggaaattatagcaaatggttccaaatcatgagactatattagtatatgtcctcatttcaaaaaattatagcatatggcccctaaatcttaggacagtaaatgtcatcatttcaaaacttgtagaaaaatgacctttttaaactatttattatttatattgtcttttgtctacataaaaaaaaatacattattttttttttagtaattagaaagcaaattatttaaagattatggtatatctatataagtttgttaaaaatcttttttatttaaaagttattagtctaatttttaaagtttttaattgagttatta

SEQ ID NO: 400491 - DNA, 693 bp, Cannabis indica
ttttattttctttctaaaaatatggcaatttgaaaatcggagtccattgggtgttgagggtagtgctcatgcgcaccagaccctcggacaagaagactaggcgtgcgcatattctcagacatctcccttatctgaaggtgtgtcacacccgtgtcttcagacacgagatgctgcgtgcacgccgagggagaccctgcacacgccgaagtttctcggtgcagggaccctgccagctccttcttctgcgcgcgtgtatgtacatttgcagcctctcatggctacacgtgcatcctaactgccagcaaccccaaaaatctgatttttgtgggatttttccccaaatttcgaatttttgtaattttcaaaccctaaaattaaaataaaatattatttttaaaatatttaaacttaaatatcaattttaaattaataatattatatttgaatagattattattagttttttaatattttgaggtttaaatttaaaaattgattattttattttttaaattatggtcagattttaaaaatttattaatttctttaatatttatatattatttaattataagattagatattttaatattggacatatattaaattaaatggtagccttatcttttaatttgaaatattatattaaaattaccttatatgataaattaaataattaataaatttgaaatt

SEQ ID NO: 400492 - DNA, 620 bp, Cannabis indica
cgatactgttggataacttgatttggatgcttcaggatcaaagagaaaaaacgattccaaaatgctgcccaaggataagaaacccaacaagtatatccttatttatgacgaatataccgagctcaataaaactcaagaaaatatctaccttgtacatgtacaggaagttatttttagcgagccaaaacctataaaacatgcgaggcgtaaaagggatccaactaaacggtgtgaatatcatggagatattggtcataccacggaagagtgtcttcagttgaaagatgagatagaaggtctcatatcgtaaggacaccttcaacaatatataaaggggtaggaagatgtctatgatcagctcgatctgcccaataacaagcgacccgagattataaccctccttcgtaagaggaaaggacaccttggttatctcgagagggagcgggtcactagaatacaaggggcagtgactctggtaaagcaatttcgtaaaagaattgcaacgtgagtagatatcgacccattgtggttgccatataaagctatcacatggaaatttggacgtccaccagtagaagtcaaagataaacaactaaaaccaggattactttgcctggaat

SEQ ID NO: 400493 - DNA, 823 bp, Cannabis indica
tttttttaacaaatagcttataaaattaaattttcagaagtcagttacattaaactaccaattaaaatcttaaacggagaaaccggttacatacaaactaaactaaaaaactagtttcatcatacaacaataatgaacatcatgaaaactaaaacaaaaaccaatttcgttacacaacaacaataaagattatgaaaataaaacgtaaatgataaacaataaagataattggaaccagtttcatgatcaaatggtaaaaaaatgcacacaaaaatacaaagaaaaaaatacttataaatataatcaaaataacacacaatacacagcaaaaatctaaaaataaaatataagtgtgaaaactaatttcaaacttagaaacaaaataataaaagaaatttaaaataaaaaatatacaataatatcataaaatagagcaaccccactatagaacccttaaaacttgtaaaaccaattttaaaacttcgaaaccagtttcgaactgtgaacccactttcaaatggtgaatcctgtaaaactagtttcaaacctatgaatcttgtaaaatcagtttcggccctatgaacaatcatagcaaaacttgtgaaaccataacaaaactagtttttctatgttggatttgtaataggttatttaacgtaattgatttctttatgctagatttgttattggttgtttaatagaaataattttttttatatagatttgttaaaaattcttttatggcacatcttatatatatatatatatatatactaggtaattgttacgtgtcaagccacgtagtgttagttttatttaatat

SEQ ID NO: 400494 - DNA, 929 bp, Cannabis indica
ctaagtttatgtagaatttaatggtgatttcttgctgaatttattgtggtaaaagcatgtcttgaattgtgtttttctcttgtgattgcatgttcttaagtgttgttgtgattttgatgaattgagtgtgttattgcatgatttggttgagaattttattgttgagcatggagtaagacaatagggtatttctagcttagaatcatgtgtttttatgaggattgctgctggattttaagggatttgtgttgggtttgagttcatgttcttaaacttgaatcttgataagtttaagctagatttgtgttgttttgagcaatctaaattttggtattgttatgaggattttgatgcatgaagtgcattatttgagcatctattaattgatagtaatcctatttgttaatttgaaagtttggttgagaaattggagtgaaaagattgatatttcttgctgaaattcgttgaagggcttgttggtttctgggtttggaacccagatgctgcggcatgctctggagcatgccgtggcccgccccttttggtggaacctgggttttgtcccaggtgccgcgacatggtttgggcataccgcggcccgccctcgtgtttttgggcagtttcgagttggctttcgaaaattcataacttttgattccgaactccgatttgggagttctttatatcattggaaagctcgttccaagctctgtatgattatctgaattttaaatgccatgattgaattttatgagtatggaaccaggagttaaccctaagtgtgaaatatctcagatttgtgtgactaggattaccgacacctgatcaggagcacccggggattcagaatctctgacattgctggacaacaagtaagatagtgattagcacgtagagtacgcgtagtggcgcttatattgagaatgata

SEQ ID NO: 400495 - DNA, 624 bp, Cannabis indica
aatcttgaagtgacgatatcagaccattgtcctatccttctccgaactgctgcgatcaatctccaccattcggttactaattttcgctttgaaaatgcatggctccgtgagccattgtgcaggcaagtaatacttgatagctgggaagtttgcgtggggctcactctgatagacaaaataaaatattgtggtgagaagttgatggtttggggtcaagactacacgggtaactttaagaagaggattgctaattgtaaaaaagagatccgaaggcttaaatggtgtactgatgaggcttctattgctcagtataagcggtctgtcgctgctcttggggaagtgtatactcagcgtgaggttttttggcgtcagcgttctaagcaactttggcttcgtgagggtgatcagaatagcaagttcttccatgcaaaggcaactgctcgtaagaaaaataactccattaattctcttttgaataattctggtgtgtgggttgattgggaagggggtctttcagatgttattgttgattatttctctgatatatttacttccactagctctaactttgatcctgtggtaagtggtattcggccgactattactagtgttcagaatgactct

SEQ ID NO: 400496 - DNA, 610 bp, Cannabis indica
tttttttttattgtttgataggttttttttttcccaaatcctaagctacctgaggttttttttttcctcggtcaggctcgtcgactctttctgggtttagacttggcttggtcgggatctgtagttttgctattgcgattagtcttgtctttttaatataattttgagtgtcttttgtttaggttattgtgattagtcttgtctctgtgacatgatttgttttattttattttgttgttggttcatctttttgttctttgatgtctcaccatcaaattagttgagaataataaattctcttcgactaaagaggtattattggtgcagttacacaccttacataatagttgaatgcttaagctaagggactaaatggaccttttgcaactttttgccacatatctatcgttgtgtattttctaacaagagagatattttaattaattattgctattaataaaattgtacgatttaaaatatgttataatatttgtatactcagtgacacaatgtatatgttattaaggtgtaaaatggtgtgagttgtaaaatggtataataaaatggaaattaaattagttaagaaaaaaaaaaaaaaatagaaatcaaa

SEQ ID NO: 400497 - DNA, 566 bp, Cannabis indica
aaaaaaatatataattgctagatttaaagccttatgtcaagtgaagaagtatggttacaaataatgaataattatcaattgtgaaagagaatagttaaatgacttattttttttctcattatttaataaaaatcatgctggtgcaattgatactttatcaacttgaacaatgtattcaagtgttgccaaaggaggaatttgcacaccagtccctaaatcagcaccattttctctaaaacccaaatttggaggaattattactctcctcttacctcctcccttcattgatctaatcacatactctataccttcacaaactcctttactataaggtcttgatcccaatactaaagccaaaggcttcttatctttctcaaatgtatccacaaacacttccccacttccttctactttgccttggagatcaatcaccaccaaatctcccggcctcggagtagctccacctcccagttttaactcgacgtatctacacattaatattttcataactttagaagaaaaaaaattaagtactagtcttatcggtgatatacgatcttgactat

SEQ ID NO: 400498 - DNA, 636 bp, Cannabis indica
ttttgtttgttgctttgtgattcactttatgcaaagaaatcaaagtaccacacctctgaatcctgagattgaaaggacttcaaagcagttgaaagcgaagaaaaagctaaatttcaccatcgcagccattaacaataatacacaatgaccttaataataaccaactagcacctgctgcagctgatgcacaacaacgggctattcttgactattgcttacatgtggtgaatgaaaatttgactggtattgcttatctaatcatcgctgctaataactttgaactaaagcatgctttaataaatatggtgcaacaaaatcagtttggtgggttagctactgaagatcccaatattcatctagccatatttctggaggtatgtgcaactttgaagatgaatagtgttactaatgacgccataagactatgcctctttcctttgtcgatctttaagagatagagcaagaagttggttgcaatctttgcagcgaggttctataattacatgggatgaaatggctagaatgttcatgctgaaattcttcctccatcgaagtctgcacggtggaggagtgagattgggcagtttagacagtttgattctgaacaactttatgaagcataggagcgattcaaag

SEQ ID NO: 400499 - DNA, 1784 bp, Cannabis indica
taattgctgtaaagattacagtcttgcaaagcacactggctgaaagaatttccaagagttctttgggcctacaagactactaaaagaactttaacatgccacactccgtactccatgacatatggatgcaaagcaataatcccagttgaatatgctatgcctatacataggagagacacctacgaccctactcgaaaccgcgctctacttcaagaatctttggatttaattaaggagcttcaagaaccgtcacatgttcaactccaaatatacctgttgacctcaaaagtgatcaactaacaacggggtcgtatagatctgatgcttgccacgtgttacacaaacagaatgaaaaagtataaaacacacatatttgttatagagattcagtcccctgtgatagcgggtaatgacctactctctttttggttgtattgatacctaaagataatactattcagattactattagagggatctgatatagctctctattatgatacaaaacatgaatcaagtaggtagatctctaatgagagagatgaatagccttagaggcgtgtgagagaggaagagagagagagcctttgggggcgtgtagtagagagagagagagaaagagaggctagggcttctgacttagtgtaattttgaggttaaggattaggcttagtgacttagattttctaggttagagttaagggctttatataagaagcctaaaatcctaatttacaataaaaccctcagatatttacatattaaattgatcaaatgtcacgtgtcatgtcttgcataaacgctgataacaatatattatagttatttaagacatcttgtaagattttgaaaaaaataaataatttacaatatagaaaatatggttaaactatttgtttcatacccatataaaataaaagatatatatgtgctgcagattatttaaaaggaagtttacaataatatatattttttacattctaatttacaattatatcgttactattattagtgacgtgccacatcagccaaatctaacgtttttccatttttttattataagtttttttgcgttttttaaaaataactttttggttaatatagtgttgataagaaactaattaattacttttttatatatatataaatattatttattcatataatttgagatacatttttgttacctctgaaacttatttgtataagtcttagtaattaattagttatttttaagttatattatgctatattgtaatttaaaatacatttaggtaacttttaaaaattatttttcgaaactaatgagttgttaagtaatattacaaactactatttttatatactaattattttataagtctttttgttattattctttttatagatatttttttgttattttaaaagttaattagttatggtacaatataatataatttaattaataaaattttaaaaaaaaattataaaacaataattaatcattatattaataactaaatcgtttttttttttggaaataataaaaataaaacatgtacttcttacctcttgaaatattgacattatagtgtaaatgacaatattttgttagactctttcgaataaataaagatgttattaatcctttatttttgacaatttaattaaaaataaagtattttaaaatttaaataaatatattgtacattatcgttaaaatattaaaactatttgtgcaccataaaagttcccaacgttgatttttattttgtaaaggttggaagactgatctacttgct

SEQ ID NO: 400500 - DNA, 832 bp, Cannabis indica
tattgcatgtattccttcagtttaattaattacacaactaaaactatattgaggggtttagtaataagcgtgtttattcaatttaatctgcactattttgttcatagtgtatatttagtgtagtttttaaattttagatctaatccaatttgcataataagtcaaatccaatattattttaaatgtattacatattaatattaaattaattaaaaaatataaaaaacacagaaataataacaaaataaaacaaaaaattgttgaaatctaccaacaaaaaataaaataaatcaaataaaacaaaaataacaaacttaaaggaagaaaaaaaaattgtatgtataaaaaaaaatttaatttaattttaaattataattttcttatattaaaaatgaaatatacattttatctactaaatttgaaaatatatttgtatcatatgtgagatttttcaattcgtatcttttatattaaaatattaattgtatatatatattttctaatatatacatataaatatgtgtagattgaattgaattcattaaatttattattttacatctcaattaacatccaatctacaatattagtacttacactttgaattgggatgataatattttatgatcgcccctatatatttagtagcttggtaataacaaacacttagcaatactataacatcaaactaatatatactacataataatactaatacatactgaactccattacactctaattcatattattataggtgatgtttggtaactttttttaattagtttttatttttaaaattagaaaagtaaaactcttttcactttttaat

SEQ ID NO: 400501 - DNA, 939 bp, Cannabis indica
cactatatctttatatattaaaataaggtgctacgtatatacgtacgtgatactatactagttgatcagtattgtgtgaacatgtaccctttttgtttgtacttaattgtacaacttaaaagatattcttgaaataaagtttgctttaaaaataattttattgtgtatatgttattggcaaattctatcaaagagaaaacgatcgaactaattaacttttttatagaaactaagaaacaaaccaaaccgcttttagtatgatgttttatttagtgataattaaaataaaattatattcaatttcaaattttgacaatattttataatttcttttaatcatatgagtaattattttttgggaaaaaaacaggaatattctaaaaagggaaaaatattacaacaatactgtgggccggcccaatgaacatttgtacagcccaaaatgaaaatattacaaaaataccacttgcccttaccttcagccgcacgtcacaaacggagaggatgaatgaagctccatcgatgcagtcggccacgcaaccagaatgaaaccagatcgaacgtaaaacaactgtaaatcccgtcgaatttcaataggaaacgaacaaatccaacgatctaaacagaaatttttttaaaaaaaaagagcaggacaaccgtggagaaactgaaattcaacatttgatttcggtttttatagtgcaatatcactcaaacgagcgtcgaaaattcagattgaagcaatgtaaatctgtattgaacagatctggagctccccctcaaatccaaaaaaaaaggtatgaactgaaattttttttcaacaatgatacacggcatttttagttgcattctggttgattcaatggtgtgcaacaggaaattcatatggtaaaaccaataaacaagaactgattctgattaaggaaccaagggatacta

SEQ ID NO: 400502 - DNA, 757 bp, Cannabis indica
ttgcttagtttgagcatgatatttttgtgtttgccaatctgaaattgtggtatttttgtggggttttggatgcctaaagtatgttatttgagcaccttataattgctagtgatcccaattgttaatttgtatgcttggttgagatattggtgtgaaagattgagtttggaagctgaattttcgaagaaggactgctggtttcagggttctgcacccagatgccgcccctcttagtggaacttgtgttttgtcctaggtgccgcggcatggtctggggcatgccgcggcccgccctcttatttttgggcagttttgagttgattttgaaagttcgtaacttttgattccgaactctgatttgggagttccttatatcgttggaaaggtcgttccgagctctgtatgattatctgaattgtaaatgccatgcttgaattttattgagttaaaagtcaggggttaaccctaagtatgaattatcccgaatttgtgtgactaggattaccggcacctgatcaggagcacccggggattcggaatctccttctattgctggacaacaggtaagacagtagtttgcacgtagagtatgcacagtggcgcttatgtgaatatgatatatgtgagttattgtaaccgggattagggttattaccctaataggaacggtttgttagcctagggttattactctagtggaatatgtgtataaatgccatgccatgctaaacgaaatgaaatttaaggattatgcgct

SEQ ID NO: 400503 - DNA, 852 bp, Cannabis indica
gtctgggttcgggtccgggtctacgtctcagtccaggtccggctccagggtctaaggtttgggtctggcttagaggttcggagtctaggtttgggtccgagtctggtgtcctaagtccaagttcggatcctgggtcttggtctcggtctggggtctggggtctagatccgggtccaggtctagggttcgagtccaggtttcgggtcttgggttcgggtctgggtctaggtctggggtccaggtctagggtttgggtatgggttcgagtctgggtttagggtctgagtcttggtcttggttcaaggttcgggttctggtttgggatctgggttcgggtctaggtttgggaccaagtttagggtttgaggctcaggtctggggttcgagttcgggtcaaggtctgggtacggggtccgatttgagtctaggtccaagttcgggtctaaggtccgagtgtgggttcgagtctggtgtcctggtccttggtcttggttcgggtccagggtctggattctagggttgggtctgagtcaaaggttcgagtttggggttcgggtctggggtctggggtccgagtctgggtttagatttggggtcttggtccgggtttagggtttgggtctgaggtccgggtctggggtcgaggatccaggtctgggtctaggtccaggtaggggtctagggtttgagtcttggtctttgtccgggttcagatctgggttcggggtctaggtatgggtctggtccaaagtccgagtccgagtctgatgtctgtgtcctggtttaggtccgggtccggagtctaggtatgtgagcaaaaatataaaatatatatcttagacaaaaaagaaa

SEQ ID NO: 400504 - DNA, 509 bp, Cannabis indica
aaatgaagctcaacccaaagaaatgcacttttaggtttaagtcagggaagtttttgggcttcattgtcagtcagagagggattgaggcaaatcttgaaaaaattcaggccctcctaaatatgccatccccgaagaaacacaaatacgttcagagcctaaccagaaaggttgctgttctgagtcgttttatctcccggtctacaaataagtgcattcccttcttcaacatcttgaagaagtgtcagaaatttgaatggtctaacgaacgcgaggaggcaatttaaaaaaactaaaggagcacatggccaagcctcccatcctgtcaaagcccgttctcggagaggacttgtttctgtacttggccgtctccgagcacgcggtcagcgcagccttagtccgggaagaggagaaaacgcaacatcccgtgtactacgtcatcaagcgcatgataggggcggagacgagatactcgtcattgaaaaattggtctttggcctcctgatggcctc

SEQ ID NO: 400505 - DNA, 756 bp, Cannabis indica
acctactctatcccttacttgcatcacaaagcactcgtaagaaaaataagcacatacttcaattcatatgtaagaaaaatacactacacattgtaaaacaacaattaatatcaaatatttgtctaataaggcaaacgttcactgatacacttaataaattaaccatttcagtctaataactttaataagacaaatatttattgttacttaatgttgcccctgattttgtccaaaatacgtggaccaaccggatgatgacacgtagactgaaagggtttaacgtttagataattcagctaagtctctttaaccacagggatcagccttagacatgcctcccggagaaggcacgtgagtctcacatactcccggagagcaaagctacaacaaagcatctccgggaggtgtcagatcctatctgaacagtcacctcgcatttaatgccgcatgggagaaggcgtattgaaactgccatatgtcttaaagtctgacggcgtaaccccctctctgcagctactatgctatgattaatgagcctagtgacggctactttgtgaggaatcacatcagtcaaaaaggataaaggactacgtccataaaacccctacaaagcctagggattagaccatgcatctcctatgatgtatccattgggaatgtgtgcctttactaagaattacagaaagacatgtacctcaattctaaggatcaccccacaaaaacactataaataccccacaaactcattaaggcagg

SEQ ID NO: 400506 - DNA, 1031 bp, Cannabis indica
gctaaggcgaggcgcgagctgagagaggccaaggaggcagttgcagatctgactgccaggctgaagtcaatggaggagctacatcaggctgacttgtagacgacagccaacttgaccgttgaggtgaaggagctcagtgatttcgaagatcaggccctaaagaaggcgaaaagggataagctcctggcccctgttgtctgcaaatattgcaccaagcactttgatgatggcgtgtttatggcctggcagactaatgactaaaacctcaagctcgacttctatccaaagcctgaggaggttatcgttcgcttctgggagaagaagaagagacttgatgccctgctggaggagcgcaggaggcctcgtcttccaccccacattgattaagccaactgttaaccactactgctattatcactatctcttctttttttttctttattttatttacatttacagttctttttcccctccctaacaatttatatttttttcttaaagggagacaatttaaggcccgtccccaggcccttaatatattttttagagcttttcgctgggtttgaacactttatatttatgcttaaatacatactttactttttagcttcgttaaacttttggtttgttttgcttttgtccgcgtggtatgccttactaccccctgagtgtcatgaaaattatttttagggcactcagttttacaaacattaatttaaaggttgcacatacttgtccagtacaaatttactttacagagcatagacttatattttttgactattggtaatacttttgtaggtgatcagtattttaagccctaggcaccatggttccgtctattcttttaagcttgtaagtcccgaagctgatttcgtcctcgatttcgtatggtccttcttaattagttccaagtacccccactccgggttcctgagtggctgggaagacccgtcttaggaccagatcactaatagtaaattttctatttttaaccttcgagttgaagtgtttagccaccttcttttgat

SEQ ID NO: 400507 - DNA, 550 bp, Cannabis indica
aggaaaattggatgaatcagtcacaggtttaagggtatgaacttgttgttgtatgggtttgaaagtaggaatgacaatgtcagaaaacaaggtttttacttcagatggagatgttggtgaaaacaaaggaaaaatattttcatggaagataacatcccttgaaatgtaaagttgtttggtttcaatgtcaagaagtatataggatttcatgccgtgagggtaaccaatgaaaatagaggccctactcctaggtgtgaatttgtgtcttttggaaggaagggtggagccataagctaaacacccaaaacttcttaggtgatcatatttgggagctgtatcatgtagaatttgatatgaggttaaacctttgaacaacttggaggctgttcttgttggaaattatttttatgattgaggtatcacttgctgtgtgtgggcactactctaatcactaagtgtttcaaaatcttaaggaagaagagagagagagagtggtcggccaaggtagagagagagaggctcagttttttctgaatgaaaagtgtatttt

SEQ ID NO: 400508 - DNA, 773 bp, Cannabis indica
gcataaaacccaacaggtttatatgtcatggctgcctaaaaatgagttaggaacaaatctacaaatatctcccacgttgaaatctaggtttcgggtaactagataaactagttgtgtgcattatcctcaaaagttataggaaggatatgacacttttccagttgaggtacctggtcaacttcaataatagtgttaaatttatcaagataatctataggattggtggcacctttatctttaagtgactcaaaaagtctgaagcttttttggagccttgcttgtcgcacttcttcagtgaagggtgacgttccatgcagcttgtatatgagctttctctactactcgatcacccagcactccaagaagattttcttaatcaacccctcctgacaacatgggttgttagcaatcactatttgatttctcatttgtagagtagccactgttgctatcttcccaggtactaccacatcatgtggcctagttggtgcaagcggcatgttaacgttatttgctaagttgtttatatttgcacggggtaacttgattagctaaaagtggatcatgaggttcctcctatataatgcgattccttgagggtctgggaacatgcgcgaaacactttgttaaggctgtaaagaccgcttagtttaatttggaaattagcagttaatcacgtttaattatgaaaattatttatagctatttaaataattattttactgttattattgaattcagagatgcatttctatgtcattcagtagttttca

SEQ ID NO: 400509 - DNA, 583 bp, Cannabis indica
cattcttagactggtgttatggtaattttttttggtgtggattcgagcaagaaatgtttggtggcaacgctctgttgggcaatttggagcgctagaaatgattttgtttggcaaaaaaagttggtaaacgctgaaggaattgtggtgttggcaaaaggttatcttgatcaatggacaaatgctcaaaatactcttattgagtcatcatggtctggttttcagacgggtgatggggttgagcaatggcccgcttcaagtgaaaatagcatcaagatcaatgttgacgctgctctttttgaagggggaaccagctatggcttaggaatggtagctcgtgaccatcacggtttcttggttgagggccgaatggatttcttctcgggggctgctacaccagaagttgctgaagcaattggagtccgcaaggctctgagttggattaaaaggaaaaattggcaacgtgtgtcgattgaaacagattgtttagtgattgttcaagcaatacgaagctcaactaaaatgatttctttgtttggacaaatcattaatgaatgtaaacaactcctgttggagttaaaacatg

SEQ ID NO: 400510 - DNA, 1346 bp, Cannabis indica
aatccagactcggactcgggatccaaaattggaacaagaattggaatgaggaccttggaactggaattggacctggacccaaaatcagatccagaacatgaacccggacccaaactaggattgataccaagacccaaacccgaacccgaactgacacttgcgccaggacctgggacccaaaacctgcaaccctggacttgtgacccaagaccttgaccacaacccagacccgtaccagaacctagacctaaacctagacccaggcccagaccaagaccccgacctaaactcagaccgaaaattggacccggacccagacccagacccagaccaagagtcggactcgtaccagaagtcggactcgaacccaagactcaaaccgggctgagatcaggactgggacctagacacagactaggaccgagccttgaacctcgactgggactagaacctggattgggaccgggactaaggacccggggccgagacgtgagacttcgacaaaggatcgaaacctagatgggggacatggacccaatactgggcctcaaaagcggggtctgagacccaaaatttgaccctagactcgagacacaggacccgaccttagacttggaacccaagacctcgctaccaggacacaaccccaaactcggacccaaactaaaacttaggactcggcccaggacctgggactcaaactataacaagactaagatccaagaccgagatcttaatctgaacttgaggcttcaacatgacccataattagtgtttgaatcgggacccagacccatacccaaaccgggatccagacccaatcttggacccagaattggaatcgaaccaggactgggacgagaacccagacctaggactgtaacaggacccaaacctaaaccaaaactcaacctgaacccatactgagacttggacccagactaggacctgtgacctgggacctaaaccaagaccgtgacccggacctagacctagacccaagaactagggctggacctaggaacaaagaaccaaactcggacccaagattcgggacctcaccctagacccaaaccttgaactaggacccaccccgagacttatgatccaggactcgatgcttggactcaacccgtaccccatcacttgaaagtagaaccaaaaccagaagaggattgggacccaagaacaggactaggaccaggaccaagacccaaacccaaaactgtaactggactaggacgcgaactcggacatagacccacactcagattctgtgtttgggtttgtgtttgggtctgggtctgggttggggtttgaatccttgttcaagtctaggtccaggt

SEQ ID NO: 400511 - DNA, 515 bp, Cannabis indica
acctaatgaataaaaattttagatataaatattttttgttgtaaaatataaaagaatggataaaaccaaaatcaaatagtgatcaggtaggtatctgcacagcacaataaccaatacaccaatcgtatcacaataaaattcacacgccttctctttcttttttcatttggttaattaatcgaaaaatgcaatgaaaaaatgtgatcatcatcaaattcaggaacaagttcaatgaatcggtttggcaataaatttcaatccattcgaatctaatttattaattaatttaatcgatttgaaaaaaatggatagtacccatagttgatagcgccggcggcaacttcagtgataccggcagtgaggacgatggatgatgtggcattggcaccggataaaccagcagccaaggtgaatggaatagcgagaccgtcggagacgtcgatgatcatatcgcgaacgatttcgccggcggtgaagtgttctcccatgtgctgactgatgagaagcttctgctt

SEQ ID NO: 400512 - DNA, 701 bp, Cannabis indica
taaatatatatattaaaaaaattgtaactacaccaattacaagaaaggagtaaaacatttattttgtaagaagaaaatgaaaatattagaaatatatatagtggactctttatattatatattgttgggaaacatgataatcttcaaacgtaacaaaataataaaaaaacgaaagtaaagaaaatttactcagtttgataaaattaccaaacccacaaagaaagatatatttcactttatgacttcaaaattatatttactctctatctcaatctcttcacctaaattcaatataccatttacttcttcctcactctcaccacaccacaaactcacacacacacttttttttacaactcactatttttctctacacacatacctctctttcacacaaaacacatatttataaagttacaaaactcgaacatcaagacaacttggggaccaagacattctaaatcttccttaagaagactcattaaaacttagtcaccaagactttcctttttccacaaataataattacccaaaaaaattgtaactttacaaatatagttaaataaataaataacttaagtcaaactccaacaatctctaccttcactcaaattctctaaactcacaactcaaaccatcaataagagtatatatgcagagaattcatactctcattgaacttcacttgagcacttgtcttc

SEQ ID NO: 400513 - DNA, 776 bp, Cannabis indica
gaggaagaagatgaaagggggcggctggctgttatggttagggttaggagagagaatttattttaggttttgaaaataaagaaataataagggtattttgggtaaagtgggaagttagtagaatagtattgtataaaatatttaagagggtattttttgaaataagaattttttttttatgtatattaaatgaaatttccctattgttgttactctaacagttaagatcaactttttataagaaagcaaacgagagaaataatgttagccatacttttttttactccttcaactattatatattttaagaaaatttacataaattattatttttggtaaatttttcatatttatatgtttaattttttttttgtttttgtatttttacagtgttcataaaaataacacaaaaacgagaagaaaactacataaaaataacaggaaacactacaaaaaattttacttttactcacaacaaaacttgtgactaattataaaccatcattcttatgttgtgtgactaaaaagtctgtggctaaaaatattagtcacaaaaattacaatttattgtgactaaatgtatttttagtcacaatatttattgtaactaaaactaaatcggtgacaacttatagctaagtactatattttagtcacaagtaactttttgttgtgactaaaactcacatttagttacagaaaatttatgttgtaactaaaaagttgtcactaaaaataactatgttttgtagtgaaaataacattcaaacaatatt

SEQ ID NO: 400514 - DNA, 907 bp, Cannabis indica
agcagtctcgaccttttctcagttaccattggatgtaagggagcttttagtcccttaagcaacttaaccttttttgagatataagattttattggaggagttttggccccgtaggtagtgcccaactcatttcatgatataatgttgtactaggggagctttaaacgccttctactgcatttgcggtacttagagcgcatcttgaatatttagaaatttgtactcttttcatagaagcatccctcttatatatgtacttacttttttttttttttgcacacggtcatttagcactgctaggcactttattaaatatagaaattggttagataataaacgggtaatgcacctcctaaatccgttctcgttttccatttatgtccccatccccatcacaccccgcttaattatcctcgatggatttgagatagggaaacccccatggggtacccattaaaattaaaacaccaataatattaagaaaataatataatataattcaaaataaaaataaaaaacaagataataactttaacataaatacacattctacctattaaaaagccattatgatacaataaattaagaaatattaatagtcaactttgtaagtaaaacaataactttatatgtaataattagaaaactatatatatttgagtcgaatatggggtgggtagtactatcacccccgatcccaccccaaactcacttcgggcatataaaattgcaccccatctaacactacaaaaaaatactacttttagtgataactttttagtcacaacaaaatactacttgtgactaaaacataatatttagttacaagtacttgtcacgaatttagttttagtcacaacgagtattgtgactaaaaatacattaagtcacaacaaattgtaatttt

SEQ ID NO: 400515 - DNA, 536 bp, Cannabis indica
ggtatatatttgttttgcatgtgtgtttttgattttgtatattgttttaaccggttatttttttttttatatatgtgttcattaaaatgtcgcgtaatgtttatataccattaatgcttatatacctgtaatgtgtattattgacaattgttattccaattttgattctgtgtataatttggtttgttattttagttttttgttttcaattttaattagcattgatttttcaagttataaagataaggaagaggatcagaagcaattgaagagcttacctgaagacgatcagagctgtagaagacgatcggaggtcgatgatcgttgctgaagctctctcttcagtcgatgaaaatttttggttttgagatcgactttctgcgcatgtttcttgcgtttgagatgattagtataacctgaagaactttccggagctggaaaagacgatcggaggcggcaatcgttactggttttggagaagacgatcgaagtcgactgatcttcgcgtttgagttcggtttgcagatcgaattgca

SEQ ID NO: 400516 - DNA, 779 bp, Cannabis indica
cacaaaacagtacaagaaaagaacaaaaaaagacataaattattaattttataaagaaagcgggatgaaaactccaacaagaaaaaaaaaaactcatagattataacaaaaatgagatgacaatatatgtttcttcaccaacattgatcaagatcagggcagcaacattgaagtgcaactatattgtcatgttatgctatatattacaacacaaaataaaattcttatataatattgtgtattattgtgttaagatttcttttaaaaatcatcactctcatcattttgtgctacaatattagacatgtatatataaataaatatatttgttttaattttatatgacatcgttcactttattttttcaaattggtttgaaaaatactgtatatatatcaatatttcttatatttatttatgctattttagattatgattattcataaaaaaaaaataaagttatagataggtataatatataaatttcctgtaacaaaatttatgtattattaacaattaaatacaattttttttaattgatataagtacaaatttataatctatatatatatatatgtgtattttttacacaagcataagcatagttattcgagcaaaaataattattctacttcaataacattttttaaacactctacttcaataatattaatttagaataataatattaaagtttttttatgtttgtttctttttactaaagaaaaaaaaaataatctttaaaaaaaataataaaaaaactataccatcatttacaa

SEQ ID NO: 400517 - DNA, 1984 bp, Cannabis indica
ataattaaggtttatatttatataatggtttaattaggtaataagtgggattatgatcctactaatttatttcagaataaaatttaaattttactataagtgagtaaataaacgtaatttattaattgcgaagatttagcatgtgtgaatgtaatatgagctatacgtggaataaaaatattttcaggttcggcgaccctgaagactcgataagtggatatataagcgtaatttgttaattacagtgatttatatgaaatgcgtggatataatatgagttatttgtgaaataaaaatattttcaggtttggcgaccctagagacccgattggaggctaaaaatgtcacagtaattttagttagaaatattgatgagactatttgataagttaattttagaaatactagggtattttggggtactcaaagttggtcaaataccttagaaatagagattcttagtagttaaaaaataataagataactattaattaataaactttttattattattattattaatattaatattatattatattatattattattattaatatattattataatattattttatatatatataaaaaaaagttatcgttaatatatattataagttacagtaaacaaaaacgaaaacgaacgaactttcgttctttcttttcaacaaaatcttctcctcctatatctattttctttgattttcaactcgaaacctagcaatctaagtttcggtagtagcaggatagcaaatccttgaagagggaaagcataaggtatagtttaatttcgttttaagttttttttaaaaaaaaacaattggtttcgtataggagttttgtgaattagaatagttatgaaggttctgaccttataagattattctcggttagtcatgggactagttccgatgttttcttactgaaactgaggtgattttgggttagaaatcgagtttggaactttttaaatcttagtccgaacgttaatggtatttttcatttaagggctcgattttattttctattacataaggatggtaatatttatggtatatatgtggcttgtgaagtttggagtgatttggataagtttttggtagtatttcggtgagtacaaaatttgagattttcatgttttatagtttttggaaactcataggagatcagaaatcgtatttttgtcataacttttgactcgggtgtccgtttttgacgttctatatactgtttcaaggcttgcaacgagctctataatatggtgtatgttttagagccaaaatataagttttattttagtgtatttataccgcaggatttggtagaaaattctaaattgtcttatgtgaatattaagcagtgtttttttttttaccattattgtgacatagggctgagatcattggggatagttctccacttggggttggccgaaatgtatgaacctgaattaaatgtaagaaaagtatattgtactgcatagtacgttgtatgtaatacaattagtattgcaatgaattgattaatattgagatatagttaatattattatataatgaaaagattaattggttgagtatcgataacgtgatgatattattcatgtgatatatgggatcacctgattaggtgatgcgatttttttggcgacgtactaggcgtaagtacaagcgtgagtgatatatgatgagtatcgagcgtaggtacgggctcacctgattaggtgatgcaattttcctggcgacgtactgggcgtaagtacgagcgtcagtgatatatgatgagtaccgagcgtaggtactggctcacctgattaggtgatgtgattttcctggtgacgtactgggtgtaaatacgagcgttagtgatacagtagaacctctatttaagaatattctattcaggattaacctctaatttgttataaaaaaaaatgaagtcccaatttaggccagttataaataagaataacctctatat

SEQ ID NO: 400518 - DNA, 818 bp, Cannabis indica
ggttcttcctttaccaaaaaaaaaaaaaatcatgggtgttcttcataattttgtttttctgctgggaactcatatcacaaatctattttatctttgcaaacttcaccacattaaggttttactacaacattaattatttattttttttataacttaacattaaaggtattttagatgaactctctaccagtaaaaagaaaaaactttttcagtctcttttgttattaaaaaaaaaaaacagaaaacaaaaatgattgggtctcttcaaatattaaaataaaataaatagatttatttctttttttgtaaaaatttttaaccataaaaaagactttctaattttcatagttttttttttcttttacaatattacatttttttcttctcatagtcagctctctattgaagtattgtctgtattgtctttttgtagattgagaattttagataaacaaatagaataataaaaaattaaaattaaaattagtgcctgagaaaaaaatttattagtaatcttcccactcttggcagttggaggaggcgaatccaccgacgcagtccaaaagataaccatagggagaagcaatgcggtcggtggatgggaaaattatgggagctctgatcgaaaatttggataatgatttacatgtggatgatatatttgaaaacggaagccatacaagtgcttcaatggaagaaactagaaagagaagaggtgagagagagagtaaagagattaatttattttttgattgatttattaaattattatttatttttataatattattaaaaaataaatttacaaataatctagt

SEQ ID NO: 400519 - DNA, 750 bp, Cannabis indica
gtatgcctgaccttttttaacttctgggtagtctttgtctgttattagcttcgcgttgttgatgtcgatttctggatctagttttttactgttgttttcaagtttttctactatttcttcagcaaccagattcgtatagtcaactatgtcaaatttgacgttctcaaattctcttatttctaactcttctccttattctgattggtgttcaagtgtgtatgattctgttgttgctgtgttgttttcaagcattgttgtgttgttttgaagcattgtcacattttcttgatatggtgttgttgtagatgtgatatttgggattacagcaggtattgtgttgttgctctgtccgtttccaacgaagaaggaggcgtcgtttgtcctttgttattgttcacagtacaaaagaaaaaaaaaaagggtctgagcagtataaaagaaaaaaaatgagcctcaacaaatataatagaaatttctactgtgtggcagtatttttgtaaaaattaaagaaaaagttaatatttttataagttttttatttaatattgagtttgcagctacattagaaagccattcacacggtatcaccaaatataatggctccttggtaatgctctaactaaaaagtaatgtgaacaaaaataaatcctatcactacattacacgatatgcaattagataaataaaagggtaaatactattttggaccctctgttttacaaaagttaccaattggaccctgtgttttgt

SEQ ID NO: 400520 - DNA, 730 bp, Cannabis indica
ctaaataagtgatctaattaaattagtccaataaatattttatgggttttgtaacatgtaataataaacttaattaagattataagattctaattaatctactatataaggaacactatacggtttggtccctaactctaatctctaagaactcttatccttcattcccactaattaagtgataacccgcaagtggaaggtcataaacccacattttctaattcttatatccaacatcatggaatggaacaagtatgtcatcttcttaattctataggtaatcttgataatttaaataatatcctatatgttcctagatctagttatagcaattggtacattacatccttattttatgttagattattgaagagtatgatgtcataagaggtgattgtcataagtgggttcaagtgaaaagaggtggaagggatagaaaaataatattatgcctttagtgatagtaggatcatttgacactctttttggataggctaattaagatttttacctcttaaattttaatatgtatcaaattatgttctctgaacttttttgactgttgaaaattctccctaagctattcagattgttagatttaaggatttttgtttaatttcattcaattttactatttcagtgattgtttatgtattaaactatgttctacagactttgataactacaaaatcatgtctctcgaactttgacatatactagatcatgcccc

SEQ ID NO: 400521 - DNA, 877 bp, Cannabis indica
gttgagattgcaattgttgaggactagtgttgagtggtagtgatgggaggaggaggaggtggaggtggacggacgctgacagtggtggaggtggcggagacggaggtagaagtggacgaatgctagcaatggcagaggagtcaaggaaatgatagtgatggtgaactctcgatgggggagaaattgaggatttaataagagattaaatcttgagggtattttaggcacattacacttaaaagcaggtatgttttaattgaatttaatttggagttatttttattagttattaaagaaaagaggtaatcctcaatttctcccttgttactattgctaagtactattcttcttctgtattatgctctttaagaaacacaattactaccagaattccaaatcccagctctgtatacatctcccaaccacattaactgataaattaattacattagcttttaattaaactacattagttgaacataaaaatatgatggaatgaaatatatatatgaatactcaattctgtcagagtatctccatttaagtgatgcagatattaaatatagtttactttgttaaaagtctatttcaataatgtaccaaattgtgatgcaaatatcttacataagaaaaagtaattcaaatttagatcacaatatagaatgatacaaaatttgcatcacaataaatactataattttatatttactattatatcatttgtaatattttattattaaagtttagttagcatactcattaatggcttttataattattattattttattataaaattttatatttataactgtatgattattattattttatatttttaataaactattagatgagtattaaatgacatattaaa

SEQ ID NO: 400522 - DNA, 537 bp, Cannabis indica
aatttttttatcttgacttttatttttaatttttaattttttgtttaaaaagatataagaattacatatggctaattaattagttttacacttttttttttattctaatcttaattgtattttcaaccaaggagatgtctcaattaggttgcagattactattaataaaattagacaaatttccttaaaaaaaaaaaagatagttcatattttaaatttatataatttactattttatttataattcttattattgttaaataaataagttctttatgaagattccacaagtccaccgtagatgagggatatgaagagataaggtgggaagaaggattaaaatggctaatgggaatatgaggatgacgatggaaataagtccttgctcgttcctccatttccattcttaatcattacacttcttaaccgtaatacctattaatgcgaattaaaaaaaattaataaggtaataatctaataacctttttatcgtaagtttctaaaaataatttttttaaaaaaaattatatttatttt

SEQ ID NO: 400523 - DNA, 1656 bp, Cannabis indica
gagagaaacaatgtggtacatgggaaagctgaaaaactagcaaagttagcctttcctttactgccaattatctgcagaattaccatcgagcaagagcataccaatcacctacaactactgcttcacctaatgcacaggcgcttccatctgaaccatggcagccaccagagattgaaattttaaagctcaacgttgatgcaacgtgtgacaaagctaaaaacattattggtattggagctattatacgagatgcatatggaagagtcattgctgctttctcaaaactcattattggtaactttacatcgcatgagatggaggcaaaggctttattctacagccttaatttggctattcagctacaacaactgattgggcaaattgaaacagacgctctaatggtctctaatgctttaaatgcttctttttcagccatatcatcttttaaagatttaattgtggatattactagtcttctatcctttttccatagagtctctattaatcatgttaagagatcagccaacatggctactcattcattagcacgatatgctctagagttggatgaaacttgttcatggttggaggacctacctccttcctttcactctgttattgtaaatgacatttcttaatttataataatatagtttattttgtcaaaaaaaaaaacaatatgtaactagaaaaaggataatgattaaaaaaaaggatacgagtcaataaaagcaaccttaaaataaaaattataaagaaattgacaaaaataccatatctttataaaaatataatttgattaccaaaagtttatagaaaattagaagagttatttctggcataaatacttaagtttaattttcggttgcagataaatacctaaattatatttctaacatttttgtaggtatctgaccgttaagtgtcaagtcaatagccatgtcacagtttttaatttgtcaaggtcattagattaatattttttaattaaaaattagtttaaatataccaataaaaaaatgacacgtaataacttcacactttatggtcagttacctatatacgaaagttcaaaaaatataacttatgtattattaatgtcaaaaattaaacttaaatatttatttacaactgaaagttaaatataagtatttatgtaacgccctgactctcagagacgccacgtgtgtgcttttataaacttattattactaatcttgtaattttagaaaagtgtggtttaattaaaacctttaattaaattcaaaataaagacttttattttaaatactgtcgtaatatggggatcccctgctaataaaattcctttacaactgattacaaaacctttagtataagaatgggttatacatccaatcatagaaaaggttgatcctgcttcacgaaagctaagacaatgcggttgatatgtacattgctaggaaacctccaactcatggccgaacacggctcctaacttccttacctgcaccacaaagcatcggcgagtcacattgactcagcaagaaaagctacaagataaagaaaatcatagaaagtgatagcaaatttcagtacaacagattatacatgccaataggtcatactctttcaacgtacatatacaatttagcgtctatacgaacaaacttatta

SEQ ID NO: 400524 - DNA, 887 bp, Cannabis indica
tttgaaagactcaggcataattctcggtccttatgaaatattttttggtatatgtacttattacttagtcttgagcaagtattttacattaatgttaatactagaatgctatgttgatgacttagtttagaaggaacttaatgtttcagactaagataaaatgtcacaacaagaggtccctaagtatcaatggtaagaggttaaatgcacacttgtgtatgtatttaaccatactcctattgttgagtgggagccatcgaagatgtaatcaaacaaggaatattagggagacaatcaagaaagaatctctgaaagtgatctatatgttagatgatagaggtataaattagaatccttacatcaacaccaactcaaaacttaatatcagatatggtggttactcttggggtggaagaattattctagaaggatataaaaacccctctataataatttagttccaccggtgaagctaataacttagttgtttttaaaagcaccagaaagttattcaaactgaagaaagttcttaactgttttcatctctattccatatgagttttttgtatattcagatgacttatcatacagtaaagaattatgtatccctagacgagtaatacatatagaaaattgatgttgcataatgttttatgaacacaaaggaagtaatggtaccgaaagcagttgattaccacaaccttacagttcctgttatttgggttgagtcaaacacactacacttgatatggatatcaaaacaatagattgattgaaatgcacttcaagttttgtaatagtggaagtgggagtttgttaggattttataccctaaataaaacgcatttcaatataatcttatttgttatcaataaaagattagaagt

SEQ ID NO: 400525 - DNA, 551 bp, Cannabis indica
ggtgtttccagcactagtacgagaaaatacagggtatgtgtggtatagaacttagtggtactcaggtaacgatatataacctaccaacactcgtacaatgtcggtacttagtgtatgtggtacagtggctgtaccctagtaaagaaagtcttactcatttgttaagcctagtaataggtgtatgggcgtctagatacaagtcggtattatattatttgttttatgattttcttactgagtctgtcaactcacagttctactttcatgtgtgggtaaagaaaaagcgaaggctgaacaggagtgagctttaagctaggatgatgttgtacatgtcatggtgacgcgacctagagtattcggtctcgggtcatctgggattttattttgtactcgttgtgtgaccagtgtaatatcctgataagtctaatgcaaaataataagggtttatatttatattatgacttaatcaggtaataagtgggattatgattctactaatttacttcaacataacatttaaattttgccataagtgagtaaataatcgtaat

SEQ ID NO: 400526 - DNA, 704 bp, Cannabis indica
attaagaaacatgcttgaatatatccaacatccccaactaaaatcaaacagtgtcctcaatgtctaaagatataaaaattaaaagaatagggaaagagaacatatggagagtaaacaaccatggatagtagcaatattgatcctctaaaaacataaaaactgaaatacaaaaaaataatgataacaaagaaaataaatagcgaataaaatataaacataaacataaatagaaacaacttgatcattctgggtaggccagagtcacaaaggtgatctcctcaggtaagcctaccctcttaccaaaatttgtcaatatcgcacatggacccgaagaagcatttcatagatcgggtctagaatcgcaaattctcatattgcgacggtgatgctccatcttgggacatctcaagaatagaagaaacattggcttccttaggtggataaagcatatttttagtatcaaagtcatggaggagagcatttaaagaatcagaatcatcatgaataagaacttcctcctcaacaattgtgtctatcacgtcagtatgacagcaatcttcctcctcgtctggtggttgtttcgcaacatgaaaaatgttgacctccatagtcatattcccaaaagataatttcatgagaccattcctacaattaatgagagcattggctgttgcaaggaaaggcctaccgagaatgatgggaat

SEQ ID NO: 400527 - DNA, 809 bp, Cannabis indica
tttttttttgttattttgtgtgtatttataaaatagtaaatgccattttaaaccctgtgttttgcgaaagttataaattagatttctgttttgttaaatgataaaaatttaccctatattttccaaaatagtaaaaatagaaccctgaactcaattgtcaacaattttattttttaatataacaaacttagagacaatttctaacacgagaaaaggtaaccaattttgtcataacatctctagatcatattattattaagttttattttgacaaaaaatcagttcaggattctatttgtaaaattttagaaaatacaaagtttattttgttatttaactaaacagatacaaaacacaaaattcaaaatagtatttactcattataaaataatcccttttattttttaaggggaatagcctctttaatagctttctacttgagctttgagtgtggcttatgttttgcactattgcatttgcatccattctctagtctttctcatgcgcttgggaaaataataattggattttttttgaagaaaaataatatatataaatatatttttgattttaatctgaatacttatataatatattattttttgtaattttttttcatatttttaccaacaccaaaataacaaaaaaactacataaaagtaacatgaatacaacatcaaaagaacaaaaaaaaataacatacaaataataaaaaattaacaataaattaacaggagtacaatataaaaatatattaaagactgtattttctgtaaataaaatcatacaaatcgtaaaaatatttaaaa

SEQ ID NO: 400528 - DNA, 550 bp, Cannabis indica
tcatttactagccgacaaactacaaaaaataatgtaaacataaatattgacaagaaaaatgaatgaaaataaatttaattactctatacaaaaagttaattgaataagaagaaatgtgaaaatatgaatgacttttgttttaaaaaaatgtgtaatgtagtttattaattattattatttgaatgaaatcatcttcattaatcaagagcaatagctcaaatagacaacatttcgtaagaatagaccatatttcagaagcctcctccaaaacacgaccagctaagaacagagccggccttgaaatataataaatcataagaaaaagttaatttttgggctcttatttaaaaaaatatagaaattttttcaaaattgataaaaaaatatataaattgataaaaaattgagcttaatgcctatatatatcaggtttactccaaagctctggcgaccattactaacctgtaatggggacaaagaaggaatattctgacgtccttgaactttaaggcgctattcatcaagactcaaagtagcaaactctacagac

SEQ ID NO: 400529 - DNA, 685 bp, Cannabis indica
tttgttaaatagtaaaaataggatcctgtgctcaattttcaacaattttattttttaaaattaattaattttaagacaatttctaacacagatacaaaaaatataattagttttgtcataacatctctaaatcagattattattaagttttatttgacaaaaaatcagttcaatgtcttatttgtataattttagaaaataaaatatctattttgtcatttaacaaaatagaatgtccaattaataacttttacaaaacacgagatccaaaatgaaatttatcaaaaaaaaaacaattataatatgcccatgtgtgttgaaattaattagttttccttgtgttttattatatttaatatttatatatataattatatttgatttatattatatataatatagtggccttttggggttaaaatttcaaatatatatgaaaggaagaaaaaacaaaatagaaaagaatgaaataattggagaacataaaatgatcaataaaaaatatttgaagcttttaataattattatttttctattaaccataaccataaacattagatatgtttattgtaccacattcaatatttttaagtttattcgaattttttttattaatatattagatagacgagatcgatagacgagagagacgagaagaaagagagattgagagagggacgaagac

SEQ ID NO: 400530 - DNA, 845 bp, Cannabis indica
aaaaacaaaagtatgtttcataaagttaatctttaattttttaattttatttaagttggatccgggtttgggtccggggttgggacgagtttgggtttggggccgcgatccagtgtctgatctcgagacagaggcggggtccaggcctaggatccggtttagggctggagtccgaatctaggtccgaggccagggctaaggccatgatgtaggttttgtggtactaaatcaagtacgtagtggaataataatttttgattatcatcgcactacatcgtcatgatcaccatatgtatatacattaaatctcaaataaatagacaaaaagaaaatttacatcttgaaaaacctattagggtatccttgtttctttttgtaagttatatcctcagatgatgatgaagaactatatgataaactgtataatgtgggctaatatgataaactatataatattgttctcgttttatctcaatttatgaggaagaacaccatgatgatggaaaaaagtttaatcatatttaggcttctaaaaaaatgcgtatgcttttaggtttatacggaccatataattaaaaccaataaatgtttgatttaaataaatatttgaattcaaaataataaattaaatcatatttaaattatttgaataaatatttataaccggatctgttataaatatttattttgaattaaatatttatgtttgaattaaatatcaaataaccgattgagggaatctctcaaccacttggagagaatcacttaactactttgggggaatatctcaaccaacttaaatataaatcatccaatccaatgacaaccgaccgatccaattacaa

SEQ ID NO: 400531 - DNA, 523 bp, Cannabis indica
ttatcatgtagttcaagtaattttgcctcaaatccctataatttattatgcaccaatacacaatgttatttaataaaatattttaatggaagagtaaatagaaaaacaaaataataatttggagggtttaattaataccaaaagatcaatttatgggattaagtgttaccaatcatgtagttcaagtaattttaccgtcaaatccctagaatttattatgcactaaaatagatcaagaagtgtgaattcattatgcactaaattaactatatatacatagatagataattaaagagaaatattaaaagatatcagtagtgtctagcacttttttacgtgtcagtatcgttaattaattgtgactaattataaattattattcctatgttgtgactaaaaggtccgtgactaaaggtattagtcacataaattacaatttgttgtggttaaatgtatttttactcacaatacttgttgtgactaaaactaaattagtgacaacttgtaactaaataatatattt

SEQ ID NO: 400532 - DNA, 949 bp, Cannabis indica
tatatatatatatatattccaaccctaaaccatttactcttagtttcactaaataaattttcttagatttgtgaagattaataatatataggcttggtaatgctaatgctacttcatcaattcttatcattgtaatccatctaaattaattgattaataatatatattttttaataatattattaccaatcgaatgctttctttgtaaatttcaagtattaaaaatgaaattaatctccaatactctagttttatgataataatattaaatacatgtttgtgtttttagatgagattaagattcttattaatttgcactatctatttatataaatctcattttattttttgtgttttgtagaaagtttaaataaatgtataagaaaagttccaccatctcacttcttgatgaaagttgactcaatttagtttgttctcaaaatcaatgaataaacacaagagttctgtatttgaagttggggaatacaaatggtattatttgtattatatactttaatattaatatgaactaaatcaacttttgctcttattaatttattattaaaaatctattatatataggcaattgtcattttatttaaataaagataaaaattacctatctttgtacttgacgataatatggtgcaatgatgatgatgagagtgatgatattgcttcgagtattggttgggaggttaatgttaacttcactttgtttgtctataatcaaacaaaagacaattacctggcatttcaaggtaattaatgatgatgatatattattataatgagtaatttgcgacaaaactcctttaactatcaatttacttgcaaaaaatcatccaacttcatattttagtagaaaaccctccaaagtactattctgtgtccaactcctaattttgcccacgtggcaatgaaaaagtcactaaaaaatatatctact

SEQ ID NO: 400533 - DNA, 702 bp, Cannabis indica
tttttctcgtttcggaaatggctatctagttaagaacgaaatggaatattcctaaaaattctataaataggacagaacctacaatgtaagagatagacaatttttcggaaaaaagaccttgagaaattaagtgtatacaacccaaagattattattttgtatcaaatatcttgtaatcttaaacaaatgaaaaactcagaaataatacggactcttagactacgtagatttaactacaaatccacgtaaaaattcttgtgtcttatttatctctattatgaatagttacttttaattttattccaaatgtctcattattgttaacgaaattatgtgttaacatatttatttataactcgaagttaaacttaagtatttatactaaaaattactctatataaaatatatatatgggtattacccatgaatgggtagtattaggagaatttgagtttttatgcttaatttatctaattaaaaaaaaatacattacgttatatgaattgaggttgttccatcagctggaaaaaaaaaatatataacaaaaaaagatttttgggtaaaaaaaaggacaaaaaaaggttgagtttgactttttttttaaaagggttatttgcggcaaaacctcctaaagtggacaggttttcgcaactaaccccctaatctaaaattttggtggtaaaactacctaaaccactagtc

SEQ ID NO: 400534 - DNA, 827 bp, Cannabis indica
tttttaacccttttaggtgtgggaggggacaaaatggtctattttcgccccataagtcttttgtcctttagtggacttagtattacatgatttatttggtttattttatgttgtgttggctgaaataaatggattaatgtattaattactcattttattagaaaaatcaaaagaaaagcaaaatctcattttctctgtagctctctctctttcaaccacacttagaaccagctagggttgttgtttcttcttgcttaactcagtgttttgcatcaactcttagtacaaatcaagctaaggtaacccttgtgtaactctcttttagtttcttgatgtttaaggaagtaaatatttgcatgcttaatgattttgatgatggtagctgctgtgtatgtttgtttttactttctaaagtttagatgtgtttatttgagtggattcaagctagttttgttgctatttagttggattaaaccttatgtaaagctttgaactcaaaactttggattttaatggtaaaatggtgttttggctgctgtgatctttgtttgtgtttgagtttagtttctggatgttacatatgttattttaggttgaatttagttggttgtgatggttggttgtggtgttagccaagttttgagctttaaagctcaaacttggagctcacatggtgaaattcgtttctgtgaatgaagctttgttttatcacttgatttatgttcattggggtctagttagcaggtctggagggttgcatgaggtttggggctgaattagttgagaaatgaaattttgaaaaattcctccactgaaccggaattctg

SEQ ID NO: 400535 - DNA, 559 bp, Cannabis indica
cttagttgctaagaataagtgcaattgccgataccgtaaaatggtataaaaatacaaatcttaaaatttcataaaaggtcatccaccgaggaatttttcgtaaatttttaaatagcaaaggattcctgaaaatcgtcatctaccgaaatccttatatccaaattctaaactgccgtatttagaactacaagtggcttatccttcacaaagaaggtatgtaggcaactcagttaattattgactgagttcagctgtaattccaaattcaccccaaattcttcccaaattacctcaattatttaatatcatcgtaattgtaatcaaagggtgtttcctttaaacaaaggattgtaattaagagattattcttataatcttggatggattgaaataaaattaataaactcttatgctgtaaaatcagcataggtgaaattatgttttgaatttatttttaatactctaaatgtgaaatttttacttaacataatttttgacacgcccagtgggacccattctccttttcatctccaactatgatgactattatttaacttta

SEQ ID NO: 400536 - DNA, 582 bp, Cannabis indica
tactggggcggttcccagggtgatcgagagtttgatcatccttttcaatgcgatgacatcgccgttaaaaccgtatatgctcgacgtcacgggtcgcaggtccttctcttgcaaccccatttgtttgaaagcttggaaattcaaaagattcactaaacttccattgtctacgagtatactgtggacattatctccgccaatattggaaatgatgactaatgcctcaaaatgcggatgatggacccatctcgcatcactctccataaaggtgatgtcgtcgcattcttttttaaacaatttctctggccgctcactaagattgtttacattggtgagcggcttctccttagcttctttggcatagcgctcttgggacttgcgggagtctcctgcgatatggggccctccaatgatcgttaagatattgcgagatgttctcgaaccactcgcgttttgattttcttctttgtcatccgctcggggatgaccttcctcgttcttcttatacttgtcgaattttcctctccgaatcagctcctcgatttcatcctgcaagacccaacattctaaagtggtatgacc

SEQ ID NO: 400537 - DNA, 2401 bp, Cannabis indica
gagttgttgctctcacatgcacagaaaacaaacagagagttagtattgtgtgagaaagagggattaaacacttaatatgtattaaaacaagagattactagtcgaagaacatacctgtgacttagaatctcatccttgtaactctgaatatcatttttatagtggaatcgagctctcaatctgaggagcagctcaaacagagatgtagccaatttattggtgaaccttgggaaaaatctggtgttttctaaccctaatctttctggttttgtgtgtgtgtttgagtttagatcagatcgtgttagatctgatcttgtgtttgtggttgagttgggatttctgggttgtttgaagggggtagcttcgagtttctcagagagaaactctctgctagggtttcgatctaaacctaaggatgagggattgaatgagaacgttctcgaatccctttgttggttttgttcaaagacaaaatgaggtcgcattaacctgctgactttgaaaagtcagggaatcggtaaaggtcgaaagtgaccttggtttaatactgattatttgatgttggtgtagggcagtttggtaattgcacaatattcctacaatggtatcagagcttggttaaactggaaaattcaacattcaaactaatcatggaggaagaacactcaagcaagaaatcaagaaacacaaacaagaacttcaagaactcaacctgatctagagaaatcttgaacaaaggatttctgggacatttctttaattaatctttataactaaatttcttattatttatttttatctgattttattaatcatgagcaatttaaaggtagacattgacaaatttgatggttctggtgattacaggatttggaggagaaagataaagtcactcttggctcaacaaaaattgttgagagtacttcatgaccctatagaatggccagaagggacaaccaagattcaacaagaagaatacttggaaatagcaactggtatcatgatattcaatctatgagatgctattatcaggttgattgacaaagaagaaacccctaccaaggtttggaagaaactggaagaactgtttcaacaaaaatcattaaccaacaagattttcttgaaggaaaggatctttggttttaagatgagttcatccaaaacccttgatcagaatttggatgaattcttaaggatgcatatttaacttgcaaattctggggaaaatgaggctctaagtgatgaaaaccaggccataattatcctaaactctttgcctaaatcctatagggaagttaagactgctattaagtatggaaggacatcaataaccctagaggaggtgatctctgccctaaaatctaaagacttagagatgagagcagagaaaggaggaaactcaaatggtgaagtcaatttgagtaggggcagaccaggtccaagaaaaccttggaataacagagggagaagccaaggcagaaattcaagcaaaacaggaggacaacaaagaggcagatcaaattctaatactagaaatcctgatgaaactaatggttgttacaactgtggaaaacctgggcactttaaaagagattgttatttcttgaaaagaaataacaggcacaaaccacatggacagggagattctaaacactcaaactctaaaaataaacctgatatgcatgatgcaaacttaagtgatggatatgaaagtggtgaagtgtaccaagttggatcatccatcaaagatgaatggatccttgactctggttgcactttccacatgactaacaataagaattttatgtttgatttcaggaaatctaatggtggaagagttatacttggaaacaaccaaacctgtgacatacaaggatctggttctatcaatttcaagatgcatgatggcatgatcagaaccctaagtgaagttagatatgttcctaacctagccaggaacctaatttcactaagtgttctagatgacctaggaattgtaagcaagattgaagctggacaaatgaaaattagcaggggagccctaactatcatgaaaggacataaagaaggaggcctatactatcttaaaggcaaaccagtggttccatgtaattttactactcacagtagcagtgacaattctaatgccatgacttggcacagaaggctagggcatatcagtgagaagggcttgcaactaatgagtgaacagaaactcctaggtaaggataaggtaagtaaacttgatttctgtgagtgttgtgttcttggaaaacatcgtagactgaaattttgcactggcacacacaccacaaagaaaatcttagagtatgttcactctgatctgtaaggaccagagaaaacagtactcatggaggttgtgtctattttctatctattg

SEQ ID NO: 400538 - DNA, 975 bp, Cannabis indica
agagagagagagtaagaaaaattgagttttttctttaatttttcttatttttccctaaaaaataaaatcctatacttggctgaataaacaaaaatggccagctaccattctaagaggaagccacctaatgcccttaacaaaattatcataatacccttttacttacatcttaagtaatactaagtctaggggtaaaatattcaaaagccataaccctgctcaaactcggtattctatttatctcaaatttttatcccactaaggaaaaggttttagacttacccatgtgactctaacggtcatcaatcgtattttctgtcgtcgccgagtaaaaattataaaaattgcataatgcatatttaacttaaataatactcttagagtttaataaaatctccaaaattgagaaattataactctaatgtccattctgataatgggacccacaaaaataataaattcatgcataattataaaatatcaataattaacgctaattatctttactaatccatattctattatgcgatcattataattatccccccgttaaaagaatttcatcctcgaaatataacctaaataactctggatattgagtcctcatgccagactccaattcccaggtggcttcctccaccttgctgttctttgagagcagtttgaccaaggctatggtcttatttcgaagaagaaagaaccttttctttcctatcgaggatctaaactggctgttcctcataggataagtctgattgtagttcaagggcttcgtaactcaagacatgagtcgagtttgaaacatatttcctcaacatcaaaatatgaaatacattatgaacaactgatagctctggtggtaaggctagctaatacgctacctgcccaaccttctcgagtatctgaaatggcccaatgaacctagggcttaacttacccttcttcccgaagcgcctaatacccttcattggtgaa

SEQ ID NO: 400539 - DNA, 574 bp, Cannabis indica
ccccttcgaaaattctatttggtattcgaaaatagtttaatatcaatattttatgaaaaatagagaagatgctcgaatgaaatctcgaaaaacaccatcaaaaatggtccatgctgataaaatgtcaacctgggcgcagggccagccccaggtgtaaacctaggcgctgggccctacttttggcaactagaaaatgttgtttcttctttcaaaggacatatttccccgttttttatgaagatgaaaaattcagatctccgatctgatacttggaaggcactcagattgacagattatcaacctaggtgttgggtgctcgggaccctgagtgcttaaaaagaacttgctccaattccgattcggatgcctcaaatatttccatggtatgtctagttgatgtttcaatgcatgttttgatccttttgcactaagacagtcctgtaaattgaaaccctagtttgatatgtcaacttgggcgccgggtgaaactctaggtgcccaagttggcttccgagttgcaagttcgtgtaataccagctctagaggtttggattaggtgttgggttttatgccc

SEQ ID NO: 400540 - DNA, 857 bp, Cannabis indica
caaacgtaaaaaaccttaaaaaaattacaaaaataattaaaatgcaatgtacctcaatagaattattaaagatgaaatttttaccttaataatgttgaggttcaatgttttatgtctaaaatccagtcgtcggagctacaaccatcacaattcaaatcgtcaccaacatattcactctacactcaaaagattaaatattatcattctaataacaggaagatattttggtattgaaaatgagaaattttgcaaaaaaaaaaaatgaaagatgggaaaaataggatttttgggctaaagatgtggttgttgaggagggtttcgtctcgattttgagagaatgaacattggaggaggagatgaagtgagccttttgttctcgatgaaggtgttttaaggtcgacctatagtggcggtaattatataataatcgtcgccaacacatgtacacgtgctcctttggcagtggtgttattatataataaccgccactataggctgctaaaacccctttaacgaaaccaaaaagctttaattaattggctactttattttattatttaactaaaataacctcctctaacgctaattttgtagtaatatttaaatatgatataaattttactaaataatttagagctaaaattatatttctacctaatagattttatatctatgtttagttgtattatttgaacttttgtttatatataatgttatttattttaacttttactcagggcgggctctgagggtagacgggctaggcgtgcgcctcgagcccccgaacgctcagggcccgaaattgtaaaaaaaaaaattaatacatagataaagtattaaataattatatatttttg

SEQ ID NO: 400541 - DNA, 585 bp, Cannabis indica
cagatctatatcatatttattgagttgttttggggcattatcgatttctttccgttttatgttatgtgtagtatgtgtttctaatttgtaagaaatttacacaatacatctaaatggatatttttttttttttagaattactttttatattatttttttaatttttttttaaatttaatttcttaaatgatttttacggtggtttttatataagttatgcggattttagttacaatttaggttgctcttttagttgcagtagagatttctatgtgaaattttgtagaaaataactagtttgaagtataaaaataaaattgtccctatttatttatactaagttattaatttttttaaaaaaattaaaacatgcatagataaaaattagacttcacggtcattacataggatattattcggaatagaagatatacacaaacgaccatactgattgtggataaaaaaaccaccctagaatcactctctataatgataaacatccagctttcatccttagcaacttccagcgccaagcagcaggctgccgcttcacaacaaagagcatcagagaactctaatctagct

SEQ ID NO: 400542 - DNA, 637 bp, Cannabis indica
tatataaccacatttaatataactagatattagtaacatgaaatgcatgtttgcttagagttgtattaaaattattattacctaattcttaatttaaatataatcttaaaatttaatttaatataattgaattatatttttcaaatatataaatttaatttcgttttaaatttattaataaaaatatattgtactaattttattaaacaataaaataagtaataaacaataaaataagtaaataaattaagatatttaaataatataactactaattttttttataaattataataaattaaataaattaacatctaattcaaatttcaattaagatttgtataagaaaaataattatctaattttgttggtacttttaaattaaatttaaatatttaaaattatttttttatataaaaaaaataattaattgattgatttaatgctattagttttaaccgttaactttcacgaaaaagtaaaagaaaaatcattaaaccaataatcttctttaaatagccacatttaatataagagagatttaaatctatataaatatctatatataatataaaggaaagtacagaataagtttaggtggcatcttagattttttttattctatttttaaaatttt

SEQ ID NO: 400543 - DNA, 542 bp, Cannabis indica
aaaaaaaaaaaattataaattgtactaagaaactattgtgaacatgaatacttacaaaattggtgtgattaactattttgaagatttagttacaaaatagtaaaaaaaaaaaaatacatgaataaagatattagtcttagaaatatttttttaaaaaaacaattaaaatttcaaatatcatatcatttttcgatgcttataacctattttcggtgatattggagtttttttatatttttttctctatttttcttttaaaacttttgaagaaaagatagaaattaataaatggagtatatatcgagctagacagtagcaaaactagacaaacttattaggagggccgattttttttcaagtttatacatatatttatatatactagatagatgttacgtgccaagtcacgtttgttaattttattttagtttttagttttttttaatatcataattttaaaattaataatattcaatgtagtgataattattgaaaatttaaaatatagtaatttaaataaaaacaaaaattactattatact

SEQ ID NO: 400544 - DNA, 542 bp, Cannabis indica
tatagtattatttttaaaaaaaacttatctatgataagtttatatatataaatatatatatatatattataagttatatcagtaaacagtttaatgaaagaatgaatgaaattttcttcctgtgataaaattttttcttcttctatctattttctttgattttcaacctcaaacctcgagatttaagctctggtagtggcgagataacgaattcttgaaaagggaaagcttaaggtgtgatttaattacattttaagctaaaaacgattggttttatatagggttttgtgaattagaatagttatggagattctgacttcatagaattattctttggtacctatgggactagtatcaatgtttacttgttgaatttgaggtgattttgagttattaatcgagttttgaactttttaaagcctagttcgaacgttaatggcatttttcatttaagggcttaattctaatttatgttatgcaaggatggtaatatttatggtatagatgcgtcctgtgaagtttggagtgatttggataagttt

SEQ ID NO: 400545 - DNA, 851 bp, Cannabis indica
ggggaaaaatttctactcactgtcatggaattcactatcattatccttaggtttcagtgtctttgtgtaaattacgtactcttttatccttttcttcttttggtgatatctcctacgatgttttctttctttttgtttttagccagattgctagaaaaatgaatcgtacacatttttcaataagattcgtatgccaaatgttacaattaataatatatttttgctggaaaagacaaaataaaaaattggtacaaagtatttaaaattatatatatttttgaatttttttttttatgtttgattttttagtttttttttttctgaaaaatatttttatttgcacgttgtaaaaatataatataatattgcattaaggtgaaaatactgtatttcaagtagcaattttaccctatgaacccaacactaaattttgcctcgtttcataatgaaataattttttaaaatttttacggaaatctatatagaaactcacatggcaaccaacatagtaacttaaattacaactaaaatatattcagtaatctgcataaatactacgggagcaacctaaattgtaattttttttaaaaaaaaacattaaaaattaaaaaataatatatgaagtaattcccaatttgtaattttttattaattcttaacaaaatataaaaacctataaaataaaaaaaaatttattaaagataaatatttaaagtaaaaacaaatcattcctaaaaaaaattaaaacttaatttattcacaaacatatatattaaaaaataacaaaaatgattgaaaaatcaataaatcttttaaacaaaaagtaagatttttttgaagaaaaaaaagtc

SEQ ID NO: 400546 - DNA, 497 bp, Cannabis indica
tagccaacgacgctgagtcaattgtagcgattagaacaaatgataatcgttatataaaattaaggaacaagaacacaaatatttataaaagtttggcccgtgattcttgtaatagcctactccccttttgttgtattacttatgaaaaaaaaagtaagaagctcttgatctctctcagaaacttataatttttaaaacataagagctctcttcaacagttgatttcaaatccctggatagagaaataactccactatttatagggaagaattagcttaattaggtttcccaaacaaatgtaaaataataaagctaactaggaatgtttcccattttacaacaacatgtgtggaaattccattaaaataggaagtaaattaataaaataaataaggaaagtatcactgaaaacattccaactgcatttaccctgggcagcatatatggactgttgggttttatgccctaaataaaacgcatttcaatataatcagatt

SEQ ID NO: 400547 - DNA, 1387 bp, Cannabis indica
ggtcacccctgtcgcagattctttcaagaggctagctaaaggcatgcaagacaaagggaagaaagtcgtgattgatccggctgttcgagctcgcaacgtcttgactctccaagagaagttcatgggtgatgaattccagtcaaagacaagacccctgctgaagagctgttgccttgctctgctgagttggcttcggagttcattgccattcgaaggcctttgttactggatctaaagaggtcgaacttgggaagagataaaatgttcaacttcaggaggacatcaagaagctgaaacaagatgcgacttccaaggataaagagctcgaggaactttgcaaggccaaggagcaggttgagctcgaagccaagggtgctcagacgaaggtcgaggagatgtctcgcgacttggaggtcgagaaggagaatgggaagaagcactatgaccaggcggtctcagactacatttacaccaccctccccaaaattctggatttttacttctcaatcctcagagcagaagccgctgaaatggttgaggctttccgcgccatgtcgcctacgcagacccaaggcggtggagggaatttgtttcccgaggaggctgaggctgcggatgtcgagggagtcgagaatgaagccatcagcaaagtcgcggatggatctacccctgctgctcccaatgcttgacttttcctttaatatttacttgtgttaaactctatctttttttttatctatgcggtacgggggtactcgcactttgtacttgaacaaatttatatttatgtttcttttgaacgactttatatcctttcggggatatctatttataatattttcgcagtacacgggtactcgcgttttttgtcatttataatatcttgattgcgactttaactacagcttggtgtaataagtattagagtaaaaaattttagaaacttgaaaaatttcaaacttgaaaaaattccatagctttcataactaatcaatagtacatagtggtattagtggtatataccccctatacttaggattttttttatataaaaaaggactaagtataaatacatggcgagtataaattacacaatgcgagtactattgataataaaattttaagctctcgccattctaagcccttcgaatcgcagtaccatcgagttctgcgagtcggtacgtggcatcaccaactttttctgcgatgagatacggtccttcccaattgtccccgaagaccccatgcgctgggttcttcgtgtttggcattactcttcgaaggactaagtctcctactcgcaggactcttgtcttgaccttggaattgaaatatcttgcggttcgccgctgataagccgcatttttcaggtgagcctgatcgcgct

SEQ ID NO: 400548 - DNA, 724 bp, Cannabis indica
attaaatcatccacaattgcttgcccaccatcttcgaattcttgaggtgcaagttgaaagatgtctataaaatcttctaaagggtttgagctcgagccctcatcttttacgatcaaactttcttcaaaagagaggtaattgacttgagcaaaattttcttcatcttcttgtgtttcatgcccctgaatagtaattctcaaaggtttcttctgttttggcacccattgtttttgcattttagttctctttggctgtggagcatttggaaaggtaagctttttgaatgctgaaactcgtgggggtggatgtgcttgcttcaagtctatcaagtaccaacacctgcagggaaggcgtaacgctctaacaattaggcacgctacgctaaacaattaagaaacccaaatctcctaatctaagattactagaaagataagcgcaggaaatttaaacttttatctaaaatagaatgaaaataaaacttgtaataactttaaactttacaatcaaaagtgacatatttcaagatcccaaaaatattttacaaaatattacaagtcttttcactagccgacctaagcggcaaaatcagagttgcaaaagtgcatcactggtggaccccaacccgcttagtctagtgtggcccaaaaatgtacaagcaccggcaagctctcgcactcatggctgatcagagacagatttaccctttcctgcacagtagagcacc

SEQ ID NO: 400549 - DNA, 532 bp, Cannabis indica
tgaatccatttgatttgaaacttccaattaaacctaaaccaatatatatagattgtatttaccttaatgtgctttttgaaacttactaaaaataaaagtgtaaaattattatatatggctttttaaatattctaccacccatgtctcttaaatttttaaaattaatatatatatgtactaggtaatgataccgcgcctcgcgcggttgtttaaaaactttttatttatgttgtaaaaataaaatttatattatatattaaaaaattattagttaattaatatgttaatgtactataaaaaaatactaaaaattataatcttaatatgttaaaatattaaatcacattatttaattgaattattattattatcgtaagtttgttatataaattacacgtataattatttgttaaaatatgtgaaagattaatattgtttaaaagaaattacttctaactaaatcaaccacaaagtaaataatctaaaataaaaaaaattagagagtcagttcattatctttatagcttgcact

SEQ ID NO: 400550 - DNA, 502 bp, Cannabis indica
aaattcttttgcatatgttgactatgatattatccaataatgtgtttatatgtatgaagagtttttttttatttaagcgtttatatattacataatgcataacttaggactcgaacctaggacctccaatacacacgtactctcctatggtcacttgagctagtctcaagtggttaatatgtatgaagagttagagagttattattgtcaatatggcaatagcacctttgctagaggtaatttatttattgcaaaaaagaaatttttttattataacttgtgtcataatattttagactttttatcattaaattacatctatacccattagaagatatataacctaaccatataaataaactaggaaacaaaagtcgcgcgttgcgcggtcttaaaaaatcataagctatacattattaaaaaaaaaaagtttacgtttttaaaaaatattaaattagtaaaatactaattaattattggacaaataaaaaatttatttaca

SEQ ID NO: 400551 - DNA, 765 bp, Cannabis indica
actcggttggttggctgaacctcacaaggggacctgtggggcgccgtacactccttcgacggatcgttcggagcgtatcacttaggtatagttggtgaaagcaattacagcaacttgacaatctaaaaaaactgttacaaaagtccaattaagcttattggcccaagtaacagcaagaatcacaccttagatgaggtagcagtcccacaagaggtgaattcaaaacaaagcctaaaattacaggggtgatatgtaaatagattacacaatagagcattctttgatgttctttaatttttgtatttagatttttctggccatgacttgggacatgaaataggttgtatagaaaattgagtttgaatgacttcattaataaaaaacttaattttactaccaaaaaaaaaaaattctgtgagattttaccttgaattaatataatttgaaaaaacaaagaatatacattcatgaaactgataattatttcatatatagtaaaaaggcaactatttgcttgttttagaaaagtggaagtaaaaaacatttttttacgcttttcttctttaaaatctttaatttgaaggttattatttaaaaataataaacgataatcctctttgaattaatatagatgtgtataaaagacattaaatacaatatctatataagaacattatatactaaatagtagtggattaataatattaaatatgaattttctgacttaataataacaaattaggaatatatatatatatatagata

SEQ ID NO: 400552 - DNA, 740 bp, Cannabis indica
tgatcgtcatttttctgggcaggtgtgctcagcatcacctgcttgttccagagataaagagcaagagtagcagcgtcatcactatcattagctctggctctcttaagcatagctcgaagagaaccaccaacaaaagcttgatgcggttggaaggaagcacgcttcactccagaagcagaagcaaggcctttacctcgcacagaaggatcaggctgaccaccattgatgatcaatgatattggcataaacagaagagagtcgagacagtcttaaaagcagaagccagtgaaatatcagaaacattctagggatcacgcacaccctcagacatatcattcccagcttgatcagccacagaacagagaccgtgggataggaagtgtaatcaggggaagaacaggttgagacagaaacaacattactgacaggagaaatcaacatctgagtattaggattaatgggtgtgggaatcatgatcgcagcagccccacaaggcattagaacctaattttcaacagacatactatgatgaaacaaataagggaactaaatagcctggggattcatagaggaaggaaggtggaaaccccctggttcatttgaacaatagggacagtaggagggtgaggatattgaaaaggctgaggcttatcagtgagtttttgttgggattttatgccctaaataaaactcatttcaatctaatctgatttgttatcaataaaagattagaagtcatt

SEQ ID NO: 400553 - DNA, 806 bp, Cannabis indica
tataatattatctgtagaacttccacttaattattagtcatataatgagtataattgtgttcaagtactcagttatccaatacatcaataaaagttagcaatataggaagttgtaaaaaattgtaggcgattttaacagaatacccacccgatgccgcttgattaattccaaacattataatcatcaacttgatttatccgaataggaattcccaagataaagattgatgtcacgaggttcaattaagtccctaagttactctaaatcccaccctctctcagttgtaatcataagctgattaacccttcaaggagagataaccaaaggattttcattgttaggcaatcaaggtgtatccaaaacattaatggcatgtttggtttgttgtgttgtcgagtgaatttcgcaacaccaaattatatgatattatttgtgacaagaagcaatttacgtggaaagacaaatgcgagtattcaacctagaatggcgagtactcaactgggaatgagaaataattaacgaaagttggaaaataacaataagacagagaattatagtggttcagtcagattacggtctgcttagttgttgtgaaaaattgtgtacgcaagtatacgcaatcgtaacaagtaataaagtgataaatcgagtatcgtctccacagggattgaaaattagaaattaatttataaaactaattactcacaaattggtttcaacaaaaataacataaagtgatgagaatatgtaaaaaaattaacaaacacaaactatgaaaaaaaaaacaagctagaattattaaatt

SEQ ID NO: 400554 - DNA, 1019 bp, Cannabis indica
tatattatgtacatggaagatggtgacacccatggattgaaactgtgtgtggagctgaagcttattagagttagagggatgggcatcatggggattgataggtcgaacgtaaacaaaagtgggatggccttgagaaacgctggctttcaccatgaattttccaaggtaaccagtgcctccaaaaattagtatcttattttttggagaagccataacaaatatgtcttttcttattattagcttttatatgcttaggaagaaaagaaaattatttaactgatcacctcatgagcttgttagttcctcacaaaaagcacgccttttatagccacaaagtccactttaaaagtctacatagaacttgtctaatgcaatcaacttatcaagtgggctttgtttttttttttttacaacaattaagtggccgttcgattagttattttttaaaggggtgagatgtaaactggtcttaaatttgaaatataatataaaaatacatttattgtatattatttttttttaaaaaaaagaatatataataattaaattaattaagttatttaacttttttagtatggtatattattatattgtaacaaaaatgaatggatataaaataaaattaaatattattttaaaaaaattatataccatataacaaaaaaatatatataattcatcaaaacatatataataacaataataaaaaaaatatatattattaatatgtatatgtatactatactaactaattatataccacaattaaaatatatatatcatgacaataaaattatataccacttgtatataataaaataaaaattaattaaagattatttaaaataaataatatatcgatacaataaacatttataaatataataattaaatatatgcatcataccaataaaattatatacatacattaaaatatttgtatttgttaacaaaattatataccactattatacatagcaaaataaaaaataaatattatctaaaaataataatatacc

SEQ ID NO: 400555 - DNA, 1078 bp, Cannabis indica
cgagtttgaaatagcgagttgtgcgctgttgataggccattgttttaatttggcctgatcgtgtttttcttatagaaaatcaagttggatcaacaatttttctgtatcagtctcgacgttgaaaacatctcttcgtaacgatccagctctgacttcgactgataccatggcttcacatccataagatagtgagaggggatttcaccagttgttgagcgaggagtttgtgttgtatgaccacagaacttgcggaagctcttctggtcacacgccttttttctcttcgagcttagcttttatggtatgcgtgatgattttgttgattgcttctgtctgtccattactctagggatatgcaaccgatgagaaagctttttgaatccccagatcaccggaaagtttttgcatttccttacaatcgaattgctttccattatcagagattaatttgtaaggaatgccgaacctacaaataatagctcgatagacaagctgcataacttcgcaacagttattatcgttagagcttcaacttcagccgacttggtaaagtagtctattacgactactacatactttagtcctccttttccttttggtaactcgctaattataatctatcccccataccgtaaatggccaggggctggtgaaaggatttaactggctcggtggtctgttaacatagtttgcaatccgtgggcatttatcacatttcttagcaaaattggtcgcatctgcctgcaaggttagccagtaataaccttgttgcatgatcttcaaggccagggaattaccaccggtgtggttaccacaaataccacaatgtacttctcgaagtatgtagtcccatttgtctccatcgatacatttaagcaatggttggctgaaaatcttgcgatacagcttgttgtcataacttacatatcggtgttaggttatttttagcctaagtttcaggtcatattttatagttgtttttcttctttattattatttttagaatagaattacgctagttttctttggtttcaggtttcgacacttggaatgcataaattggacaaatttcggaaaa

SEQ ID NO: 400556 - DNA, 539 bp, Cannabis indica
aaaataatatacaaacaacaaaagataaagaacaaaataattacaagagtacaacataaaaatacatcaaaaaagcgtattttatgtaaattaataaaatcttaaaaactataaaaatgtgtaaatttcgtacaattctatttttgtgattttttttttgttgtttttgtgtttttttgaataatccattttttatatgtttatcattacgtcatttttaataatttattattaaattttaattaccatgctcttttgtattaataattttttaaacgtgatacatctattttttgagtaaatcatttatttgttttttaattaggatatctatttggagagaattaattattttaaattgtatgagtagttttaatttataattaatcaattaatattaatgcttattataagctgaataaaaaaaattaaaaaattaagagaattaagaagaaaaaaaagggactttttcatttttacacttcaaaacgtgttttttttttttacgtaaattctacatagaaacccctattgcaatt

SEQ ID NO: 400557 - DNA, 590 bp, Cannabis indica
ctacaaagcattatgtacggaaataatttgctagcaatttattatagaaatttttacatagattaaaattttttaaaaaaattacaaaaatatatttacaccgagaaatttttatttttgctgtttgaacttttttatttacaaaaatacaaactttagtaaattgttcgatatttttttttattattttataatagagttatagttgtcatgatgttgattttttctcgttatttttaattatttaatagtttatttatagttgttttgaagttaattttttgttagtttttagttgttttattatattttttgttgagaaaatcgtatttttataattttaaaactttaaaattatagttttatgaataaaaactttaaatcataaaattataaataaaataaaaaaaattaaaaaaaaccccttacgatcatatataaattatatatttcctttcgttgatataccttaagggggtgtttagaacgggttaatgctaacaagggaatagtaatgtgatacattaccttatttgttttgagggtttagccttagaatgttattcccttagtaatataactaccttgag

SEQ ID NO: 400558 - DNA, 800 bp, Cannabis indica
acagaaaacacatcgagctagtacttgccacttacgtcaggtataaaattcaaaagctctttcattcacgttttcctgtctctagcactctcctaattagccgatgcttttaccaaatctctttcaacacatgttctcacttctcatattggcaacatgtgcgtctatgacatatacactctactttggaggggaggatatcaagattggagcattttgatttgttagttatttagtagttactggcagttggtcagttagccctttactgttagttagcttctttattttctttatttttcttgtataagttagttgttagtctatatatataatgtaatattcttaggtgtagtttcatttagctccacaatcaatgaaatttattttagttaattttgtttttttaagataaatataaattttcatatatatatatagacaaccgattttgtgcttatctcagaaaatcacggattgtattcagttgtactttataatgggtcctacgtactttattatattttttaatattttttgtaattttttttatttatttggcaaccgactcatgtaagttttttcaccattttgtcaatttaattttttaacttagaaataaaaaaatacaaaaaagtacaaaaatatttaatcaaatgactgttggtggtagttaatagtacaatagtactgcagaggttgagtccatgttgtcagactgaggttatttttatcttttcagtcattcctattttttatgtatttttgcagtggtagtggagtacgttatatcacgtacc

SEQ ID NO: 400559 - DNA, 1229 bp, Cannabis indica
aaaataaataaattacataaaaatgtctatgccccaaattagtttatattattttctaaaaataataacaacaaaacctactcaattataccatataattaacgattcatcacctcttatacattcacaataatataaaaatccattcacatatacatatctcatatatataaatgcataaaacccatacaaaatttaatgtatatacatttataaaactgctcttgatagtaattgttagttttatggtactaaattaggtacgcaacggaagagtttcatattatttaattatcatcgtaccatagcccttaggatctctatatgtatgtacattaaataaaaataaaaaagaatataagtttagaatatacctattaaagcctatcagggcctcctaaaaacttcttgtaagttgtatcccttaatgcagttgatgtgaaatatgcaatttggactcacaccattgtcttctaaattgatccaccacatacaagggatagtgtgggctattaggataaattattttttaattatttgaataaataactataaccgaacttagttactgatgtttataagcaagtctcttaactacttgagagaatatttcaacaatcttaaaattgtaaagtcttttttggcaagttagttgacaaaaatattttttatttaatggtaagatatttttgcatttatgaccgattgccttaccttgtatatttggatttagttgttcttttcttagttaggaaagatgcttttaatgctaaactttcctttgtttggaaatttcttgtaagagaatctttttctcctatgaaaagttggtttataaaggaaaccttgattaaatgctttatcctcattaaattcgattgtatcttgatacaatcagaatatataatttgtttatcggacccgattatagcttgtttcctttttctggtctgatttgctgcgtcagcttccgattctgatgttgtagatcatatttatcttaggaaagttttgtgcagctgcaaattcgatcttgtggctgtctctagggtttctatgctctataaataggacctagagagcagccattcgaatgagctcttccattattcatattttcccatttatcttattagagggaagagagtttctttgttatgtgagaacctagttgttcatctaggttctagtatttcatatatcagttcttactttgtcctagagtttgt

SEQ ID NO: 400560 - DNA, 739 bp, Cannabis indica
ccctcttgttatttattactttatagattattaattgctatataattaagtctataatttatctattacaaaagactaatatttagttaatgaaaatctacattaacaatattgaattcaaaatttgaatcaaccaccataaaatatatatattagtttgaactttatattttttaaataatcatataaattatatgatattgttatatatttgttatttaacaaatatataataaagattaaaatgtggcatattatatattaatatgagattaatatatattatgtgttggaggttatattatatcattatagtataataatacacataaattgtaacaaagtgaggagttacaaatctgaaatagtttgtaacctaaggatcaaaaattgataaatatgtaattatgtgagttgttacatatgagagttatggaattaatgggataagtttctagctgttagaaactgttacaatactcaattatatcatttaaatgggtattgggacgttgggaaatgatttaactcggagaggagttacattttgagttctcaggaaacagttgtttgtatgttgttttatggttgttttcgaacatctggaaccagatttttgaaaatgttcataaacgtatacaaattaattgagcatgtttccagctctcttgtccaacgtttttatcccattaaacacaaattaatgtgttggtaacagccatgtgatgaaggaatttga

SEQ ID NO: 400561 - DNA, 800 bp, Cannabis indica
taagaatcaaataataaaataaacacacaaacaatgacttttaatcagaaagtaaaaacttagagcattgatttttctatttcaaactatgaatctcaatttaccgattattccaatttatcctataatttgtagtttctagaatcttaatgtagtctattaacctctctcgagtgattataaatttaacttaaattaactaacaagatatctctattcaatgttaatcaaataagcactcataaagtaatatgattctctttaaaagaaactcatagaattagtagaatctctcaatctcacacttttcctatgtcatgcaattttaagtttgattttggattacctctctcaagtgtaaaacctaaaatctctatactaattaatggtaatcaagcattaaaaagataataattagcacaaaattgcataaacaaatagcaagaacaaatatgggaataatctaaatacttaaattcataatccaaaatagatccatcaacactctagaatgagtgtttagtttataatcacaaacataataaccacaataatcatgttcatgattaaataactaaacagaagaagaagaagaagaagaaaagaactccaataatgaaagttgatgatgattgcttcaaatctcttctctcgctcttcaatgtattctctaatctcaaagttgcttgtttctacctctccagttatccctaaatttgatttaccacattctttatataggccaagaaaagatagatgaatctcattaaaattaggattttttataaaaaaaaaaaaaa

SEQ ID NO: 400562 - DNA, 902 bp, Cannabis indica
ccttttattttcttgtctaccatcacattattaatttcaatctgaaaaaagaaaaagaaaatgcaagtttatgaatgatgagagcatgtgtgaatgtgtccagctgggcctgtaacctgatacacataccatcaattttataagtttcacattctgacccacccaacttccttgcagcctattcctttttctgccactctgtatacgacccataactcacaccacaccacattttgattcccctaaagaaaacccagaattttaacattcatgtaccttgacatatattggcttaaaatttgcatgaattaagcgatttctattgttttttaaactcaaaaaaaaaaaaaaaaatacagtaagacattcaaaacattgcagtccagttacagagtgacaacttaatttacttatatgactatttgagaattgattggtgccaatttaaagagagaaaaaatggacgaaccagattctgtgccacttttggatgaaatgaaaatactagttatgtttcactttcgaacttttattacttaaaatgcaaagttggtaactcaatatctaatacgtaatgagtgtacctaacacaaaaggaaggtatctttatagttgcgattaagctattttataaatttagtaatgaaacatgtcaatgacagtcatcttaattgtcagtcgttagtcaccaattacatctaatataatttcctcattaatggggtaagttgaaaaatacctcttttattaatcaattaaccaaatttgcctctaattttatatttatttgaaacatacctcattttatatgtattgtacccaaaataccctgacataaaagagtcacatggagagtatcttgaagtgacaggggcataattggtataatgtttaaaaaaaga

SEQ ID NO: 400563 - DNA, 529 bp, Cannabis indica
atattgtattctgtattcaaaaaaagatcataaataaaaaagactcgtggagtatgcagatttaactgcaaaatcacgtaaaatatctagagttatataattatttatttttattatttctgaaaagtatttattactgaaaggcttattaattttagttaacgaaaatctacgttaacattaaacatcaaaaaaagtatcataccattattagtgtattttaatatcagctctcaaaaaatttaatttaataaattatttaaaaaaattgctaaccaattatttgatatcacattgatatagtattaggcatcttaaggtgttacataacaataatagtataaaaaattatttaccaaaaaaatttagttcaaagattattcataacaagaaaaaaaaataataaataaatattgcatcaagttttacaattatgcattggaatagaatactacaaattgatgcaaacatatcacaaaatcttattttttttttttccaaatatagtataatttttacatatctcatt

SEQ ID NO: 400564 - DNA, 797 bp, Cannabis indica
gaccatggcggatatcaagggtacaaggccttcgatttgcatgcataagattctgttggaagatttgtgcaaccattctgtagagcagcaacgacggctaaaccccatcatgaaggaagtggttagaaaggaggtaatcaagtggttagactttggcatcgtttaccccatttcggatagttcttgggtaagccctgttcaatgtgttccaaaaaagggcggagtcactgtggtagctaataaaaacaatgagttgatccctacaagaacagtgacgggttggcgtgtttgtatggactatcgaaagttgaacaaggccacgtgaaaagatcatttcccgctgccattcattgatcaaatgcttgatcgtttgtcgggaaaagaattctattgtttcctagatgggtattcaggctataatcaaattgccatagctccggaagaccaagagaaaacaacattcacttgtccatatggtacctttgcctttcggagaatgccatttgggttatacaatgctcccgccacttttcaaaggtgtatgatggcgatatttttagatatggcggaaaacattcttgagatcttcatggatgacttctcggtatttggggagtcttttgacacttatttagttaacttggagagagttttagcaagatgtgaagacacgaacttagttctcaattgggagaaatgccatttcatggttcaagaaggaattgttttgggtcataaagtttctaacaagggcattgaagtggatagagagaaagttgaagttattgagaagctgc

SEQ ID NO: 400565 - DNA, 921 bp, Cannabis indica
ggaattatatacaaactcgcgtagtttggccacagtaatagtcgcaaatactttttcctcagcccatttggtgaagtagtcgactgcgactaaggcgtatttgactccgccttttcctttgggtaactctccaattaggtcgatgccccaaaccgcaaagggccaaggacttgtgatggagtgcaagtggcttggaggttggttgacatatgtggctatccgctgatacttgtcgtacttcttagcgaagtttaaagcgtcttgttataacgtcagccagtaatacccttgccgcatgatttttaagacgagagaattactcccggtatggtttctgcagataccactatgcatctcacggaggatataatcacattcatccccgtcaatgaatttgagcagcggttggctgaagcttctgcgataaagtctgccatcataaatgccatatcgagcagctcgatatcgcagttttcttgcttctattttgtcttcaggcatgatctccttttccaagtaattccgtatgggagtcatccatgtgactcctctggcagtatctatttccattacttcatctcgactcaccgttgggtgagttagtacatcgacaggaattacattgagcaattcaacttctcttgtagaggccaagcgggccaaagcgtctgcgtgacagttatgagcacgcggtacttgagagacaatcactttcttgaatttctgcagcaactcgcatgttatggctaggtacctagccaaacgtctgcctttggccagatattctccgcttaccgggcatacaacgatttgggagtcgctgaaagcctgtaagtactcgatcttcatctcaagagtgagttttaatcctgaaattaaagcttcatactcggcttcattgttagacgcagaaaattcaaa

SEQ ID NO: 400566 - DNA, 533 bp, Cannabis indica
cttagcataattctgattgtcttttattttgcaattggtgcaaatacttcattaaagtcaatcctttccttctgtgtaaatcctttggccactaatctggccttataccttataggttcttctttagttctgccttctttttccttaaatagccatttgtaatcaactacacttttatctttaggtttaggcaccactatccaggttttatttttcttaagagatttcatctcttcatccataacacctttccatttcttggaatttggtccattaatggcttcttcataagattgaggttcattattggccatttccaactcactcatgaaggcatatgcaatgtcttcatcccagatattaaaattgtagttaggattaggaattggtactcttctgtctctgtccatagttaactcataatcccccaagtcttcttgagtcccttcatcagtaattccagtattatcttcatcaggttccacctgaacctagtccccaggttccacctgaacctgatctccttggttctg

SEQ ID NO: 400567 - DNA, 750 bp, Cannabis indica
caaaataagtaggtagattggtgaaaaatccttgtttctatttgtgttttaaagaagtgttctagagtttacacttatcaattttatattgtgacatagggcctccgttcagcacgtgaatttccattaaggttgactagcacacttgaatcatgaaacgtggtaagattaacataagatatgtatatgtatatgtgtatgtatgtaaaatgcatgttgtattatataatttatatactaccaacactagtacaatagcggtacaaagtgcattggtacagtataatgttatgaattgatatcatagtggtgcaaccatagtgtcaggtcagtagtacgagcataatattgggtttgactagaatctaattcaataaagtatcaattgacgctatcatagcggtacaagcatagtaccgagtcgatagtacgagcatagtactgattaagagtaatatcatggtcaattgtacttttgggtattattaatgctatcaattgacgctatcatagcggtacgagcatagtaccaagccgacaacacaattatagtgctagtagtggttgatatcatgatcgatagtatcaaatgttaagaacgttcttgatgcatccgaagccttgtaaataggtgtatgggcacctagacacaagtcggtattatgtgttgggttttatgccctaaataaaacccatttcaatataatcatatttacttattaataaagatcagaaataacattttatgtt

SEQ ID NO: 400568 - DNA, 1207 bp, Cannabis indica
tgattttacaatgcacccccttataagagatgtacttattttggcatctaaaaaaaatttttagtctaatttttttttcatattcatgtatgttatatctatttaagatagcttaaaaattgagaaatttagaataatttacaatgtagaaaataatgtttaaacaatctattttacacgcgaataaaataaaatagttatgcgtgcaacacattgtctgaacgcagtttttagtatattaaactttttcgaattttttaaaattttacaggatgttttaaataattataatttacatgaccatgagaaaaaatttgactaaaaaattattcggatactaaaacaaatagagatgtatcagtgtatcccttataaagggtgtattatagaattttccaaaactattcaacaaattttgaaaatatttttttattttattattattattgtatttaaatcttttaaattttgattatgattttaaaaattaaaaaagttaaaaatagttttattttatggaggagcaaactttgtttatatatatttttacttttctaattaacattaaaagcacattagaaaattgtacacttagcattgaagaatttttttaatcaatatatcaatataaaggagaggaatgaagcggtgacatctcaccctaaaatctttctaaagctattttctttttctccttaattctcttatttttaatattttattagaacataaatttacaaattaatattatactattattttaataattttttcataaaaataaaataattttaaaaaacaaaaattaattaattaaaacaaattcatatcattctaaaaataaaaaaaatattatatacatattaaatgaaataaaaatcaattatttattatttttcatcttcttccagccatgttatcttcacagattaacaatagatttttttttttttgtaaggagattaacgataaattttgattctcgattcaaatgctatctttcaattctattttcatatattcaaaattctcattctataaattttctattaatattttccaatcaatgaaacgaaaaagataaattttaattcccgtatgaaaaatcaaactattaatctcaataaccaatagaaacaacatcaaatttcaagttataaaaatctatgaaaaaaaaaaacaacagttctcataaacacaaactcaa

SEQ ID NO: 400569 - DNA, 768 bp, Cannabis indica
gtgtacggtccctaataaaaaagaaagtttagagttatatataagcaatttattttgaatgtttcacagtttcacaaattcacactagtcctcaatttggttttatcatttgcatttctcacctactcatcgttaatttactcaatttttccttttttattcatcaataaaaaataagataagcctcaaattaatgcttcttttttttttttttttttttttgaaagggacacgactcgattagctaaccacagattagaaaaaataattacacccaatatattggcttcataatcagctagtatcttttttaattacaatcttgctagtctatgagatttttattatttttataatattgtgcttgtgttaaaaataatcttaattaagtcgatcagtatatccttaatttttttaacaaaacttaactctccttttaaatgaaattaacacagttgaattcttaattacgcaatgatttctataaaatattggagaagcagtaattattaattaatttataagagcctaattttgtccttgaaagataatttttttaaaagaaaaagttggcgatagaaatttaattacgagtctttaaaatattaattatttgtttcaaaaaaaaaaaaacttgagaacctttagaacaataaaaaaaggtgtgagttgtggcggaaacttgtgaaactgaggtgatgtttgctttgatgtaatgtaatggaatgataatggtaattataataagaatagaaatgtaatggaata

SEQ ID NO: 400570 - DNA, 518 bp, Cannabis indica
tcctccttctctttctcttttctaatcttatgcaccacacacaccaaaaaaagatatcattattaatttattgatatatataaagaaaaaagttcaattataccaataaatgcatttcaaaagatcatataaaaacaaatgagtttgtcctactaatactataatgctagttggtcttggagggagattgtgaaatggaattacaatcttaaaactgttttgggcatgcatgatcttaattatggtagagaaacatagtattcatcacatctaccaaaaactcataaatgctaatcatcaacaaatgggttcctaaaatcttttaatttttttggaacaaagttaatgttcctaaacactcttgtagggtttttaccactctgccctacacacaacaaataagaaatcaatctttctccatattgagttgttgcttgtttattttggatttatagaccttaccatgttggatgcactgtctgttgaagcctagttggatggtactgaaggttgcttca

SEQ ID NO: 400571 - DNA, 436 bp, Cannabis indica
atttgttttaatttttacctccaatttcaaatttttttagatatacccacttttatggatgatgtccccattagatcctttaagttaatataaattatatattagacttaagtagagagtgagggtatattggactacccactcaataacactaggacagccgaaaaacaaccattaattccaacaagattaagcaaaagcagtgaaatcaacgttaaataaataatcatgacaaaacaactgtaaaacaaatcaaacaaaacaaaaggaacaaaaagattaaaaaaaactaacaatcttctgcatagtcttaacaccagatgcaataacatctatatttgtaagtccggtcctaaaaatctatagctacttagaaaaacataaaagaatcacacaccttaaaactcttttgccaatgagctcgtcaaatgtattt

SEQ ID NO: 400572 - DNA, 695 bp, Cannabis indica
gagagagagagagagaaaataataagtgtatggattttgaaaaaaaaatgagagaaacccatgaaaaagaaaaaaagatgatgaacatggagagaaagaaaaggaaatatgatcaaaaagtgaaacgagaacacgtttgggtctcatctttatcatcaataattttaagtaaaaaaataaaaataaataagtcaaaaatttgtcacaacatcaatcaaatcaaaactttatatatattttcatcttttatcattattaattttaagtaaaataatatttaaaaaaaattgaaatacattaaaagtgacagctcatgtcactatcaaaaatttatatataaaaatatttaaaaaagacagtatcgtataaaactcaaacactctacagtaaaaataaaaaattaacgcctagcagtattaatgtaataaaatgggaaaattcagtatatcatgtaaattttcctaaaaaaatttgcctataacccatttcaacttaagtcctaagtccgacctagtaaataagagagggattatttgatgaggttataatgtaattagtggctgttgccttttgctttaattgaaattacacaaaatatgaaaaaaatttaagagtttatttttttatggcataaacaaataaagctaaggggttatggattttttttgttttttttacatttatatgggtttttt

SEQ ID NO: 400573 - DNA, 1266 bp, Cannabis indica
ttactgctataaagtaatatcttttaggctgaagaatgttggggcaacatatcagtgattggtgaacgagatgtttgcgaaccagatcgggcgaaacatggaggtttacgtcgatgatatgttggtaaaatcaataaaaagtaggaatcataccacagacctcgcggaatgcttcaaaatattaaagaagtataacatgaagctaaacccaaaaaaatgttcctttggagtttcctcaggaaaatttttggattcatagtcaacgcgaggggtatcgaagcgaatcccgaaaaaatcaaggcattgatagacatgccatcaccgacaaagcctaaggaagtacaagccctaacaggaaagtcaactgataagtgtttgccgttctttaatgtattgcgaggcaacaagaaattcgagtggagaaaagagtgtgaagatagaacataaaaaggcatctagcggcgcctccaattttggcaaaaccaataactggaaagacgttacttctctatttggctatctcggaagatgtgattagtgcagctatagtgcaagaagaggctaagcaccagtaacctatttactatgtaagtaaaaggttactatcagcagagtctagatatcccccacttgaaaaactcactttgtgcctagtccacgaatctcgcaagctccggccgtatttttaggcgcaccccataaaagtggtaactaatcagaccttgagacaagttttatcaaaactagatgcttctggaagattgataaaatggtcgatcgaactagggtagttcgacataacatatcaccctcgaacatccatcaaaggccaagccttggcagacttcttaatagaaggtatgacttcagaagacattctgcctgtttaccaagatgcggacacttggaagttatatctagatggggcatccaatgagcaaggctcaggtgcaggggtaatagtaattgcaccagaaggctttaagtttcattatgctttgagatttcaatttgacgcatcaaacaacgaggctgaatatgaagccttgattgctggcttaaagatagctgaagcattgaaagtcaaaaatctcatctgccgtagtgattcccagctgattgtgaactaggtcctcgtggaataccagaccaaaggcttgaatatggcaaagtatttagagaaggttcggaagaacttggaaagatttgattactttaaaatcgagcaaatttcgagagaataaaactccaacgctgatgccttgg

SEQ ID NO: 400574 - DNA, 765 bp, Cannabis indica
aacttttttagttttttttttttttatgtttttgacaactaaaaaaaggtatagtaaaaatttgaggtaggggttatttttgggttttagataaagtagtcatatatttttaatggtgatatgtattagtttaggaataaaatattatgtatatgtaagtatagaaaattaaatttcccttttaagacaacaattttcagttattataaagaaacaacttaacttaaaaatctaaataaaaagaaagtttttttttcttaagtggtaaaaggaaaacgttattaaaagaaaatctctgtttacacatgtatttgggagagggattaaaataatatgttgatatattttttttttatttaataaaaataaacctaataataattcaaaaaatattaccaatttgagaattatgttagcgtgaatatataattagcctttataatttatttgataataatttggaacttatattttaaaaatagattaaattaatatcctaatgttaatttggtaaaaaaaaattaacaaattcatgatatcaattatagtttcaaatctaaacagtgacggactcagaatttttaccttatgggggcttatttatcattaaaaaatatttatacatatattataataattcttactagatttatttaattttatgggggttttttttattattttggtctataattatcaaattaaaaaaattacattgaactttttaaaaggcaatatttttgttagtgggggctatagccccca

SEQ ID NO: 400575 - DNA, 520 bp, Cannabis indica
taaatattaattttaaaaatatataatacccatatataaatagatataggtaatacccattaagagtgtgcacccatatatatattagatatttgtattagatatttacttagccttaattctcgggttctgttgtattctgttactgattagttagactgttaggctttgttttttctccttaaaccgactttgctcaggttgtatataaacctcctggctcttgtaaattcattcagataacatagaatatagagactctgttttcttctcctctcaaattctctgtttctcatatggtatcagaagtacacttgcccacagcttccatggcaagaccttccacccgatctcaagatggtgttcctccatcaaccaacgacaacatcaactctgatgttcctactggtgttacatctgcgcctctggcacaatcgttacacccaaatcgtcgagctccaacctcacgatccagatctcagctccctgatgacaccgagaatcaatctccaagaatcga

SEQ ID NO: 400576 - DNA, 1473 bp, Cannabis indica
cccccgtagttgtggttgggcgtctcgtcgtcccgaggcaagcgatgaaagaccccagacgcggacggcttaatgccagctacggtcacaatcttctccaactggtgggcgcaaatcagggtggagcgaagctcgtccgcctcccagccgttagaacgacaagtatagttctcctgggcaattgggcccttcatgacttcctctagggtggccaaggcaaccgcccccttccgagaggatttggttccagacgcaagggtagacatttttgttttgaaaaaagaaagaatccagcagttaggcccccaaccaaaccctaatgttaaaagagggaatgggggtcccctaaccgctggaaagaggccccctctgaatatttgccaaaaatggaaacccaaaggattttccttagcaaacatcgggtgcaaaaatcccaaaggcagcgaaagcagaagaaaagcaaaaaacgcagaatgtaggaacaaaaatcgccccataccctaaataatcttttgacaaaggggtcgattgtaaataagaatggaggaaaataaaaaaaacacaaataaaaaagattttatacatcacgtaacagacgccaaagctatttccaagaaatccaccactcaaccaaaaagttataccctagcatgcaaataaacagtaaagacatagagttccccagaaacttacatgaaagttgagaaccggggttggtgtcgatcgacggtaaaaagtcgattggcagtgacggaggaatagcagcaagaaatctatggtttctgaaattttttctcaaagatgttcttgtggaaaaatggtgaaatggtaaaagtaaccaaatgaaggagaaatgttggcttttataggccagaacgaatgcaaggcagctgtgatcaggtgtcatcgtgcggtgggaatcgcaatcaattcacattctgtagatccaacggttgggataaattctcatcagggcggttggaaatgcttgagtatttgtctgacatcaattaaatgcgctgaatcattaatggacgggaagcgaatcgttacctgcaaaaagtaataacttttaatgatgactgtcataaatgcagcctacgcgtctaaagcacgtgccaggaaatcaatgagacaactggaggcaccagccaagcctcgtttactctacaccaaacgaggcttgggggtaaatgttgccctctattttgcccaaaatacgtggaccagtataacaacgacacgtggagctgagaggctcaattcttaaagaaatcgactaaatctttggcaacaggagtgtcagtaagaagataactcccggagaagatgtgagaaggctccacgtactttcagagatcaggagtatgctaaggcatctccgggaggtactggactctatttgaacggttccctcgcatttaatgccgcatgggagaaaacgtattggaactgccataagcaatatgtctg

SEQ ID NO: 400577 - DNA, 619 bp, Cannabis indica
tttgatgagagagagagagagagagagagagagagagagagatatgaaattgggtttttatgggttttgttatttgagattgtttttatttcattctggtttaaacaaattaaaaaaaagagagaagactttgatcaaattataggaaagagagaaagggtatagtttgtaaaatgaaaaactattttaattggtatttagtttgctgattgatgaatttttctttctttctttctattaagttttgatttttgtatgcaaaaacgccatttattttttgaaggagcattactattttgtaatattttattaatcattttaaattttaataataatttttgtatgaatatatgtgtatacattaatattatatattccagttaaataaaatataataaatttttttaaaaaaagtgaaattgtcgcaatatattttaaaataaactgattcatataaaaatgtactgtaaaataagaaaaagtaaatttttcgtaatatattttaaagaataaagtatgaaagttattgtgagtgttttaaggtgtctaatactattacttcaaaataataaaaaagtgtccaatactatatattctataaatgggtgactattcaatg

SEQ ID NO: 400578 - DNA, 739 bp, Cannabis indica
aaagtggatggtcaagaataaaattacttgtgtcatgtcaaagaaggtaattgagaaggatcgattatggttcgatttactttagttggtgacaaagacagaactactttagctccaaaaggggccatgacccctcctaaaattttagacaaaaaaagtttataaagcaatttaatgttaaaaattttatttttttcaaaaaattatgaatttggcccccttttattattattttttcttatcttttggctcttattcttaacttctacctctgtccctggttggtgaactgttgtaaagttttgtaaatttggagtataaaaactgtcaagaccttataaaaagaagatgcatttaggttgtataaaattgatatgtttaatgaatattcaacttattcatcaaacaaaaaaatttaatccacttgcgactttcctgcattacactgtgatgagaattatagggttccatctcaaaactaattggtgatgagtggagtagcccatgttcttatttatggcttaatactttttacatttgatccatgtgggacaatgttctccaatattcccactcaagatggtgcctatttttactcaccaatcttgaatcaccttatcaaaggccatgccatttgctcgcttctttttgtttggatctcaaacgtctttgctccatcaggatttcgtgcggctggctaaccatttagataggtgtggatcgaaagtccgctagagat

SEQ ID NO: 400579 - DNA, 884 bp, Cannabis indica
ttaaaaaaatataatttaaatatctcttcaaacgtaatttaatatatatttattttctagataaataaataaaatatatactaaaataaattatattagcaaaataattatcaataaaaataaaattttatcttataaacaagtaaaaaagagaaactaaattaaatactacatatatatttttttaaaaaattaaaatataaaaatatactttcattttttctatgtgcaaatatatgcacattcttcttttgagccttataaattaacaatgagaataatcttctagttcttcaaaaagttttagtcaaatcctttgcaattatttcaatatgattggttatatcaaaataactcaattcatgaacttcatgttcactataatttgtatttcaatgaaaccttcataaggtaatgtaaaactacaacatataagtaatcattacaagtttcattttatatacacgaagaaaataattatattattctccaaaatatgtatatacttttcaggagttactattatgtatatcaaactttatatttcttcatcatcaattcaatgatgtgtacatttgaaatgtacaagacgtacttcatcatgttgttgtaatggttaaatagatataaacataatacatcattcattttttttttggcatctttctaaaaagtagtctaatttataaatagactattcaacagtctaattgttttgacttgtcactttcatcacttgataaaaactatacatctagatacatacaaatatatttaactacttcaagtaacaattgtatgtaaggaagttttttaaataatcattttatgattctttatcactttgattatattagattatattggatcactaacaaatatta

SEQ ID NO: 400580 - DNA, 1184 bp, Cannabis indica
ttttctttttctttctcttttttctcgacagaatcccctcccctactgaactatactctgcttctgtagttgacaaagacactcatggttgccttttgctacaccaagacactactcaagatccaagtttgaatacatagacagtagttgatcgtcgggtatcatgatctccagcataatcagcatcgcagtagccaatgatcttaacctcatcccctttcttatagaagagaccatagttaatggtatctttgacatacctcagtattcgtcgtactacttccaaatgtggcttctttggttgctgcatatatcgacttactactccaactgcataagaaatatctggtcgagtcaatgtaaggtagattagacttcccaccagttgtcgatacattgctccatcttgcaagtccttcccagcatgagcacatagcttagcattggcttccataggtgttgagatgggcttgcactcgagcattccaaatctttgcagcaaatctttagcatacttttgctgacagagaaataagccttcctcagttcgatcaacttctaatccaaggaagtgtttcaattctccaagctccttcatttgaaagcgtactgataggttctcttttgtttgataaatttctgcatcatcatctccagtgataatgagatcatcgacatataccagaacaattgcgatctttgcttcctttactttgacgaataagcttgaatctgcatgtgccatggaatatccgctttctactaagaactcagcaatctttccataccatgtcgtggagcttgctttaatccatacctttttcagtttgcaaacatagtcgggatgtgctctatccttaaagcctcttggttgcaacatgtatatcgctcggtccagttctccatgtagaatggcattctttacatccatttgccatagtctccagtactgttataatcttagcgactgggctaaatgtctcatcataatctagcccatactgttgagagaattctcgagcaactaactgagccttgtatctctcaattgaatcgtcaggacgaatttgtaccttgtagacccatttgcacgaaatggatttcacttccttcggctttggcaccaactcccaagtctgattcttcgctagcgcacttatttcttctttcatagcttctagcca

SEQ ID NO: 400581 - DNA, 1570 bp, Cannabis indica
ttctgagaggcaaaggaagaaagaagtcgaagagagagagaagtcgaaggtgagagtctgagatttagggatttttttttagggattttaagttttttttttaatatttaaaaccgggccgggccgggcccgacccgaaataatatataccaggccgggccgggccgggccgggctagaagtccgataagagcccgaataattcgggccacggtcggcccgtcgggccgggggcccggcccgacccgcgaaaatagcccagattgacattcctaatcacctcatagaccaaatcttgatttttttcgatttatactacaatatatttattgtgagaattgatgatttatgacatgtggcattcactttaacttttctattaaatactctaaaaaaattggtataataagtgtaaattatctttaattaaaatagtgacttcaagttaatgggttaatattggtccataagttgttttttttagctaggattttatgtatatatatcgagatacttctaaccatttcaaattcctaaacatttacagtgtatacttcttatttttaggttattagtgctgcaattagaatgattgagaagggcatttctaagtgcttgtcagaagtaaagtcactcccaccggagtcacctgcacacagtcagtggctggattcatctgacacttactcagggtcctctgatgagtatagaactggaccggcgcagaaatttcgcaaagtgacggccgaagagatgaggttcaacccatcattgatgaagggtacaacatacttttcgtcaaacagtctgccggaaacaacatttattgaacacaaaggtgatgtggcagtttttaagcctttgcagccggaatcgacggaatcagaactcgatggacattgtttccgaaatccagaacatggcgatccaacccaaagggaaggtaacttacgttaatgacttttatttaagaaatggtaatattaatttccgtcacttgacattttttgtttttgttagacatcccacctaaaagtcacgttggagctgggaccaatagtaaaaggccagaagttcccgtcgaggaagcttgcagatgcaaagaactcaaccatggttcgctgagtcaaacgttgtatgaaaactatatgatgtggagagtagacgatatttacaatatgctgacgaagctcatccacaaaaagaatcgatcctctgcctacggtcagacgtctgtagacgatactactgaagatgaaggtgatgaagctagtgggtcgtcgaaaaagtcgagaaaacgtaagggaaccttttatttggttccctctagaagagataactaaattgtttcttcctacaatgctttcatttcagtgttaagttcattttccaaagaattgttgttgggatatcatagtcgttgttgtaagcctttttaaaatattaatttactctcaatatatagtattaacctcaatattaggtactttgtattgacctaaataagttactctcaatatgttgtatgctttcatttgagggataatgtaacaccctaactatcttaggcg

SEQ ID NO: 400582 - DNA, 584 bp, Cannabis indica
acataaaacaagataaaatgctaagaaacaaaaatagaatcgcacaaatcttacattttatatatatttttttcttgttgagaaaatataactatctacccaaattgaacaaagtgcatgacaatataactcaaagaaaaaaacatcaaaaatcttaccaagctatttacattaaaatgaagaaaaaaaaactcttaacaatgaccactacaaggattagcacttttgcaggcacaatttagcgtttgcaaaagtattactgacgaatttttgacactacaagaaaaatgagtattaatgaggacaaatttcgttagtaaaacccctgttttcgtcagtattcctcatcaatgaggacatttcgttagtaaaaagttgttggaatagttcgtcggtaaaaacaattattaacgactttttaggtcgttgggaataaaaagtatcaacaacgacattgtcgttgggaataatattttatttatttatttttttaaaacttgagtgcatcgacaatgacattgtcgtcattgatattattatcaatgacgacaatgtcgttattgaagagcttttcgaaaaaaaaa

SEQ ID NO: 400583 - DNA, 739 bp, Cannabis indica
cccacaaaacctttgaatctctataagaacgttaatatttggagacaacttgttaaccaatttatttgttgatgtgtctagtaatatttcagctacttcattaaataagaccaaagttgttttaacagttttgtcattgacttcgatatgtattttgaacctacataaaaaagtagagaagaaaaaaagagcaaaaattagagataacacaaataaaataataattattattttgagaaaaccaaatataaatttcttacttcacaataagatattcagatatttttttttttgaggaaattacgtagaatatggcatttttttctttaaatttcataaatatggaaaaattagagatttacttaacttatggcatttttacaatttaagttagttgtatggaaaaagatttccatatttttaagttttttattaaataaagccacattttcattttattaacctatgtttagagatttctaatattttttaaagcaaatcattaatatatatatatacatttatattatttttatattataattattttatttattttaactctacataatcattcttttcttagcttaaatttctattttattttttctttttaaagaaatctatttattaatatatgtagaaggtttattttatttttgtacttaattattactaaagtatttttttttattttattttgaatataaattaacattttgatattatattttataaa

SEQ ID NO: 400584 - DNA, 1391 bp, Cannabis indica
tgacgttctaatgtcagcatgatcactcaaggagtcatcaacataaaattttgaatttccgtattcaatagggaatgggggttcaaaaccctactctcagtgggaatgcttgaagaacagaaacaattgtccaaggttatcaaaattgatgcctacttacttattttgagagaaacagtcttagttcacgttattaagtcaacctcacacaagtgtaaagttgacttgaagggaaaatgtttacaccaagagtagccctgatgatgtggacatcaatgtttgacacgtggaaataaagatgacatctcagagttgagtagtatcgagtcatagtaggtcaacctgagagggtccctagccctgcgccttggttgactttgggaactccgaaatggaagtttggactttaataacttgaattccactcactatattttaatattctgtaccatgaagaaatagagcaacctaatccaagccctgggagctgaaattacacgaacctgtaactcggaagccatcctgggcagctagggtttcacctagggcccaagttgcaacctcaactagggtttcatttttcaggaccatcttagtgaaaatgggtcaaaacttgtcttaggacatcaactagacataccacagacatattgaaggcatcagaatcaaaatcgaagcaagttcatttttgagcatccggggcccgagcacccagtgcctaggttgataatctatcaatctaggtaccttttaagcatcaaattagagatctgaatttttgatcttcttcgtcttcatcaaaaaatggggaaataggtccttttcgagaagaaacaacacttcttgtgtgccaaaaatagggccctgcgcccaggttgacacttggggctagccctgtgcccaggttgacaatttgtaaacttgggccattttcgatggcattttccaagattttttttcgagcatcttctccaaaaatagaaaaaattaagatttaactattttcggggaccaaacgaaatttttggaggaccaaaattgagactcaatgcccaggttgatcaagttcaccaaaaagtattctgggaatttttttcatcatcaaaagtaaagaaaattcaagaaaactcaaggaaaaaaatcacaaacacgtgccctaggaaatggggcctagtgccaacctgggacagtgccttcaattgctcaaatgtcgaatctaattcgaccaatgaatccagaatggtcaaaaatagggtaggagacctcatactcaagttcagaattcttgaaagtatcaaatatgagatcttaggagctcaagagtaagcacccagtgcctaggttgacaaatggcctggtgcactggattctgcttatccgagtctgatgtt

SEQ ID NO: 400585 - DNA, 1509 bp, Cannabis indica
tcaatcaccatgagctttgaaatattcagtatataagaataataatttcaaagttggaagaagaagaagaagaagctctctctttattttttacttgtcagacaaaaaagacactgaagtcaattgttatttaaaaataagagctatacttctctatttataggaattcattaggtttagggttagagcttaattaatgggatgattagaaagatccaatggcttataattcatctcatggtcaaaccccttagtgaagcccatgagttaaaatttttccattattttattttcttaatgaaacaaacttgtctttcttcagtaatacaatttttctactctaattatttaaatattaattctatttatttaataattatagataattatcaaataaaattactatttaaatatatttattaattagaccctccaatgtctcttaataaataaaccttgaattctcttatcttcttaattaagcccttccttggtgaaaattcacaaacaagacatagtcttatttagaattctaattgattaattgaaactacaaaataatattatcccagttagtgtggggaccatggccctatgtaatcaagctttcaataagtagattcaaaatttatcaagtaaattttctaacttattaaatcctactaactccactatagatttagaattgaactcttaattacatagaacgctctattaccaaaaaaaaaatagattcgatttgaattacctattgtttcaatccaaatagtcaaagatcctctatagatgatatacatcgagtagggacaaatttactgttctacccttcaatatattttatccttaaaacacttagctaattgtaaatgatatttcagtaaactaatataattacttaaatgagatctcaatcatttctcgcattaagccaagttcgaaggatttcatcgtttcacttttagaagttataaaagctatagattctaatctatgattagcgctcccactcaattatactaccatgttcttaagatgtaagtattgggtcgatccaattggttaactttaacgaacaactcaaagaacacaaataatacatttaagccagaacctagcaatctcaggatttagatctattgacctaagatcaactaagtgatattgacttagaaagatataacggtaagtttatgatatcttatccaatattaatatcggtccagtctgatgtatactccatacatccgatactggcatactttgccaatgtcctggaaaggacataacacttatccaaggtgtgagtaaactttattgttgattatcatgtcagtgtaaattcagtctattgacaaatcataggacttaaactttgaaacatataatcatgattatatttcactatgttgacaacactataatcatgaataactatatgttctggatttaatagaatttatatattaaacttatagtcatgaaagtgatcatgtgaactatgcaacataa

SEQ ID NO: 400586 - DNA, 1461 bp, Cannabis indica
agcttagtccaaatgttaatggcgttttcgtttcagggcttaattttaatttctattacgcaagaatggcaatatttatggtatatatgcgccctgtgaagtttggagtgatttggataagttttggtagtgtttcagtgagtgcgaaaattggaattttcgagtttcatacttcttagaaattcttagaagataaaaaatcgtatttttgtcataacttttgactcggttgtccgttttggacgttctatatatcgttttgaagtttgtgacgagctctacaatatggtgtacattttagagccaaaatatacgttttattttagtgtatttataccgcgtggtttggtagaaaaccctagattgtcttatgtgaatattaagtagtgttttaggataaacacttattggtttatcgttgttgtgacatagggccgagatcatcagggatagttctctacttgggttggttgaaatgtatgaacctagattaaaggtaagaaaagtatattgtactgcatagtacgttatatatgatacaattagtattgcaatgaattgattaatattgatatatagttaaaattgttatataatgaaaagattgattggttgagtatctataatgtgatgatattatgcatgtgatatatgggctcacctaattaggtgatgcaatttccaggcgacatactgggcgtaagtacgggcgtcagtgacatatgataagcttacgagatcccataaaaggaatagaaatacataattacgaattatgtactgtgggatcttatgattttgactgagtagtaatggttggacataccgagttaatgtgtttctattagtgtagaaaatttatacaataaatgaggatatataattcatatgaaggaatagtctaatcttgtgaaattataaggttgatatctttggtgataatgttaagaattaaaaaagattattaagagccatggaggttaaagaaggtgggtaacctgagaagatccatggaaacatgatgtgagcatatttgataaaggttagattatcttagaataatctcttccttgacgaggtgtttaattaaaagtgataattaaatgtaccactagttacgtaccttaataagtgtggtacgagagaaatattagacgtttgttcactggaataagtaggccaggtagcttatcaactagccttaactcctacgttgtccaagtatataatgtgtttcaagtctccatgctgagaaaatatgtatcaaactcgacccatattttgagttgtgacgatgttaaacttcaaacaaatttattatatgggaaaaatatcttgtccaggcttttgcactagaaagagcaggtactgtaataccctggaattaagaaatggattagcaaaaccctaattagataattaatatgaattttaacgtgttaagaccccgttagtgagaca

SEQ ID NO: 400587 - DNA, 816 bp, Cannabis indica
acatcaatgttttgttcttaaatctctcagtaagtggggggtttcatcttacaatggcaagagcaaggtccttatattgtttcaatgttgtttacttcttttctttttcttagtccttttgttgttttactaatgaacatctctaatcttgacaaatagttgagatagtggatagtgtaacttgataagtaatattttggaaggttttatttttgtgattaaattactttgccattttgataatttccctttatttttcagcaaactaatttttaactaattagtctttattttttgtccctaccataccagaaagaggtatgggaaaatggatatattgttgccacagctagttgattttcattcttactcttatattagctaaatttctagtgcaaagtccacatgaataatatcaatatattatattgtcattacagatacgagtaagtcaatgtggataaatttgccaatgtcaactcttttggtttgcgcattaagcattctttttaatgaggtacgtacttcaaataatatcaagagttatgaaagttaggaatagaaaaaccttttctaatcacacatatagaggataggcttgtgtattgtaagcataaatttttactaagttatgaaggttgggcttgtatattgaaagtattgttaaaatatttgtaatatagacactttatgtaatgttatccatgtaattgtcttaatttgaatttatcttttagtaattctaactttatattattattaagttaataatgtatatgttttttacatggatatatgatattaacttatctttta

SEQ ID NO: 400588 - DNA, 854 bp, Cannabis indica
cccaaaagtgtacgttatgtacttatcgatggaaaaataaccttcttcacgcgtagacattaaaacgtaattcgatgcaaagctatcaatcaatattaataagctaaaattgaagagacccttggtcagggtcacgtcagttcgtcaatcgatgcctaggacacgcgtgacccttctggacaagactccagattgagttaagtctatgtgcgaccaggaaggtcccgcgcagacttgggggcaaatgtaatccagttttttgttgggttttatgccctaaataaaactctatttcaatgtaatctttatgttttaaatatcaataaataaacagaagtatttttcatcactttgtgtgtcatttggttcatgttatcatttatttatttgatttataaattcatcgaaatccttatcacatttatgttcctgtttattgtgtcgtcagtacagtgaaaagtaatgaagattatgtgattacatacatattcctagatttattagtacacagagggtttaactgatatgacaatctacaacatagtttacttgcaccttggataagtgctatgttctttctagggcattggttaaagtaaagctttggttggattcatggagtatgtatcggaatggaccgatattgaactttgattcagatatattaaacttaccgtaatatctattcaattcaatatcacctagttgatccttgatcaaatgatcttaatcctaatatggttaggttcgatctcaagagtattatacatgttctttgatttgttagttaagcctacttcttggtaagggtgataagtacattttgggaacattgtagtgcaattgagtgggag

SEQ ID NO: 400589 - DNA, 613 bp, Cannabis indica
gcattgtagatgttttctctagtgtctaggaggatgatgtaggtagtgaactttggggttggatcttgtctggctagctcaggggtattctctggtcgcttgttgtcgttgttgtaaccgccattaccgttattccccctcttgccattgttggagccattcttaccgttaactccttgagagctttgactattcgagctaattccgttctttttattcttagcgtgcttaaagccttgagcatttcgctcggcttcttccaatttaatgaactcatcagccctgtcaaggaaatatctcatagtatgagttggtttctaccttgtatctttccacatctgacttcccacaagaatgcccccacgacagcggcccgtttaccatcatcacttagatttttcactttggttgcttcctgcataaagcattaaatgtagtctttcagcggctcatcgagcttcttcttgatagagactatgtcacccaactctgctggaaaatcgtcaggctgaagagaattgggtatagaataacccttcgaactcatcccaagaagtgatcctcctaaggggtagtttggtaaaccattattgtgtcgtgtccgtgagggttg

SEQ ID NO: 400590 - DNA, 887 bp, Cannabis indica
attataactctaatacccattttaataatgggaaccaaatcataataaaatcatgcattactataaaaatgtcaataattaatgttaattgcctttgcttatccatattctaaaatgcggtcattacaattatgcccccgttaaaaggattttgtccccaaaatctaatctgaatagctctagatattcagtcctcattccagattcaaattctcaggtggcttcatccaccttactgttcttctagagcaccctgaccaaggttatggtcttgttccgaaaaactttttctttcctatcgaggacctgaactggttatttctcgtaagacaagtctgactgtagttcaagggtatcatagctcaagttatgagtcgggtccacatcatatttcctcaacatcaaaatataaaatacattatgaacagtcgataacgctggtggtaatgctagccaaaatgctacctgcccgactttcttgagtatctgaaatgacccaatgaacctagggcttaacttgtccctctttcaaaagcgcttaatacccttctctggagaaactcacaggaaaatatgttctcctgcctgcaatgtaatgtctctgcgcttcagatcagcataacctttttgcctattttgtgaaataaacatctgagccttgatcttatctatagccttattggtcctttgaaataattccggacctaagtacttcttttctccaattcgtcccagagaattgagcgacatttcctaccatacatgtaacgccctaacaattaggcatgtcacaaccactaattatgaaaccctaatcccctaaactgggattactaggaagaaaagcgcgggaaatttaaactttaaactaaaacagaatgaaaata

SEQ ID NO: 400591 - DNA, 582 bp, Cannabis indica
gtcgcgaccaaagaaaagggtcgtgactatggcatatcctggccgcgataactggagcaagaactggcagcttcaacagatttttcaccacattgtcctgtcttttcaccaatcgacagaatttgaactgcaatgcatcgggaacctgaaacaaggaaaaccaagtgtaaaaccattctgaaaggcaacattaactgagaaaatgcttattaattcgacccggaacttaggctaaaaatagcctaacattcatctcaaaaccaaataagagaaccacttgatgaaatttatggtaccattgacaggaagcttgcttgagtccatatatggatttttttaatttgcaaaccattttctttgggtcaccaaccacaaagttttctggttgctccatataaattgtctcatcaatgtcgccattgagaaacgctgttttaacatccatctgatgtaactcaaggtcaaagtgagcaacaagtgccattattatcctaaaagagtctttcgatgaaactggagagaaagtctctttataatcaatgccttgtttctgagtatagccttttgctacaagacgtgcct

SEQ ID NO: 400592 - DNA, 639 bp, Cannabis indica
tggattgctggaataagttacaagttagttttcgaatacagtttgttgcagcaagaaagattaatctcgaagttagcgccttgactaacatcaagcaactacccgcagaaacattgaaaaattttataaagaggtttagggaagaagcctcgaaaaccaagaaagttgatgacggacaacaactcgcacttcttcaagccggaatccgtacaggaaccctattctggaacgaattacaacaagaaggagctgctaacctccaagatttccataacagagtccaaaagtacatcaacttggaagaagcccaaatagtggcctacggaggatactacccaaccggagtggcaggatatgtacccgaagttcaactctcgagaaccctacatcaggctactccacaaataagcggcatacagttctctgctaccctaggatacaatcagagccaagccttggctcctacatcttcgcattacgggaacccctcagggataagcgaacaagtgctgtctaactccgctcctgctgcgagcctaaccgaacctcctcaaggctcaaggagcaagaggtcctcaaaaggcagcaaccagacggaggacaagcgccaaaaaatagggtataatcctcaatacaccc

SEQ ID NO: 400593 - DNA, 828 bp, Cannabis indica
ttttttattacttactaattttaatacaaatcgaatatttttgtatattagttcgattgaaaaacattaattatcaatttaaatattatttatttttttaactatgtttctttaaaatataattttatatttataattaattcaattataattattataatcaaattattaaagcagaatattttttttttaaaaaaatagttttaccggcgcattattacgataataaaactcaatcctgaatcactcgcgccaaatccaactttagcacaaaaggttttaccagtgcatatgtgcgctgacaaaacctttcgcgccaattagcaaaaaaggcaccaaatttttgtcggtgcacaaatgtgccggtaaagattttctaagctggctaagggcggagtagggtcttcatttatcccgacatataatttttcctggctctaattatcgccggtacaagatagttttgtcggcgtaattgttgtgatattctcaacacgcaagtatacgtaccgttaacaagttatagactcacaaagagtgagatcgatcccacatggatcgtagttaaatactttaaaattaaatttttagttctatttggccatataaaatttaagagaaaattaaaactagaaaacaataaaaacagtgaaaataagaagcaagtaaattaataaggaaattaacgatgattaaaagttagggctttcgatttcaattgaatctattgattatgggttaacatgattctattcctattaccaaattctttgtaatagcaggtttactaaggtaatttatagaggatgataccaaggatctgtattt

SEQ ID NO: 400594 - DNA, 863 bp, Cannabis indica
ataacaaattggtttttaaagaggaaaattttctgctatacaggtatgattttaatcgtttgttaaaaatatttggatatatatgagtgtattatgatctcttttgttagaaagcctgggtcgttcttcttgtaatcgtttttgttgtttggttcataccaaaagactgggtctgtttgaaatccactcaaaagtatttattttcgtcgattaggaaatgaagaattagcacaaaaaaacatggaatttttttaaaaatatatatctattttctatacaaaataggttaatgtaacagaattggtttaaccagttttttaactaaaaaaaataagaatgaatactaattaaatcttgtaactaatctcaatatcgttctcttctctaataatattttttgtaatagtgattcagaagaagaatgattcagtattttcggattcttgaattgagttgaggagaatttagttaggttttgggtttgaatggtttggatttttacacgtacaaagcataaaataaacatagtttggaagaggtggagagaactgaaaatggcttaatgatttgcatcatttaatagttttgttatctgcaccgttttaatatgttttttttatatatatatatatatataatttgtactctttgcttatcaatgaaattattgcttaaaaaaaatggtgtaaatccttttgtggcagtaactacagaattagtatttaggtttttccactttgtgcagactgatagggaagttgaggtacaagatctgcttgataatcttggacttagagataagcaacaatttgtaagttttcttagaattattaaaggaatacactataacctttctcatagaa

SEQ ID NO: 400595 - DNA, 556 bp, Cannabis indica
tggagacaagaaaagaaacgacaaaggcatggctcaagtcaatcaagcttctacaagcaatccaattgatcacaccattgctgctcctgctgctgcagatcttacatcccaatgtcagcaactgatttctttgctaagccagcaactcagtcaaacagtttctttgtttttagctctaagcttctcatattaataaataaataaaaaagtaaaaaaaccaaataaaattaaaaaaaaaaaccggagaagaaaagtggtacaaatgtacaaaagactttaagaaaattgaaacaaaacatggagtaaaaaaaaaataagaaaaaataaaaaaaaagagtgaggttaaaaaaataagaaggacaaaaacatttacaataggtacaaacaaaacaaaaaatataatttaaaacattgcaaaaaaaaaaaattactaaaataatcttattcagtttgagaaaatattaaaatagcaaggacaaaaagtatagggttgagatgcaaaatgggcctaaatttggtaactaagttagtaaatgtccactttttaaaaaaatta

SEQ ID NO: 400596 - DNA, 827 bp, Cannabis indica
ctttgatggtaatggaattataaatataatccattaacatgagagagatgtccaaaaaataaaataataaaactttaatataaaatccataaattatgatttttcgacattatacattatgtactctattttgccaagaaaacataatgtctacaaactactactactaataaaaaaaatgggcttttttatttttacacttcaaaagagttttatttatttttttttttttgcatttttaagaaattctacataaaaacccctattacaactagcgctgcaacttaaattgcaacaaaaaatcgtatagaaattcatattgcaactagcgctgcaaccactttaaaaactcgaaccgtaaaattagaaaaaaaaaaaaaaacgttaaaaaaataagtataaaaaaaataataattgaatatttaataaatatattaaaaatttaatattagaaaaaataatcacatgtgaattgaagttattattgttgaaagtatcactatatctgatctttttttgggacctatactttggtttcgattttaacaatttccatatcatctcttttttcaaagatgttatgaccctctatttggtaatatagtacataaatggtatttttcgttcaaaaaataaataaatgatattcttgtaaatactttgattagtcgtatttgtggctatttacaaaaatatgggaaaataaagataagttttgatatatatagcataaaaacttaataaaactaaatatgacattttttaataaaacttacaaatatgggaaaaagtcatgagaaatgtcataaaaaactttaaatttatgt

SEQ ID NO: 400597 - DNA, 558 bp, Cannabis indica
aaaaaaaaatgttttagtataaagtaataaaactaatatgaataaagaaaactaataaatgaatgaattaattaaaattagtaaaaataaattgttaatatcattttagatcatgtattttgaaaaaaaaatatcgatcttaatctctgttttattatataacaagtggacctatatttttcaaaatggtacatacaataccttgagtttgatatttgacgatctttatttttattttaaatataaacaattactaatatgaataaatgtaaaaaaaacataactaattttctcataatatctacaaattaggttcttattaaaatttattttttacttaatttttacaaaaattaaaatccaaaatatgttatatccaaaaataaaagccataatggtgtgtttggaaagccacaatgtaattggatttgtgtataattggaggtaattacacaatttgacatatttgtcagatcatgtaattacactataattgtgtaattggaagtaattgaggggttccaattacactctccaattcttatggtcccccatgag

SEQ ID NO: 400598 - DNA, 553 bp, Cannabis indica
ccaactttgggcacagacggaccgggccagtgcccgtaccaccatacaaatagggctcaaaatttggaaaaatacaatattttatatttacacgaatttccccaaatgttttgaaaattatcacttttcatataaaaaatttaacttttttttccttttactgtataggactcagactcccataactcaagggtagtaggagataagcactctgactcgtttggtagccgtattatatcgtattgtattgtataatattatattaaattgtatttcattcaatattttttatgtaaaactgtatgtcataatgatttttatggacacctaaataaataatattttaatttaaattaaaatttaacataatattatataaaaatatgatatataatccaattcaatataatataatataatacaatacaatacaataccacttaatataacgtaccaaacgagcccttatacgttaaataacaatattggccgaggtcttgacttatttacgttattatatgtataaattgaataatgcacactgaaatgaatg

SEQ ID NO: 400599 - DNA, 853 bp, Cannabis indica
gtagggtaaatcaatcagtgatcagccatgagtgtgagagcttggtggtgcttgtacatgtttgggctacactagaccaggcgggttgggtttaccagggatgtattttgtagtttctggtttttgccgcttaggtcggcacgtaaaaggaacttgtaatattttatgaaaatgtttatgggatcttgaaacttttatcttctggtttattgtatagttaaaattattacaagttttattttcattctgttgtaaacaaagtttaaatttcccgtatttatttttctagtaatcccggattaatgggattagggtgattatatcggttgtcgtagcaacctcattgttagggcgttacagtttggtatcatagcaccaaggtttttatactttctatagaccagctaaacatgtacaatcatcttcagagacaagctcagctcatggtgcagtaagtgttgagagaaaacgcttaactacttatgtgattatttatttaccgctttccattttaggtagtatgtgagcatcttgtatatttatgtgatatggaagccatgcttagtatagtaaattattaaatgtttatttatatgaaatggaatagttgagttagggtttaaaggcaataagtgcataagcgtggtattggtgtctgactcgccgaggttgttgattacagggttatttgtgaaaatggaccctctgcaataatctagaccacagggcgagcaagtagagtttggtgtagaccaaaccaatccactggcaccgcctgtgccttaatagaatttgggggataatgcgggggttggtaatgctatttttgttggatattattttaccaggatct

SEQ ID NO: 400600 - DNA, 943 bp, Cannabis indica
catcggtctgggtacttctattttagccaggttcgcatcagtgtagatgactcaacacctcatctatgccaagggtttgatgagcacgccaacaagtacttattccttgggaagttaagtgggatccatcattgacacttccagaagataccatttttcaagcgttccattcccacattacaaagtaagggacagggcaaattgcattctttctttgtcagccgagcagaggaacatcacccaattgaaaagtgtagaccattttcaaatgtatggcttgtatccttctgctgctagagctacaaggatgacaacttcagatgaggcttcccctgcagatgggcaaggccttgtcgttggatgatgatgatgcacctttgtctcatatcatacaaaatgtggagaggagagagagggctctacataggtgcctggcccatgggggtccagttggtgacgcctttcttcgtatcgagcctagaggcccagcttccgatagacctacacgccctatgcccacaactaggggcaagggtaaagctatagttgtgagctctatagctcatcttttgatgatgatggtagttgatagtttataactccatgcttttattcttgttttgaatatttttgaatgcattctgaatttgctactttctttttgcaggcatgacttcaaggatgagaggtctcgcaggtgggccttcagatgagcctaccagtcgagtgagggccaatgtggccaggacctctcgcgatgtaaatgctagtggaccatcactgcctccccctccactagagcctgcatccgctaggcaacctatagtttagcttactggcccaggtacacagaggcctggtagagaagtggggtcatctgctagtattagggttgttgagtcagccactcggtgtatatagagggatatccctttcttggatg

SEQ ID NO: 400601 - DNA, 843 bp, Cannabis indica
agaaagaactaacaaatgacatcagaatccttatgaaggtccgatcctaatgtgttagtaataacctactcccttttttgttatatttctagataacctgagccaaatgagtttcttaaacactctttagaattcttacaatattttcacaatatatagtgttgtaccaaaaatcaatcactcacttattttgatgataaacaaaaatttgattattatttgttactaatcctttttttgattgttttgcaagtaaactcacaaagtatcgatatttgctcggtaaagtcaaacataatcatagaagtggattaactaagtatatcaataactttatactttataagagaaaaagtttcaccaagtagatcaataattcaaaaccctatccaaaagaggacttcaaaagctcaaagtcaaaagtcaacctaaaaataaaaatcaaagtctaagttaaaatcaactctcggtaagagtcaattttggatcaaaagataaaaataaagctaggaagctcatctacatcaagactacacacaatcaaatggtataagtttactttagtcttgttaaagcaatttacatagtacattagggtttataagttaaaagtttgactcactaacttgtgcgataaattatttcacaaaaataatatcaaaatctcttaattaatttttaaaatcacatatcatttaactaagggtgcatttggtaacacttttttaatcaggtttttgtttttaaaattaaaaaagtgaaaatattttttaaatttatgttctctaaaaatgtgtttacttttaaaatttttaattaagaatctaattttttttttaaaaa

SEQ ID NO: 400602 - DNA, 588 bp, Cannabis indica
gatggtggtagagggtatgatttcttgaccaaaatatgattatcgatggaatatcgatagtttatcaatgattttttctgtgcactgttatttttgtgcgcgtttagaaataatcgataatatatcgacaacctatcaataaatgtcattgatatactatcgataatctattgataaatgccatcgataaactatcggtaaatatcaaattgacaaaactgtgttacatgcacataaatcatcgataaattatcgataacctatcgacaacctatcgataatcacgttttggctagaaaacaccataatcacaaccatctaaggtctgaaacaaacacaaatctaataaaaaaataaataaacacaaagatgaagatgaagatgaaaacgaagacagagattcagggcctctgggttttttgacgcttgagtgctatggaggtccgaacgatcttgggcatttgggtttcgtctgggtttttgggtagatgatgaggttcgatggtggaggaaaggaggttcggtggtggtggttggggggtctcgtgcttgggtttggttggtctcgatggagagagagagagagag

SEQ ID NO: 400603 - DNA, 960 bp, Cannabis indica
tgactatcagggtattctcgaaagttctcatatgttgtatcctttggttgattaaaaactcacatcgtagtccttctaattgatccaccacacacaaggaaaagtgtataatttgttcttgataaattttcaacccatgagcaagaaaaatttaagagagaaaatagttttccttttctcccaatgaattttgaaaattctagtgtgaaaagcttcttctaattcctcaaaccagatttctatttatagtagttaaatctctattaattaaatcacatttaattatttaagtaaatatctataaccgaattcgattattgagatttcagatgagggaatctctcaactatttgaaagaatatcttaactactttgaaaaatatttaactacttttcaaatttaaacatttatctaatttaattaattaaataattaacccaaaaaggcaaaactaatagggacaccctactataggtcgggcggcaagcgcctaccttgtctcatttaggataaggatggtgtcttttgtcctgacaactttcgtctcaattcaaatattgtcttggcaaattttgtcttaacaatttttgtctttttcatatttaattaatttgaaaaattatttatttattacaaaaataaataattactattttttcaattcaaaataaattttttcgaacaacattatacaactctttatctcttcccttgataatgtttcaaggcagcgattcggggaccatgtacctataattttgagctccaataagctagattatttattgagtctcatcaatcataaaatatttgtttattaattctatgattactccactataaatatagaattgaactcttagtaattatagaattatatttactgagttttacttcagtgtctattgatataatcaattccattgattagccctccatgtgttggttcgtaattagtt

SEQ ID NO: 400604 - DNA, 584 bp, Cannabis indica
ccccactcaatacagcagtctcatcggtaaactcatatatttaaccatcaccaaacctgacatctcatttgttatcaacaagttaagccagtatcttcacacacctagagaaccccacctctatgcagccaacagaatccttcaatacatgaaaggaacccctggccaatgtctattcttccatgcctctctaccagcaccacttcatctccaagcctttgcatatgctgattggggagcatgcctagacactcgacgctcaatctcaggttataggagtgttcatccaatccaatctgcactattttgctcatagtgcatctgattcgcactaagggccagtttggcacagctgtgctgcggaaaaaagcaactatagctgtgctgtaaggaaaagcagctgtggcagaattgtgaaaaaaagttgagctgagtgtttagtaaattataatttttaaagtgcttaatgataatattttaatctagttcattataatcacaaatatatataaaaaaaatctatgttatataaaatttttatttttttatatatttttaatatttttttctatagtataaattta

SEQ ID NO: 400605 - DNA, 559 bp, Cannabis indica
aaaaaaacctaagtcactaggtgccaaacctcattctaagcctaagtctctaagtttcatatcactctctctatctcatctacaagcccatatagcattctcaacacttgagatttgtcctccttgattcatactttgtatcttaagggagctatatcatatcccacctataatgatcagagtagtattatccctcggtatcaatacaactaaaataggagtaggtcaatccccgctatctaagggggttgaaccccaataaacttctttgtgttcttaactttcgagttctaattgtgtatcacgtggcaaacatcagatttatatgaccccattgttccttggcaacttttcgaggtcaacagtttggtgttgtcattgagagtgagtggatatcgtatctgatcaaacgcgatggttaacacgagaagaagtccgattgcaccatatgtatctttgggtttttgtaagacccacagactgcagatcttgatgttcatgttcaaaccacatctagaattcctatgaatatcgtggatgtggtcaatcctgccaccac

SEQ ID NO: 400606 - DNA, 779 bp, Cannabis indica
tttgttaaaacggtacacgatatcattgaaaagttattggaaaagggcagagctacgaaaatgtcactggaaaaagtagcgagttgggcaaaatagcttagtgtaggttgttctccaccacaaggtgagtctagtggtaaagacggctcgtcaaacggacataagaagtggctcaaaaatccattcaaagtttgaactgctaaactttgacttgtgatcctaggctaatggtggtgaagggaacggcgccgcttgggggttgaggtcgtcagcacctgggatttcaattggtctgacacgtgaggcggtggctagagataggttgctagagagtggtggtgatggtggtcatggcttctttgaagcttgaagagagagaatgagaaagggaaagagaaagagagagagagtgtgtgttgatggtggaaaggattatttatattatatatatatatttatttattttgttattatatatatatttctctttgactcggtcaaaactgagtctttacaaagtatgattaattaattgaattaactaataagattgtagtatcacagttaacgtaaagaacacatatatttagtttcatctacaattcagaagagacaacaataaagctgcaataggaaagtatgtgtgggctttggctaacaaggaagatagcttgtggttgagatgaattaatagtgtgtatttacacaatgaggactggtggagccatgctgttccaactcaagctagctggtattggatctgcatagtgaggctcaaa

SEQ ID NO: 400607 - DNA, 523 bp, Cannabis indica
tcccatttattttatttcaaaacttaaagaacctaaaaactgttataaaataatataaaaaagataagaagaaaagaagatgaagagagaaagagaaactgaatgacaatttttcagttgtttatttcaatgaggtgaacccctatttatacaaaagtattgactaaaggaatgagaaactaaattaatgtaaggaaaatacaatcaaacattaatggtgataattgattttgtaatttggacatccataaataatattacataatactctcccttggatgtccataataattgcatcaataaaaacttgctgaaaaattttggtcaaaagaaaaagagtacagtgtaaattaactcttcctcatttaggcattcgtggagattttctaatcaacgaatttcgatctagtctgccgtcttctcaaatgttaatgttggtgataactttgtaaaataagtttgcaagattgacacttaattgaattttttgaacaccaatatgcattttcttaaaatgtataaa

SEQ ID NO: 400608 - DNA, 1012 bp, Cannabis indica
ctctctctctctctctcccctcaactcacacgcaccacacacatcagtgtggtgtgagttttatgatcatccctatctcatcacagtatctcatgagttgataatatactatgattgcataattatactcatcctatagttactaatagttcactctatttctaactgttgagacttgcttgaaagattgtggagtgaactctttagcaagttcttagattggatgttcaataataatacgaaaaagatagcgaggatcctctgaaggctacaagaggtattgtctctctattcattagtttagatttaatctatatacattatgctgagatccttaggcttatgattcatattgggttaaattaattttaatcaaatccacttctgtttttctaactctgatataaactataaaaaccaacagggatcgggtcggggtccaagtccgagtttaggtctgggtttgggttacaaggatgaggttgggctgggtttgaccccaaatcctttgtaaatattgtattgtattgtatgtatagtattgtgttagattgtattgtattgtattaatattatattaatatagtattatgcttggtattgacttatattaataagttacataaaattataaattctttacaataaacttaacctcaaccccaaccccgaccacgacctagactcggactcggacccgaacccagactccggacctaaacttgaacccaaaaccttgactctaggggtgagcatgggttggaaatgggccgaccaacctggccaacccaacccgaaatgggccgaaacatggtcattttttgtgggccgaaatacatatgggttgagaaagatccaacccgctcctattgggttgatttcggcctgggggttttctaaccaaatgaacccatactgaactggtcaagcccagcccaagtaaaaaaaatatacatatacactttttgtaaagcccgcttagttaatttggaaattagcagttatttatgtt

SEQ ID NO: 400609 - DNA, 792 bp, Cannabis indica
aaacactaaaaaaattctctactatttttttaactgaaactgaagctatttttttaaaattactattttttttgtttttgttttttgctttttgtttttttttatagaaattgatgcaataccaaaataattttatcaaggtaatagagtagtaaactaattaattctatatattaaaatgaactaattatttcaataaaagtagcagaaaaaaatacaatttcatcaacaccataataaaaaaacacagtacaaaaaattataatctaaaaatgatacaaactttaaaaaccagtttcatcaacattaaaaaaaactaataatttcattaaaagaagcagaaaaaaatagtttcatttaataagataatgaaaaaaattaaaaaccatttcatcaatattaaaagaaactaattatttcattaaaagaagtaaaaaaaaccagtttcatcaacaatgtaataaaaaatacacaatgtctaataactaaacttttaaaaacgatactaaatttaaaaactagttttgaacatataaattttatattaaagagataaaaaagtaaaaaaaaccataaaagaataccaaaaaaaatggtgaatgggagaaaccagttattaataaaccaaaataaaaattaactcataaaaccagtttcttggaattaccaaataaaaaaatgaaacttaaaactcaatatgaacaacaataataaaaaaaaatacagttacgaaaataataaaataataagtgtgtcagtgtacgttatatatttgttatttaacaaatatat

SEQ ID NO: 400610 - DNA, 503 bp, Cannabis indica
gatgaataatgtaagagttaggattggcttgaccatttacaattttcaaaataaaatctcgcactccttttgattcatcatacttaatggttgtcatttcatccataagatgttcagcttcaacgttttcaccagtgtcatatagttttttgacagcactgaaaaaccctttggcatttgtagtgtctggcaaactactcaatagatgttcaggaataaatttttttcatagcagtgaggctaagacgttttgacttttctcattgtgcatgacaagttttctgggcaacagtgctgatattagtaagattagtacatttttcttctcacaggcataagtccaaattcattatgtctaaagtaattttcacatctcgtttctatgtcttaaagttggagcattcaaaatttggatggaaacgttattattgttcacagaaaagagatcgaaaaattcaaaaaaaaaaaaaaaacttgatcaagctatatgagcaatgcaatta

SEQ ID NO: 400611 - DNA, 538 bp, Cannabis indica
aatcaagaactgtgaagatcaaaacttgaaacacaacaatggcgtttgcaagattcgaaattgacaaattcactagagtgaatgactttgcctcttgcgcattaaaatgaaagcacttcttgtgcagcagggcattgttaatgcaattctagaacctgtgtccaaagaaggagaacatgtaaagaaagtctcctaagaaatcgaaatgaaggctcacagtgctatcttgctaagcttgggtgatgaggtgcttcgagaagttgcagaggaagagactgcccttggtttatggaataaacttggttcaatttacatgaagaagtctctagctaacaaattgtacctgaagaaaaggttgtacaccatgaagatggaagatactaaagaactgaggaggcatcttgatgatttcaacaaactgatcttggacttgaataatattggagtcaagattgatgaagaagatcaagcaattctcttactgagttccttaccaaagaattatgaacactttgtggatacaatcctttatggcaaa

SEQ ID NO: 400612 - DNA, 902 bp, Cannabis indica
ctttcttttttttttttttggttctgagaaatgtgatttctctcaaaccttcacaagagatttaaggtttggttgataatttattttagaatatatatatattgattattatacgagggagagagagagagagagagaaagaaagatagttttgtttgtattttaatgatttaatattatatataatgaatggtttcccacttgtattagttttggtgtttcctgggagagagagtatgtgtaatactatacggtgatgtgatgatgtttatcgcagagcttacgccggtctccaccaagtggattgtcaacttgcaaactccttttggacttagtttagctttattaattatcccttttctttacttttatctacaactttgcccttctcttattctacttaatattattccttacattttcttttcaaggcattccttccaatgtttttcatatttattatcgtgtgtatttagctttttgccgattcttttaatttggatgattgtactattcatgataatccattttctaaatataattaaatatatattattgaaaaattctaatgcaccttctaaaatgagtctatccatgtatttttaatttgtttcggtatttaagaaaattttttaatttaattttttttatagtcatatgttgtacttatttaggacatcatacaaaattttgagaaattcaaaaaaaattaacacactcaaaatagaattcaaacagtctattttacactcgtataaagtaaaagagtatcgcgtgtaacagattgtttgaaccttatttttaatgtgttaaattttgttgaatctctcaaaattttgcaaagtatcttaaataactacaacatagacaaccataaaaaaaaaaattgactgaaaaattct

SEQ ID NO: 400613 - DNA, 683 bp, Cannabis indica
acccaccactgtcaaccttagaagctctcttttttccctctctttctctcttgatttttttgtgatctcacaatatcattttcttttttgcaggtgaatgttttatttttttttaagaaaataatgtttgtgttaatattattatggactgttaatatcatttgaagaattgatttggattgtttgtgttaaataagactctttctgtattttttaatcattcttcatttgatagaaaataaattaaaaaaatatataaacaacctgaagaaaattacctatagtttcagttattagtaaataaccaaagacataaagggccctttcgctttcagttttctcaatcccattgtgctttgcctaaaatgcctttggtttcaaagtttcttaaaattgaagctaaattacccaaataatcaatatatatatatatatatactagataaatgttacgtgccgagccacgtattattagttttatttaaggtgttagttttgactaagtgtttctgagtttgagttataatattatgtcctgtgtttatgtccaaatattgtgtgtgtctggctaatctagtgaagaagattgaagttttgattctcaataaatagaatgaatataaatgtatactttgtagtaggtcattattgtgtcatttttaagttaatgtgtcaacttaaaa

SEQ ID NO: 400614 - DNA, 513 bp, Cannabis indica
aaccctaactcggtctggttttgacaactcttgtggcgatcttgatcatgagcgtggtgtcgctactcgtatcggcggtgatcattggggtgacgatcgtgtgcgctcacggtgcatttagggatcccgaggacctcttcgtggatgatcaggaactgatggggttcttctccgtcatcaatggcggaggcacctcttatggatctacggcggctgcgggtcctgcagaaacccaaattctcactggccttataataccttgtcacaaattctcgatgagaaaccaattgattaaatctaatcaaacaaaccaacgtacacttatcccccatagttaccaagccaaccaacttctgaacctgatttgtattcaaacccctacccctctccacaaccctcgcatccctaaactacttcaagcaccgttctttggcgaagccaaaacacttctcctttgtcatcgccaaacagccgttcatctcacgctcttcacattgctccctctccttcaaa

SEQ ID NO: 400615 - DNA, 898 bp, Cannabis indica
gggatttaaaaacccccacgtctggtcatatgatgggaccactgacctagtctcgcatttgaataattttaatactataatgcgagctagcaatgttacaaacaatcgttgtattttgtttcccacctcactagttggagcaactagtagctagttcaataaatttactcatcattccatcacttcttgggaatagctgtctaaggacttcaaaaagcagttccaggccgcaagggataggcgacccaaagcatcctcactcaccaacataaagcaatagcttggcgagacgcttaaggcgtacttaagtcgtattgatttctttaatctgaataaggcatgcccaaaggattgtgttccattatctaggattgaccaattggtggatgcaactgctgggcacgagctcatgtctttcatggatgtatattctggataaaaccagataaaaatgcatgtcccagatcaagaacatacgagcttcgtaacaaacatgtgactttattgctacaaggtcatgccatttgggttgaacaatgctagggaaacatatcaatgattggttaatgaaatgttcgcaaatcaaattggacagaacatagaggtttatgtcgatgatatgttggtgaaaaatcagtaaaaagtaaaaagttaaagtcataccactgtcctcgcagagtgcttcgagatattataggaagcttaacccgaaaaagtattccttagagttttctcaggaaagtttttgggattcatagtcaatgcgaggggcattgaagaaaatcctgagaaaatcaaggctttggtagatatgccatcaccaaccaagcctaaagaagtctaagcctaacaagaaggatagccacacttaacagattcattttgaagtcaactgata

SEQ ID NO: 400616 - DNA, 1225 bp, Cannabis indica
agaatcctataaagcatttactaataacatttttgaactggttgtgcctagaaatattctggaagcactagatgacccgaattggaggctaacagtatttgaggaaataaatgctctaaaaaagaatggtacttggaagattatggtgttaccagaggagaaaaaaattgtaggatgtaagtgggtatttacaataaaatacaaagctgatggaagtgttgaaagatacaaagctaggcttgtggctaagggatttactcaaacacatggaatagttatcaagaaaaagttgcttctattgctaaaattaattatattcgtgtgttattatctctagtagtaaactctaattggcccttacaccaattagatgtaaaaaaaatgtatttcttaatggagatctagaagaagaagtgtttatgagtcttccaccttcattcgaagatcactatggagcaggaaaagtgtgcaagctaagaaagtccttatatggactcaagcaatctcctagagcctggtttgaatgttttggtaaggtgttaaagtgttatgggtatactcagagtcaagcatatcacacaatgttctataaacattcaaaagaagttaaggtggctattctaattgtatatgtggatgatattgtgctgattgaagatgattatagtgttaacgctgatttttgttaaccaataataagccttttcgtaataattttaacacaaaaataacaagaagtcaattaagtatataaagtataataataacaccagatattttacgtggttttgcagttaaatctgcatagtccacgagtctatcttattcaagatattttcagagtatttaatacaatatacaattgataatatttctatttttctctcaaaggattctctgtccctttttctgtgggatctgcccctatttataggaatataagttggcagttatttacatttagattcaagatatataaccatttaatgaaaggtggttaattcccacgtttcatttaaatcatatgtttggataataattgataactgcataactgcctattattcttatcctcaaagatggtcaatgctgatttggataatggcatctcgcttaattcgtcgatggttaatgccgattcggacaatcatataccttccagcaatggcatgagcaccagtgtactgagaaaacttaagaactgctctttgaccataaggccttg

SEQ ID NO: 400617 - DNA, 949 bp, Cannabis indica
tcgagttcattgacaatgattaaattttggtcaagtttttcaatttggtttaagtgaaatactcagattgaggagttttacaaaaattttactcttttacaatcaaatatttttttttacatttttatggagttcattaaaaacattacgaaaacaacaaaaaaatcacataaaagtaataaaaaaataacattcaatcaacatcaaaataatatataaaataacaaaaataaaaaaataaaaataacataaaaacataaaaaaacagtaatttctacgaataaaatctgaaaaattataaaaatatttaaaattctgtatttttgtatttttttttattttttttgtgtatttttaaattatctctaaaaagtaacccacaatttaatattttagtatatgtaatttctcatttgttattttgtattaagttacttgagggcctacaatttgtagtgtaaactgaataaaatataagaattaatgttccttattttgtgcacgtggatcgtgatcaaatggttgaaaatacagagagaacaaacaaggctttcaaaacaattttttttacttttcaacatttgataagtacaagcaaatagtataatacattaatcaaaatcatccattaagcttttgttagacttttatttgggcttacattaaattttattggttttattaaaacttgggttgattggatagttctttgctgtattagcccatgttgttggtgatcaattgttaatgggcttagcatctgtgagtaaagtctaggtgaagcagaagtgtgggcttttctagttgactgaagcctttgatgagcaggcccagcccaactagggttttgtagctaagtcccctccctaactctataaatacatattgtctcatcacaattgtataccttttgataatcagataaaataaactgcttctgatttagaga

SEQ ID NO: 400618 - DNA, 413 bp, Cannabis indica
caattacagaggtgtgattcaggtcagaggtcctcgtcgtctccttctcttctgtgaaaatcccgttcttctccttctcttctgcgattcaggtcaggggtcctcatcgtcttctgggaacaagaggtgcgaaccaggaggtcatcgtcatcgacctgcgaacacccccatcgtcatcgtcttcttcctcctcaccaacaacaaccccatggaatggatttggggtcgaatgatgtgttggaattattttaccaggatcttagatctactcacaagtatgttaattaacaacctaaatatgaacttctaaaacgaatataattaaacactatgagaaaccttacattgggtggagcggaataatatgtctcctcccacttagatctctaactcttgattcctttctgtcgcag

SEQ ID NO: 400619 - DNA, 470 bp, Cannabis indica
agttattcaaatcaggcaaatgagccttcacagttggggttattcatgtgagggagggctgggttcagtatgtcgtacccactactaatggcccccctaactctcacacaaggcccaaaagagaggaatttaaccttaatttaaacaattgttattaattgaataagcccaaatactaattgggcctaaataaaatctatcaagtgtgataattttatttagcaacctagtccattttaattacaaaattaaatgggctccctatatgcatctaagcccaaagcaaacatataggctcacacaggcacactgatttggatggatcctataatgttactaggtttatacacagatgaaagaagattgcaaaatttacctgttacaaattatttatttgacctattgacaattgaaccattaggttaaaatcagatcattggatctgtcaacaagttaaccatagcaattta

SEQ ID NO: 400620 - DNA, 639 bp, Cannabis indica
tttttcttcttgtgcggcttccaagccatcaagcgcccggagctacttaccgagtgggtcagggtaccgccgatgcactgcaccacccccacacaacttttccttcaacacgccaaggtcttttccacgtacgacaaggaggggtttaatgttggggacttggtcacaactgcacactgcaggagggcaaagttgatcacagaaagccagtcagtggatgatttcaatctgcccaaggttctttgtcccaacgttcacaatcccgactccgagaaggagcttcgagcagacatcattgcttccacggaggaccggtataagaagcacctcttcaggagggaacaagaattggcttacatcaaagcccaagccgccgccgagagggttcttcggattaaagccggtaaagagcaggcgacctgtcggccgaaggttttgttcccagttcccaacactagggctcctgatgccagtacctccagatctggtaagtccccactaatgttcatcacattccttctgttcaagattattctagctataggccaatagagtttgatgaacgtctccataggtttaggatgccccctttttgatggggtgatcatgccaagggtttttatttttccaacctaggtc

SEQ ID NO: 400621 - DNA, 758 bp, Cannabis indica
ggaactttattcacatagtcatgtttactttaccattgtgttgacggtcacataaacaggataaagtatgtgaaaagggtttcagatgaattcatacataatgtacatataatcaagaaataaatcaatgtgaaccatgcaacattaaatgttgtttcttgatctatattaataagtaaatttgattatattgaaatgagtttatttagggcataaacccaacattcactccttgtatcgcgacagtaatggagctacttctacttcgagtttttattctcacgagatggaattacaaaaaataagctaagtgtttaaactttaatttctagagagaaaattagagagagatgctttgaccttatggctacttttctgaatgtaaaataaactagtggagctcttattttatacgtgaaggaggtccttaaaataggaataaaataatccaaaatatgaaaaagttacaaatcgactattttttactgtatatgatgatctaatggtaaaaattaactttgaggttgatcgataatttttgaagcccgggccgcgacgtacgagacctgctccgggttagctgtagctttaattcataactctcttaaggtaaaatttagagtcgataactttagaattatgattgaagtgtgagacattacttaatagagcattgaaatagcttcaaaaagcaagtttaattgtgtcaattggatcactattgagtgagttatgtccattttactgaaggttgttca

SEQ ID NO: 400622 - DNA, 515 bp, Cannabis indica
ctatatattttaaaatagcaaatgatatttttagtgtcaacactactaatttatttataatatacacgttaaatattatattataaattatattacttaacataaatacaatatatatatatacaaattataaaaattggacaacaatgcgaaacacaacttagttacctaattatactataattgaaagattacaagttacaactaaataaagataaaaaaaaataaatcaaaatactaaaaagtattaacgctaacaagggaaaggtaatgtgaaatattaccttgtttgttttgagtctttagccttggaatgttattcccttagtattataactacccttgaggagggtaatgttgatactttaaaaaagggtaggattgaatcattaccttctattatattaatttgaatagaatttttgaattaattaataaatttaaataccaataatattatcatttattataaataaaatattacagtatatattaagtttgtgagatcggttttt

SEQ ID NO: 400623 - DNA, 743 bp, Cannabis indica
ccgtaccgacgtattttgtaatttttttgttgttttttgtatttttttttaaattattcttttttttatttagcaatttttaaatatataattaattttaaaatctatatatataaagctagaatataagacagtaacatgataaaattgatttaaatgccttaatttattctcttattttaataatttttaaatacctcaatctattttcttattttgatcatttttataattttttttattatatttataaatattagttcattaatttttattcctatacaagttaaaaacttcatatgccatctaagaaaaataatcatcatatactattttattttctctaattttgaaaaaaaaaaatagttaacaaaaataatataacaataactcattcctcactcaataaatttgttattctaaattttatccatttgacgtggcatgtccacgtaagccaagtccaagtacacatggaatacaatcttgccaatagcaggacaaagtctccttacaaggtatggcaaaaccattaagcagcaagcgaaaggagttaagtgagtcgtcaaggagttgtaacaccatgtctggccagctaagggggagcatataggtctgccaggatgagcttatatggccgggccaaggcttgggcacaagctagtcaacccaaaaggtgactttcaggccaagaaagggtccattcggccaggaagcctaacctctgcaaggagagtatgtac

SEQ ID NO: 400624 - DNA, 848 bp, Cannabis indica
agcatctggttttgataaaattgtctcaagggctgatccattaacacctttatggggtgtgcctgaaagtacagtcgcagcttgcaagacgcttggactaggcacaaagtgagtttttttgagagtgggatatcaagaatctgccactagtaaccttttacttacatagtgaataggtatctggtgcttaccctcttctcgcactatagctgcactaattgcatcttctgagatagccaaatagagaagcaacgtttctctaattattggttttcccaaaagtagaggcattgcaagatgcctttttatgttctaaaaggcctcttcagactcttctgtccactcaaatttcttctttcctcgcaatacattgaagaatggcaaacacttatcagttgacttcaaaatgaatctgttgagtgcaaccatccttcctgtcaaggcttgtacatccttaggctttgttggtgatggcatgtctatgaatgccttgatttttttagggttttattcgatacaccttacgttgactattaatcctgaaaatttccccgaggaccctctaaaggagcatttgttcgggtttaacttcatattatacttctttaatattttgaagcattctgcgaggtctgtggtatgattcccgcttcttattgactttactaacatatcatcaacgtaaaccaccatgttccgcctgatctgatttgcgaacatctcgttcaccaattgctgatatgtttccccaacgttcgtcagcccaaacgacatgactttgtactagtagagttccatgttttttacaaagcttatatgttcctgatctgggacatgtatttttatct

SEQ ID NO: 400625 - DNA, 689 bp, Cannabis indica
actaccaattgtgaatcactacaaatcacaatgtattcagcatgcagctcccgagaaagtttcaagccagcaatgaggacttcatactcagcttcgttgttggaagcattgaatccaaatttgactaccccgtgcagaggttgcccccgggtgtgacaagggcaattcctggaccatacagttgttctgtaactgacccatccacgtgcaatttccgtgtaggtctatctttattgttgttcagcatggattcttgtattggctccagattgtcccttaaggtgctttcttctctgtgcactcaactacatctgctaaggcatgtcctttgactgttgttcgtggttgaaagattattttgtactgacccaactctaccgcccatttaagtaaccgtctagaagggtaatggttggtcggagtatacccgaacatgatgagccttgacgtatccttaacttccttgttgctaagaataggcagtaggtaagcttttctatcaatggatacggtccttcagcttcaacgagtcttttgctgatatagtacactagattgtggagattgttctcttctctaatcagcacgacactcacatcgtattctgtaacaactaagtatattcctaattcttcgtcgtccacgggttttgagagtacgggaggctttgcaagttgtcttttaagttc

SEQ ID NO: 400626 - DNA, 741 bp, Cannabis indica
ccatgccgcggcacctgggcaaaatcccaggttccaccgacaggggcgggtcgcggcatgctcaaaccatgccgcggcaccagggttgaaaacccagggatcagcagccaaaatctcgaattttagcaacaaaacctaatcaaatcaccccaaataacattcaaactctcaaaacatgatcacaaattatcaagctcaaagatagggaattaaaacactcaattcatgcaccgattccaacttaaaactctcagtttcagattacacaaaaatctcacaactaagctttaaacccacaaacattcaaagctcaagagcttgagcttcaagccaacatattaccaaaattttccagtagctcaatatcaagtaaaactaggttttaaacatggaaaatgccctagaattacaatcaaagctcacccaaacacaatccaacatatactcacaaaattcatgcataaacatgttcaaatcattaggaaaacatcaacatacaactaagattatcactcacctgtttcttgcttttacaacaataaaattcagcaaagattcaaagtttaaaggctataaatctacctcaatttcttgcacaaactagcaccaagcttccaacacaatttccccacaatcaacctttttttttttgacaatgaactttcattgaaaatactcaaaagtttatacataaagaaaagatgaaaaaccatctatccaaactagtttatcatccaccct

SEQ ID NO: 400627 - DNA, 533 bp, Cannabis indica
catttgttttgcatgtaacttgttgagttaagtatttatatattatatgtttttatatgtatatatattaattttaattttttcagggcctccaaatttgtggggcctgggaccgaggccccagctgccccaccctctggccggccctgtcaatgggaaggagtcccgttaggtcattgaaaactacgtctcattttgtaatagtcacacttctttatcttctaattgtattttctctaatattagcagaatatgtaattttgtcgcccataatgtggttaagtgggcgtttacccacaagttatttggcgatatttcgctatccaccatccctttaaacattttatgtaatgactgtgaagtctaacttttaatatattaatcaattacgcttttttttcaaaaaaaaaggtaaattattttaattatatgatttataacacttaattatataaattaatttttgtgataaaatttctgaatttttaaatcttgttaaatgtcacagtaaatatattataatatattttatt

SEQ ID NO: 400628 - DNA, 610 bp, Cannabis indica
atgaaatgagataatagaacttttttcaattagaagattaatgtacattttactattaataacatacattattataacacaactatattttacttactaaatatactgacacatattttatttttataaaacaaatcgttcaaataattatactattttaattattaatttaaataaaaaactaaaatattaaataaaactaacactacgtgacttggcacgtaacaatcacctagtatatatatatatgctgtgtgtgttttaatttgatttctaatgttgtaggatggttttgaatttgaagaagaaattcctgatgtggatagcaagagcaaagtaatgcccatggtttgttttttttttttaccttttgttcatctgtaaatgtcgattaagatttttaggtttctgtttttgttgttgttcttttgattggattttttgttttttttgttctttttttaaagatttgttcatgggttagttctctcaatattcagtaaaaaaaaatattgtattcgagtattaattgagttgttctgtgtttattaatttagggatttttcgattttatttttctttctaaagaatagttcatgagtttatgttt

SEQ ID NO: 400629 - DNA, 274 bp, Cannabis indica
atcaatgccccttgctaaccatgaccacccgaccaggcgcacatcgccttttcagggttggtggcacaattgctgtgggcgggaatgtagcaatccaggtggcccaggtattcgtcctggtcgagagtctgaaggtatgcctcagtaaccttggacggagggcttaccaacctggcgcccaaggcaccttgcctcctatgaggaatcacagcaaaaagttcctgactgacgtagccccagtctcgttgtactctccgtagtttgggggtgcaac

SEQ ID NO: 400630 - DNA, 556 bp, Cannabis indica
agctccagttctgtttgtaaagaggaaggatgggacccttcgaatgtgtattgactaccgggagttgaacaagttaactattaaaaataaataccctttgcctagaattgacgatctgtttgatcaaattcaaggaaaaatgatattttctaagattgacttcaagtctggttatcatcaattgagaatctgggaagaagatatttcgaagacagcttttcgaactaggtatggtcattatgagttcctagttagttcattcgggttgacaaatgctccggtaacctttatggatctcatgaatagggtattcaatgatgtcctcgatacctttgtaattgtatttatcgatgatattcttgtgtactctcgatcagaagcagaacatgaacaacatcttcgtatggttctgcaacaactcagagatcacaaactctatgcgaaattcaagaagtgtcagttgtggctgtcccaagtatcttttctgggacatatttttgggaaaggtggaattattgtaacaccctaactaaaataggcgtattacgtgattttt

SEQ ID NO: 400631 - DNA, 916 bp, Cannabis indica
tgttgatctaagttttatcttttatgatttagagattttatctaaatattttaaatggctatgttgatttaatgttgtttataaattgttttatagttgttttatctttttaatttattttgttgttgttgtttcacccagtcatccattgaagaggttttttaggaaaaaatgtgagataatgatgatgagatgcacctttaaagattaatgtattagtttttgttgtctttgtctggtttcaaatgcttgttttgttatgtttatatttttttcaaatgtatttagttagaagaattgttcaaccttaaatggtttatgtctctaactttttttgtttctaattagttgttttttagttttaatttagttattatacgattcttattctaaggttcttaagttttatttttattttttaacaaaactagatcattaggttaggtcttacatttatcaattatatttgagttttaattggaattgttttagttgcatgtttattacgttttataattacgttattttttagttgttatattgttgttttaatgttgttcagtacatgatatacttgcaatattgtataactattaatcatatttttatcgatttattgttttattaattttgttatcctaatattttcaggtgcgtgataagacctctgacgttgttgacaagttgaagcttccaaagtaaaatattgtaaaggtttataatttactttttggagatgtcttgtttgaaatgttctctgattgtagtttattcatttgaaaaaaaaaaatcatagcagaaagttgttttatagtttatttaatgttatttggatgttgttttaactgctgcaggacttgatttctagtgatgatgaactttaaagttgattagaatagacttgttgttcatttct

SEQ ID NO: 400632 - DNA, 585 bp, Cannabis indica
taaagtgacccaagagctagttttagtttagaagatacctacagaagaaaacccagcagacatgggaaccaaaattgtcacccttcacaaattcaaactttgcatgaatttgttaggggtagacacaggatgataacctaaaggagacttgagctaggaccctcagagaagaactaactattacagattaacttatatgaggaatcaggtggaatttgttgggttaattccccgtataagtcaacctgtaacagttaataaggtcaaaacagttagttaaaatactaactaacctatccatatgcaatccaacatcaagacagttgttagttattcctaactaacttcttcaactattacaacacctataaatagaaggactaaaatcagagaacacttacagcttcatattttttcttcagaaatccagagaaacaagatgaaaggtccagatctagaaagagagagttcctctcgtgtgtagacagaaagaaaccagaaagaaaattagagagaaagagagaaagtgactgttcgatcctgagagaagaaaagaaagagaaagtttgagagagagagagagag

SEQ ID NO: 400633 - DNA, 615 bp, Cannabis indica
gatgccaaacatgcactaagtatctagttctacagtctgtgggtctagagagagacccgaagatgcagatggtgcgataggggtttttcttgtgttaaccatggtgtttgatcatatacgatatccatactcttaatgaaaacactaaactgttgacctcaaaaagtgatcaaccgacagcggggtcatatagatctgatgcttgccacatattgcacaaacaagaataaaaagtaataaacaaacagatttgttatagaggttcgacccccttatgataacggataatggcctgcttcctttttagttgtcttaataccgagggttaatactatctaggtcactatagatgaaatctactataacacccttagaaatacaatgtatgaatcaagaatggcaaaactcaagtgatagtgcttgtatgggcatgtgaggtgaggaagtgaagaatagagaagttgtcagacttaagcttagagcttggaggcaggtttcagacttagattgagcttaggctttctagattagagttaagacatttacataggagacctaacccctagattacaacttgaaaccctagatatttgtatattttattagttaattaca

SEQ ID NO: 400634 - DNA, 1057 bp, Cannabis indica
taacctcctgcccataaataaaattacttttagacccaatagcatgacccaatagagccaacccaatcctttatttttatctaaactttcgggcccaccaggcttagagggagacacattgctcacgtgatccacaccttttcctttcgccagctcatcaataacgtacacattcaaacagttatcttttgaaatcaatatatcaagaatagcttcagaaccacttttatcatttcttcgttgagcacccttgccattaataaaaatggaaagagtattatcaagcttgttattaatggttttgggaacacaaacttgttttttattcactgcccgaggactatgggtcaccatcttgcttttccttaaaccaggtggagccgaacccagctgtgtcccaatcttgccactgccagagttactcgcaagtaccgtcagagatacggtgaccgacctaccaccttcagcagcactgctagaccctgtggcagtgacttcacgtcacttcttaaaaaaaaaaaaataatcctcgtacagtttcgtggtgaacagccaaggcccatacaaaggaaacagaactccatgtccattcagaacgacattcgaggttgagaggcggcaaccacggcgttgatggcccagacgaccacagttaaaacaaaaaataccaagcttttcatactgaacttgatccattttttctccattagtgagattgatgaagcaacccaaaaacagtggtttctcaatgtcaataacaactaatattttaagccacttatcctacataacatgtctatcctcgtcaagctccacatgtacaaccgaaccagcaagcgaacccagagaagtaccattatcaatggagaaatattcatgtggtagttggtgcagctgaacccaaaacttgagcttcccacctgccaatgtacaaaaaaaactaggagcccactcatggaagaccataggggtgtgcataaatcatccaatccaatgagaaccgactgccaaacattagatatccaattgtaataagatcggattggatgttattttt

SEQ ID NO: 400635 - DNA, 806 bp, Cannabis indica
caaaccagattcaggatgatggaattgcgattactgatcgtcgattacagatgtgatctagcacgaagaatgatttgattaaggagatgattgtaatgagggaactgctcgagcatcctctcagctctatgctcatggatttgatccagagcactttgatgaatgaagaggaatcacaatattgctcaggagaaatggacaaagttcagagaaacattaggttagtgctgctactaaattgcattatattgaaccgtttgtgaaagaggtatttacaccaagagtagccctgatgatgtggcatcaatatttgacgcatggcaagaaagatgacatctcggagttgagtagtcctgagtcatagcaggtcaacttgggaggggtccctagccctgcgcccaggttgacttcacaggaactccgggatggaagttcggaattcaataacttgaatctaacttactatctttcagtattttataccatgaagacatggagcaacctaatccaagccccaggagttgaaattacacgaacacacaactcagaagccaacctgggcatctagggtttcacccgacgcccaggttgacatttgggctttagtttccgcgaccgtcttagtgaaaaaaggtcaaaacatgcattgggacatcaactagacatcccacggacatgcttaatgcatcagaatcagagcaagtttatttttgacaactcggggccccgagcacccagctcttaggttaacgtaatcagtcaatactcgacacattcctgttggaaattattttacctacggatct

SEQ ID NO: 400636 - DNA, 918 bp, Cannabis indica
aacatgtaccaaatcatgcctcttgaactttttcaggcctttaaaaatttcccttaaattatttgagattgttagattttaagaactttttgtctaatttcattcaatttactatttcagtgattgtttatgtactaaactatgctccccagactttgataactactaaatcatgtccctcaaactttgacatgtactaaatcatgccccctaaactttcatccatgttagacttttttttttactaaaattggacaaaaatccttaaatccaacaatctcaatagttcagggggacatttttaacgactttaaaaattcagggggcataatttggtacatgtcaaagttcaggggaaaaaaatcctaattagcctaaaaaaatataatctagtcataatacttgcaggtcacattataattatgatatatttaaaaaaaaaaattgagtgtgaagtattattttataccttttcttaaaaaaataagattaaagttgttatttaataaaatagaagatctgattattaatttttataaaatataaagtttaaagtagtatttaattatggtatttaaatcctattttatatgtccatttagtaattttttcataaaataaaaaggtttcgttttcaaaattcatcatctctcactacaagaaatatcacttttaccaacagttcgctattacgctggtaaaaagatcaaagttttaccagcgcacatttgcagtggctaaaatataacttttactagcgcatttacgcactgggaaaagtcattttcgccagcacttttcattttgtactaacaaaaattctaatacaaccattgatttgccaatcccttttgccaacacatcagaagtaaattctattttactaacacaataccaaacttttgccagcacaaaaat

SEQ ID NO: 400637 - DNA, 609 bp, Cannabis indica
aaaaagtgagccaccggttcaagtacaagatactatcattactgcctgaactattagacacctaacccgtaattgcaacgacccaattgcaagagcggagctatatcaactgagctatgtccccccgagccaagtggagcatgcatggagatgtcaaatgtttcttccattcttttccttggctcagttgggccatcctgatgatgcgtgtcataagccacaataaatttactatttttttaattccaattattttagtataatcgtaagtaagggtcgatcccacgaggactatgtttatttaattattcacaatttagtaacaagaattagaaaatggaggattttgattattagaataaaaatagcaaaataaaaataaaaataaaaagaacaaatttaaagtgagactacgatatgagaaactagttaaatgttattctccacccttaacagtcattcctaatttctattaaagaatataatttttagtttccaatcaaactattaatcccgcagataaagttgaagcagtcaattattccaatctccctattgtatgtaatcaaagtgaagcgctcaataattaactcttttacctaagcagta

SEQ ID NO: 400638 - DNA, 666 bp, Cannabis indica
attttttttaaaaaaatcttattggtcaccttctttagcaagtcaccaaattgccacctcatccgtttttagtacccattaatggatattatctattgagaaattatttatatatatatttatatgtgtaatttagatcaattttatgttttgcttagcatatttttttttgagtgtagcgtaatggtatttttacaatcaattaatagcttaatagcttaaaggtgctgggttcgaacccatgacctctccttttttcccatccctccttcaccactaagctagccttagtggcttttttgcttagtatgtttagagtgtctttgatgacactttttttttttaaaataaaaaagtgaaaatattttccaaaaacatgttttataaaactgttttcactttctaattttaaaatttttgaaaataaatcactttcaaaaattttttaaacattttttttcttaattaatattttgaactccgactctaacctggaccttgggacacagactttggccccaaccctagtcccggacttgggtcacgacctggccccagactcgaacctggacctgacttaaataaaatcaaaaaataaaaataaaaatgaaagttatagaacacacttttgttttccgttattaaaattaaaaaataaaaatggtt

SEQ ID NO: 400639 - DNA, 791 bp, Cannabis indica
gccatatttcataattgtatgcggcaactatagaaagaagaatgcaaatagatttaagcattgccacaagagagaaggtatcttcataattgatgccttctcactgagtgtagcctttggccacaagcctagctttaaaggtttctatattctcatcagcatttctcttcttcttgaaaatccacgtacaccctatgggtgtaatatcctcaactggagtttcatatacccaaaccttgttggtgcggatggagtccatctctgaatccatggcattgttccaattgtttgagtcaaggttacctattgcttctttgtaagtcaatggaccatccttgtctgtgtcaaaaacaagagcatgcgcttcatgtttgtagaggacaggttgtctcacaatcctcccactacaacgatgtaccgagatttccttttcaagaaatgtggtaatcgttgtcggtcgttcaactaatggtgataaaatattagttcagaaatctcatttcagatttcctcaataaccacttgactaagtggtttgtgacttttcatatagtcatgtttaaaaaaaaatagcatttattgaaataaatactttattgtcttgatgactatagaaataggaacctcgagtctcatctgaatatcctacaaatatacacacttcagtattaggagcaagcttcccacacttaggtttaagaacatgagcgggacaaccccaaatacgaaaaatgtttcaaactgggttttgtctcattccataattctattagagtattgcttatgctttt

SEQ ID NO: 400640 - DNA, 585 bp, Cannabis indica
gatggagtggggttttattgctaatgttctggagcataatggattcgacgaaaaggcttgcaagatcattatgaattgtgtaaagagtgtttcatactctgttctgtttaatggaagtcctctcagaaaattcttgccaaatcgagggttaaggcagggggaccctctatcccccttccttttcctactttgccaggaagtgttatcgaaactactttgcaaggccgaagctcagaggaagatccatggtattaagatctcgagaaacgctccgcccatttctcatttgatgtttgcggatgacactattctctttacaagagctaatgtgggaaatgcaagggagcttttgaagtgcctctccctctatgaggtctggtctgggcaagtctgtagcaaagaaaaatcaagtgttttattctcgaataacctccctcagaataaaaaatccgatctgttagcggctttggaaattgctcaagtccgggagaatgagagacatttggggaacccttttgtcttcaagcgtaggaagaaggaagattatcaagctttgaaagtcagtatgcagaaacgtcttgaagg

SEQ ID NO: 400641 - DNA, 546 bp, Cannabis indica
cgtgatgtgaggacaaatcaaatgagatgaaaaatcccacaaacaccgccggtaatgtctgaaactccaattccgattccacaaacacctcctcaaagccaacactacctgccctaaacctccaatcccttcccaaaattttcgtccccagttaactcacacaaccagaaaatgagagagagagagagagagatacctggttcagtgaagtgaagaggaagggaacaagtggagaacggctagtgcttcaccaagctaggttttgattttcctggtaaataaaacacgtcattttcagagatgttaattttcctattgtgtaaaggtaagggtaacccacggtaactaaatcaaataggtaaccaaatactttttttttcactcttaaattttttataaaataataatcatatttttacaagggttaatttcacaaatgcccaaaaacaacaaaaaaataataaaattacggttttacgaaattataaacatttttacgatttttttaattttatttacataaaatacggtcttttatgttaaaat

SEQ ID NO: 400642 - DNA, 811 bp, Cannabis indica
ggacttctcgcacaaatcccactccagtgggagtggggaacttcatggtaagaatatagatggatgtcacaatcttcatttcctttaggataggacagccaatcactgcattatatgctgagtactggtcgataacggccaagtcagccattgacttagtcacaacaggtgcggtgcctaatgtgcttgggagtttgatcattccctttaaagcaatggtgtccccggttaaatcgtagatactcgaaactactggtcgcagatccttctcttgtagtcccatttgcttaaaagcttgaaagttaaggagattcacagaacttctactgtccactaatatgcggtagacattgtctcttccaatgttagcgatgatgaccagtgcatcggcatgtgggtggtgaacccatctggcgtcgctttccatgaatgtgttatcatcacactcctttaatagtttttctggctgctcactcaaattgttcacattggtgagtggcctctctcttgcctcctcaacatattgttcttgtgattttctggagtctcctgcgatgtgaggccctccaatgatcgtcaatatattgtaaggagttctcgaaccactcgcattgtcattttcttccctgtcatccactcggggatgaccttcctcattttttcttgtacttgccaaatttcccttgcctgatcagttccttgatctcatcctgcaaaagccaatattccagagtagtatggccaatatccttgtgatacttacagaatttttttgggtctctcttgtaacggtttcccctgattgggggag

SEQ ID NO: 400643 - DNA, 758 bp, Cannabis indica
aaaaaattactacagttttttttttgggagtaaggaaacaatgaaaaaaaacactatataaaaaaaacaaaaaacaaacagcagtaaaaaaaaatgttttttttaattttttttctaaataattaaataaacaaagaaacaaataaataataataaaaaaataaactattttactaacctattgtagcgcaaaaacctcttcagcaacgacgccaaaaattgatgtcgcccaattagttacactgcgatcgttgtagtaaacgtgctttatgtcgtatccacaaggaggtaaattactactaaagattagtataaataaaaaatgatataaatgtgtgaagtaataataaaaacgatgatatgagaaagttgatcagataaagattttggtaaggtagaaatgtagttatgcaaatcttattctaataccgatattaattcgaaacacagttgcaattctaaactgttgctcctgattttgcccaaaatacgtagaccaaccggatgatgacacgtggatgggaaaggattagcatttaaatgaaacagctcagtcttctttaaacaaaggattatcttagacatgcctcccgaagaaggcatgtaagtctcatatactcccggagggcaagatggcaacaaagcatctccgggtggtgtcagatgccatctgaacagtcatctcgcattctaatgagataaattcctagtggattttcaccattaggcatacataatagtgttagatctcgaaagat

SEQ ID NO: 400644 - DNA, 832 bp, Cannabis indica
ataacatcaatctaactcaaaacaagcagaaaacaaccagaatacttgacattcaaacagacaaaaatgagtaaaaaattgaaacccactaatttgaaatgtaaaaaaataattaaataaacattaatcaatcacccatataatataaaaaaaatcttagattaaggaaaaaaaacttaaccaaagtattatacagataagagattctccaaggaagcggcatttcacacaaatgtcgttcctttttgttccaatgaggcaccatccaagactgcattttgaggttaatgctacagtgcacggcgtatatgtcgtgcactatagacacggcataagtttttttttaaaaaaaaaaattaatatttatatatatttatattattgattcatttattaaattaagaatttaattttgagaaattctacaatgcacctttttaaaagtattatattatttccctgacaaatttttttagtctaatatttttatagtcgtgcatattataattatttaagacatcttgttttgagaaattaagaacaatttaacacgccaaaaataatgtatttttttaaaagtggtacactgatgtactcttacctattttagcattcaagagatttttttaatctattattatttcacagtcgtgtgcattatagttatttaagttatcctgtaaaatttcgaaaaatcgaagaaatttaacacgtcgacaataaagtttaaactatctgttgcacgcgtcacttttttatttagaggggtacattgtggtgattttagttaattaatatgatatttttttttaattacattaaaaaataatat

SEQ ID NO: 400645 - DNA, 541 bp, Cannabis indica
actttccatccacagtgaaataaacgccaaactttttattttatttttgtttagagtgcttgagatatttaaactgtacactatgaatttttttatgcaaatattgattcaggtgttaatccgaacccgaccacagcaaacccgccatacctgacccaaaatctatcggactcgatcttccaaaaatagggtttgtttacaaattttaaacacccaaaatccaaaaacttgaacacgaccatccgaaaatccaaacatctgactcgttttcagccctaatggtaatggtaatgggttcgtgtgggtttctaacgggaggcgagattggttaattagggtctgtgtgttgggttttttaccctaaataacacccattttaatataatcagatttactaattaataaagattagaaatcgcattttatgttccatggtttacatgatttatttcatgattatatttaatgtataaattctattaagtccagaacatatataaatatgtatatatttgttcatgattatatcagcacagtggaa

SEQ ID NO: 400646 - DNA, 629 bp, Cannabis indica
tccaagagaagaaaatacaactgtagacgcattagctcgattggcaagcagcaatgtaagggacaaggcaaacctggttcctatccagttcctcgaagagcctagcatcactggcatggaagaaatcaaaatgattgatacatccccaaactagacgacaccaatcgcagcctacctcaactctggggagctcccagataaccggaatgaagctcggaaaatgagaaggaaagctgcacggtatatcataggagagggagtcatgtacagaagaggattctcgatgccattgctcagatgtgtcactcaagacgaagctgcatgactcctatctgaagttgacgacggattctgtggaaatcatgccgctggacagagcttatccaagaaaattctaaggcaaggttacttctggccaacgatgattaaagatttgagagcttatgttaagaagtgcgacaaatgccagagattttcaaagataccaagagctctgcccaacgagttaagacagatgcaaagtccatggccctttgccatttggggaattgacctgatcggacaattacctaaaggtaaaggtggggtgcagtatgcagtggtagcggttgattactttactaaatgga

SEQ ID NO: 400647 - DNA, 721 bp, Cannabis indica
tcaacgaggcttgtgacatgaacaactactggatcgtatgctggacctaatccattgagcagatgcatgatgagatcactttaatcaatcggatgaccagctgtagaaaatgtatcaccaagaaccttaaccttgtcgaagtaatctgaaatggataggttccctttctaaatcatggagagttgagatttaatttgtagaagccgtgctttcgactgagaagcaaatcgttgttccagggctctctagagggtatgagaggagagatgattagcaagagatccaagaatggattctgccattgatgatctaagccagctgaggagaagctaatcctttcttttctaggcgatgaattcttgattgagggcactagtgaccaatctttcaggaggagcaactccggtgaacagcagatcgtcaaggccatggccaatcacagtgggaacaacctgtgatttccaggcgaggtaattggatcgatcgagttttatagtgagacaagagtttagggaattctggaaaggattccagttttgtgggggaaggacattgccggagctttgcccctgagtttgagtagaatttgaggatccatatgagacttgtgtcaatggcttcctgataccatgtatgaacctatcaatactaagcagacagcaaaaaacaatgaagacaaagtctctaaggcttgtaaaggttaagccaaagagaagaacca

SEQ ID NO: 400648 - DNA, 737 bp, Cannabis indica
caaaaacttaataaaattagaaaaattaaagatgaaagattaggaaataaaattacatgcataggttgccacatagacaattttgtgtattcttttaaacataataaaattagaaaaaattagagatgaaagattaggaaataaaatcactgcacgtaaacaattttattttatgtatttatatatatagatacatagattattgttctagtaattaaaaatttggtacaatacacaattttttttttatgtgtatatagcaaataaatgtatagttattattttattatatattcattcacatagtaggataggatggtgtgtattaatttttttttattttttagtatgcattataaataacttatattaataatttttgcatggtctctacatatatgtttcactatatattattattaatatatatttattatgcatgataatggtctctacaaattcataattgttaataaaattggaaaaagagaaaaatagataataggagataataagaagttaaacatgccacatcacctctcataaaccttcctatatatatatattgataataataaaaattatataatagtgtaagttatagaaggtgatataataatagagagtacataatagtgtaagttatagaaatgaaaagacacattaattatttgataatatataaaaaattataaataaatgagaaaagttgagaaattgagaaatcaaagaagagg

SEQ ID NO: 400649 - DNA, 519 bp, Cannabis indica
ttgacagcccatcaagaatatgtctacatatgaatgctttatgtaataggtccaccatatgaaaagccaagcatgcaatagacagatgttatctcactaaacaatatgggttatgaaaaggctaacatgcaacataacttatcacacctgtcattagatagttgacagttgttattttagttataggtaaataaataattacgaaaggttatttttgtaaatagactatgaaaagcccaaagagctatcctcttttttataaaggtttatagatttacattagcctacaaagtacccaaaaaattattgctaaaaaaacagtttaaaattttattttatttcttaaataatatctatttttaaaattttgctctaagtcccataaaaattagagatgaccctcttataacattgggacttcatggcttgtaacatagggtggtgagtttgaacaaaacctatgtaaaaaaaaaaagcatcgtagttgtagttatacatattaacttgtatctcatttta

SEQ ID NO: 400650 - DNA, 1314 bp, Cannabis indica
catgcaatgtgtatttatcgataactgtataagtgcaacgcatgcaatgtgtatttatcgatacaatgtcgatagtttattgataaaactttaacaaaaagaaatttggtgtacatattatcgacatgatgtcgatgttatgtcaatagcttatcgatatagtggtaattggaaagtgggaaaaattaattagcattaaatgtttaattgtacacgtgtctgacatgcaattttcttgttgggaatacttgttgggaatgtaggaaaaattaaataacattaaatgtgtaactgtacaagtgaaatgcatgcaatgtgtatttgtcgagtgaatatcaatacaatgtcgatagcttgtcgatagttgaaaaggtaagaaagattaattaccattaaatgtctaattgtacacgtgtctgacatgcaatgtgcattgtggagtctatatcgatagtgtgtcgatatgtattgccactcaaattgtagatgtttttatcgacataatatcgatgggatatcgataggatttcgatatttttatttttttgtattttttcctgcacttaccttttttgtttgaaattgcaggattgactgtgtttcttgttgtatcgtacgatggtgtttggtgtgttgagggttataattgggtttataaagccgaaggcagtttgacgttgacagtcagaactgacacaaccctacaacaaatgtgccaaattttatatgaagagttggagattgatcctttggcgtatgatttaaaattggagatttgttccttgtacatgaagggacaaatggttccaccagaggttattaagaaagaacgccaactaagaatgttcttagagatgagggcaacaatgtcaaacacataatttatgccattattcgtgactaaggtgagaaaagttgggaatacggatgctacgccgcctactaatcatctccctcggagtgtggtaggatcttttgttcccgaaatagatgtgattggtgtgaatgaggaagttccgaccaatgtagatcaacaacaagaagcaataggatatgatcaatttgaggagttcaatactaccttctacaataatgatcctattgtagatttgaatatgaacgatgaacatgatttggcagtcgatgaagccgtagcggtaccttccttgaggttagagtgtgtactgagcaaccatggtacacagcgagaacgataaccccataatgaaaatcgcaatacacctggaactagcaatagtcgacaaggcagaaccgagaacatgctcctctcgtcatgcaaccttctcaacgttc

SEQ ID NO: 400651 - DNA, 559 bp, Cannabis indica
ttaaaatatggaaaaaaaaaaagcaataaataaaatttgtaataataagttccgctggaaaagtcatcagcatcgaaaaagttgtcgaaaaagtcaccgaaaaagttagtgtcgccagaaaaatcaccagaaaagtcaccgtcatcagaaatcactgaaaaagtcactagaagtatatgtctcagatgtaactaaaaatagaactgattctataacataatgaataaaaataaataactcaaaccgattataattgaaatataaccggttctgtaacataatgaataaaaataaataatacaaataactcaaaccagttataattaaaatagaaccggttctataacattgttataatgaataaaaataaataacacgaaataactcaaaccggttataactaaaatagaaccggttatataacataataaatacaaacaagtaacacgcaataactcaaaccgattacaattaaaaaacaaagagaaaatcaattcctaaaacactgaaacataaattaaaaacaaactaagttccacaacaaaatacatcataacac

SEQ ID NO: 400652 - DNA, 522 bp, Cannabis indica
gttgatgccttattttcaagctcatcctattcaggtgtataccgaccaaccactacgacaaatactacaaaagccagatgcctctggacggttactcaagtaggcggtagaattgggtcagtacgaaatcaacttccaaccccgaatagctattaaaggccaagccttagccgactttgtggtagaatgcacaggcaaaaaagaaagcataccagaaagcaatcctgagctagtaccacagccaagtaatattgaagacaaactgacctggaaactacatgtggatgggtcggcaacagatcaattatctggtgcaggaattgccctagtcacacctgggggggcaacacctgcacgctccagtcaagttcggattcaaggcctccaaaaacgaagccgaatacgaggccctaatcattggacttaagctagccaaggaaatgaaggctgaacacattgagatctgcagtgattcacagctggtggtaaatcatgtatccggcgaatacgaggctcggggag

SEQ ID NO: 400653 - DNA, 538 bp, Cannabis indica
accgcacattaagaaaactgtaaatgtcatctcgggagggtcagacctgggaaggaattcagtacgagcttcgatggcccttgcccgacgggtccaatcagtaagggctatgacgtcaatcgacagcaatggccctgacgtgctcttatcatttaaccgaggggaagcctccgaattagaacacccccacgacgacgctcttgtcatcaccctagacgttgctcatgttcgaatgaaaaacatgcttgtcgacactgggagctctgccaacattctgtccgccggggttctgaaagaaatggaaatcaaagacttaaaagcccaggacacccaggtcacactagtaggatcctcgggtgaaagcgctgttgctcgaagtttcgtccaactacccgtctacgcgaacggagtcaacaaattagtaaaatttttaattgtcgattgcccgtcggcctacaacaccatcctcggcaggccgtggattcatgcaatgaaagcggtcgcgtcgtcctaccatcaagtaattaagttcccctgt

SEQ ID NO: 400654 - DNA, 1127 bp, Cannabis indica
actataaaatttacattaaactaaagtataatagttatatttcataaatataataattaatcgaatttaacactttgaaatttaacttcaaaaatttattttgtttaacgtctcttttatacatatatttttttatgtaacaaattaattttgtaacacactatataaacatattttttctaacttaattgtactataaacctttttatatgcatctataaaaatatttttgaacttattaacaaagtataacttatacatgttttttctaatgaacttgtactataaacttttttatatgcatctctaaaaatatttttaaaaatataataaagtgataagtatgtatatattgtttttttttaaaaaaaaaaatatattgttgttaccctatatattatattatttttctaactatataatatgaaatttatagatttaaatagtatactacaatacatattttagaatttacaaaatttatattaaattttaattccaatatgcacacactaataaattcaaaaaaattataactaattggacaagattgagatattcaattttaatcatccatggcaaaagaatgtgaatgtaagagtactttatttataggttagaaatacaatacacacatcatttgcaaaccatgtgggacttttgttaaaaaaaaaaaatcacaaaattatactaaattcaataattttaataaaatagatatatttatacattttatattttaaaaaaagttaataatgttatacttatatgtatataaaattatacaccacccaaaataatttcataaacttattattttattctgcccaatatttggtattaagaatgtgagaatatcacaatctaatttatttttttctaacttttatcttatatgataagcacatgatacagttataataaataatatcatgtaaatgattttaattttctttagtatcttgaacttattaacaaagtaaaacttacacatattttttctaacgaacttaattgtactataaacttttttatatgcgtctccaaaaatatttttaaaaatataataaaagtgataagtatgtatatagtgttttcaaaaaatatatattgttgttacactatat

SEQ ID NO: 400655 - DNA, 732 bp, Cannabis indica
gccctgctagaaccacatagacagaatagaactagacaaagctcctataggggccacgtaccaggctatagctaaggcagagttccttataagaaccaagtcatgttgagccttaagttgaacattcaactataatagactcaccattaagcttcatatagagtttctaaggaaaccacgtatgaggctacggttgtatatgcctacagagctaaactcttaccaaagtcacgagaggacacaaaactggctacccactttgaactaagcccatgccagccaaggttctcaagccttcaaagggtcgaccaagttcccatggctcagccaagaactggccagggtcaccaaacccaggcatgagcaggcaagctttatagggtaaaaccctaaagttggcaaactcatatgattaagccttagggtcggccaggtctcaagaagacctcctaggctagccaaggtatgttttgaatcccaatgtgtgtttttctttcaaaactcaaatatgtgcctcgtattctttatgacttaaagagtccagaatcataacgaaggccaaaatcaaatcttttctatcaaaaagtcacacattacacattccaaaattatcatgaggatcaatatacagaagagattacaaactaaaaatgaatcaaaaagtttccaaaaaagcttgaaacttgctaatggtaggtacaaagaagagatacccaagaagagaagatgaga

SEQ ID NO: 400656 - DNA, 927 bp, Cannabis indica
gtgttgcgaacttgtgtgatggatttcaaaggctcttggagcaagtacctgccactgatagaatttttcgtataacattagctatcagagtactatagggatggccctctacgggatgttgtatggcaggaagtgcagatctcctattcattgggatgaaatagattaaatgaaaatacctaggtccggaatcagtgcaatggactaatgaagccgtagaaaagattaaagccagaatgcttgcctctcagagtaggcaaaatatttatgcagatccaaagtgcagaaatgtagaatcttaggtaggggatcatttgtttctatgggtgtctccgatggaggggatcagacatttcagaagaaaaaaaaaagggcaagttatgccctaggtttacatggtctttcaagattctcaagaaggtcagacttgtagcatatcgtttggccttacctctagcgcttttagtagatcacaacgtgtttcaagttcttatattatggaaatacgtttcagatcctacttatgtgctaagttataagaaccttgaactacagtaagatttattgtacaaagaacaactagttcagatctttcatagataagataatgtctttcggaataagaccgtagctttaatcaaggtaatctagagaaatagtaaggtggaggaacccacctgagagttagagtccaacaagaggacttagtatccagagttgtttagattagattttgagaacgaaatccttttaacgggtggataattgtaaagaccgcttaattttaatatgggtattagcaaataattagggtttaattatgaaactagaatattaattatgatttgtcattttatggagattaattagattcagggtgtaacgccctaatctataggaacgtcatgtgtgtgattttataaacta

SEQ ID NO: 400657 - DNA, 530 bp, Cannabis indica
gtgcataattttaaacgacaccatgatagtatcgaaaaatcaatcgaccgagtataaaagtattttttgtgtcagagataacttgtggcagcacaacttcaaatcggttggccataaccttagaaacaatcttgtagaccacattacacaaagaaattgaccttagatctctcatctttacgggattcttattttttggaataagaacaatattggcgtcgttaataccaattagaaactcacccaaagagaaaacctgttgtaccaacttcaccacatctgcccccacaatatgtcaaatattttgataaaatcctagacttatcccgtcaggtaggggtgtacgttggtcagtttggtcggtttatggtacattttattcaacccaatgtaaagatcgggttataaaaatctaagtgcaacacgttcaattaagaaaacaataaaatagtgactcgcccaataaaattggtcgggttaacccgtccaaaccgaccactaatatttttttttaatttttgttatttttt

SEQ ID NO: 400658 - DNA, 630 bp, Cannabis indica
taacgttaacgaactaaaagtcgaggacagatttagtacttgtcaaagttcagggagaaaaattactaattagcctaatttataataatcttgaatgtgaaaactaggttgccagttaccatatggttttgaatctctattaatttcttcactctaaatttatggcattcccttagaatctatcacaatatttctatatttaatattagaattattttaatattagtacaaaattatttaaattgattttgcattatcttatatgattataaattatatgtgataagagtctgtgaagaataattagcatttttaccttctgaattttcgacattacttgattttgctctttaaaatatacgacttgttaaaaattctttctaaaataatgctgttacataattatgcctcttttgttataattcatttattttaccgtgtaaaaaattagcatttttaccctctgaattttgaccaatacaaaattttgtccccttttgttgagaaaatttattttaaaaattataatattttagtaattgtgaaaaaaaataataataataagtattaaaaaacttgataaatattaaatttattacaaaatataaattttacttaaaaaaaattaaa

SEQ ID NO: 400659 - DNA, 1046 bp, Cannabis indica
ctaattaggagctatagctacctttctgtttatatatatattgcaattaaaaaaaaattgtttgggataaaacattacacaaaaatcgaacttgtgaattattacttagtttgatatgagatgagagtactaaatttggctggaattgtaataaaatataataaattgatctattaattatttgcatatatatatatagattatatacatacatgtatatgtatatataaatatgaatttggatatagatcacttaatttttttctagttttaaaaaaaatacataattaataagttttagtttaaaaaaaatacataattaataagtattttttaaaaaaattacagttaattaataagtgtataaagcttaggggtgttcattagatcacatccaatatttttagggctatccagatccaattatatattagatgttagattttagcatctgatctgatccaattaatttcaatcatccaatcgatccaacatctaatggatgttggattggatgggttctagctatccgttggatgtatttcatatatatttattagtttaatttagatttatttaatattttagacctagtattttttagatcggattagatccatccaatctaaaaaaaaaagagtaaaattttgatgttaatttttatatatacatatatgtaaaatctaattactcatacaaactaaataaaaatactaatttgttcgattggatgttggatgtattggatttttggacacctcatccaacatctgatccgatccaattggatattcaaaaataacattcaattcgatccgatcacaattagatatccgatgtttagcggtcggttgtaattggatcgatcggttgtcattggattggatgatttatgcacacccattaaagcttttattattactattaagctaattagtaatttttccccttaaactttgacatgtactaaatcgtgccccctgaacttttttggccgttaaaaattcaccccgaacttgagattgttaaatttaaggacttttgtc

SEQ ID NO: 400660 - DNA, 1228 bp, Cannabis indica
tttacgcattttctgtttagtacaagccatcatcctgtggctggacgagaagattgaaataaaatgtccgtcgcttgaagagggcggactagaacaaagacgagggtgatcctcatgcaagagttgaagcaagttctggtcgattcggtgttcgcttctccaaaactcacctgggttcatctacaaaagacaacacgcgagatgagtgtttggtcgggatatcgaatagtaaacatgcaaatatgccgacaaggagtactcaacagattaaagaatagaaatattcgacgaaaagtcaaaactcaaaagcttgaaattttcgagagttagggaaaaaatttcatgaagctttgaataagcaagatgaaagacagacattgtgcagtcagaaagcaagcatcatgaatggtgaagtcgcataaatcattgcaagggaaaatcgcaaagtttctgaacctagggctttctacgtatcttctacagcaaagttaaagtcgcattcagaaagtaaatgtgcaaagtaaaagtaaaagaaatcgagaacttactcaaggatcgacgactggattcagtctacacaaagctgaacaaacagtttttgtaaaaaaaattcaacaaacttgaagctaaaacctctccttttcgctctaaacttgcttaacaaagaaggttggtgaaaataattttgtgaacaatgattagccgtatttataggcaaaaaacgaaaaaggggtcatcatttcaaaaaccctcaaacgccttggttccccccaaaagtgaatattggaaatcaaaagcaatcaagtgtaaccttcaaacgtggtgagagaaaatcagattttgaagcattaattgcatcagagcatttattagctgaaaactgaagagacactgacacgtgtcacccatccaaatgcaaagatagctcaaatgaagtctacacgcaacttcggaagtcccgtacagacttgggggcaaatgttatcacaatttttgcactcagacgtggcatcacacgatggtgacacgtggaatcgactctgggtacctgctcgcaaaacacaggccgaacagggcacctcgtacattcgctcggacgaagtcttctagaccgagcagtaagcaatccgcgcagcatgccaacacttagcaaatttagattttccatcgtgagtcatcaaggaaatccctataactttaggatcggattacagagatatggcaagct

SEQ ID NO: 400661 - DNA, 898 bp, Cannabis indica
cgtaaaggaatttttaccagcgcgtagatgaaatgcgccggtaaaaggcgagaaatggcgtcgacaaagatgaatcgccggtgtaaaaggatacccttatccgctatgaacctgctttgataagcttttgccgacgcaatatagcgctggtaaaaaggttcgtcccaatcctcagattggcgccaaaagttttaccggtgctatagatgcgtcggtaaaagtggtataaaaccctaaaattaaacgcaccgtttacattaatacttttgcaagcgcactattgcgccagcaaaagcattctcacctaccaaaatttttcacacgggaattttttccacaaatttattgtaggcagtcaagattcccaccaaaaatttagtcaattttattggcgcaaaagtgcgccggcaaaaacctaaatgtgggaacgtcctcgccccatttggcggttcattttggattcccacaaaaattaagttacttttaccggcgcacctatgcgccggtaaaaaccttaaatacgtggaaacgtcctcacgacttttggcggttcattttggatctttcaccggcgcatatttaataatacgccggtattgtctaccttttgtcggtgcagtaacgcgccggcaaaagtaaatgccgaatcaatataaaaatttaggaatttatttattctcataacttttaccggcgcaattgaccaattgcgccagtaaaagtaggttttcttgtagtgactttcgctcacatggtgttggacatggcatcattcttggaggcaacagacttagctcgagaataagtgtaagccatcttcagactagtctacatagagaaaaaacgttagaatctgagccaagtaaagaaggattaaaggaaactgtcaggaaagact

SEQ ID NO: 400662 - DNA, 726 bp, Cannabis indica
agggcccacgtgtcaatctcatcctaagagtttttttggtgaggataataggacatctttttagataaggtttgtggttagtttattaagtttttttatggttaatattatttaggctaattaggatttttgttttaaaattttgacctgaattaaattatgcccttgaatttggatttaagacttttgttcaatttagtaaagaaagtctaacatagggaacatgatttagtacatatcaaagttcgagaagcatgatttattaaatatcaaaatatggagagcataatttagtatataaataatcactaaaatagtaaaattgaatgaaagtagacaaaaatccttaaatctaacaatttcaatagttcaagaggcataatttaatacatgttaaagttttaagggcgaaaattctaattaacttattatttattgtaataggactaaattcagagacataatttgatacatgttaaagtgaatttgttaaatgatataataaattttgtatttttttaaaatgatataaatagggctttgggagtttagttttcgattgattttttttttatataaaattaatttgaaagcaattcttaacacaaacctatgcaaaaaatgaaattaatttccccaccaaaagttacagcaaaccagaaaaaattttcaactattgagctaaaaccagaaaaagttaaaaagtaaagaaaaaaaaaaaaaaaa

SEQ ID NO: 400663 - DNA, 912 bp, Cannabis indica
aagcatgcaataaattccagattctatccttaatatccgcaaaatgttttttatcttgcttggagtaggctgggaggcctaaatatttttcatgacattcactaattggcataccaagaatgttactgaaatagtgttgaacatggtcaggagtattagtagagaaggacataaccgatttgtcttcgttaagcaactgtcctgaggcacgatgatagatgtctaatgctcttttaattgcaacacaaagcttgtcattggcttgacaaaaaagcaagctatcatctgcaaataaaaggtgtgaaactgatggtgcacttcgggcaacagctaagcctttgaggcgtccaatggattcctcatattgtaagagacgtgagagaccttcagagcatattaagaataagtacggagataatggatcaccttgacggagccccctctagggaataatcgagccagttactattccatttatgagaaatgaaaaagaagtagagtgtaaacacgtcatgataagagaaatccatctaatgttgaagcccattttccccataaccgcagcaatgtatgaccattcaacacgatcgaagactttactcatgtccaattttaaagctgcatatcccttagagcctctccttctgtgctttaagctatgaatcatttcaaaagctactaagacattatttgtaatcagtctatgtggaaggaaagcactttgagtctctaagatgacatggtgaagcacattcttaagccaaagaacaatgcacttggaaaccaacttgtaaacaacattgcacaaactaataggcctaaaatccttcatagtctttggctttttgacctttggaattaaagtaattagggtcttattaaaggcagcagggttagtgttgggttttatgc

SEQ ID NO: 400664 - DNA, 1238 bp, Cannabis indica
gaccggggtcgggtctttggtcccaatcccaatcctaggtctcgattctggttctaatttttagtttgggtccccaatctaggtctggtcctaggtccaggtctgagtctccaatctcagtccgagtcctgggtctgggtcttggtccatgtccgtgtctgggttcaggttcgcgtcccgagtctcgatccgagttttgaattgggtccgcatctcgattcgggtctgggtctaaggtcctagtctgattccagttcccaaactcaaacccagactcatacttggacctaggtctggggtacgggtctaggtctaggtcagagtctaggtatgggtcccaaatccaaacactgactacgggtcaggtccaagccccgagtccagatctggatcacaatctcgggtcccagtttagttccacttcgggtcccaggtccttggtcccggtccatgtcctaggttagggtctgggtctagggtcagttcttgggtctcggtcccaattctgatgcccgtgtcccggtccatgtcctaggttagggtttgagtcccagttcggtttccaatctcggtctaggtcaggatctgggtttgagtcttggtccaagtttaagtctaagtcctgtgttcggatctgggtctgggttccgaggcacaagtcatggtctgggtcctaggtcccgatctgggtccatgttcgggtttgggtcctagtcctaattttgatttcgattcagtgtctgagttcgagtttgggtccggacctggttggggtatgagtcatggtttgagtctaggtccgagtctgggtcttggtctgggcctgggttcgggtccaggttcgagttttggtcttaggtgcaggtccaggtctgggtctgggtcagggtctcagtatggatctaggtcccgagtttcgatcccgacctgggtctgggtctgggttctagtctaggttcgtatccggatcctatctaggtccaagtctatgtcttggatcgggtcccaggtctaggtccaggtccagctctcgctcccagtctgggtacacgatcgtgtttaggctcgagttttggtctcgctttgggtttggggctaggtccgagttcggttctaggtttgggtccgggtcctggtcacagtcctagtcttgttaaagggtcctggttttgcagttcttgttcaggttccagttccgtctctcgggtctgggtcctggtccgggttcgggttcgggt

SEQ ID NO: 400665 - DNA, 1282 bp, Cannabis indica
gggccaagcggtagacggctagaccctatctaaccgttctttaggtggagttatacctaataaccccatttaaactaacagttctgtccaacccaccagccaaaccaatcaaacactgaggccacctagtgcttcagtattcaatagattgggtgtagcccatgatcccaagaatgatttgaacagaagaagaggtctggataaacaatatgttcaaccgaccactcagctaggcatccgcattcacgacccatctctaagagatcctgacgtgacacaggtgggtcaagaggctgaaccaattcacccatttgtgaaagcatatttagatgaactaaaaaatatgtttcaaggcctaacctacccaaaactaattgatcttgagctgcactgagcatgtcgatcacctttcacctccgagatcgatgtcgttgagctacccctaaagttcaagatggtgacctggaagatgtacacagggaaagggaatcccttgtcacatcttaaatattttgagatgcaaatggatctgcaaggactacagggtgatgtgcggtgtagggtattccctaccacacttttagaaactgcacaacagtggtatttcaagcaaccaccaaggagattcaattcatggaaagctttttccgcagaattccattcgaagttctcctcttctcgtcaactcccattacatgtagaagacctgatcaaagtaaaacaaagaccatgagagcccctcagagcctacataagtaggttcataacataagctacgaaagaagcaagattaactgaagaggggaggctggccgccatactagggggcatcgaggtacttggagaactgtggaaggacattaaaatatgtggcgtcgtggggtctatggcagagtttctggactgggcagatgggtttatcaagctcgaagaggccattcagcgagtagatgtcgagcctaagctgggccaaccacacatcccctcggcacgagcacccgctcagagcccacaataccctagtagcttaaatcagagcagaaaaagatccaataacaatggcaggcaaggcaacaggaaaaagggaaaattcatgggcaaagccgaacacacccctagagaaaatgcctccaagtttactgccttctctatcctaactgacgacctagagacgatctacacggcaatccagtctatggtcccgtacaaaaaacatgctcagtgagaagcgtaagtagagagacacgtccaagttttgccattttcatggagactatggcca

SEQ ID NO: 400666 - DNA, 722 bp, Cannabis indica
aacctcatatttgttctatcattttaaatatatcgcaaaatattgaaaaaaactggtaaaccagaagaaagaaacgcaaaaaacaagagaggtcatgagagaagacgacgacgaggccttgtgaccggggttctgggtctgtgtgttcgacggtaggagttttgggtcggggttaatgccggagaatgagagagagaagttcttttgaaatgtaagggtattttttagaggaaaagatattaaaagtatgtatatactatttttaattgagtggtatattaaaactaaatattttatatttaagcatacttaactaaattttcctataataatatctcgttacacaatttttgcaattttttataaatttagcttaaaaaaatgaattaacattatgttttgtttaaattttataattttgctttaatacaaaaaaaagaatgtattttatacttagattaataggtaataaaaaaataaataaaaaagtgatttattgtgatataaaatttcatccatgtaatattttattttaaatttaaattatagaataattatcttttttaccccctgtacttatgacactatactattataccccttaatctattcagcttgttacaaatagtccttgtataattttatatgcatacatttagtccttctgtttattttgtttaaaaatactgtttgtattgatgatgtggtattataacaaagga

SEQ ID NO: 400667 - DNA, 1245 bp, Cannabis indica
ccaatcaattacagttagccacccataactaaattagaaagactcatttcctgaattctcaactgataacaattaatcagagatcattccttgatctcgaagtttcatttctgtatttagtagaagtcttaaaatatttttaaacacatcaaaagacatacattcctcaagtatattctctattttattgataattccttggcatgaactaccatgacaacttatagtgagtcccccgttgatgatgctaattcatcaaacgtatacttttcccatcattaccactaaggttttactccctagttcatacgccaacataccattgctcactttcaatcatcacatctttctacttggttaacccctctataacttattttacactcaactatatagctcgttatttaataaacaacctactttgcagtccaacattcaccaaccacttgaatacatgcccattaaattgcatcccagtttatatgctttttccattctgggtgagcatacctttttatcattgcttaataagacaatcttttcttgaaatttcaatagtcacctcgtataccaaattgaacatctggtcaaatataaaagcattctccatcattaccatatcaccatgagcaattcaagaatcttctttacctcagtgataccactactctccctaatgttcggttatttgataccatttgaacgttcctgcttcaagcctccattggcccttactcccatagaatggtggctcttatacacgagtatgtcactttggatgtttcatggaatgatgattgaccctttaggtcaacttgagtgtgcccaatgtgctttgttttgactcacatgtttcttgggaaaacttccaaggaagtcacccttcctgaatgaaatcactctaggtcaaggacactcaactatggagttctttcgtgatggctaccaaaagaaatatacgcctttttaatataggtagccccaatcaatccattcaactcccttacatctatgtaatcccattcctacatagtctcaaaatccaattcctaactgtagctgtttgattcataccccttttgatctcatttttaaatagattaacccacataattgtctcctttaattgacctagaattccaagcaatactcataaattgtccaacatttgctaacactagatcacttttggacaaaaagattcttttctctaaatcaattaaatggatgcctccattggctact

SEQ ID NO: 400668 - DNA, 546 bp, Cannabis indica
gatctccgactgcaaatcagaccattgcttagctaaaacctcatgatgttccctgaacttgcaaagcttgacattaagcatctcgacactttggagacctctctgttgagccacaaaagataagagagatgcatgtgagaagtaaagtcagaggaagatgtgtaagtgaaaaagggaaatatacaaaagaaagggaaagaagaagagaaattaaaaactaacccactggataaggtcgtaactccttgtcacaagactttcgaagctacccttgtttattaggtctcagtcactttgttcaaaagacttgtaatgatggcatttgttggtagcatgcagcgagcaaatctacgagccttctgtgctagtataaataggcaaggggcaagaaggctctagcagtgccatctcgggatgagaactagaaaacttaacttgattaacggacccaaatgcttgttcatcagtgctcacaacaactagagcagttgagttgtcaagagacttttctagctcgatgctaagttgggtcgaggctcatttttt

SEQ ID NO: 400669 - DNA, 907 bp, Cannabis indica
ttacactattgtatagttactttagttagttgattctactctctatttgttactattcgtttttgtagtttttttttttgagtaagtttcaattaatgtttacattaatttactagaaatactacaagaatgtctacttttgccagcacattttttgtgctaggcaaaaaaatagtattgcaatggtaaaaatagaatttacttgcgatgtgttgacaaaagagaattgtcaaatcaatgttggtattggaacttttgtcagcagaaaatgaaaagcgctggcaaaaatgatttttcccagagcgtaaatgcgctggtaaaaattagattttagccactacaaatgtacgctggtaaaattttgacctctttgccagcgcaatttgcaaaatgcgctggtaacttttacctgcgcaatagcgaactgtgctggtaaaattgacatttcttgtagtgaaagaatcaacatgccatgcggtctctcaaaaatcgttccttaaagcactcacaataggctctttaaaaaagaattttttttaaaaaaatttttagctaaatttgataacaaaacagatgtgcctagcacccttaaaacgtgtcgccttgcgattggctaacaatactctctaaaagctattatattaaactatatgggacccgatacttaattagaccaatagcgatattgacatgtaggagggtgtttggcaccactggtgccttttagtatttctcttatattatatatgtataataaagatgcactcaaatcaatccaacttactctacatgtagagcatgaatagttcattctctaaacttattttaaaaatatataaatagtatttttttttatgtatattgtatatatgttcaaaaattattattttaatagtgtagaaaataa

SEQ ID NO: 400670 - DNA, 679 bp, Cannabis indica
caaatgacacaatgatttatgctgagattgttgaaaggctctaagagccgagtgtgcagtggaatttcatcaggagccctgagagactctaagcgttggtggaaccattactcttcctactttaggatatggtagggatggtggttatcccactgctaatcaaaagagaaaaactttcctaacatctagaggttcaggatagaacaataggttttgagggaaccaaggcagacatggacgacagggttattcataccctgagtacccctcactgtaagaaatatcgtcttggaaagtgcaattgaaaaacatgattccagtgtggcatagttgggcattttaagaaagattgacctcaggcgaagaaggaagagtagaagcaagaagcaaaactcgtacctgctcgggtgtttgctattactcaagctgatgctgcaaccaatctatctatgatgacaggtcagcttcttgtccacaactcctattttactgtactgtttgactctggggctacacactcatatttggcgtctagagtaatcaatcagttgggtaagccttgtgatttcattgagagagggtttggaaccctattgcctaatggggaatcagttatctccaaagggcaggttaggtctatgccaattagggtggaaagggagttgagtgttgacttagt

SEQ ID NO: 400671 - DNA, 613 bp, Cannabis indica
ttcatttattggtcggaaatgtgtttgttaccgtagtaacttacatcaaagctattatcctgatctgttctgatctttagcttaacatgaacaaaacaaattgcggaaaataaaaaattgtactttcaatggtggtcatccgtcctgagtacatgaaaattttatccaaatcgttgggcgtggtccgcccataaggccattcacttaagagcaaatgttcttttatttcgtacttgatatggtcatccgacctgctacttctattggtagtattttcttaaatgttccccgttccaataacttgtactagaacgagttacattttttcatcatacttacccaacttatatgcccctaattctagaacttcgaccacttgatatggtccttcgaagtttggtccgagcacacctacctaactatctttggtgttcaaaaatactcgtcttacgactatatctcccacaaagaatttctatggtttcacttgtttttaaaataccgagctactttttgctgatgggctattagttttaagtttgctgcagtttgcttttcttcaatttcatcaagtgattctacaaggagtacatgattggcctcttggctatat

SEQ ID NO: 400672 - DNA, 799 bp, Cannabis indica
gttacgatttaggttgctccgtgagttgcaccgtatattccgtataaaaaaaaaattggacatacagatcatggcctcccctttcatcattacaatttagggtataaatttctcattttcataatgtattaaaattaatccccttaattgaatatttcatatagaaacattctattactgacatttttatataaattctcattttcagtttcaaaaatagtgacacccttttacagttgtcatgccaaattcacttttagtgagatcacattccaccgacaccacaaaataaaatgtaaaaacttttataatattagttaaatttttttttctattataggaaaaaaaaaaaaaaggttctaaatagtcgtttaaaaataactacaccatcaattacaaggccattttattaaaattagaaaatattttttttcatttattttattagaaaaataaatgcaatttctttattagttaagtttttaatatttgtcacaaaatcgtcatctttctatatatcttaaaaataaaaaattattctaatttcaatagtattattattttttttttttttgtaatacacacatcaaattattatattttaaattatatcgctgaataaatataaaaaaatatataaataaaaaggttataaaagttagataacatgatcgcgcaaagccaacttagtttcctagttaaatataggaaaattacatagtatactaacttttgccattttttttacaaaaatattgtcaggcggtattttttacttttttactgtattttttttata

SEQ ID NO: 400673 - DNA, 760 bp, Cannabis indica
ttcatatcccatgtgggactctttccaactcacacacactaagacacttatatattttgttaaaacattcacaacatttccaacagtagctagctcatccaataacagcatctttagccatgtgtagccatttctccacagcagggctatgaaattgtttctcctcagcatcattaagcaatgcagtgacactcaaaagtgtaatctttgacttttcaagcaactcatcatatttctttccatatatgaaacctataaactcacgagaagctaattaattaatcaaacaaaacttgtagaaatgcacatagaaaagcttcccctactgccatatcttctctctctctagaatggaaatcaatggaaaaaatggaaagacataacaactccaactttgcaaggagaatcgtcaactattctatattttgactagtcaactttggaaggagactttatcaaagtattgatcataataatagtagaagtagttgaaagaaaacgcacataatgacaaaagaataaagtagcagtaggaggagcaaatactaaaatttgtgctttcttcattagtgttttgaactcaaatactaaaactaaaatttgtaagataagttcaatttatgattgcagagtgtaaaaatagttgttatataagattattttgttaataaatttttttgatgatgattcacataaaagtcccatgccttatgattcgattattgttatggagagtatatacaaagctcttcgttgattt

SEQ ID NO: 400674 - DNA, 334 bp, Cannabis indica
tttctattttcaattttattcatctgtatttattttcttagtagctagtaaatagttagttacaactagttaacaagttactaatttttattcatattcatgtattttttttactaactagttaatcattaataactagttagtaataaattaactagttagtaactatagttactcataaattacataactagtaagtgttggaaattattttaccaggatctagatttactaacaagtatgtttgattaacatcctaatatgaattctagacaatgaaaataaacacagtataaagtttagaaaactttacagtgggtgcagcggaataata

SEQ ID NO: 400675 - DNA, 447 bp, Cannabis indica
aagtgttctttcggagtaagcttgagaaagttccttgggtttatagtgaactctaagggcatcgatgctaacccaaaaaagataaaggcctcgatcgacatgaaattcccaactaaagttaaagacatccaaagcttgacaggtcaaatcgctgccttgagtagattcatctccaagtctaccgacaaatatgtccctatcttcaacatcctaaagggcaataaaaaaaattgaatggactgaggaatgcgagaatgtcttccaaactttaaagcaacaattatcccaacctccggtcctttcaaaacccctagacggtgaagggttaagcatatacatggtagtgattgaacatgcagtcaacgcagtcttagtaagggaggaagatgttggaaattattttaactttctaaaacgattaaataaacacatataaagttaagaaaa

SEQ ID NO: 400676 - DNA, 504 bp, Cannabis indica
ttgttcttttttttctccctaaatgttgtggtatttttaacacgcaagtatacgtatcgtttgaacaagtattactcacaaagagtgaggtcgatcccacaaggattgtagttaagtacgttaaaattaaactcttacttttatttggctgaataaaatttaagagaaaatttaaactaggaaacaataagaacaataaaaatcaggaagtaagtaaattaataggcaaattaacaatgaataaaagacagggctttcgatttcaattgtatctactgattatgacctaatataattatcttcctattaccaaattctatgcaataacaggtttactaaggtaatttatagtcttctcatatatataaacctcaattacatgcaaattttctactctcgtgataaattaaacatgtaacatgcattaaacagagaaaccctataagctatctaaaccatatatgtactctcatcctatatcgaaattcagttctattttactat

SEQ ID NO: 400677 - DNA, 603 bp, Cannabis indica
aggcattctgcagagggtttttaaatctattttattctctctcttcttctctttcttaaagttaatatgtgtgatttttcttccatgaacatgtgtagctaaacacttgattagggttagatggatgatgtttgacattgctttatggttttaatatgatttatttcccccctaatttatatgtattctatttcattcgtgctaaattacttttagttgcctgtccatcaattagctgttttatgatttcgatgcgagatctgagaagtgagtgtcaattatgatatagcaaaatagaactgaattttgatataggacgagagtacctgtatggtttagatagcttatacggcttctgtgtgtaatgcctgttgcatgttaaatttataacgagagtagaaagtttgcatgtaattgagatttatacatatgagaagactaaattaccttagtaaacctgctattgcatagacattgataataggacgataatcatattaagccatattcaatagatacaattgaaatcaaagcccttatttttattaattgttaatttccttaaattgttttgcctttcactatttttattattttctagtt

SEQ ID NO: 400678 - DNA, 746 bp, Cannabis indica
tttcaatatggcattaattatcaccatttctcttaccatcttcttcatcctttctagtactgttaaaacagtaggagcacaatatacaagtgtagatcttggtgggcctatcagtaagagaggcattataattactgttgtaatttggtgcctttttttatttgtagtagtaccccttatttatttcgtatataagtattggatttattataaggagataatatccaaaacagcattattcgaagtgggcaaatatccatgcgaagggcataccatatttgtaaaccaatgctcaatatgtgcttatgaatttcagaatggtgagaaagtaagaatcaccaaatatggtcattgttttcacaataaatgcactcgggacatgactaaaggaaagctcacccaatgccctatatgtagaatgtcattatttacttagacaattttcattttaatgaataattaaaaagagtgtgtagtgtgtttttttttataatcatttatgtatatgtgtgtaatattaattatatcaataaataataattattattattatttgtctcctaacaatctcattaattattgctatttttttttttaattagtaatatgatccatgtgtagtttttttatttttaataaaaacaacactttattaagaaatatcatccaaaactaaggattgaacataataaagtgtattcaaagagtattcaaacaaaaacttagaataattaagagttcatgat

SEQ ID NO: 400679 - DNA, 594 bp, Cannabis indica
ttccggtggagttacattgtgtgctgtgcacctatggggacgagtcgattttccatgtttgctcgttcatgttggctctgatctgcgttaggtgttggccattccacagcaaacaattttttgactggtttatggaagtgttggcagtgggcaatattgggttggtggaagaagccgtcatggttggttgggcaatttggaaggctcggaatgatatgctttggaatggtagaagttgtagtgctgctgatgttatttggctggctcgtaccactcttcgacaatggatgagtactcactctaagcgactgggttctgtgtccctagcttccaatcgcactgacataagagattactagtccaaaccggctgccggtcagttaaaaattaatgtcgatggggcggttttggaagacactagtgagataggtacaggttttgtagcacgcgattgtgatggtcgagtaatgtatgcgttttcaactatttcttctgttagttactgacccgaaattgcaaaaaattctaagtgtcaaagaagcacttagttggataaagaggaataacaagtcaaaatgttattttagagatgga

SEQ ID NO: 400680 - DNA, 561 bp, Cannabis indica
caagaacattttgggaaagaaaccctttacgatttctatatctcgattgatcttctaatggaacccatgcagggatatgggtgatgtcgcccaattagttacactgcggtcgcggtagtaaacgggctatatgtcgtatccacagggaggaaaaatacactcaaaaggacagttagtaattttacgagaataaaatatgaaccttgaatgtgatgagaatattgagaaaatgatttttaaaaattaaacaagtaattaaaatgagaagtgatcagaaaatgattatggaagacacaagctttgtacatgcaattatattttcctaataaaattgattctttaacctcaactataattctacaccattaattatagttggaaaatgtgtatgattaagctcactagaaaaatatgttctctaattaaattaatactacttctaaaaatactatcatattatataatttaaatcgacaaaataccaccggcagaatgcagtaaaaatcatataatataataaacactctaataattaatagcctaacttacataagaaaagca

SEQ ID NO: 400681 - DNA, 501 bp, Cannabis indica
tgtttgttttctagttttattcttcagttacagagttgtgttctgtagctacaaaatatctattttaatattatatttattatttcacatttaattaattgattaattaaataataaattagtaatattaatattcaaaatttcaaactacttttagaaaaagaaaaataatctagtgcaacatcatagaaataactaattttttattatataacattttaatttaatcgctaaatatttattttgtgactaatacacaaagtagcaaatagaaaatatttttacaatgaataatatgcaattgggaggcatgaataccatgtatgaaaaaatatattagtttaaacacgatacaatactataaattagcaggacatcacatgaaaattaagatagagttaagtacgacacgagataaaaaaatatatgcttaagcacaacatgactgttggattaaaatcctattgtgggtacatatatataatgtatatgctattataa

SEQ ID NO: 400682 - DNA, 825 bp, Cannabis indica
acccaacctaattgcataagacatagggagttaatcatgccgaaagcagaaaatctatttctaatgatgtcatcaatcttcagaaaacgaaaaaagtgtgatgttgccgtcatttatccacacacccaaatcagttagggcgtaagcaaaaagtttggggtccagaattcaaattattgttgagtcaactacatttagctagctcgatgattttcttgcctttggcaaaattctactataaagagtgcgaaacaataagaaaaaagagttagttgctcaaggagttgaccgatcaatgggttattcattgaatcaactgaactttctctctttctctccatgaattcaaattatagttttcctgtgttttctctctctctaaagtagaatctatactgacttaagcatcaaagagtttttttgcaaaataaaccctaggacttccgtcaatccaaacaaagataaccggaggaaaaagcaaaggaagtgttagcaaaatattcagagggaatcgagctgaaccaaacaatattcaccttccaaatttggtaagtattcattagtaaatttttcaccttcaacaatggctaaattcattgttatttttttacctcaacttttaacattataccatagattaatttttttttctctatatcaattaaatattatatttttaatatatttatttcaattaaaatatttaagttaaaaagattgataaaataataaaatattattttaaagcataaatagttatagctaaatatagctaagctactatagtaaaggtaaacaaagataaaataaaggagctaatgtact

SEQ ID NO: 400683 - DNA, 655 bp, Cannabis indica
tacaagcctgtccatatcttcatataaaatgtaagtaatcaattagtaaaactaatataatcttttttttttactaactttgatctgtactaaaatcatgtcccttaaactttgaaggttgttaaaaataccccctaaactaaactattgaaattgttggatttaaggactttgtctaatttcattcaattttactattttagtgattatttatttactaaactatgctcccagactttgatatatattaattaatcctgcctctcaaactttaaaatatactagatcatgcccctaaactttcatccatgttagatttttttattaaaattagacaaaagtacttaaatcaaccaattttaatagttcagtggacaattttaacgactttaaaagttcaggggacaaaaatttataattgacttttttttttttaataattttttgagtaatttgcagcataaatacttaaatttaattcccagttgcaaataaatatctaaatttaatttttggcgataataatacttaagttatatttttggaacactactgtaggtatctaactgttaaaatattatgtcattatttacgtgtcattttcttattggtatattttagttattttttttatttaatgactttagaccaatta

SEQ ID NO: 400684 - DNA, 522 bp, Cannabis indica
taactcccttgagggtgaattttaacaatgatagcttgagtgtgagacatgacttgatagagcattaaattagcttcgaaatgcaagttgaatcacatcaataaaatcaatattgagtgagttatggctattttactgaacgcagtacatgacccagtgcccaagttaacatccagcacccaggttgacatcccagcgcctaggttgacatatgacgtcaacctggatgctacataagtgtaaaaacgtccaaggaatgtactttaagatgcctaagtgatattttgacatcacttaacttgtttatatgttctggcaaagctggtcaccagttcgtagagatgttgttctacggaaatgagagactcaaaactcttaatttccaagtgagctgaaaatgagaaatgcaaagttatgaatttaacttctttgactcatagatctttgttattgtgaaaatctagatggactgtcgaaacgacatcataattggataagcagaacccagctcaccaggccatt

SEQ ID NO: 400685 - DNA, 1484 bp, Cannabis indica
ctatctaagtcaatattacctagttgatctttggtcaacagatcttaatcttaatatggttagattcgatctcaattgtgttatttatgttctttgagttgttcgttaaagatcgaccaacccaatacttacatcttggaaacatggtagttcaattgagtgagagcgctaatcatagatatggaatctatagcttctataaatatttagaagcgaaacggtaatttccttcgagcttagtttaatagagataaatgattgagatctcattttagtacttacattaatttactgaaatatcatttataggtagctaagtgttttaaggataaaatacattaaagggtagaacggtaaatttatccatactcgatgtagatcatctacaaaggatctttgactatctatctatctatatctatatataaaggaaaaacttaagagagtaatgtcgcatcttctccttcttaaattttattttctctaatttttagtgttttaaaatatatatatataatatttacttataacaataataattattaatcaataattataattaattcatagtgtccttttattttctaaactatcattattattttaaaaaaaggaatatttatatttattaataacaataattaattaaattataattttaattataattaaatgatggtgtctcttcaattttttttaactatcaacattgttattattagtagaaagtatcttttcaatttttataattattaccattattattattattattaaaaaatataattactcattgtaacagaaagaaaaatattaataaattatacattaataaatttaatggtgatattaaatattatttatggatgtccaaatcactaaattaataaataaatagggattcaccccattagaataaacaactgataaattctaattcagtttctctttatctcttcatcttcttcttcttttgttcttatatattttatattattttatcacgttatcaacacaagtctctgcccaagccccaagataaatatcttgttaaagttcttgaatattgttttaagatcacgatacactaaatatatttatatatatatactaatctgattaaaataattttaaaaaccttttttttctttttatttttatttaacatctatatattgtatgtgtatgtatatattcttattcttataggtttgttattaatttcatatatatatatatatatattatgctctcatcatttataataaagtagaacctctattcaagaatacacttgagactaagcaaattatattctaattgagaggttataactaaatagagttacactaagaaaaaaaaattaaaaataaccaaaaataatcaatgtaacaataataacaaataaataaattattaatactatattataatagaattgttttaaagtaaatataatgttaatacatatattacaatttgga

SEQ ID NO: 400686 - DNA, 562 bp, Cannabis indica
atgaaggttagatcaaatggggtaggaaaaatcaagcctaaggtcgtaatcactattgggcatcaggactttaatttttgccattttcttttattaaataaaacaatcttatttttttttcaaaatttataatttaaaattaattttatctatttaataattataggtgaattactcaaagtcttccatttttttcagtaaaaattgccctgttgatacatgtgctacactttgcaatcttatgggaatggtggaagctggagacaatagtttttatcttggtttaccgtgcatcttgggccgtaataagaaagctatacttggcttcttacaagagaagatgaagaagaaaatatttacttgggagagtcgtttcttgtcaaaagcgggtaaagaggtgttgttgaaatcggttgcccaggccttgccttgttatgctatgagtgtgttcttgcttacaaaaggagatttgctctaatcttgaaggaatgatggctaaattttggtggaaatctcaatcaaactcaggctcgaagggtgtgagctggataagttggaagcg

SEQ ID NO: 400687 - DNA, 678 bp, Cannabis indica
gagagagagagagaataccaaacgaatatgagagattggtatgctagagaagatgaagttgcttttcactgagaaatgaatctgagagatcgatttgccggagaacacgaagttgctcttcaccgagaaatccaggccaaatcggccagagaatcggcaaagatggctgaacgggaaaatgaagaagtttgggtgagagggagagtactggctaacaccgtccaaaataatacaatacaaccttatacactatttttattcagcatagaataatacaggataaattgtattaaaaattagggttgtaatatctattacaaacaatacaagatcccacccaaacatgatagtcttataatttaatacaatacagagcccttatacagcgatccaaacgaatcctcaaaacaaacaaggctcccttgttagcaataactcattccaaacacacactttccttccatttttataaatataaagaatgcagtaaataaatattataagtaaatagaataaaaatatatttatttcaaaaagaaaatgttataaggaaaaagaataaaaatatttctctaaaaaataaatatatctttatatattaaaagtgcctatctaacgacatttcttggtttaacattcttggtttaacagaatatacttaaaaataaaagaatattc

SEQ ID NO: 400688 - DNA, 829 bp, Cannabis indica
aggcagtaagtaagtttttctatcaatggataccatccttcagctttaacgagtcttttgttgatgcaatagatcggatgttggacgctgttttcttccctgatcagcatgacactccaacatgtactgtaatagctaggtatattcctaattcttctctgtccagaggttttgagattacaggaggttttgcaagttatctttttagttgttgaaaggcattctggcattcctctgtccattcacacacttgtctgttgatattgaaacaaatctactgagtgcggctatctgaccaattaagctttggacttcatttgtttttgttggcgatttcatatccaggagggcttgaattttctctgaattggattcgataccttaggcattgacaataaaaccaagaaacttacccgagccaactccaaaggagcactttaaggatgagtttcatgttgtattttctaaggattttgaagcatttgtccaagtcatctatatgcccccaaccttcttggatttgtcgagcatgtcatccatgtatacctccatatttcgttcgatatgatctttgaacatttttttttaccaatctttggtaggtagcttcaacgttctttagagcaaatgacatgaccttataacagtacagacccatatctgtttggaaacttgtatgttcttggtgtcgtggatgcattctgatttgattataccctgaatacacgtccataaagcttaggatctcgtgcccagctgttgcatccacgagctgatctattcttggaagtggaaagtagtctttggggcatgccttgttgaggttggt

SEQ ID NO: 400689 - DNA, 694 bp, Cannabis indica
agacaatttatagtactgactaccgtatatatgtagtaatattaatgtagtatactcatctaccacttacgccaaaagaggcatccaataatatatatatatatatatatatatttatataatttgttttaaaattccttcctcaactagaattttatatgtaatataaatataatctaggtgatgaactcgctgaatttaataatattggcttcgataccatttcttgcaaggaaacgcaattcatacctaattaatcttattgtttacacatatatgacacacatcacaatcattaatatataaattaaagagaaccatgtacaaacagcttttgaaaagcttaattagttttcgtcaagatagataggtttaactcaatccaatgaaatgtttgctaaaggaatatgtttagaaatattaatctctataattctattatttttctcctttattacaagaggtcgtttatattatatgtgcatatattatttcattgcatattacgtacactaatatgcgataaatttttatttatcttgtgatggaagaatataattgaataagtaataataaacatatatgaaatttggtatatatctattctatataaagtgtgcctatataactaaatttcttggtttatgagaaatttatgagtgactttttatttatatttaataaaataataaaa

SEQ ID NO: 400690 - DNA, 723 bp, Cannabis indica
cagatatgggtctgtattgctatgaggtcataccgtttggtctcaaaaattctggagctacataccaaagattggtaaataagatgtttcaagaccagatcggacgaaacatggaagtgtacgtggatgacatgctcgccaaatccaggaaggctgaggggcacacatacgacctggacgaatgcttcaaagtcctcaggaagtataacatgaaactcaatcccttaaattgttccttgagagtcagctcaggtatgtttctaggctttattgtcaacgcccgaggaattaaagctaatctagagaagattcaagtcctcctagatatgaaatcctcaacaagaaccaaggaagtttaaagtttgactggtcgaattacctcactcagtagatttttttcgaaatcaacaaacaagtgtgttccgttcttcaacatcttgtgaggaaataagttatttgagtgcacagaggaatgtgaaaaagcttttcaagagctaaaaatgcaactcgcaaaacctactgtactctcgaaacctttggatggagaagaacttcgcatatacttggttgtcatggagcatactgttagtgcaagattcaatatccggtctattatatcagtaaaagactcattgaggccgaaggctgatatccattgataaaaaaactcacttactgcctgattctagtaacaagaaagctaaggccctacttttaagctca

SEQ ID NO: 400691 - DNA, 508 bp, Cannabis indica
tttgggtgtttccacccgctcctgatcctcattagttgaaaattgatctttgagtgactcgctccccttaaggagggagtgctcttctttggccgaccatggggactactggaggagtctgactggccatggggactcctatgttgggttttgtgccctaaataaaactcatttcaatataattatatttactaattaataaaagatcaaaaattgcttttttgttgcatggttcacatgatttatttcatgattatatttaatgtataaattctattaagtccataacatatgtaaatatgtatatatttgttcatgattatagtgtcgtcagcacagtagagtataatcatgattatatgttcaaaagttttattctcatgatttgtcagttcactggagttaggctggcatgataatcagcgataaggtatacttacaccttggataagtgttatgtcatttccagggcattgacaaagtttaccagtatcggatgtatggacta

SEQ ID NO: 400692 - DNA, 1417 bp, Cannabis indica
tatagctatcgttacccaaaagcaaagtaaaatagtactcaaagttcaaactaattagaactaccaacccaaaataaacccaaaaaaaaaaaagaatagatacgaaaacaaaataaaaaaaaaaaaaaaaaaagaaaaaaaagaaacaaaatttatacagctcatcgagtatataattaaaatacagaatagttaaaaaaaaatatattttttaatttttacaccataaaatattttttttatttttaccaagattgacatggcaacacgtatttattgacgaactaaaatatacataacaacccacataaaaactaatgaaacaatctaaaccataaaatttttttaaaaaaaattaacaaaataattccaaaaacaattaaaacaaaagcaaacccattccaaagtttaacagaaagtcaaatgaaaaaaagttttgtataaaataccacaaattttgatgggtgcttcgaggttcaacaaattagactgatttaagaaaatttctttagaagctgcacatagctgacggatctctaactcagataactgaacctgcttcccgggttggcctcgtacttcaagtaggcgattgattatgtcatcgagaaccgattggtccattatatgggtcttgctgataaacatgaccaaaaaaattaacggctttatttgacgtgactgtaacaaaagagcaaagaagaagaagagggtagaaagaaaaacatgcctttgagtagagcctgggactgggttctgtagtagagtaagggatgattgagattgaaagagaggtggcttgtttcgttgtcgtttgccacaaaaagttgtcgtttttgctttggaaatgaagcgtttggtgctgaaaaagagaaagtgggcgttactcgctattctttcctttaaggcttttttatgcttttgcttaacttatctaagtttttcttttctttggatcaaaagggtttgaaatgagcaaaaccaaataccaaaaattttgtttttatttcatactttccttaacacaattatatttttttttaaggaagtcactacctccttcttcttttttctcgatgatgtcacatttattaacagtgccaatgtgtagagtcttccttgttgaaaagtcaaatatgttcaaaagcaaaactaataaaaatttaaataacaacgataatagtaaaataacaacgacaacaaaagtagggtcttcatccaatttaatccacattattttgctcatagtgtatttgatatgcactaagtgcagattttattttttgaatctaatctagtctgcacaataactcaagttcaatccaatcaaatccgtaaaagtacaaatttagattagttactttgtaatattaaattatatttataaaaaatattttttttcacataaccagcaaca

SEQ ID NO: 400693 - DNA, 1359 bp, Cannabis indica
tgagtgtgccaatgcactattttttgtgttttcggtattcagattgttttaagctttagttttttttcttctttttttgttatataatagtatataaaaaatttaaaataatttaatatggcgaaaaagattcaaacaattttattgtatacgtgattttattttttatttttatgcatataacataagttgtttaaatcatatatttgtattttaaattattctaaattttttaaaactttgtgaatatcttaaacaagtacgatatgtaaactttgaggagtaaaaaaacactttgtaaaaaaaaaaacacaatactatgaatgaatcataactccaaacaacgagcaatataatgtggtgacgtacattatgaagataagtatctagtttttatttgttttttaagaaagttatatgtgtatttacaatttattttattttatatgtaacatcttttacgaaatttttgtagtatacccctttcaaagagtgtataccattaataagatttatgttactttagtcacctgtattgagaaacaatataaaattttctctcaaatttaatactaatgagagaaggaaaaaagagccccttgcatgtgacctgggagtatttaattgatctaaatgcttcattaattggaaaaaaatacatttgatagatataattaaaccattgattataggtatatggacttgtctaattttgtctctacaactttgttggaaaagtttgttggcatgtcaaatcaattttattgagaagtgtaccaattagtgggtgtgcccaatatatgtgtcactatttgataaaaatgaggataacatatagttccaaaatgtttattccgcctttgtttaatgaagacttcaaatatattttccttgttctgtggaggtatggtgactcttgaaatggtagagaaaaatccaaaaaatattagggtttgaagagaattgcactaagcaagaagacattgatattattgtcaagtacctaagcctagccaatattagttattggagataattgcaacaagcctaaagacactagtcctattctcaagtgcctacatctacgcgacattaggacttgatgcgaaaaacaagttgactagaaaaactatatcactactacaaaaatgaattttctagacgtttttaaacactcgtttaaagtattcccgttggtttctataaccgtagtctatatgaccgtcgtaaaacgaacagaataggcgacgattcaaaaccgtcgctaatgtagatttctcaacggtttaaaaccgttgggaatataaaaaaaaaaagaagaaaaaaaatacagatttttctgtcattaatggcagaaaa

SEQ ID NO: 400694 - DNA, 644 bp, Cannabis indica
actttgggggatataatgaagctgggaagccgatatccgagtagggtgacgttttggtcgagggagaagactatgtcaccgaggagtttaccacggcggtcccccacagaggcaaagcgccttaggggtcagatgggtgtgcccttcatccaacataaccgagggctatttgagggacctggataaggctggatacctgtgcggacttgagtgttatctcccttccccaaatcaccgagaaactaacccaaagaaagggttctgtgcctggtcgggtgctcacactaagcaaggggcgatccttcctttgcactcgtacttcaaaagggttgcagattatttctgcctctgtccgacccagttcacacccaagggcatcaagtacttatcttccgtattagttctatacgccactcatggatggggtgtgccgtccccgcacgacatcaactagatttttgatttgaagtctacccttaagaagagcatgttggggtacttctacttctctcagctggactataagtggctgacgggcaacgtggatacggaggttagcaagattgggggttttattgacaagaactatttcgtggagggcatagattgtaacaccctaactagcataggcgtattacgtgatt

SEQ ID NO: 400695 - DNA, 537 bp, Cannabis indica
atgaatattatatatctgtcacagcctcaatacatattaaggtggttagacctaaagtattcaaactttaggaataatatgagtttggttttattactcattgagtgacacttttgttacagtatattttgtcatattttaaaattaaatgagatcctgaaatttgtaaactttatattttagttaaataagtaaaattgtgttattattaaaggtttttgtttcccacttcttttttaaaatattttggttagcgaaggctttcataattaagaaaaagcactgtaatgtccttaagttagtagccaatagttagtgatttttactaaagtttactaatatatatattagattgtactaataataatattacatcacactctttaatatttctcatatattaattattaatatatgtgatcaaaagtaaatttactatagcgtatatatatatatatatgtaaatttactatatactaggtgaatgtacgtgccgaaccacgtattgctagttttatttaagattttagtcttttt

SEQ ID NO: 400696 - DNA, 532 bp, Cannabis indica
atgtgcatatttgatgattgtttcgaaatcgtaatttacgttattaaatattttttgtttccttttgaaaatatttttcctagaaagcagacaaaaaattaataaatgtggcattttcaaaactcaatttggatttttatgaattagttatgattttttgaatttagataaaaaatatttgaaaccgagcaacacgtgtgcgcgccgatggggagactcactcggacacgaggccttcagacaaggccttgtccgaatttttccccttctgaccgaggtttgccccccaaataggttgcttgcagcctttccctcacccacatgcatcctcgtgtgcgcgcggggagtatgcaatcttgtttttgtgatatcttttgattcaaaaattatttttcatcgagacaaaattcaaattttagtagaattttgtgtagaatctgaattttcaaataaaaatctaattatcagaataaaataaattttttattaattttttaattaattaaaattagttttagatattagtagcctt

SEQ ID NO: 400697 - DNA, 605 bp, Cannabis indica
ttttttttttttttgcataaattacttttcaattatactctacgaatacatatttaaaaagaaaatatatttagaatattaaaaaaaataattatataaaaaatttactagaacaaagataaatttatatgtattaaaataatgatttgaattaacaaaaaataaagtaaaaataattcaaaaaactattaaaagtaaattttaatattgcattgtacataaaattttataagtgtaaataaaactttttcccataaaatggccctctctattatttgattttgcctccgcccctgtcatcgaccctggtccccgaacagccccaaccccttcctccccctctctcttttttgcttttctctttttcttccttttttcttccttttccttttctctgattttctatagtcgtttacaatttaaaataataaggaatgaaatcctaacaacatcttcaacgaaaagactactaagcaaccaactttgaagcatcaaaatagtataaagaatactaagtttctaacctaaatgaaccagtaacaaatcaaactcatcactgtctatcagccaaagatctcttaaaaaataagctaattaggattttt

SEQ ID NO: 400698 - DNA, 707 bp, Cannabis indica
acactagcagcaactacaacaactaaaatccctaaacatgcataatagcatagcttaaaacccaagaaatcaacaagaaggttcctaaggactataccttggcttggatcacctaagacttgttggaaagagcttaaattgctgaagaataatcccaaaccatagttggctctagggatttcgagagagagagaaggagagagttgagtttgagagagaaaatgagatttttgggtaattttctattatttgccaaataatgagataatattgatttacagcaactaattcagcttattatcaactaaaaatatgatttaatacctcccacaaaaggacaaaatacaattaataaattgacaattttttcccttaaacactaaaactcactaaaaagtcactaaggggtaatttgggaaattctaaaatcctgactattctcgacattcctaatgtctaactatatcgccccgctatactaaaatgctaacatgtgattcaactaaaccatacaccgcgttccaaagttgccagacactgaacgtgcaaaattatgaaatttctatatatgacatataaaatgcattgagaattcaaataaatcatcataaattagtaatttagaattattaaacaatttctgtaattaaaccctaattatttgctaattcccaaatttaagctaagcggtctttacaactatcccc

SEQ ID NO: 400699 - DNA, 578 bp, Cannabis indica
agagagagagagagattggatttatttttaggttttttaggttttagaaaatcattaaatggtaagggtattttaggtaaaatgaggagttattaaaataatattgtaaaaaaaaattaatcgggtatattttgtaatagggattcttattaagtataattataaaaggaatgctttttttttaaaaaaaaaaaaaaaataataataaaaaaaattgtgcaattttaatattgtagttagaacaaaaatattatctttatctgtatctttatatattaaaagtggctatctaacgacaattcttggtttaacgttttttttaacgccaagaacgatcctttttaattttttaacgggtcttttctaacgtcgttattgttggaaattattttaccaggatctagatttactaacaagtatgttggattaacaacctaatatgaattctaaaacaatgaaaataaacacatataaagttagaaaaccatacagtgggtgcagcggaatattatgactccttccgttcaaatctctaacccttgattcctttctgtagcaaagcatcaccaagatctgaa

SEQ ID NO: 400700 - DNA, 688 bp, Cannabis indica
gcatgctgtttagtaaaattagtgtacaaaatatcacgtaccgagtacaaaatatcacgtacagagtacattcatttttgtttcgtagtacattgttaagaataatttgttataaattatgaaattatgtgttggtatatattgagttttacgttggtgtattatttttatttttattattgtgtataaaaaaaattaattactatggaaattttgaccttataagattgaattttcttgggtaaaataatttatttgttcattaattataaatttgagatttgttgagataaataccttaaacacggcaaacataacatgaagtatataaatctagagtttttgaagcaataattagagtcataaaccttaaaacatcaatggttaaaaatagctagttatatatatgaatgaccatagtatgattcttgtgtggaggaaggcggtttcagaaaatacgcgttgggcaccgtcgataatcatggcctgatgagcgaaaaatgcgacaatgtcttgagttttatgggatctgctccccgttcggtccttcccttggatttcccgtaccctttgttctcacaactttggggtctttaataatgttggggttgttccgatatctttcaggttgtggcgtctctccttctggattggaactcatctcaaattcttccttgaacattagagt

SEQ ID NO: 400701 - DNA, 777 bp, Cannabis indica
gcacacctgccttctgtaaagttccgtgtgtgtctgttatgacttaacgattggaattagtattggtaggttggctgatctactgcatataaatagtctttgttgttttataaactaatcatctatcaaaacacatatttttggttagttgagtttcatcgtgagagtcagtgtagtatcttgcttttcttcttgttgtttttacaggtctgattgtatagtttgaagatggagatctatggcagaaagatcagagcctgaagatactgagttcagactgaagggagttcagtgtcatcctcatcatcagatctgaagggatttcaaattgaagaattgtcgaggacgaactcagttgctgcacaagggattgtgtacttgcgaccaagattattgattgttgttggtaattcattactaattgctgtaaagattgtattaaatttctaagagtgaactggatattgtaatacaaatcttttgagatttagtagatgagattaccctggttcggggaacccaaacactagtcagctgagatgtgttttcagtgctgatgaagcttgtaaatcattatgtgctttactgctttattctcaaattgagtcttgaatgcaagtgttgaaatcaatcaattcaaagataaacaactcggtaatttgagtcttgaaaattgacaagtagtactttcatattataaaattttaagaaatttataataattttagttacaataaatagagtttaaataatatattttacacgcttataaaataa

SEQ ID NO: 400702 - DNA, 870 bp, Cannabis indica
atttaaatattttgttgtactcgcaactatttttcttacacgtgtagtaatatttgaacattatttttaatattataaactattaagaattttttaaaaaatactactaatcttaaataattacaatacatatttaatttttttttataaatgccaaaataaataaataagtctttcaaaatatacttttttataaaaaaaaagtatatcagataaattttaatataagaaatatttaacttttttcaaacaaacttacctcaaaaaacaaaaaaaaaaatcaaacaaactaataaatatttaatttcgtaaaataaaattaaaaaacaattaaaaaaagtaaattacctgtaaaataaattacttttttgtatttcccaatgcattgatatttattgatttttgacacaacaattctaaaactaacagaaactttagagttaacatgtaataaataaaatggacacatgttagtgtttgattgtagggacaggaatggaatagggagtttgggacaggtgaattttattcttgtgaagatatccctctcgtatgaatccaaccaaacaaccaaatgacatcatcatagaaaacataataagatgaagagaaatgttaaaggcatcctatgtgttaatatcgctattggtccaattaagtatcggatcctatataatttaatataataatttttaaaatatcgctagtcaatcgtaacgcaacatgtcgagaatgtactagacaccactggtacctaatagcaatgctctaaaatgaaaatatattaaatgtttcgtagcatgcaataggaaaataaaaaaataataataataataaaaaaaacttcaattttatctccaaatatttttt

SEQ ID NO: 400703 - DNA, 529 bp, Cannabis indica
aaaaaaaaaaaaaaaaatcagtgcatgggggcatgacatactactggtcagctatagttcaagatcctatgtttaatttttaaataataaataaataaatatgcgtgcattatatactaaggcagccaattaattatgattgtacttgtgaaactttgaattaaaaattacctgattataatgttaatttatgttaacatgaaggagttaattgagtaaaaagaggagaaacctttttttatatagcttaggcaaaacgacataatcaattactgatgctgacatgtgtttgttagccataatgattatattatatagagttaattatgtatgtttaagcgtttacttttgcttaacaaaatattaacccaataatacaaattattttttgttaactaactcatcaatgattacacatagtaccacataaaaactatgtgtatttgttgaagaggaaactaaaaaatattagaatttgggttaacttttataaaaatattgttatacggaaattttttcaaaaatactg

SEQ ID NO: 400704 - DNA, 1070 bp, Cannabis indica
aaaggagagaaagatgaagcagggtaaggggattgggtcgaaatacgaggatttgggctggattgaggagagtcaacatggagaaattggtcaacagcttattgcagatcttgagcatcggatgtaggatggatacgaggaaagaactcctcaaaaggggtggagttggacagctaaaaagggttcttcttatgaggggatgagggggtagcacagaggatgtctttgtattccaagagaggagggtgagggaaattatcacagcgaaggaggtatttagagcatttgttataggtattgtcaacaaagccatagaaatagcagaaattcggaagatctcatatttgaaactgacccatcgtggcttagatatgcccctgaagcgtatggtcatacctctgcgaagaggcttagtgatgtcaagaagcacacgaatgcgtaggtaaggaccaaagttttccattaaggagagaggataaatttccaggagatcaccaatttcatcagcaatgaattgtgcaagttggggacttttacgtccaaatgggattcgatggacttggatccagaaggggacatatcgaatagattcaggagtaggggttggcgacacgtcagggtgagtgaagaccatcaaaaacttatcaaaatgccatggctgttcttcaagaacacgacacctatcaccatcacattggaaggaagccaagaatagcccagaatgatattcagagatttggcaaggaaaacggagagtccaagcttcggacatggctttttcaatccaagagggcttagcagatttgggagataaaagtttgaaaaacaagcaaaatgaatcagcatcagtagaagagtggatggaaatgttatcgaagtcgtggacgaggctgtcctcatcatcaagagcagttatggggttagggttgctggaggaggaagccattaaggtaggaaataggaaactaacaggatttttagtgggaaacaaaggtggtatgaatagagtaagggagagaacatataaataagcaaagataaaaaaaaccacagagaagagtacctggaga

SEQ ID NO: 400705 - DNA, 880 bp, Cannabis indica
atcaataggaaatagatcaggataaataaattctcggtactcattcatataaaagattcaccagtcaatgcacaagagttaccaaaaatgagtacaaaataatagactaaattgcaagctaattgacttttacaacaaaatatatttacagtccctggcagcggtgccaaaacttattgtgctaaatttatatacgcaaatgcccgtagtcacaaataagtaatacaatgataagtaacgagtatcttctccataaggtctgtagaaataaaatttctattgcaaaagctaattaccaagcaaaatgcccaaaaaccaaattggactgattaatgctttagctaaataaactagaaagaaagtaaattaactaaaaaatggttgcacaatgaaaataaaaatgaactgtaaactattaaaatgtgaaaggcctgaactactgaatccccttatgtttagcagaaactgtgcgttttgttgcagcaaaacgttagcaaaaccttagcaaaaatcccaggttaacaagaactccattaaagtgcataagacttttccaaattttatgctatcaatctttgaacctaatcaaacatattcttatgccaatcaagctcaagaatacaatttcaaagcatagttctcaaatgttacataaggacataacatattcctatgttatctctaatctaatctaacaagattaagaacttgtgttatctaagttaagtccattacatttaacctttccagaattaaatataactcaacatcaagttattggtggccaatcaataacaagaaattagcataaagcacacttgaatgaatatgagaatttttactaagtatttgcataagaaaattactaaactaaaacata

SEQ ID NO: 400706 - DNA, 1252 bp, Cannabis indica
gggcataaaacccaacaggcggaggtggacttcgccaagaaggacgcgaaagacgccagggcgaaacttggagctgttcgaacagagctgggtgaagccaacaagaagctttctaccagccagaataaaatagatgagctgactaaggacatcgaggtttctgaccagcttgaggagatcatcgagactttgtctactgaagtgaacaaccttcaggatgagcggacatctcttcgagcggtcatcctgcgggtggaggaaacgagaaaatctaaggagggggagcttacggccaaggtgacgagactgaaagagaaagttcatgccttagagacagccggccttgagcttttctatgacttctggcgggccaatcctcaggcaaactttgactacttgggggaagctaaggacatataccttgaattttgggcttcccaagtagcttatggtgaaactggggcggctgcttctacctccggccagaaagctgatgtacctcccattcaaacaacagatccttcagctcctgccggcccagaagacccgaaccaagagcctgggactccagctgtctaaacatttctcgtttttcttttgatttatatatcttattcggccacaaggccttttctaagacatcatgaccggccaaacggtctctaaacttggaattattttttattttttagacaacgggctgattgggcagcttttaatcctggtattgcgtgcctttgttgtctttaatgaatttaattctctgtttacattcatcgtgcaattgtgattgttttatttttaccaaatgctttgtacaggtataggtgcccccaagtgaccgagcagacgtatgactcttagtcacttgtcttttatttgttcggtgttcttgactaaaccttttgtacgcactgcatggtaaattagaaacatgctgatgatttcaactcaatttgaattttgaaataactatctttattcatttattgattgaaaatgtatttgttaccagagtaacttacatcagagctatttgatccaatatgatcttttaccttagcatgaaataaaacgaattgcagaaataagaaactgtactttaaatgggggtcacctgacctgagtactttgtttcttttgtcaaaacctttgggcatagtctgctcagtaggccattcgtagagcaaatgtttgtttagtacttagtggggtcatccgacctggtactttattggtagtatttccttaa

SEQ ID NO: 400707 - DNA, 993 bp, Cannabis indica
agcggaagcgtaccttaatcctttcatagtgatgatcttaattcattttgtagagatgatctttgtggtgattttgggtaatgatcttccaagaaaacaagacttagggttttctaattttctctcttgatgggagaagatgagaataaaattggctcttgtttcttggggaccactaccaatttatcatctcatagctaggttattaattttaagtatttctaatttagcccctcaataaattagaaatatcgcttagggtatctacacatttagtccatgacactttaacacccaatgacccacaattactaaaatgatcactttatttgggtcaaactttatatagcaatacacataaatacatatgagcccacattagagattttatttaacaatcttccacttgggctacatatattttcttatagtgtgtaaccttataagcgcttaaactttgctatcataattataagtattcaaaaacaattttcccccattgattatactaacattgattatacacattgtgtcttcagcacaatggaatataatcatgattatatgttcaaaagtttaagtctcataatttatcagttcactggatttagactaacatgataatcggcgatatggtatatacttacaccttggataagtgttatgtcctttccagagtattggcaatgtttaccagtatcagatgtatgaagtatacattgtattggaacgatattgatcttggataagatatcataaacttaccgttatatctttctaagtcaatatcattggttgatcttaggtctattgatcttaatcctgatatggttaggttcagcttagttgtattatttatgttcttcaagttgttcgtggaagctaacaaatgattttaggggatatttacatcttgggaacatggtagttcaattgagtgggagcgctgatcgtaaatatagaatctatagcttttataagtatttagaagtg

SEQ ID NO: 400708 - DNA, 575 bp, Cannabis indica
ttaattttaatattatatgagttaatatatttaaacaaaaatcttatacgattcttttttttttatctcttctaagtcatatttttcatgctgaaatgtgaaggttggtctttcctttatttcttctttttgttcatgaattgtgttcgcaacacaacagctactacatagtagtcttatggtttgaagttaatatatttatatataaggaggtgacttgtaataatttagatgatatatattcaatgttctttttgtttaatttcaagtcttgtatttatttatatgaaatatattagtcttggtattatatttgaattgggaggaacaaagaagggaagaagaaaataaaaatgaaagttttttttagatgaataaaagtgaaagttgaatcgaatagaaatttatttatttataaaatcatataatatttaaaaatatttaaaatcatataaaatatttaaatgaaggtaatctagtcataccataaattaaaaaagggtggaattaattattcccctccattatattaatttgaatagcatttttgaattaataaataaatttaaatacca

SEQ ID NO: 400709 - DNA, 994 bp, Cannabis indica
gcgggctcctactcctcctttgcaagggcttccacaagctaagaaaggcaaggagatgcttgcctgctacataaaccggttggttcctgatgttagtgagcaactgaccggtgttgacaacgactcttctttggagctgctgaagggaggagtcttgaaggaattcacaagggtaagtttttcgtgacagtttcctttaatcctctttacttggcttggattctaaagttttttctctgcacaggctggtctgaagttggcttacacattctcccgggctaagtctgctgcttccaggaatgcgactctgtccaacaccatgaggccggaggtggaattggccaggaaggaagctgatgacaccagggtggaacttggagctgttcggatggagctaggtgaagtcaacaagaagctttttactgctcagaagaaaataaccgagttgactaaggatcgaggcttctaaccgacttgaagagaccatgaagaccttatctgcagaagtgaacaaccttcaagatgaaagaacatccgttcgagcactccttcgtcggcttgaagaggagaagaagtttaaggaggaggagcttacggcggaggtgacgaggctgagagaaaaagtccatgccttagagatagccggtctcgagctcttttatgacttctggaaggctaaccctcaggccaactttgattacttgggtgaagccaaagatatgtatctcaagttctgtgcttcccaagtggtttatggtgaaactgaggcggttgcttctacctccggccaaaatactgatacacctcccattcaaacaacagatcctccagctcctactagcccagaagatccaaaccaagagcttgggactccagctatttaaatacttcttcttttatccttcttttttttatatatatcttattcggccataaggccttttttaagacatcatgaccggccaagcggtctttaaacttggaattatttttc

SEQ ID NO: 400710 - DNA, 524 bp, Cannabis indica
tgatctaacggtgattactcttatagtataaaattcaagagaaaacaaccacttcaccatttctgcctttcaaatctttgagtttttctgcaaaaatcattctcgacttctccataccttgcatgccctctctatcattgacttattttctgcgagtttcttcagatttaatcttcaacctcaggagttctcaaaatacgctgatgcactcatctcaatcccagtttcagaactcttccttgtgcaaaaatccacatctaaatagtaagtggtttatacctttctttttggaatttctttttcctgagttggtactcttatttttgtaattaattgcatcattgctcattttgtttggtttaagtaacttctatttagttttttggataatttctaaggtttaaaagagacaaaacttaggtttatttcattcataggcttctagtttgagtaaatttcttccaaaaattgggatcattattgttgatcgaggttttcagcaaccagttaaataatatataaga

SEQ ID NO: 400711 - DNA, 700 bp, Cannabis indica
cattatcgcacctctccctctgtgcattattgcacaacaacccatccattctccgaccaccccaaaaacccatccacagccaaaatacaagccaaaccaccaattgaataatcagggccggccctgagaatttatgggcctaaggaaaattttattttgggaccctttcaaaatatatataattttttttaaaaaagagtgttttgggattcgaacctatgacattgtataatatgtcatacaccttaaccaactaagctatgaatatttgttgtttcaatacacttaattttacttaaataaaagcctaataatttttttattttttaatttgggcccccgaaaggtgtgggccctaggcactggcctagcccacctatgcctagggccgaccctgtatatatatcaagtagatatgggaaaaacttatttatttgatcatgtacgtagaacacaaagtatgaggtttttatcacctcatgatcctcattttaattttaacgatgtacaaaaaccaacagaagaaaggaaaagaggaacactaatagaactaagggaagcagtgaataaaatgctaagaagtctccttaagggtaaaaaaaagtaagaggaaacaacattctgagaagcctgatccaaatcctgaggcggtggatgagtccacgagggacggttatactcggatcatttttctaatgat

SEQ ID NO: 400712 - DNA, 522 bp, Cannabis indica
tagtgttgccgaaaaactcaccggaaaagttaccgttaccgaaataattaccgaaaaattcattgtcgccgaaaaaaataccaaaaaagtcactgaaaaaataccataagtagatgtctcagatataaacaaaaataaaatcggttctgtaatataatgattaaaaataaataatacaaaataactcaaattggttataattgaaatataaccggttctgtaacataatgaataaaaataaataacacaaaataactcaaactagttataattaaaatagaaccagttctataatagcgtttttgtaatatcccgataagcctaatggtaaataattatggtttatatttatattatgtgttaatcaggtaagaagtgggattatgatcctactaatctatttcagcataaaatttaaattttattataagtgagtaaataagcgtagtttataaattacggagatttatatagcatgtgtgaatgtaatatgagttatatgtggaataaaaatattttaag

SEQ ID NO: 400713 - DNA, 529 bp, Cannabis indica
tcatcataaacccttcctgtgtgattggataaatttccatagatttattctctaccagtttcattaaatttactaaacaacctaacattatacccaaagattgagtttgtctgtcttgtagcttaaacaaaagaagccttcaggagcagcaagcctgaaatcattttacaaaattattttactaaaactgtaccatcaagagaaaatattaaaattccaaacgcacaaattgcaagaatattctgctatatgcgaatggggttgcttgatgtgttagaagttagaatgttgaaagcttaaataaacttttagggaaccttttctattatcccgatacatgtcatttccagtgtccacattcaaaacgtctgtcaggccaagcttttcaatctaagcccaataattagaggcccaacctgtaaataagaaaagggataatttcacaaatacacaaaaataataaaaaaactacaaatacaattttatagaattttaaatatttttaagaattttttaattttatttacag

SEQ ID NO: 400714 - DNA, 569 bp, Cannabis indica
aaaacttccaactccaatcaagtgccaccattttctccccaattttcttttatcttttttctgggcataagaaacccaacacttccaattcatcaacacatacacaatgaagaacagcaataataagctcctcagggaccacgcgcagggccaaaacagaagcaagcagaagtttgatcatcaggtatcatacctcctcctttacttgtatcaattgcttctaacattttcaccacttcatccatttctgggcgcttatctggatttccatcccagcatttgcgcataatattcacgaaagaacttgggcagcatcggggaacttccggtcgtagattctgcaaacaaaaccaaccaatgttacaaatgaataaacataaaaattaacagcttaaatgaaaaacagatgctataggttgagcaaactttcacttcagacaggttatagagaaatgagcattgcaagtaaacatgctataaggtaaatttcaaaatatcagtttagtttgtttgcatagtaaaagtgcattcattacttggaaatactagtactctagcaagaactttgt

SEQ ID NO: 400715 - DNA, 547 bp, Cannabis indica
ccttatcttttagccaactaagcgcctctttgataccgagagcttccaccacctccgctggataagtaccaccatgataattggctttaaaatcaacaagacaacccatagaatcacgagcaacaattccatagccatatgcgttttcttcctcaaacaaagctccatcaacatttaacttgactgtatgtagatcgggtttggtccaacgctcaatgttattatcattatgtaggagagacaatgataataagctagatttatgcagaacgccattggtcaagtgtacaccgtgctgaatttagaattaaagttggagaggaggatttcttttcccaaacaagcttattacgagacttccaaagtacccaacataacatgatagcacgacatgatatgtcatcactatacttctcaaaagtggactcaagccagtacccaacagttgaggaagcatcggattgcaaagtgaagtcgcactgcccccaacagctgagagcaaaggagcagtttagcagcacatgagcagcagtctcggttgcattat

SEQ ID NO: 400716 - DNA, 550 bp, Cannabis indica
taatctgtttgcaaatacagaggaaaacaagaactaataaacacaatatatatacctttatatcattggagtctctgtaaatgaaaagaataaaacccaacaagagtccactgcagagtccaattacaaaaccaagaagttccaagaaactgcttagaagccccatatcttctaatacaataatagttcagaaaaactaatgaaaaagaaaagaatataagtaaagaaagagagatagggaaactataatatgtaaggaaactattttcttgagaaactagaaaacaaaaccattgttattattattaaaaaaagaaaaataagaggaagaagaagaaaaaacagagcgccaaaatatgatggtatcggtaagggacaacgctacagcttgtcgtttacagttacgattcaattcaaatcagtgtacacatagctttgcctttgggcacgtgaaactacctctgcactttcctttttttttttcttgtatggatttcttcttaattacttatactattttttttttttggaaaggtttgattttatttat

SEQ ID NO: 400717 - DNA, 565 bp, Cannabis indica
ctcacccgagaattagctgagtcatatgtaggcgaacaagtgtagttcgacgagtgagcccccagagatgtgcaaaggcatgtccttcctcttcaggagctagagatatgatatagcatctccaaagggaggaggacatattcgaacaatcacctcacatttaatgcagcatgggaaaaacgtctaggaacgcctataagaggacatgttagacgacgtaagcctcgtttacgacgattacacgatattcaaaggagctagtggcagctccattatgaagaatcacatcaatcatggaaggataaagaattaatcttacctaatccctatgatacctacgacataggttatgcatcccctattttgtacctcttgggaacttatgctcatacattacgggcactcaaagacaagttatcccttttgaactattcctaccactctctataaatacccccgaggaaaataggaaaagggggatggatcgaacagaaagaaaaaaaaaaactacaccaagaatattctgtgtataaaaactctcattaataacaaagactcgtggact

SEQ ID NO: 400718 - DNA, 734 bp, Cannabis indica
tacctgcatggaagaaataagagaggtaagcaacctgacaaatctacaaacacattcaagttaacagtacccaatggtaccttccaagtaaaagacaatatacaaggccaatcatcgaccaagtaccgtcttaagtacccttactactaagacatatagtaagtcctaagttgtataattgactataatggactcactagcaagccttatatagagtttccaagagaaactacacataaggccacagttgtatatgcctccaaggccatcacaagactctaactgaggtcaaaagagggagaaaaactggctgcccacttaaagccttggccttggctaaccagggttctaggcattagtggtcggccaaaccccaagacccagtctagtggcaggccaggaaccctaattctaggcataggctagccagcttacggggtacaaccccttggccgacagaccccttgatagcctcccttggccagccagacctcaaacaaggcctccttggtcggctagaatctacatggattagaactcgtgtttttcaagaacttaaacatgtttttcgtgttctttgtgactcaaagagccaagaatcaaaacgaatgttagattcaggtctttttttgtcgcgcgcattgggcctccttgtccgagggtctggtgtgcacggtgcacccatctcgacttagtttcaacccgaaacttccaaaattcataactttctcaat

SEQ ID NO: 400719 - DNA, 635 bp, Cannabis indica
tgctaaatattttgcatagaaaacgacaattggctaaaaggaataaaatataggaataacaataaaaagggaaatagaacaaaattaaattaaaatatataaaaaaaaattaataaaaaaattattatatttttatcatcttgaatggttattttattttttataaaataaatagtttaagtgaaatgatattttaatactttaaaatacaaataattaaaaaaataaaaattatttcatttctattttattatctttaactaaatccggcctaaataaactaataagtatatttcatacactatattatattgtatattgtataatattaaattgaattccttaatattattttcatatgttttaaggtaatttgtggtcaaactccttatatttttatgtttgttacggtttaacctccttactcgaaaaattatagcatgtttgttacggtttaacctccttactcggaaaaattatagctatactctctaaactcgacaatcgttttgctctgtagtccttccgtccattttgatctgctaagtgcaaagtggactggcatagtgtacacaaatgtacacatggaaaattttcattggcccacttaatattaataatttatatattaaaaa

SEQ ID NO: 400720 - DNA, 1122 bp, Cannabis indica
ctttacacacaatcttcaagaaaaatggtgatatcgatgttcaacaaattcgatcaagcgataatcttgcagacttattcacgaagtcatttaccaacatcaacttttgagagatggttcacagattggaatgcgtcgattaaaggatctccacgaatgccaaaatgaggggagtaatttcatactgcactcttttttccttgaccgagttttgtcccactgggttttctcggcaaggtttttaatgaggcagttattatggacatccaagggggagtgttataaatagtattaattatgtggatgtccaaatcttttatttattaccattaatgtggaggtgtttttttttcttgatgaaatatatcaactaattaaatgtctttattcccatcaagctatcacctaagtgagaagtctccactcttgcttggcaagcaaagctcagtttttttttttttaaaaatgaaatatcaactttattgaaatttatcattcatcatacaagagagcatgaagctcattaggaatgtcattcctataaatgctacgatcagagaaaattaaagtccctaaagtcacgaaaaccacccccaccattgactttatgagcagacaacttgtcccacttcatcaaatgaatatcttttttttgatgaagatctccaccaaaattgactaatagatcgctcaatatcattacaaatttcaacaggattgagaaagacattcatggtgtaagcaaggagagcttgaatcactgacttaatgagaacttccttacccgctcttgagaggaacttgttgtcccaagtttgaatctttttatgcactttgtccttcaagtagccgaagacaacatttttatttctaccaacagtacttggtagtcctaaatatttacgatgctccgacgcctcctgaatacccattcgagtacatatagcatgtcttgttgcagacaaagtattcgtactaaagaacacagaggacttgtcaaagttcacttgctgaccagtagccatgacaaataagtgtaataattgaagcactcggctaacttccccgtttgtagccttacaatagagaaaactatcatcagctaacataaatatggagtct

SEQ ID NO: 400721 - DNA, 661 bp, Cannabis indica
gagagagagagagagaggaaatacctgaagaacgaagaggcagtgaggaggatgagactccgacaaagagagatgtctgagtctgacaaagccagagttgggagccaaactatgtcgttttgattgtaaggtttcttattcttgttagctaattagaatttttacctcaaattttaactttgaactttgacatgtactcaatcatacctcatgaacttttttggccgttaaaaattcccctttaactattgagattgttagatttaagtattttttgtttaatttcattcaattttactatttgagtgattagttattactaaatcatgctttccaaactttaatatctaccaaatcatgcttcttgaactttgatatgtactgaatcatgccccctgaacttttaaatttagataaaagtccttaaattcaacaatcctaatagtttaggggtcatttttaacgatcttaaaagttcagagggcatgattcagtacatgtcaaagttcaggggtaaaagtcataattagccttctttttctctttaagcttctatttttgataggtagaactaggggtgtacgtcggtcggtttagtctatgttacattttatttaacccaatgtaaagatcgggttacaaaaatctaagtgcaacccgc

SEQ ID NO: 400722 - DNA, 842 bp, Cannabis indica
atgaagacgaaagaagatacatgtgtctgatttttgatttgatatttaaaagtggcccagactgacaaattgtcagcctgggcgctaggtgctcgggcaccgggtgctcaaagttgaactttcttcaaatctgattctgacgcctcaaatatattcgtgatatgtctaggtcatgtccaaatgcaaagtttgaaccatttgcactaagacggtctcgaaaattacaaccctagttaaggatgtcaatttgggtgctgggtgaaaccctaggtgcccagattgacttctagggtgcggttcatgtaactttagctctcagggcctggatttggttgtttcatatcttcatggtacataatattgaaagatagtgagttagaaacgagttattgaagttcgaacttccaatccggagttcctaaagtcaacctgagcgcaaagctagggacccctcccaggtcgactgttaggaatcaagactactcagctctgaaatgtcatctttctatccacatgtcaaacattaatttctatatcaccaggaaaagtttccaaattaacaaatgtaaatcatattatcttaagaattgaaatttacaaggattatggtgtaaaaatatttaaatagaaaaaattatttactttattagcatcataaaattacagtatatgtatatatatatatatatatatatatatgaatgggtgcactcttaatgggtattagccataaatagggtaaaattagaaaatttgtagttttatgcttaattttctatctaattaaaaaataatctctattttatatcatatggctgagattgttccatacggtaaaaaaa

SEQ ID NO: 400723 - DNA, 790 bp, Cannabis indica
gaaatatatatcaatttttttaaatttcaaaatatatatcaagtatagcatttacatcttaattaaacaaaattatatatgtgataataatttttttatatacaatgggaggtttttattagagtagtttggaagtaattatgtaagaactaagatagtaattacatgtaattactaggatatatagtataattacacaacatagtatttacattacattttaaaataaaaggtgtcaaatgtgatgaattgatgattacttatgaattcttaatattttgtttgataaaataaattagtttttaattttacacaaaaataataatttttaatacttaatatttaaaataaaatgttttaataattacattcaattcttatgaaagaataagaattagaaagttacctactacaattacgtaaactgtaatatccgtgatcagataaactgtataaccaattccaatattccttcttagcattccaagcgcggtcttattgtctttacaagcataaagtatttccttcaaatactataattccattatacaatacaaaaagaaaaaaaaattataaatgagtaggctctttctaaaattaaagactctctctcaaaaaaaattatttgtaatattattgtttacaaattttcattaagcctcctaagaagctagaagcggaaacattacaaaaaaaatagtatagtttgcgtcatttttatggttaaactataccaagtctttgcttagaaagacatattggttcttacttcttagtcattgtagctttt

SEQ ID NO: 400724 - DNA, 667 bp, Cannabis indica
gtggttcaacttgtacgagaattttttgattccgcctctattcctgaagctttgaacaatactaatctggtgctcattcctaagaagaagaatcctgaaaggatgggtgatcttcgcccaattgctctttgtaatgtggtctataaggtcatctctaaggtaatggctaatagactcaagttgtttttgactgatattgtctctgagaaccagagtgcttttgttcctggtagacttatgacagacaacattttggtgtcttttgagataatgcattatcttaaaaggaaaagcaagggcaaggtgggacaaatggcttttgaagttagacatgagtaaggcctacgatcgagttgaatggccttttctggaagtgttgctcttgaagctggggtttcatcccagatgtgtgcagttgattatggctttggttgtttctgtccgatacttgatcatctcgggtgggcaacatttgggtcctatcgctccctctcggggaatacgtcagggtgatcctttatccccttatcttttcattatttgtgttgagggtccttcttctctcattcgaaaatatgaaactaaagggtggattaaaggttgtcaagttgctcggggggcttctcacatcactcatatgttttttgccgatgatagctacctttat

SEQ ID NO: 400725 - DNA, 475 bp, Cannabis indica
ggtctaattcaaaataaaaaaaatataatggagaaaattttcttttgtttttggtaagcaagaaatatgattgtaccaaaaaaacttttacaatcaccaatcaaacaaaactcccaaaaaggaataaaaaaacagagcagctctagaatcctttacaagtataactatcaaccaatctttgtctctacttgtaatttttacatttataatctctttaactctttgggacacatcaattaatttttttttttatctttatagtcaattctaactactgtactttctcacaagacttcatttcgaactctctaaatttgatagagagctgcactcactatcaaaaacaaactttttctcaacttggacatcccttttccatgggctaaccacctgaacaaagtttcaacatttacagaaagtgcagtctgttgggttttatgccctaaataaaacatatttcaatataatcagattt

SEQ ID NO: 400726 - DNA, 882 bp, Cannabis indica
aaagacttgtgtaacaacatcaaggagctagaagaaaaaaattaaatgttgtgactctcaattgatcttaaaagagtctgaaattatttctttgactaaggaacttgaaaacattaaaaagaatgtcaaaatgttaaattcaggttccaacatttttgaaaagattcaaaagtcttgccaaactaaccatgctagtctaggttatgtttctactcaatttgattcgaataccaaatttgttaaatttgatatttttgcttctggaagaactgtctctacttgcaggattctgtcacttcagcaaaatgctctactgttatagaaaagaagcatcacggtaaatttgacaattccaaagggaataggagacgattcattcctacttgccatttttgtgggataaaaggtcacattcgacctaaatgtgtcagtatgcaatacatgtttaagactaattatcttggaaataaacatgtttttttttaaaaaaatgggttgtaaaaaataaatgcttagtaggttcttcttgttttaaaactattgctactaacatgtggtactttgacaatggttgttcttgttgggctttgtgccctcaataaaattctatttcaatgtaatcttttctattcaatcatcaataaagaaacagatttaattccattacttgtttaatgtgttatttggttcatgtgatcatttatttacttatttgattaataaattcatccaaacacttatcacactaatattcttgtttattgtgctgtcaacacagtggaaagtaaacaagattgtgtgattaaatgtattcctagatttatcagtacacagggtgtaactgatatgataatctacaacgtagtttacttgcaccttgga

SEQ ID NO: 400727 - DNA, 792 bp, Cannabis indica
ttattattatttaaaaataaacactcaacgaaaagtacacatttttcaggctgtatccgctatctagcttaaacattttttagcaaatacactaagtttaatgtaacgctctaatgctaagggacgctacagtgttgtttcaattacaacactgtagcaaactttgctaattaaagtattttcttaaaaaaacgtgtcaaattaaaacttttatattaaatactaaactttagataatattaaaatatttacaagtgtcgggatcccgttttcaaacttttaaacttaatattccaaaatacatataaaccaggtcgcacatcgactacaaaatataatcacagatgtcccgagaccgaacactccaaatcacgctgcttcgacatgtacaacttcatccgagctcaggttcactcctgttcagcttttgcctttcctttacctacacatggaagcagaactgtgaatccacatactcagtaagaaaaacatataacatatcatataatttctgacttgtaactaggcgcccatacacctatttacaaggcttaacagatgagtaagaacgttccataccagggtatagccactataccacatacactacgtacctctctgtacgagtgttggtagggtttgtttcataccctgagtacctctgagtgatgtaccacacatactcagtacctctccgtacttatgctggtatcacggtactctcagacaacaatcactataccaatacactctataccttaaccgtatcagtgttggtagtgcaactaacaa

SEQ ID NO: 400728 - DNA, 971 bp, Cannabis indica
taaaccggttaaccggatcagaagctggtttcctaaatttttcgtgttgacgatttatgttacttttagagctttggttggttgattccttgattatttagggtattgccatgttgtttatcaatagggaaaacttttagtttcaagtttaaatcctcataaagtgatttaacgtgtcactcaccagtgttacgaataatgtgatttaggggcctgtgttggaatatattttaccaggatctagatttactaacaagtatgtttttaacatcctaatatgaatttctaaaacgatgataataaacacattaaaggtatgagaaaccttacagtggtttcagtggaattaaatgactcctcccgctcagtctctaacccttgtatcctttctgtagcagagtatcaccaagatctgagcccaattctccttcttgttgtttggattcttcacaatcttacatactatgattgaggaccaacttattatgtgtgggcatgtactcaatcactaatggctgaattttggtttgtgaagaatagactatggtattttcgaaattcaagaggaagaagaaggaagaggtctcatcaaacattgagagaaaaactaagtttttagctttggaggcattagttggataatgagaccatagccttccttttatactaaattccaatagggttaggattgaattattaggtgtaacaccctgacccgcagggacgccacgtgtgtgtgcttttacaaacttattcctagctattctattagtttatgaaaagtggggtttaattaaaaactttttgattaaatcggaataaaacttctttatgaaataccactaaaatatagggatccccctgtttataaaatttctttataacaagttacgaaactgttaatacaaaaataaagttacactttcacacataaagaaaagaggttgatcctgcttctcaaaagccaagac

SEQ ID NO: 400729 - DNA, 622 bp, Cannabis indica
tttttttttgaatggaatttaatacatacttaaatgaaagaagaaattataataatttaagtaaaatcacattatttttaattatgggattaaactgaacagatatgcaatatcctcgattttaaaaataaattagcaaacttaattaccttaattaaatattaagatagatttatattataatataattaaattatgtgatatcatttcaaaatatttgaatttaagattatatttatgagttagaggtatttttataattttgacataagaagaataaaatttcaattttggtatatattgtattaatggatatattattatatagtatgttcgtttttttgtattacatgtgaattttgataagttggcacagtacaattataattaagtattttgactcgaattgaattcggggtccaattcggggtacaaaatttatgaattatgtggttatgacaaaatttatgaattgtgtgatcttggtagtttttgtaatatttcctggatttcccgtgtgaacaatggtgcagcccataagcttgctgcctgggctgcgtcccagaattttttgtggttttttttgatccttctgttgtgaactctgccatgtagcagtgtt

SEQ ID NO: 400730 - DNA, 1115 bp, Cannabis indica
gactaaaacttaatagataaaatgtatattctattcttatattatttttttctacatacaatttaaaataaaatttaaatattttttatatatattacaattttttttcttccttttgaattttgttatttattatttttatttatttaatgtgttgttagagacaaaaaataattataatttattttattttgttgctagttatgtaaaaaaaaatatatattttcataaacattaaataatttaatattaaaaagtaaccaattcaaagtaaccgatccaatccgcacttttgcggattggattggattggatccaaaaaatgaaatccgcacttagtgcagattggatgttgtttgaccaaaaaagtgcggattggatcggatgaacagctctatttttttttattatatatatatatatatatatgcaatagtatatattgtagttataatatgtatttgactagtttatttattttttttttcatatatgggttatattattttttatacccaaaggattattttttattttatttttggtattatttatttgaattttaaaaaattagtaggagttctaattataacttcttattataatttttttacgttttaaaattaaatgtcggaatatttttttttcaatttttacaatatcatcccagtaaattttttaaacaaatcttaattgtttaaaaaactttaaacctatttttggcaatataaactattcgaaattttttaaagatttacatgaatgatgttgtaactataataaacacatctatgaaaaataatattatataaaatattttggcatgtattttcgggcacagtagttaactaaaaggttgtaataggaggttaacagtactcttagtaaaagtgtactatataattaaaataaagaataattagcaagtttgctccttgaatttttgacactatctgatcttacccctaaaatatatgactggttaacaattctcctttaacttttacatttatagaaagtgaaaattacatgaaatatgggatttcataacaaagttagaaaaatatggcatttttaggtttgccacttttctatggcattttttcacatttaag

SEQ ID NO: 400731 - DNA, 500 bp, Cannabis indica
aaaatcatatcccatattatatacgtacacacttattataattgtgtttggagcatgcataaatcacagtggtagattagtgaataaacatagttacagtatgcttcttaattttaatttttgcatcaaatattttgggagcacggatctcccaaaatatataaaatttagcaaaaaatattagtaaatattatatttaatacactttttataattgtagttcaatgtataataataaataagataaattaaaataaaaaataattattatattaacgagatttaataaattagatatatattttaaaaatcagtggcaatattttaattaaaaaaatatattaaagtaattcattaatgttaaatcacacaattagaaatgatttttttataaaaatattaaaatataatgttgcatcatttatttagaactccataagagatgctctaaactatacttaggtggcgtttgataacacttttttaatcagttttttttt

SEQ ID NO: 400732 - DNA, 531 bp, Cannabis indica
tactaaacttcaaagttcagcgagtttagcagcaaattacccttcttataatgtatatataaactgtttctatagtagctgagtgagaaaaggtgtaaatgtaagccaatgtatctaattatctaatttaatactttgtttatttgattttattcaaaaaaaattaaaaagccctacaaaataaataattataaataaatctatatctatatatatataaaggagaagtatgaggagatgacgtgacagtctaaaaatactttaaagttatttttttcttccttaattctctcatttctttaattttgtattaatttcatatatatatattaattaatataaaatatattaattttattcttatttttaaattaaaattttaaaaaaaatgaatgtacaattaattaatatcatatatatgtacacatgtatgaattaactcctaaaaaaatttcaaaaacaaaaaaaaatctaatataaataataataaatataaattaaattcattatattatattaaactaattaaat

SEQ ID NO: 400733 - DNA, 1294 bp, Cannabis indica
atgaatcggcttagggcggaaaccttcctagtccagctttgcacatctttgtgtttcttaggggaaggcatgctcagtaaggcctagatttttttggggtttccctctattcctcgttggctgacgataaatcccagaaactttcctgatttgatgccaaaggtacacttcttaggattaagcttcatcccataccttcacaccacttcgaagcactccatgaggtcatttgcatggcccatgcatgtcttagatttaattagcatgtcgtctttgtatacctccatatttcttcccaggatgtctttaaacattcgattaaccattctttgataagttgcactggcattttttaatctgaagggcatgaccaggtaactgtatacccccttgtcggtcctgaagctagtacattctttatttgcgatatgcatcttgatctggttgtatctggagtaggcatccatgaaggaaagtagcttgaatcctgaggtggtgtccaccatttgatcaattcgaggcaaaaggaagcaatcttttgggcaggccttgttgagatcattgaaatctatacaaagacgccatgtcccatctggtttgggtaccaacactggattagccagccatttcgggtagtacacatcccggattaggccattagttaacaccttatccacctccttctctaacgcgtgtgcttttattggatcaagaggacgtctcttttgctgcaccagaggcatgtctaggttaacatttaagacatgggtgatcacataggggcttatgccggtcatatcctcttgacaccatgcgaaatcatctgtggctgcctataatgtttcagtgatcctactttttcctctagctctaggttctttcctagacagaaaccttagtggagtcaaggtcgcacacatttacttcctcagtgtccttcataggttctacagctgtttcgaagtcccggacggggggggggggggggtcaaactcgtcttgttccatcaatcttggcgcttcacccctgtgcaccaccatattgataaggcagcgttgtagcattgccccacctctcccttgtttcctttcactgttcccacttcagcttccctggtaggaaatttgaggcataagtgccggatgaaggtgattgctccaaaatcgaccaaggccgactggccgaggatggcattgtacgttgtcaggcaatctactactacaaaggtgcagtatttaaagtgctttgtgttggaagttattttaccaggaacttagatctactcacaagtat

SEQ ID NO: 400734 - DNA, 606 bp, Cannabis indica
atttgtctaatgccaatgaatgaaatctgcaaaagaatatcaaacatgtaaatatttatacacctaaaataatattaaattaatagaaaacaattattcttaagctataaaaaaaaaaaaaaaaaaaaaaaaaaaaaaaaaaaccaataccataaataccgttgggcgccatgcaatagatgtcccaataacttgaccaattgtcttaaaaaggccataagatttaatcaattgttcatcagggttaacagaaactttaataacttcagaaaaagaggatccaagtttttttcatctaacttcttttgatggatcattgctacaaacgataccaatagcaattatttcaagctcacttgtgacacttttaatattgactagttctccgacttgtatataaaaattatatatagagatatatataagaaatattaatatatgcatttaaatattattagtagataaaatagtatgtaatactatttgttgacttcgcttttagccaacgacaatgagtcttttgataagcgataaacgatatgtcgtaataagaatacgtaataaatcaagtaataataataagaagacacagaaattttatagagg

SEQ ID NO: 400735 - DNA, 728 bp, Cannabis indica
gaggtcttcttagcaaatgtcaacaatgtgttgcaacattcgcttgctactctttggtcaccaaggggattatcgataccagctactgttgcaaacttgatagacatgtagtagatagatgaggctcaaaggtcatagagtgttaaccttctaaggagacttggtgtcgatcctatgaaggtagtcatagtggtgttcttgctcggggtagttctgactgacattggtaatttgattttaccatagaaagcgatgttggctttattaaaaccatacatgacctgcttgcatggcttcaattctttgaaggaaaaccccattatctctagggtttgttcaattaaaatatttgatgaggtttcgttgttaatcatcacacttgccaccatcatgatggtgattttgttggaaattattttaccaggatcttagatctactcacaagtatgttgattaacaccctaaatatgaactttctaaatcgatgaaataaacacatataaagtttaggaaaccttacattgggtgcagtggaattaaatgactcatttcgttcagatctctaacccttgtatcctttctgtcgcagagtattattaagatccgaacctggatctctttctctgaatctttggtgctgaaactccttcttgctagagagagagtgggcggccaaaggtagagagagaggctcacgtttttctaaatgaaaagtgtataattttcct

SEQ ID NO: 400736 - DNA, 904 bp, Cannabis indica
taattataacaaacaaataacttaaaaaattataaataaatactaaaataaaaatactaaacacttaggtgacgtttggttagaggtaatgaaatggaatggaaatggaaagtaaaacaatttttcatttccattccttttgttggttgacattttaaaacattggaataacattccaatggaatgacgtttccatcattttggtggaatgactactccattttaaaatggaaggaaagaccattacattgcaagattttgaaaaaattaataatttttttaatcaattttttatgcattttaaactttattccattctattctaattcttattccagttcccattcttatttttatattttcattccttccaactaaacgccaccttagagtaatttaaatgtgtatttattcaaatttaatttattttcatttatacttattatatattatttattatacttaatttaattatcttatatatatgaaaaaattaaattatatttaaataaaaataaaaaaaaaataatgttgaaacacaaaattttaaagctgaaaaaaaatcatacgaaggctctatggagtcgattatttcctaataatcgactccatagggtccctatacgaagtcagttatttcataataatgatgccacactacaagaattaccgtttttaggggcggaggggtccgctggtaataattaaaaaatccgccggtaataagtattagcggcggggtccgccggtattgctccgccggtaatataccgtcgctattaatgattaataccggcagactgacacgtccgccgctattaataattaataccggcggacaattagcggcggggtccgccggtaataatgtttttttaaaaaaaaaaataaattaatattaata

SEQ ID NO: 400737 - DNA, 715 bp, Cannabis indica
gagtagtaagtttaaaaatatgagactacaacaataaaataataaataaataaaaatagtagtagacgaacctcgaacggtagtcctttccttttactttttttttgttttttttttttaatttttttattattattttaatcaaaaacacttaccttgttcattatttcattaaattattttatatttcaaaaaattcaaattataaaatattattataataatcaaatgctaactaaagtaaaaagtatagttgagaaaaataataaaaataattatttactttaactttttagctaatttaattaaaaattagataaaaaataagaaacacatagaagctctaagagcatctctaatgatagtatttttaaaggtgctatatatctccacattagctagagatataatattttattttatatttctttcacgtcatttttagcactctaatttttaaaaatactctaatgatatatataattttttttattgaactattatatattttatagctttaattttttatttaaaaaaatatagcgtcaatgctattgtaaggcatcaatgtaaattttaacaataataattttttatgtctaatagtataacatccttatattttgtcacttaaactttctacctcatcaagcattctctaaaacagggctggtcctgagctaagacgaatgaggcgaccgccttccccaccgct

SEQ ID NO: 400738 - DNA, 362 bp, Cannabis indica
atcatcatcatcatctcaaaagatggatacacaaatagaaaaagtttgggtctcaccaagtgagtattgtagaagagcaccttagagaggacaatcgtcaaataagaactagtagatttgaagagcaccttgcacccaaaatttaagctaaaatagatgagaatcaaccacttaatcttcaatgcaaagtggcaaaacttctttctttttcttcttcccctctctttttctttctttttctttggctgcctgctgctcactatacctacagtccttttttttttgggaaatttacacccattactgttttttccatttttttttcgtttgtactgtgacacggtggaatttacttttgtact

SEQ ID NO: 400739 - DNA, 715 bp, Cannabis indica
actaatatttttatataaatttcttattttttaattttaaaaaatgataatgttgtgatgccttcttttaccgttttcatactaaattcacttttgggaatcgacattctaccacaccacaaaacaaattctaaaaactttcataatattagataaattatttctttttattaaagaaaaaaaaaatactaaatagtcttttaaaagtaattatatcatcaatcacaatttcattttattaaattcaaaaatgctattctttttcttattatttattttattagaaaaacatatataattttttttgtttagttcaacaattttttaatatttgacacaaaatcgccatctttttatataacttaaaaaaaaattattatgtgtttaattttaatattattattttatttgtaatacagatatcaaaatattatattttaaattatatttggataacattagtttcctaacttatatatatttaaatttaaatttatgacagttaattttttgtttttcccttttttttttttttgttttgttttttttttttttacctgtaggtgtaggagcaccgggtgaaaatatgatttaatgtttatctattattatattttttttgaaattaagagagtaatactttttaataaataaataaataaagagagtaaaactcaaaaaaatattaatatttaaatatttagttactacgatt

SEQ ID NO: 400740 - DNA, 470 bp, Cannabis indica
attagacataaacacctttttttctctctagttctctctttccttcgaacccacctagaaccagctagggtttgggttgttcttcaacaattcaagctttttccagcaagtgttaggtgatctcaaggtttaggtaagctcctagcaactcctctcttagttttctttagtttcaagtttggatttaacatgaattttgagtagatgagttctgtagctgctgtaatcatttggaatagttttctgtagttaaattatgtttgattatgttgtttttggttggttataggggttgtagtgttgaatgagcaagctttgagttttagaactcaagcttggctcattaatggcaaattttgattctggttctgttgagatgttttattgccttgaatgtgttccttaggatgtatagaataggtctggaaggtttggtgtgatttggggttgatttgagagagttatgaaat

SEQ ID NO: 400741 - DNA, 596 bp, Cannabis indica
ttatttggcatcactcggatactagatgttatacggtgcaatctggatatcaccttgctgttagtttggactcaaaggatgatcattcatcatcatccacgaatagaagatggtggaattggttacggtctctcaaactccccaaaaaagtcaaattttttgcttggagactagtgaatgatgctctccctacagcggttaatcttgctcataggaaaatcgccccttctgctgcttgtgctctttgtaaatgtagctgggaattagttggtcatgccctttttcgttgtgaaagagctaaattggtatggaacaagtttcatttcaatgttttcatccccaacattggtaacattaaaggctttgatattcattcccatcttgctgctgcccacaatgacactgatttagaaattattacatgcctcatgtggtgtatttggtctaaaagaaacaaagagatacatggcactaaaccgaaaccagtaaccattctctattcctttgctgcctcttatttgtcacaatataaaaggctactgtgttggaaatattttaccaggatctagatttactaccaagtatgtttgattaac

SEQ ID NO: 400742 - DNA, 586 bp, Cannabis indica
tcaggccgagataagactagactctttagtggtatcactgataaaatttggaagctattaagtagttggaaggaacaattattttctgctggaggtaaggaagtgctattgaaagctgtagtacaggcaattcctatgcaatgagttgctttcgtttgccagccacactgtgtcatcaaattgagagcatgatggccaatttctggtggggatcaacagcttctggtaatgcaattcattggaaaaattggaattctctttgtaaggctaaggttcaaggtgggttaggcttccgaaatttcattgacttcaatcaagctctcctagctaaacaagcttggcgtttattggaatcacctaattctctactcagtcgcatattgcatcacagatattttttacatggttctttgctttctgctggtttgggcaactgtccttcacttacttggagaagcattgtatggggtaaagagcttcttgttaaaggccttcgatggagagtaggtactggtactcaaatcaattgcaaaacggatccttggcttcctggacatactgactttacaccattcagcttcatagg

SEQ ID NO: 400743 - DNA, 1126 bp, Cannabis indica
aagctgcttactataactcatataagcggtagcagcatgaatttactcaaaggcaagtccaggagttgaattctgctttctctctatggaggatggaccccaatgctcccgaccacttctcacagccactgccatggtacccataccagccatcaccaccaccaccgtgtggcgctcaggtacattcccttttttctttttttaatgtcacattgggaacaatgtgtcactttggtttgggagagtgaacttaatttttattctgctagttttgacatgtttttttttatgtcttttaattttaatttttagtttttagtcaattttcttaatgcgagtcaatttgaaagtaggtagatagcatgatttaaaagttcatttatttttcgtagaacccgagtgcttggtgatattacattcttgacgaatttcaatttgtattttagaagaacatgaaatcatattaggtagttttctagtaattgatttggtttatgtatgctaattgtgaattgtggaacgatgtttgaaaaattctagaacttgattgctttctatttgaggcgaaataataaattattcattactaggaaagtgatttagctattttttggatcaattgtgtctttgaagccaaccctgcaattttatcctacttatcctttttgagacttaacctattccttgtttctacacatattgagcttagaaaaagataaacccatgaatatgtaaatttaaccctaattataccataagtaaatctttagtttgggagaatttggatgtgaagtttgttgtatgtgtgtgggaaaaaatgtaaaatttgagagaaagatgaaaaaaaaaaattgattggcaacaacttgaaaagaaaaaaaaaaatctgacaaccactgtcaaattcaaaaaaaaaaaaatacaataaataaatataaagttgttgtaatcttgttgaaaaaattggaaaaaaaaattctctcatgtaattagaaaaggagaattggtattgtctgtgaaaaatttcttttaggtgacatgattggagaagtttatggtataagaaaacctaaatgaccatttcaagagcccttatctaagcctaacattacaagcctagaaagac

SEQ ID NO: 400744 - DNA, 593 bp, Cannabis indica
ttcttattaattattagttttagtgtataccttgtttgatttaaaagtgagaatattgtgaaactaccacattgaatttacactataacaactataatagtcgtacactataaatttatgtttgtaggtaatagaatgttatttttggaatgtttggtaacaaaatttttataaaggctcttatgacaaaataattgagaattaacttattagagagttagcacataatgttaaaaattcatttgaaactattgaaaattaaagcttcaaactttaatttattgataaattatcaattgtttttctatttgattttagttgaggaaaaagatatatatatatatatatataaataaaaagtaaataagtaatggttaattttttttaagaaagtagtttcatttgattttgatccatatattacttgaactatatgtataaatatattgcttgtaatatttaagtgtaaatatcattacataaaatacaattttatatattcaaggaagaaaaatacagaaaaagaaaagtaaaattattttctgaaatgggataatcttgaaaagaatacagtgccttaatttaacctgtaa

SEQ ID NO: 400745 - DNA, 577 bp, Cannabis indica
acaagggagtagagttagccccagaattggaagaggaccaggagctattcacagtggtgaaaaaagaaggttcagtcagccagtgattttcgaagagaaatcttttattcctaatcctacactcactattatcaaagaggactaacttcaaaactctgtgatcagaaccataaaagctaaggtgatggaggattgcttgaggataatggtggaaccatttctcattagcaattccccaatctaaacgctcaaaagtagaaccatgtttccaagtaaacttgttgccaacaaaatggataggagttaaagagtatttattaacaaaagcttgaaaattaaccatagcataatgaggtaaagaggccctactacttctatcagcaaccgaaagataatcattgaaatcccctaaaataagccaaggaagttgaggggcattatcaaagagcctatccaaaagaacccaagtatgaattttatcacaaacataaggagagccataataacaagaaacatgagtagtgacattatcattaaaagtaacaatacagtctatatgattagaggagtagttcaa

SEQ ID NO: 400746 - DNA, 640 bp, Cannabis indica
aaaatattatataaatatctatagtatatattggtaatcattctaatacgtttaatccataataaggtatagttgtttatttttttcacactatacacatcatgttaaaaattaaagttattacttatttatatactaaaaatatactaaaaaaaaaaaagtactcatagattacactaattcactagcttcatattataatgtataatataaccaatatttatatactataagagccggcccaaaactatgagcagctgaggcaattcccaagccctactagattaataaagctcattctacacaaggcgctcttgttttgtttaaatttgtatttatttatgggtaaatattattttgaattttgtgtttgcaaaagttactaatcagatcttttattttgttaaatgccaaaatggattctacatttttcaaaatggtaaaaataagaccctgatctcaatttttaaaaattttattattttaatataactaactttaatacaatttttaatatggacagatacagaaaatctaaccagttttgtcataacatctcttaatcagattattattaaaatttattttgataaaaaattagttcggggtcctatttgtacaattttaaaaaatatagggt

SEQ ID NO: 400747 - DNA, 623 bp, Cannabis indica
tttttttttttttttgagtaacctaagtttaactacaattgtaaataaatacctagatttaattttttgcggtaataatactaagttatatttgtgtaactctgtaggtaagttaaaatattatttcattatccacttgttatttttttattggtatattttaattaatttttttttaaaaaataaaaatttaatgacttggaccaattaggaattatcacgtggcaatttacttaacaattaacagttgggtacctacaaaagttccaaaattataacttaggtattattaccgccaaaaattaaacttaagtatttatttacaactgggagttaaacttaggtatttatgccgcaaattactcttctttttttaaaatgtgttatttatattttttgggggggactttttcatttttacactttaaactagtttgttttgcattttttacagtattctacttagaaatccctattgcaactagcgctgcaacctaaattgcaacaaaaaattatatagaaactcctattgcaactagcgctccaaccactttagaaactcaaaccgtaaatttgaagaaaaaaaaagttaaaaaaaaataatatatgaggtaatttcccta

SEQ ID NO: 400748 - DNA, 510 bp, Cannabis indica
ttcttttatggtaagatttaattacattcataactgattttcttaccttgtttattcagtttttattgctcttttttatgttaggaaagatgccctttttcagctgaacttttcttgtatggaaacttcttgtaagagaagtaattctcttatggaaagtttttttttaaaggaaactttgattatttcattttccttattgaattcgattgtgtcttgatagaatcagaatatataaactgtttatggcaggaatcaagacttaataaaagatcggacccgattatagcaagtttccttttctggtctgattttctgcgtcagatcccgattctgatgctgcagatcgtgtttatcttagaaaagttttgtacaactgtgattcgatcttgtggcgttctctagggtttctatgtcctataaataggacctagagagcagccattcgaatcagctcttccattattcattttttgcatttttcttatttgtgaagagagtttctttgtt

SEQ ID NO: 400749 - DNA, 687 bp, Cannabis indica
tgaacatatatatataattcataatatatataattttatttataactcttctgatccattatttatttatttggatgtttttaagttatttagacttctctttcttaatttatattttcccactgccttattttttcttgtgtttggcttgaaatacacttcttatgttattgagcaacacatgtttttcttatatttttatactatatatatttaacaataaatataactaattgattctttgaactcttattagattgtaaatctctaataaaactaatatatatcgatttatacccttaggtatatttataatgtcatctttcattgattctagtgtttttgcttatatttttttcagtgtatattcttattacaacgattcgttttctacattacttttaacttatcatcactaattgtataaattaaaaaagctccacaatttctttccaattctttcaagcaagtcatactcatcaaatagttcacgcatattaaattatatataagagaatatatatttatttttttcatatattatgtgatattttaatttttctcagtgagatatatagaatgtatattatgacatttaattattgtacaatacaagtgagtgcttcttctttcattattaatttattatttttttactaatatctcattattatttattatattttt

SEQ ID NO: 400750 - DNA, 853 bp, Cannabis indica
tgtgatgtcaaagtgggtcactggggccactgtgctacgactgtgtctaaagaccatttgggtacactctcatgggttgctaccaagcggtttcaattttctgaccctcttaaaggtgaagctacaacttgtctttcggcgttggaaataactctcaatcaagaaaatctttttgttattgtggattgactcaaaactatgatcaaagctcttaatggagtcctttctagatgggggattgagaactactgtactcattattgtagaatttctaatttgctttcgagctatattttttctagtattaagagaactagtaactttgttgcccataatgtaactaagtgagcgtatgctcacaatcgttttggttatgtttgatctatctagcataccgtaaaatattttatgtaatgactgtgatgcctaatttttatattttgaattcatatatagtttctttcaaaaaaaaaggtatgtatattaattttttttatttatttaatatagaacttttattaatttgtcaaatcagccaaaatacaagattgtaactcaacaggaacatcacccatattgaacactcaatctggaaaagaacaagatgctctagcaaaactatgagcaactatgttagcaaaatgtttaataaaaaacaaagatttattatttaaagatgcaagaaatttatgacaatcttctataataactccaaaaaaagatagcataggtaatgaattttgaatagcttgtactactaccaagcaatctgagtccagttctactttctgctatggttgagttgttgggttttatgccctaaataaaatttcatttcaatataatctttatc

SEQ ID NO: 400751 - DNA, 1061 bp, Cannabis indica
agttcatctagctgtgcctgtacagctaggctaacttgctcgacattctggttaatttgaatcacgtctacatctttttgagtgggaatttgagcacgggctccagactgcacgatcatcgtgacatattgattgtctacttctctccttcaattcagatcattccttaggtcgtgagttgtccccaacctttcgaatacagaagcccctggctgccttagcgattgatttgcttggttgataggtggaatggcaccgttaatctggttggaaccatcatgtatgatctctcccaatgaattactagacaaggtctgcctgcctactgcttggcccacaagtggaactcgtgaccggggattgggtggctgaccatttgtagtctgggaagtattaatcgctggatcttcgtccgtctcacccagggggatgacattcggaggttgctaacctacagtttggtaggctttttcgtatcagcacggtagctttccgactacgattttcaatctctgtatgatgagcccttaacgcttccatctctctatctctccactcggtaaacatgcacctttgttcttcgaacgcgagatttatcgcagcgtggagatcttcttgatcatgatgtagggtattgttataaccctgcatgagtccatgaacgtcacagagattttgtaactcactagcatctccaatgattgtttgagtgttggtaccgggcggaacggctgtgttatgaatgccctagttgggtgcagaactgttattcccagtctcttgcacaccaggtgcgatttcatctatagtagtcgttacatcgtgacacacgcttgccggctgttcaggattaacagttggcggaacctttgtgtttcctgggttctgcaatgcaggacccaccgtctgtgaattggttggatcaacctgacccctacgagtctgcaccaccatcgtatttgtggttagattttgaatgaagagcgactcttgagctcaactctcaatgaaagcaccaaaatttgacctcgcttttaaccaacgacaatgagtcttattta

SEQ ID NO: 400752 - DNA, 648 bp, Cannabis indica
taaactctatgcgaagttcaaaaagtgtgagttttggctgtcacaagtatccttcctggggcatattttcgaaaaatacgggattatggtagacccagggaagattgaagcagtgaagaattggcctagaccaaaaatagtcactaaagttcgaagttttctcggtttagagggttattatcggcgttttgtggaaggttttccaagattgcaatgctgttatctaagttaactaaaaagaaccagcagtttatatggtcagataagtgtgagaagagctttcaagagttgaaacaacgattgattacaactcctgttttagccttgccatctgatcaagagaagtttgtggtgtattgcgatgcgtcgaggcagggtttgggctgtgtgctaatgcaggcagattaaggtaagcttattcttcacgacagttgaaagattatgagcagcgctatccaactcatgacctggaacttgctgcagtggtgtttgccttgaaaatttgtcgacactacttatatggtgagtggtgtgagatctatactgaccacaaatgtcttaagtactttttcactcagaaggatctgaacatgagacaaaggaggtaattagagctagtgaaggactatgactgtgaaatcctgtatc

SEQ ID NO: 400753 - DNA, 642 bp, Cannabis indica
caagcaattcaggagtacggaaattggatagcaaaatcaattgcgaaggtctttttcaactagggtttttcaactattcttttcttctctattttcttcttctattctaaattaatatgtgcgaatttgctacaatgaacatgagtagctaaacaattaattaggggttagatggatattgtttgacattgatttatgaatttaatgtgatttaatttttcctaatttctatgtattttatttcattcgtacttaattaattttaattgtctgatcactaattaaatgtttaattatgattttgatatgaaatttgagaagttagcatcaattacgctatagtacgtaaaatagaaaccaattttgatattggacgagagtacttatatggtttggatagctcatagggtttctgtgtaatgtcttttacatgtttaatttatcatgggagtagaaaattggcatataattgagatttatatatctgagaatactataaattacttcagtaaacttactattgcatagaatttggtaatagaattgaatcatgttagaccataataaatagatacaattgaaatcatatccctaatatcacatttattgttaaacctcttatttgtttgtttatttattttt

SEQ ID NO: 400754 - DNA, 794 bp, Cannabis indica
agcatatattctgtggaactaataccaggaaacacctgtgtttagcatgaatttttattgtgtatgacttaggtgaagttagttttgaatttgggcatttttaggccttaaaaatgggatttttgggtcttctgaatccagtcgccgcgacgggattttcgaccgccgcgactgggttcggtagtggaatgtttgtttttcccaattttgttttggccataacttttgactcgggactccatttgggatgttctttatatcgttggaaagctcgtttagagctctatttaattatctgtattttgaatgccatgtttatgatatgtgaaagtggatttagggattaaccctatgcttttaaatcccaaaatttgtgactaggattactggcacttggttaggagcaccccggggggggggggggggaatttggaatctcttcacttgcaggacatcaggtaagacagtagttgcacgtagagttatgcgcggtggcgcttatgctgaaatattatatgtgagtaattagaaccggattagggttattaccctaacatgagcggtttagcggcttaggttattaccctagtattatgttatgtgtatatgctttgccatgataactatatgagtatattgagaattaggattatgcgtgcaaggcataatcaggttggactcgataactagaaccgagatgaaccgttctaaggccttattgtatatagacgtgtgagcgcaacacgtaggtctatgtcacatagacataattaggtatgtgagcgtaacatgca

SEQ ID NO: 400755 - DNA, 748 bp, Cannabis indica
aaggttagaacaaccaggatttgatggctccgccaatagatggacacttgcaagtatcattggaggcccgcacattgctttagacacgggcaaagcttgggaacgatatgcccgcacagctcagtacgagcaagaagaagtcatcctggccgtggaagaaaggaaacccaaagttccacgagcaggagagccaaccataacattcaacgacgaagatgttgtccagataaggtttccgcacaacgacccgctggtcgtggaagtccaaatagcaaactaaatggtgtcctgaaccatgattgataatggggcttctgcaaatattttgttcaagactgccttcgagaagatggggctctagctcaagaatttaactccatgccttcagcccgtctatggtttctccggtcaaggagttgcgcccctaggacaaatctgcctacccctcacacttggacaagctccaacgagcataactgtcatggcccagttcctggtattgaatattccttcagcctttaacgtaatgctaggccgaccagccttgtatgacttaaaagctgtcacatcaatattccactcgtgcatgaagtttccaaccaaaaacggggtagggtgtcttagagggaaccaacaatctgctcgagaatgttacaaccttgcaatggccaaggctaagaaggaaatatcctccagccagagcccggacaagggaaaaaatattcccaagtaggaaaccacccaaggc

SEQ ID NO: 400756 - DNA, 537 bp, Cannabis indica
ttttttttttatttatttacatatctcttctcttaatcatatctaccaaaaataatttttttggtggatatgagtatttttgacaaataattataataaaagtaaataaagatcatatctctccactttataattattgtctttttatgaaattctcgtccacctctggcttcacctccacggtgaaattttggagaaggaagaggatgatcgggacgattctccaatcgccgtccccgaccacgacctgatatttttctgtgaagagatagagacagaaagcagttatggaaggaaatcaaagagtgtgagtgaactaagagcttctttatatataaatattttttccttaatagcagagctcatcctgggttgttctctgtcgagaattttaaacctgccggctagggtctgttggaaatttattttaccaggatctagatttactaccacgtatgtttcattaacatcctaatatgaattctaaaacaacgaaataaacacatataaagtttaggaaaccttacattaggtgca

SEQ ID NO: 400757 - DNA, 551 bp, Cannabis indica
ggtttttttttttttcttatattaatatttaatttgttgaatgagcatataataaatgaaaaatggtttgtactgtgtgtattgtgggctctaacttttttctctttgaagcaacttcgaatataatgaacagaaatggcagtgactgtttatgtgtttgaaaacaagtagggtgagagcaacacttcatcaagtcaaacacaagaacatacccaagttacccaacacgaatttttcatatatataaataatttatgtgtacatatatatatatttgttgatataattattatttggaataatggggtcatatatcatagtggctaaaaaggagtgatcaaaattcatcatatttgtcaaccttaaaccaataagggagagtaaggattttcagattcgaatgaatttcagtcatatatcaaggtcaatttattcttctttacataaagaattttatagtggtcacaaacacacctaaattacacacatttttttgtactcataataatgtgtacttaatctatttttatagatttcaatcaaacacttag

SEQ ID NO: 400758 - DNA, 1075 bp, Cannabis indica
cttgttatttgtttttaccaaatattttgtataggtatagatgacccccaagtgatcgagcagacttttgactcttggtcacttggttttcacaagtatgtctttttgtctgttcgggtctatgggtacgggcagacctttgtacacacttaatggtaaatttataacttgctaatagaattgacagaatttgaatttaaataagcttctttattcatttattggtcaaaacgcacttgttatcatagtaacttacatagaagctattatactgatctagtccgatctttagcttaatataaacaaaataaattgcataaaatagaaatgaaatataactttcagaagtggttacccgacctaagtactttgtcatttcatccgaacctttgggcgtagttcgcaaagaaggccacttacttaagagtaaatgttcttttgttttgtacttaagatggtcattcgacttggtactcttactggtactatttgctcaaatgttctccgttccaataccttggtactaggacgagttgcatttttcgttgtacttacccagcttgtatgctcttgattctagtttttcaaccacttgatatggtccctcccaattcggtccgagcacacctgctgtgttgtctttggtgttcaagaatacccttctgaggaccatatctcccacaaagaatttctgtgctttcacttgcttgttaaagtattgagctaccttttgttgatgagccaccagttttaggtttgctacagttcacttttccttaatttcatcaagtgattctgcaaggagtgcatggttaacctcttggtcatatgttaatcttctatgggatggaggttctaattccacgggcagcgtagcttcataaccatatgccatggcaaatggagtctgtcttgtcgctattttctcagttgtgcggtaagaccataatacttctggaagttcttccaaccagtttcctttagcatcttcaagttgtttcttttaagtgtcttaatgactgcttcgacttgaccgtttgcttagggatgtgtcactgcggagaaactttttatg

SEQ ID NO: 400759 - DNA, 799 bp, Cannabis indica
gaagatgacataaaaattgctaattaaaaaaatataattatatcttgatcaacaaatcttacatatataacttgaaaataaaaaattactgtcttatttttcaataatatttagcaattaatataaaataaactactaaaggactttttttgattttgaatattttatttgatgacggtaaagaaatatatgtttttcacatattaaaataattatatcaaaaaataagttacagtagtagtacttttaagtccaaataattagtaatgtagccacatattaaggttgtcttaacgcaaataaacaaaagaaagaaaaaggaaaagaaaaaaaaaaaggcaaataatgaggggccattttttaaaatataagtactaaacaaaaataaaaaaaaaaaatcatttttattcttaatacataaatcatatctcacaaattatttagaagtgaatatatacgatttttttaagagttttttttttaatatacactaagaaagagtgaaaaatttatatttctttttgttgcaaaatatagcatttactgcgttcatagatataaaaaatcatttcgtagtagctgtatttatatttctttttgttgcaaaaaaatcttacacttcaaaactttgattaagagtttagattattactatagttgcgacaaatttaaagagagagtttttatttgtataagtcaatttgattttgtaatcactttgagattcttctaataaattttagggaaatttgcggcaaaagtccccaaaaagttcacgttgatgcagattagtcctcaa

SEQ ID NO: 400760 - DNA, 556 bp, Cannabis indica
ttcatttcacaaagcatgcataatcaagctcaaacaacctaagcatgcatttaccaccataaaattcagaataacattaagcaattaagtaagaaagctacctcaattcacaccaaagcaagaacaataatctttccttcaacctcaagcttcaaatcaagccaagaccaagcttttctttcaaaaattcaacattaaaagcaaagagggtttgagtgtgagagagagaggggtcgggtgagataggggaaaaaccagaattttactttgattttcttaacaaaaatccaattttccaaacataataataagaggtcaaatgaccaaaatgcccttagggccaattaacatgcatacacatttccaagagcaatattgcaatttcacactcaaataataccaaataaattttagattatcacccataataaaaatgccaaataaatcaatccaatttggatttcgggcccgaacccagttcggcccaaaatttccggttgtgactatactgcgctagcctgtcagaacacacctgaaaagacaacacaggcatact

SEQ ID NO: 400761 - DNA, 583 bp, Cannabis indica
ccaaactcacattatgttttgcttatacacttccatccaaaaatatgcgttaagtgtcaagcatgacatgccacaatgtacatagtacacacctagcatggtttagtagtgcacataatattaattatttaaatataaaaataataaaatcatttaaaaattacaaaaaataaataataacttacaaaataattttccccctttttcattgcattttctttgcatgttctctctctatttcttttccaaaagcctaaacaaagtcacacagccaacgtcctatcagctagggctgagcataaaatttagaaaatcgaaaaaatcgttcaaatcgacctaccgaacaccgctgaaaccgaaactgccaaaactaaaaagtgaaaaaaccaccaacggtttaaatcgccattggatggtcagtttttttttgtaacaaaccgaccaaataaactgaaactgaccgttactttatatatataatagattgatgttacgtgcaatgcacgtataattaggatttttaattaggttcaattagttgatgttaagtgcaatacatgcatgtttaattttttttaattag

SEQ ID NO: 400762 - DNA, 853 bp, Cannabis indica
accagcgcgtgtattttccatcattcaggcagatgctgtcgccagtccttcagtgtttacaggacagttctttattaatggtttcacttatactgttttatttgattccgaagctacacgctcatatgttgcaacaagggttcttagtcagctttttaggcctagcaatgtatttgaaatgggatttagaaccctattgcctaatggggaactaactatttcaagaaagtgggttagatctgtgctaattagaatttaaggcagataactgagtgttgatcttgtggagttaccattggccgagtttgacattatactcggaatggactttttgtccaaatactctgccagtattgattgtaaacggaaaatggtaacttttcaaccagaaaatgaggaaccttttgtttttgtgggatcagtttacggttcttgtgtccccagaatttcaacactaaatgctaggattcctagcggttataattgattttggtaaacttgtgttgcttggacctgaggaggtcaaagtggttaaggaattcctggatgtgtttcctcaggaattactaggactaccacctcagtaggagatagatttcattattgatctgatacccagggaagaacttgtttcaaaagcaccttaccgcatggcacttatagaattgaaagaactaaagatacacctatggatctagggttcacccgacctagtgtgtcaccttggggagctccagttctgtttataaagaagaaagatggaactcttcgaatgtgtattgactaccgggagctaaataagttaactattaaaaacaaatatcctttgcctagaattgatgatctgttcgat

SEQ ID NO: 400763 - DNA, 758 bp, Cannabis indica
tggatttatgaagataggaatggaaggttaatgcaacttattaaggttatttttatgaattttttagagtccaatttagggagtgttgtaggaaaaatgtttggagatcttcaattgtagtaattttagtgttcatcaagtctttttgagtaaaaaagagaatatctattgaagaaaagaaacttcttttagcttggagtaatttcctatttcttaaaatgggtgaaagattgcattttcagcccttattttcgtggtcaagagtcaatagtgaccactttctaaaaataaattaaaatttctatgttttggatgttcaacatgctccttttgtgtttgaaaataaagtctgaaacttcaagctaatttttcactatgatccattaacttttaggaaaaactttcataatgaaagttctagatctctcttttatctttctaaaacttctttaatcgtctaattcctagttatattgagagagttatgaccaaaatactattagtcgtcacagtaagaaattgaaaatgggaaattgcaaaaattagtgcagaaaatgggaaattgcaagcaaggttgcggccttagtgagaaaaaaatgagaaacttcaatttttggctcaatttaaagggggttgatggcaaagctttgataccattcaaaaattaagaggactctgagtgtagaaggagagcaaggaatagaaggcaccggtggaggactccaaacaatgttctttctcttccatctctatctttt

SEQ ID NO: 400764 - DNA, 823 bp, Cannabis indica
gattgaactacaaggtgaactttttcaagatatgagagtttttttgtaaaaaattacaatcacaacacaacacgttactatgaaaaccaaaataaaaacctaaaattaaaattccttatcatttttcctaaataatatgttaactacgtcaagaatgtaatcaaattcaatagtttcttacctttgtctattttgacttcagattttattgattttcttcattgcgagtaggaacatgaacaaaaaatgaagaatgataatcacaccagaggagaagggaaggaaagaaatcagagagaaatcagaggagaaggaaagaaatcggaggagaagaagaaagaatcgcacgatatagagaataggtgaatttggatattttgggtgtgaattttataaaaagaaatatccttttataggttctatttttcccattttttaagttttttatttttttttccaaatttgaagttttttcattaaatgtccatatttttcaaaatgcatttaagaaattctatatttataaaaaaaaagccctaaaagttatagattatagatatatggaaacaataaaagagaaaaaaaaaaagaaaaagaaaattagtgaaaatatatatgacaaccaaaaattgataaactgaacaaaaaaaaaaaagcacacagaataaaagtaataattaccacctcacagtataattgaaatattaagtagtaaaaatagtatttgatgtaataagcccaattttataagacaggagtaggactgggctaagctgacgacaaagagtgtttgttctaaaacagaattaaatgcttaagagac

SEQ ID NO: 400765 - DNA, 1402 bp, Cannabis indica
aatcgtcccgttctaataccttggtactagaacgagttacatttttcatcatacttacccgacttttatgcccttaattctataacttcgaccacttgatatggtccttcgtagttggtccgagcacacctgtcgtactatctttggtgttcaggaatactcttcttaggaccatatctccaacaaaaaatttctgtgctttcacttgtttattaaaataccgagctactttttgctgatggactatcagttttaagtttgctgcggttcgtttttcttcaactttatcaagtgattctgcaaggagtacatgattggcctcttggatatatgttaatcttctgtgggacggtggttcgagttctacgggcagcatggcttcatatccagatgtcatggcaaatggagtctgtctggttgttgttttctcagttgtgcgatatgaccatagaacttcaggaagttcttccagccagtttcctttggcatctttaaccttcttccttatggtgtccttcaatgtatttttgactgcttcaacttgaccatttgcttggggatgcaccattgctgagaaactttttatgatcccatggttcgcacaaaaatcaatgaaggattgactatcaaattgtttgccattgtccgggactatcttgtacggtaatccgaaccgacagattatgttcttcacaatgaagtcttgcactttcttggacatgatggttgccaatggctcagcctccgtccacttggtaaagttatcaactgcaaccactgcgtactgcactctgcctttgcctttgggtaactttctgatcaggtcaattccccaaatggcgtaaggttagggacttttcatctgagtcagttcattgggcggtgcccgaggtatctttgaaaatatctggcatttatcacatttcttaacgtaggacttggaatcttcaatcattgtcggccaaaaataaccttgccctataattttcttggataaactctgtcgggctacgtggttgccaaaaaattcatcatgtacttctgataaaagtcgtgcagcttcttcttgtgtgacacacctaagtaatggcatggaaaatcctctactatgatgtatcgcacagcctttctcctcattttccaagcttcatggttctattgtctaggagttctccagtgttgaggtaggttgttattggcgtcatcctattcggggatgtatcaatcatttcaacatctttcgtgcgggtgatactaggttcttcgagaactggacaggaatcaaatttgctttatcatttacattgcccctcggaagtcgagccaatgcatcagcaattgtgttttcttcccttggaatttgcttgagagcatgcttttgaactgtgcgagtagatcgtgt

SEQ ID NO: 400766 - DNA, 511 bp, Cannabis indica
aaaaaatatatgtctaagatacttggcatgaacgtgtatatatgactattttttaatttataaatttttcctagctatataaattttaaaaacaaaatacgctaaacataattataaataacttaaaattatatttttatcaatcttatttttttcactctctcggcctatctccttcttcttctattaatttctttattttttatcttttgagattgtggttagcaatttttgcaaatctaccaagaatatacatgcatctactcagagaaagaatgatcaacaaaaggaaagagttggtttggcattctttttaatatcactcctttttattcttttacattatctttatgctatgttatttcatcatatgttttttttttatttttatgtagcaacaagtacgcaataataatataaataattagatatatgtaccaaatctttacaccattgaaaattactaattattttttgtatattagtggaagttttattcacagataaattg

SEQ ID NO: 400767 - DNA, 600 bp, Cannabis indica
ccttacacatgtcccgtttaaaatactatggaactgaacaaaatttaatagaattacaaatttactaatattgagtacttcactcgaaaaaactaaaaaatcattaggtgttacaaatccaaaacattagtcactttatgtcatagatatccctttatattacatttctatcaaaatttgaaataatataatttattaaattttgttttaatatttattagttaaattcataatatattgtatttttttttatataaatactaaaaggcacatgtgttgtattagtgtccaatatcatcttatgttattatattagtgtaattatgtattgagttatgtatattttagtttgataattattaatacatatataaaataaaaaaaataataatatctgcacacataaattacacacttatatgtcaagccatttttaacaagtatgtttcatcttaaataattattattagttaaaattattaggtgattcaacaatgcactcttttaaaataaatgtattgatgcaccctctacttattttggcattcagaaaaatttgttagtctaattttttttcatattcatgtaccttatagctat

SEQ ID NO: 400768 - DNA, 558 bp, Cannabis indica
tgattgagctaatacatgaggcaaagacacacagggctatcattgatgagaggactcaggtgactatgatctttgagtctctatctccttgcttcaaggctttcaccataaactacgtgatgaagaagctagagtttaacacgattcaattattgaccgtgtttgagaacttaacaaggataagtccaaggaaggtgaatcaaacatcgctgaagcaaaatccaactatctttcttcttttgataagaaaaggaagtggaacagtaaggccaacaatgatggaaggcccaaagggaagaagtcacccaatgccaagaagaacaaagccagacccaagtctaaggacaaaaaggcaaaatgcaagtgtttctattgtggcgtaatggatctgaaaagagaatttctttggatcaatctcactatattgagaaggtcttaaagaaatataattacttgtactgtaaacctgcttgtacaccatatgatcccaatgtaaaattatttaagaacactggtgatggtgtaagacaatctaaatatgcaagcatcattggcagt

SEQ ID NO: 400769 - DNA, 713 bp, Cannabis indica
tctagtgcagcccaagtaagagcctcttcatcatttatatcatcttctcttctagactttaaaaaatactcatctttattattattattattattattgcctctccatactgaagaagtactacttctcaagctaatatttctcaagctgtttccagctctataaaggtctcccacctccattttctaactatatgtatgtatatctaaacctctctccaacccccttcaacttattacacatatataactttctatcatatatataatatacacacatatagttatgccctgctacaaccaaaatctagttaattagttttaggaaaaattctataattatgactataactttattctcaaataaatttttaaacctaaaaaactaggagaaatttgactaactatgtatttattggaccaattttttttcttacacttaaactatttaaaattagaagaatatgtcatttttttacttcaaaccccattctctctctctctctctctttgtaaacatgcacacggaggagcacacaatcgacccacaacccaccacccacaaccttggtcccttctctcaacgaccaccatgactacagacccaaggacccacggacccaatgaccaccacaaacccaacgacttctctatcaaccacggcctcaccaatatggtcaaaggaataaattgtatgattaatgtttgttatct

SEQ ID NO: 400770 - DNA, 1141 bp, Cannabis indica
ctctcctactggttggaagaaggagaggaaagaaattactaatattttaagttttttgggagtaaataaatatattgactatttttttacttttatattatattatgttctttatatcaatctttttttttttaattactgcccaacctattattaaaatttagaattatttgggagaggatacaaagaattttctctctaattgagattttttatgtgggtgacacttttccttccctccccagtttatcgtttgactacaaccttctttttctcttctctccagttttattttcccctacttttctttcctaattaatagagggtaatactcttcattagccagatgaatgttttttatttatcactgacttttaattaaatcaccttttagcctttatttaaatcaccttttaggatcttgaaaaacaactactgtttaatacatttcacatataatatatattacacaatggaatttgaaaacacacccaaccaaagaggcttaacattttcatttcagttgcattggatgatcattaagcttattccaaagggcatgatttctcaaatatgatccttcagctttgggctgatatgttttctaatttaaaagaataaaattttaaggctaattaggatttttacaattttgacatgtaccaaattatacctttgaactttttaaactattaatttttttttcgaatgattgaaattgttatatttaaggatttctgttcaattttatttaattttactaatatggtaattgtctatatagtaaattttgttcctgaactttgctatttattaaatcacgctctttgaacttttaaaagtataaaattgtgctctctaaattttcatgtgcattaaattttgtttagtaaaattagacaacaattcttaaatctaacaaattcaatagttcagggaaatttttaatattttgaaaagtttagggacatgatttggtacatatcaaagtttaaagggcaaaaatttaaattagtcaaattttgaatgtgagatcaacatccgattttaaaaagaaaaatgcctttgaaaatcatcaaatgagtatttatttaattcatctaataattactcaattttttgaaaactacttttatctttt

SEQ ID NO: 400771 - DNA, 792 bp, Cannabis indica
gtctgagaattctcggtcagctcttgtctgaacgagcgtgcttatctgcgcggtgcctggtacctgtgcgcgcacacgtgtgcacgaacttgagatatttcattcaaattcaaaaaatcataactaattcataaaaaaaatcaaaattaggttctgtaaagccaaaatttatttaattttttgtctactttcctagtaaaaatatttccagaatgaaataaaaaattattttacaacatacattgcgatttcaaactaccatcaaataagcacataaactatcatgaaaccatccaaatcaacacaaaacatcgttttaattcatattagccttacacactatgattgagataccacttgatgtgtgtgggcactcactctatcactcaaggtatgaaaatatgaagagaagaagaaggtggttggttcgaaaaatagaaggaagaatagatggctcaatttttcttaaaagcaagaaatttcatcatcttttagtgtgagccatcgctatctatttatagacagccacctaggtttacgttaggatttattatgcattaaacaatagaaaattaaagtgtaaattaccaactaagtgtccggccacactaatgggccccactttggaaattttcaacttttgacaatctttacctttattttctcaaaaattgaaaatttttccaacttctagccatctaaatgccaaaactgttattatataaaattaatatacaataaaattttatttaaatatatttattatttaagatttaattaaagtactcttgt

SEQ ID NO: 400772 - DNA, 596 bp, Cannabis indica
atattcattctcatcaaatagttagatgtgtatacaaaaaaaaaaaatcaactatatataagtcaataaaagtttttagatgcttaaataattttctcaactattaaaggatgatcatttcttaattatataaaagatcttaatatgatatctatttatatgtgtagtaaaattttattttgtagccaaaataatattttctttttataaacaacttaagtaaattatattataaaatttatttttaacttatactcagcgacgaactcatgaaattttacgagatgtaaaatttaaataattaataaatatatagatacaattaaaaaattattaaaattataatactatatattcataaattagtaataaaatatactataaaatttcttctaggcattataagggttccattgtttatgtttttcttattaataatatatatgaataaagcatattttaaatattttcgtaaaaatttaaatattatatgaatacttaaaaataaaaataaataaataaataaaatatattaatataattttatcaaagtattaaaattaaaaaaataaaattatttaaatttaacacaaaaa

SEQ ID NO: 400773 - DNA, 651 bp, Cannabis indica
tatgattgcctgttagattacatgaaatagcggtatcactatacatagagttatattggatcccgataaatgtatgtttgacttaagtattgattgacgatatcacattggtacaactagagtatcgagtataggctaacattatggtcaatagtactgtcgtatgaacgttctagaaacagtatcgcgtgagacgcgaggatagggttatgattgagtgtatgggcgcctaattgtaatccgctttatgtctatgttatgattatacttttcttactgagtttgtcgactcacagttactatttgcatgtgtaggtaagggcaagactaaggctgaatagcagtgagtgcgaacagatgaggattattgtacatgtcggggcgattaggcctagagcgtacaatttttggaacagcaggctgtattttgtgtggtcgctaggcaataacttttgtatcgaatattttgtattactgaaaaaccgtgtttttgcaaatgtcaattacatataagaaaatataaaactgtatgcgtctacagaagcagaaagtaattctgctactgcagaaactcgttttgcaatgacaaaacagaacaggcagaatataaaatatttgcagaaaaataataacttgacacaagagatttat

SEQ ID NO: 400774 - DNA, 645 bp, Cannabis indica
tttgaccaataactacatgaatttagtgaaagttgcattcataaaaaatatatgcaattcaattatctttcgaatgatataaagatcataaaaatagattaaaactgagagagttatcataattttaccaaaactatttctgagaaggaatatggagtagtgaattacatgaatcagcaaaaatacaaacttttgacattaaaaagtttagaactagaggataatatcttcatgaaagttttaggaaatttaacctttttataatgacatcaaaatctttgaaattagaattatattcagagacgtattgcaattttaccaaaacagtttctaaagcacaatattcaagaaacgaatcagaggttataaaagaaaattaactttttggcataatatgactccaaattaacaaaacgtttcttcatgaaatttatggaaaattaaataagcttcaaaaccatatatagatcattaaaagtggatgagaattgagaaagttatgatattttagtgaaagtactttttctgggaatatgaagaaaaatgaatgacaacaatagcagaaagataataactttagacatagaatatcactaaattggtgaatagtttctgcatacaaattttagatcatcgaataagctt

SEQ ID NO: 400775 - DNA, 623 bp, Cannabis indica
aatggggcaattttagtttatttatagagttttgtttctatctaccttaatcaatgtatatttttgggtagtgggaaaatgaacgaacatgaactgcctgacatttctacatagatttatgtgttcgtaaaaaaatgtttgtgtgatcgatattttttgggaattttataaaatttgaatcataatagttaaaagaaaatgggttgagattgaacccgtgattcttgtcaattgtcaatggtggttggaaattagttcatttacttaaacatttgctaaatcagctgccatatcaattagctggaattagatttaagtcagttatgttcgtttagatcttgcagcagctgactctgtctatatatatgtctcaacaataatttcagaagataagatacattaccttcttctttcttcaatactttctaaattttaatcatgaagctggacactagcggtctggattcaagggtgttttttattgaatttcatgtgtgtttcctctcttgcgaatatgggcaaactctgatataataaatgagtttgcaagtcccaagtgcatggagcataaatagattggtttattatgaactttttaaaaaaagtaaagtaaaattgatatg

SEQ ID NO: 400776 - DNA, 673 bp, Cannabis indica
ccttaacactatcatcattataaactagttgggcaagagtggttttaccaagtccccccattcctacaatagggattatatcaatccctttactactcttttgaggactatcacataacaacttactcactaaaatttccttatcatcatctctaccatgtatttcagtttcttcaaccaaagaaatagtagtgattcttgatttgacaatagaactaggattgtattgttgttgagaatacattccaatagctccaatgactatgccatgatcatggccatcgtttttaataatatctagctcattggtcaatttcttaattcttttagcaaaatcacagtgcctaattacttgattaacttttttgaaacataaccaagaagagggcagtactggaaaacataccttctttgcacaaacatgatcactactatcatcaccatcttcacaagtaccctttccttcttgatcaaatctctcgatttcagacttgagaatggcagagttccactcatccaacacatcatccatgtcgaatgatatgtcttcgaggtcacttagccactgtttcagccattgagagtcgagctgtcttgtcccagcatccaccaataaatcttgaatgtatttcagactttttttgagctttttcacatctttcttcacattctg

SEQ ID NO: 400777 - DNA, 518 bp, Cannabis indica
ataatgatataaaataaaagaaataaattcctcacattattaaatataattaaaagtaagatttaaacttatctgtgaaaatttgtagtagcacttattgaggttgtattcactatcaaataagccaacaacatacggtaaaatagccaactaataaggcacaaaagccaaataaaggtacaaactagccaaaaaaatggcacagactataaaataaggcacaagctaacaatactaataattatgaaagtaatctaatatgagaagcaataacataaagagttaataaaattaattaacaagaatagctcgaaattaaatatattaatagctaatattaattaaataataaaattagtttaaaagttaacagtcaaataataaatttataagaaaatagagagcaaccatgaaagtaaaatataaatttattagaaaaaacctacaaaaaaagaaacttatacacatattaaaattagcacaattggccaaaaataataagaaaaccacataacttt

SEQ ID NO: 400778 - DNA, 759 bp, Cannabis indica
ttgtatttttaatagggaaatttaaaatttcatacttacaatactttaaaaaaaaaaattcctaaattcatagttattaaaattagtcataccacattactaatttcctaaaaatacccctcacatttgaaatccctaaactcatcagcatctctctttctctcttttaactcactctcgctcaacccacccaaaaaccccaaccccagctgacgatgacggcgcagccgacttcgacccacgctcgacccaagcgacccacggtgactgacccaatcgacggcgcagagctcttcgacccacggtggatccacgtcgaactgctaaaatgtcgaaggtatgttgtgatttctttgttttttttaagaaagtgttaaagatttattttgtttgtgattttatttgggattgtttgtgaaacctattttgttagatttaagaaaatttttgtggaatggaaattgggtggattcagatttgtgaaaggagaaaccattggggaagaagagggtgcgatgggtccgatggtccgatggtatgggtccgatggtcctgatgccatgggtccgatggtgccaatatgatagccatatgggtccgatagctaccaattggacccatagagcaagactgattctcttaaaagctgaaggtctgattgaaccgatagggtccaatggctaccatatcgggccaatcggacccatcagacccgaggtgttttttttttgttttattaattattaattatttagttat

SEQ ID NO: 400779 - DNA, 760 bp, Cannabis indica
gccctcatttaaaggatgggaccagagtccataaaaaccgtatttaaatttgtccccctttttggggacggaaacaagttcgtaaaagtactgaatttcagccggactgggcgaaccccagcccctggtagcatacaaaatgaataagcctgaaagcaggcgataggcttgaggaattaattggtaaggcgcaaggccgacaaaaacgaggaagttaatgaaataatcttgaagggggagcatggccccagacataaggtgggtttggctccaggctccgaaccccccgtaattgtgattaggagtgtcctcatctcgaggcaggcggtggaaggtcccggaagcagacggcttgatgtctgccaccgttacaatcttctcgagctggtgagcgcaaaccagggtagaatggagctcgtccgcctcccagctgttggcacgagaagtaaaattctcttgggccatgggagccttcatgacctcctccaaggtggtcagaggagctgcctctttcttagaagcctttgacccagagacaggggcagacattttggttctgaaataataagaagtccagcagttaggcgccataccaaaccctagaattcaaaaagggaatgggagtcccctaaccgctggaaggaggccccctccggatgcttgcaaataaggaaaccccaaaagatgttccctgacaagcatcgggtgcaaaaatcccaaaggtagcgacagtggaaaaagaaaaagaaaggggaaagaa

SEQ ID NO: 400780 - DNA, 629 bp, Cannabis indica
acatatttaagaagaaaaaaaaaaaggttcgcgattattgttggtgtgcgattttttcttggtttgcgaatataagtgttgtccttcgtgacatggtgtgagagtctaggttttattgtttgttttttgtttgtgattttttttggtttgcgattgttgctggtgtgcggttgtttctagttaagctttttctggtgtgcgatcgtgtttctagtttgcgattggtcctggtttgattttttcttatttgtgattgtttttatggttgcattgttcctggtttggtgttgttgatagtcggtttcagtcatggcttcatcgtcttctccggtaaaccttagcttggagtgtgtgtcgatcattcatctggaggaggagcaggaagagcctgcagtcagttatgagggtccccttattgacgagactgaggttgttactcgatggagtattgtgggacgtttcttaacagatacgccaattgatttaatggcgatgcagaacctaatggttgtgttttggaagcctggtatgggcatgtatgtgaaggagttaggatgtgacaaatatatttttcaattctatcatgaaattgatattcaaagagtgatggataggagtccttggacgtt

SEQ ID NO: 400781 - DNA, 591 bp, Cannabis indica
tcctagcattgaccaacttgtcatgccactataggtcatgaacttctcaatttcatggatgcatacttgggatataaccagatcccgatgtatgaaccagatcaggaacatacctcgttcattacagatcgaggtttgtattgttacaaggtaatgccttttggtttaataaacgcatgtgcgacgtatcagaggctggtgaatatgatgttcccagattaaagcattagtagagatgcgatctctgaataagccaaaagaagtccaatgtctgacaggtaaagtcgccgctttaaatcgtttcatatcacgatcctctgataaatgcaaagaatttgtcaaatttaaaaggcaataagaagttccaatggaccaaaaagtgctaagcagctttccaagcactaaaaacacatttggggcaaccctcaatcatgtcaaaaccaatgcctggagaagttttatccatttacctggcggtatccgaatatgcaattagctcagtactaatctgcgaggaccaaggtagggaatacccggtgtactatgtcagtaaacgtttgctagacgctgagatgttggaaattattttac

SEQ ID NO: 400782 - DNA, 643 bp, Cannabis indica
aagcagtgacgtgtgtaataaaatatttgaatcttatttagaattttttaaaaatttacagataattttaaatagctataacgtacatgatcataaaaaataatagaaaaaaataatttttcttaccaaaatagatgaaagaattactagaacaacatttttagagtgttctattatgagattaggtaggcacatagagaaataaattcaaacattaactgtaaataaaaaataaaaaaaatgagatagtcaatattaaaagcaccagattgaatatagaaaaacaaaaatacaaaatgagatgatgaataagatatctcaatgtaattgaatagaagtacaattcattgttaaaagagaaaaaataaaggtacaattccctttaataataataatatatattgtttaaaaaaattagataataagaaaatgtaagatcggttgccaattttcaataatttttgtacccttgcttctagatgaaggtataccagccattggataccaaaaatatgcattctttatcaatctaatggttaaaaagctattgaagttttacatacctcaagtgttaaacgaggttttacataattggcctatatttatatatactatactaactaaattatataccacaattaaa

SEQ ID NO: 400783 - DNA, 940 bp, Cannabis indica
agttgtattttgtgcaattttacacttgtggttgttaatatttttcaggtttagtagtgaaaaagaagagaacaaatttgaggaaaattgttaaagaaatgatgaattaaataaagtcttgtcactaaagcataatgagatgaattcaaaaaaaaaaaaaacttcaatagattcggtgcgattgaagcttttaatgttaaagaattggaaaatgtagagtagcacctcgacatggaaatctaatgtcagggtgctaaaaggtaaaaatttggcagaaatatcgtgatttggaagtctataggcaggcctcgacattgggattcaatgttgaagcagaaggccctcaaaaattggagcttgcgacatgcccttgcagtgtcgtggctcgcctcttgtgtttggaaaaacctgggcgtgttaaaaataggggtgtacgttggtcggtttatgctacattttattcaactcaatgtaaagatcgggttacaaaaatctaagtgcaacctaaaaaaacgaaaatagtaacccgcccaatgaaattagtcgatttggtcgggttaacctgtccagaccgaccactaatatttttttttactacaaaaattgttatattttagttaattgtattaatgagacaaatatatatagattgaatttaaagttcaaatcaaccaccataaaaaatatattagtttcaactttatattttttaaatagtcatataaattatatgatatataaatatgtatcataaaaatatataaatatataaaaaaacccttttaagtgggttggtcaggttagttcgggtggattgggcgggttggtattattttcaacccacccaatcctgcctaatataaagattgggcgggttatattttggttggatttttcggtttgtatttttcgtggggtatctcggtttggtttgggcggg

SEQ ID NO: 400784 - DNA, 738 bp, Cannabis indica
aggtaccctttagcgtcggttgttatgaaaaaaccgacgccatagggaccctttggcgtcggttgttttaaaccctatagcgtcacctggaacagcgtcggtagcgaatttcgccaaaaccgacgccaaaaccccttaaaaaccgcctctaaagcccaattttgtagtagtgggtggtcgtggttctaagatcctgggtcttgagttagtagtcgtcgcgcggtgggttgatggtcttcagttggaggcacagtggctggcaagcgtgggttgctagggtcttcatatgtgtgcgagagaggaggagtgagttatatgagaagaatattttaaatttaatgaaaaagtgacatatcttactaattttaatataattagatttagtgttccaacaatttacccaaatacatgaatattaatctaaatttatgttctctctagcaatttcattaatctaaatggcatcatgatatgaagacgtacaataataaatattaattatattaattttctttttcgttacgttaaacatttctacttatttttcttctttgtcaatcattaataaaaaaaaagtataattaacttattttttcttatgtatgcatgagtacatatatacgtaatatatagtacttatatacaaagagtactagcaataattttacatatatctactgcatcatatagaaataattaatatatataaaattaatcacgtggttactaatttttttt

SEQ ID NO: 400785 - DNA, 832 bp, Cannabis indica
aattaactaatgcttgtcaatactatttagtattactgatacaccctagaggtatgaaaaatgatctttaccagttttacttctggtaaaaaaaaaatagttgcctttgttaagtgcactccttgtagtgaaaggcttcagtaaagtttccccatgaaaatagaaaggtttaaactgaatatacattgcaaatgtaaaaaaaagaaaatatacctgaatatactacaatctcactttagagatgtgttgaatctttgcgtttggttagaggtaatgaaatagaatagaatggaaatgaatcaattttcattccattcattcgtttggttgcattttaaagtattagaatatcattccaatggaatgacttttctactatgtgtggaatgattattttattttttttatgcattttgaattttgttccatttcattgttatttctgttctcatttctattcttattcctaactgtatattgttcattttttttatcagtttactgatgtgaagcaatttgagagttcagaaagaaaatataagtatagatagtgttataagtacaaacatgaactccaaataaagcacaaactaatttatcatacaaaaataaagtttgtcttgataaaaaaaggcttgtattatttttactccaaagggttaaggaatagaaagcagaatcgtttgaaaatgaagaagaagaagagagaatggaagcttactaaagtacaatctgtttatgaatagtgataacataatttagaagctaggatgtactaattattatcatttgttttgggttgcagcagtgtcttgaaagcatatggtggcat

SEQ ID NO: 400786 - DNA, 502 bp, Cannabis indica
accagtctttaggacctttaaaagtatggcagctctgataccaagttataacgctttaatctatagggacaccatgtgtgtgatttgataaactaatttaatactaatagatttatttaattattaaaaaaaacgtgataatattaaaacttgactaaaataaaacattagaaacgggcatcataacgacattaaaaatgttttctagggatccccattatgaaaggtttacaaaaagactatatacgacgacaattcaaaacataaaatcaaaatacgcagcagatacaacctgaaaataactcttggcaactcggcacacatgctgatatggtcaacatgtacattgctggagaagattgtcacctcatggttgatctagcttttctttgcctttacctacaccacatagcacccgtgagtcacaaggactcaacaagaaaattaataacaataatcatatggtttattattcagatattatcatttatacttagacaat

SEQ ID NO: 400787 - DNA, 390 bp, Cannabis indica
tttataacgagagaacaaccattcgtgtagctaaataaaggaggcaacaatgacaattacacacttaaaattttattaagtgggaaaagcaaaaacaacacatggaaggatatatttaagacctcgagaggtagagtaacgacaatcatctccaattcgcgaggccacattacggtcgtcactgaccatcatccatgggtggtctcgggatgcaccaccccgaccccccataaggtggtctcggggtgcaccacccccacccccataaggtggtttcagggtgacacactctgaccctcacttgagagtggtgcccctacaactgcaaaaaaaaaaaacaacaaaaatgcagatttactcggagtgtaccccgtgttggaaattatttta

SEQ ID NO: 400788 - DNA, 794 bp, Cannabis indica
ggtcttttgattaatacttttttaagaattgatagaaatttataatttttaaaattaactatttattaataaaaatgaacaaaatttaagattagtcaaaatttataagataaaatattaatttttaatggtaatagaaaaagagcctatatatgtttttggctaataaatgagcctcattgctaggattagcatacttgtactataaacatgtgaaatttgtgcgagttaaaaattagttacaaaatgtctaatatgtttcatatattgaatgaagatacgatgaacattataaataaacaaagaaaaaaattgtaacgaccactaaatcaatataataaacttttacaaatcatatgaccattgcatactcgaatgtaaagctttctatttgtaatggctaattactgataaatgataaaagataaaagtagtataggttacaattggaagatttttgtttttcgaactgtaacagtattgtaaattggttattttaacaagttttgttagacacaacgaataaataataaaattgcagtttagccaattattatattagtgctacatgtataaatttacattaaaaaaattatatatttttaaaaaattattaaattaaaaatcaattaataattaagaaaattatgtaaaattaaatttaaaaaaattatattattatttttaaattaattacaaatgtgacattaatatgacactgacatgacaagtagctaagcatgttagataaattaacaattaacccaagatttatttgtatataacatagaaca

SEQ ID NO: 400789 - DNA, 565 bp, Cannabis indica
cttcacctctctctcttcgaaccagccctgaaccaaggaggttgttgctggattttgtgttttcagcaagattttggagggaatcaagcaaaggtaagaccctagaacccatgaatttgtattttggaactttttctttagtttgagtttgtgattttatgagttagtggcttttagggtttgagatgtttagggttcgaatttttgggttcatttgagttgaatatagcttcttgtagctggttttgatgtttgggattggttttgtgcaagtttgagctttgagctcaaagctttgatctctaatggcatgttgagttttactgagtttttctgtgaaatactggctggaatatattgattatgcattgtttaggtgttctggaacgtatggttgcatttggtggaggattgagcaagaaatggaaagtttggggtgaactggtggaaaccggctagccggtttcaccagtatctcgaaaaccggctagccggttttggctgggtccccgaatgctccattttctcaattctcgtccatttcagtgccgtagttgggtgtttc

SEQ ID NO: 400790 - DNA, 524 bp, Cannabis indica
cgaatataacatggattcaagctcgaaaacatccctcaatatccatctaaagcttaaccaaacccaaaatatcatacaatcaaagattcatggttaaatcaactaaagatcattaacatgcaacataacttcatcatcttcaacaaactcatgcttttcaactctaaattgagcaacaataatcataataagaagctgtaaaaactacctcaatctccaattccaagttatgcacaatcaacccccaagaatcaagcttccaccaagcaattactttccaaaatcaaagagaaaataaggcagggtttgggagagagagggggtcggctaagaggtgatcaacaccagaattttccttttccttttctcaaaatatcaatttcgtcaaacataataaataaaggtcaaaagaccaaaatgcccctagggctaattcccacatagtctcacatacaagggcataattgtcatatcacacatatctaattccaaaaaaaaatgcagatttctcattatcaaattaa

SEQ ID NO: 400791 - DNA, 940 bp, Cannabis indica
aatttgtgcatgttatagttatttatgaccattttgtaaatttttcaaaaaaattttagaataatttacaatgccaaaaataaaatgtatatatattttaggctaattaggattttttgccccctcaacttttaacatgtaccaaattatgccccttgaacttttaatgtcgttaaaaatgccccctgaactattgagattgttggatttaagaatttttgtctaatttcattcaatttaactatttcagtgattatttatgtactaaaccatgctccccagactatgatatctaccaaatcatgcccctcgaactttgacatgtactaaattatgcccatgaactttcatccatgttagactttttattaaaattaaaaaaaagtccttaaatccaataatctcaatagttcagggagcttttttaacgatcttaaaagttcagggacatgatttggtacatgtcaaagttcaggggcaaaaatcctaattattctatattttattatttttcttatactcgtggttaataactgtttaaactttattttcaacattgtaaactatttagaattttctaaaaatttacaagtagtactaaatagctacaatgtactcaatcataaaaagaaattagattgaaaaaaattataaatgctgaaagttgaaacagataaagagtctaccaaaacaaccctttaggatgtctactacagaaatttccaaaaaaataaacttaaacattgaaactaaaaagttgatataccaaaaataattcacaactactataactaaaccctttatttctctaacagtgactcttgtgtgtccttgagtaagttatgataaaatgaataaagcttaaagagattggtctttatgaaaaataaatgtacatccacttataattccaagataatctaaactcttcaatcattag

SEQ ID NO: 400792 - DNA, 599 bp, Cannabis indica
ctaggttgaacttagatacaaaatctgctggaattcaagaaaaatggtgaagaattttcccttggttggatggcttctagcttgctcgagaaggagagggagagatgaagcaattaggtgtttccttagtttctaaattaataacttattagcttcaaaaatattcagcatttaactaacattaattaaataaaatttagaccaattaacattaaaagacatagtgaaattaacctaagaaatgaccatattacccctcttgataaaacttaaactatttaaaacctaggggcattttggtaattctaactaattcgccaaaccgacaatctaacactctaaactagtccggtataaaatccaattcaattcatcttttattgtcgcaatatctctgacctctccgtcaagttccacggtcaccgcgcccaaaaatattttatctcataaatattgtttactattcacacattatctgataaaatctctgtaattaataaattacgctttattagtcacttaataaactttcactaattaacttaagtaagatcataatcttacttcattatcaaaataatctcatatttaataaaata

SEQ ID NO: 400793 - DNA, 653 bp, Cannabis indica
aaaaacaaaaataagaagtgtactgaatatcactcgtgaagtaatagtaaaaaaattaagttttcatacttaatttttctatttaattagaaaaaaaatttattttcacattatataaactgagattattctatcaattgaaaaataaaaataaaaaaataattttggcaaaaaaataataaaaaaaaattgagtttgacttaaatatttttatatgaacatatttttaatataatgtaaataaaaagtaatttttgatgttttctttaattaagtagttaaattaaacatataaattcaaatttctgttttgttattcattatctgatgaaaatttaatagtttaatatttttaaaattaatatttatagttaaatttgtttagtaaccatcaatgtctaatactcattaagaagtgttctatatatattatacagaagaattaattgcagtaaaatttccaatagtttcattttgtttgcacttaattttttaaaacttaaattttagcatcaaaacttcaaatactcgtgttatattagtaatttaaaattctatttattttaggtattaagtgtcatgttagattgtccacgtgtacatttatgtggacatgatgtacacatgatacaattttattggtcacgtaaaaa

SEQ ID NO: 400794 - DNA, 939 bp, Cannabis indica
ttttttatttttttttttgaacagtacaaaaataaaagaaaaccaatattcagtttacaagtttaataaacataaaccgaaaagaagaaacaagaaaagtaataacaactaaaaaaataagagagttcaactaaaacactatgaaaacttgggttggctcccaatagcgctgtcttttttgtcatatagccggacgttgactaagttcttcaaagaggcgctagaatcatggcggacttggcttggtcaaaatgacctcccaagtaaagctttaaccgctgcccattgactttaaaagtctcggggctttcaccttttagttctacagctccatagggaaacgccttgaccactgtaaatggtcccgaccaccttgactttaacttacgaggaaataatttcaaccttgaattgaaaagtaaaacttgctgtccaggttgaaattcctttttgactaagcttcggtcatgtcacttcttcgttctttccttgtagatctttgcattctcgtaagcctcatttctaaactcctccagctcattcaattgcagcaatcttttctttcctgcagcttccaagtccatgttgagggtgacatcccaataggtgttttaattccaccggcagatggcaagcttttccaagcaccaacctatacggtgacatcccaataggtgttttaaacgcggttctataagcccacagtgcatcatctagctttcgtgaccagtctttccttgatctctgcactgttttctccaatatcatctttatttccccattagaaattttagcttggccgttgctttgtggatggtagggtagagcaattctgtggcgaacgctatatctagataggagtgcttcaaactgcttattgcagaagtgactcccttcatcgcttatgattggtcggggagtaccgaaccgagtaaatat

SEQ ID NO: 400795 - DNA, 587 bp, Cannabis indica
ttggatccatccaatatttttttagtccggattagatccatccaatatttttaagggatttttttaataatatacataatcaacaatttatttacaaaaatgacattatacaaataattagtaaataataacgttccatgtcagcaagaataccgtgtatacgtattcagttatatactattaataaaagcatgcatttgactcattgcacttaacattgaccttttttttttagaaaaaaaaccaatatttatttctctttttttgttttaaaaaaaaatttaattacgctactaattattttgtctcaaaaaaatactattgcaatctattttttaaaatgatcattttaatatgtgagaaacatatattttttgtcaataaaaaaaataaaacaaaagcatcattttagtttctttaatatttagtaaatcaaagagtaatatttttttttacttaatattcaaagtgcaactaaatgacttacacaaaatttattataccaactaatttccaaaaattattagaaactgttgttatataaattaacaattaacccaacatctatttgtatataacatagaaca

SEQ ID NO: 400796 - DNA, 1042 bp, Cannabis indica
cgaactcatggccatcataaaatataactctatgccgatgtcattattcttggctaaagaagctgaaatgaaagccctcaaaactcagtatgaatctctaaaaaagcaatttttttcaacgagaatcatattcaacagggtctgaatcaacactctttggagaaaatttaaccctctttggagcaaatacaccatcagtaccatggcagtgctcaaccatgccaaagacttctccgacatcacctttctcagtctcttcacaagaagactcacttctccgacttagacgaatgcttgacgaaaatcaacaacaataaaaaaccaaaaaggggaagaaaaaggaaagcctagataattctcctccaagagcatcctcttgatctgaaaaagagccaaagcaattcatggcccaacgaactatgcataatcctatttctgccatgatccaccaaccagatgaagaatttgataatcagtcttcttcctctgaccaagaagagaattttgaaacttggtcccaagattcagatactagtaacgagtcccaagattcgggtactagtgacgagtctaaagactcggatacttctgatgatgacgtacccccttattttatggctcaatctgcagaagaagcatactctcaaaccgagcctattgtcaaaagtgaagatgaaagtgaagaagatgaagaagaagcagctacaaagaaaacagaatccaagcatcaccaaaagagtaaatattctaagtttcaaacttttactcttgatgacattcccccatctaaatggcgagagagattccaagaatttcaagcttggcttagcctggagacacaaaaaccacaggcacagacggggacgatcctcttgaattttgtctcaagattcactggaactttgcaagattggtggacaagcttaggtgaatatagacagatgactttcctgcaactcccatctgtcgcaaatgccctaagccatctctatgtcgaattttgtggccaagatgcacaagtaactgaaagacttagagcaga

SEQ ID NO: 400797 - DNA, 575 bp, Cannabis indica
gataccctcattcgggacctggagcgtaaacttgaccttattcagagtttgcctgtgggctctaggcagtgggaaactgaaagaaatttgcgcgcttcccttaacgaagcccgtatgaggaaggaggtgtattggaagcagcgagccaggcttggctaaaggaaggggataagtgctcaaaaattttcttcctatctgcttccataaaagggagaagaaatgccattgacagcatcctgaacaaagacaatgtgtggatctcgaaaagggagcttgttggggctgaatttttggagttcttccaaggcatcttctctggatcggacactggcatggcgcctaattgcatcgatttagtccgggaaggtttatcttcggaagaccaggctgatcttattagaagaccctctcttgaggaagttagaactactttgtttgctatgagtagtaataaagccccgggcccggatgggatgtctgttcttttctttaaacactactgggattctgttggggcagacttctgcgaagcggttgtggactttttccaatcaggtcgtatgcataaaggtgtt

SEQ ID NO: 400798 - DNA, 733 bp, Cannabis indica
aattttgtaagcatataaaatcaaatttcccttttaaaattacacatttttctttattgattttaaaaaaatattatatattttttttacataaaaacccaaaaataatttttttttatatagctcattttaagaccagcctacgcttctctaaaagcctctaaaaaggtagactttatcattgaaaagaaataaagaaaaatatgactttcacattgatttgaccactgactttttaagtcctctttacgtaatgatataccacgaacttaattctacattagttaacgttgaagagaaaataatgagttttagcttgctatattggaaggattcaaaattcaatattgaattattaattaaaaaaaaaatgagtttctataactttctaatttataaaagtctcacttaatatcattatttcaattttatgtttttctttcttcttaacctaaaatcactatcttattttcagacactatctacatttttttttctttattctgttcactttttaatttgcgccacctgtactatgattttctatctaagagtggggcaggttgggcctatgctcaaagtccccaccatgaccccccaaaattccaacaaaaaaaagctctcaatttcattttttaaaatatcatattttatatttttattattatttattaaaaaatataaggggaatgactttatatactgtttttttttttcaaatttacagtttgga

SEQ ID NO: 400799 - DNA, 606 bp, Cannabis indica
agaagactttgtttttctcgattctctgccctttctttttcttttaagcacaatgttgtcttctgtgagttctttgcacccgacctttgtccaagaaatccttctagggttttctggttgacagacgtccggagggggcctctttccagcggttaggggacccccattccctttttcttggtttagggtttggtatggggcctaactgctggaatcttaactcttttttcagaatcaaaacatgtctgcgtccggttcaaagtcgtcgaagaagagcggtaagcgtctggctaccctcgaagatgtctcactgggtcccgttgcccaggaggggtataagtcacgggccacaggatgggaggcggctgagcttcattccaccctaacctgcccccaccagctggagaacatcatagaggtggctggaatcaaaccctcaacatccgggacgtatcaccggccgcccgagatgcggagacgcccaaccacaactatggcggcttcggggcttggagccagacgcacctgatggccggggccatgcttcctctccaagactactttattaattgcttagtttttgtcggccttgcgccataccaactg

SEQ ID NO: 400800 - DNA, 582 bp, Cannabis indica
tagttgaaggagtagactacgccaccgaggagttcactaatgcaattcctcacaggaggcaaggtgccttaggtgccagatgggtgagtcctccgtccaagatcactgaggcacgtatgaaggatttggacaagtctggctatctgggtggacttgaatgttatgtccctgcctcaaatcaccgagccacaaactcgcggaaggggatgtgtgcctggtcggtgcccacaccagacaaggggcaatgctgcctttgcacacgtacttcaggaaggtggcagattacttccgcctcagtcagacccagtttactcccaagggcattaagtatctgtctgccctgttcatcctctacgccacccaaaagtggggtgtgccttctccgcacgaggtcagttggttttttgacctgaagtctacccccaagcaaagcaggtcggggtacttctacttctctcagccagatttcaagtggttgacaggcaccgtggacaaagtcgtgagcaaaattggaaattttgttgacgagtattactttgttgaaggcatgggcaccacttatactcagtttcaacagatccc

SEQ ID NO: 400801 - DNA, 577 bp, Cannabis indica
  modified_base (146)..(146): a, c, t, g, unknown or other
actcccacaacatgagcaatataggcaatactatacctactctccaaccttgctttctctttcttggctttcaagccaactatattagaatatatataattatggttatatgaatattatatttttattagttttttttttttttnttttttcgatttagtgtagagtctttttgtattgtaattttaaagaatatcatatgaatattagtattttttatattaattaattcaatctttacatttagaaaaaatcaagatctatttttaaatgggaatgtatatatacataatgaaagaaaaaagaattaagaaaaaatatcaataaaataaaatcgattagaaaaaaaagaacttatttgagattgaaatgaataaaaatggttaagaattccccagacacacacagtttcatttatatatactgttggctgtgcccaataactacttttattataaatctgctaaaaaaatatatttggacaatgcttgtctatgattattaacacctagatatatttttgttaattctttcaaaacaaaaattactaactcatcatcactcaaataaatcagcc

SEQ ID NO: 400802 - DNA, 558 bp, Cannabis indica
accaaacggaaagagaaaatgcacacaaattgaaaaagatatcaaatgccgaactcaccgacatagggaatcgagaagaaataatggagttaacacccagagaatgatgcattggtgaagaagcgccaaaaaggggcttaaaggtccatgaattggaagcggaagagaggagaggttgaagaagctttggggaagagtggaccagacgacgagaagaagaggtataaggaagtgtttgggctgagcatagtgccagagatcgaaggttggaggatagtctcttcaacatcatcgtcgttaatggttcgaaaatttgtgttacagaaaacctaacgtcttaaactgagctctttgggatgcagatgcgtttggcaaactgaatagcctagcccagtcccctgctcgggttgaaattgaataaaccctcaacggaaatttcattatatttatttatttattttttttttttttgaatagtttcattatctttatatattaaaaggtctctctaacggcattttttggtttaacagaatatacttaaaaataaaagaatat

SEQ ID NO: 400803 - DNA, 507 bp, Cannabis indica
ataaaaaaatatattattaattagtgacagcagttttacaagaataaatttaagagcagtccacataaaagaatagtgactgattttaaataacaaataaaggtatgttataaaaaataatatatacattttaattattcaactcgaattccaattgtgttctttctcctaaataataaatattatatatacaaataattgataaaattttaactttatatgttattatttatatggttgcatatatttataccaattgagtattttccctacagtgaaaaaaaataattctattaataaatatacaaaaatgataaattttatatttttatgaatttaattctttctttttatatttttatggatttttttataaaattgtagagtattatttttctgctgctttaaaaaaaatgttgttttgacgttgaaaaaaataacaatcttttttataagtatacagagtgttgtttttttattgtttcaaaacaatgttattttgacgtt

SEQ ID NO: 400804 - DNA, 557 bp, Cannabis indica
aaaaaaaacaaatatatttttaaaaaacacatataattttgaaaaaaatatatatatatatactagaacgtgtcataaaaattatataatgttcataaaaatgtgttaacaggtgcaatttatagcatttggctaaactaaaatttgtgtataaatgagaaaaagtgtatgaattcgagttgtatatataggttctgttcgggaaccattttgtttctttttttaaaaaaaattttacttaacaaaattttgtagtttcttcatgatttttgattaattaatcaaaaaactgattttttaatggttaccgaacactactatagttgtattaaagagagcttcaaaagtagatttaatcttgtacaggaaagaaaagtgtctagcatagataaaattgttcttaaaaatgtaaaagaattgtaagtttctcttttgaagaggaatcctcttgtggatgtaattgactcaatttgattgataaaaattatctttttttgaaaaaaaaaaaattaatacataagtttataataatattaaaacaaattaatttaaaagat

SEQ ID NO: 400805 - DNA, 815 bp, Cannabis indica
acttatacgtgtaacgtacaaacctgaagacaaaccaggtaatttttctaatatgcatttttttcttgaaacaatagatgtaatgcaaagatattcaaaattattttcatctattgtctcaatatgatatccattacgacgtatatctttgaaactcaacagattcctttttgatttggtggataataaggcatcatctataataatttttgttcctctaggcatcaatataatggctcttccggagccttcaattaaatttgcagtgcctgatattgtattaacatttgccttcattcttgataaatttgaaaaatatttatcacttctaagtattgtatgagtggttgcgctatccaccaaacacatatcatcaccattatttgtagaatcatgtatagaatgacaaatgtccattacttcattaaccaaaaaaaaaacataataagttcaaaatataaatgcttaaataataaaagttcattacataaacatgccaaataaaataaacaccttaaagtaaataaatgataataataagggtatgtttggaagtaattgtgtaattactaggtagggtaattactaagtaattatccagtttaataattacactatattttaaaatacaaggtattttttggatataaggttgtaattacatatgaattcctaatatattgtttggcaaaatagttagtaattatatgggaaaataatattttttagtagctaatgtttaatatggaaaatttttactaattacataatgtaattacattcaattctcatgggggctatgagaattggagagt

SEQ ID NO: 400806 - DNA, 929 bp, Cannabis indica
tatggcccaattcaattccggggcgaccctgtccaaaccacatatgaggcatatttagctttagcattcttagaaagcattttcttatcattctcatcatacgcctcataagtcttaacaactgttacaccatttatgacatgtttagcaatgtaagcatattattttctgaatttcttggaaacgccatttgtgctcaaaccttctaacatgttattttctaaatttcttggaaatgtcatgctctagattgtgaaatctaatcaaataaatgagcccttgctctaataccaattattaacctaagatatgtttccaagaggagggtaaattaaaaatttaaactaattctggtaaattaaaacttttaacacaaaactatgcaatcaatttcttaatcaaataaatgtaagtaatatggcaagcagcgatatataacaaataatcaaacttgtaaagtaaggagtttaagggtaagaaattacaaactctttatttttataaggttcggtagaaaagccacctacgtccttagtctttaaagttatagacctagttttgagttccactatcgagccaagttaatgggcttgactaacccttacaattagaaatttttcatcaaggtgtttcctaacttcttacaatagttttgcactgccaaagactatcaacctttttttttttcagattgttgtagtgacaatctcactctaactaggttgtttacaataccggttccaatcagctcacctcaatcacaatatggaaatgtgtttgaaattacaagcaaattcactctagaagtatgatgaaacaataaaaacctagagtgattaacaagcacaccttaaagaactaaacaccatttttggctcaatgtgtgaaaagtgtttgttggattttagacttgggagctcattaaactc

SEQ ID NO: 400807 - DNA, 500 bp, Cannabis indica
taatttttttattattgcgttaagtcaagctctaagaaaactatcattttcaattctaaaatacttatagaagctatatatctatgattaatattgtagagggtaatttctacaattatcagaagggaagatcgcgggcaccgacaacttgtagagcaaagggaaaaagaatgttaaagccttgggacactggtatggtgtaagccatgacattacaacctggaaattccttttgattccgaacaaggattgttaacattagtagagagagataagtcatgcaagcatattgattattaggttgtagaaagattggatagggtagaatgaatatgatattttttcaaatgttgaagtaaatttacatcaatacactctttttcaaaataagcatctgaattaattattaaagttttttggattgaaattctagttaaattaattgattgaagtttcacaggtggcagcaacagcttgattgtttgaaggcttagttaatt

SEQ ID NO: 400808 - DNA, 807 bp, Cannabis indica
taacataatgacataacataggcctaagaaataaattaattaaataatttttagttattatattatttttacaataataaaacataaaatacattagaaaaagaattaaatcgtgttgtatttactaatttaataaaactaaagaaataaagaaataaataaaaattaatacaaactcgatcattcttaatatataagtcatactattattgttattcctcaattaaaatttgtttttcatcaataatatttgcacatataaaagcaactagctagcataagtgaatgcttaataaaatgtataaatgtgaatcaattattaaagctttagaggataattaatcaacaatgtggtctccatctacaaaattttaattattgttctttataatttataaataaacatggcatgtagaaatatatatgtttattaatttaattaaaaatatatttttatgtgaattaggaatggtttataattttaggtaagatttttatttgttttgatcattttgtataggatgatatattttattgatagttagaaagatattaatgtttttttagttaattggtttcttgatatattatatgggagctaatacaattggtattgtaatttttacctattgataggtataatattgatttatagctattgatttaatcagataatttaaattaactcttgaaaattacaccataattaatatttttttatttataactaattttaaatattaatttggatccaactaacaatactccaaagctaactccaaacctataatttttcttacttattta

SEQ ID NO: 400809 - DNA, 759 bp, Cannabis indica
ggaagaagaaaaagctcagcatctcgtatactatgctagcaaacgcatgataggggcggagacacgatacccagttatcgagaaacaagttttttgcctcctaatggcctcgagaaagctgagaccttatttccaagctcacccaatcaaagtattaaccaaccacccgctccgacaagtcctacagaaaccggaggcgtccgggagacttctcaaatgggctatggagttaagccaatttgatgtacactacattcctcgcacctccataaaaggacaagcgttagcgaacttcattacggagtgccacgaggcagaggctaacgcaagcatgcccgcaaaggaagtcccggcgtggaaagtatttgtggacggcgcctccaacgaaaatggatccgaagtaggggtggcaattatatccccaaatggacttcgactccaggcggccctacggtttgaattcacagcttctaacaatgaggctgagtataaagccctgatagcagggctgaaattagcaaaagtcgtgagggccaaaagagtagaagtctaaagtgatttgcaactggtagtaaaccaagtatcgggggaatatcagatgcgcggagaaaagatggctgcatacgtagcaatagtccgggaactgctccacgagttcacggactacaaagtagaaagaatccccagagaaaagaatgctcacgcagactgtttggctaagttagatttagacagtgaaattgagaaactgggggtggt

SEQ ID NO: 400810 - DNA, 630 bp, Cannabis indica
accgattaaagaaagcattattcttttgattccaaatggtccataaaaagcacaacaataaatctgcgaaacctttatccaaacttgagaaaacattagaaagaaaatgcataatatccaaatgtttatttggtaagtaaaaatgagcaaaatccgaagccttccaagcttccgagctctagagcactctagcaaggcatgcataactgtttcagggaaattattgcacaaaggacataaatgagaaggtataatatgtcgttgggagagtaaaacagcaaccggcacaaaattagtaacaattctccacacaaaatgtttaactttaggaggaatgtgtgcatgccaaattctggcccagaaaggtttcatatcaagtgaagaagatgttgaagggatgtctcgagattcaagagctaagtgataagcagattttaccgtaaaaagcccagaactatccctcccccaaatttgctcatccttaccctcaagcccagaaaaaggaacacttaagatatcattaatagtggaatcatcaaagcaagatcgaagtctatccatattccaagaccccaaaggatcaataaaataagatagtttcaactgttgagggtccagaccacaaagggt

SEQ ID NO: 400811 - DNA, 789 bp, Cannabis indica
tgaaaacaaaacaaaacaacatttacacctttacacgccaaaactacatgacatcatagattaatataagaaaacagaagcaaagaaattgaaaagtaatatcaattgactgattatatgtcattgtcttctattattaataggttttatttttgtacctctgtggatctggaatccgagaattgttgttcaatctaaaacgatgtcgttttgtattgatttgtgttgaaattgaaatggtgtcggtctattcttaactgcattaccactcaaagttttctctttaaattattatttaggtatgtttgcaaagttaactattaaatattgatttggatattaaaaaccattaattttaataaaaagagcaatattacaaatattaaatagcatcctataaatggttagtattttttaattattgttattaaattattttatatactatttttttttttttacaatttagattgctcgataattattatttgggttgcaatttaaatttttctattgattgatatgtaagttattatgtagtcctttcaaaaaaaaaaaaagttattatgtagatattcctcaaaatacaaaatacaaaataccaaaaaaaaaaactttaaaatgtaaaaattaaaaaatcccataaaataaaataagtattaaattgcatgtatataaaaaaaaaattattctattattttttcttatgttaacatagttaatatgttattgctataatataaaatttaattttttcttaacaattaattaaaagaaattagatttttt

SEQ ID NO: 400812 - DNA, 892 bp, Cannabis indica
agattgtaaacgtcattgcagcaacagctacgactggcactcgagatctattctagcaattttgagcaaaaatacattgaactagaacatggagagcagttctggtgctgctaaatagaacagacaagcggaattaattggcacataaaatataattttagatagggtgaacataaaatattattttctaattaatatgtatatatttttattatgcataattttgattttaaagcataaataattttctttttatatataaataatatctttttataatttttttcttttaaatagaattacaaaaatatttttaattttttgtatggttgaattaaatttaacaatgtttacctaaaaaaaatgggtactaaagaaaaaagaaaaagaaaaaaataaaagttaccaagttttatttatcatttattattactaaatacaattaaaataataaaaaaattgatatctacattacctcaaatttcaacattattaattaattaattttaaataaaataataggattttcatcctaaactttgaccctttatataatttttgcttcttaaattatttttttattttattttattttcgtaaataatatcatctaaactttgaaaataattgtaagtattctcctttgtttgtattttgctcatttttttgagataatttcttgataggacggatttatggctaatttactgcaatttgagagtccatgcaaaaaataattgtataaataatattctaacgataaaatttagaattatatatctataattttagagttaatgtttgaatgtttaatatcattatacagtaaaacggtataactaaatagagttacactagaaaaaaaaattaaaataccaaataatatcaatgt

SEQ ID NO: 400813 - DNA, 517 bp, Cannabis indica
ccctacagcctatataatgagaagtaagaggctgaagtagaggatcctttttctgaaacccttctttgagacctacttgacgacaaccaagaacaccatacttactcttcatctttttcattgagtccaccatacttagtcgacactaagacctcaaacaccatgatacacatctcctttttatactttattggcttattgttcccaagaactatacaaccaccaatattgatcaaatttgtgaatattaagtctcccatgagtcttgcgttcataaatctcgatacgaattttatctagaaattcattgttgtattattgtccacacactcttgagaacataactgtggtgtgctggatctaatcaataaaaatacaagtagatatagccccattactaggggtgtacatcaaatcgctcaaaccgctcaaaccgcccgcaccgcaaaaaacatacggtttgaaattcttcgcggtgcggttgcggtttgaatttttcccaaaccgcgcggtgcgg

SEQ ID NO: 400814 - DNA, 572 bp, Cannabis indica
tggacatattatgtgacaaaatagtgagatgttatatcattagagagaaaagaatatcattctaaaaattcgcatgaatgctatgttgtggcactgatgatattcatcaatcacacaccacactactcaaataaattcaggttattcatatatcaataacatgccaatataaaatcttgaaaatgtatttcggccccaaattcagttcggcccgaaatacccgattgtgactataccgcgccaatttgtcaaaaaatacatgcagaaggacaaaacaggtatactatataataatatagtccataagcacgctacccttctcgggtcaaaattacgaaaatgcctctggctcatcaacggggtcttaacatgttatttatcaaattaatttacatctaataaattatataataatataattctataataatacatattcaactagttagggctcgctaatccgttttcttaatcttagaatattacacttggtttggtcgcgaagataattagtcgcgacctgatgacgacgagtgtgatttttgagattttattttgtgcataacttttga

SEQ ID NO: 400815 - DNA, 784 bp, Cannabis indica
attccaccggcccactattattaataggcccaataaagagagagtccattcttttccttttcccttctgatatttcaaattccaagtcagaagagaatttaataccactttcctttaaaataaccactgtaccttcattcacggatatgtcacgatccgattccataggatgcgatttgttctttgattcaggcgcaaattgggaaggagagttaatgttgattgcttcatcagtgggcacctcgttgctggcctgagcagctgtcttccccgatcgcagccatggtgaggctgtcaaaaaattttgccgccgattaggagccttcatccacaacccatacggcttcactatctcatccgcgggtgtatcgtagagcttagagcagaagttttcggagtgtcctagcaatccacaaataaagcaaaatgtggggaccttctcatatttgaagttggcataaaagaacgtatcattccccctgcgtctgaatttcatcctccgtttcaatggaatggtaatgttaatccgcacccgaactctaaagtattctcgccaaacgccggtgaagttgttcggatcagcctctaaatactcgccaatgaatcgacctgcctcgaggatagctttctccgttcgaaatcccgattgcaaatcatggatttgcacccacaaatctagtgtatttagcattacgtttttcggattaccacctggtttcaggcgctcgattataagttgtttcctgtcatacgtccatggactgccattgatcactcttctaat

SEQ ID NO: 400816 - DNA, 1434 bp, Cannabis indica
cagaggtggaggcgtccagcaatccttcacaggtggcgaaggactaggtaagagagaagtatgtgactctgcaaatgaagaacaaatttggtcaatacattttacaatatcaggaggaaaattattgtgtaccacctcattacgcattctccatatattgtcaacaacaattgaagcataaagaaaaacatcctttactcggatacccctcttattaaggctccaaatgaacttcacccaattccaaactcgaataccagtatcacacacagggaagattccccacggagaagagcgccacaagtgcatcgctacatcgcaggtaagaaacaaatgttccatagtttcctcacccaaaccacaaaacagacaactagtatcttcaatctgaaatcttcttttaatcactgctcgaatggggagagcttgagagaggatgcactaccaaagaaccttatgacgctccattatgttactattccaaagtttattccaaagagcaggggcgacattacattggggtgctctctccaaggcctgagtcagataagccgatttacaagagaaacgcccattactctccaaggtccacaaccaattgtcctttcccaatccagggggtgttccatctttcagaatagctaaaacagtctcatgatcaaaaagactttttagcttatgaatatttcacccacccctaggagacaagagatcagccacacagttattatctgtaactacacttccatttggtttcgggacgaaacctttcaagtgagggatccaagggtccctccaaatactagtgtctcttccatcagcaaccctcttgcatgcccctttccgggggattacactagcttttgcaacattcttccaaaaccaggaatcagagtctttgtacttgcagttgagaaaatactttcccctaaggtatttagcctccagaatcttacaacataacgactgactcctagttagtaaattccacccctacttgccaaaaaggcaaggttcatttcttttatttccgaaatcccagtccccctaaatacttgggaaggcaaagtttatcccaggcttagagacaaaggccacggttccctttctcaaaggcccaccagaaatcgcggatcaaaccatcaatttggtggtttgcatggcatagatgggcaaagacagtcccacagacttaataagggtagccctgcccgcttttgataatgttttagccttccacccctgaagtttagatgtgagattctcaagaatgaaattaaagtcaacatctttttgtcttaatctgaagagaggcaaccccaaatacttaataaccccttcggaagtgtctatacccagagcttccttaatttctctcctcattccaactggggtatttttgctaaagaatattgatgttttgagtttattgac

SEQ ID NO: 400817 - DNA, 1252 bp, Cannabis indica
aaatacaaaaaaaatggaattacactgaaatgacattaaagtattaaacacattaaggataatgcactaagcatattaagagtaccaataataaattaaaaaaaattactaaaaataaataaaaaacaaaatttaaaaaataaataaacaaacttataaaaagaatcacaaaataaaataaaatattataaaaagaattataaaataaatattataaaaaaaattgtacaaaaaacattcacaaaagacaaaagtaagtctttttttttttgtgcattttgtggggattcattcttctgatgttagatatagagagatatatatcattttatagagctgaccagacaatgtactaatatcagatacaattctctttctttagtaagacttttgtctacgaattatattggtagagggtagaccatcgaaattgacaagtttagactaaatggattatattgaatatgatttattataaatttttatttttaggaagaaaaactccactagtagtctagtataaagtttgtcacatataccaagtcgttttgatgttcagcgtagtcaaatggcaaatgcaagtggcaatggataaaacaactattggtgccggaaagtaggcggctgaaatggatgtccgttgtggccattacaacttttggtgacaaattatatgagagggtaaatatggacataagtactcaaagttttaagtttataagtggcataatttcaatatttattttttagcgatataagtttacaggccacgtataagatctagatttttaatcattgggtttagacagaaacatgtattatcaactacttctaaatattcttttaataaatttaaacggagtctgtactgacaaaactgaagaaaaattacagttttacaaacattgggtacttatgccgctaaaaataaacattgggtttatgccgcttacaaacttaaaactttgggtacttatgccgctataaattatatattatatttgatgataactaagaaataaaattgtattaaattttaatattataaatttttcatataaatttctttaaaaaatatgaaaagttagatataaaatcaaaccacccaacgatttagaatttaggtcttatatgtatcatatttaagataataacggagtctgtacttacaataacagagtctgtcaccgcttcatactttagcttttattatacctgaaagtcagctgtacttcagaaagtgacacgtgtc

SEQ ID NO: 400818 - DNA, 623 bp, Cannabis indica
caaccattacatataagatatataaattttgatagtggcctaatattatactatagatatatggtcttctggttttgaggccatatacggtggtttgtttagtttatgtgtccgttggagcttgttttgtaccatgtatgatggtttgtttatgtacttgttgcgactatgtacaatattaggccaaaaatataaaaaataagtatttttttcaacataaaaataataataacagaaaagacaaatgaatacagattgtataacttatatcaagaagataattaattaatatttatatgtaagtcattactgttgattctaagataggcagtgcattgttgctgaaagtgaatggtaaaatggattaatggctcaacaaataacttgctcataagtttctttaaatacattcaatatttggcaaacatagcctaaaagaaacatgttaattacaattacacaacaaaatcaaatcatttccattaaactggattgatcaatttacattaatttgcagcagctcacaaaagtttcatctgcaacctaatttgagatggttccttggtcgaggttgactgtttgacaagcttcccaaccttgggatacttgttgatgaacttatc

SEQ ID NO: 400819 - DNA, 629 bp, Cannabis indica
ttttgtcccatttttaatcctctatcattttccaatatccatttactcaacaaacacagaataatacatcataaaatgatgaatctaaaaatgggtttctccattgttaaaactcatgtatttctcaatggaaaaagtaaaagattgttaccatgacatatatgaacacatttagaggataatactcatattcacacaaccttaaacacattaatccgaaaaaaacactacaaatttcagatttgaaaaaaaaattgtgaaaaaaaattttgagccctaaaatcaataactttggctctgataccaattgttaaaataatgattactcataatcattaaagccaagatctagtatttatttagagcatcaaaaacaataaaacacatacctcatatgccatccatgagagccatcaccaccaagatctttgagcaaaagttttggagagaacacttgtggagcaacccttttgcctttcaccacacaaaaccatctcaccccttttccacacattacacatatatatacatatatactattgcccttataaccctaaggggttattaaccaattgggcttatggggtcttttatggtgtactataatttaatgggccaactatagtatt

SEQ ID NO: 400820 - DNA, 1224 bp, Cannabis indica
aaagagcagacagcaaaggattccaccacaacatcgaaccctcttgctagtggtaatattagtaaggggatcgacggtggtaaccctgatcacaaagggaaggctgatgctttcgaaacattagagggtaatagaaagtttcgggaaaacagaggtggctgtcaaggccgtagatcttcattttgatcttatcctgagtgtccgaaatgtaagaaacaccatcagggtgaatgtcaagccaagacttgtttccagtgtggcatggtgggccactttatcagagattatcgtcaggccaagaaagaggagctgaaaaaagaatactactcagaactcgggacgactctttaccatgactcaagctaatgctgatgctagtccatcagtggtgacaggtcaattatctataaatggttgttcctatattgtattgtttaactcgggagctactcattcctatctatcgagttgagtaattgaaagtttccataaaccatgtgatatttatgcttcgaggtttggtaccctgttacctttgggagaccttatagtatccactaggtggattcggtctttgtctttttggattgacggttgtgaattaaccgccaatctaatagagctgcaactgtctaattttgatataatcttgggaatggattttgtgtctaagtatggggcaacgatcgattgtaagcggaagatggtggtgtttgagcccgatagtgctaacccagtagtgtttgtgggtaaagttcaggggacacatataccaagaataacacttctgaaagctaaagatctgatgagcagaggttttttgggattcatagtcactgcagtggatactagccaacttgtgacatctgaatctgagaaacaagattggtatggaaattccttgacgtctttccagaagatttaccaggattacaacctacaggggaaattgaatttgtaattgagttaattctaagagtgaaaccgatatcaaaagcaccgtatcgaatggctccagtagaattgaaagaattaaagatccagttacaagagttattgaatttgggattcattacaccgagctactctccttggggtgcttcagtattatttatgaaagaaagaaaagatgggtcactacgaaatgtgtattgattactgggagttaaataaaaattatcattaagaacaaatatccttttacctcaaattgacgatcttttt

SEQ ID NO: 400821 - DNA, 505 bp, Cannabis indica
tagattatgtcggtagctgctgattttgcttgaatttcttgctgtgtgctttaattttcttattctggctgtaaatacgggttaggcgtttttgacacgtcacaatgattaggcacgaaaaaatatgagtttgggagcatgatacggtaccaaaaatgtattcttaagcacgaaaaacaccacacataatttcgaatagattagtacgaaaatcaggacatgggacaagtctgaaaaacaccgcacaccatattaaaaaactttataatttattaataataatattaagatataaatttattaattataaataaattaaaacaataataacacttaaatataatattgaatagtataattttataattaaaattattaaaatatgaaaaattaaaattaaatatttatttatagggtgtgatactaaaatttgagtatttataagtaaatatttaaattctaataatactaataattttttttatataattatctataaaatatt

SEQ ID NO: 400822 - DNA, 935 bp, Cannabis indica
cacttcttcttcttcttcttctgttctcagtcaagacgttttcttcctttcttctttcttctttattggcttgtgtcgcccttcctttcctcatctcattcatagtcatcaccgcctaactatatcttatttttttattttatttatctttcaaacttttttttttcatttttcgactagtttttatgtcatacaacactgccacgtcagcataaatatataaaaaaattctaacaagtgtgatggaaaagtacgaaactttgctgtggagtgagagcaaagtactataataaccttacaagtgacatttttcttaataaattgtgctacaaatttgtgtatatgtatttttagtttatatttataaaattaaatttaaacaatttaatttccctcaaaaaaaattaacaatttaatgtcattgatgctattttttttaaaaaaaaaattaaagataaataaatagtgtaatattataataaaataaataacaacacgtgaaatcatatatataataaggtgttatgttagtagagtatttttaaaagtaggagtataaaaatagtatagaagagataaaataagatattatatttttggatgatgtgaagatttttagcaccttttaaaatgttactattttaatggggagaaatatttatagttgtcaaaataaacacatcatcttaaaatattattttctctctcatccacgtaagatttgttacaatttcttaaaaaagatactataatggttgacaactctaaaagttgccctataccttattctaacctacaaatagaacattataccttcatgcaaagggttgaaaaatcatttatgctatcaagagcaaatatttagggttcttcagctagggcaaaaacacttgtgtaagaatactttgaaatttttttagctcaataatattaac

SEQ ID NO: 400823 - DNA, 1200 bp, Cannabis indica
gtacctaatggtaagcactagactagaacttgcttatgctattagtgtacttagcagatttatgacaaatcctggtaagacacactggcttgctataaaatggctcctaaggtacttaattgggacaactaagctaggacttaaatacaaacaacaacaaggaaaaacagcaatagaatgcttcagtgatgcagactatgctggggatagagatagtagaaaatctacatctgcctacatattacttataggggggaattgtgtgagttggaaagtgcaactacaaccagttgtggcattgtccacaactgaatcagaatatattgcaactacagaagctattaaggaaagtatttgggtgaaaggagttctagaagagcttaaattactagactcaagacctgtgatttactctgatagccagagttgtgtacacttatgcaaaaaccctatgttccatgacagaaccaagcatatagagataaagtatcactttatcagggataaagtgacacagggacacatagttattggcaaggtgcctacagaagagaatcctgcagacatgggaactaaagtgatcaccctatctaagtttaaacattgtttaaacttaatagggttggatcaaggataatgtgatcctttggatcactgagctatgaccctcaaattgactcgaccactaatgtatcagctcagtgaaggtttaggtggaaattgttgatataaacctccacttacactgatacttaaacaatatacaaggatagaaatgtaattacaagtaaaaatcctaagttggccttcggcctctaaaattcctaacagaaatagttagaatggatttggttaaatccacacctaactaatttttgtatctacctaactaacagatacagaagaaaaccagaagccctaacgtgctatatatacctgcatcaaaaaccaagatctagtcagttgagagagttcttcaagatccagtgtttgaacacttgaagaagtagagattgatgctcgtacatgcacaagaacaagaagaaagttagtatagttagagagagagggataaaacacagtatatgtaataactaaagagattaccagtcaaaaaccatacctgtgacttggaatctccatctttgtatatctgaaccatctttgatagtggaattgagctctcaaattcgaggagca

SEQ ID NO: 400824 - DNA, 607 bp, Cannabis indica
tggatatagttgtttagtaactaggggtatcctagttctatactcaggtggttaatttaacatcttatgctaagagagtgtaaagttgagatgtaagagacactagcaaagtgaatgccaaggggtgatgacattttagattttgtttgggtgtttgtttgacctagactgagactggagctagtcttttccaccgtgataagttgaatttctatggaccatactttgttaatagttttaattgattttggtacaatgtaatcttatatttcaagaaggatgattggaagattgaaaagttttactgtagaactagttattctacaacaagtggtttaaatcccttccagagttgtgggggaagaagggaatgcttggttgtaatcgttgagcaaagattagagaatcttgaggatgaattagggatggattgatttgtaaagtttaatgtaattattgattgtgaaagaaagatggtaactcttggacctgaaggcgaggattcattcgtgttcgtgggcaaggttcaagagtcctgaatttcattaatttcagcatttaaggcaagagatttaatgtggaaaggatgcatcagtttcttaactag

SEQ ID NO: 400825 - DNA, 688 bp, Cannabis indica
tttttactgttgtttcataattatttttttagttgttgtaccgttagttttttaattgttatgtttttattgttatttttatagaaatataaatatttttaaaataatatataaaattgtgaattttttagctgaagaaaacgacaatgatctatgattcactcaatcaaacatatatactccgatctaaccaattaacaacgacaggtactcaaaaggccgaaagcgacgtaactctctaaaaaaacaaaaacgagacccctaaccacaaaactaaatcaaaaacacttgtagacaaattgccctctaactaaaaggtttatttcattatctcttcttaatttttttttaaatttaaaactaaagatattcaaataatggtttggcataggaaaagaaagaaaataaaatgagggtaaatttcttcttaagcaatcaagaattaaagggaaattttaatttacactacctaaaaatttttaagtacacctcattttaataatttttattttatataaaatttatatactttaattttactaagtatttttaactttttttctttcaatttatattcttaaaaaatatacttatcaaacaaaattaaattacattttaaaaattatgacaaataaattaaaaataaaaaattatatgaaatttttttagaaaaaaataaaaatatata

SEQ ID NO: 400826 - DNA, 983 bp, Cannabis indica
taattaattttagataaccttaattagaatattttttcttataacttaaatagaattaataattaagttgattttattcaatatacttaattacttgtttctatttcatgaaatttaataaaataagtaaaaaaaatatttaagtttaaaattaatttgttaattaattttggacaaacttaaattagattatttttcttagatactaaaatataattgataattaagttgattttattttaggtacttaaatatttctattttaataaatttaattaaatagaaaattatatttaagcttgaaattttttaatttcagatcagtttaaatttaaataattttcataatatattttattttattttaataatcgtaatgcaacattaattttgaattgcattatttttaatgcagatattttgaaattttttaattatgaaaattagattaaagttgaaaattaattttttaattaattttagattaacttatatcaagtaattttcattaataatttaattaaaataaatagacaaaaatatattatattttaattagaaaattggtaattagtttatgaattatctagatagatattttctaggtagacttttcgtattttccaagatatatttaattaagtaagaaaattaatatttaagttaattttattttagacacttaaatatttaatatttttattaagatatttaattaaaaaggaaaattatatttatgttaaaaattactttatttaattttagcccaacataaattaaaataatttttccagtttacttaattttattttatttttaaggattttgaaaatgtatttctataaaattgattttgaattcagttatttatatatatatatatatatgttatacccaaaattcggctggagaacatgtgtcaagattaaaggaatgagaatcggtgcaatatcttttatagaataactcattaattacgtaag

SEQ ID NO: 400827 - DNA, 514 bp, Cannabis indica
tcactaataaataaagatgcataaccacaattaaacaatttaaacaacaaaaaaatcatttataaactccaatccatttcacatgcatccaagaacatacccaaagacatgcttttctaatcatcaactttagcaacaaaactcagaattaaattcaagagtagcaaagtttgaagcttaccatcacccacaagcttccatcaccaacaattactccaatccaagcaagatttcaagattaaagtaaaaattgaaaatgatgaactaagaagagcaaaagcggggttcggctagggctaaaaaaaccagaaaattaatttctcattttgtcaaaattccctttttgatgataattaactaatgggtcaaaagaccaaaatgcccctagggcctatacatgacatatacataaatcaagggcaaaaatgtcattttcatcacatacatactcaaataaatttcaagttattcactcaaccataaaatgccaatataaaatcccgaaaatatattt

SEQ ID NO: 400828 - DNA, 786 bp, Cannabis indica
gggactagaacccggactgggacagagactgggacccaagatcgggaccaggaccctggacccgatactcggacctaggacctgagaatcgaaccgtgacccagacccagacatggccaagacccaagagaaggaccagtaccgaacatggaccgagacctgcactcagactgggaccctaacccacactgggacctaggaccctgacctgaatcgaggaccgggaccaatgactcaggacccaagacccgaacctatacccaaacttggaacagagacccgaaccaagacccaaggcatgatttagaactagaccaggatctagatttggacccgagacccaggacccaagactcgaggcttgggcccgaaccatagtcggtgtttaaatttgggaattggacttggacccggacccagacccggacaaaaaaccaaacctgtataagaactttaacttgactcaatatgtggttggtgttttgatttgggaccaagacatggacttaaacccaaacacggacctagacttagataaggactcggacccaaaccaaaacccgaaccttaaatcgtacctaccctgtgacccaaaatttgaaccggaattggaagcgaacccttaaaccctaaaccctaaatattaaactctttacacatacccctaaaccctaagccctaaaccctaaaccctaaatccctaaacactaaacccaaaaccctaaaccctaacttggacacgagcccagacccatacccataccgagatcggaacccaagacccag

SEQ ID NO: 400829 - DNA, 507 bp, Cannabis indica
tattcaatgagtaattattctagttttgaccaccattaaaatactaatttaactctaagtttaagttgcctttagtaagcatatataagtaggagatttttctaagatcgaggatttatatcattacgggatagaatatctagaatatggtcatctacgccactcatttttatagaagaaaatagagtgacatcataaatagatgatttataaaccttcttgtccagtgatatactatcttaagcaatttcttaatgaaaaagctaaagaaaaactaaagaaaaattttgatcaaaataagaatccaagatgtctcggtaggcgagagtcaagattattcttattttaacagttctccattgtttcagtattgtaaacactagtctaaattgtcatcgtagggatgagtcaattagattttgtatttacaagatacttatctgttgagatctaacactattatgttgtaaagcccgcttagttaatttggaaattagcagttgttta

SEQ ID NO: 400830 - DNA, 1346 bp, Cannabis indica
ttttcttaagctttaagtgaagaaattttgcgtgaattggggggtttagggttctgtaggtgctgttgatgtttgttattattttctgaagtttatttatggtgaaatatgttgttttgagctgattttgaggtctgttataaggtttgagcaagctttgagttttataactcaagcttggctctttaatggtgaatttcggttaggtttctgaaatttttaggttacctggtgtaaaacttgttgaccggttttgtaggccctgtaaaaccagttaactggatcagaaatcggtttcctgcacttttcgtgttttcgattcgtgttagtttctgagctttagttagttaattccctgttagtttaggatattgccatgttaattttcagtaggaaaacttttggcttaaaacctaagtccccggttgtgatttagcgtgtcacttacccatgttataaatgatgtgatttaggggcttgtaattcgccgagcagttattccactcaggttgaccggcaaacctgaattcgaaaacaaggtaagattagtataatgatatgcatatgtatttacatgttgagtgtgcatgtttgtggagcctgttagcttacaagtatagcagtatcagtatacatagagttgtactggatactgatagatgtatgtttggctcaagtacgagatcgatgctatcacattggtgctattagagtatggtcgatagtactgtcgtaagaacactctagactcagtatcgtgtgggacacggaaatagggttatggttgtgtgtgtgggtgctgattataacccaggatattatgatgttttatgttatgcttttcttactaatcagtctattgactcacagttgcaatttctatgtgtaggtaagggcaaggctaaggctgagcagccgtgagagcgagcagatgaagattgtatatgtcgagacggttaggcctggagcgtacgatctttggaacatcagggcttattttgtagtcgctagacgacagacttttgtatatgtacagtgaaacttttgtaaatgcttttgtaaacgggatcctggaattatatatgtatgttattttgtgtttttgattaattaagcaaaattttaattaatcacgatttttaataacctcgttgattagcaacgagctgcacagttaagtttaaaatcacgttaacatgatgcctaacatagttagagtgttacaatatatatacgctaaaatctcccagaatatacttctgacttggcaaattagatgagttatagctaaataaagttacatacactaaaaaaataatcaaaaacactaaaaaatatcaatgtaa

SEQ ID NO: 400831 - DNA, 630 bp, Cannabis indica
tgagttttgagcatcgattgagtgtcaatgtctgcaaattcaacaaatcattcattgaatctggaagtgataacaaactttcattcccagaaagatccaagtatctcaattgtgtcaactgacctagtccacttggcaaagaattcaatgtatcgcaagaagaaagttcaagatgccttaagttgatgagtttctcaaaatctctaggtagttctttgagatttgagcaataattgagcttcaacgtttgcaaattcaccaaattcgtaaatgaattgggaagtgacttgatataagaattctgtgaaaggactaaatatctcaagtgtttcaacttgccaatagaatttgatactaacttcacacttgaacgtttcaaagtcaaacaacgcagaaccttacagtttgatgttatgacatcgcaaaatgactcttccttagacttggaaatactaagaaatgttcgaatattttttgcatgagcaaacaaaactgaaagttcacttcttaagtaagcatcgtctacaaaagacacatgaagagtagtttccttgattatttccttgaccatttgaaattgcaaaagtagtacattcttctttataattccacatttatctacttcaacat

SEQ ID NO: 400832 - DNA, 399 bp, Cannabis indica
aaatccaaaatagtatttaccctaaaatatactcatttatttgttgtgtcatagaaaatggtaatcatcaattgttaactactcttattattattattattattattattattattattattattatttgagcttccttgaaataaatgttttaatataatcaaatttagaaaatggaccataaacatctactttaatgtttacaaaaaaaaaattgggctcaaatgaaacccactccacctcttaccatgggctaaggtgtattaggccaaatcttaaagaggaaattacactctataccctttttatattgtcctattttatttttaccttcttttttaaaatctatcatttttacctctttttttaaacattgtaccaatttacccctatcacttc

SEQ ID NO: 400833 - DNA, 650 bp, Cannabis indica
aaaaaaaaaagataaaaaaacaaatacgtatgagattttttgttaaaaaaataataatatataatacaaatcaaaagctaaaagtgtgatattttaaaaaaccaaaaaaaaaaaaaaaagtaaatacgtgtgaaatctgtttttttaaaaataataaaaaatatcaaaagctaaaaatgtgatgttaaataaagctaaaaaaattaaatactcaataaggttaattaaataatcattattaaatatagattttgaaattattatttatgaagttaataaaaaaataaaaaaaaaatagagagaagtaaggaaagaagagatagttagattaaagtgattatagggtgccacattaccgctttatacttctttttatagaacctaacttctaaaggtagggttagacacacaaaaaggcagatgaagaaaataattactcataaccaaaatttaaaagtttaaggtacaataataagaattaggaaattttgaacccatgttgatcgtatacgtcaaacatgcttattttcttgtcttttattatgctgtaatttttaatcataatattgtattatttattgttctcagaagcttatatagtactatactacccttaatataatgagataatgtagctgttagacttttta

SEQ ID NO: 400834 - DNA, 646 bp, Cannabis indica
attaataccatagtacctaaagtcgttggtcgtaaaaaataaatgcatgctttgttgaagtcgttggtcgctgacaaatagccctcacctaggtcgattgctctgccataccgatgtttgcatcgtccaccagccctcgcctgcgctgtcgaagccgtggcccatgggtctcttggatgtgtgcaacgccgttgagaagaaataaaggggagagagaaagaaggaaaaaataaattagggttagttttttttacaattgtaaatacaatgaatgtattacaactgtataaataatgtgcctcttttttatttatttatttatttatttgaaaatttaggtgcatttttttgaaagtttaggcgcctcttttcctttttaaatggatttaggtgcctcttagatatgtacgtaaatattaaactttgattttttttattacttattaaatgcatattaataaagcaatttttgttacaaaaaattagaactatgatatagtgacatgctaggtgggtcgggacatatttactcagtcacacttgacgtgtcactataagtgagtatttttaaaattaataaaaattaaaaaaaatatatgagctttactctttagtgacactctttacttttagtgacccacattac

SEQ ID NO: 400835 - DNA, 521 bp, Cannabis indica
ttaaataattaagtatctagaaacatatagttagttattaattttttaatttaattaaatagaaaaaaatacatataatttatcttgaatttatttcattaaactaagtgtgtttttcttaaattaatatcaaaataatccgataaaattaattttatatattttgaaaattaattatattgctaatcaattttaattatgttaaactaatataattagcctaataaaattatttaaataagataatgggccttcagttgaggtttattcatgtgagggagagctgggttcagtatgtcgtacccactactaatgaccccataactcttacacaaagcccaaaaaagaggaatttaaccttaaataaataattgttattaattaaataaatctaatactaattggaccgaaataaaaactatcaaagtgatccttttatttttggaagctagtctattttaattattaaaattaaatgggctccttatatgcatctagacccaaaagtaaacatataggct

SEQ ID NO: 400836 - DNA, 1103 bp, Cannabis indica
atagtccaagtgtgttctggtcatagaatacaaaacaactcatattctatacataaacatacagtttggatccattgacaaaaaataaatattaacaacttgtgaaagttgtattgtaatgttcaatgtactttggaaactgaaataaaatttctatttggaatcaaaaatttaaagtcaaagacttaaatttacaccaaatattttggagtaattattctagcttagaccaccactacttatctaactctaagtttaggttgccttaagtgagcatatacaagtaggagatttctaagattgaggatttttgtatcatttcgagatagaatgtcttaaataaattcatttgcgccattcaatttcatagaagaaaataggatgacatcataagcaaatgatttataattcttttgtccaatgacatactatcgaagcaatttcttaatgaaaaagctaagagaaaaaattaaaggataatttccattaaaataagaatccaacgatgtcccatttagaagagagtcaaattttattcttattttataaatttcttcattgtttcatattgtaaacactagtctaagttgtcatctttggatgtacaactagatgtcgcatttacaaatatttatctgtcgagatctaacactattatgtttgtctgatgacaattccttgggatttatcccattaaaacaacaaactaagttagaccaacaatgaagattcgaaatttatactacaacattagtaacaaaaaacaacatgattctgttggggattattttaccaggatctagatttactaccatgtatgttgtttaacatcctacacatgaatttctaaaacaatggaatttaaacacataaagttcaagaaaccttacattggttgtagcagaattaaatgactcattccactaagatatctaatccttgttccttttggtcgcagagtattatcgagatctgagcccagttctccttcaggtgttggattcttcatagtcttacacactatgattgagtactagacttgctatgtgtaggcatgtactcaatcactataagggacaaaagtttgaagagagagagagaga

SEQ ID NO: 400837 - DNA, 511 bp, Cannabis indica
aaagttaggacaagaatggttcttaaattgtaagctcttattcaatgaatgaagtttgatacaagaaggatggcttaatctatagtgtcatataatatcattattgatcttagaatcagaaactaaagaaaaacaaaggattgatttttttcattatgcaattttagttagaaaagttttccatgccttttagccatcccaatcagctgggtcctcaaactgtcctaaattacacagttatcagaataaaaggtgaatatgcaagtgttagaatctagcatggatgaaactgaaatgagattgatatgaaaatctggcacatataacacattttttagaataagagtaggtgaaagcacaatggttccaaaacatgaaaccttagcagaatgtaacgtcctgactctcaggaacgccacgtgtgtgtttttacaatcttcttatcaataacctactagcataggaaaagtgtggtttaaataaagtttaataatttaaaatatacatataa

SEQ ID NO: 400838 - DNA, 665 bp, Cannabis indica
ttccatcaaaggacaaatgactagttgacaacttgtttaaaaatatagtttaattattagtttgtcctcaatgtgaaaacaatatcaaacaatagcaaaatgaactcctcagttgaatcaactaaacagtaaacacaaccagatttggcatttacaagattaagatttctcatctttgagcttgcggatacaattagaaccacatgagccacagccacagttagaaatgtgacttaagagagtaataaggagagtcaagtcaaccaattaaagatgggttactccttggaagtgacttattatggtgggcctaccaataatgcttaatgccttttagctactacacatatacgaataggaccacctctaaatcactaaggataagaaaaaaaaatcaacagaaaagaacaaaaatcagcacccattattgaataccaacaacaccacttgtgatagaaatgcttaaatgagtgatctgttatgttcttagatcatatcataccatacaattcaattcaatctaatttagttactgagaaaaatcatcaaatggcagatgctattgtttcatttgtgattgaaaggcttggagacttggtgatttctgaagctcaattcttgcatggagttgaaacgcaagttgggaatgcacaaatcaagcttca

SEQ ID NO: 400839 - DNA, 512 bp, Cannabis indica
aggatatctggcatcgtctcttcgagtcttcacctctctggatgagagtcatccttccgagaccaaaaggtctagcttggtcgaggcagggtcacatttgaactcgaagttgtaatttgactcttcttatgggttgacccattgatctgtctgagcctgacgaatgggcccatgagtttattttgggcattaaaagtacacgtgtcacgcacccaaaaacgcgaataacaactaggttaaattattttgtcatgtttctaatataaatattaaagtttaaaatattcatctcaacctaatgaacccaacccaatccaacttatatgtaatatcccgataagcctaatggtaaataattagagtttatatttatactatgagttaatcaggtaattagtgggattatgatcttactaatctatttcagtataaaatttaaattttgctataagtaagtaaataatcgtaatttgttaattacggagatttatatagcatgtgtgaatgtaata

SEQ ID NO: 400840 - DNA, 985 bp, Cannabis indica
cactgtacttagcatccatggtgaggtttgatccagtcttcactgctgctttgtcaagaaatctgtattaacagaaataatatgaaatgttattataaaaaaataaaatatattaggatcaaagtgtggaacatttaatattattcctatatttatcattccaaacttataaaattaattgttattttaatttttgtagactacgaccaattaaaaagtactatgtaacatattatttgctgttttttttttctaaagtaaaattaaaaaaaacatattatttgctgtaattttttttgaacccctgacttaagtgagtctaggcatgcacaagtctagcccgcctatactagacctatcaatcaatataattatttatatttattttgtattttaaaatgagaatagttatttatgtatattattgaaactttacaaatgatcaaaattagtcatgggagggatatatgattcaacttttgagtaacgtgtatcacgtggaaaacaaataaataaataaataaacttatattaatcatttatttatatatgatatatgtaaaatttaatagaaacaagttatggaagtcttttttttttttttgttgttgaaatatcttttatattaaattatttaacaaaaattgttggtttacgatttttatttttttttgttaaatttaacaggtcgaagtaataccgttaaatcaatcaactaattattttttttaaataattttaaatatctaaatttaatttatttattaaaatataacttaaataattatttaaaagtattaaaaaaattagataattttttatataaatcttaatttaaatttaaattgaacgttaatttaattaattaatcatattttataacaaatttattagttatacggttttaaatatctaaacttatttacttattttattgtttaataaaattagttagatatttttttattaataaatttaaaattaa

SEQ ID NO: 400841 - DNA, 570 bp, Cannabis indica
ccattcttaaagtggtacttttttttaataacttctaagcatttagaaggtattctcttattgttttaattaaattttagctaaaataattaaaaaaaaaaattaaaattagaactgtacttttttttttttactccaaccatactttctactttaatttgtattaatactttaataatatttataatttaaaagttttgattaaaataatattaaaaagtttaagagctccctatattcattaatatttttcataggagttacaactttttgtataattacttttttgaaaattcactctctactttagctaaaaagtatatttgcataataatattagtgatgctctaacctaatacctaataacaattatactcaaaaaatcaatcgcctcacacatgaccatattgatcattttatattcttacatattttggcaattacacataatctacctattaatttttcttagtaatataattgcgagtaaaagttcttaaaaaaaaaattgaaaaactacaaatatatatactagatagatgttacgtgccaagtcacgtatgttaattt

SEQ ID NO: 400842 - DNA, 636 bp, Cannabis indica
tgagtacttgacttgctatgtctcggcatggaactcatttactatgggtttcgaatgtgaagaacaatgaaggaggtaaaatcattaaggaaggaactctctcatcttactagttgtctgacatagaaaactaggtttgatttggttgaaggcatcaagtggatgagtgagagcatcatgttcctttcatagtgttttaactagggctaatggctgaattatatggattaaaaaaaagaataaaatattgggcaaaaataaattcatagccgtacacattaaaagactgatttctagttacaattttgccactttttgcaaccacttattcttctttcaataataccatattttccaattcaatcctataaataccaaaactatttatttaataattataattaattatcaaataaaattatcattcatgtaatttattaattagaccatgcaaagtctcttaattaataaattgaccccaaaacctcttttcttcactgttgacctcgcttttagccaacaaaaacgagtcaaatttagtaagcgataagtgatttatagcaatcgatatataataaagcaatgtaaagacagaggaattttatagaggtttagccccgagcagttcggtaatag

SEQ ID NO: 400843 - DNA, 970 bp, Cannabis indica
tttttataaaggtttatagatgtcctatgttcaaggcccatccctcaatataaaagttataaataataaaaaaaaaaatacaatttagtaaataacttatataatacaaattgtccaaaataatatctacttttataataataaaaatattatataaaattaattttatatttatttaggtaattataaatttttttaaaacatgtatatatgtataatttgaggtatttatgcattttgttacatttgtttcgctgaatattttacacatcaaataatagaaagaatttattcaatcaccatatatgaaaacaaattgtaaataaaagtaaaatagagaaactatatgtattgatttttaaactatgcgagacttttctaaaaaaaaaattatatcatcatgttcaaaagaaaaagagtgcagtgtgaattaactccccctcatttaggcctttgtggagatcttctaaacaataaatttcaatcttgtatgtcgtcttctcaaatattgatgtttgtaataactttgtgaataagtctgcaatattgacacttaattgaatatattagagaccaatatgcattctctttaaatgtataaagaagaattttgtgaaatgtattttaattctatctcattcaatatactttccttttaattgaacgatgtaatattgacacttaattgaatatattggataccaatttgtattctcttgaaacgtataaagaagaatttggtgaaatgtattttaattctatctccttcaatgtaccctccttttaattgaacgatgcaagtagtattatcttcataaaatactgcttgtgttgatacttctttattgagtgtaatccatatgtttctcgaatatgttatgtcaataatctcactcccactcattctctacttgcttcataaagtgcaagtatgttagcatgatctaaagttgcatcgttaaaaaccttg

SEQ ID NO: 400844 - DNA, 601 bp, Cannabis indica
taatctatatatgtatatatattttagtctatatcataagcaagctagctatataacattagcttttcaaaaaaatcttgataattaatgttgttgttatatattctaaaattttcttctttttttttgaaaaattaaaaattaccctctcttttttattgcattttagccctttcttttttatttttggggtggctgccaatcctgttctgacaaaaaagaaaagaaagaaaagttagggaatcttacagaaattgtcatattaagtggggacattatatatattgatttatttttattatactttttttaaaaaaagtttatatatccttttatctgattttgcaagataattttagtagtacattatacattgatttattttgcattcaatgtaatcttttttttagagttcaataccaacagtggtattcagattataaaaagaagtcaagatgagaatagaatcaattctactaaaaaagaaggtgaaacaaatagataaaaaatggtttgaacacttatataaatttaatgggcaagactatggtaggacttagcataagttccctaccggtagggaactttttttgaccattga

SEQ ID NO: 400845 - DNA, 673 bp, Cannabis indica
ataacttaagtattgtgtttgcattaatttattaaaagaattaaaatctagatcattttagatttaatatatatatatatttttttgggtgaaatcgtatcgtatcgtacaaaatccaaaaccatatatatcatatccaagttaggattttataattatttaaattgcacgcatatttattcctaatcttttgagtatatctcgaccaaatatcgagaaagtaataaaagaaaaacaagagacagatgagtatcttgaaaaaaaattataaatttatggttttatatatattattattctattggtttctaggtatatattccttagggttattgacagaaatacgagaaaaatgagataaattttgatatatatatatatatgccataaaaattttattacactaaatatgatattttaaaaaaaattacaaatataagaaaaagtcattttacataaagagggatgccataaaaaattttaaatttgtgtttctttttatttttttttcttttataaaaataaaacactaaataaataaaaatgacctatagattttatttttttttttactagaattaaacctgtttttatttaaattattattttttttttatttaaaaactaaatttaatttcattaaaagcaacagaaaaaaaactagtttcatcaa

SEQ ID NO: 400846 - DNA, 849 bp, Cannabis indica
tcgaggctcatttgaatgttagcgtctgactcgtcaggtttgtaagcctcaccgagaagacgtctgaagttaactgggggaagttacattaatgaaccttcccatagcgagatagacacctcgcttattgggtctcgtgccagcctgactgttatactttgtttgtacgttatacacgaagtgtttccgcagtcgatatgcaccgctttcgtctacccaggtgtaacgtacttgatgcctcgctaacgacatatggtttctcgttattatactaagcaatagtctgtatatcttttcctcgcataaactttacagtcagcgggttgtgaatgtactcttctacttacgcaattaatgagttattccataaaaattgacatcatcgatccgtattccacacgtcttccactgagatggtagccgaattttgagtataacaattgccccttaaaaaattcttttttagtaataagtactttttaataattatagagggcatttttgtcataatccctttttggaaaaatgcctcctttgattttggcagatgtaaggtttcaagggtcattatgagccgtcttctcatcttctgtcccactcccaaccgttaaatttcctaacatttagccttcttgttactggacttcgtgtataaaatggtggcttaagcctgccaaattccacgcacttctggttttttggtgagatccattttgagattggatcattattctctcgtcaagatgtctcatctgagttcagaaatttgttcctctagaatcataacaccaaaattttccaactacctctctttctaggtgatattgaattgaatagatattacggtaa

SEQ ID NO: 400847 - DNA, 540 bp, Cannabis indica
agaattaccctatatatcatttattttattttattttttttcaaatttacagtttgagttgctccgataatttttatgtcgggttgctatgtggattttagttgcgatttacgttgctcttttggttgttatgtcatttgttatgcgaatttctataaaaataaaaaaaaaaaaaaaaaaaactttaaaaagtgtaaaaaatgaaaaaataatcccaaaaaaaaaacatactttttattattcaatactatttcatgatagcattaagcatcactagtacctaaaacactcatcataaatatatattgaataatttgcggtataaatattcaaatcaagtttaactctcagttgcaaataaatacttaagtttaattttttgtaagtaataatatcaaaattataattctagaacttctgtaggtacatgactattaaatattaagtaaattatcatatggcaatctgtgatttgtccaagtcgttaaatttttattttttatttaaaaaaatagtttaaatatactaataaaaaaatga

SEQ ID NO: 400848 - DNA, 984 bp, Cannabis indica
aatttataacttttataaaacacgaggtccaaaataatatacccataaatatatattagcaaaagatataaataattttctgaaaacaaaagtaattgattaaagtctaatgatgaaatttgtaggagtttcataatcttaataagacaaaaatgctaagagtttgatttattaatagctccataatcttggaatttcaacttcagaccatgctctgattcttatggtaaaagttcctgctgcaggccacaattctgttaagcggtttcggtttgaaaatgcaaggttgagggaacctctttattatcagattgtaaaggatagctgggagatttgtgagtctgttgatgttatgcataaaattcaatgttatgtggacaagctggctgtttagggtaaggaggttactggcaactttaaagacaggttgaagaagtgtaaaaatgaagtgtagaagtggaaattgggtcaagatgaggtctctgtagccaattacaaacaagctaagaagcacttggccgaatattatgtgcaacgagaagttttttggcgtcaaagatcgaagcaattctggttgcaagagggagataataatactaagtattttcatgcttctgcaactacgagacaaaggaataattttgttgcaaaacttaaagatcattcgggtccatgggttgactggcatagtggtttggatgatcttatggtttcttatttccatgagcttttttcctcttcccaaactgactggagagaagtcacaagtagcgtgcaaactcgtgtatcatcccagcagaatgctgagctgctgttaccggcttcagatgaagaagttcggaaagctttgttccaaatgcattcggataaatccccagggcctgatggaatgaccctgggtttttttcaaaagtgctggccgattgttaaggatgatgtcatcaatatggttaagcagttttttcataatggttctcttcctac

SEQ ID NO: 400849 - DNA, 581 bp, Cannabis indica
gttttttcaaaaatcttcatttttgtaaactttgccacaaatatcataaaaataaataatttctcatttttcattttaatacaaagtatcataaattgatattttaattaaattatattagtccaaattatgtactacgaatttaaaatgacaattaactaaatttaaattttttcattaaattatatttgatgttttagaatcagaatccaaaaactaaaatttaagtataatattacaaccaaattaactacgtagaaatgtaaataaaagaccctatttctaactctatagatagttaatgtctatttttttaaaaataataaagcaaatgttattttttactttttaatacctacaatacccttcattatataaaatgtattatatgttttattcctttaatagattatgaaaaacaataaatcaaaatctctctacttaattttgtcaactatttttcattatataaaaagtattatatattttattcttttacattttgctgttgctgttgttgtcttatatgttatttaaccatataattaatttttattaatatatcgtatgatatacaaata

SEQ ID NO: 400850 - DNA, 831 bp, Cannabis indica
tttgagctttgtgtatgattttttgttgggtattttgagcatatattctgtggtagtaatgcctgtaaacaccttgatttagcatgaattttgttttctatgacttaggtgaagttaggtttgagtttgggtattttgaggtcttaaaaatgggatttttgggtttttaggacccagtcgccgcagccagacttttggtcgccacggccaagtttggtagagagcatgcctatttttattgattttgttttggccataactttcgactcgagactccattttggacgttatttatattattggaaatctcatttagagatctatatgttaatctataaatggaattcaaattatgtgtatgtgaaagggaatttgggattaaccctatttttaaaatcttagggatgttgactaggattaccggtgcttgctcagaaatacttggggatttagaatctccacatatttggattaccaggtaagatagtaagctagcacatagagttaatggaattggcgctcttgtatgttattatgtggatgttatgtgagaaaccgagattagggttattacgctaagtttagcgattatgtgatttagagttattactctagtatttaagtgaatgtgaatgcaatattatattgtatatgttgatataaagaattatgcgcttaaggcataattaagttagactctataatcagttttgagataaactattctaaggccttattgtaaatagatgtctgagcgcaacgcgtaggtctatgtcaaatagacaacatatgtagtggcatcaatatttatatgaattgtgattatgctgc

SEQ ID NO: 400851 - DNA, 542 bp, Cannabis indica
atctgtaactcttggttgcacaatagatatcacagcctcagtatcctcatcggcagggaaagaagtcatgaagaggttggtgtaatattgttcaataatattcagaatgtcatctccatcagagcaccaaatccctgcttcattaatcagtcctaacaaatccgaaaagtagaactgaattagattgtggaggaccaaagggggtgctatgaacaccttataaaaacataaagaataagactcttacaatcatagagaataaggagaaacttcagcactatttattaaataaactaatgacatttttttttggacattgatcaactaactgatttgcatcctaatattcaccaaccaactaacttaggaattttattagagcactactgtcagtttttttactagtatattttcaaatatatcagttaattttttttttattgtataacacaccttattacactattatttctttaaattactaaaattttattttttatttttaatatattttctttattttaaatatatattattaatat

SEQ ID NO: 400852 - DNA, 557 bp, Cannabis indica
aaatactacaaaattaaaattttttgatttagctacttagtagttatataatttatgaataactagttactaactagttattaatgagtaactacttagtaataaaaatacatgaatatgaataaaaattagtaacttgttaagtagttttaactaactatttactagctactaaaaaaataaaaacacatgaataagattgaaaaaagaaaaaaatgataaaaattagaattaatttttaaatttttatttttaaactaatttttttgaaattgaatttataaaattttatttaatactctcttatctcattctcattcacaatattgaacaaaattattagtttaaaatattcaatatatacatatacaatgcataaaatactttcctatctcacattctcaatcacaatacatatacatatacacacaatatatattcaatacaacacacaatacatacatttatactattaaagtttaaatttttactttattagcgcaatctgaccaccaatgtcgaccaaaatccagccaccacgcacaaccacaataaca

SEQ ID NO: 400853 - DNA, 632 bp, Cannabis indica
gaaaaatggtctcaaaaaaggggggaaaaaaaataaaccaaaacttgtaaaaaggtttaagaacagaattgtgtaaaagtgatttagaacaaatgcatgtgtataatttgagtatgtgcttctaagtttatttagttgctttatttcgtagttggactgattaataacttgcttggtttgactaagtttagaataaaagcattaatgaaagagttatgtgtaaaactatttcagaggaaaagaaagtgaaaagatttgaagcaatattttgattaaatatggaacaaaaatcagtgatgggctccattgttaactttttcaacaccatcaacttaggtcttacgttgaattgctttcctccactgctttgttttctttttagccaattgactagagatacaagagtcttggttttctgatttttgtgaatctggaacaaaagcagtgtgaatttgagtatcccacattgaataagtctggaatcttcttcttctttttcttcttggttttaatgtacacgaccctactcacagaggtcgttttggtagatcttttatctatttcgacatctttttttagtctatttttttttttttataattcgcgtacgttatagttatttagaattactt

SEQ ID NO: 400854 - DNA, 780 bp, Cannabis indica
gactcctgtgattggtcctatgcccaaatttgacatttttttcaattttcgaccatttaaaatgaagttttttcaataattctttcgattcatctttttcgaagcatgaatgggttccctagttgttatcataaaaagttgacattatatacaattttacgctaaaagcatatgtttatatattttaaggaaaatgtgagtgtttctgtatttatatatatatatatattatattttaagaaaaatctaatcgtcatatcaatataaaaactaggtagatcatacgtgcaaggaaagttttgttttttgttgctttttattttgttaaaaaatctatattagatttcttaaaagatattttggttgattaattaatatattgttatcgtgtgtttccaaaataaataaataaataatatatgttaaacgatgatcttgaagcatcttaaaaagaattttaaagatttgatatcttaattattattattatagttattattattatgattcccccacctccccactacaaaacaataggagatagtagtaataataataataataataataataataataataataataataataataaacatacaacgtcaggtacagtactaaaataaagatttgcatagtttatatagaagcattaaggttatacaaaatagagtataaactaaacatttgaaaggaaaaggaaaatgtggaggctgaagtataggagatggaggaaataacccttacatatttaccactaaacaactttgttggtta

SEQ ID NO: 400855 - DNA, 605 bp, Cannabis indica
ttttacatcttgtgcattgaagctcaatcataaatagtgcgccaaatatagcacaaacttattttttgtgccaaatttagcacaaattttaagggctgagatgcaaaatgatcctaaatttgaaaactaaatttgtaaatgtctatttttaaaaaatttagtaagatcaccaaatataataaattagcttattaaaattataaaaatacatttattacatattaattttgcctcaataatgaggtctgatcctttatttataatacaaaagagttgtacaaatacagaacaagaattctgtcataaaaccataatttgttagtgcaaaaactagaaactaactaactattccaaataatgagacaaaaaaccaaccaactaactaactaacttggttatcatcccctcaaatgaaaagggatagacaccactttgagtttggatttgtagataatgaaaccgatccttaggaagacttttggtaaaaatgttagtcaactttgtcaatgtgggcgacatatcgcacatcaagttcttatttagtagctggtcacgacaaaatgttgatcgatctctatgtattgtcatcgagcatggaatatagg

SEQ ID NO: 400856 - DNA, 1621 bp, Cannabis indica
cccttagaaatagtacaattctgttttgagtttagaatctaaaattaaatgaaatcctcaccaccattttttgttaaattgaatacaaaatagttttctagtaagagatttttagaaatattatttttatatgattttgtaaggatcgatacaatacttaaacaatgaaaacgttagtaagagaaaaaatatttttaacaaaagttgaattagaagacaattttgaatcattcgaaaaataaggaagaagactattttgaacaaatttacaaaatatgtgtggagtctaaaaaaacaaaaagttcaaaaataaataaatatatttatgaaaagtataatgtaaggtctaatttaatttaatcaataattattccaatgagtataacatatagataatggtaagaaatttaatgaattaaaatatcattttactaattttgataattaaaaaaaaaatacacatgtactaaaaataatttattttaattatgagtaaatactattttaaatctcgtattttgtaaaaattattaatcgattcttttattttattaaataacaacatatatttaaaaaaaaaaacataatgatatcttaaatctaattttgttcaaattatttactaaataggaagttttagggttaagaagacaaatttttagagttatgataaaaaatagtggattgttatcgggtaccatgaggtacccaacatcatactcgtgttgtgagtggttaacaattttttatattatttatttaattaatcattacatcaaaattaatattttattttttattataaatatatatcataattaataaaaaaaaatatttttaagagtaaattgcggcataaataagtttaatttttggtggtaataatacctaagttatcattttgaaacttctgtaggtacctagttatataaattgccacgtgacaatccttaattagtccaagttattaaatttttattaatttaaaaaaaaatagttcaaatatactaataagaaaatgacacgtggatataatgacttaacatttaacggttaggtacttatagagttaccaaaaatataacttaagtattattactaccaaaaattaaacttaagtatttatttacaactgaaaattaaacttaagtatttatgccgcaaattattctttttttttttcatttttttaagagcatttgtttagttataatatcatccttgactaaatttttttaaaaaattttaagagtttacggtaccgaaaataaaattcttaatattccactttactacccgtgttcctaaaattttaaacttattttcagtactgtaaaatattttaaaaaaaattaaaatttacaaagatgatcttataactataacgaacacttatcttaaatattttaaatcatctaatttttgtttttgagcataaaaattaactaaaaaattataatagaagcttcacaataacagccttaaacttttttttctctctttggatggaagaaatgaattgtgagctgtgtatagtaggtggtagtagtcctagtggagattattttgaccatttaattattaagtgggtcagtgttgaaatttccactactcgtcctcg

SEQ ID NO: 400857 - DNA, 737 bp, Cannabis indica
tcttgtcccaaaacccaacaaaagttggataacatgtattgatttttctaatatgaataaggcatgcccaaaggattattttccactaccaggattgacaagttggtggatgcaactactgtgcacgatcttacgtctttcatggatgcatattctggacataaccagataaaaatgcatgtcctagatcaggaacatacgagctttgtaaccaacatgggactttattgctacaaggtcatgccgcttgggttgaaaaatgctagggcaacatgtcaacaatttgtgaatgaaatgttcgcgagtcagatcaggcggaacatggaggtttatgtcgatgatatgttggtaaaataagtataaagtggaagtcataccacggacctcgtagagtgcttcaaaatattaaggaagtacaatatgaagcttagcccgaaaaagtgttcctttaaagtttcctcaggaaagtttctgggattcatagtcaatgcgaggggcattgaagcaaattttgagaaaatcaaggctttgatagatatgccatcaccaaccaagcctgcaatgccctaacaattaggcacttttcccaaggtgattaagaaaccttaatcccctaaatggcattactagaaagataaacatgggtaatttaaactttaatcgagaacagattgaaaatagaacttgtaataaacctaactttacaatcaaaaattacatgtttcgggatcccaaaa

SEQ ID NO: 400858 - DNA, 288 bp, Cannabis indica
cataatctatagtccatacataaatttatgattagcttgtgtaaaaaaaaaaaagtgagcaggtgagcgggttaattgggtccaacctgcaacccgaactcacccgttcgtggtaccaggttggacccaatccatctgcactgagcgggttttttaaaaatatttgagttgaccggatctagataaaattcagtagaaatattcacttttgaggttatattatacacctaaaattttgggaattctttaggttatattaaaaatagttatattatgttggaaattatt

SEQ ID NO: 400859 - DNA, 604 bp, Cannabis indica
atatatatatatattaataagagaaacaaattaagaaaaagagttaggtgagatgttgtgaaagtgagaataatacacatgattgagttaggttttttaaatttatatacgagggaatatatatataagccatgtgtaataatgtggctatggtgtgaacattacaattagcattattagtttccttttacactatcacatttgataatatagccataataaatgaatgtaacactaccaatattagaagaggaggagaccaataatgtgtcgacatccccaagtgacattttccaattaaaagtgtataaattaaagggattatttcacatatacatcaaaataacaaaaaatatagttgtattgaatttttaatatttttatgattttatttacaagaaatacggtctttttatattgtactcttgttaatttgttgttgatttttgttatatgtatgctatttttttgttattgttttaattttatttggatgttatttttatgtagtttctttttgttttcgtgttgtttttataaaaaaccaaaaaattgtaaaaaaaagaagataaacataaaaatgtaacttttttttttaaaaaaa

SEQ ID NO: 400860 - DNA, 563 bp, Cannabis indica
agagaatctacatctttaaaattagactcataactgagcccatatatgttcactggactactaacccattgggtctgcggaatctggaatattctcatactactctacactttataccatttctttttaaatatgccattttttataggctaaaataaacatagagagatttattgtattatatactttaaaattaaacttaagacatttttctgttgaaaaaggtaattgcttagcttcactaagtttactagtgtttatgggctacataattagtactttcatacttttgtgtacttttaattgggaaacttacaaaaatactggaatttggattaacttttacaaaaatactgtcacacggaaatcttttcaaaaatactgtgtttttataaaacaccagtaaaacacaaagcagaacaactcaaaacaacagtagaacactagtaaaacactagtagaacaccagtgaaaacttaacaccgtatactgcagtatgaaacttataaaaaacacagtaaaaaagtaaaaattaccgtctggcagtatttttataaaaaaaa

SEQ ID NO: 400861 - DNA, 513 bp, Cannabis indica
aaaaaaaaaattaacacactaaacatacataaacaaccaaaagtaactacccactcacaacataacacatgaaaaataaggacaaaaaaaactacaaaaacgtgcactaaataaaaaattgccaaaactgttaaaacaataaatacaatacacacataaataaaaacaaacaataaaataactgtaaacaaatataaccggttgttaagtagtcaaaaatgcatatttattagtgtaaaaatacaaaataaaattaattctatataatattttcatgatgaaattaatgtaatatatttctatttgaaaatattatagtgttgagttaattttgtaagaaaataacattttatgacataaataagagaaagaaataaataaaaagaaattaagaaaatgcattgtttttattttaaaaaaatacaaattaattagatcttaatattttcatttgaattattgtgatatattttgtgttgaaaatattttatttggatttaattttgtttgtgt

SEQ ID NO: 400862 - DNA, 331 bp, Cannabis indica
aatggaccccgcacggtaccaaccgcggaagcaggaagtagatcgccttttaacatgtggcttcataagggagtcattttacccaatcttgttagcaaatcccgtactagtgcccaaacctaagggctcatggtgcacatgtgttgatttcactgatttaaataaagcatgcccaaaggatagttttcccctacctagcattgaccaactcattaatgctactgcaggtcatgaacttctcaatttcatggacgcgtactcgggatataaccaaattccgatgtatgaaccagatcaggatcattctgatgtatcaattgcttgtctattt

SEQ ID NO: 400863 - DNA, 407 bp, Cannabis indica
ggggactatagaggtttcaccattcatagcactattaaacagactacaaatatatcaaatttgtgggtataataattcaatatttgtcgtcacaaaatgaggtaatcggtcccacattggcccaatatatttattacgattgagattattcaatttctttatatttgacattgtttagataatttgatcccttcttcatcctttggatcattctaataatatagggaccatgtattagttataggacctcatatctgaatctgaaattattttaattaagtcattggtagtaacattaaggtagcaattgattgagaggaatgtaaatataaaaataagaatgtgaatgacaattaaaatagaaatagaatggaataaaatttaaaatacataaaaaatttaataat

SEQ ID NO: 400864 - DNA, 541 bp, Cannabis indica
aaataattaaactatcatcaataaaattattccaaaacacttacgaaaatacaacaaacttgagactaataaaagttataacaacaacaataagtcaataatctttttaaagtttcaacaacacacctaaatcaaaataacaaacttgaaactcattaaattccaacaacattgtaaatgtacaactaacatactttcagcaatagattaaaaatataacaaacacaaagttccaactccaaatttcaatacacatgtatgggcttgggcttgttgctaagaagagagggtttgtgacgagttatggattttgccctaagatttataggcttgggttgggctcatatgtatgggcgtaattaaataaatataaaaattgaaattttaaaaattgtggagcgttgcagtttgaatcgcggtttaatgattcaaaaccgcaaaccgcaccgcctgcacagtttgggaaaaattcaaaccacaaccgcaccgcgaagaattataaaccccatttttttgcggtgtgggcggtttgagtggtttg

SEQ ID NO: 400865 - DNA, 593 bp, Cannabis indica
gagtgtttattacagaaaattttcttggtaaatctctctcttctttactctctttgattttttaattgaaaatcgatcgacccctttccagtctgtttgtggggtatttatagtgttttttgagggatccttagaaatggatcacttttctttctgtgatagcttcataggggcacatattcctagtagatacaaaataggaaatacatgacttattataccgtaggtatcttaggagttaggtggatataatcttttatcatcttttgactgatgtgattcctcataatgtagtcgtcactagactcatcgattgttgtgtaattgccgtaaaaagggcttacgccatctgtcacatctttcatggaggttctaatatgtttttccccatgcagcattaaatgcgaagtgattgttcaagtaatctctttacctcccggaaatgccttaacatggctctagcctcccgaagagtaaatatgtgtcttatgctctcctccgggaggcccactccttgtggtgttcttttttgtccaagacttagtcgtttttaatacgtgggtgttcttacagatccacgtgccacccttatc

SEQ ID NO: 400866 - DNA, 629 bp, Cannabis indica
agatgtgtttgtacactcggccacaaagtttgcaaaggcttgaccctttatggccattcttgattgatatgtgatgtcaaactggccaagttcaatggcccacttgagtagtcagtcagatgctttaggtttttgtaaaacttgctacaatgattgatcggtgtacatctttattgggtgtgcttggaagtatgacctcaactttctggatgccaagagaaagttataggtcaacttctccatgagtgggtaccaactttcagcatcaattagtctcttgctgatgtagtacataaggtgttgtacaccgtcttcttctcttgttaagactgcactcacaacatgtttagtgactgctaggtacacgcctagctcttcattgtctaggggttttgacaacacaggtggttgagccaatcattttttcagctcctagaatgctttttcacattcctctgtccactcgaatttttttgttgcccctgagaatgttgaagaagggtacacacttgtctgtagacttggacacaaatctgcttagtacaacaatgcatcttgtcaagctttgtacttccttgatggttgtgggcaattttatgtccaaaaagacttggatcttgtctgggttt

SEQ ID NO: 400867 - DNA, 608 bp, Cannabis indica
ttttaaaatggtataaataggacattgcgcatttgcgctcaattttaaacaatttttttttaatatatctaacttaaagataatttttaatatgaatagatgcactaaatgtaattcgttttgtctaacacatttagatcaaattattattaagttttattttcaacaaaaaattagtttagagcactatttagttttatttttaaaaaatagaaagtataatttattatttatcaaaataggatcattcacttattttaacaaaacataaaatttaaaattatatttactataaaatttattatattaaattatataaaatttaataatatgttataatgataacaatattatacattagaaaatgttgagggccactaatattttttaacatttattttttttaaaaaaaaaacttgaaattcattaatattttttatttttttgaaaaaaaattgaaaattgaattcctttaagaagttcgagataaaaaccgagagggataagataagatcggaccgttggacaactttgtcttggaatggtcgttcatactgggcctgttggcccacgtgtacgaatcaagtgttctcagtgaaagagaatat

SEQ ID NO: 400868 - DNA, 782 bp, Cannabis indica
gaaaagaaaaacatgataagagtagtaagaaaatggacaaaaaaaataaagatataaaatgttaaatttagaaaaaaagtttaaataatatttatgtattatttttttttttttggtctttagttattaggtttatatgcatttatagttgtttcttagataattttttttaaaaaaaaaattaataataaaaactaaagtttggtggtttcgaattcaggtcccaagaaaacataatcctaccaccttttaggctgccactatgctgggtccaatttaactatatttaatgttaatttaaaataaatatagtagttaagtaatgatgtcttaaaattttaaataggcccctagaaagagtgggcccgtgcctagggccgaccctaattgttaaccacaatttttttttaaataattgtagttccaaaccaaaaacattttatattattagatactctaaacaatatttcattttaaagttttcttaaaatatattattcattattcatggtttacatttgaaaaactgagtttttacaaatatcaattaatattattgaaatataaaattataaacgtcagcagcagaataatgcagaaaacagttttgcagaaacaaaccagaactagcagaatattaaaataattgcaaaaaaaattgaatcacttgacacaagagatttttacgtggtattagtgttctttcgaacactcctactccacggggccacgcccagagaaagaaatcaattaataaagtatcaacaattacaaagacaatt

SEQ ID NO: 400869 - DNA, 528 bp, Cannabis indica
cccatacccccttttttcttgtgagtacacagtcggtcccaagaaagccaatggatccctttccctgacttgttagaagattgccaccaaaactttgtcataattttctccatctcccgagtaatgtcgattggaattaggaacacgctcatagcatagcttggtagagactgagccacagttcttattaaaatctctttccctggccgagaaaggaattttgcttcccaaccttcaattcgtttttgaactcgctcctttaagcccaagatatagactattcgtccctgctatagtcatgccgagcctttggctaatattgttacgagttgacaaggttgtgttagtgttgaaaaaaatagaggacttagagtagttaactttctgacctgaagcctcttcaaatttgctcaacacctcttgtactcttgtagtttcttccatagttgccttacaatatagataactgtcatccgcaaataacatatgcgatattcggggggcaccatttgcaactttgcaaccatg

SEQ ID NO: 400870 - DNA, 814 bp, Cannabis indica
aaagcaaacaaacaatagatctacaacacagaaaaacagatcagaaagaaatagagagagagagaaggaataaaccctagtttgagtcttcagctccaagatccaaccatgagaacccagatctcatggtgagaagctcgaaaagaagtacatgcacaaagaagacaaagcagagagttagatcgagaacaaatagaaagaaaacaacaaaaacataaagtgtaaagaaagaaatcgagtttacctggtcgatttctgtgacaggaagctccaaagtttgtaaaccaaccttgtgatagtggatatcaagcttctatctctgagaagagcttgacagagacgtagcccagatttgggtgaactctgaaacaaattctggtgttttctctccttgtttttcatttttctctcatctaatctaagctatggttgtgtgtgggtgtgaatctgggtttcagatctagaatcgagcaagttctcaaagagaacttgctctgctagggtttcgagtttgtgagtgtgtgtgaattgtgtctgagtgttttggggttctagactcttctattgagtctttgaatcaaagggttcatacgacatcaagattggtgtcgtggggttaatacggtgtcgtattggtctaagttttacttagacaaggaaaggtcaagtttgaccttaatactgatattgctatctttgttggtgtagggataaaacagtaaattcctacaataatatttgggattatttcataaaatttgtacttttttatgaattttttctagggatattttttttttgttcttttactaaa

SEQ ID NO: 400871 - DNA, 1053 bp, Cannabis indica
caaaaagcataggaacaaaacgaaagcgtagatgaacgtgaataatgacaaaagagacaactccaatcattaatattttagagctcttcgaggataatttgtgaaagactactttaatttaatgaaaaaatacacttgaatgattgagttatgaaagttcaaacttaatattcgaagataatttgtgaaagactactttattttaaaaaataggctcgatattataatgaaataattgaactttttctagacaatataaaaattaataattaacaaacttcctttaatcacgtatataacatagattcaaagaaaacgactttacccatattaattagtattatatattgttatgttattgttagaattaggataatatataaattaaaagtataaattactaaaagtagaaaaaaacacaaaaaaaggaaagataagtattgtgggcatgagatagggtctctttaaagtttgaaatttttgatctacgtgagaccataaatagcaagagagtagtttttacgtttacaatctttaaatgttcaattcaagatcttttataaaatattaattatttcattttatttaacaaaaaatcaagagtcatgaaatcaactgtaacaatcatgcgttctttttaagatagttaaatggagaagttatatagctattattataatagttatacttaaataccatgcaaaattaatactgcaaatgcatttatgagtatatttctcaattgctaaaaaatgtaaaggctttcaccacttgaggctagctcaagtggccataggtgggtgtgtgtgtgttggaggtcctgggttcgagtcccaggtaaaatatgtttgtaatgggtaaaataggaaaattatattactcaattcttaagctgccacatcatcaccttaacacaattagattatatagatatatagactaggaaatatgtataaccggtcttgttgaccgaggttttcggcaactagtaaaataagattataataatgagctataagaaagcgagatgaagactttttacgtggttggggc

SEQ ID NO: 400872 - DNA, 849 bp, Cannabis indica
tcagagttataaaagcagaagcaaaattttataaaacaatttttatctaatataaaccataagttcaaggatctcaacataatatatatagattaaatctaaactactgaaagaaagattatacctcttgaagcctatcatgatatccttgtttattttttataattatcgaacatctaatctaagaactttattgaagaattcacaccttaatcttccaagccaacctcaacactcaggaatagagtgggctattagatcttattggatgaacaaatttaagtattacagtgtgtactcaactcatgagatattataatagagttatgattttgatctcacagacacttgaataggtgtgtacatgtgtgagatgaagagagaaagagggtgggagcgtgagggagagagtagggagtgaaagatcaatcatatttttccttgcttttagttgctaggcttgctttaacttgttgatttatgatactatatatcttatatatagtgttataaacaaagcattttaattatttatttaaaataaaattaaatatctaatttgatttgaattagaattcaaatttaaatataaatatataataaatgaatataaaatatcagtagatctttcattttaataattatccttttaattaaacaattatcgaataatttatttaattaataattaaaagataattaatttaaattattttaactaataaaataattaaactaaataattcatgtacttttatacgtcaccccacacgtgtagaatgggtctacacgcgcgtgtgggtcttttaaggttaaaagtttatttttaattttgtcataaataagatt

SEQ ID NO: 400873 - DNA, 1289 bp, Cannabis indica
agcaaaagcagtaaaaaagtcttgaaaacttacaacgttacccaagccaaaacctcggagtatgtagttcaaggaaccaagacgaatcgtatagaccggtgaagtactctctcgggtacttgttcccaatctggccgagtacccaattgtgaaaagtcttcatcagcttccgatcaaccactcgaagtgggtccgcattcacgagtgtcgaagtagccctagccttcttcttcatttcagcgtactcagcgaaccacataggtcgcctgctcttcctccggttctccataacttctggagttgtctctaacacctgcacctcagaatcttgagtatccctgatgctgatgatattcgtcttctcaggtgtacagaaaatgtcatcatcatccggttggtaatcatttgggagaatgaagtcatcttccggtgtccgagtctcttcttctggttgtggctgtggctgtggctgtgaatctgctaccgaccttccaggatctagcaggagcgtcattatggtcttcaactgattcataatcgctgtttgtcatcttagcagagcggcctgcccttccctcaaagcaatctgtcccctctccacaatctccaaccttaccaaaatggcaggtatactggatcgcgagcctctgaggtgctgggaataaaagttgacgggagaactggaggatcctgtgatgctgcaagtgagtcaacaccacactgatctggaacttaagctgcagatgggtcaacaccagacccatcaggaactgaagctggagatgggtaaacaccagacccatctggaactgcaggcggtgcacgtggtggagacggtggaggtggtgtagagtctttaaatattcgggctacctccgctcgttcttccaatgtggaggcaagcttttcggcctcgcttcacagagcatcctgtgttggttgcctatcctcacccatcacaagttcctccaagtcaacaaataatggaggctgaaccccggttatgtaactcacaaactcaatctcgttcggccgagtacataacatggagtacactgtcaactgaaaaatataacaaatatattaatataatatatggaaattaacatgaattcaacataaagcgtaacaaacttacatttttagcaaataatctggtcacttcatccttcccgagtgtagtgttcggcttactctcccagttgaccattctcggaaagcgatgcgacctcctcactgcatactcgttgcccagttgtaatatagcctcgtatgcccaatactgcaac

SEQ ID NO: 400874 - DNA, 607 bp, Cannabis indica
atgtcaagatttatcttttcaaagtcatactattttctaatattaagcttctaaatgtcaattttatctatttaataattatgataaattatcaaataaaattaatatttaacttatttattaattacactttctaaaatctcttaattaacaaataaaccctgaatgttttttttttcaaatttgtccttgcttagtggaactcataattgagacatagtcttacttagaattctaattgattaattaaacgaattaattgagtctacaaaaaaaatattatctcaaatagtgtggggaccatgggcctatataatcaagctcccaataagtagttctagaatttatcgagtaaattccctatcttattaattcctctcgacttcactatagattcaaaattttactcttgattagaacgctctattaaccaagaatagatacactataagttatctattatttcaatctaaataatcaatgatcctttatagatgatttacattaagtatggactaaaattactgttttactcttcaatgtattttacccttaaaacacttagtttcttataaatgatatttcttaaactaatataattactgaa

SEQ ID NO: 400875 - DNA, 772 bp, Cannabis indica
ttgaaaaaagagaaagtataagaaaatctatatactaaaaattttacgtatccatttaattactggatatctataatatattttaatatacgtacacattagcattatagcaagttttgattggtctcacctaaaaattgttccaatggagagacaattatttttaggggggaatattatctgtttacgagaaaataataatcaataaatattaattggggctatcgcggtgagatataaatataaaaggattaaaaccatgtgtgcagtttaaaatataacaaaaatatagggattagtgtgtattgcataattttcaaaaataaaaaagaaaaaataaggaaaagtaaatttccgctcaaaaagaaaaaagaaaagtaaagggattagttgttgtcgtgatgagaacaaaattaatcgacatagtgtgacaaaaaaaatcaattgatataatagggataaaaattggtcggataataagcgagaaatgttcttcatcctcatccccgccatgaaggaagccacattgttttaggtgaggcaattaaataagatatcataaatttacggttatatctttttaagtcaatgttactagatgatcttatgtcaataaattttaatcttgatatagataggttcgatctcaactgtgttattaatgttcttagagttgttcgttaaaactcgaccagcctaatacttacatattgggaacatgatagtataattgagtgagagcgctaatcatagatatagaatctataggttc

SEQ ID NO: 400876 - DNA, 661 bp, Cannabis indica
tacatacagataaaagtctcacatcgtttagaaaacttttaggtactatctatataggttataaataataatttagttacatttatttttttagttcttaacaattattattttttttctttatgggtgattaattaatatcttacctattaattatttcattaaattttatttttaataattattttttaaaataaattttttcatatatatttatgaaaaaaaattaaatttaaaaattttaattctagtattcaatattattatcctacgaatggaattatctcactaaaagcaaggtatgacatcttataaacattaaaaaatcggctatattaaaaaaaaatctactatttttcattaaattaggtagcgtttggcagggacgactcttatggggtgtaagttgggctattgtacaggccccaaaaataagggcccaaaaaaataaagggcctaaaatatttgttttaatactctttaatttttttaatgaacccaatttttttaagtgctaacaacttatcattgattatttctatgtcaatttcaaaaatctattttcaattctattattaaggaaaaacttcattgtaatacatattatatattttaattacattaatcacctaacaattggtttcttacatttttaacttat

SEQ ID NO: 400877 - DNA, 836 bp, Cannabis indica
atattgtattaaatactcagaaacatcttcaacaagatagactcgtggagtatgcagatttaactgcaaaaccacgttaaagtatctgatattattattatactttttattccttatttatttcttataatttctatgttaaatttattatgaaaaaggcttattattggttaacgaaaatgtgcgttaacatttgctatattgacaatgtaactagagaaggagacatatgactacttgatataaaaaaagaactatatataattagatttttggatgggtgcaaatgcaaacgtataagcctttaaaattgtgatcaaatcattattattatctatttaaacacttataaatctctttagttaagagctttttttctaaaaataaaaatacaaatatatgccctttagtaaactatgaaacatgtgatgtaccagtgtagattaaatctacatgcatgtcaattagaatgtcataggtcaaaacttttcctcttttaagttggtattattttagctatgtatgagtttcatctatgaaagaattgatgtgtaacataggtgaaactaaaataaatatataattaatttttttgtttttattcttaaatgaaattaaattttgatgacttttggtttgactattcttattataagctataagtatttttataagtataaaaaattggaataataagaaaaaaagaaaacacattagaaaaatcgtattatcactactagaaaaataggttttagtgacccacgttgagtaactctaaaactatttagtgacacttcaatgcgcgttgtcacgggctcaccttttcaggcagcgga

SEQ ID NO: 400878 - DNA, 500 bp, Cannabis indica
atttaaataatgtttaattaattatgtattttttcactacaaaaaataactacttttagtgacaaccttttagtcacaatataattttttttgtcactaaatataatttttagtcacaacaaaaagttacttgtcactaaaatatgatatttagatacaagttgtcactaatttaattttagtcacaacaagtattgtgactaaaaacacattttgtcacaacaaattgtgatttttgtgactaatacctttagcatcggaatttttagtcacaacataagaatgatgatttataattaatcacaacttttttacttttagtcataaattttattgtgactaaaagtaagattttttgtagtattttttttcattgggggagggggattcaaatagtggcagagggacacacatgaccccactaaattttttaaaatttattttttgtatgtattttttttatatatatatttatatttttgtccccataaatttaattt

SEQ ID NO: 400879 - DNA, 690 bp, Cannabis indica
aatttttttaagttttggtgtattatgttaattttaatttaaattaaacataaaaaaaatgaatttcaaaatttgtaaaaaaaaaaaaagttattgttatttttatttgtaaaacagtaaaaaaaatgtattattaagaattttagttagaccgtattcttcattgattatttgggcctgatctatgcaacttctcaagaggaaattacactctatactctttttatattgtccttttttatttttaccttattttttaaaatctatcgtttttatctcttttttaaaacattgtaccaattttacccctatcacttcaagatactcttaatgtgattctcttatgtaagggtattttgggtacaatacatataaaaagaggtatatttcaaataaacataaaattagaggtaaatttcattaattgataaataaaagaggcattgttcaacttaccccccaacttcaaccatgcttttgtggttggcccaaaattcttgtgttattatggaccttatttgaagcggaggcctggacctaatttggaaaatagtaaaatgacgaaagttataatttacatcgataaaaatcataaaataatttttttttaaaaaaaaaagaaaaacataaaataatagatagaaaatgtaaaatcacctcatatactattttttttttatttcatttttt

SEQ ID NO: 400880 - DNA, 515 bp, Cannabis indica
catcacatactcaaattcaacaacaattaacttcaattctttttcacatgcaatctcaagaacaccacatctatttcatgctcctctttattaaaaattcagttaacgaataaagattaaccaaggaaagttacctcaaatctcaattcaaggctaaactccaacaattcccaagtatcaagctccaattcatgcaataatcacaccaatttctcaagaaatcaaagattgagaaaaagagggtttgagtgagagagagagatcgggtgagagggatacataaccacaaaattcctttttgctttcctcaaaattaattttgtcaaacatagtaattagaagtcaaatgaccgaaatacccttagggccaattctcacatatttacaccaacaagggcaaacttgtcacttcatgcataaataaatcccaattaaatttcagattatcacatattaaataaaatgccaaataaacaaacccaatttgcatttcttgcccgaacccggttcggccc

SEQ ID NO: 400881 - DNA, 543 bp, Cannabis indica
ataaatatatatatatatatcaggctttggtcacatgtgttcatgaaggcgtgcactcatcgacccatgtgataaggattcatttgcaaaaaaacttttgtaatggtcgataaagcatggctcgccacttttcaaatttgtgtagcatataactatatttacatatatggtcccatttttaaaatcctatagatttatatatacttatataaccttcacaagaaaaataatttttaaaaaaaaaaaacttgaaagattctatttcaatctttttcttaagaattttttgtagttaattaaatcctctcaaatattattttacttggacttaagttcaaattttgagagttttctggtaacaaatttaaggtgtcatcaattttttaccgttagttacctatatagacttgcacttatgtacactttttgtatatatatgtgatatttatattgttatactgaatattattatttaaaaaatataaaaatcaatatttcaaaatttataatatattttatttttaatttttataattttattta

SEQ ID NO: 400882 - DNA, 857 bp, Cannabis indica
gctatgagttacaggtataattacagtacaagagcctatttgaaaactttaaaatacccaatattcagtttattgacattaaacatacaagctcgaagaatgtatatacatattctcataattcatcgttagaatgctatttatgtatttattttttgtctagactcttaaattgggctaaattaatgttatgttagtgatatatcaacaaattgtttaaagaaataagtataatgcaactgcaagggaattttggagcaatttttatagttcagggggatttttgcaacagagaaatattcaagagacaaaactctacaaggctaatagttcggagggataaatcctatttattcaataaaataattaaaagtgtctccagtaaatgagttttacttccagattcattgatgcaaccccatattctttcttatattcaaagtctagatcttttctaaacaaaattcaaagaataatagtagggcacaaacattgaaacaaccctgcttccacagaagacacaaaaacttgagactgttataaaagatcctataatgtagaatatacaagcagaacacagtcatttggaaacataaaatgaatatttcaaacaaaaaggattgaggtggcagataagaatcaacattaattcagtgaatatataagtaaaatttcaaaagcaatcataagaacaaaatgcacagaccaatcaaagtcatctaaatttgagactgttataaaatatcctataattaatatcagttctttgcaggggtttatgagaaattcatggtgactttttatttatattaaaaataaaataatttattataaaaataaaatgatttatgagaaat

SEQ ID NO: 400883 - DNA, 605 bp, Cannabis indica
tgtatgtaatacaattagtatttcttatgaattaattaagattgaaatatagttaatattattatatagtgaaatgattgattggttaagcaatgataatgtaatgatattatcaatgtgatatacaggctcacctgattagctgatgcgatactcctggcgacgtaccgggcgtaggtacgggcgtcagtgatatatgagtaccgagcataagtacaggctcacttgattaggtgatgcgatactcttggtgatgtaccaaagtaggtacgggcatcagtggcatatgataagtatcgggtgtaagtatgaatttgtctaattaggcgattactcctggcgatgtgtagatacgacatcagtgatatggaaatagccaagttatggtagggtttcctcctggcgacgtgtagatatgagcgtcagtgacatatgatatgtaccgggcgtaggtacgggctcgtctgattagacgatgcgatatattggtgccagattgtggcacgggctcacctgattaggtgatgcaattatatgatatatgggtgcaagtttttggcacgagctcacctgattaggtgatgaagttattgttggaaattatt

SEQ ID NO: 400884 - DNA, 621 bp, Cannabis indica
tttttttttaatttgtattttcttgatatttatttgaaaattggtgttggttgactttaaattaagtttctcaaggtatttgagcagtgacatgtgtttagaattctattatcaagttagttttaatgtaatcataagttttgttagtcaaatttttgaagaacttggtcttgaacggttgaatttgagtttttgagtttgaaagaatgttctatttgactgattgtgaaatattatgtgaagttttgtgacttaattctatgtaaaaatagacttttgtgtaggggataagttgaggaatatctttttttttgtatcaattaattaaaaatattatcatattatattttattaaaatctacctacttttgtgggtgggttgattaagttaagaggtatgatgtgacatcatctataaacgtgggtatatcttaggttaattagtcccttgaactttgacatgtaccaaattatgctcctgaatttttttgtcgttaaaaattccccctgaacgtagttttcggcgtgttaaacttttccaaatttcttaaaattttgcaggatgtcttaaataagtataacgtacatgaccatgagaaaaagtttgactaaaaaattatt

SEQ ID NO: 400885 - DNA, 605 bp, Cannabis indica
tattaaataataaaataagtaaacaatttagatattttaagcaatgtaactaataaatttcttatacttaaaatttaattaattaattaattaaattcacatttaattcaaatttaaattaagatttatataaaaaaaaactaattatctaattttattgatacttttaaataattatctaagttttattttaataaataaattaaatttagatatttaaaactatcatttttttcaaaaaagaaaaaaaaatattaattcatttaatgagttaacggtgttagttttatttgttaactctaaaaaaaaaaaaaatttaaaaaaaaatgttaaaccaattattgttgttagatacacatttaatataaaagactagtatattgttacgtgcgatgcacgtatgctatgttttatattaagtattatattatgagttcggaaggaaataaatgaatcaaaaataaataatatttaatttagagagatttgaataataaatttaaattaaacttttatgtccagtataatggagtttaaattaaactacaaatgttagtaaaaacatattggaaacaataataataaggttataatatatgttgcat

SEQ ID NO: 400886 - DNA, 549 bp, Cannabis indica
aaagaactaagaatagaagaaacttacgaagccaatctctgtctcttccttgctctctctctctctctctctctctctctgagtttctctctctattttgtagcttttaactttttttgctaattcatagtttctgagttttttttagctctgaaaacctactaaaaacactaataataatgtgtttatataggctaccaaagttacctaaaagatactaaaaatatttaaattttaaacttaaaaaaaaatcgcccatgtatgaaagatccacattagggttgcgcagcctgaactcataaatgagttccaaagacaagtcgacgcattcgtctcttatggcatactggccatcgagggctgccttctgcttcccctcacaccttgtgaggtcattctctaacctagagatgttaggagcgagcagggttgtcatacccagaattaaggaaaggattagcaaaaccctaattagataattatgagttaattgaggaattatattattatatagttcaatatatgtgaaattttatgaaatttaacatg

SEQ ID NO: 400887 - DNA, 515 bp, Cannabis indica
tgacatttctgttgctcgatatagtgaggttagaaagaaactttttgcaattcttgatcaaagagagatattttagaagcagagagctaaacaattttggttgaaagaggatgaccaaaatagcaaatatttccataaggaagcgagtaatagacggcgcaacaatcatattacgaaacttaaaaattcttagggggtttttatggattgggagaatcggttagctgatgttgttgtgaagtattttacgaatttattctcagtttctgatacaaattgtagagaggtgattgattgtattgatcaagtggttcccgagttggctaacttcgaattcacaaagtctgtcactgaggaggaattgaggactctcatttttcaaatacatcccgataagagctcggggccagatggtatgaccccggccttctaccaaaggtgttggaatattgtgaaaaaagatgtggtgaatgtggttcagagtttctttgatacgggtgtcttcgatgaagctt

SEQ ID NO: 400888 - DNA, 1241 bp, Cannabis indica
ttcaattattttactaattttattcttacgtctctacgataattttcattattctttaattaaaattttggccaaactttcccacgaacttacacatctatctacaaagaatacaaatctattatgtttgaaattatgtcttgagtgtgtgaggataatttgggtacaataattataaaaaaagatatatttaaattaaattttatttagaggtaaatttaattaatgtatagaaaaaagagatattattcaacttctaaaaaaaaaaaaaaccccacataagttgttgtacaaaaaaaattataaaagaaaaaacttatacaaaataattgtgaaaaaattgtgaagaaaaatataaaaagataaaaaaaaaaaattataaaacgacaaaaacaattttttttttgtcattttgtgggaatctatcattctattgatgttatatgatatataaaattatactttgtacataaaaaaacttcattgtatgaactttgatgctggagcgaagttaggtgtagattagatagggcaatggtctcaactgaaattattaaaactggtcttaaactatatatagagtttaggccaaataaacttttcatataaatagttttctgctcaaacaatatcaagtaaaattatttattgtggtggtaaatatttcttttataatttaaggaggtcacaaatttacactctacacttttattttttaaaaaaacctatcatattattgttgggatttaaactacctaccaattatagttcaaaaaaaattaacaattatatcactactacaaaaatagcttttccatttttaaacagtcgtttaaaatatttttgtcggtctctataaccgtcgcctatacgaccgtcgccaaacagacaaaataggcgatggttaaaaaccgtcactaatgtggacttcctgacggttttaaaccgtcgcctatagtataaggcacgttttgaaactgtcgcctataccatgttataggcgacggttttaaaccgtcgagcatgtaaaaaaaatacagactgtactttcccctattttttcatgcatttgttttataattttacctaaattaaaataaaacaactaattcatttcattacaataacaactaattttaaaacatattgaatttatacaataacaaaataaatatataataaataaaaaagtgtataaataaaaaatgtatttataccgagctcggagagagagaatgaga

SEQ ID NO: 400889 - DNA, 987 bp, Cannabis indica
aatcgttagaattattagcggcagggcattaacagcggtctcgctgctaataattgtatatatacccaaccccgactttcggtacctgtttcagtactttgtttttgctcgtaagcttttttagacatagtcaattttgtgagttcaatctatgccatttaaaatgtcacgttgtcgtgaggtataaaaactcaatgattgtgctaaagaattaaatgtctcaagcatacgattaattatagaattttttattacatacaaacacatacgtcatgataagatagagtttatttaagatttagttcataaaaataataataaattttttttatagaatttgttataaataatttaaaattttaaaataattataagtaattaatattatatattttgaattttgcacttaattataattttttctttaatttcaacattttgaattgtgatcgggtcgttgattagggttgaaataccctgtagatagtcaatgtaagcataaactacaacatttgggtgatatgaacagtgatcgataccaatctaagccttttgactaggaaagttaataagagcattaccgattagtgtaataattgttaatctaattagaatattctttgtgcaaatttctcttatgcaatttgtcttaagcgtatttgcacattagtcattttatcgccctataaatagaagcttaagtagttagaattctaggagaaaagagagacagaaaaattcagaaaaaaataattcacagttaactgccaccatggactgtttatgtgtacactcttgaacatgcggtatgtttatatcgtacacctaattttttatttcaaaatttatattaaaatgaaataaaattataaaaataaaaataaaatattaaaaaatattataaattttgaaaaaaaaattataatttttaaataataatattaggtataccaatataaatgtgctatgtgtacaagagtgtacaca

SEQ ID NO: 400890 - DNA, 654 bp, Cannabis indica
tggttgttttatgagataaaattattacaagggtttctaatatgaatgttgtaagggttgtttaaatgattgcagtatgagattgttgaattattatttactctgtgggttgctaaaattattgttgtatgagattgtttaaaaattttctatatataggatttgctatagtgcactttaagcatcaaactacaaaaataataaataattctatacaactaaaagaaacatgatcaactaactgctgcattaataataattattctatttattttaccaaaggagctttgaggtttgctagaataggcttgatcacaaaattgattttataaaattttatactaatatatattactcttaaggcttcaggcaatacatattattcttagaaatttcattcaaaagatgacgatttaaataaaactgttttgagaatttcattccatactaatagttcttaagcaaagaacctttgttttcatatgcttcaaaattttaataactttaaaaatcaaaacgagcaagagtcaagagaaaaattaactagttaaataatttttcttctttatttttagtttttatgattgttacagtttatctcataaattagttagtctatttttttaattatataaaaatgtacataaaaaatat

SEQ ID NO: 400891 - DNA, 919 bp, Cannabis indica
agggatagtaggatggatggagaggttagagaggatggggagtaagagggatagagatgattgttcatctccttgtattgtttggtattaggggtgaggtgggaaggatagaaaaaaaattaattagtaaaattacaaaattatccttttaaaaataaaattctattattttttaagggtagttattgtattttgcaaaatgtgttttgtctttttctacaatccttccaaatatggagggattaaattttcaaagttgggagggagaatgtctccctccatctctcctctccctccttctctccctcttgccaaacaagtgattgagtctctccttccatcactctccctccacccctctccatccacccatctcccactcctaccaaacaattacaaatgtaatctccatccacttaaaaaaaaaaaatgtaatctctatccaattttaaaatatgtttaaaaaatcaaaattagcgaataatagtttgactaacaaggttaaagccatataaattgggattaatcccccttgtataagtcacaatatttggttagacttgcctaatcatttgtaattgtttctgttgaatgaaggattgtgatttaaaacaaaaagtttactcctgggtccgccattgcttgaatattttatgttgggaagttgttgatcatacttatgtcgagcctatttttaattaattagttagctgttaaatgtaaaatattacatatttaataaaagaatagtataaaaatacaaaattaattaaattttaaataaaaaaaatattttaatgaaattaatgttatatatttgattgttgaaaatattttatttagatttaatttatctttgtttataaataataattagtatttataatgaaattccgtattttaatattcccagtttgat

SEQ ID NO: 400892 - DNA, 503 bp, Cannabis indica
gctatgtctatttattgtttatatacacttaatttacttaatgaataaaagtcttaattgagttttttttttaattttttaatttttggggccccccaaaataataggccctaggcacgggcctagcccgcctatggctagggccagtcctgtttagcatatatatatgcatatttgattagagagaaatttgagaacaatttaaggggatgtaaaaaaacaaaaaaacatgattttttttctttaaaagaatgatacgaaacaaaagaaaaaaaaaaagaaaaataataaaaaagattggtgcaaaatttatgaaaacaaatatttttttatttattataaaataaattaaaaaaatgattcattgtggtacatattatctattaaaaaaacgaatttttaataaataaaaaactatactttaattaagttttttattgtttgaaaaataaataagcaagtaaatagaatcacacatttttaattatcagtaaaaataaata

SEQ ID NO: 400893 - DNA, 811 bp, Cannabis indica
ggacaagaagcatggtcaaaatgattttcatttgatagaaaaacattaaaatcatgatatatgtaaaataatccaattaattaagctataaaattataataatttaattgaatctcaatacatataggtgtcgtttggtaacacttttttaatcaattttctgtttttaaaagtggaaaagtgaaaatatttttcaaaaacatgttctataaaactgtttttacttttcaattttataattagaaatcaaaattttaaaaaaaaaaaaaaatcactttcaatatttttttaaacagttttttttcttaatcaatcttttggattacaaccagacccgaacccaaatcccctcctcacggccttggcgctgaacccggcttctgacccgaacccgaatccaaccccggatcttgacccgacttaaataaaatacaaaaaataaaaatgaaaataaactttacagaacactacttttgttttttgtttttaaaattgaaaaataaaagtggttagagaacgcatttttgttttttaaaaataaattttttaaaaacaaaaattttactttcattttgtgattaaaaaattaaaaaacaaaaagtgttaccaaaagacaccataatattcccttaatatatgatcataaaagtcaaatgtttggcaagtgtctacatatatagatcgaagagtttaattagtcgatgctaatataattaattgcaggacaagatgtatataggtgttgggtagtaatataagttttatttcattaatgatcaaatattttgattgtcaaattaatcgagatatt

SEQ ID NO: 400894 - DNA, 971 bp, Cannabis indica
attattttttttatatataatatctcactaaattattattgtgagtgctctaaattcgtgaggaacaacatggattgtataaaaaaaacatataaattgtaattagccaacaaatttcattaagggcatgttggaaaaactatataattgaatgtaattatacaatttagtatatgtctaaccatataataacataataacatgtaatagtgtaattatacaatttagtatatgtctaatcatatctaataaaatagactgaaaactaaaattaatgtggagcttattaatttaaaaaattgtcatagtagaatcattattaataatggagatactaaaatcaaattgatgcgcaagagtcaaacctagacgaatggtgctgcaagaactactactaacaacaactaataaagaaaagatatctaataaaatagattgaaaactaaaattaatgcagagcttattaatccaaccaattgtaacagtagaatcgctattaataatggatactgaaaccaaattgatgcgcaagagtcaaacctagacgaatgacaagtagctctgccacattagcagaaaaatctcctaacacatttgatgaccacgccaaccaaaccacactctgtgcatcccctattactcccctaattcgacaaaaccctccccagaaccaccgaagcatccgtcgcaagagcaaaaaattcaggaggaggtggcatccatcgatcgtagctcgatttacaactgggtttgcagtatattaacccaaatgaagacctcgccgaccatactccttaaactctgccatatagttattagggctgtacatcggtcggtttagtcggtttatactatatattttccaacccaacataaagatcgggttataaaattctgcatgcaaactgcccaatttaaaaaaaaaaattctggacccgaccgacgggttgggcgggttgggcgggttaacc

SEQ ID NO: 400895 - DNA, 992 bp, Cannabis indica
tccgtgaccaccacgtctgccatcacaaccaccattagaaacgaagttccgttttaggaaaaattttgttaacagtttgagtcatctgagtcattctatagaacaagtatgttagaatgtcgtttcttttgttttatttttttgattattttgttaggggataattaagagttgtattaatgtaattttggtgaataataattcttattatttattgaagaataatttgcggcataaatacctaagttttactctgagtagcatataagtccctaagtcgtatttttggcggtaaaataccttccgtcattagtgtggaacttccgtaggtacctctctgttttctttcttgtaatgtgccagatggcattatcattaaaaataaatgttacaccattccaatcattaacaataaatcattgtatatctcaaatagatgtatatgtggcaatatttaattggcccatattatttaatttctaaaaaacatttaaataaaaattccattaaaattatttaaaattaaaagaaaaatacaaaataataataaaatttaaaacttaaaataaacacactttttctctattctatctcgtcttcttcctcattccttttttttttttttttttattgatgaaacgagaaggctgcttgaaaaatagaataggcagctggaggtagataatctccatcccacaacagagaagcttgtcttcttcttcattctctcaattgggcaaccataaacatacgacattaaaatacttattcaaaatttcagtacacaaaatttcagatcccaaactaaacagacaatattaaaatacttattcaaatacttataacttagtattttggggcagctataaacagaccaaaactaatacagtacacaaaatttcagatcccaaactaaaaatgatagctataacttagatccatatattaaaaattaaaaatcaatacacaaagagaagaataagaaacaccgg

SEQ ID NO: 400896 - DNA, 544 bp, Cannabis indica
agaaacttctttcttcaacaaacaaacatttagatttcgaaaaagcaatttaacaatttttttttttcatattatgacataaaaacactgttataaagggagaaaaagggactgaaaagaggagcaaggatacctctagtaaaatatctaaattgttgtactacttattgaaattgaatggaaaacttcctcattagttgtcattctaagttactttccaacctgtgaggacaacaaacttattaaaccactataagaagtaacatgaaacaaataacaacattagagaaatacttgtatccgtgcaatggcaaaaagatgtactacggagcaaattaatcatattattcaatattaaacaacggttttaaaagagaataaataaataaaatttcaactgtaacgaccgccttaataaattagattagaaaaggcaattagcactaatttctattattttattattatttatgaatttaattgttttggaccccaatatttaaaaataaatttagagttgtaatttctcaatttcggagatttt

SEQ ID NO: 400897 - DNA, 555 bp, Cannabis indica
aaatggacatggtgtaaattcttcataacataaatagctacaaaactaagccctcctatgtcttatatgtcttattcgatattcaatattcattgaaattaataatcactctctctttctctctcttcccacaattataataattagtattattcacatgcattatgatctattataaataagcatatcttttttttttttaagcataaataagcatatcattaattatatatacgccacaatatttttcacttctatctaaataccaattcttactttgctaactcatatttaattatatgtacacattattcgtacatggtaggtggtttttaggtatcacttctactagaaatgtgccacgttattccaatgtgtcactttaaaaataatttctttttaacaaattaatttaaaatagtatatataataaaatttaaaattattaataaataattttaaataataattaataaaattatacatttaatttttaataataaaattattaataataatatgaaatagataatatatttataattttattatata

SEQ ID NO: 400898 - DNA, 825 bp, Cannabis indica
cttgaccccctctggatatcccataaacatacatcttagagcccttggctttagcttgtcttgtttgatatgcacataggctgtgcaaccaaacaccttcaaatgttcaaacttcggtggcttccctgtccacacctcttgaggtgtcttaaagttatttggcactgatggacacctgtttattagatagcatgctgttttgagagcttctccccataatggtctctccaaaccagctcctacaagcatgcatctcaccctctctagcagagtcttattcatcctttctgcagtgcccttctgttgtggtgtgttcatcacttttgtgcttgaaataccttcttgagcacaaaacatctagaattctcctgagcagtactctaggccattatctgtcctaagtaccttaagcttgttaccagtttggttctctagaagctttctccactcaatgaaagtatccaaggcatgattcttatttttcagcaagtaaacccatacttttctactgaaatcatctataatgctcatgaaatagtgtgctcctcccatggttggaattcttgatggtccccaaaggtctgagtgtacataggctagtttttctgttgttgagtgttctcctttgctgaactttactctgcaggcactcccaagtacacattcatcacaaaattctaacctttcttgtagtttctccttgaacaacccttatttgtttaactcttcaagtcctctttggctcacatgtccaagtctcaaatgccaaagtctgatttggcttgttgcaggattgtatacagcaggtgctgcacttccagtaat

SEQ ID NO: 400899 - DNA, 649 bp, Cannabis indica
ctgtgaggcaagcataggagctcgaatcttctcaataacttcactcattcttttgactacatcaggtgcaaggtgcctccattcaccagcttcatcccaatgaatggatgaacgatacttccttccataaagcatttcatacggtgtcatgccaatagtactttgataactattgttatacaaaaactcaatcagagggagatacttgttccaagaaccctcaaagtccaatacacatgcttgaagcatgtcctcaactatctgaataattctctcagactgaccatcagtttgaggatgaaaggttgtactgaactttaatttggtacaaattgctcgctgcgaactttctcagaacttggatgtaaactttggatctcgatctgagacgatcgatcttggaacaccatgaatttgaattattttcttgacatacaggtcagcgtactaatccactatatacatagttcgtgttgggtcttgtgccctaaataaaacctattttaatataatcatatttactaattaataaagataaaaaaacgcattctatgttgcatggttcacatgatttatttcatgattatatttaatgtataaattctattaagtccagaacatatataaatatgtatatatttattcatga

SEQ ID NO: 400900 - DNA, 615 bp, Cannabis indica
catgttagatgatttccctgaattgcatgagttcttaaaaattaggaaatgggtaaacacggtcaccaacttgtctgcacctcatcccattttagtttaagaattctatgccaatctagataggactgttattgctgaggggcatccagggtgtgtgagtgcatttgttaggggtaatcgtgttccatttggtccatccaccattgcatgcatgttgaaagttgagtccatcaggaatccaacatatgggaaacaatacaatccagatcaaactgtgatgggtagagtgctaactggcagggatgattatctgtgggataaacaggaaattttagccactcatctaacacctttctatagggttcttcatcgggttgcattgtacaattggttccctaactctcatttgtcatcagttacacttgagattggaaagtttctgtatgctgtaggaactcatgtgtccattgatctgccatctctcatatttgaacggatccttgaagcttcagaaactactggcactcgtaacaagctaccctttccaagccttgttcaacgagttcttatggctgctcacccgcctcttaccacgcatgactatgaagttcaaaa

SEQ ID NO: 400901 - DNA, 965 bp, Cannabis indica
aaaataaatatcatataactgaaaaacaaatttcagttatattcttttattttatattacattttaactttaaatacattatcttataatatatttgatataataattaaaagataaatatccattttaatttaatttattttataaataaaataatcaaactaaatctacatgggctcttacatgtcaccctacacgtgtgggacaatgcctacacgtgtgggccatattttaaagtttaaaattagtattttaattttaccacaaataagattcattatttattttaccaatgaataataattggttaattctcattaatcttttattttactaggattaaaataaatattattttcaacaaaaataatatatttctctctctttaatattatttaagaataatgttctattcaactaattaatatagtttcatcaaataaaactaaatagttaaatactactttaattatacaatttataattgatataattattcaaaataataatttctacaaaattattattttgcccttaaaaattatttcttataaaaattaatttttttctcaaatttatttatcaaattaaaccttcccacgtacaatgttgtataaaggtgattcggggaccatgggcttatatttcgaagcttcaataaactcttcattattattgaactcttcagtaaaataatttgatttattaattctattattacttgacgataaataaggaattgcactctttagcaatatagaattatatttataaaattcttatttgttgttcattgatataatcaatataagtagttcaccctccaattatttagttcataattagagttggttaaaattactcttttacccttctaattatctcttgattccttatttaatattaattcaatgtgaacagataatctatatcaaattatagacttggatccaactattagcact

SEQ ID NO: 400902 - DNA, 558 bp, Cannabis indica
aaaaaaatagtatatagggtaatattgaataatgtatcatattgttaaattttaatttacactaaaatattatacatttatatgcccataaaattcaatatctcatgtaattttacataaaataacattcaatataataatatacaatacaaatacagtacgacatactaaacgaatccaaaattattttgcaaattatttaaaattttataaatatttgtaaaaattcctaaaaaaaaaaaaatctatatctatatataataagaacaaatatcatatagaccaatatttgaaaattttacttctatattttattaaatgaaaaataataaaattaggttgattttggtcaaatattttcaggattagaattacattacagatcggatcataactattaagggttaaaataagtaggggtgtgcataaatcgatccaatccaatgagaaccgaccgatccaattacaaccgaccgccaaacattggatatccaattgtgatcggatcggattggatgttatttttaaatatccaattggatcggatcggatggtgga

SEQ ID NO: 400903 - DNA, 844 bp, Cannabis indica
tttttctaccattttttcagcaattagattcacatagtcaattatgtcaaattttttcgttctcacattctcttgtttccgactcttccccttattttgtttgctgtcccgctgtatacgattctgttgttgttgtgttgttttctagcattgccacattctcttcatatggtgttgttgtggttgttatatttgggattgcagcaggtgttgtgttgttgttttgctggttgatgcataatggatatgtggtaaaatctgtttctttgatcttcaattgcaaggctggcatcgttgaatatttttatcggtggtattccttctttagattggtactgtatttgcatcgttgttctggtgttttcgcaccccaatgaagtaagtagtatttgtaatagctcttcatacttgcattttgttggtatgaattctccactagcttcatagttgacataattatgctattcttcccattgttcattgctctttatcagaactggtatacgttccattacctgccattgttcacaatatttcatttatgtatctttttttttcatattaaaacaacaataaaacaacacttcaaaacaatttacactagtcatttattggtgttcttatttattattttgctgatccatataatcaatatatatatatatatataaaggaaagcacaagaagagtttatgtgtcattttataaatttttcttactatttttcttaatttctaacacattctcttattttgtttgaaaactaaaccacacaaacaaacaaaaagtcccacattgtttaaaaaccgtttaggttttatctatgtaggttataaataatatt

SEQ ID NO: 400904 - DNA, 542 bp, Cannabis indica
tacagatattacaaagtacataaaacattcaaaagtagtgaaacaaagtacccaagctccccacgcctaattttcaagaaataataacaaaactaatctaataagaattagggattgaaagagttagcaacatcgataacaaaacggtatttaacatcagatttgagaagacgttccatggcagtgttgacataatgaatgggaataagttcaatatgagatgtaatgttgtgtttggctgcaaaattaatcatctcttgcgtctctttcattcctccagtgcaacttccacctactattttccttcctgcaacatcataaaatcacattctttagcaaaactgaactaaaataattcacacaattaaaacacattgtacatcatctttatggtatattaaatttgcctataccaaccctataatatatatatatataaataatacgctaatttggatttttatcccttaaactttaacatgtacgaaatcatgccccctgaatttttttcatcgttataaattctccctgaactattgaga

SEQ ID NO: 400905 - DNA, 1513 bp, Cannabis indica
ttattgatgtttacgtttttagtgtaattactataaatcaatatgcaaacggattgacaatgaatgcaatccttgtgtaactaactggacacttgctttgtatataaaggagtgatccaccatgaaatgagacctacgaaactcttgctacagtggacaaagcagaccgtgatctgactaaaccactataatcctttgtcttcttgttatttccagttttctgttaagtatttacattcccagctcgagtactcgccattttaggttgaatactcgcaattgctcttcaaataatttcctcttattattagtattattatatactttcggtgttgcgaattttgctcgacaacatttggcgccgtctgtgggaaccaagaagtacattcttactaaattcaggaaggaaaatcatcatggcttgaaaccaagcaaacgaaggtgttaacaacgaatccatcaacatcggaatgatgaacgttcgattatctggagttagaacgccacctgtggatgtcattaatggcgaagtagggacaggtaatgtcagacctctcaacctattccctaaaacggctggcccccgagttagagaaacatccacgccagcagcgacaacggggcactttccacccatcactccagcggtagtatccgagggaatcgtccatcacaccactgaccaatacactgcgatccaggattaactacgcaccctgcaggctgaggtggatggacagaacagggccaacgcccccatcgagcccccactaccgcacagataaccctcaagtaacaaatgccaggcgtcgtaataaccgtgttcgcagggaacgaagaaccaaccctgaaggtctgggcctgaatcaaccaacctcaagagaccaatctgcgaggtatcccaaccaggagacgcaagttgatgaagaccccgagcgacgcaaccctcgcagtaggccttcaagagacaacgacttagaatccacctcctcgtcttcacatggtcgcacacctagcaggtatacgaggcctggttctgtggagacgcaccagggaggacgatatcaggttcataggggtgatctgcgtgatcacctcaacactatttttagagcacgctcccacgcccctcatgacgaggaaacaccccgtgacccccaaatgggcgatcaaggtgtaaatactcgcacatatccgcctaacgcaccagcagcgactaccagggttaatgtcccagcaaacctcgccgtagtagccacaactcctgcagtcgtagcactcccggctcccgtagccgagggtattgatcaaagcatgcttttgcaagctttgaaaatgctcgagcagcagagaaagcccatatacaagctgcctgggacctcttcttttactacggaagtgcgacaagctcagcttcccaagggattctgattatccgaatccctaaaatacaaatctacctcttgttgggttttatgccctaaataaaactcaattcaatataatcagattt

SEQ ID NO: 400906 - DNA, 642 bp, Cannabis indica
tatatataaaaaaaaaaagcatgcaaagaaatctttaaataattgtcatcactgtatctcacttgtattcaccactatatatatgtaaagttgatattatcactatgtctcatttgtagtcatcattaatattatttccagtaaatttgctctatacataaaataaatcaaataataatcggtaagtagtcacttttatacataagtaaatcattaattatcaatatcatatacggttatatagtttattttttaaaaaacttttaattattaatgatctctaattaaataaagtattaaaaataattaattaataatctccaattaaataaaatagaataaaaataagagaatttaaagtagaataaaaaattgaaaagatgagagaattaaaatgagaatagacagatgtttttttttaaaagaaaattttaattaactaatgatctctaattaaataaagtagaataaatttttaactaactaactatcataagcaaaaaaatataattttcgatgtattcataaactagacatagtctaatttttattacgagtagaggcattataaaagtactttttaatttattgtgcataaatttaaaagcgaatacaatactttttatatcgtggaacatatag

SEQ ID NO: 400907 - DNA, 443 bp, Cannabis indica
tagtgcagaatcaaaccaactaacctttaaacaatcaaacaatcagtaatgacaagattatcaagccaagagcaataattgtataaaaaaaataggagcaaacagactattagaaaaccaaaaacctattactgtaaatgaagaaaatagcaccaagatatatattggttcaagtctgatagatcgatgtgatctatggctctactccagttctggaacaccagcgtcatccatctttattgattgagcaagaaaaggtacaatatagtcaagacgagattctctgttgagttctaagtgtttcagctctcacactttacacccaagaatcctcttcatctacagatgattcttcttacaaaatccaaatccattctctctcgtttctctgcacctctctctctgcctctcaatctcatctctaaagttttgaatctcctcct

SEQ ID NO: 400908 - DNA, 705 bp, Cannabis indica
tgaactgacttcttagatagagtggatgactttatcaaactagaagaagccgtcacccgagccaagggctacaagggtggacaagaaaaagtcaccagactcttaaacccctgctactgagacgtaaggaaatgggaagaaaagaaggtacaaacagagagaagaaagctaacaataatggcaagccaggaaactccccccggtggaaagaagccaaagattggggcaaggcccttacgagagtatgagcctcacttcaccaccaagtcaatcttcttggccccaagagagagatctatacggctacacaatcaacaatgtcgtatcataaacctctttccttcaaagagtcagggaagagggacatgaaaaaaattctacaactgccacaaaaattatggtacatggataccaatgagtgtaattagttgcatgacaagatagaatttttcatcaaataaaacatgttgctctttagcggtatgtacgaactgaaactccagttgggggcaatgcacctctctagcctgtgctagttgcaggtaggctagagatcatgatttgagaccctcacccatctagaaattcaaggaacaccttaaagagatatgcaaaatcatttcgacatgaaccaagagctaaagtcttgcaggttgtagaacatcctccaaagtctcaacgctacgaatgtgaacctatcacctt

SEQ ID NO: 400909 - DNA, 674 bp, Cannabis indica
  modified_base (59)..(59): a, c, t, g, unknown or other
aacattcaacaaatcatctcttttaggcattatatcaaaacaccttgaatgcataatanaatgaatagaaagcatatttggtgagactaagcttcacaaagaaccaacaaagacaatataataacaacaacaaaaaaaaaatacaaataaatgcataataacccattaggggaaatcatccaaattggtcaattcaatacagagaccaaagcttaaggatacatggtaaaatcaatatcagaaagcagaaacttagaactacctggggattagtgatgcgagaaagcccttcagtttgccaaactgggtaaatgtcgaacggtttcatcaacagaagcaatttcctcatagccattgctactgactagttactactacttctgtaaactatgttcgtgtagtatagcttccacccacataaagttcataaccattaaccgctccctccttaagggggtttgttgcttttgggcctgagatacgacacgaacagccccagctcagctcacacttccagaccagtatctatataaactataaagatatttaatgtaagcaattatttcacaaatacacaacaacaaataaaaaaaattaacaaaatacgattttacgaaattttaaattatttttactaatttttttaattttatttacagaaaatacagtttttt

SEQ ID NO: 400910 - DNA, 1296 bp, Cannabis indica
ctttttcatggttaattactccttaatgtttatgtattatatatatgataattattcagcaaaatatatatatgtatatatgtatattatttgatgcccttcatttgtttattatcctttataattataaaataggacaatttaatccctaaattttcctagcccgtgagaccccaatttctccgtaggaaacggatttctaaaacatagtcctctagtttatattattttatttttcatttttgtgccacagattgtatatacatacagtatgtgaatctagataacactagtcctttagttttagattcattaagattgtttgtagttggtttgtttgggaatttatgctggtttctttttgagttagtgaaaggcctatagattttagaatttttgcttgaatgtttgcacagtgtgatgaagtttttgagttaaattttttaaatttagttttgagcctgggagatctcggtcagtgtcgtgttgggttgaaggctgaaatggtggatagttgatttcatcttgttgtttgttattgattttgttcttttttgggtgagctgatataatgggatatactgttaattttgttataggtttgttttatattgattttgttctattttgcgccattatttatggctttggcgccttacaaggctttagcacctattatatggttgggcccctaattatttagggtagtttgtttaaattttcacgtttttcggtattgaatgtataagaaaattttgacagaataatattttaaagttaaagttatgcactatacagatttattagtcggaataaaaggattattttggttaaggtatgatttaaagaatattttaaactgaaataaggtttaagagggtttactttaaacgctaattcctattagctatattttggtttatatttttaggaattttcagcataaaaggaaagtgtttggaattttatatttagattctaatattataattaattaagtaaattgaagaataagaatattgaggatcttgtaataaaaggagttgggaacactaatggtctaatgagaatatattgattcagatatatttggtaagtcaaattattatggaattttggtttgttctcaatattatgggaatgtaccaaaattattatattatttgtatttttaaagaatttctggatgagtggtattagcttttttgatggaagaaatggaagtacaaatttaatagttgagtttgcaccatttgtgtattgctttggtgacttttaaggttttcgcgcttgatt

SEQ ID NO: 400911 - DNA, 552 bp, Cannabis indica
tttttcatttttcgtcttcttccttgctcactattcaatatccattcccaccattgtttattttcttttttcttcttcaatcccattcttccaccaccactactacatcaccaccaccaccattgcatcaccgccccaaccatcacaaccaccactattgtcatagccaaactgttgagctttctgccctaaataaaatctatttcaatataattagatttactaattagtaaaagatcagaaatcattttatgttgcatggttcacataatttatttcatgattatatttaatgtataaattttattaagtccaaaacacatatatttgttcatgattatagcttcgtcagcatagtggaatataatcatgattatatgttcaaaagtttaagtcccatgatttatcaattcactcgatttagactaacatgataatcagcgataaggtatatttacatcttggataagtattatgtcatttccaagacattggcaaagtttaccagtatcggatgtatggagtatacattgaattggaccgatattgaac

SEQ ID NO: 400912 - DNA, 695 bp, Cannabis indica
atgatacttattagttctaattagtgaaataaacaataatgatttaattaattaatgcagggaggtgttggagaggcaagcaacattacatttcaagacattgaaatgcataatgttcgaaatccaattataattgatcaaaactattgtgctcgtagtactacaccgtgccaagaacaggagtctgcagtacaagtccgaaatgttttatatcaaaatattagaggtacaagtgcagacgaagttgcaataaaattcgattgcagccatagcgttgaatgtgaaggaattgttctacttcacattcataatcaccgtcgaaataacagacacaatagaggaaatggagatactgaagctgtatgtagaaacatacacttcactaatattggacacgtttttcctttgtgtcccaattattagttttattagagcattttattagtgatatattttattagtatatagaaacacattgagattttatatttgaatatatttacatatataaattacttatttaatcacctatttaatgaatgaaggttaaatatttctgtttattgcaatactatgtgggattgtatgagttgttatgatagttaatattagcttttgaatcttatcttaagagttatatgtttagtatgcagtcaaatatcttttaaacaaaaaagcaaataaataatatatat

SEQ ID NO: 400913 - DNA, 811 bp, Cannabis indica
ttgtaggtggctttagccttagaggaatggcgaggtcaacaggattcgcaagattggatggattgacagtaatagccagattagtaggaccttctatggtgggaggaacacgaacattgggatctcacaccatgggttctagaggaagatctgagagagcaattcttctagtttgaaccatggtgattgatcaaaatgaaatgaagaaacttaaaaaaggctcttgatgaaaggaccaaaatgatgactttagccaactgacagtaaagccttataaattactgattatcaccatgtgtaaataagaataataaatagtaaagggaaatgatgtactccctttttagttgtatttactcttgagataataccatgcaggttacaggcttagaccttgcaatttctagctatggctctctttagtattacaattgtgagaacaatgtgttatagatgaagaactggtaagaatatatgataaacttatgaagaaaatagacttagagtctgagaggccttaggtgcgtgtggaacttaaagagagagacagagagagagttataggcgtgtagcttaggattggggtcctttgctgggtatattttacagggatctagatttactaacaagtatgtcgattaacatcctaaatatgaatatctctaaaataatgaaattaaacacataagagtttagaaacccttgcttagatctctaactcttattccttatggtcgtagagtattatcaagatctgagcttggatctctttctctcctgcgggtttagttaccaccgtcatactcactat

SEQ ID NO: 400914 - DNA, 1028 bp, Cannabis indica
aaaagaaacacaaagttacagctcacgatgaagagaagaaacatgaagctactcatgaagttggaaacaaccacaaggcttctaatgaagatcagatgcagtggaaagcttgggtgtgcatctcttctaaataagattgctcttttgttactcttttgaaaattattttgaaagttccatgatggaatacatatgtaaatactaaataggccttgttggaactatattataggcttccactcttgaaagctccatcactactagatggaatgaatatgtaaataaataggctacaacttaggaacaccttaacaatcttttgagttctattacaacttgacatgaatcatgttgcaacattaaaaattttgtcaccttaaataactatgaagtaaattattataatgtcaatattttacatcttatatgctatccacgtgcggagcacgtaaagcctcactagtattttttagaaagagaaatgtaggatgattaggttttgtttaaaactactgttaaataacaatttataccttatattttacaaaatgtaacatagttatatcctaagtttgatattggtcaaaaaaattatagttagattatatcaaaaattggttgctaaagaagtataggtagagaattttttgggtttggcttaaaatatttgaccaaaaaacgaacttagtgtatcattatatttacggcctgttcgggaatcattttttttttttttgttttttaaaattttacttaacaaaatcttgtagttttttcatgatttttaattaattaattaaaaaattaattttttaataattaccgaacaaacatttaattttgggttatttgcggcaaaacctcctaaagtggacaggtttttacaactaaccccctaatctaaaattttggtggtaaaactacctaaaccactagtccgttagcagttagccctttccatccatttttggctgttaagtgccaggttggaatgtccacgtgtacacagtatacacgtggcacaattt

SEQ ID NO: 400915 - DNA, 864 bp, Cannabis indica
tggaatcaccatactaattcgggctcttaagcttcccttgatgtcttcaaccatttgacatttattcaccttgtttccatgccaaatgcttccatttctagcttgccaaacatggtaaactactgctgcaatggcagcagacatcaccattcttttaaagtttgaaatccttgccctgccaatccaacgaaccagcttagggagggacctgttcaagccttccagtcaagccattgcttgatttcatccaagcagtaaaagtaaatcacattcaaaaaataaatgctgctcattttccaaattagaaacacataagctacagtggtcatttgataagatgccataccttttcaacctctctttggttttcagtcgagtaagcattgctaaccaaagaatcacactaggttttggtgtgttcatccttgcccaaacctcattgcaccattttactcttggctgtggagtagtaaacagactatatccaaatgctattatatatcttctttgctgaaatgagtcacaatcaatcaagttggtaagttggttcttgatggttacaagcttcttccaataccaactcgcatggatagaagcattgtaatcccaccaattttgatctttgatgtagacactatgaacccatctaagccaaagattctcttggtagctcgagatagcccacacatacttactcatggctgccttgttccattcttccaacttttttatgcccaatcctccttcagtttttggttggcatattttgtcccaagctacagctcctgcaccatgaaacatagcttgccctttccaaaggaaagctctacaaatagattcgattgccttcagaactttctttgg

SEQ ID NO: 400916 - DNA, 1778 bp, Cannabis indica
gacaactagaaactgatgaacgaaaaactcctcatgacaataaggaggatcttggaatgcaactaggagaacggaggtcacctgctagaaatcaccagcattcttcccaaacccatagagcaaggactcgtacagaccctgatggggaaaatacaataaaatgctttcacgggaaataacaaagcgtgaagaagcaagtgtgacttcgaggcagtgaagaacccacagtcgatcaactcgaagaggagaaagtactcaacgagctaatgatcgagaaagtatgggaaccagtaaatctgtgagccactaaaagatgaagtttatgagtaggacacgatcggtgagtaagacgaggtctaccagcaattactccaaaccgtatatacgagagcacttgaatcgaaagaaacttgatctccgccaacagcttggtccaaagcaagacgatccagtccaattgcggataaacgagctggtggacaaattaggagatatcaagtgggggaattagggaaacaatctggatacgactctgatgaggagcttgagtcgtatcatctagatataatgaataccccttttccttcaagattcaaaaacccgcatgtctcgtgatatgacagaaccaccgatccggtctcgcatttgagtaactttaacacaataatgcgagcaagtaatgtgacaaacaatttacgtttattttttttcccacctcacttgttggagcagcgagtagctggtttaacaagtttactcatcattcaataacttcctgggagcagctgtccacggattttaagaaacaattctacgctactagggatagacgacccgaagcggcctcgctcagcaatataaagcagcagcccggcgagacactaaaggcatacttaagtcgttttagcacggctgtggctagggttaggaatttggatgacaacacgcaacttacagctcttcaggcggggatctctactaatccattaaccgtaggggcgagttgtgggatgacttataaggacgtctagtgagaagcatcaatgagttcgaaaaaagggctcaggtgtttgttcggaaggaagaagcccgaaaggaaatgatttttttgaaaacaagctcgagaagcaagcccagcaatgttttaacaggtactatttccacgagaattgataactcggggcttctagttcgaagagaaaggacggaattaaagaaccgtcgaaggataaaaagaaacagaagaagcatgataagtacatgtcagtgtatactatttataccgagcttaatgaaactcgggagaatatatacctcccacatgagtaaaaggttgccttcgccaagcccgagcccatgaggaattcgaggagcaaaagagatcctaataaatattgtaaatgccataacgatattggacatacgaccgacgaatgtcatcaattgaaaaatgagatagaaagtctcatccttggaggccattttaaacaatacatgaaaagacagggccatggatacaaccagcccaatctacccaataacccaaacaactaggaattacaacctcttcctattgaaggagaggacatcctggttatttcaggagggccacatatcccaggggaaagcaataacacccagaaaagatatgtgaaagagataaagaacgagcagtcgacctttgccccagaaccttcgaagaaggtgaaaacttaggaacctcccattatattcacggaggaagaaaagaaaaatgtgaggtatcctcatgtcgatcc

SEQ ID NO: 400917 - DNA, 430 bp, Cannabis indica
caatattcaattaacaattttaccatatcgtttatcatattatcagtagctcttcaagtacaacaagcttgagttataactcttcgtaactccaatagtagtattagtagtattttttaaaggtactaaatatctcatcaaagatataatatttttattttatttttctttcaattatgtttagcaatcttacttcttctaattgtggagattaaatggctgctgcaaaatgaaagggtggcaggaatttcttttgtatttagagaagcaaaccaagttgcgcatgttttagccaatgatgctttgattaacaaagctagtgccacgtgggtaggggttgttcccctttgtgcgagtcaagctattcggtgagattcgcgttatccattgtaatgtttttgattaaatgaattctgtttcaaaaaaaaaa

SEQ ID NO: 400918 - DNA, 716 bp, Cannabis indica
ttttaactctaaataatccaactatctcagttacctattcctttgtgagatcagatgcttgatggctgtcattgccttcatatcctgagaagtcctctgccaaggccatataatcatccatctctggaggaatgaaataatcaaagtcctcttcaacctcatttgagtccacctcatttgaatcctcactttctgggggaaactgtggtgcagcctctgaatcagatgaggaactaatctcaattgcttcttgtaattcttctgaaatcacctcctttgttgtaattgcagccataaactcaccccaatggacaaagaaattgtaaaatttgtcatcaacattgacatggccagggggattcacaacaacatcagcaacaacagtacacccttcaggcaactcctcaattttacatttctccacttttgaagattgctctggttgctgcatcttaacagcttcagcatcctcctcccattccactgctaactgtggatctggtagcaccagatacacattagcctctgcattatttctagctgccaaataagaacaacaacaaccataaatcatcaattctgacaaccataaaacctatgacaacaaacaactaacatatctaagaaaagtttaaaattatacctgtcaaatcctccaacatgagctgaattgaagcattgtttacaaccatgaaacccatgtttaaatgcttccc

SEQ ID NO: 400919 - DNA, 1389 bp, Cannabis indica
ttatattgttcataatcaacataaatattagtaaattaagattctggtaaaataaattctcaaacactagtatcaaagccatggtaattatatacttttatgagaaatatgtattaaaatgacttgattgctttttcatgtgatttggatggttcatgttgtgtttatgtgagtttgataaattttatgtgaaattacatgtaattctatgaaaaataattttattttacatattttgtgattaaaattattttagaattaaatttggttgaattttaagcatgtacggattttatagatctaaaattaggccaaaattgacccaaaaatacgaagttaggcattgatgggcgtggaatctcgaacctggccgagaaaagtcggtccaagaggcccttctgtgtgcacatctcattccagttgcctcatccgtgggcgcatcatccctggtgcaagctcctatccgtgtgcgcccaccctaccagcaactttcgtgcgtgcaaatctcagtacctgcatggtgtcacactcacaccaacatgcttcatgcatgctctttcgaattttgagggatttttgccattttttttttaattaaaaattcatttttttaaatgaaataaaagcccgaaaaattccaaaattagtagaaatccatatttttctatttttaacctaaatatcatatattaataatatttaatttatttatagaatattattaattatggatattagtaatggtttctccagtgaagagcattaggcgctttggaaagagaggcaagttaagacctgagtttatagggccatttgagatactcgagaaggttgggcaggtatcatatcgactattcataatgtatttcatattttgatgttgaggaaatatgtttcaaaccccactcatgtcttgagttatgaagctctagaactacaatcagacttatcctatgaggaagaaccagtttagatccttgataggaaagaaaaagtttttcgaaataagaccatagctttggtcaaggtgatcgggaagaacaacaaggtggaggaagtcacttggaaattagagtctggcatgagaactcaatatctagagctattcaggtttgattttcgagacgatatccttttaacggggggataattgtaatgactgtatgttagaatatagattagtaaaggcaattagtgttaattattggcatttttataattatgcatgattttattatgttgtgggtcctattattagaaatggacattagagttataatttctcaattctagagattttattaaactctaggagtattatttatattaaatatgtattatgcaaattttataatttttgctcgacgacaacgaaaaatgtgatggatg

SEQ ID NO: 400920 - DNA, 976 bp, Cannabis indica
caaagttatcaattaaaccatgtgtttgttaaatgacaaaatggaccctgtattttttaaaatagtacaataggaccctgaattgattttttgtcaaaataaagtttaattataatccgatctaaaagtgctacgacaaaactgtttacatttttttgtatctgttcttattaagcattgtcttcaagttggttgtaattaaaaaaaagttagtcaaaaattaagctcagggtcctatttttactattttagaaaatacagggtccattttgtcatttaacaaaatacagggtccaatctgtaacttttgcaaaacacaggattcaaaatggtatttacccatatataatgataatagtatataagttcaaaattcttgtaattctattagtcttttttttttttttaaagaatttgttaatttttctaaaatataacatgttaatcttaaattgggacataatttaaaaaaaaatatatattttgatgcacataaattctaaaaaaatttactttaataaattttaatttacgaaaaattatagttataatccctaaactcgacattcttattagtccataagttgtgtctttataccagaattccttttcattttgctggagtgaaaaatactaaaatccttagaataattacataagatactattcttttataaaaaaaaaaaattatttttacgtttaaagatatcttttttactattttacttatttttcacaaaaataataatacgaaaaataataaaaaaactaacataaaattaacatgaaaataacatcaaaacaacaacaaaaaataacatacatataataacaaatcaacaacaaattaacaagaatatatacaacataaaaagaccgcattttctataaataaaatcgtaaaaatatttaaaattctgtaaaatcgcatttttacaatttttttgtatttgtgaaataattctaaaattctttt

SEQ ID NO: 400921 - DNA, 388 bp, Cannabis indica
cacaatcccttttcaccaagctttaaagaccctcagtgcaaagaagaaaaaggtaagaatacataagctcaccttgtctaagacttcgttgaggagtaatagagccaaggacctcaccattcagtagcatggagtactccacagaagagatacagtcaagaatttttctaatccacacactatgaaaaccgagctttcccataaatttctccaagaaacactactcaacccgatcataagcttttgacatgtccaacttaagagcaaagaaacgatcacctctactctttttctttaacgcattgatgcattcaaacacaataagtacattatcagtgataagacgcccaggaaggaatgcactttgtgttggaatttattttactag

SEQ ID NO: 400922 - DNA, 839 bp, Cannabis indica
caaagagatggatgagttgacttgtgcactttaagatagtgacactaagctatggggttccaactaactatgatccttccatccttatgccagccattattcgacgtaaacaccaacccgaaatattcgaacatataaggctcccaagttctgagccttaactcttgtctcgagaagaccaacaagccctattttttgatttccaatcaaatgcttgactagattttgttttagctggctgttgatccctcggacattccaactcaatatcttatccattattatgagagggacctcccccctctcctgtgccatctgcttcccattgcttccctttcttcccatgatcttcattaccatgtatctctatttcttctgcactactgtttttctctgtttcccccaggattttaaaggagttgttggtagttgcagcaacattttccattccttatcttatttttcagcctttgatgacaggttggaacccttctctatcaacatttcctgctttctcgctctcttttaacccagcatgctgctttcctggttttttcgaaatccaatgctgttgtttttttggctctcttttcctgcaatctcttgtagaatgccccattccatcacagttagcttacatttgtatcttagagccactgttgtatcattcccattttcatcctcaaactctataagctcaggcgaatcctgtttaatggccacttcaattaggggtgttcataaaaaccgaaaaactgaaaccgaccatcaaaccaaccagaccgtaaccaaattttcggtttcacgtcatcaccgaatttggcggtcggttttgattt

SEQ ID NO: 400923 - DNA, 797 bp, Cannabis indica
tatgattaggtaatacggtgttgcagttgattccgttaatcattttgatctttctcttcttctctggcaacctcagccaacctccgacgaacgtgcaacctaaaccccattttctctgtgcctcggcttctccgcctaccacgacagcggttcaacctctgcctcgacttctctccacctcgtcttcacgcctcccccagtcatggaagctggtatatggctttttatttttccctttttctttatttgtgtttctcggtctctttctctcttatgcaggtggctgtgttcgaagggttgaagctcgagtagatctcgcccgtctgtgttcgaaggcttggtggctgacgggatgctgggttcgtgatttaagtgggatggggcttggggtgttcgacgggcataagaaatttgaaacatctgaatttttttgataagtttgaactattctgatttggtgattgtttattatgtgattaaattgaatgttttaggtcaatttttcttaatgtattttttgggttctgtaaatgcttctctgtaaaaaattttaagaaatgaatgtataaaattaacattctttatatcctgttattattgttatattatcaaaaatacattaataattattagttttctagctaaatttaatatttataactaataataatataacattattaatatatttgtaatttaaataaaaaatagacctatataaaattttaatataaatttgtattaaatcaaattaaatattatttttttaaaaaaaatatttaatatagtggcacttt

SEQ ID NO: 400924 - DNA, 699 bp, Cannabis indica
cagcttctttctaagagagctgaagcgacagatcagtggaacccattgaaagatgtttagagctgattagcgaaggtaccgggagtatgccttcctatagcgagatggatgtctcactaatcgttatccatgtcctccaagctattacacatagttagtataatgtatattatacgctaagtgttctaacaaccaattcgtctcgtcaacacctttccacacattgtgaggttgatggctcgctatgtattattgatgtcatccttatggttacgtacgcggaatggtttctcattaatacatgaatcaatagtttgtacatccttgtctcactagagactatgcagtctgtgagttataaatatatcctattgactccacatttaatgagttattccatttaatatcttttaatataatttccattatatttattgattcgtattcctcaaggttgacacgtgtcatcctctgaagtaccagcaaaattttaggtataacagttaccccttaaaaagttattttcagtgaaaagtgctttttaaatgattaccaaggatatttttgtcataattcattttgaaaaaatgcatgccctttggttttggcggttttgtgatttcgaggcacatcatgagcattaaataaccatcttttccacttcctccttatttcaacccgttggatcatttatcctta

SEQ ID NO: 400925 - DNA, 985 bp, Cannabis indica
tcatatatgatcattaatttcatgaccattttcacccaataaataaaatcaacaacccacccaccatttttatggtcttattataactaggtttaatatattattccaaaataaatatattaatatttttttttttaaaaaaagatgaataagaaaacttcatttaatttcaaatcaaaacaggagaagttctttcatggaggagcatgtatagagtttggtcatccaatgaagggaccatttggctgtagcatttaattacaattctctcctttaggaatgtacttgtatatacaaaaattaataaaatattacatgtaatgtctaatattgaaaatattataaatagaactaattaattaagacactaacaacaaaataatattaaaatatgagttatttatttgtccataataaattatattacgaaaaaaaatgaatttctatcttttcaaataatcaataaggaactcacgatcgtgaatttaaataattgtataaattttataaatatttcaattttaaatgaagatgaaaaaaatagtaaaaataattaaacatttggtcatatccataggaaagaaaaataaatgtgaagatattaaagaaaaaatggctaaacattggtcggatccacagaacaatgatatatcttataaatataattaaaaacttttcttttacatgatattcaatatataaaatttaataaaaggtgtacccaacaaagtggcgacactaatgtattttaaattttttatataatcgtgtacgttatatttatttaagatattatacaaaattttaataaatttgatataatttacaatataaaaagtagtattcaaataattttttcacacgtgtataaaatattaaattttatttgaacaaactgtttgaatcttatttttagtgtgtcaaagtttttcaaaattttacaagatatcttaaataattataaatttcacgaatataattaggt

SEQ ID NO: 400926 - DNA, 1200 bp, Cannabis indica
tagttggaaacagggggtggctgctaaggaccaaatcaaaagcaagatggatattcagcggtttgtggaacctgatataccattgctgaagggtataagttacttgccctgtacatcagaaagtcacctgggatagagaggtttggggaagactcaatgttcccaagcattgctacattttctggctagcaatgcacaaccggttgagaacaaaagcaaggttgaaagctgataaaatagtgcaggaagatagatgtgtattgtgtaatctgcaacaaaaaaatgttgagcacatgttttttgaatgctcggtgtcagcacaatgcttgctggaagtaaaacaatggctgcaatggggtgcataacctaactcaatgaagtagctggtgcggtggataggaatagcaaagctgtcaaagtttaggaaaaaggtactttcagctgccatagaatctttgatatataatatttggaaagcaagaaatgaccacatatggaacacgaagatggtgaacataaaacagattatgcaacaaacaaaggagatagtcaagacccgtgtattggtgctttggctgaaagagatcaagaggaaggatcaagattggttttccaaactataagatatagtgaatagtatagatgtaaataattttatgcataatatacggttattataggtccttttatgaggatgctattttgtttgtacaaaagagttttatgagcaatacaactaattgattcataaaaaaaatgataggctcttactttcaaaaaaaaaaactgacaacataagctcatcacactacttttttagacaactgagaaaataacgagcctcttttagatttcgaattcctctctctttcttcttcaaaattttttaaccctatagtgaagagtacttgcccacacaattcaagtcaatactcaatcataatgtggaagattgtgaagaattcgatcttctaaagagatccaagttcagatcttggtaatactctggaacagaaaggaacaagagttagagatctaagcggaaggagccattatatactattatggtaaggttttctacaatattatatctgtttatttcattcttttagaaaattcatatttaggacgttagattgcagtttgtaatcaaatatacatgttaataaatctagatcttaaagggcaaagtggtaattt

SEQ ID NO: 400927 - DNA, 715 bp, Cannabis indica
taattgtctagcacctcaattgtctagtcaattacgcatagctaatggtgaccatggttatggtatagaatttttagggaagtggacacctcttaggattaatgaaaatggtgcatcagggctcgacgcaatcattgatacaggatcatcatccactacattgcctgataattttgtgactagtcttcaaacatatgtgaaagaacagttgtatgaattaggtgtaaaagaacatgaaggtgtggtactggcaaattgctatgcttctgaggtaatttgagggaggatcttaaagaatttctaaaagttcggattcagtttgaaggtgaagcaattatggaattggatcattgtattttgttcaaacaacatacaaagagagcattttgctttattttgctttaggataggcgtaacaatagttgattcgggaaagacaatgataattggagcggtcactcaacaaaattaccacatggcttacgatcttgactacaaaagattgtatatagaaaaagttgattgtcaaaagtataaagattagtagtacttctattaaatttgacttttattattactagtttggacactcgtgcggagagatatatttattttttaaaaaaaaaaattaattattttgaaataatattattattagaatatttttttaaaccaaaataaaaaaattaaaaaaaaaaacaaataaaataaaaag

SEQ ID NO: 400928 - DNA, 500 bp, Cannabis indica
ttcaattcataataatttttttccatataaaaaaaaaatacttttcttatattcttcaaagtaaaaaagaaaacctcacacatatatagttatatgaatacatatatatataaataattcaataattatttcatttaatattattaatttaatttatatttattattatgtttttttaaaaaaataataaatttaatatagatatttttatagaaaatttattaaataatagtaaaatattaatttgtaaatttatgttttaataaatataaaaaaattgagagaattaaggagaaaaaaaaaataattttggagagattttaaaccgccacgtcaccgcctcatacttttcctttatatagatatatatagatatatagattattatgtgttttttaaaaaaaaattaatttaagataaatgtttttatagaaaatttattaaataatagtaaaatattaatttataaatttatgttttaataaatattaaaaaattga

SEQ ID NO: 400929 - DNA, 682 bp, Cannabis indica
atcaatatatgaagcctttcactttttgagtagagtggagagtaaggatcataatgacatgcagaacgatcatatggtttgcctgtaagattgaaacctaagtacaaaggaaaaccaaggaacactataatagaaagctttagggctcttcctagtggattgtccaagtaatgtttgtagagccatgcgatttgagattcggggactggaacaaacaattgatcatgttcaagggagccgatgttggaatgatggcgacgatgactatacttacaagagaagtatgggaagagaagagcggagtggaggacaaagccaacggtgtcatccacccattggtggtcactgaaagcttggtgaccacaatcatgaccaaggacccaaataccagcaaaaatgctgccttggaagatccaataaagtggccaagctaagtattggagcgggtgtgggagaagatggaagtaagaggttgctatgtagtagaacaaaaagacgaaaaaaaggtcttgaaggacatgagagaaggaacgaagaagagaacggttgaagcaatggggtggaatggctttcttgagttggcttagtgtgaatggtggtgtggtgtgtggtgctcgctcaagtctactatttttgccaccggctcccatttttgtttcttcaaaaagattacaaagaaaaa

SEQ ID NO: 400930 - DNA, 583 bp, Cannabis indica
aaataaataaataaatgaaatattgagtttaaggcttgatctatcagaacacaacagaagagaatatttcatggaccaataaagataattgtcccttcattgtattattgaatattgagtaattaattaccccatgtatttatttttattaaactttaacagacagaatgggactgataaatgtcttataggagataaagtcattgtaacatttttacctttgtgagttttactaacatgggatagcctgaaaggttgggacaaaaatgaggcaaagttttaacttttatgaactataattgtcattataaggcactgcaaataatcttcaaggtccacatgaaagtaaaagttgaatagttttatgatcaagaaagtaaaagtttgaatatagttgatgaagggaattgtttaatgggttacatataattattgccttttaatttttgtcttatttggcaatttaatgtctaaatagaaattaattaataaactgttaagtttttaaaataatattgattaattaagcccttctaattaactttttaatggataattttttttttggctaattagaattttt

SEQ ID NO: 400931 - DNA, 647 bp, Cannabis indica
aagatgacaaatgggtttcagttaagccaatcccaaatgcccttgtgatcaacattggggacactatagaagtaagacatattatttctttacataatctctcctccttttctttgtttaaaaaattggtagtttttggtgtttttttttttttaactttgaagtgtacatacatatacaggttcttacgaacggaaggtacaagagtgtagaacacagagctgtgactcacaatgaaaaagataggctttcaatagtcactttttatgctcctacctatgaattagagattggacctttggctgaattggtggaagaaaataactcatgcaagtatagaagatacactcatggagagtatagtgaaaactatctgagaaacaagttaggtaagaaatcactggattttgcaaagatcaaaaccaacaattcaaactaaaccaaccccgtgttgtgaaaatgtaacaccctgttctttagggacgccatgtggtttaataaacaagtgccttgtgaagcgacatatttttaaatccaagtgtgattttaagtaaaccacttgagactagctcaagtggccataggtgagtgtgtgtgttggaggttctaggttcgagtccagataaaacatagttgtaatatataaa

SEQ ID NO: 400932 - DNA, 828 bp, Cannabis indica
ctcgcataaaactgagtacccatcggggtcccaacccatatgccaaagttgcacattttatacacttctaatgaagtattcctcttccatgtgagactcaatacactcacacagttcacttcttatacaaagattttgtcaaatttcactaaagttccaacaatcgcccacttgaaacttttttaacaatattttcttgagcagtagtctaagcaataagattgagcatagacaaaggtatctttcaaattgaatatttacgttgtgaatacaacttagaatatactagagtgactcgtaatcttaaactatatctcttacgatgtaccacgcacaacgtttctagggtgtagtcgaaaagcttgtgatttaatggccatgcacatctatcttagtgtagtgaatgctctaaaaatttacctaaatttcataggaagtggctccactcccacattcgcgtattgagtctataaagagtactcttgttgctcggtactccactccacatagagtgtagatctcattaattgtttctattatctcaaccttttattgcttcagaaatttatgcttcacatttcttataacaatagcatgatatcattcttatcacatcataacttattattaccatatttgaacctatttcttgggatctctagtctataggtcaagttaccattataagtatctcatcattctaagggcagcagtcccattccttttaaggttttaaggaatttctctctagctagtcctttcgctaatggatcaagtatgttttcatcagtgcgtactgttggaaagtattttaccaggatcttagat

SEQ ID NO: 400933 - DNA, 880 bp, Cannabis indica
gatacaaatatattttaaaactttgtagatcaaatgtatattcgttttttatttatatgaaaaatataatttaaaataaaattaaatatttttttatatatataatttttttttgactttgaatttgatattttttattttatttgtttcattttgttgttacttgtgtgaaaaattatattttgttaatagatattaaataattcaataataaaagttataggtggtattaattaacgatattttttaaaaactattttaatagtagtatgatagtattacgctaggcactacgagtatctattagtatttttcttaaatgaaatagtgtgaattaaattgaataggcaatattagcgatatttattattcaaatgaaataacgtgagccatggggtttgaggtgaggtgagagagaagcggtggtccaactgaaccgctggctcaggtcacactaagtcggttgacgaacgaccacggaccacccaacccactctccaactccattatctacgtcattccttcttccatttcctgacacgtgtctaccctttctttatttatttatttttttatgctatccagactcaatgattttttttgattggacagactcgaggatcttgtcttggcatatgtaaaaaaatcttctgtgttccgaatataccctttcgttttttttttattacaaaaagtatccaggtatgggctgcctccatttttattagggaaatttgattttctatacttagaaatacaaaattttttaccctaaaccaaaaatttaaaacctaaaaaactaattcctttttttctaaaccccaaaataaccccctccacaatattctctctctctgcatcatctctctctccctctatc

SEQ ID NO: 400934 - DNA, 891 bp, Cannabis indica
gaacatggaagtttagtgtcaatgacatgctggtaaaatctaagacttgcatgagccatcacaatgatttagaagaggcttttttcattatccaggagtatgaaatgaaactaaacccaaagaaaatgcatttttagagtctctttaggaaaattcttgggtatcatagttagttctagaggaattgaggtaaacccaaagaagatcaaagcccttctagacatgccttcacctagaaaacacaaggatgctcaaaagttaactggaagggttgaagcacttagcagatttgtttccaaatctacacataaatgcatacctttcttcaatgtactttgaggaaacagtaagtttgaatggacaactgagtgtgaagaagccttccaacaacttaaagaacatctaacaaaggctctaatattgtccaaaccaattgacaaagagtcgttgttcctataactagcagtgttagatcatgctataagtgtcgtcttagtgcgagaagaaggaaaggtacaacttcctatttattacatgagtaaaagattgttgggctcggagttcagatatcctatgattgaaaagctttccttttgcttactaattgttttacaggagttgagaccatactttcaagctcacgccatcagggtactgaccaatagagctaagccaatttaatatacaatatcaaccaagaatttcaatcaaaggtcaggcctcgacagactttattgtagaatgtgcggggataaatgacaaacgtaatatgccaatctcagagctagaagtctagaatatatatagagcaatacaaataagaaaggttgtatttatgggttctgttgggtttgtgaccctaaataaaccctttacaatctgattagttat

SEQ ID NO: 400935 - DNA, 672 bp, Cannabis indica
aaatgaaatacggtgatgacaatagtttttatatgatgaattttctatagatttatcaattgttttttagatctccaggattctttaattatctttgtttaatttattatagtgtttgaagatatctctttgttttctttttttttaaataaaaattgtataataattacccttattatgaaacgaaaaattacatcaaaaatttcaaaatttaaaatttgatatataattctaatataaaatatcaaattatatcaaacatctaatgtaaaattatatcaaattttaaattttaatatttttgatgtaatttttttaaatacattttggttttaatattggtaaaaaattatataaaaataataaattttgattcaatttttattattttgttatcattttataaaatatataatttgttttatatatatcatttaaaaaattttaaatatccgctgcgaagtacagcctatttacttttataaaacaaatattcaaataataatatgaatttagttaccaaaataaaaaaaaaaacaaaaccttaaataaaactaacactatctaattatttattctacctaatttactaagggaaatttcactatttgcccttaataatatacctcatatcaaaatttatacctttccttaatttgtacaaatttagtc

SEQ ID NO: 400936 - DNA, 516 bp, Cannabis indica
aaaacttagtaaataaggatgaattgaaaccaatgggtatgaaatcgcatgattgccatgccttaatgcaacatctgcttccgatcgccattagatcagtcttgccaaaaaatatttaagagtgtttgacacatgtttacattttctttaataagttttgcagggaggaattagcaatagataaattagatgcactacatgaacatgtagtcaaaatattgtgcaacctcaaaacagtgaacataagaaaagatttggtaagtaattaatataatgaatttctagcaatttgtatcaaaatatagtagtactcatttaatttttgtaaaacaatatagaaaaaggaccttgagattcaagatctcccacctagccaccgtgtttggatcaaatctcagaccaaaaaccaaaacttgtcactgattacgatcagaaaattgccaataagatagtgagtatatattaattgctgattaagtaataatgaattaatatatatataaatcatatactaat

SEQ ID NO: 400937 - DNA, 668 bp, Cannabis indica
tttgggttgctctaatagttgttccggtagttttcatgtgagttgagatttaagttactctgttagttgttatgtaaatttctataaaaattacaaaaaaaaacaaaaaaaaaaaaactaatataaagtgtaaaaataattaaaaaaaaaaacccttttaataataataaaaaaaaattagatttattaaatgaaaagaataaaaaaaaaaatggaccatgtattaacacaatagttctttttttttttcttggccaagtatatcacaaaattgtcatttatttgcattggatattatcaaactactttttctttttgaaagattatcaaactactttatctcaccttaacaagatgtatttgtcttatcttattatatttcatcttcttattatggtgtcaagatatgaatttaaaaaagaaaaaaagggtaaagaaaaaaaaggcttattagcaaaacagaaacattcctaaattagtaagtaataatattgtatacctacaaaaattattctttagtcgaatgtgttattttactaatatggggctcgtttggaacgccgtattagatgggaaatttacattatatactaacttttttatttttttacaaaaatactgccaggcggtatttttacttttttactgtgtttttttataagtttcat

SEQ ID NO: 400938 - DNA, 573 bp, Cannabis indica
catgaattgtataaataatttaagattaattaataatctttttttcaaactttaacatgtaaccatatttttgaatttttaaaatcgttaaaaatctcttttaaattgttgaatttaaagattttttgtccaattttagtaagaaaagtctaaaataaatgaaaattcaggagacataatttgatacatgtcaaagttcgagaaatatgatttgataaatatcaaagtttagaaagcataatttagtaatagctttttttagttttaaccaaaaaaagaacaatattacaaagatactttagttggccaaataaacaaatatatagcctaaataaaagaaattacataaataccacttacacacaccttcaacccaggatgcgtactatcgcgcaatcattgcgcaaccacgcaacaacccaacgcaatcaaaacaaaaattcaacctaaaaaagaactaccattaattccgatgacttcacttgagaagacgactagaatcaatcaaaacagggactatttcgaatttatgaaaaaaaaaaagtgtagaaaaactactatgaaactaaaatt

SEQ ID NO: 400939 - DNA, 630 bp, Cannabis indica
gcaccatcggcttccccaaggcctaaaaatctcgatcccatctctttcccttaatcagtcgtccttcgccgtcctttgccgccagctgccagtcacctgcgaagaagagggagagcagattaaagaagagtgaagattgaaaatttagattttagggttatatttatttatttagtttttttaatttaaaatatttatttagggttatatatatttttttatcatttaaatatttgtgaaaaaggattgaaataattaaaaattttggtaacaataagaatatgcaatgtgtacatagatgtacatggtggcaatcttagttggcgtcctaattggcacttaactgaaaaatttaactgttattttaagtttgcaaaaactaaactaaagggggtttcaccactaaaaaaaaaagaaaggggggttatgtgtatacaaactaaaacatagaagggtttatcctcaaatttctcaataaataataaataacttataacctgaaagtaacttaatcatttattttcttataaaactttaattaagattaattatattttaaaattaaattaatgataattattaactaattttttgtaatttattactttataaggatcttttagcaattta

SEQ ID NO: 400940 - DNA, 525 bp, Cannabis indica
tatataattcagagacttgcggtatacaaaaattaaactatgaattccgaaacttttaaaaagaaatagtagcgaagtttctcacttaagtctataaatgataaccaacaacagtcaactcaagtggtatgggaggtgtgtgtaacttagaggaaggagtttgattcctatttaaaaacatgtctacaaatgataaaataggcaaaaattatggagaacgcatacataaaaagatgaggttaattatttattagtattattttgaattctgtaatttacaaaaggttaactaggattttttttcttttcaaactttgagatgtaccaaattatggttaaaaattcgagaaaattacactctataccttttttatattgttctcttttatttttactctctttttaaaagtctatcatttttacctctttttttaaacattgtatcaattttacccctgtcacttcaagatactctccatgtgactatcttatgtcaaggtattttgggtacaatacatataaaaa

SEQ ID NO: 400941 - DNA, 554 bp, Cannabis indica
ctttccaaacccttttctctttccctctgttctgttgtagaagctctgtgtgtagaacaagaacagagctgaaatggaacaagaattgttatttcttttctcttttgtcttcttcgatagagttctgtgtcctgagttgaattgtgaatggagttggaaggagcagaagagtctttgggattcggttcacgccgctatctgataactatggtgatgaaagcgagtcacaactcacatgataacgacgaataatatgtttcttgcattaacacaaagacaaattcctatattgaaatttgaaagatagcttgactagtagtagattttgataaaataaataaatctttttataaaaatttatatggcattaaataaaaaattgtgtgtacagaattttgtattgtattaattgtattatttaacatataaaaaataattaattattaatttgtattacaaataatggtaaggccggggttaagatgtaacctaagttgagaaattgatatggtatactaacttttgttattttttttataaaaatattgtcaggc

SEQ ID NO: 400942 - DNA, 645 bp, Cannabis indica
ttttttttttaagaaaaaagagatcaatttcaaaaagatattgaggcataaatatgaaaagaaccagttccataacaaaataaataaacacaattaataacacacaataactcaaatataatataaagaaactggttatatttatcaactagttaaaaatttaagaaaaaataaataaataaatataattgaaatataacttgttctgtaacataataaataaaaataaataacataaaataactcaaaccaaatataattaaaatagaaccggttcaataacaatattataatgaataaaaaccaataacacgaaataacttaaaattcgtcataagttcataactaaaataaaaccggttatataacataatgaatgcaaacaagtaacacacaataattcaaaccgattacaattaaaaaataaaggggaaatcagttcctaaaacactgaaacataaattaaaaacaaaactagttctacaataaaaaaacctcataacacataatacctcataaaaccgattataatttttttgaaaaaaaatggagatcaatttcaaaaaatattgaggcataaatatgaagagaaccagttccataacaaaataaataaatacaaataataacacaaaataactcaaa

SEQ ID NO: 400943 - DNA, 901 bp, Cannabis indica
atacctcgcgtaccaccaacaaagctaaggatgatgacctcgacttacccatttgatcggggcactctccacagggcaaggaggagcaaagtatgcagtggtagctgccgacttctttacaaagtggacagaggctgaacctctggtttccataacctgcaagaaagttctcaaatttgtcattaaaaacataatttgtaggtttggaatactactacaaaatttgattttcccaatagtttataactgtcttttatactatttgccacggctcctcaagccgttggttatgtgggtgtcataaaaatgcagaactttataagagagtttataactgttggaaaaagttattttaaatgacggtttgcaactattggaaaaaatctttttaagtgactgtttataactgttgacaaaaatattatgtaaattaaaaaaaataaatttaaattaatttattatataaacattattatctgattagaataataatataaataaatttcagcaaaaataagtacataaattaaaattaatgaaataaaaataaaacataaattcaaatgattatgtttacaatatctttttagtatatacaactttttcattgacaaacaacaaattctttattcccaaataacaaattcttaattcacaaacaaatccaactcaagtaattacaagaaataaattataccaaaaaaattacactcaaacttatatttacagacgttttgagtctcaagattcgaagcccagaatgctaggaacagtggctggctgaaatgctcactggagctcctccactgttggtggcagttcttggtcaaggtggatgcagaaggatcgagccacagatccttaaagcccttaaggacgagaacccgaaatgggttttttt

SEQ ID NO: 400944 - DNA, 608 bp, Cannabis indica
ggtttaattgttataaaaaagttatattatttaaaacaaaaaattataatcaattttaataaatttatttaattttgtaagaatttaactgttataacaaaatatttgtggaggcatttcttattattgtgatgtataattatcaattaaaagattttttatttattttttcaattttttttttttcagcaggggctacagccccataagcttgcaagtgagtccgtctctgataatatgatagaaatctataagtttcagtaaaagaagtgaaaataggaaaatgaattttagaaaaatgtaagtaaatgactatttttaactctatagatagttaatgtcattttttttaaataataaagcaaatgactttttttactttttaatacctaaaatacccttcattatataaaaggtattatatgttttattcatttaataaaaattatgaaaaacaatacatcaaaatttctctactgaatttttgtcaactattttttcattatataaaaggcattatatattttattcttttagattttgtgcggttgttgtcgtccaatatgttatttaaccatataattaattttttattaatatatcgtatg

SEQ ID NO: 400945 - DNA, 862 bp, Cannabis indica
tttttttttaaaaaatactaaataatacccaatattccttaaataacaatttatgacattagtataattattttgaattaagttatttattgaaaaaaaaaatcatacttgcatacattattactagtctattctcttgttgtgaatgtattaaactgtactgtgctgccattaattaattaagttgctaaagtcaaaatcagtaaaatattttaaacatattctgagaatcgggttttgattgctgagtgcatcatactgtatttgacattgggggaaagttgtggttggtcttaatgataaattaaaagggtcccagctgaagtgaaattgtatattaattactcattattatgatgattgtgatgaagaagaaactatgcagcagaatggctatggtctcctatcctattattggacccaagaaaatgatgaaaccacgttaaggagtttactatttgtacacacacatttatatatattatttaccaactgatgttgatcatttgaaaagttcttatttcaacaactaattggaattgacttactttctcagccctcaggtgtcaaccattagtggcatcctttgttggggcaaagaaagtcttagttttgatatctttccattttcagttctttaatgtttccatttattcaaatgttttttgtttttaaaacttgaaaaccattttattttatgtatcaatatccaaatttgacatgactatacatattttttcttttcgattttcgcacatatatatgcatgaataagaaagactaaaaaaaagacatgaagaactggataatgaacaatacccagaaactttactcagtgaggtttaattgttataaaaaagtt

SEQ ID NO: 400946 - DNA, 812 bp, Cannabis indica
ccagtggtcgcgaccctggtcgcaacctggacgatacagaaacaactcaaaaattcttagttccagtggtcacgactaggtattgtgctagtcgcaaccatttttcccggtcgcgaccctcgtcgcgaccacctcaatttttagaagcccctgaatttcaaattcgagctagtcgtgaccagccttagggctagtcgcgaccagctcaagattttctataaatacccacttttcccccattcaaccctacaccaatttcaaatcttctattcatctctcaatcgaccctaaccacttcccattcaaaaatttcaatttttcttccccaaatcatcaaatcttctcatcttttaaccaatttctcaatccacaccatcaaaaatcccaatttcatcatcaatcaccactttctcatcaaaaaccatacccaaaaatatcaatattatcccaaatccgaaaataccattgttcttcatcttcaacctcaagctttaaaggatattcaacaatggaggtggagtaaaagtttttttgggtttgtaagtaacagttcctatcatatttaggaatttcattaattatttatacatttttgtggtaatagtgaatgttgtgggaaaattgttgttgatatttggttgtgaaaatcaaattgtggtattgagttgttggtgatattatttgcatagtttttaggtgattgcgaatttttgggaagtagaaaattaaggggaggtgctgcccaatttttcttagaattattttaagaaaaaaaatataaaaacagaaaaaaaaaaaagaattatttctaa

SEQ ID NO: 400947 - DNA, 656 bp, Cannabis indica
aactatttaattatatttttttataattttttattagctaaattttattatatttggcaatttttctaaattttttttttaaaaatgggacatttactaacgtagttttcaaattttagggcattttgcatctgagacccttttaaaaaaaatatatatagtgaaaatgtaaaaataattataaaaaataacttaacaaatcttatttataataatattttgccacgtcattaaaaaatatcttaattctaaattaatatatttgaaatgaaactaatctctaaattttttagttttttttaatttttcctacatttaaaagtaacattttggttaattatgaagttgataaaaatcaataagtaaattttttagaaaatgtatcacttttatattatataatttaaaatatattttggttacctcaaaaatttatatgtatacacgttaataatcaattaattattaggttatattagcatatttgagtaacttttaagtttattttaaaaaattataagctatcatgcagtaagttaatattttagtaaactgtattttaaaatatatagggctcgtttggtacgttgtattaggtcgtattgtattgtattatattaaattggattatatatcatattttcatataatattat

SEQ ID NO: 400948 - DNA, 579 bp, Cannabis indica
aaaaaaagataatactttttatgtgattaatttttataattaggatttcattcttaatttattttaatattaaattcataatgcccaattattatttaaaaattattgaaaacctctataaattattattctatttatttaattttcttaatttttattatattttaataatttatacttattagttaatttaagtttaaatctttcactatattatttttcacgttcatatttgaattttaatttcgttagatattttcttatttgtattctatttttcttcattattattattattattattatttattaaccttaatatttcttttgtaacttttcgttagttttaaatttcaatgccgctagatattttctaagtttttattgatattttttttaatttattagtattaattaagtttatttttagttttaaattgttattataaaaacgaataaaagctgagagagataaaaataagtatctatttatatatctatatctatatatctatctaaaatatttgtttagtttattagtattttttttttctctcaagtttgtcactaatttagttt

SEQ ID NO: 400949 - DNA, 1061 bp, Cannabis indica
gatataatcgcactcctccccgttaatgcatttgagtaacggcttgctaaagcttctgtgataaagtcttccatcataaatgacatatcgagcagctcgatatcacaattttcttacttctattttgtcttcgggcaagacccccttttccaagtaattcactatcggagtcacccatgtaactcctttggcaatgtcgatctccatcacttcatcttgactcatagttggggtgagttagcacatcgacaggaatcacatcgagcagttcagcttctcttgatgaggccatgcgggccaaagcgtctgcttgtgagttatgagcacgcggtactcgggagacaatcacttttttgaacttctgcaacactcgcatgctatggcgaggtatttagccaaacgcccgcctcttgccagatattctctgtttatctgacatacgacgatttgggagtcactaaaagcttgtaagtactcaatcttcagctctagggcgagctttaatcctgcgatcaaagcttcattgttagatgcagaaaattcaaatcgtaaagcagcgtgtaccttaaaattgctggaactgatgagtattatgccgccgtcggagccttcgctattagaggctccatcgacgtataaagtccatccttcgccatttggtatatcagtatcaattttttcttctacgagtcctacttcagtactcgagaactcgagaatgaaatctaccaaggcctgcaccttaatcgtagatcttggtttgtacttaatatcgaactggctaagttctactgaccatttcaacaaccttcccgatgcttttggttttactaaaactttcctcaaagggtagttcgttaaaacttcagcgctatgggcctagaaataaagttgcaattttcttgacgctattaccagggaaaatgcaagtttttccatttgagggtaacgagtctcagcgtctaggaaacgtttcctgacatagtacactgggtattgccgaccttggtcttcgcggattagtaccgagctaatcgcatattcagataccgctaggtaaa

SEQ ID NO: 400950 - DNA, 1271 bp, Cannabis indica
tataaaaagataatataatatattaacgaagccgacataccatgaagtgacagtccaaggttcttgaaagcatctcctttgggctcctaagattgagaaaatcccaatctaggggaaggagagtttgaagtttgcgccaacaggcgaccccatatgcctgggcaaattcagacccagcttcctcagctgcgaccaaaaggatctcgatggcctgactcgaagaagctgcagcgggagtcgcctcgggatgaggaacattggcatcgagaacaactggaggaggaacttgatcttggatctcgttgttcgaaacctcgagattgataggctcgaccggtgatttcttcttatgagtagtgattttcctttgcctcttgggagaaatcacttcggcagcagcagggactcagggttggatgtccttttcttccccttgcggtccaaaatgtcttcataacctatgtctgcaaaacaagacgaggcgttacaatcattataaaaaaaccgattaaaaaagggaggagtataattttctgcctaagggatttaccaaaatcactagaaggcgagctatcactagatgaaggggtagaaggaccataatatttgctaaaatccttatagcctgtaattttgaatatatcaaaaggcttgattggttctaaatcccaactcgcatctatctgacctgtcctatctttcatagtaccgtattgctcggctataacataaaatgactcatgacagttaatctggacgtggaatctagggtaccaactttcaaacttatgagcaatgcggtccacgagaatggaattccaagtataaaaattaagacgggaatcttggaaggtaactaatgtattacgcttagccctaagtacagtaggtgaccaaccacattgattacctcgggatgctccttcaccagattctcgaggggcaatgctttgaaggtattgtgcttgggccaagcgatcccaggcctagtcttcgggtggaacaattatttgctgccaagaagtatacttgggaatcttgtaatcacaagtgtattctttgtcagcgagaaggcctgtcgatcgcaagtttacttcattcaaaaggaatttgcatgatcgaagacttgtaagggagagtcatcaggcgcctgtgcctactaaccatgtcgggggtaggtgtagggtctcgtcagaagagctgtcaaaacaaacaaaactttagtcaagtacttgaaaaaggagactgatgtaaataagtaagaagagaac

SEQ ID NO: 400951 - DNA, 525 bp, Cannabis indica
caaattatttggtaaaaactcgtgaatagaaattaaaacatagagtcgtttacaacaacagagtaaactggtggagggatacactccaaccatgagcatgcttcatccacctctaatgcaaatttaccaaaaccatgagcagccatattgactatacgtttgacatgagatattttaacattagggaaaaaggaaagaagacaagatacatcaacaataaaatcactaaaggatgaaatagctgctgaaggagaacataaggaattgacaaccatcaaggcatcagattcaatgtaagtaaggccaatctgttgctgagatgcccaaattagactgtggaagagtgccttggcttccatctcatgagacttaaaattacttaaaacatacatttctttatggttacaagacattataccaatattattcaaattattaaaaagggctgacccataggctttgcaatacaagcacatgcccagggcccaaaaaggtaagagggcccaatttatttgtttgtttctt

SEQ ID NO: 400952 - DNA, 1143 bp, Cannabis indica
atatacatgataattaaattctaacctttggtattagcctctactaaaaatatatacctccactaaaaatatagaggataaattttcttatttttattaatttaaaaattactggcttgcgccatgtgccattagataaatgtgttctggtccaacccacttaaaacgtatagtttttttttttttttttttaaaaaaaaaaaaaaagctgtaataattatttaaaaaaataaaaaaattaaactttatattaacaattttaataaaaggacatttatagtccagtgaagagactagtgaacagtcccttgtttcgtaattaatcttcatgtctcttcttactccacattatgacattaaactacactaaatttattcctttaggggcatttggtacgggaattaagttcaaaataatttattgattaattagattgttaaagtgaaaaatagctgtgtttggttgtgtaaaaaaaatattttgttaaattaatgttaattaattatattattaggttgattataggaatctcataaaatcattgtaaaaaagtagttataaaattattaatatgcaaatccattgtattaagatttaaggaaatgtttaagtctacctttttgaaaagttttaagattactctattatggggtacgtaatctagacttaaaaatgtttaaccttgtaccaaacataagaatgtgaaagattgctactatgaaactattacaccataccataccatttctaaaaaataaatgtatcgaaaccttcattttatatttaagttatcgataattttaattttaattttatttatatatatgataatatatattatagttagtgaataatattataattttttagaaaaattaaaataatttaaaagtacagaaattataatttgaatattctttacgagtgtataaaactaaataaataaacatgcaacaaactgttcaaattttattttaaacacattagagtatattaaattttttaaaattttttacaaaatattttaaatatctactcattttagggaatgctaaaagacatcaatggtgctaagcaccctcctacgtgtcaatattgttatttgtgtaatttagtatgaggtcccatatagtttaatataa

SEQ ID NO: 400953 - DNA, 490 bp, Cannabis indica
gtgttgcttggttgtttggggtaatcctgtcataaaatccatggctatatcttcccacttccattctaggatttccaagtgttgcaacatccctgctggtctctaatgttcagccttaacttgttgacatgtgagacatctagctacgaattcagctacatccttcttcatccctggccacaaatataaggttttttaagttattggtacatttttggttgacccttggatgcattaagtaaggtgtaatgtatgcttctcatgatctttcttataagctctacgtcgttggctacacacactctttcccttatacctcagcatgtcgtctgtaccttcagagaaattctctatctccttcacttataagcctactcttttctctgtaagactcatcaaaaatttgtgcatctttaagttcttgtagcagcgttgagacaatggtaagttagctaatcttgtgtaacgatctctatccacttctttggag

SEQ ID NO: 400954 - DNA, 1646 bp, Cannabis indica
aaccttccctcatgcatttagtcttatatatagtaatccatcctcattggaataggggttgacagaattactttagagagatctaagagtaaccactcagagatttcattgtgagagcttcaagagaggaaacactgtattctttgttcttcagttaatacaattcaaggggagtaggctattaccgaactaaaggggtcgaacctctttaaaatcttgtgttctttactgtttatttgttcttaccttatcttaattacattttttatcgcttattaattgactcattgtcattggctaaaagcaaggtcaacattaggtgatcaaaaatcgtatttttgttataacttttcactcggtgtttgttttggatgttctatataccgtttcaaagcttgcaacgagcgctaccatatggtatatattttagagccaaaatataagttttattttagtgtttctactatggggtttggtaggaaaccctaggttatcctttgtaactattaagcaatatattaaacttgtgacatagggtcgagatcatcggaagtatttctccacttggattggtcgacatgcatgaatctagattataggtaagaaaagtataatgtaccacatggcatgacaggttttgtaatcattgacttgcctgattaggcaatgtgatatataagtaaacctgattaggtaatatggtgccaagttatggcatatgcttagctagcctgatatggcaatgcggtatacgaatgttagattatgacatgagcttacttgattaggcaatacaatatacgtatatatatgatgaatgtcaggccatggcataatcttgcttgagtaggtaatgtgatatatgaatattgacatttaggttgtacgtggggcaaccgttataaagtcacgactatgaatcaaaatcgctgtttgcaaggtcctaaaattatcgattgtttgattagacaatgataatgtgatgatctatgaacataatgtacaagttcacctgattaggtgatgcaatattcttggcaacatactgggtataggtacgggagtaagtgacatatgagtaccaaacataggtacgggatcctctgattaggagatgcgatatattggtgccaggttgtagcatgggcctacctaattaggtggtgcagtcatattatatataatattacattatgacacgggcttgcctgattaagctaattattttatgataatgaaatgtatgattacttattgaatttatcctttctaatcacttttcttgctgagtttatgttactcacgggtgctctgtggtacaggcaaggacaaggaaaagttagagcacgatgagatgacagtcttctccaacaatgtaaatattgacctcatcagcctgtgtgccgggacgccatgagttgttttgggctggctgtatttgatgtgtattttgattttgtgtttttcattattattgtacatagtacttttgtaaactttttataataatagggatccccaggataccttttttaccaccgttatgtatgtccgttttagtgttttattttagtcaagttttaatattatcacgatttttaactaattaattaatctattagtattaaactagtttataaaatcac

SEQ ID NO: 400955 - DNA, 713 bp, Cannabis indica
gagttagtgtagatataaggattataaataaacccctatcatctaacatataggtcactttttagatattctttcttgattatctcccaatgttccttgttttattccatctttgatggctcccactcagcagtaggtatctggtttaatgcatacacgagtgtgcgtataacctcttactattggtacttagggacatcttattgtgccattttatcttaatttggaaacagtaagttccttctagactaagtcatcaacatagtattctagtattatccttaatgtaaaatacttgcttgagattaagtaatcactagagataccataaaatatttcataaggattaggaattgtgcttgagtctttcgaatagacattgcaaaattttctttcttatcctcataattctgataagttattactatccatatgaatggttagattaatttttctttgttcaattttaaagtttcttttgttgaacatatcatagcaggttgtcactagtatcatccatataataatgtgatggaaaatcctcccactaagataaggtattgtgattccatgtccaggggcttcagtggtatcaatttactattgtaacatatatattagaacagatacatgatcaagaataatttctactagtttgctagttcatttattatattatatctatgtctaattaaaatatgtgtgccatagag

SEQ ID NO: 400956 - DNA, 550 bp, Cannabis indica
attttcatattaaaaataaataattcaccaaattaccattataaaaatattatttacatttattacatagttacataggaccattttatatgtaaaaaaaattatgataattaaacttaataatatttacaatcagtttttgtttttttttacaccattgactatctcagtgtttggtaatactattattttttaattttttaatcacaaaaatacaagtaaaatttgtgttttttaaaaaataaaattgtgttctataaccaacttttgtttttttaattttaaaaatagaaaataaaagtgtgttcgataatttttatttttttgattttatttaagtcgggtccaagtccgaatctggggccggatcgtggtccatcggagactggagtcgaggctgaagttcgggtcccaaggtttatgttggagtcaaagtccaatatatttattaaaaaaaattaaaaaaattgaaagtgatttttttcttcaaattttttaaaattttgattctctattaaaaaattaaaaaataaaaacagttttatagaac

SEQ ID NO: 400957 - DNA, 528 bp, Cannabis indica
ttatttagaaaaaatattaagataaatttataatatctttttcgctgtgaatatcgatcaagtttggtatatagccaatacatctgatgctagtttacttttctaatgtcctaaaaaaagacattccacttatctaaggggactttggtataagggattcaaaataatctgcttaaggagaatattatgaaggagaatatgattatctgtaaacttattactgtgtttggttattcatggtaatattaattagattactgttaattaaattatagtatttagttgagcacaagaatcttatatactattttggaatagtaaaataaaataataattattaaatatctttcaacataattataaataaaataaaattattatttgtaaaaacaaatatatttattaataaataaacttaattcaatgtatttgtccaactgatgagccagcaactaaagttgtagcgacaaaagagcgatgcaatgttgaattttaacaaaaaagctgtgataattttgtattgtttga

SEQ ID NO: 400958 - DNA, 603 bp, Cannabis indica
tgggcggtttattcgagttgagcagtttgtaaaatttattgaacacccctacaatttaatattggacttctccttcattggaaatacgattaagagtagaattagaaaaatgagccaaccaattagacatctgattcccaaattgtttgacgaaagaaactaaaataaaatcaggcgaaaaagattcgacatcacagttaattttaagaacacctatatttagtttccaccaccgctcagaatacacaatagtagtaatagttgcagtaggttcattcaaacccttagcatgagcactcaactattgtgcaagatatataactgctgttgggattttatgctttaaataaaacccatttcaatctaatctgatttgttatcaatgaaagattagaagtcattgatgtttacatttagttttcatgtttatggtttaatatatacaaatatggtacgtccagaacatatagtcattcacaattacagtgatgtcaacacagtggaatgtaaattgttattatatgcttcaaaagacaaagtccctgattcatcagtgcactggatttacactaatgcgataatcagcgatgaagtatacttaca

SEQ ID NO: 400959 - DNA, 581 bp, Cannabis indica
aaactagtgaaatagtgaaattttacgtgcgattacgtagtatatgaattatatattatattaaattaaatttactattaaatattttagtaattttaaaagaacatcttaaaatttaaataagttaataattttcttttattttgaaaatatgatatatgtatttatattttatggacaataaacataattcttatttaaatataatttattatttatttatttatttatttatttttttgcataagttaaaaatttatattattcctctacagaagattattataattatattatgctaagttttgacataatatcttatatagtgtacttgattggttattttaaaaaagaatattggcggctaaactactctaagagcatctccaaggagtacactaaatttggtgtcacactatcaccaaatttagtgtcaaaacttatttctactccaaccataacaccaaaaattacactaaaaaaatattccatattattatattaattttttaataatagtaaaaaaaatttaataatatattaatttaataaaatcagtacaattgttaaaagataataat

SEQ ID NO: 400960 - DNA, 1368 bp, Cannabis indica
cattatgcaatccgaatctggaggtggcaatgtccaaatatacccacaaatcttgatttattatttggtctctccaaaaccttgattttgtatgtttgttggcatgatacttgtgttcggagttgtggtatgtttttttgttgtatgatggagtatttgttggtttttatagttactaaatcagatttagaaagcaaacatgagtttatataaaaatatattttagataaatctaatctgaatcataattctaagatctcaatacaattacataaaataaatctaaacaacaagtaaataaattttacctcttgatgtctatcaaggtattctagattctttttcgtattaaatatcgatcatttaatccaaaagttaggaacttgatgaagacttcccactaggggaaatccttaacactcaagatgagagtgggcttatatgattattttgagagacgaaaattctatcaaagtgtgtaatcaactcatgagacactgtgaaatgagatgagaaaaatcacaccaatctcttaatatgggcttcaagatttcttgagttgtgcttgttgttgaaggaactttacaacaccaaaagtaaattataataatagtagtaaatattgaataagtgcgagtattcaacccagaacggcgagtactcaaatcaggaacacaaatacttagtaaaagactggaaaaataatgaacaagagagaaatatagtggttcagtcagatcacgatatgcttagtccactgttgcaaagattctgtctctctttatttcacggcagatcactcctttatatacaaagcaagtgtcttatcatttacacaaagattgcattcattgtcaatctgtttatacattgatttacaataattaagctaaaaacgtaaacataataaatgaagaacagtttccaatttcattcactaaatacagcaacatacgcgacttttatattgcgagttggctattcatattcttgcataagctcgcaggcttaagatgcattcacgctagttggactagttgagtccaggatgtctgcgtccttgtaaagtcgcttttacggacatcatataatgagctgatagaaccaagacatgtgagtccatattagtttatcgaggttttttgggtcatcaggaccacctcgcaacatagataatcgacctctatatttttcgcaggaggatcgcgaggatactcgcatttatcttgatatatgcgggctaaagtcgttccttggtcctacataatgcgagtcatatgaatgcgattagacttggtcatattcgcatcatctcgctgagtctggttcaggcgaggttcatactcgaggagtctctcattgacatct

SEQ ID NO: 400961 - DNA, 708 bp, Cannabis indica
attatcaaagatcttttggattgagagaccctaggcaacgaccccactgtcccatcctaaagacgacttgtttatatgaagacggttgataattaaaaaatgagacgaaattgagagttgagaaacgtgaagctttaaaatgatagtcaataaaattatttttttaacccaaaagcatattaaaaaacgaagtatgtatttattaaaaaaaagagtatacattaacacgtatttacttatgattttattttaaaaaacaactaaaataaaacacatatattatcataaacacttttttttaaagaacaatcataaattattttaaagtcattattattttttaaattataaaagtggttataccattttattaaattataaattgaatgatataatatatatttttaaatagtataaaataatatttaaagttttatttttgataatttttttgtaatataactaatcaagtcttgtgataacatttttaaataaaattattattaaattttattttaacaaaaatagttgaggatattattttataagataaatataattttggatattgtattttgcataaattataaattggaccctctattttgttaaatgataaaatggactctgtattttttaaaatggtacaaataagacgctgaactcaattttcgataatttttttttaatataatcaacttgaaaata

SEQ ID NO: 400962 - DNA, 915 bp, Cannabis indica
tatgttccacgatatagataccactacaagaaaaaaaagcttattggcatgacaaaaatcgtgcctacaagctcactttttcctgccaatgtgccttcaggcacgtcgtgtcgtgcctaaaaagagtcttttggcactacattaaaatatcggcccaatagtaatttttaaataaaaaataataatatattataaattaagagaaatatataataattaaatttacaaaaaaaaaaactgtataaacatttatatataatataatatattagttacataaatctgaaccttgatataatattttttttatataaatcaatgaattgtattgctcaaaaccaatttgaatacacactaagagcaacccaactggtcctcaatctatacaaatcttttgcactatactgctatattcatctaattacaaagcaaagaaccactctctatctatacttgagattttctttggcaaaacaacattaatccgagtccttagactccactcaatgtcacaaacaacctgcctttgattgatctgtcctccctgccagatgagatgatttcgttccttccagctgctgtaaacaagtgcagcaactgctgcagcaaaaacctgtttcttgaattttgacacctttgccttctcaatccatcaaaccaactgctgtatgtttgttgcttttgctttccaccccagccagtttttaacctcaactaaccaatggctagttgtcttgcactcaaagaacaagtgctgaacattctccttgtactcgtcacataggcagcaggtttcttgaacatgaatgcccattttcaccagcctatcttttgttttttaatctgctaagcatagtaagccagaaaataacactatgttttggtgtattcgatcgagcccatacctctttactc

SEQ ID NO: 400963 - DNA, 502 bp, Cannabis indica
gctctctaggaatttcagtagagtgtctgtaaatgaaaactaataatagtagaatcaccggtgcagagtcaaaaggggatttcgatccaagaccattcataaaacaataaatccaattaagttcttaataattagaagatttcgagtataattggaaaacatttagtacaagtaaaatacgaagagattgcctcagaagtatcagaagtctcaaaggaatgttaagttaataatatgtccgaataataagaccttttttttgtcgcccttcatttgattaacataaagtataaaaatatagactcaagatagatcattatctactgcatacccctatttctttttcatttttcctatttatttgatctaaatcttaccagtgccaattttcgctataaaacaatggaagacgccctattacgttcttgacgttatcaaaaagtaaaaatttcttttttttttttacttacttaactcaatttaatttataaataaattaagt

SEQ ID NO: 400964 - DNA, 510 bp, Cannabis indica
atgagattgcattatctttatggtccttttgaaattgggttttttgtattttctttttactatttttttttttgaaatataacataaaattaaagtaaattaaatatttctaataaaaataaatttaccattaaaattatgaaatatttaatttatattaattttatatacataattaaaggcttaaaatgtataaatttgagccttaatcacctatataaggagtgaatttcagttgatttggtcaagcaattcggagaaaaataaacagtataatacagagcacgaattttagagattaattacaatactagaggcattcttcagagggttttcaacattcttttcttctccattttcttctttttctcaagttaatatgtgtaattttgctttcatgaatatgagtagctaaacacttgattagggtttaaataaatattgtttgatattgttttatggttttaatatgatttatttccccccggtttctatgtattctattttatt

SEQ ID NO: 400965 - DNA, 704 bp, Cannabis indica
atagatagtagggatcaatattgagtaacatacaataagtgtacatcttagtgattaaaatatatttttgagtagtatatatgtccattaaggaaatatcatagctattaattttagaaagttttttattttacacttcaaaataattatatttttttttttacatttttacggaaattcacatatagactcatatagcaaccaatgaagcaatttaaaatcgtaaccaaaaattcatatagaagcccacatagaaactaccgaagcaacccaaaccgtaaaatttgaaagaaaaaaaagctaaaaaatagtatatggaataattctccatatactatttttacacttcaatatatatttttttgtatttttatggaaatcgacatagaaacacacataacaactaacagagcaatctaaatcgtaaccaaaatctttatagcaacctatataaaaaccactacagcaaccactggagcaacccaaactgtaaatttaattaaaaaaataaatgatatatggtagtaattctcctaatttttatagatattttagaaaatatggatcatgtaattaataaatagaaaataaaatgtgagtaataatttaaaatagggttgggcatctaatccaatcatttttcttttaatctgattcaatctaattaataattaaattttaaaaaattatcatctgatctaatt

SEQ ID NO: 400966 - DNA, 931 bp, Cannabis indica
attggactttcagttttattaaataacaaaataactcctgtattttttaaaattgtacaaataagactctgaactaattttttatcaaaataaaacttaacaataatctgatgtagaaatgttatgacaaaattagttacattttctgtatctattcgtattagacattgtcttaaagttagttataataaaaaaaaaaattattaaaaattgagctaggatactattttttatcattttggaaaatataaggttccattttatcattagattcaattagtagcttttacaaaacacaaggtccaaaatggtatttaccctttacttgaataagaattttttttgctgagaatacttgaaatccctttatattttaatgtttatacatttaatctgtttattttttttttttgggctaaaacctccttatattttaattaaattaaaatattgagaattaagaaaaaaaactcatatatataatgtcattgtgacctcttctataccttcctttatatatatactagggaatgggtccgtgctttgcgcggttttaatatttctttttaattttatattaaagtaaattataattttatttaattatgaatggaaattaaaatctattatattttaattttatattaaaatttaaaattttcattgcattaaattatttataataattaaaagtttcattttataattattaaaaattatacttgattttacaaaaataatacatttgaagttttaaacatcatttaataagtttaatatttttattctaaaaaataatataaattaataagataaataattttatgaaaataattctcaagcaaccaagtggaccatttttgttcaactctttgatattaaattaaaagtttattgcaataccctataattaagaaatggattaacaaaa

SEQ ID NO: 400967 - DNA, 951 bp, Cannabis indica
gggaccccgattggggtccaatgcatgtgctataaatgggagtccgacgggtccgatcgggaccccaattgggtctgacatgtctgatgggggtccgatatgggtatgaagaaagagagaagaagagaggggataggggataatgtaaatgggcgtattttaaggatattgtaaaatgtgtcacattccacaaatattacatattatgtgtttaggagaaaaatattaggtatttgtaagcataaaaagtcaaatttcccttttaattttatacgtgtttgaaataatttgtttgaatttatattgtaaattattctcaatttttttattttttaccgaatatcttaaagggtaaatagtggcataagtaccaaatgtttataaaactgtaattttcttccagtttcatcagtacagactctgttattgtcttaaacaagacacatataagacccagaatttagattatttggtaggggtgagcaaaaaatccaaaaaaccgaccaaatcgaatacaccgaccgtccgaacaccgaaaaaaccgacaccgaaaaaacacgaaatcgaaaaaatcgccttcgattttagtgtcaatggcaaaccgaccgattaaaccgaaattattcattgctttattaaactagttttacttatatcttttttatttaaagtctcaattattcattgctttattttattatagtttgatgcatttacatattatatatacatattcataaaataatacaagttttgtaatataactcattaccatattagtagcataaataatttgaacaaatttaaaaagtttattttacattatttatttaactaagaaagttttattcttaaattatatgatatttgatacaatactctattttttttttaaataattataaaaattttaaaacttatttaaaaaaatgaagttcggtttggtcggtt

SEQ ID NO: 400968 - DNA, 758 bp, Cannabis indica
caatccatatctcaaaacaattacatctaaagcccaagaactatcaacataaattctttaaagcctctaaactactataactaaacatactattacaataataacagggtgtttactagtggattgggtttgaaatattcagctacatccaatttattgatctgtatcaaattcaaatatatatatataaataaataattaaaataaaattattaatatatataacttacatcggagagataggctcgtcgatggttgtccgaaagaaagatgaacagagggagagagaagggtggttggagggatgagggacaagaggcgattttgggatttttggcaagaggggtgccactgattgaagctcggagagagagagagagagagaggagcgtcgtctatcgaagctcgaagagagggggacgtcgttgatcgaagcttggagagagagagggctggagaacagccagaggtgcggctgggtttgtatgactgggaaagaagaataagaaggattgagcaatatcatgggagaagagagaccacagaccaccgtcgaatcgtctgaagaggaggtggttagggtgagttctcatcgtcgtctgaagaggagatgcgactgaagagaatcgcaaggattttgcgtttagggagagggctgaagtggagatgcggctgaagagaatcatctgaagaaaggggcttgagaattttgccttttttaattttagggatttcactttttttttgtgtcggttatt

SEQ ID NO: 400969 - DNA, 365 bp, Cannabis indica
taactgtaaaataataaaataaaacaattaaaacaacattaaaataattaaaaaataactgtattaatataacacaatatacaatatttttcaaaaaaatccgctttacaataaaaaaatgtaaaacaaattaatttaacacagtatatgaaaaatccgcctacaatacaaaaaaaaaaagtaaaaaaaattgaaaaattcatataaaaaccctattttgtaggagtaatactagagatgctagaaaattcttagatatttttttttatatatttatgggttaaaaaagaaattgtacttgtacaactaattatctaatatataatataataaaagtcaaataattatatttttaatctcaatat

SEQ ID NO: 400970 - DNA, 707 bp, Cannabis indica
agtgcacaaagtcagcaacaacatcaacctactttggttcatccgcagactcaacaatttgtggagatcttacctacgcaacaatctagacaatcttattaccctaccccgctggctcctcaatctcgtgataatcacgaaggttcaagacttagctcgaatgtagatgattttatagaatttactaatctcaacaatgataattaggttttttaactaagtaaatttttatattttaaagtttattttaagacaattttataactttatttaagataataatatatattgttatggatattaatattaatgtttgatttcttaaaccctaatcaatattaatgtttggtttcttaaatttaaattctaattaataatatatttctataataattattatatataatatatgatattatagttattatatataattataattattaaaaattgaaaataaaaaatttatataaaaatattaataccggcggaactcaccgctattaatctgcaggtattaatattattaccggtggatatctattttggtagctaatattaatattagcgactaataattactgtggataattattggcggattccgccaataatactcaataccagcagaatccttaattagtatcggaggacgtctccactcttaattgtagtgattatttgtgtgtattataaatatattattt

SEQ ID NO: 400971 - DNA, 431 bp, Cannabis indica
gagcatgttgctcaaatgggattgttaggaccctatcttgttgagcttagtatgagttttattaatatgtatcaggcatgctagtatcttctatggaatgctaatgacttgtgttttgaacatacataatgatgttgtagtcacttctagttattgttgtcatatgtatccaattatgtgttgtttactgaagtaacgagcacaaaaggagatgaatacccatagtctcaattttgttgtacctcatgcatgtttggtttgattgttaatgattgttattggattaaatgtcttcaaggtcaattcatacataatatatgtatcctatcaatatgatattatgtacgttttaattggttaccttatgtgtggtagacaatgttatggcagttggttatattgtccaagtaggagaatgttagaattattat

SEQ ID NO: 400972 - DNA, 566 bp, Cannabis indica
tggtccatatcaaagttagaaaaacaaaagcagaatttgataaaaatattttttatctaacatgaaccataagcccaaggatctcaacataatatatatagattaaatctatactaataaaataattaaaccaaattgattatgggtctttatatgtcacccctacacgtgtaaattgggccatatatttgggccatattatgatgtctaaaattaatttttcaattttatcataaataagatttatatttattatgtcaataaataataattgattaattcttattaatctcttatttcataaggattaaaataaatattattttctctaaaataatatatttctctctttaatattatttaatcataaaaataatatatttaactaattaatatagttttatccaatataactaaatagttaaatactattaattatacaattcataattttcataattaatcaaaataataatttcataaattactattttgcccttaaaaatttatttcccataaaaattaattctcactcaaaattcattcatcaaataaaatcttcccct

SEQ ID NO: 400973 - DNA, 664 bp, Cannabis indica
gaacaaagagaagaagaagaagatggtggtaaataataatggcagtagactaaggagctatataattttttttacgttcattttagttttttatgttaatgtaggtgatggaatatttgagttctactttttttaaggagtgggtattacacccttttaggatagttagaataccaccgtataaatattaatgggtttaaaaattttaaaacttcataacaaaccgggtaatatttaagattacattttccctcctaatattaaggaataattacatagaaaatataaattgaaattttatttacaaaaatacctctataaggtaaagtcaacatttataccttttatgtaattttaattaccaaaataccacttacactatcatcacttacacaaccagacgatggttgcagagtggttgcacggtggttgcatcagacgaagggtttcaatcagacgatggttgcatggtggttgctaggtggttggccgaaggttgcacagacgaaggtttcatttagacgaaagtttctgggtggttgctgggtggttggccgaaggttggatcaaacgaaggtttcaatcagatgaaataactgttagcaaaatgtttatgtaactgtaatacaactgttgtgaaacattaaaaatcagaacagtattt

SEQ ID NO: 400974 - DNA, 849 bp, Cannabis indica
agtacgacctaacatccgactaccagtacctccactaccctatcaataatgttgatttggtagatacaagtgaggtattttatgctttttggaccacttgtaacttagggttaatatagttcaactataaatagaacttctttccattggaaaataagggttggaaaatcataccttttaactcatactcttaaattcaccattgtaacttatattttctcaagaacttccatagttaatcatcctcaacattcatttttacattgatttttcgacctaatttgattgaggagttcttattgtcaacaatatatttatacatgatgcaaaagtcaacaaaaagaggtatatacctattaaaatacagttagatcatctctaaagcttcgactaatatggagaaccactgcttataaggtaaatgttgaagatattttagatcatttgatatatgtgtgtttttatacttttttcgattctttagctatatttcaacttattctatattttagttcgcctattgtgagtgctcttagattcgagattacggtgaaagtaaattttactagtagagccaatccaactacatacatacataataagaaaatttgtgacataaatatctattttatttgttttgctgataataaatactcaaatcctagtagaaagcatgctcaaattagtgattatcgttattcttgttgatacccacttaacaactccattagttgctaaaagagtgccacgtgttgatctctaatttgtctaaatcataattattattaaaacttatttaaattaactttaaaataaaaaacccagttataataatttttaaaaaaaaaa

SEQ ID NO: 400975 - DNA, 583 bp, Cannabis indica
atatatttatataaagaaaaacaacaattaaataaggtggcatcctgtattttcttttttgtattacacatttttttattagagttttagtgagtttgtattttttttttttaattttaaatatattgaagaatatgtttcttacaattttttattttttttgggtaaaagtctcacattatttacaaatgatgtaaggtttataagtaaagtatttcttcatgcaccatttgtgcaaaaattagtatttttctttaattttgtataggtgactgaataattcaattttgatccatttttgtttatttttgaataatttgccccattattattagttatatatatttttatatttaagaaaattgattaaatctttataaatatcaaaaagttagtttatattttattttttctatatatttaattatttttttcaaaatacttataattttttaattttataattacttttaatatacatatataattgaaaaaaaaattaaaagtattaaatttaatatttcattcataattaagaaattattttttaaaaaaaattattaaaaccgcgcgaagcgcggat

SEQ ID NO: 400976 - DNA, 534 bp, Cannabis indica
ttctacaatgcatcctcttaaaaaggatacaacgatacattttaatctattttggtatttgaaataattttttaatcaatttttctctcatggtcatgtatgttatagttatttaaaacatcttgaaaattttgaaaaattttaaaaaaattaacgcagcgaaaatagggttcaaagagtgtgctgcacgcgtgactattttattttatacgtgtgtgaaatatactgtttgaatattgctttctatattataaattagtccaaatttcttaaaattttataggatatcttaaataactaatatgtatgttgattatattctataatctaacaccctaaatataaatttgctaaaataataaattaaatacatataaagttatagaaaatcttacactggtggcagcggaataatatggctcattccacgtagatctctaacacttgttcctttttatcgcggagtaatcacaagatctaagcttggatctctttcaggtgttagaattcttcacaatcttccacactatgatt

SEQ ID NO: 400977 - DNA, 523 bp, Cannabis indica
tatatgaattatgctatttttactatttttgttcggcgacgacagaaaatgcgacggatggccatttgaatcacatgggtaagtttaaaacatttttctttgtggatttaatattggagataaatagaataccgagtttgagcggcgttatgatttttgaccattttacccctatgcttaagttagcttaagttttcgcttaaatggcattttattcatttttaaaggggcgattaggtagctgtatgtgtgaatggtagctttccatttagttgttttcagccaaaagattaattttaatcaattaagttattcatttgagaaataaggaaaatcaagagaatttccatttttctttccctctctctttgctcgacctccaccaagccaagaagaattggaaaattcattccactttcctagaaattcagcttagattcaaggagtaattggtgtaggtaagccctagaactcttaatcttgttttgttgaagctttgtttttttggttgaatatgcaaatt

SEQ ID NO: 400978 - DNA, 1091 bp, Cannabis indica
atgaccaatccaacatatctattttcatgaagccgcagtgttgatagaatggaaagggtttattcaaagaaatactacgaaattcctcatgcacaccaagacagctaacaccaagatatctcagtgaacttagctgtcgaaatgataacagcgccaagcaacagtttttacactctagatcaacttttttcaagttacaataggatggatctgttacccaatctggcaaatttgtgcctttgtacccgcgtattctgagtttcttcaaatttacatgtggttggagtgcattaagtacttctctttccttcattgagttatctgccgtaccattccaatcaagactgagatcatcaagatactttttgttcttcaattcgccttccaaagcatcactcacttcattaacatagctaaggcctgaaatatgtaagctgccacgcagattctccaacttgcccaactctttgatcctcgatccatcacttttacacagaacaaaatcacttaacctctgaagatttgtcatattgcaaatatttggtggcatctcttttaaattagtccatctagttacaagatgacgcaagttgattaatttggaaaagtttgtgggcaattgttcgaccaaacaacttgccaataagagtgtttccaaattgtacaactcacaaattgaaagaggtaattccttaatttttgtgtgagagacatccaaatacctgagttgttttaaattgccgattgaatcaggtaagtttgtgatacgtgattgtgacaaagaaagagttcttaggcatcctccatcctttagcaccatttcaagctttaattgggtctcgtgtgattgttgtatacgtcgcaatggtaaagccaacaggtacgcaaattcaaattctattgtatctttcaagtctttcatgtatgatagatggcaaatcttgctacggttattagcttgcgagagtcgtaacaactatcataaataaaacagcattgacttgatacatagatagctaaatcatgcaaaagatcatgcatagaaatagcccatcttgttattctttgaaaaaacgatcttgatattaaag

SEQ ID NO: 400979 - DNA, 606 bp, Cannabis indica
atgcataatcaaatatatcatgactacgactacgactactacgataacctaattctactacgactacgactacaacttttccatggtattacgataacctaattctactacgactacaacttttttagttattaatattaaagggtcttgtcttttgacatgtatggtatgtgagttaagaaagtgagttttgagttattctggtgattgatgagtcgtgcgttttttttggtggttggagttatggcttctagcagtaggacgatggaggatttgggtgataggtgggcaaatctgactgtggatgatgaagaagaggtgggattcatgttcgaccaggtggaagggttggcagatgaatttgatgctcggtggtgtttggtgggctgacaactgtctaataaatcgacatattttgattcactccgaaatgtaatggcgtcactgtggcgtcccggtaagggcatgtatgtaaaggaattagagaccaataagtatttgtttcagttttttcatgaagttgatatcagcagggctcttgagggcacaccatggacattcaacaagatacctttgatcattaaaaggcttaaggaaggtgataat

SEQ ID NO: 400980 - DNA, 883 bp, Cannabis indica
gttgcttgatctgtggattgttgctgtattttgctagttttctgttaaaatgtttgatgcgtgtgaaaactgaattttgctagttttctacagtttttttcgtcgggcccgatggggtccgatgctggcccgatggggcccgatgttgggaaaaatttgttggcaggggtgaaggtccgatggtccatcaagtgggtccaatggtcggacccccatcggacccgattggctttttttaatttttttaatttttggaacctggatccgatggtcccccagatgggtccgatggtcggaccaatcggaccccatcggacccgattgctctttggatttttttttattttttttttaattttttaaaagagggtccgatgctcctccatagggtccgatggtcggaccaatcggacccgatggcaattttttaattttttaatttttttgaattaattaattattattatttattatttattattgtatgattaatttattttgtattgatttattaatatttgtgttattaattattcttttattaataattataagttattaattattattttagttaatgttttaagaattattttatttttttaagttattattaatcattaattattaattattattttattattaatttttgtcttattatgaattattaattattgttttaattttaatttttttattaataattgttttattattaattttttattattattttattatttatgattttaataataattattaattattattttattatcaattaataattatttttttattattaattattgttttattatgaattattaattattttttatttttttttattaataattattttattattaattat

SEQ ID NO: 400981 - DNA, 492 bp, Cannabis indica
agaagttataattcagcttatttatttctttaacattttttttgatgacttaacctgttttgcaacttgtgatattggatttagcatttcctaatgcttttagcatacatcttggtaggagtttcaagtttgagaagtttattattatgcaaaagccatttcataaaaagcaatgtgtagattatgattgtggtatatatgtgatacaacttatgagagctgcttacacaaatggtgaaatatgtgtacacgtatgtttctgaattatttctatttatttatttatttattttgtttgtttttaaagccaacattattattattatttttaattgatgaaaatatgttcttattacaggtacaccagacaatggaaagagttgttgtttctttggctattatattgtcgtctttgaataaaatgcgactagctttaaagtaaatgttgtgttggtgtatgttctgtggagagatatgtgttgggttttatgc

SEQ ID NO: 400982 - DNA, 515 bp, Cannabis indica
gatgcacagttggattcattggaacattgtaaggtttttctcccagttttcttgtctcaattaacaaatcaagtacatactttctttgagacaaaaaaaaataccttgtttactctgagtaacttcaacacccaaaaaatacttgagcacccctaaatccttcgtatgaaactgggtatgaataaaagatttaaaggatgagatgcatttagtatcatttccagtaataacgatgtcaccaacatagaccactaacaaaatgataccagtagttaatcttttatagaacacaaaatgatctgacttacttttcaacaaaccaaatttctcaatagcctaacgaaatttaccaaacaaagctcaaatactttgtttcaatccatataaagatttgtaaaatgtgaaacttgccctaactccccatgagcaacaaacccaagagattgctccatatacacttcttcttcaagatctccatgaaaaaagcatttttaatatcaagctgatgcaaaggc

SEQ ID NO: 400983 - DNA, 977 bp, Cannabis indica
gtgttcttcagtactaatacgtccgttgctatgaggcaggccatttgtggaaggttgggcattcatgaagcggctgatcatagcaaatatttggggctgccaatcatagtggggaggaataaaaatgtggtgttcggtaatttgatggacaaagttcagaaaagaattcattcgtgggataataagtttttgtctcgcgcaggaaaagaagttcttattaagtcagttgttcaagcgcttccaacctacacaatgaatgtgttccttataccggttggactttgtcaagatattgagcgtaccattagtaattttggtggagatcaaacaacaataaaggagttcactggttgaggtgggaaaagctcacagatcacaaggataggggtggaatgggtttccgtgatttaagggattttaatttggctctccttgctaagcaagggtggcgtctactgacatgtgaggatagcttgatggggaaagttttcaaggcaaggtatttctctactggctcttttcttatagcttcattgggaagtaatccaagctatatttggagaagcgtttatgaggccaaggagctggttcgggctggggtgcgccgacttgtcggtgatggatctaacattggtattctgtcggagccctggctacctgatgagctacattcgtacattgaatcaagccacccagctctattagggaatattgtgaatgcattgatgaaggatggcatggttgagtgggatgaagaagttatcaaagatgttttgagtaacagggatcaaaagttggtctggaaagtgccgctaagtaatcattcaagaagtgattcctggtattggctgcaagaggaacctgggctctttacagttaagagtgcgtattctttgctacaggccgctaaaacaagcagcaatgtctgaatatcgagatctggcgccagttgtggcagttgaaacttcccccaaggt

SEQ ID NO: 400984 - DNA, 609 bp, Cannabis indica
agattagttttcttttggtcaaacggtgatcagtaattaggtataaaattgaaactggttgagttttggcggttcagaattttgaggcacatcattgaacatttaatgctctgactgttcccattttacgattttcccactcgttagattaattttcttttgatcaaacggtgatcagtaattacgtataaaattgaaactggcaagcccatttcgccattcttcttatatgagtagttgataatctactacgtctttcacaagcagtttacaatctgcttaagttattcgcaagcagtttattgtctgccatatttgaagcaaacttcaaatattttgaataattcttttaagaactactttaaatattttattgattatatgaatagttaatcttctattcatattttagtttttgtattattttttaagatatatttgtatctcgtttacaatacatactataactatgtgaaccgtgatatattcaaataacatatagctttttatcgctttatgagaaagagcctcacttgcaactgctaatttaattttctcttaaaaaaaaagttttttaattcttgactttatactgtccaaagacaattt

SEQ ID NO: 400985 - DNA, 666 bp, Cannabis indica
aaaaaatatataaatatgcctaaaatggaaaataccatactttccaaaactaaaaacataacagactccacaaaaccagccacgatacgatctctctctctccctattctctgcgattttgtctccgatcatcaggttcggaatcgcacaatcaccagccacgatcagtcgactgcaaaccgaactcaattgatcactgcaattcgatctgcaaaaccgtactcaaacgcagcagtcgactccgatcgtcttctccaaaaccagcaacgattgccgcctccgatcgtcttctccagctgcggacagatcttcaacacattctactcatctcaaacgcaatcaacatgcacagaaagtcgatctcaaaaccaaatattttcatcgactgaagacagagcttcagcaacgatcatcgacctccaatcgtcttctacagctccgatcatcttcaggtaatttcttaaattgattctgatcctcttcttaaccttcataacctaaaaaatcaatgttaattaaaattgaaaacgaaacactgaaaaacaaaacaaattatacaaagacattacatgtatatatggattaatggtataaaaacaatacacgacattttaatgaacaaatataaaaaataaataaccgattaaaacaatgtacaaaatcaag

SEQ ID NO: 400986 - DNA, 540 bp, Cannabis indica
atgtgggttactatacgatttttggtttcttttatctataagtatttagaaatttttgtaaacacattataactaaattaatatttgaacttatttgatattcatactaaccgttatatattctgtataaattattagtgcaaggacctatgtacaactcgacgatggtactgagttgctagatgctgtgatgttcgaagatgttgcagaaaacatattctcatgtactgcagttcaattaaagtcatattcgaacgaggtaaatataaaaaaataaatatataaaatttatacattttcataaatagaagtatattaaatcttatttttaattatttttacagaaacataggttgtttgtccaaaaaactacggagaaattatcgacccaaaaatggagaattcagttgtatgtagatccaacacgaacgatgagttcaaagtacaatcaatacaccattcaagcagctgaaccaatggaagaataggaagaagtttcactatactctttttagtttttcaaataatattccatatatt

SEQ ID NO: 400987 - DNA, 803 bp, Cannabis indica
catacactctgtatctcaaccgtactagtgttggtagtatataactcatacaatctaacatgtatagtatatgcacatatgtatatctttatactaacacaaagacatattataaaatataaaatattaataaaaagatatattaagtgagttcctattggggcggggagtgtcatccccgtccccacttcgtaggacaaaaaataatcctcgtcctcgccccattttccatttagatggggaatccttgccctattaggggcaggtccccgcgaggctatctcgaagttatgcatccttacttctatgaacctagtatttaaaaaatgattattgtgacctttatgagcctttattggctaaagttcgtcttgctgtttggaactagtataacaatatacaatttaatactcatccaaactaaataaaatactaattagtttggttggatgttggttgaattagattttttaacaacctattcaacatccgatccgattcaattgaatatttaaaaataacatctaagctgaataattcacaattggatattcaatgtttgacggtcagttataattagaacaattttcatttgatttgatcaatttatgcacactcgtgtatgtgcgttattgttttctaaaacagtaggtcgtggtcacaatttaaatagatataattagttaggggtattcatcaaactgctcaaactgctcaaaccgcccgctccgtaaaaatgcagtttgaaattctttgcggtgcggtcgcgatttaaatttttcctaaaccgcgcggtgcggtgc

SEQ ID NO: 400988 - DNA, 707 bp, Cannabis indica
ttttattattgttcaatttattttaaaattatttggattcttaactttgctgctcttgttaatggattaattaagtttggttatttatatacatatataaattttaagcttttggatgaaagttaagaatacttaattttggattaattttgttcaagtttggcattctaaattactaaagtttgtgtctttcattctaaatgagttgattgaaacatgatgtcgccaaagcaacctctcttgtgtagattgctcatgaggaatgttagatgtttgtgtgtgtgtttctcatgtaagtattgatcggcccaaaggaaggttatacttattttgagggcacacatacttgtggtgataaatatgtgacaattataaggtttccatgtgaacaatatgtacagtccaaagattgacaaattgtttgacaggatttattgtcaatatttgattgctacaacaagagtaccgcttacagttaatattattgtccaaagacttgatattaatggtgtgtttggtatcttgagatgggatttgccattatttgaacttattttgttatgttgattcttttgtgaacccttggttattttgttcttttttttgctcatgttttagttatatctaccaacataaagttaattctcatgccaatgagataaatttttaactaaagaaaagagacaaacatgcttctttagctacct

SEQ ID NO: 400989 - DNA, 591 bp, Cannabis indica
ttttacgaatacttgatggggagagccattcccagccaagtagcatcttcgagatgcggaagaaccatatttgtccccaactccaagaagtcttggaacacagtttggctgcctgatttccatataaggacttctacggactggtcacaaatcttaactactacaccaaggcaaatggccacgttagcttcatattgaaattgacctacaaatatggttatacctttttataaaacaggatcaaatcttgtcccccatgccagtcatggtagtgtgtgtacgtaccttaagacatgccttttgcccaccaaatcgtctagagagtaatttgtaaaggagaaacctttgaacaatacgtgtccctaatccatacggtactagttactacccctatacaccacacgatgaagaaagttctccaaggtcagacagtcatatctacaattgtatttgttgggttttgtgccctaaataaaactcattacaatctgattagttatcaatttaagagatttgaagtgatttatgttaacatgtttttttcatgcttatggtttaatatatatagatttaatatatgcacaaaattag

SEQ ID NO: 400990 - DNA, 752 bp, Cannabis indica
cttatattatatatgtatggccatatggatcactccccctcaattattttgtaacattgggaagagatccaaattacataagggtttattaagctaatagggccaataaaataccataaataaacttaagatttatagaaattagatattggagtcgtcgtcagagttaaacgttgtaatcttacacaaaaaaaccaattacgtttattaactagttaaaagtgtgacaaaaaaaactaattttataaatgaatcaaaatagaaactaacacacaaaaacaaatttctcaaaatgaaaaaaatcaaaaactaaaacttaaaacctaacttactaaaaaaaattaaaatcaacagttaaacacaaaaaccaagtatctaataaaacaaactcagtaaattaaaatacaaaaaccaatcaattataaaataataaatcacaaaaaccaattacaataaacaatcaattaaaaatctctctcagagaaaccaatttcataataactggttcctgaaacacaaaaatcagttactaaaaaataactaaaacataaacaaattgagaaataatgcaaataaaatatataaaaaaaattactatcctatactcataagatatggagaaactcgttactgaaaaaaggaaatagaatattataggaatattctacaatgcacccccttaaaatggatatattgatgcacccttatctattttagcacccgaaataattttttagtcaaattttttctca

SEQ ID NO: 400991 - DNA, 548 bp, Cannabis indica
gagccatcattaacttgatgcctatgtcagtcttcagaagattacatcttggtgaggcaaaacctactacagtaactttacaattggctgatcgatcgctagctcatcctaggggagtcattgaggatgtgttagtcaaggttgacaagttcatcttcccagctgattttattgttctagacatggaagaagataacaacgtcccaatcattcttgggagaccattcttggcaactgggcaagctttgattgatgttcagaagggtgaatgagtacaaggagaagaagtggttttcaatgtgttaaaggcgatgactttcgcaaaggcaagtgataactagtaatttgtttgatctgactgataccattgtgaatgagaaaaatttgatagatgatcctctagaattgagcttaattgaagatgacttgctaagtaagaagggaaggaggtaatggagtatgtcaaatggcttgattcctatgggtcactgaacaggaagtattatgaagagttgggggtagtatcaaaagagcttgtaccatctaca

SEQ ID NO: 400992 - DNA, 536 bp, Cannabis indica
aaagaaacagaacttaacagaaggagtataattatatagctgttatattttaaggataatttttaacaaatcgtatattttaggggacaagatcaaatagtatcgaaagttcaaaggacaaaagtgctaattattctaataaaaatattccaaaaaaattcaaactatgtttaaaaaagtctaaaaaaattgttcaaaaaaatattaaaaaagaattctaactctaactgtataattaaaaaatattataatttaataattaaaaaatattattctaacaatataacaaaaacaaaagtctcaagagtgaaagcgttggccaaattaatgttagattagatctatatttaaaaataaaagatcaacatactcatatttgatgatgtatgattaacaaattattaagtgatcaggactagtagtgaacacatcaagtcataagtttaagtttttattttaaatgatgtacgatgataatgttagaaaattaataatatacccaagatctatttgtatataacatagaacacaatagt

SEQ ID NO: 400993 - DNA, 1103 bp, Cannabis indica
ccgagtgtcctaaatgcaagaaaaaccatccgggtgagtgttaggccaatgcatgtttccagtgtggtgtggtgggccactttatcagagattctcctcaggctaagaaagaaaagcctaagaagaatactacacagcacccggggcgactttttaccatgactcaggctgacgctgtccgtcagttgtgacaggtcagttgtctattaatggctgtccttatactgtgttgtttgattcgggagcttctcactcttatgtgtcgagtagagttattgagagttttcataagccatgtgatatctatgcttcagggtttggaaccctgttaccctcgggagaccttgttgtatccactagatggattcggtctttgtccttctggattgacggttgtaaattgaccgccaatctaattgaattgcaattgtctaatttttacataatcttgggaatggatattctgtctaagtatggggcaacgatcgactgtaaatggaagacggtggtgtttgagcccgatagtgctaacccagcggtgttcgtgggtaagtttcagggggcacgcataccaagaataacattgttgaaagttaaggacctaataagcagaggttgtctgggattcatagtcactgctatggataccagccaacctgtgacattagggcctgagaatacaagattggtatgcgatttccttgatgtctttccaaaagacttaccgggattgccacctaccctattgattgaatttgcaattgagttggttccgggagtggattttgtatcaaaagcaccgtatcgaatggctccagcagaattgaaagaattgaagatacaattgtaagagttactgaatatgggattcattagaccgagctactcaccttggggagctccagtattatttgtgaagaagaaggacgggtctctgcggatgtgtattgattaccgagagttgaacaagcttactatcaagaacaaaaatcctttacctcgaattgatgatctgtttgatcaactaaaggggaagacggtcttttctaagagcgatcttcgctcaggctatcatcaggtgagaattcgagaggaagatatcc

SEQ ID NO: 400994 - DNA, 1072 bp, Cannabis indica
tgtatcaatcattttaacctcttccgtcccggtgacactaggttttttaagaaatttaatggggattagatttgctttatcatttatgttgcttctcgcaagtcgagctaatgcatcaacagttgtgttttcttctcttggaatttgcttgagagcatagcttttgaattgtgcgagcagatcatgtattatgctcagatatgctatcatcttctctccccgagcctcgtactctcaacatacatgatttaccaccaactgtgagtcactacagatctcaaatgtgtttggcctttatttcccgagcaagccttaggccgacgataagagcttcatactaagcttcattattggatgccttaaattttaatttgaccgcaacgtgcacgtgttgcccccaggtgtgataagggcgactcttgtgccgaacaactgatctgtagatgacccgtccacatgtagcttccaagccggctcgtcttcactattgctcggctgaggtacttgtactggctctgggttactttctgacgtgctctcttctttacccatacattcaacaacaactccatgttgttcggggctgaaagataatttcatgctggcccaactccactgcccatttgagaaaccgtccagaggtgtccagtttttgcaatacttggcgtaatggttggtcagtgtatacccgaacaggatgagcataaaagtatggccttagctttctcgttgctaggattatgcaataggtgagcttttctatcaacgggtatcggccttcagcttcaatgagtcttttgctgatgaaacagaccgggtgttggatattgttctcttctctgatcagtacgacacttacaacaggttccatgacaaccaggtatattccttgctcttctccggccagaggttttgagagtacaggaggttttacgagttgcatttttagctcttgaaaggctttttttgcattcctccatccattcaaattgcttatttcctcgcaggatgttgaagaatgggacacacttgtttgtttactttgaaaaaaatctactgagtgtggcaatcc

SEQ ID NO: 400995 - DNA, 894 bp, Cannabis indica
tacaatataatttcctcaaataatatacatgtgtagatatatgttacttataatttttttcattaaaaaattattaacatgaagttttatatgttgttatttatatttatatatttttaatgaagaattaattattttatgtataaactttaaaaatatatctataaaattgaatagtaaaatcattttttttttaaaattaaatatattaaatctaatgagaagttgtatgagaaaagatattttatattagtttaagcaaataataattttttttaaaaaaaaaaaacatcaaaattaataagacgcttttcaaaaaaaaaatttgattgacttaaaagttcttatataaaaacaaaacaaaaaaattgcttatcctaattttttttaatcttaaaaaatattttcccaattatttcttttttaaattttatcgatagctacaaattaaaaattagaatcatcaaaattatctttggaccctctctagttttgatggaaaaatacatgcatcctacctaaataattaaagaggtttttaaaatatctactatttttaaaaacctaaataataaaagtatttgggactgatattttatcacaaaaatataatagagcaatatatatatttgtacatatatattttcatgttttctttctctttttatatatatttataaatatatatatatttggttattgttacttgtgttaagaattttgtaaatagtacgtaagtgcacgtaatcaagtagtaagcttacataggtgaggtcgaaccacaaggaattgaactgagtaccactaaattaaatctatgtttctatttgacaaatcaatatttttcgagttcaataatcgaataaaaattcaagaagctgaaagagacaataa

SEQ ID NO: 400996 - DNA, 666 bp, Cannabis indica
cgatgtcacagactaaatatatatatattgtaatattttatttataataaatgataatattattggtaattaaatttatttattaattcaaaaatactattcaaattaatataatggaaggtaataattcaatcctacccttttttaagatatgaacattaccctcctgaagggtagttatattactaggagaataacattccaagcctaaaccctcaaaataaacaaggtaatgtttcacattaccattacgttactagcattaacctattccaaacagcccctaattctttggcttggcagttaatggaaactatattgtatacctattttactttatttgttttaatttttatttttattttcatgttctttaagatatactcacttttataaataatgttcctattagactccttaagttaatgtaaattatatgttagatctaagtagaaagtgaaagtatattgaaaaacttacttataaaagtgggatattttaataaaatataacatgagggtaattttaattaatagatacaaaaaataggtattccttaacttatccgataatactatccacactatatccgaccccaatctatagtttccttttatttgttacttggtttctaagtaatatatagtaagggttttcttttctttc

SEQ ID NO: 400997 - DNA, 1073 bp, Cannabis indica
atgtcatatagtgaatttcataattttgcatttccggtgcccggtaacatggaactcggtgtttggctcagtaaaatcacaacttagtatgttagtatattgggacggtttattagacattgggaatgtcgggagtggtcgggaatttagaatttcccaaaataccctttagtgccctttatgttatttagtgtggaggggcaaaatggtcattttgccccaatgatattttgtcctttagtggacttagagttagaaattaaatgttatgttatgttccttttggctgaaataatagttgattgtatgcttttaccctcattttattcaagttagaaaaattagaaaagaaaaacaaactctttttctctcaactctctctatctttcggccctcctttgagcagcaagaattttggtgattctttggttttcaagcaaattttgtgtgattctaagctcttggtaagctcttgaatcttgctctttagttttcttgagttttgatgaaaaagatgattgttgcatgttggtttttgatgttattgctgctgttagttgttgttgttgtttttgtgattaaaatgcttgaattgaatggattagataggttgtaatgcatgcttgttacccttgtttaagtttgtgaatttttggttcaaaagctatggttttcaaagtaaattgtttattttcgttgctgtggttgctgctattgttgagtagtgttttctggtgttaaattatgttgaaataggttgagttatgcttgatttagtggctgtttggaggtttagtcaagttttgagtttttgaactcaatcttgaacctccaatggtgaaatgagtttctgtgattgaagcttggttcttttgctttggatttgttcttaggggtatttagaacaggtctggaaagtttggtatgatttggggttgtttggattgagttatgaattttttaaatgattcctgcgaggaaccgcaattccggatgtgcaaccggaattccggatgggcttcaggaattcccagaaccgaaattccggttgcagaaccggtctgccggttggg

SEQ ID NO: 400998 - DNA, 1236 bp, Cannabis indica
ctccaccattacttcctttatgtgcttaaaacattaagcaacatcatattttatttgcattactcctctagggatactgaattctttactgcttataaagtgcatctgaataaacagaagacatgtctctaattctatcaaaaaatggaatagagataacacagtaagaactttcttcagttgaatgacttttcagtgcttttcgaaagaaacttagttatgtagcttaactgatggagcttaaattattatagatgggtttttacgtccttctagaataattcctccaccccagagtaaccaccatctcgaataggttatgaattggtgtagatataaggattctaatatacacccttatcttctaacatataggtcactttcagagattcttccttgattgtctcctaatgttccttgcttgattacatcttagatggctcccactcaacagtaggagtccggttaagttcgtacactagtgtacacttagcctcttactattggttctcagggactcttgttgtgacatactgtcttagtgcgaaactataagttccttctagactaagtcatcaacatagcattctagtattaacattaatgtaaagtacttgcttaagattaagtaatcattagagataccataaaatatttcatgaggactagggattttgcctaagtcattcgaataaattttgcaaaattcccctgtcttatcctcaaaattctaataagttatttctaaccatatgaatggttagatttactttctcagttatatttaaaattcctatcattatcataacatagtaagctatcactagtgtcatccaaataaagatgggcttagaattttaaaattctcccacccaaataaggtactgtgatactatgtccaagaacttcattggtatcaattttattacaacagtaacaagttaattggaacaaatataggatcaagaataagttctagtaatttgctaatttgtttattatattacatccatgtctaatcaaaatatgtgtgtcatagagattctgtggtgtatttagtataatctagagttcaaagaaattttttgaactgcatatatcaatagcttcttccacccctaagtgttatagagatcctatggagttatgaatataatctagagttcaatagatgtaaaagatcgttgaactacatatattactttttaacttcttccacccccatcagatcaaaag

SEQ ID NO: 400999 - DNA, 855 bp, Cannabis indica
ttttaaaaaaaataatttaaatagtaatcaacccaaaactcaaataaaacaaatcacctacccatgcaaaatggctaatatacctttttcccgaaaactaaactaaacataccctaggtgtaatttggtaatcttagctaatcccgtcaaatcaacgacctaacactctaaactagttcggtataattatcattccgatcatattattatcgtgacatatctgaccactctgccgagttctcacggttgctgggcccgaaaacattttattcttaaaatggcatccacgatatccacatattctaataaaatcttcgtaactaataaattacactttatttaatcatttactaaattctcactaattaacctaagtaagatcataatcttacttcattaccagaataattacatatttaataaaatatgtctaattaaataccataatattttccggaatattacatatgcccttcaaattttgacatgtacaaattcatgtctctttaactttcatccacgttaaattttccttactaaaattacacaaaagtccttcaatataacaaactcaaatgtttaagggagatttttaatggttttaaaagttcaaagagtatgatttggtacatatgaaagtttggaagagcaaaaatcttaattagcctaaaaataatatgaaaacaataaaaaaaccatataaaaataacaaacaaataaaaaaaaacaagaaaaaaaaaaacaaaattacaacacaaaaataacataaaaaattgttcgtattttttagaaataactaggtgattgttacgtgccaagccacgtagtgttagttttattcaatattttagtttt

SEQ ID NO: 401000 - DNA, 612 bp, Cannabis indica
aactactcacaaggtcagaacatctctttctaaaaataagagattaaacacttagcctctttctgtaattaccatctcgtgagaaataaaaacttgaagtagatataactcaattactatcacgacatggagagtgaactactataaattctgaatgtctctctaaattttttactaaaatttattatttatcttgccaatgtagcgagctggtgttgaccacttttcaacttcaatatattttttttgaaaaaatagaaaaaaacgtatgatatttctaaaagaataaaagtattataaaattaaaagtactacgactaaactaaaattataattaacaataaatttaaaatattataatattttttataattattatttaattaaaaataaataacataaaaatctgcatatatagcgttcggattgtatttttaattaaaaattaaaaatacaactaaaaacactatattaattgtacttaatattaatttgtatatatatagggacacgattttgtcccgtaatgtactttcacagaatgtattccgtgatgtacgaaagccgttagatgggggagttatgtgatctgagggctggagttgatctagg

SEQ ID NO: 401001 - DNA, 1699 bp, Cannabis indica
gcgtgcaaataccggaggtcatggatgtatggagtatggccgaccgagagcacccaaggacaaattccatggaagggcgagggatgcgaaggagctccaaaactttttgtttgaaatggagcaatactttagggtcgttcggaccgactctgaagaagcaaaagtagcaacagctaccatgtatttgtccggggaccccaagttgtggtggaggacgaagtatgaagacattcagagtggtaaatgcaccattgacacttgggaagactcaagaaagaatttaatgcccaatttctgccagaaaatgtcgcctacctggctcgacgccagctacgagagttaaagtaagttgggacagtatgagactatgtaaagaagttctccggattgatgctcgacatcaaggacatgaacaaagtcgatagacttttctacttccttgaaggactcaagtcgtgggctaaacaagattgcaaaggcagcgggtgttagatctcgccactgctcaagctgcagccgagcggctgactgattacacctctgagaattcgcagccaaagaagatgaatccccagaccagcaccaacaatgctgcgagtaagaagtcaggaaagtaatggccgagtaaaagtgggggaggggataagaggactcctgaatctagctcctcctctaaaagtgatgctgcaacggggaagaaaccccttcagtgttggctttgccaaggcccacatagggtggctgcttgcccccaccagtccaagttgagtgccataaaggcatccattgctcaagagaagcaaggatgtggggaagataatgaggatgaagactccgcgcacatgggtgttgttcgattgatggctgctattaagaagcatggcgtcagaggaaagaaagcccttgggaagggattgatgtttgtggaggccacgttaaatggtaagcaggccaagagcgtgttgattgacaccggcgcaacacacaacttaattttcaaaattgaagccaagagggtgggcctaaaactggagaaagatgcgggccgcatgaaagcgatcaattcgaaggccatggccaggattggagtggccagaaaagtgaatgtcaagattgatggatgggaagggcaacttgaccttgtagctgttcgcatggatgactttgatgtggtattgggaatggagtttctagctgataagggggccattccaattccaacaacagggaatctacttatcatgggtgagaatccttctatggttcccactaaagtgagacaacctctagaagtcaagctactataagccctgcaattgaagataggcatgaagaagaagaggccaacatttgtcattactctcactgtatacgatgaaaaagtggaggagtccactccacctataattgagaaggtgttagatgaattcaaagatgtgatgccgggtgcaaaggccccagctaaagcagcataccgaatgtctcccccgaaacttaaggagttgaagagtcagctaacgaagatgttggaggcagaattcatcaaaccatcaaaggcaccttttggtgcccccgtgttgttctagaaaaagaaggacgggaccttgagactgttcatagactactgtgccctcaacaaggtgactgtgcgcaacagataccccattcccttgatcgttgatctgtttgaccagctaag

SEQ ID NO: 401002 - DNA, 1062 bp, Cannabis indica
ttctttttagatacagcaataaacaatgaggtaatattataatcccaaaatctggaaaagcttgtataaatactagaaaaaataagaaatagattataataaaatttatgtaaggccgctgagaaaaaaatatttatttccaatcacaaattggtaaacttaacgacctcaaaatccctaaaacaaatgtcaaaatctaacatctataaacaaaatcaaagccctttcccccttattacagctaataaccctaataaatcctaaacaagtctaaatgatactatactctattgagttaatacaaataaaagtgcaacaccattcatacagattcaagtgaggaaagaaaaatcacttcttctacaaaactatacaaaattaataatatacccagataccgaaaaaccagtcaaagaagcatatattagatttagattatacgcaaaacccagaaacaaaacaataattataaacaaagataaaaggatacataaacgactagataatcaaaaccaaggggcgaaaggctttgggatttttggggttagcttacacgatggtggcgctcggcggagtggctctcggcagtggagaggcggcagtggtgcgtcgccggtggtggcagagctgcgtcgccgtaagagagagagagagttgtgagtgaaatcgatgataaagaacgagagagagtcttaccgtggtttggggcaaatgagagggtttggagcaaataagagggaaaacgtgatctgaaatgtagagggtttgtcgcgcgttttattataaagggctttccccgacggttttaaaccgtggagcaaagtatgggctacgggtgctaatactttgcccgacggttccaaaccgtggggaatagtatttgattatattttatttaattttttctctacatttattaactgtcgcttaatttatacgagtgtttaaaaccgtcgcctatagtgtactataggcgaccgttttaaacacttacaccatttttttagcgacggggtccaaaaaaagcgtttttgggactgtcgcgaattatgccttttgtag

SEQ ID NO: 401003 - DNA, 866 bp, Cannabis indica
tcgtaaatataaaaactaacaataagagccccatagaaaagccttgaacattccttttgatgctcacatacaaaatccattaatacatcaaataagaaataggagtttttacagcacatactgaaattttcaattttttttattttttactgtgaggtggaatttttttcaaaaatactgtgtactgtgtactgtgttaagttttcactgttgttcaacggttattttttagttgtgccactattgttttaattgttttatttttttacggttgttttataaaaaagacagtatttttgtaaaaaaaaattcgtgtgagagtaaacttgtaaacttttgcctaaaattaagtatttttgtaaaaccccgtaagaaatatgcatccgggtctgctattttcttaacaaaaagatggatactgaaaatacaaaatcaataacagaacaaatccaaataaagagcatgaaattcctaaattaaaatacaatcctactacaaattattgtcagatccaaacatccaaaaaaacgaaaaggtaaagtagtaactaatgaaatattaatgaccttgcttgtgatcggcccctttataaacagtgtgacattgagcacacttggtcctgaaaaattttctctcttgtcttggaattttcgggaggagcttcgtcgaaagacgccatttttttttctctctctgtgcaagaaagttagggagcttcgtctagggtttctaaattatacgaagagaatactcaccaccggcatgctttctaccacatcatccttccacttttctttttctgtaaaggaaaaacttaaaatatgggacatgaattttttttgggaaattatagtaaatggctctaa

SEQ ID NO: 401004 - DNA, 515 bp, Cannabis indica
aataaagtaactgaatatttttaagtttttttctagtctaatatttctcagtcttgtatatcactaaatttattaaatgtatatttagttgtttttcataagaaatgcaaacacatacatatacacataaatttgttttgtatcgaatgattcctctattgatgaatctaaaaaataaatctctgtgatttctattaataatttttggagtgaaaaatattgtttttaaatttataattatatagaaatttaaattgtgtagtgtttataagaaaaaatagtggagtgtacttattaaaaattaaattaataaactaaataaagatgtaatgatatctattttagtcattttataaaagggtaaatgtgtaattatatttttgggtgcttatacaattgagaaattttatttacactcctaaaatttctaaaggcaccttattttgataatttttatttatataaaatttatttttaattgtactaagtttatttaactttttttttccaattca

SEQ ID NO: 401005 - DNA, 534 bp, Cannabis indica
tttttttttttgtagtttttacagtacatttggaaagaaactattttttaaaaatactatgtaagatttataatgtagactttattaagtttttactgttattatacaattatttttagttattccactattattttgattgccatatattgttgttttacggttgttttataaaaagacagtactttaataaaaaaaatctgtgtaatagtaaaattataaatttttattcaaaatctagtatttttgtaaaaacttttgtttacgaattggtcctcaaactatatgtctttggcaacattaactattaacattttttcttattttatttaagtcaaaatattttgttttttactttaataaaattcttattgacgtatatctctgtgaaatgaagttgagagatcaatttgcttaaaaaattaaagttagagactaacttatcaaaccttgtaaactatcacgcaaatgagctttttttttaatgtgtatttgtaaaattaatgataaatttttggtattgaatatgatagt

SEQ ID NO: 401006 - DNA, 1545 bp, Cannabis indica
tctcatttcttgaaacacaaaataatatttcattatttaattatatgtataacatgtgttactatactaaacaagtaaaagactataattgaaactctttaacaacaaaaactactatgcgccagacaatcaactatttcctaaccacaaaaactgctatgcaccattctcaataatattaattacattgcaatataacttcctatgcggtacaattaagaccaaaaggaaaattactttatattgaactctcaagattcatcttccaaggcaagtttccatgactaaacaaagatatcaaaactgtcacatacattcttattgatgaagaaggctttcaattcaaatagacaatcattgattttctccctaaggatgttgtggtattgtcatcgtgtcagggtatcatttgttacaggaagtgcttccctactcaagacccaacaatctacatttgcaatccattaaataaggatatgaccaaacagagttaggattcacttggaaatgacaacattatatctttagcttttggtccatctaagaatcccatacacatttctacaacattcaaattagtgacagttgaggcatttgagagtagagaagaagaagaaaagtacttcacaatcgaaatatactcttcaagaacaaaagaatggtataaatcaagtgagatttgtcaatgcaacaacaacatacttttgttcttttgtatttctaaatctctcttgatttctaaccattcttttgttcttgtagagtatatttcaaatgtaatgcacttttcttattcttctccaatctcaaatgcctcaactgtcgctaaatggaattcagtagaaatgtgcatgagattttgagattgatcaaaagctaaagatataatgctgtcatttcaaagtgaatcccaacccagtttggtcattttcttgtttaatggattggaaatgtagattgttagatctttagtagggaatcaactcctggaacaaatgagacgttgacacgatgaaaatacaacaacatccttagggagaaaataaaaaattgtctgtttgaattgaaaaccttcttcatcaacagaaatgtaagtcacagttttgatatatttgttgagccatgagaacttgtcttggaagttgaattgtgagatagagagttttgtcctttgtaattgagattggataaaagaatgatcatatatcaagttgttccaagttttagatacacatttcaattgaaacaatgtctctgtaggtaataggtatagcacttcgagaattcatcattattaggggtgttcgcggcgcgggtggtgcggtttttgactattttttcaaaccaactcgcacatgcggtttttcaaatttcccaaaccgcacccgcactgcaaaattaaaaacccgcaaaaactgcacctaaaaaaatagtgcggtgcagtgcggtttttgtggtttatgtggtttggactatcactaaataattaaactatcgcaaatacaacaaactttgagcaaaacttgtcaaaataccataaggctt

SEQ ID NO: 401007 - DNA, 899 bp, Cannabis indica
agcttggttcatccatggcatgtgtttgattctgagtgtttttctggattttattgtttggaatatgttattggatgttgtattaggtatacttgaaagtttggtaaggtttggatatgttttgagctagatgtggactacttgggggaacatggtgcaaactggttaactggtttgccaggtcctgtaaaacctgttaactggttctgggacaggtttcccgagcaatccattttgtggatttgtgttagtttagagccttagttgggtgattccttgttacttagggtattgtagtttcatttgtctataacggaacctttagttggacgtttggatttcgcatattagggttttggcttgtcgtttacctgtttatgttgtgtgattaaggcatccatccagcacgaagttttccgttcaggtcggccaactcacatgaattcagaaacaaggtaagaatagcgtagaacatatgatatatatgtgtgtgaatgtatgtatgtgtgatatatattcatgcttgttgtgattcgtacactaccaacacttgtagtggtacaaagtgaattggtagagtgtacaatgtttaaagagtgcattatggtgttactaggacaagtacggaaatgtacaggatgtgtgtggcacaacacttagtggcactcaaggtacgaatcaaaccctaccaacactcgtacagtgtcggtacgtagtgtatgtggtacagtggctgtaacctagtagagaacgttcttactcatttgttaagccttgtaaataggtgtatgggcgcctagatacaagccaatattatattatttgtcatatgcttttcttactgaatttgtcgactcacagttgctatttccatgtgtaggtaaaggaaaggcgaaggc

SEQ ID NO: 401008 - DNA, 618 bp, Cannabis indica
tgtttctaagcagcattatgggataaattttttgttgggttttaattcatgttggggaagtccattcggagttagagtgtttaagaagtcttccattaccgattgctccgtattatctaccgtctcatccctactgtagtataggtggaattctcctgggaaccatccaattaacaacaaatttatttcatcgacaaagttgttctttggtgttagtattgcacggttcattatggtagacacatgttctggatattggtgaatgttgtggaaaacgttttctatcaagatatataaagaactaatgtcatcatcatatggtgcaagcatttcatttggaattttgatgttgtcattgattgtgtttggtggcatgccattgcccaccaataacacgtagtccgaaaacaatggatccagtctggctctcatattttgaatcagtcgaaatttagtcaatgtaggccacaggtatgaataaacaaaggtagaatttatctgctcctgtctcgttcctttttgtaccacaggtaacacctgtcgaaaatctcctccaaaaataattacctttccgccaaatggtaaggttgtatcgttaatctcttgtagcattttatc

SEQ ID NO: 401009 - DNA, 1303 bp, Cannabis indica
ccctaaaccctaaactcaaaactttaaaccttaaaacctaacccctaaactcaaaacctatattctaacactaaaccctaaaccctacactctaaactgtaaaccataaacactaaatcctagaccctaaccctaaacccaaaaccgtaaagcctaaagcctaaaccctaacccctaagcactaaaccctaaatgcaaaaccctaaactctaaactgtaaaccataaacactaaaccctagaccctaacccctaaacccaaagccctaaagcctaaagcctaaaccctaacccctaagcactaaaccctaaatgcaaaacccaaaaccctaaaagctaaaccataaaccttaaaccctatgccataaaccctatatcctaatcccgaaaccttaaaggctaaacccctaaactctaaaccctaaacctgaagccctaaattctaaaccctaaaccctaatcccccaaacccttaatccaaagccataaaccctaaactgtaaaccctaaaacctaatcactaataccaagacctataccctaacactaaaccctaaatcctaaactctaaccctaaaccataaaccataaacactaaaccctacaccctaacccctaaacccaaaaccctaaaaattaaaccttaaactctaacccataaacactaaacactaaatgcaaaacccaaaaccctaaaagctaaaccataaaccctaaaccgtagaccctatgccataaaccctatatcctaatccctaaaccgtaaaggctaaacccctaaattgtaaaccctaaaccttaagccctaaatcctaaaccctaaaccctaaacccccgaaatccttaagccaaacccctaaaccctaaaccataaacttaacaggctaaacccaacccctaaaccctaaatcctaaatcctaaactgtaaaccctaaatcctaaacccaaaactctaaatcctaaagcataaactcttaaccctaaaaaataacccaaaatgcaaaacccaaaaccctaaaacttaaaccataaaccctaaaccctatgtcatattcctcatattctaaaccctaaaccctaatgactaaacccttaaactcaaaaccttaaacctaaagccttaaatcctaaactgtaaaccctaaacctcccaaaccctaaaccctaaaccataaacctcacccaaaaaagcaggaaaccctaaacctaacccgtaaaccctaaactgtgaaccctaaaccataaatcctaaaccaaaaacctaaaccctaaaccctaaacctaaacacaaaaccctaaaccc

SEQ ID NO: 401010 - DNA, 549 bp, Cannabis indica
agaggaagaaaaagaagaagaagaagaaactagaaacaaaaatagaaagaaaaaaaaagatgaaagaagaagaatggaacaataataacgttaaatgagttttatgtatcaattttttttttttaaattttaattcttaattaaaaaaattatcagatgtgacaaccactttcaaatcatcatttattgtgccttatttgtcactctttttttttttttttttttttttaaaattgattgtattaaaagaatggatctccaacaatataataagcaacatcacatcaaatttatttactaattctttttaatttaaaaaagcacataaaaaagataaataaagtgtacagtatatacacgcaagttttatactattttaaaaaagacagtatataaagtgtatagtaaaaaagtaaaaactgccgtgtgacagtataaaagtaataaaatgtcaaaatacattctacaatgtaaaaactttaaaaaaatccgtaatttataaaaaaattaagaaaacttacaaaatattaaaattttggttaactttta

SEQ ID NO: 401011 - DNA, 985 bp, Cannabis indica
aatacttaaaaattatgaaagtataataacagcttaaaaacgaattacaattgttgacttcgcttttagccaacgacaatgagtctattttataagcgaataatgatatataataacagatatatgataaagcaatataaagacacagggattttatagaggttcagccccgagcagttcggtaatagcctaatcctcgttatttgtattgacttaagatcaaggagaaagattccttttcttatagctcttacaacagtatctctgaatatataattcttagataatagtatagtcttagctcaactgcttttcgaccgatcccctgcccagtgaacatacatcactatttatagggctaggaggcttggggaggaagagtttcccctctcgttacaatgcgtataaacagaaagatcgtgggatcaatgctgaatgcaaggattgtgggattgaggctgaatacactgatagcgggatcgtgtgtatgccatatccacgtaaattgatccctgagttatagggattgtgctgatgactcacgatgcgaaagctgaattcgctaagtgttggtcgctctacgcggattgctgaatatcttgccctgggcatgccagcaacgcatcctgctcagactatatttcccgagcagatgttccaagtggattccacgtgtcaccaatcatgtgatgccacgtcagagtgaaaaaattgggataaaattttccccctagtctgtacgggacttccgaagtttcgtgtagactttatctgagctacttctgcttttggatggggacatgtgtcgagtgtgaccgtccaagactcgatgtgaggctgactgggcgtcccttcggttttcggctaataaatgctctgacacttaatatttcgaaatctgattttctctctccacggctgacgtctgcacttgattattttttatttcccatatttgtttttaaggcgggaagctgaggcgtct

SEQ ID NO: 401012 - DNA, 623 bp, Cannabis indica
atattaaaatattcaactcttatcaataatcagaattgtttttacatgctttttagggcattgggcatctcccttagtcccatattagttatataacccataaaagattttactgatagtgtctttgtgaatggatctaccaagttatgttccgatgcgatcttcaagaccgtcatattacctctctctactatatctcttagtatatgatacttcctctcaatatgcttgcctctctagtagcttcttggttccttggagttggcaacccctccactgttgtcacaatagagcctcaataatttttctacttctgaaactacttctagatcagtgtaaaatttcttcaactaaaatgtttccttagctgcttcataagctattatatattcgacttccatggttaaatttacaatattggtttgcttaatgtttctctagactacaactctaccaccaagagtgaatactaacccagatgttaatttttgactatctttgtctgactgaaaattagacaaagatacttgagatctatctttaactatctatcacgtaggattttaactctcaaccggaatacacaagcatgagatttctcgttctccaaagatacttgagaa

SEQ ID NO: 401013 - DNA, 588 bp, Cannabis indica
gaattttttaaaaaaataactgtagaaattttatattatataatgtgttaagttttcacggttgttttatggttattttttagttgttttactgttttttaattatttgttatgttgttttattttatagttgttttaagttgttttataaaaagactgtatttttgtaaaaaattctacgtgacaataaaattgtaaatttttatccaaaatctagtatttttgtaaaaaatcatttttttcctaaataatttgtagttgaatgttaaactaagtccattaatataatatgaatagggaaatttacataatatactaatttttgctatttttttacaaaaatactgtcatgcggtattttttacttttttactgtgtttttttataagtttcatactgcagtatactgtgttaagtttttcactagtgttctactggtgtttttactggtgttctactggtgttttgagttgttctgctttgtgttttactggtgttttgtaaaaatacagtatttttgaaaagatttccgtgtgacagtatttttgtaaaagttaatccaaattacagtatttttgtaaatttccc

SEQ ID NO: 401014 - DNA, 532 bp, Cannabis indica
tttaaaagaaagaggaagaagaaagaggggttgaagactcattgggccttggagtagaaccagagatgagataaactattaaaagaaagagaagagcttcccaactccatggatggatggaatttgcactagtttggaagaagattagtaattgcgctgaatgctctgcttttgatggtctctcaactggtttatacactaactttctcttttaaaatgaaacttttatatctacaataataccttttattattttatatttatttttaattaaaataaaatatcaataaaaaaaaattaaaaaaaaaaaactctcttccctcacatggtgctttcatgtcttcctctattttttttaaaatctctcaaaatcttatgcaatctcttcaaatctgtggatagatcaacattgttgtcaagagaacaattacattcaagaggtaagtgaatgaaccctaagtttttaattttttattttgaatgtaaaaaaataataaaaattgtattttttttagcttgattcttatttttt

SEQ ID NO: 401015 - DNA, 507 bp, Cannabis indica
aacatgaactttcacgttggctttacgactatttaccttgattcactcaattctcaccacatacaaaagctttcaagtatcagaaaggtcgagcaatcccatctacaaaataaataaaaaaagaaaacaaataaagataattcaaatattgaccaataagaaaggaattagaagaaaaaataaacacacttaaaagtaagagaaataatcataactttttgaaaacaaagaaataactaagattgtaatttataattgtatatatacaattaaataaatcaatttgcataaaaataaaggagaacagtaaaagatgagagagttgttgggagagagatatgtatacaccatcaaatagatcaatttacaaaaaaaaaaatagaatatgggagagcgattgagagagaggtagaaatatatttttaggtagaattttgttatggtagtcttaatttatagaaaagggagtagattaatttgcataaaataaaataaaagaaaattaga

SEQ ID NO: 401016 - DNA, 1580 bp, Cannabis indica
tttttcttgttgttattgtttggaatatattattggatgttgttagaggtaatctggaaggtttggggaagtttagaaacgatttgggcaagttttgagtttgtttggggttacctggtgcaaaccaattaatcggttttacaggccctgtaaaattggctaactagattaggggcaggattctcgaaaaattcattttgtcgaatcgtgttatttccagagccttagtttgttattccttgataactaggttaaagtcaagttagctatctagtgaaacctataggtgtgagtttagattcctggattaggttttggtgtgttatttacctgtttatgtaaatgtgacttagggcatctatccaacatgaggtttcaggtcagccaactcacttgaatacggaaacgaggtaagactagcatagaaaatattatatatgtgaatatgtgtatatatgtaaattagcggcacaaccattgtgtcgagtcagtagtatgagcatagtactaggtttgactgatattcaattccagaataattggtgctatcatagcggtatgagcatagtttaggttaagagtgatattatgaccaattatacttttaggtattattgatgctatcatagcagtataaacatagtaccggtcccacagtgcaatcatagtgctggtagtggctgatatcatggtcaataatatcaaatgttaaaaactcttacttatctgataagtcttgcggataggtgtaagggcaccttgttacgcgtcggtattatattatttgttatgtgtttttcttattgaatgtgtcgactcacagatattacttctgtgtgtaggtaaatgaaaggcgagagctgaacaggagtgagttctaagctcgaaggatgattgtacatgtcgagacgctgtgacctgaagtgttcggtcttaggacatcttggaatatatttggtagtcgttgtgcgataagtttgtaaaagtatcctgatattaaatacagaagtttaaacacggagtcccggcttatgtaaatatctttatttgtttataaagtttattagtttaactcaaaaatttaatttaggacggtttttgagaaaactatttgattagcaaaggtgacacattaattagaaaattactgtagcgcgcctaaatatcagggcgctgcaattttggtatcagagtcgctaggttttctaccaaagatcgtcaagacatgtacaatcatcgtcagagaaaagctcgactcacggttcagtaagcctttacttgtttagtaatgtatgtgattagaaaagcataatattttataactatttatttggatgcattgccttaaaatccataaatgcggcatatagaatatatttgatccctgtccgacttgcctgacgtaagggttcgcgggctaagtcctagtgtatggacgtccaacgaaatgaaaaagttaagatgatgaggtcgagactggaggcggtcagggaagtcaaaatcatctgaacccccgtggatgtggcaggggttgtggaaggttgcaaaggggtggttatgagaatccatcaccagctcct

SEQ ID NO: 401017 - DNA, 500 bp, Cannabis indica
aggagactcttagctggatcaagaataaaggttgggcgatggtagttcttgagacggattgcctagtagcggttgagaccattcgtagtcaattaatgatgacctctccttttggtttagttgttaatgactgtagacatttattcagttgtatcaacggatctctttagtgtttgtgtatcgttttgctaatatagtagcttatagttttagtagagcttccttttttttccaaaataaattttcagtaggagtgatgttcttgagtttatatctatattgttaaagtaatttttcttaataaaattctatttccatttttttttttaaaaaaaaaagagttattttatttaatatactaataattaccttgtcatataaccaattaatattataattataaaaaaatctttgtaaaactagtgaaataaatacttgtacaaaataataataataataattgtaactatccaattgatacaaatacgcacgagtaaaaa

SEQ ID NO: 401018 - DNA, 528 bp, Cannabis indica
ttgttaattaccattaagttaatatgattatgttggaggaagattgtatagaatggtgtaattcaaactttgttctttttttcatttaatattataggaaaattgtattaaaaagtatgtgcacatatatctctatccggtttggtatatgaaataatttttcggtgaaattttttttcattatcatgtaaattataattatttaatatattatgcaaaattttaagaaatttaaaatagtttaacatgcgaaaaactgcattcaaacaatgtgttgcacgcgtgattattttattttatacgtgtataaaatagactattctatttgaatattttgaatttctcataattttgtaaaatatcttaaatatctataacgtacatgaatatgaaaaaaattagactaaaaaatttttctagatgccgaaataaatagagagtacatcagtaaatctcttttataaatggtacattgtagaatcacctgtgagccaaattttatagttgttgcattatattgggcaaaaa

SEQ ID NO: 401019 - DNA, 537 bp, Cannabis indica
ttcattttttatggtttttaaagaataaatttgcgaaactatggctttttctcaaaaaaaaaaatatatatatattatgggaaaattttagaaaagtaaaaaaaatatgaaaaaaatagcataaggtacctggttactcccttatggtaactggttagccctctagttaccataaaggtacatgattattcttacctgattttcctatatttttcaaatttttcctcaattttctcttaaaaataaacttcttcaaaagaagataatatttttgcacaaaaaaagaaaaatatataaaatcacataaaatttttaatttcctcaaaatcaaatcccataaaaaaaatagatttttacgaaaatactggattttaggtaaaagtttacaattttactatcacatgaaatatttataaaaatattatctttttataaaaacaactgtaaaacaataaaatagaataattaaaataatagtgggaagaggttttaatggttacatttttattgtaaccatcatggttacatttttttaag

SEQ ID NO: 401020 - DNA, 653 bp, Cannabis indica
attggaggaaaaaaagtatcttttatgagcttgagtattggtggtcaaatactttgaaacacaatattcatgtgatacatgttgagaagaatgtgtgtgacagtctgttgggcacaatcttggacaacgataaatcaaaggacacaactaacgcaagacatgatttgaagaaattaggaataagggaatggatgtggatttatgaagatgataatggcaagttaatgaagccacacgccccttacgtcctcaaagctgatgaaaaattgaaattttgtcaatttatcaaggatgtgaagtttcccgatggattttgctcaaatttgaagaagaaagtgaacaatgatttatcaaatgttcttggattgaagtctcacgattgtcatgtaattatacaaagattattggcaattggtgttcgtaagtttctccctaaagatgtatcgaccactattgctgaattatgcaactttttcaggcaagtatgttcaagaaccataaaatttaaagatatggaggaagcacaaaaagaccttattttgatattgtgtaagttggagttgatttttcctctagctttttttgatatcatgattcatttgtgttgggttttatgccctaaataaactccatttcaatgtaatctattttat

SEQ ID NO: 401021 - DNA, 501 bp, Cannabis indica
ctctctctctctcttccttccttacgcacccaactactttctaaccaccttcgtcaactgtcggcctctctagctttagcaccatgatcgtctccttaaggtgtatgcacattaatgtaacctttagacataaccacatcaattttgatagctttattttcacaggctctatttattccaacttgttgaattgtatgatccatgatcatcctctttgctcctggaatcgtcgccagaaatgttccagagttgaacaatcacacatctccactgcctcgtgagaaaatctctttttgtgaaaaacgacatgtcgttttgcctcgtgagaaaatctcttcagccaaaccatcgcattttatcaaaaactcaaaaatctcaaggattcaatgctattttcggccatggaaaaaactaccaaaaagaagtgctaaaaacttcatcaaatttcaaatttcaagcaagaaaattgcaagaggaagtgtagagaacctacccactatg

SEQ ID NO: 401022 - DNA, 680 bp, Cannabis indica
gagctttctgcctatgcctcgtcgtcgaggccatagtcgagaccatgaaaaagggtcgcgaccatggtaaatggtggtcgcaactattgaagcacacttgttagtttcaatagatttttctccagtttaccccatcttttcatcaattgatagaatttgaactctaatgcatcaggaatttaaaataaaggaaatcaagcataaaaccattctaaaagataacattaataatgaaaataactataaaatcgacccgaaatttaggctaaaaatagcctaacagtagctaacggagcaacttaaatcgcaaccaaaattcgtataacaacccacatagaaaccaccacagcaactcaaaccgcaaatttgaaaaaaaaaaagttaaaattagtatatgaggtaattaaaaaaaaaaaaaaaattttctcccaaaaaaaatcttttgtaacggacaactactggcatgaaaatgcaaaccttaagccattttcctataaatctgcagccacaaaagtcattgtccaataatcaatatccaatatgattgtgactttatatgtattatcaaaaacaaaattttacgcatgtgttcaaaaataaatctaaagattaatacgcacctcttatttagctagatatagtttttagagaggctgtggtctcataacatccttaattct

SEQ ID NO: 401023 - DNA, 500 bp, Cannabis indica
attccactttttggcttgcggttaaggattggcgcagacctcaagaaagtcatctctgcgaggacaaataaaagataagtataaataaatttcaaggcactagttaatacacgcaatatgctacctgatgatggtctacaagtttgtttagagaggcgtttatctattcgctcttgtttcttctcagaaggttccttgtacaccggctctctctgaagacttgcgttctctggaatcagcttatgttctcgaagcttggcagtcgtacacaataatcgccagtcgcgatcttgtacaggaagcctcccgagaacttcagctgtctctctacgagtctcaaaataactcaaaaaatgactaagtcgggaaacatgcgacatactaggtcgacggttaaagtcagtcctaatccatggaactttgaatatataaaaccacttcgatttccaatctcccatgttggaaaccatgccttcaaccgcattaatctcagaagtggc

SEQ ID NO: 401024 - DNA, 1410 bp, Cannabis indica
taaatcactttttacttaaaattgaaactgaaagcctccctatcgatggataacatggcaataccctaaatataacaaaaagggggaaaaactagggttccccaaactgccctaaccggtaaactggttccccaatcgaagtccagttctgtggggttcctggggaccaacttaattttggttcctacaggtcccaatgaatcgatcgaccgattaaacacctcaattcgaccccaaacttcacaagaacttctaaaacacctatttataccataataaactgaaactaagcaataaatcacaacaattaacttagggtttagggtttatagcttgagttcttaaacacaaaccttcctcaaacaccataacagccactgattcaactcaaagacagctcaaataacatcagtaatataacctcagaatactcaaacaatattaaacaatatctactgcaaccctatgtccaaaatcatgcacgaaacttagcttggaacttaagaaatcacaaagagaaaggagcttgatggatatcttggattgagctatgaaaatctagctagaataacttgattaagctgaagaaacccacaaatatttgctggttcttgaaggggtagagcaagagagagagagaaaggttgaattttgatttttttttctatttttgaaataaagagataatacctagtatttatctaacattaacttataataaaaaattagaatactaatcccatcatatttcactaaagggcaaactaactaaatggaaaaagaccattttatccttgcacacaccaaaaagcatacatccccctaggggtattttagttaaatctaatgcctcaaatattcccgatattctcaatgtctatctatattaccccgttactactaagatactaaaatgtgattctattggccaaatgccgcgttccaaaattgtcgagcataaaatatgaaaacatgaatattcatatatagtgtaaataatacacttagaatttatttaaatctccataaatttataaatcataattaataatctaatttcataattaaggcctaattatctgctaattctaaagaagaattgatgtatgaaggatagaatgctaaaccccaggccaatgtcaacctgggtgcccagtgtgcttgcacactagtgcctggtgattcctaggggctaacttgctactcaaacaatattttttcctaattcaaagtctcatatcttatttttggagaaaaacaagaagaatgcttgggacaaaattgcaatcagatcgataaaaccacccaaagtgttgctacgtcaacctgggtgcctagtgacttgggtgatgtcaacttgggcctagatagatttgtttgcttctccaaagcacttgtatcttccttgtg

SEQ ID NO: 401025 - DNA, 573 bp, Cannabis indica
tctttttctatcctaaaaaaaaaccctaacctaattaggctctctgcaactccgaatggcagcagcctctaccaaactcacctcctctctcctcctccttcacttcccttctcagggtaccctcctcctcctctctacctcctccgccgccctcaaatcccaaatcctccaccaccacaacctccataatcaaatctcccaaatcttcccactcaccaacgcctctctctctactcctccttctccgtcttcttcatcacccctcggattctcattgtcgacttcctcaactccaaaatccccacctctccgagacctccatcgaggctttcatcgtcagaatccccacctctgccatcgccaggctttttctgataagcctcactcgatgcacctttggcctcggttccatgtttatgtgtctcaagagttggagaaggaggctcctgaagtggtggatattagggttttggaggcgattttcgaggtcatggatgggtgtttgaaggagatgagttagacgaagtggtggtggcgattgggaacgagaagaagagtgggaatggggcggct

SEQ ID NO: 401026 - DNA, 537 bp, Cannabis indica
atgtcatggttattgtttaatctcgtttggatggccactaaattagattttactttaatttatcgtcatcttaggattactattcacctaatagtctaggattctaagtgttcgagataaattgcaatttctaatattgtcaaaagtatttctaattgtgatgaagaataaaacctaggttaaatgaattatatgtttcattaatttgttgcctagattaatctatctcctcgaatctcaaagctttatctaagttaaataaattgtatgtttcgtggatttactgcttaggtaaaaggcttaatattgagtacttcgccttgattatatataataaggagattgggataatttactgcttcagctttatctgcgggataatagtttgattgtaaactaaaattacatttattaatagaaattaagaatgattgtcgagggtggagaataacctttgactagtttctcatatcgtagtctcaattataatttgtttgtttatttctttttatgatatttaattacatctcaaaaccc

SEQ ID NO: 401027 - DNA, 534 bp, Cannabis indica
cataaactgtagcaacaaatctgcttgtagacttgaccctccactagaaccttattgttgtggttgctgttgattctgttggggctgatttctttgctggtaaaacccatattgttgccgattagaggacgcctttgtacattctgtctttgatcccctccttgattgtacccatagttattgttttgagaataattcctgatgacttttgcttgatccatcggcaaactatttagatgcacggggcatggatcataggtgtgcgggcccccacatagctcacaaatgacttgaacttgttttgcttgaactgccatcaactttgttagggcctctacttgagctgtcaacttggtgatggcatctaccttgagcgtaccagcaaccttcttcacctggcttctttcaattggctattgttggttattcatggccatatcttctaccaaatcatacgccttgtttgcactttttctcataaatgccccaccaactgcgacatctataattgttctgttgttaccaatcagccca

SEQ ID NO: 401028 - DNA, 1638 bp, Cannabis indica
gtttgtccgttctatttagcagcaccagaaattgctctccatgttctagttcgatgtgtttttgttcaaaattgttggaatagatctcgagtgctagtcgtagatgctgctgcaatgacgtttacaagctagtttgaggaggggttggactcttggagtaaagcggatcgcttggaggcagccatgatatgttggtcaatttggaagcataggaatgaaatggtttggaactctaaacaacctgaggttattgaggtgttgacattagcaaaactgaattttgttgattggtgtgatgctcaaaaaaataacattgttactgctagtgataatggttcgaatgtgacagatttagagcattggatcccccaaaatttcctacaatcaaagttaatgttaatgatgcacttttctctaatgttaatgattggtgtgatgctcaaaaaataacattgttattgctagtgataatggttcgaatctgacagatttagagcattggaccccccaaaatttcctacaatcaaagttaatgttaatgatgcacttttctctaataagaggcggtttggagttgggttggtggctcggacagcagctggtttagtattgcaagctaaaactttgaacaaggtagaagctttgcagctgcatctagttaaagctattagagtcaaagaagctttaagttagattgaagctaatgggtggacaagtgttgttgtagagtcgaattgcttacaagtcattagtgatttacaaaggtttctcctcatggccatattttctctcattgtaaggatttgcttgatgattttgatgctatttcttttaattttcttaacgatctgctactaaggttgcacatattttagcgcgatcttctcttggtgaggttgattgtacttttagtggagctttacctactgcaattgcattcttagtttgcaaatagctttaatgccgtgtctcatacatattcaatttgaagacattgaataggacataatgaaccttttttattggaagatattgttggattaacatgcttgaagttaaagcataatgtaaaccaataataaataaaaaaataaaaattattattttcaaagaatcaattactcttagtttcttttattattattattattattattattattattattattattattattattattattattattattattattattattattttgaaatgaattactcttaatttcatgtcttaaatatatatttgttaatttttcggggtcatgtcatggctccctctaactataacataaatcggtcaatgtccacacatatgcataccaatttttatttataagttaacatcttattataattgttttaaaaaatgtatatataaaaaaaattaggcctatttttttttccataaaacattggtggatatacaagagattaatatatatcccaaaataaatatataatatatataggtgaaataatctatttaggaagatttcaaatatatttttgggtttattttataaatatggcttttttgtaagtggtttagaaatatatggagaaataaaatttttttataaaaactggaaaaacgaataaaaaatttaaaatatggaaataactaat

SEQ ID NO: 401029 - DNA, 917 bp, Cannabis indica
agtgctggctgggaagatgttctggcttcagagttatttacttcccagaccatgagtataaatctagttaaaatgctatagcaactccgtgcacttttgtgatcccctctcatagttcctatgctttctatatgactggagaactttaagcatagatgccaaatggatgtcaccacttcgaagtctattaacaattgtcttcctaggatagcattataagcagtagggaaatcgactatcataaatgtgttgtaattaaaggaggatattgcgttccttctaagaacttccccatttatagtcattggaagctgtatctttcccatggggatcaatgtatctctattgaagccttaaagttgaatcggacaaggtaacaagttggcttttactataccaatggcgtgaaaggctcctttgaaaatgatgtttacaaagcttccgttatccacgaggatactcttttgttggctatttaagcttctattaccaacgggtcattatgagggaaatgcacgtgcctggcatcgttttttgtaaaattcatgggaaattttatcatccttggacgttggacaggtgattgcaccaagtggcaagttttgctttgttcaattcattaaggtaccgcttctgtgcatttcgagtgctttcaacaatatgggatccacttgaaatagttggcacaggaccatctaaagctagtaatgcagctccaggagggtgcaaatttctgggactgggggctacagctactgccgctgctagagcattttatgccccctgaagggcttgtgcatttggagcttgtattccaggtagctgtgggtggcctacttcctaaggaggatttatggatccctaatgtctgagaacaaaaagctgtccatgtgcgactgcctgtcccggatagatga

SEQ ID NO: 401030 - DNA, 716 bp, Cannabis indica
attaaagttatggaatccttaatatatagttgctactacagttcactgatgcccgttcttcgatgcaagtaatctcagttcagattactgatgtagcatgacatcaatgtactgtctataatagagattatatataacaaagaccgatatgaataaagttatcttaatttaacatgttgtttactataaagacctaattcatatcatagcgatgatcaatagtagatcggcctaaattctgagtaattgtgaacttctgttcatgttattagtttctttgattcactcgttaaagtttctcagagaatatggttattacaacttttgtttcgagaatctaataatgcgaatggctgggaacatgactacaattatgaaatcctaaatatcctaacggatcgaatgtcgatttcatttaagtattaattctaaaactgaaaagttgtgcacaaatttaggtgggatccaaattataattccactagtaaattaatgatgttaaaggataaagaagtaattataagggtaaaacgacaatttgaccaaaactaattacaaactaatacatggagagctgatcattggaatggattatatcaatggacaatacaatataactcaataaatataattatataattactaagagtttaattccacatttatagtggagtaatcgttgaattaataaataaagattatttggttgatgcgac

SEQ ID NO: 401031 - DNA, 774 bp, Cannabis indica
ttttaacagaaagaagaatagttgaaactcaagtcaagtgcagtaatcaaaatgaaagaaaagagataaatttgaagatggaaagaagaatatggatgaaataatcaaacttttttttgtggaggaagttggattgtcgttttatgaagagtaagtggtggaaaatgaattggaattttcgtcgtagggaatcatacaaactaataaaacaaagaccacacacaaactaacaaaaccaaacctccaattatatattcttttgaacataaataattactgttctaattttacaaccaaaaatatcacagcttatatataattataaagcgatcaaattaactttccaatatggctaatcttaacctgagtttaaaattatttacataatgtttttttacaaacaactaggcaacaataaaatgtaactcaaaatgctgaaagaccaaaaccctccaggttgcactgctgcgatatgtataatccttgccaagctccaactcagtactgctcctccaacttagctttacatttacctatacaagatagcaaactgatgagtcgatcgactcaataagatatgtataacatatatacaagcaatgttgtaccagctttatgcttaagccgtcctgagcccaattaccaagctcactagatggttaagaacgttctcaacggaagtacgaccactataccatatgcactagagtaccaactccgtactcgtattggtagggccatttgttgggttttatgccctaaataaaactcttt

SEQ ID NO: 401032 - DNA, 340 bp, Cannabis indica
gaagcgcggatacgttgcctagtttataataaaataattcacttatttataaaaagtgagtagtgaactaattgacttatttatttcatgtacagacaaaacttattaataaggttagttgcaactaaaagtggaattggcgactataattgagatacggtaacaacaaatttaaatattgtggcgaatatatacaaatgaggtacggtgatgataacaattttgaaatcatatcataagttttctatagatttatcaatggtctttttctcatgacttaattttgtatgaggataatttattttttaagtaaaaaatattgtaaaataattaattttac

SEQ ID NO: 401033 - DNA, 559 bp, Cannabis indica
atcgcttttgtcttcccaggtgtgacaaagttgatgcctcgccttaggcatccaatgtcgtatggtttctcgttaatgcacgaggcaacaatatgtttatctttatcttgcataagaccttatagtcaacgagttgcaagtatactctgttaattctacatttaatgagttattccattaaatgtgattaccgttacacgcatcgattcatattccccttagcttgacacgtgtcctccattgacatggtagccgaattttgggtataacaattgctcattaaaaagttcattttataagaagtgctttttaataattacaaagggtattgttgtcacaatcacttttgaaaaaatgcatcctttgatcttggcagttttacagtttcgagggtcattattagtataaatgaaccgtcttttattcttctgcctcattcccaaacgttagatttcccaacctttggccttcccgttatcggattttaagtataaaatggtggcttaggcttgccatgctcaatatgctcttggtttttgatgagtttcatccagaaatt

SEQ ID NO: 401034 - DNA, 880 bp, Cannabis indica
ctggctcaccaatggggtcttaaacatgtcatatatttaattaagtcacttataataaattatataataaaataattccataataatacatatttaaatagttagggtttgctaatccgttttcttaatcctagggtattacaattactccctccttatagaaattttggcccgaaatttacttgaacaactccggatatttgtgatgcatatccgtcacaagttcccaggttgcctcttccattttactattcctccataatacctttactagtgcaattgtcttatttctcaagactttctcccttctatcaagtacttgcatcagttgttcctcgtatgattaatctggttgtagttccaatgcttcataactcaagatatgggacgaatttgagacatacttccgaagcatagcaacatggaacacatcatgtacaactgccagtgctggggccatagccaacctgtacactacttcccctatccttccaaggattttaaaaggtccaatgaacctcaggctaagcttccctttcttaccaaagcgtttgatgcccttcataggcgatactcagagaaataccatgtccctgatctggaaatcaatatctcgttgccttggatctgcataactcttctatctactctgagctgcgagcattcgcgctcgaattttatcaactgcctcacttgttctctgaacagcctcagggcctaaaaacttcctttcacctacttcatcccagtgaataggtgatctgcatttccttccatataaaagttcataaggggccatcccgattgttgcatgatagctattgttgtatgcgaactcgatcaggggaaggtactttacccatgatccttcaaagtcaag

SEQ ID NO: 401035 - DNA, 515 bp, Cannabis indica
tgggaggatgttgtcggggaggatagttgctgctcaggaagataatggtcgttcgggaggatagttgttgtccgagaggatagttgttgtccaagagaatagttgttgtccgggaggatagttgttgtctgggagcaaagggtgtcgagtcgggtccttgttacacttggacccttatcaaagcttcgacctaggctgaccctaattatggccctcttttagggtggcatgtgtgcttgtttgataaaaatagagacaacaataatttagaacacactactacaaaacaagattttagaggcgctttttttagcgtaataataattaaccgacgccataggattggaaatttttagaagaaaattttacgccacttatggcatcggttatttccaaataactgacgccaaaaagggtttataacccaagcccagcccttcgtcttcctcattcgatcagccaacccagaaaccccctaaaccagagaaacctcaaaccctctccaccaaccacca

SEQ ID NO: 401036 - DNA, 518 bp, Cannabis indica
aaggataatgatgtctgctccatggatggagaatgattctccagctcggagtcctcaatgaacaaggagtggattctcgactccggatgcacttatcacatgtgtccaagtcaagaatcattttttgattataaatcagttgatggaagtaaagttctaataggaattgatcattcatgtagggtcattggaactgggaaggttgccatcaaacaatatgatggcaaaatcaaggtgctaacgaacgtaaggcacatcttggaacttagacgaaacctcatatctctgggtgtgcttgaagatgaaggatacagatacaagtccatgcacgaaaactttaggatcaccaaaggttctttggtagtgatgaaaggtgtaaagatcaatgatttatatgttctccaaggagaaactatcccaatcgtagaagcaagcatggtgaaagggctagaattgggtatgcaactgtggcatcactgacttggacatataagtgaacaaggcctcaaagaactgca

SEQ ID NO: 401037 - DNA, 529 bp, Cannabis indica
gaaataaattcttaagagaaaaacagtaatttgttaaattattgttttaattaattatggtaattgtgaattgtataattaatagtatttaactatttagttttatcggataaaactatattaagtagttaaatataataatatcgctaactaatattacagagagaaatatattattttagagaaaataatattttattttaatccttgagaattaagatattaatgagaattaatcaattattatttattggtagaataaataacaaattttgtttgtagcaaaattgagaaatcgattttggaccttaaaatatggccacacgtgtaagcctattttacacatgtagggtgacatataaatgtccatgcttaattttgtttaactatttaattgagttaaaataatttaaattaaattaagttcattattatttaattattaattaaatacattattggacaattgttcaattaaaatgataattattaaaaataaaagatctactgatattttgatattcggtta

SEQ ID NO: 401038 - DNA, 1215 bp, Cannabis indica
cattatccctcattaattgggataaagacacttggcaagagaatgcctaaagtcacacaatctaacggttatccataacaacacctacacggactctgaagagttttgatgatgtggcacaccaaatgggttaagtataatgattacagccgtcttttcgaaaccctcgattagacaaccaaaagtcaccatcttgtgacaacctttcgcctgcctctcgcttatagtttccctcatgacataagctgtcagtcgcgaaactaggggcatgtgttgtagtgagaatttctcacctagaaactcgataccagactcttataaaaatcacacgtggactcactctcctcgaggaaagctgagatgtcagtgagagacctcttgagtgtaaacctcgcctgaaccagactcaacgggatgatgtgaccttgatagagtctagtggcattcgtatagtttgcacaaagtaggatcgatgatcggtttaagactcgcatatacttagatgtatgcaaagactacaaagatcttcttgggaattgtaaagatcaattctttactttgcgagttagtacggatgacccaacaaccccgataacccgataaggactcccatgccttaggttatcaacttattacaggatgtccgtataagcgactccaacaggacgcagacatcccaaactcgactagtcttgtatgcatcttaagcctgcgagcttatgcaggaatatgaacagaaaactcgcactatagaagtcgcatacgttgttgtatttggtgaattgggccgaaattattcttcatttattctatttacatttttattaatttaaatgttgtaattcaatgtaaaaacggattgataatgaagtcaatctctgggtaatcaaaggacacttgctttgtatataaaggattaatccaacatgaaatggacaagacagaaaacccttgcaacagtggactaagcagactgtgatttgactgaaccactatattcctttgtgttctttttatttttagtacgtctgtgtgttcatagcttgaatactcgccattctaggtcaagtacttacacattctctgttcatatctttattatattgtttattttagtgttgtctaaatttctccaacaacacttatctgtcgagatctaacactattatgtttgtctaacggatgacaaacctttgggatatgtcccattaaaaa

SEQ ID NO: 401039 - DNA, 509 bp, Cannabis indica
ttttttttatctcattttttttagcaaccaacaattcttctttctcttttttttttttgtaacataccaacaattcttcttttatattgaccaaaaaaaaaaaattagttcttttatatctttatttaacaaaataaaaaatataacatttatattatatttgacataaaaaataattttagtaatatatttattttaatttttaatactttaatatacaattacaaaacttaaatacttattgttgatactaaaatatctctaatatatctcttatgttaaagggataatttaaacaaaaaaacaaaaaaaaaaaaaaataaaaatacaaaaaaaatacaaaaatacagtttgtacggagttttaaatatttttatatctttttagattttacttacataaaatagtaaaatgctattttttagtgtatttttatattgttctcttgttattttgttgttgattttttatttgtttattatttttttatgttattttgttattatttt

SEQ ID NO: 401040 - DNA, 1174 bp, Cannabis indica
ttttaaaattttgcacaagactctcaaaatgcttgagaaagccctgtttatagccctagtattattttaaatttaaaaaattacatatatatatatatacaatataagaaatattacttttactagcgcatttcgcaaactgcattggcaaaaaggtcaaagattcaccagtacacatttgcagtggctaaaatctaacttttactagcgcatttacgcgttgggaaaaattatttttaatagcgcttttcattttatgctttaaaaagttctaatatcaacgttgatcatttgccaattctttttgccaacatattagaggtaaattttattttactagtgcaatatcaaactttagcaaaagtgacatttttttgtagtgataacataaataattaaggcttttaggtcttggtcaaaatatatatgtattatatatataaaaaaaataattatgttgaaggttctcttaatatggctgaatatatgaaaatctagtttagtttctatctgggtccaaaatgtttggtattgattagacccttgtattcaaaaaagagtaatatgtttgtgagaaaagaaaaaaaaacattattattccttgtttttaattttaagacaattcatttgcaaagacaaaagaactataagttaattaattaacaccaaacaaagaacaacataccacttaataaagtgaaagttttgaatctctcattatctttctatacaattttattgttctcacttaaaaaattataactataacttttttatatagagtgcttatttgtaaattgcttataatagatatatttaatttgttttcgacgattttagaataatctatactataggttttgaacatttagtgacatgtgtgcgattttttttttctgtacaaataattgttttgaagtttgatatcatcataaattattcaaaaaaaaaaaaaaaattaaaaaaatataactaattatatatctctctttataaactctcatctatgtattctttttttttaaaaataaataaagatatccggccattaacaatgatgccgtttggtaacacttttgttttttattttttaatcacaaaatgaaagtaaaatttttgtttttaaaaaatttgtttttgtaaaaacaaaaatgcgttctgtaaccacttttgt

SEQ ID NO: 401041 - DNA, 317 bp, Cannabis indica
catcctatggccggccacttggagggaatttgccatttaatttttccaatattttaacgccaaataattctaacataaacctaggtagttgcctataaatagataatgatgcctcatatcaaaagatgatgggaattcaagccttcaatcaaattttcctgagccatcacttctctctattttcgaaccacttctctctcttccactcttcatattttcataccctatagtgatagagtagggttagagatctgagtggaaggagccattaatattccgttgcacccactgtaaggtttcttaaactttatatgtgt

SEQ ID NO: 401042 - DNA, 823 bp, Cannabis indica
atatatttaaattttatttttgcatctaatttttaaatagatagtgtttaccgagattttagaaactaaattaaagaagagcttaagaaattaaatggttgtcaaaataaaatattagtgtttatgccatgaaaattctgtaaagacatttctaattatgaataagaattgaacattcggatatatgcatgattgttaagttattaatatttaatattaaataatttatatataaatataaaaaaaattctttattcatacatgagattgcgacttgtattgtacagaggattaagatcacttagctatatgaataaaatagtaagcaacatactaagtttaggaatctttatcaatggttactagtgaggttcactgatgtccattattcggtgtaagtaatctcaattcggattactaatgtagcatggcatctaagtgaaggtgttatatataatagatattatatatgacaatgactgatatgtaattaagttgtccttatcaaacatgttatttactataaagacctaatttatattatagtgatgatcaatggtagatcggcataaatcttgggtaattataaaatcttgttcatgttattagtttctttgattgactctttaaatagaaattatatatgacaagaaacgatatgtaattaagttgtctttatcaaacatgttgattactataaagacctaattcgtatcataatgatgatcaatggtatattaatctaaatcttgagtaatcatgaaatcttgttcatgttattagtttctttaattcacttgttaaagtttctcagataagataa

SEQ ID NO: 401043 - DNA, 539 bp, Cannabis indica
gaaatgatacgactgagaatgggcttaagacgattgaccaagacccttgaaatgattttgtagaaggtggagcagagactgatgggtcgatagtcagttatctgctcaggatttgtccgctttggtataagaacaatgagcgtctggttgatggccgctaaatttgcatccccgttgaggaagttgagagcaacaatggtgacgtcatgacccagtaagtgccaattcttttggaagaaactgccactaaagccatctaagcctggagctttatcatgagcgagttggaatgtagcagttttaacttcattagccgtaaaagtggcccgaagaaggtcaatttcagcaggggtaagactctcagaaatgcctgaaagaacatattcaatgacttcattgtcaggcgattgactttgaaaaaggttagtgaaatattgttcaatggttgctaaaatggatagcgtatcagtagcccaggaaccgtccagtcgttgaagggaaagaattttattggtggttcgtctcatggaagccatacg

SEQ ID NO: 401044 - DNA, 478 bp, Cannabis indica
ccgagaagcatagcgatttcatgttggagcgcatgagtcgtatttggagaaaagtataaggccgatttagtgaacttaaccagttgtccagatgcgtggctgtagtcacaaagaatgctttggatggtagtcgcaacttcaacaaaagctgagctaaaaaggaggctttcatcagcgaaaaaaagatgcgagatggttggggctcgccgagcaattttaatgccaaggaaatgactccgaggttggcgctgcttggttttataattgatgagcgaagaaagaccctcagagcagagaagaaataaatatggggaaagggggtctccctgatggatgcctctggtaggtttgactgttcccagaacttgttgattaagggagaaggaaaaggtagcagtggagaaacaagccagaattaggtcgatgaaacgcttgggaaataaaaatcggtccataattttgcgaatgaagcccattc

SEQ ID NO: 401045 - DNA, 1103 bp, Cannabis indica
ccaagagtaagcgcgatcagtgacagattttgaagactctctgatccttagttcaaaatcatgggcgtagactcccaaatcatcaatgaattggatgatatgttctttagcattgtcgaatttcccattgtactttctaaatatgggactcatataacctcgtgggtaaggcttcattgcaacttccaaggggtaaggtggatgaaaatcgatagaagttaccgatgatgatgacttccctcttttggctttaaaaagaccgatcaattcatcttttgtgacaaattcagaggaagatcgggcttcttcatcgaccctttcagcaatctcaaaagttctgatccctcgaacattatcaggtgttgccagagttctttgttcaatagtatgtacttgccttatttgagattcattcatcacatgcatttcaggtaaactgcttctatcaacagatgcttcttggtgtgactgtggcagaagtgagctcaacagttgcatcatgttgtcttggactttttgaagcttttccaatcttgttaacacaacatcatctgtttgtcagattggtactattattatcatttcgcaaggtttctgatctgatctgattatcttgctctcgggtatcgaagatagacatttggattcaaataagagaacaaacttgagcgttttcctttatgtattgataggaatatatatattaaggaaaacactcctcaatgaagtcgccaaaatatttaggggttctagctaaacatttaataatataaatgtatattactttaaatatatacatatatgatatatatactgctttaaataaaaataagacacaaatttacgtagttcagcaaattttatttgcctacgtttacggtagcaaacagtcagttgtgcatctttattaatgtgaaatattacaaggattaagagcaaatgatgtctatattctcacaaaaacgatcaatcttgggcatatgtggtgacctagattaacatattccgtagataagggaggtgtattagaccatataactgtgtttgtaagaagaaagaaatgattgtgaatagaagaacttatgattcgtagaagaaccttg

SEQ ID NO: 401046 - DNA, 801 bp, Cannabis indica
atagagagaaagattaccttgaataaagcttcaatattactagaatccccttgatttaacacaaattctcaatcccccaactgctgcccaagagaatcgaaagagagagagagagaaaaagttattttcctattgtttttcaatttccttcaaacttaagtaacctttcatcattcttcttcttcttttatatattattacttaataataatccattcccagccaagacttaaccacttaagtcaaaagaaaagtcttacaaaaagacttccttgcccctccattaataaaataaaattaaataactcaagggtaatttagtcatcatcaaacccctaaaataccaacaccgctaaaacttaacaatgataccccgaaaaatattctaaaccatataatacaattctctaaaggccccaacgccgctttccaccgcttccgaacacaaacacagaaattgggtaattaaacactaaatagcatagtaaatacatacgaactcaaataaattcacataattgttttattatcaataataataaaatttcatacataaaccctaattatttaataattcaaagtattattcatatgcggtctttacaattatccccccgttaaaaaggatttcgcccccgaaatctacctgaacaactcaggatgctgagccctcatatcggattcaagttcccaagtggcttcttccactttactattcctccagagtaccttgactaatgatatagttttggttcggagaaccttttcctttttatccagaatttgcactggttgttcgtc

SEQ ID NO: 401047 - DNA, 635 bp, Cannabis indica
cctgagatccatctaatgtatcatggaatacattcagtgaaagtaaatcacgggacaaaatcgtgtccctacatatataatatatattatgtgtatataatatatatcatgcatgtatattaaagtaaggagctaaaacaataggtattgtgatttttacctattaataggtatagtaatttgtagccttgatttaatcaaatggctcaaattaacccttaaaaactacaccataattaaagtatcttttttttttgtttttgttttataattaatcttgaatactattaattacaagttcaactaacaaactccaaacctataattttttttacttatttatcttatgactatttataatttttaattaattattttttttaattttgaactttatatatttatttttaattagttttattttctacttaacacaataattgtagctagaaaagtataaaatattcaagttatttaatcctacaattatcaatacaaccaataatataataatggtgtaagcggtaaaattaattgtatataaagtacaatgacatgatcgttcaatcctttcaaaagatataatttttttttaattttaagattttaaattaatttaataatttgaatttctt

SEQ ID NO: 401048 - DNA, 518 bp, Cannabis indica
gccaaatctttagcgcaaatacccctgctacgaattctagatgagtagggtacctctgctcgtactcctttaactaccgagaggcataggctattacctttccatcttgcataagcacacagccaagaccttgtctcgaggcatcacaataaaccacaaacttttccttatctaaaggaagagttagtactagagcggtaatcaagcgctgctttagctcaaggaaacttttctcacaccgaccagtccaaacaaacttcaagttctttcgggttagttgcattaagggtacagcaatctttgaaaaactctccacaaaccgacaataataccctgctaatcacagaaagcttctaacctcagtagctgattttggtgtttgccaatcccgaacagcttcaattttagccagatccaccatgatcccatctttatctactatgtgccccaagaaggagacacgagataaccagaattcacactttttgaatttagcatacagtttatgatcccgtaat

SEQ ID NO: 401049 - DNA, 629 bp, Cannabis indica
actctttcttttgaatattttataacgatagaaataaaaacaatatggatattatgcctagtacagattttatttcattacattctcacactaaaccaaacaccataattccaattccaacgttcattacaacaacaaaccaaaatttataatcaatttcaattataatttttattcctttacattaccattatcattccattatacaagggatttttaaaaatactcttttttatgtttttaatcagtttggtaacacttttttaattagttttctgtttttaaaattagaaaagtgaaaatattttcaaaaacatgttctataaaactgtttttacttttcaattttttaattgaaaatcaaaattttaaaaataaaaaaagttacttttattatttttaaaataattttttaatcaatgttttagactctgactcagacccaaactcggccctggccctggtaccgaacctagcacccgatccggacccggacccggacctggccccgaacccagacccgacttaaataaaatcaaatgataaaacaaaagtaaactttaccgaacacacttttgttttttatttttaaaaattgaaaaacaaaagtggttatagaacgcattttt

SEQ ID NO: 401050 - DNA, 565 bp, Cannabis indica
aataaaaatgtaattgaattaccgtaaaaaatattgaaatttccttcatatttattttttaaaaaaataaaacaaatgaaactacagtaatcgtcggagttgtcactcgtaccgaaaaagtcaccggagtttgctgccggcaccaaaaaagtcgtcggagttgccggagttgttggagtcagtgtcgaaaaagtcaccagagttgccgtcggcgccaaaaaattcgtcggaagtagaattgtcgtcgaaaaaatcaccaagaaattggtcagtttcttgatgaaaaaaccagtttcttggtattttttttggtgatttttaccggcgacaatgccaattccgacgactattctggagtttgctgttggtgtcagaaaagttgtcggagcagctgatggtgtcgaaaaagtcaccgaagttactgtcggcgtcaaaaaagtcatcagaattggcattgtcaccagcaaaatcaccggaaaaatcaccaagaaagtggttttttcatcaagaaaccggtttcttcatcaaggaaataattgttgggaatattttaccaggatctaaa

SEQ ID NO: 401051 - DNA, 595 bp, Cannabis indica
gtaaaaattctacaaataagacattagtttatttttaaatttcaattgattttataaatcaattaattgagtctacaagatgacattatcttaaataatgtgaggaccatgggcttatataactaagctcctattaagtagaatttaaatttactaagtaaatttcttagcttattaattcatcctaactccactatagatttgaaattgcactcttaattatatagaatgctctatataccaaatatagatacgttatgaattatccattgtttcaatctaaatagtctttgatcctctatagatagtttacattgagtagggacaaatttatcattttatccttaaaatacttagctacttgtaaataatattttagaaaactaatatacttactgaaatgagcgccctatcatttatcgcttttagcaaagctcaaaggaaatcattgcttcactacatagaagctataaattttatatctatgattaatactcccactcaattacactaccaaatttctaagatgtaaatatgggctataggtaagccgttaacgaacaattcaaagaactcattgttgggttttatgccc

SEQ ID NO: 401052 - DNA, 1031 bp, Cannabis indica
aagagatcctccttccctgtgtatatcttctagatcggtattttgaacttaaagggtatttccagcacgttgatctcgggagtaaagggtgatccgtgtgctcggtctagctcgagatcagtaagattttggctggccaggccttggaacatatttttagttcatccaattgtgcttgcacagatgggtgaaccggttcagtgtcacgttaggatctcttagggcttgctcctggatgcggatccttggttgaaaggccaatttaacatattatttgtccagacctcttcttctgttcaaatcattcctgagatcgtgggatatacccaatctattgcacactgaagcaccaagtggcctcagtgattgaaaggccaatactgtcagtttggatagctgaccattatgagtgtgggtgatatgcccagcaggaatctcttctgtgtcgcccagtgggatactaaacgtagcagctggttgctgattagcaacttggtaggctttccctatcagtacggtagcctgccttgttcggtcatccatcactgcctgctgagccttcaatgtttccatctccttatccctccactaaatgaactgatgcctctattctttgaacgaaggttcattgtagcacggagatcctcttgatcatgatgcaaggtgttggtgtgaccttgcatgagtccaagggcattatggaggttctgaatctcagtgtcatcccctaccgtcgtcttagcattggttgtggatgggattccagagctaggactgcttttatcggttacaaaactggtattcctagtctcttgcacacctggtgtgataccagccaaaggcgaagtcacaccttggcctacagtaggtggttgcatgtttggctgctcggaattggttccaggtgggacccttgtattttcaagagtttgcatggcaggatctgttagcaatggatcactttggttgaccacgcctctgcgagtttgcaccaccattctgtgtgtctgttgaaacttaagacaaagaac

SEQ ID NO: 401053 - DNA, 378 bp, Cannabis indica
agaacgagtgacggccataggaaaagaaaactaaaatagaaaatttataggagaaaataggaaaacggttgggaagaaaaaaattaaaaggaaaatgggtttaaaacaaaaaatataaactgatcaacacccactactaagaaaactgcacaaaaccaaccacacgactcacacagattgaaatttgaaaaactaaacaaaaaaaagaaaaaagaatgaagaagaaaagtacatcaatggcagttacaaaataataatataaaattttttaatgggttgagatgcaaaatgaccctaaatttggaaactaagttagtaaatgtctactttttaaaaaaattaagaaaatggccaaatttaataaattagctaataaaa

SEQ ID NO: 401054 - DNA, 363 bp, Cannabis indica
agaaaacaaaataatatgattgttatatatatataaaaaaaattataattataagaggtatgtataaaaacctacttgtaacttttcctcccaccattcattaggagcatcaactgtttgcctttgcatgtcccaaccaagtccagtctctcctctaagtaatgaatcccacaactgccactcctttttaacattatcccaatgatttttcatttttttcgatcataatttctacccgtctttaaattaaatttttcaataaaatttttccaacctaatttgcttaaatgtgatccatttctattgccagctctcacttgttctacagctaaatcaatccatttctcatgtgttgttgaatcc

SEQ ID NO: 401055 - DNA, 381 bp, Cannabis indica
atattttgacttgataaatcacatttctcacatgtttttagagagttaaggtatattatttctcttattcaatatgggcaaaaagcctcatatatatagaactaattctattaatcatgtacatcaagtagaattacataaataatataactaaattaggaaacaaataagttaagttagaaaacaatatcaatggtacaactcatcgagagaggtcaatgcctagagaatattatagagtaataatagagatatgccactaataacccccttgaagttggagcataaagattggaaatgcccaacttgcaaagtgttggaaatattttactaggatccagatttactaccatgtatgtttcgttaacatcctaatatgaa

SEQ ID NO: 401056 - DNA, 542 bp, Cannabis indica
aaattagcaaacacatattaaataagaaagataaacccaatctagatagcttcaagacataacaatatacgagaattatattggttcgatcttaagttcaatgtgaatttaatcatactccaatttaaaaaggtgttaggctaaaattagtctaagtttcgggtcatattttcggttagttttcactctttgtttctagttttagggctatattacgcttgattctttggtttcaggtcctcgggcatttaaagaaagtatgttcaagaattgaggaaaagttgtgaaagaatcgagaagaaaatccaagattggtgtcgctgcctgttccagtcgcgacggggaatttgccagtcgcgacgggaactggcagagacatctccaaggagtcgaagtgtaacccagtcgcgactgggattttgccagtcgcgacgggaagtggcagagagaatttcgagacaaatttgtttaaccccgtcgcgacgggggctttgccagtcgcgacggggacccagagacgggatttttgggcagtttcgtaa

SEQ ID NO: 401057 - DNA, 793 bp, Cannabis indica
tcttctttatgtctccaaagcatccaaatgtaacaaaagtatttatcagaagtgccaagaaagatgaccattagtataataataatcaaaagaattaattattctaatcaaagtagaagtgtttttttatgggaaacttataaaaatattgaaatttgggtaaatttttataaaaatatagtcacacaatttttttttttaaaaaatattgtatttttataaaacaatagtggagcacaaaacagaacaactaaaattaatagtggaacaattaaaaaacaaccgtagaacaatagtgaaaacttaacacagtacacaatataaaacttacacagtatttttgaaaaaaaaattcgccctacagtaaaaaataataaaaaaaaaaattcaatatgtggtgtaaataattttttttttattttcttttaatgaaatgtcaaaatggaaccaagaccaaatacaaataaaaaatactaaagtgaaaatataaatgtcacataattagatgattcaacttaagactaatttggaccttgtgttttgcaaaaattatcaattggatctcctgttttgttaaatgacaaaatgaaccctctgttttgttgaatagtaaaattaggaccctgagctcaatttccaacaattttaatatttaatataatgaactttaagacaatttctaacacgaacagatatataaaatgtaactagttttgtcataacatctctagatcagattattattaagttttattttgacaaaaaatcaatttagggtcctatttgtataatt

SEQ ID NO: 401058 - DNA, 612 bp, Cannabis indica
tagtttccgtttaccgaaattgaactcccgacttagtatatatgcttggccctctttctgacagaagctgacatgtgtaccaacgagaaagaatatgaatcagctcgataatcatattattaaatataattttaataactcgtttaagaaattatggttgatataaatattcaaactcgctgccacataagtagatgcgagataaaaataacaactattaacaagtaagcttgagaagacaataagtccatcttaaaataaaaagagtacataataaaagatgctcaaagatgagagaaccaaaagtgcttgcagttcattgacccacatacttagaaataagagcttgcacctcattgacccgaacaagagcttggaactaattgacccacatattagaatatggagaaaataactacattcatccatctcgctctttatacgttgaattaaacacttcgctaataccatcatggtaaaagaggattgcgaggagcattatatctatatttagcatttttcctacaaagaccgtaaagaaggacaactcatactcaacaaggaacaactagcatagtcagcataaccatttaaggataatgacaaaagagc

SEQ ID NO: 401059 - DNA, 772 bp, Cannabis indica
aagagctctaacaatttttctgataaggacaaaattatcaagcttttcatcaagaacaaaatattcattagctatatcagaaaacctttcataaaactcagtcaggatttcattttcacacattctaagctaattaaatttggtttgaagcataataaacctataacgcttaacatctgccaagcatccttagcagattcacaagaagatataagcttaatataaccttcgcctattacattaaatataacatgtaaagttttgctattgtaagtaaaaagtttatcatcttcaatgaaccattcaagttcaaattttattttagaattaccttcggaatctgtcacaataggaagcgaccatcctgatagaaccatcctccaagctttctcattttaagacttgatgaaagccctcattctaactaggggtgtgcagaaagtcatccaattcaattacaaccgaccaatccaatcccaaccgatccaatagaattggatatccaatcataattggatcagatcggatgtaaattttgaaaatccaatcggatcggatcagttgttggattggacatccgatttaatggataaccgaccaaaccgatccaattatcatccaatagtcatccaattatatttatatatttttaaaatatatttataattttatttatttaaaaatatatattagttgatttaatatatatatttaacacatgagattaaagaaaaaaaccttagatttaaaatattaattctcatcttcctaa

SEQ ID NO: 401060 - DNA, 996 bp, Cannabis indica
agtttagtgagtgatcagatttattaaaatatttaagatttattttcaggtagctgacaatcacagacatgtgagttttagaacaccttaaacaattatcacacacttttattctttctccaataatagtatctatggcttaggcttactatatataaatatataaatttatttacttaccatttttcttacatattttgcttagttcaagtgaatttatctttgattctatgatgaagatggatattgaaataaaggatctaatctctcgttccattcttgtaagttgtaagggttgaaggtgaggaatagaatgataaaatttgatatgtatatatatgtataaaaaaaattatatatatacttattttttattattatttatcaaattatttttccactaatttttaaatagaataatcatccatattaataaaaatactacatttagtgataaatgtttaatcatgcatattaatagttgtcactaatctaattttaatcacaataaatattgtagctaaaaatatatttagtgataatacattgtaatttttataactaaaaattttagccgcatatatatattttaattagtaataagataagaaaaaatatcgacaacgtaatacggaggagagaaaccctacagcgagtcgacgagtcgaggggtgagaagttgagaaaattctgccataaccgtataggcgagtcgagtctaggagcgtcgccgacgagtcgtcgtcctttcagtccacgtcgaccggagtcgccgatcaacggcggccaccgccttgtcttttgtcttccgttcggtttcattactgcaagtcttgtcttttgtgacatggtgtgattgttttatggtctgagattggttcttgtttattgttttggtttgagagactaagtttctagtttgacatgttttatggttgtctggtttgagatggttgaaggcaggtttaggtggggttgtgtggctcgcgactgcca

SEQ ID NO: 401061 - DNA, 664 bp, Cannabis indica
taaagtgagtggtttattggcttgggattattacccaagtaaattgttaatatgtaattgttatgccatgatgtatatatatttatattaaaattaagggttatgtgttcaaggcataatcgggttggactcggtagttagaaccgagatgaaccattctaaggccttattataaatagacgtgtgagcgtaacacgtaggtctatgccatatagacataaataggcatgtgagtgtaacacgcgggtctgtgtcatacagacaaatatgtggcattaatatttatgtgatgtgttaattattattattgataattatactgttttgttgggcttggcttaggggtgctctactgtacaagaaagggtaatttgtttttgatcagccatgagtgcgggagctgggcgatgtatgtacatgttcgggccacactagaccaagcaggttgggtctaccagtgttgaaatttttggaaatctattttgctgcttaggtcggctaaggggaaaagacttgtaatattttgtgaattatttttgggattccgaagcatgtaaattttggttgtaaatttaaaattgttacaagttcattttcattctgttttgtttaaagtttaatttcttgcgctaatttaattagtaatcccgtttaggggattagg

SEQ ID NO: 401062 - DNA, 436 bp, Cannabis indica
cgcctaagggatctggaccagtctggttatttgggtgaactggaatgctacgtccctgcctcaaatcaccaagcctcaaacccgaagaaggggatgtgtgcctggtcgggtgctgatattaaataaggggaaatgctgcctttgcaactgtacttcaggaaggtggcagatttctttcgcctctattcgacccagttttctcccaagggcattaagtatttgtctgccctgttcgtcctctacgccatccagaagtggggcgtgccttctccgcacgaggtcagttggttttttaacctgaagtctaccttcaagcaaggcatgtcggggtacttctacttctctcagcttgacttcaagtgattgacgggcaccgtggacaaggccgtgagcaaaattgggaattttgttgacgagcatgttgggttttatgccc

SEQ ID NO: 401063 - DNA, 1334 bp, Cannabis indica
tagcttctgcttcgttgcactctgttatgaggtcagctagcgcttgtccttttatagaagtgtggggtatgtagtgtatgtcgaactggcttaactcgatcgcccacttgaagagtgttccggacatttgcggcttttgtaggacttaccgaagtggatggtttgttaataccttgatggggtgagcctgaaagtagggtctcagctttcttgatgccattagaagatagaaaactaacttctcaatcaatgggtaccgtatctcagcccctatcatacgcttgctgacataatacacaagatgttggactttttcttcttcctagactaaggctgcgctgatagccttctcggagatggccaagtacagtaacaagtcctctccgtaaattggctttgataaaaatggaggtatgaccatatgttcttttagttttttgaatgcctcctcgtattcttcggtccactcaaatttctggcacttctttaaaatgttaaagaagggaatgcacttgtttattgattgggaaataaatcggctcagggtagcaacttttccggtcaagctttgcacatctttgtgcttcttgggagaaggcatgttcagtaaagcttgaattttttccgggtttgcctctattactctttggctgacaataaatcccaaaaatttccctgatttgaccctgaaagtgcacttcttcggattaagtttcattccatacctctggaccacttcgaagcattctgcgaggtcatccgcatgacatccgcaagcttttgatttgaccaacatgtcgtccacgtaaacttccatattttgtcccagaaggcctttgaacatctggttaaccattctctgatacgttgcactagcattttttagccagaagggcatgactaaatagcagttatacccccttatcggtcctgaagctagtgcattcttaatccgcaatgtgcatcttaatctggttatagccggtgtaggcatccatgaaggacaatagcttgaactcggaggtggcgtctaccatctcgtcaattcgtggtaaggggaagtagtgttttgggcatgccttgttgagatcaatgaactctatgcacacccgccaggtcccatttggcttgggcaccagtactggattggctagccactctgggtaatacacatctcggatcaggccatgggccagtagcttgtccacctccttctccagggcctctgcctttattagatcaaggggacgccacttctactaaactggcggcatgttaggattgacgttcaagacatgggtaatcacatgcggacttatgccggtcatatctcc

SEQ ID NO: 401064 - DNA, 956 bp, Cannabis indica
tttttttttttttttttaaaaaaaataaaagaaaagtgaaattatcgagattcttctcaccctcactccatttcactttgtatacaaatttgagaatttgatttagatttaagttccaaataacttaaacagttcttagttttcaagtgacatgaccaccctactcaatctaactttaccttttctctagttcaaattgtctaagaatgaatttaacttaaatacatataaattttaatttattcgtttttttttatgaatcaattagttgcattgctcataaaactcttttgtacaaacaaaatagcatcctcatagaaaaaaggacctatatgaaacgtatataattataccgttatttacatccatgctacttactatatcttataaattggaaaaccaatcttgatccttcctcttgatttctttcgaccaaagcattaaaacacgggttcttactatcttttttgtttgctgaataatctggtcctaaaacttgacagctttgctcttcttatccctcgcaccagctgctgcattgaattgcctcgtgagccccattgcagccattgttttacttccagcaaacattgtgttgataccgagcacatgaaaaataaatgctcaatctttgcttgctgctgattgcacaaaacacaagtatcttcctgcactatgttatgagctttcaaccttgcttttgttctcaatcgattgtgcattgctaaccagaaaatatagcaatgtttgggaacatttagccttccccaaacctctatatcccaggtgatctttggctgatctgggcaaagcaacttatacccttcaacaatggtatatcgggttccaacgaaccgctgaatatccatcttgcttttgatttggtactgtgcattcaccacctgtttccaataccagctaccattttgtgggaacttatattcccaccaatcccc

SEQ ID NO: 401065 - DNA, 604 bp, Cannabis indica
tttgggaagtttgacctccaaggcgttgtatttggattgggtggacatggccttggctttgagctcgaactacccttcttgagttgtttttcaacattgattgccacgtgcaccaaatcttccaattgcacataatggtgtagttcaacggtattagcaatctctcgatttaatccattcaaaaaccttgccattgttgcctcccgatcctcttccacattggctctaatcatagccatctccatctccttgtaatactcataacactcttgtagccttgacgaagaccttgcaacttgaggtacaagtctcgataatagtgagatggtacaaaacgtcgcctcattaccctcttcatagcctcccaagagtcaatatctcgttctccattcctcctcctgttgatgcacaactgatcccaccaaacaatagcatagtcagtaaattcaatggcagcaagttttaccttttcgtttcagaatagttgtgacaatcaaacacaattccatcttcttctcccactccaagtatgcttcaggatcactcttcccttggaatgagagaattttcatctttatatttcccaaataattatctacctggt

SEQ ID NO: 401066 - DNA, 513 bp, Cannabis indica
tcggggatcagattacagggatacgacatacacccgatcccacaatcagtgtatccagcatcaatcccaccatctttgtactcagtattgatcccacgatctttctgtttatacacattgtaacgagaggggaaagaattcctctccaagcttactagccctatagatagtgatgcatgttcactgggcagagggtggcaaacagattagttgagactataccctaaagatattatcgaagaattatatatttagagatactgttgtaagatctataagaaaaggaacctttctccttgttcttaagtcaatacaagtaacgaggattaggctattaccgaactgctcggggctgaacctctataaaatttatgtgtctttatattcctttattatatattgattgctacaaatcacttatcgcttactgaatttgactcgttgtcgtttgctaaaagcgaggtcaaccgtatgtttttagcattttcgcttgtcattcctacttgctatgtg

SEQ ID NO: 401067 - DNA, 736 bp, Cannabis indica
cccaggcttatggccgcgacggcagtcattctgccgcggcgagatgtacctcgtaaattgcttacttttgtttaggccttatggccgcggctagagtgtagctcgccacgacgagatgtcccttggaaaatcagcttctgtattccaccttatggccgtagctagagtgtagctcgcgcggccactgggcagtaccccaaaagatttttttttctgaacagtacaaaatattaaagaaaaccataattcggtttaccagttcattaaacataaaaccaaaagaaaaaaaatagcaataacaactaaaagaaacaaaatacgaaagttcaactaaaacaccaagaaaatttggggtgcctcctaatagcgctatctttttcgtcgtacagctggacgttgactgagttcttcagagaggcgccagaatcatggcggacttggcttggtcaaattgacctcccaattagagctttaaccgcttcccgttaactttaaaagtctcaaggctctcacctttcagttctactgctccataaggaaatgctttgaccactgtaaatggtcttgaccaccttgactttagcttaccaggaaacaatttcaaccttgaattggtcacgccaattcttggttctctccttgtagatcttatcattctcgtaagcctcatttcgaaactcctcaaattcattcagttgtagcaatcttttctctcctgcagctttcaagtccatgt

SEQ ID NO: 401068 - DNA, 640 bp, Cannabis indica
aaccttgctgctttggctttgatatttcaagattgattcctatcttgcaggagtgtgccatcagccagatactaacttatgggtgtcatccagctaatgttctctaacacatccttgacttcttcttgaggcttcgaaactgctgaccattgcatgtagatgactggaactgtgactccactgtttgtttgaattgttgactctaggttcgcaagtgcatctgcatgactattgtcgatcattggtacttgattaattgatatttcagtaaagctcgacagtctttctttaacagcttggaggtacgtcaccatctttgagtccttggcctggtatgtgccattgaattggttgactatgagttgagaatctgacgtgatctcaagagctttgatattcatctctttggcaaggttgagcccaacatggagcgcttcatactcagtttaattatttgttgccttgaagtcacacttgattgctcgttgaatgacatctccttggggtgaggtgagaacaatgcctaagccacatcctctactgttgcttgagccatctactgataacctccagttagagtcagattgctctttcaagcacaataactctttttccccttgtacctgttggaaattatttt

SEQ ID NO: 401069 - DNA, 672 bp, Cannabis indica
tatttggagttcaatttaacattatcaaaaattaatatttattgtaatttcaaagtaaaaaaaaaaagaaaaatggtataatttattaattctactaatattaattaaagaattcacttaatatacttttaaattaaaattagtctaaatacaaataagtacaactataatacaatatactattattatattttgttatatttatgggacctacttaatacatataagtaaaactgtatataatgataaataaatatcaactcttaacctttttttttttcataaaacatcatgtatagcatattttttatatataattatccatatttattacataagatttaaaatttaagggggcccacggccactgttaggccatatgtgactccgcccctcataacaaggtatgttgctacaaacatcgattgtaactcaatctcctcatcagtgtctgtcattatttttaatttaaaataaacctataaatattaaaatatatattgttgggttttgtgccctaaataaaacccatcacaatctgattagttatcaatacaagaaatttgaagtgatttacgtttgcatgaattttacatgcttatagtttaatatgttttaatgtttatacacaaaatctgttaagtccagatcatatgtgttggaaattatttt

SEQ ID NO: 401070 - DNA, 586 bp, Cannabis indica
cccaccaccaatggcagcagcctcctcctccgactttccccgccgccaattatcagttttctgctcccgcggtccagttccatagtgctcctcagaatcgggataatatgattgagaaggttggttacgctgttgagaaggctcgcaaagattttattgctgctggtaaaagcgtatcgtcgtggcaggttgctcaggctgcgatttcggctcttaagattgattcgtggttgtctttgggatttaggatgcaggaagttccgtcgcttaataatattattctcgttgaaggaaaggtaatgttgaaatttgatggcttttgttttcaataatcatttcttgtattttgagattgcataggtctggtttgatcattaaaatgttataaaaacgtttttttttaattaaagttagaattttgcttaattgaagatagtttgatcttaatttgataaggaagttaattgtgctagtgattatttgaactatattttgtatcagtgtaatgataatagatagtttcttgatcaaatttgagtttcagttttttttttggctaaattgagtttcaggttactaagatttt

SEQ ID NO: 401071 - DNA, 1507 bp, Cannabis indica
tcaagaagaagaaaaccctcccggccgagcagaggcccattgaacatagtatccggattagggaacctggtgaacttgctcgcccatcaactcctgtagagggaaaaggaaaagccatcctagaggagtaagaagactcttcggatgatgatgccccatctgtgcttgttcgggcagatgctctggccagcgtgcagagtacttcatcttgcatttccttttcttaattttcatgccttcatatattttatattttgttttgactgtattgtttttattccgtgcagaaatgtctcagaagatgatcgaggcgctgaagaagcgagtggggggatcttgctcgggcttatcccctccagccaagaagtctaagggcggtgagactccgtccaaagagaaggcacaaactaaagaggtcattgatctctgtgaggaaaaacctatcgtggatcctcatgccttgaaagttactaagtccaagggttctcgaggagggagtttagatggacctgagaaggcgaaaggtggatctgaactagtcagaagcggacctgaacaagttaaggccccccccacctttggtattgcacacggagaccaaaagaggcagagacatgctcaaccactatgtaagccggtcggtcccagaggtaaacgaacagttggctggggcacatagtgacttgtctctcgagttggtcatgggaggagtcttgaaagagctttcgagggtaagtcttttctaacatttcttcttttatttttgtttgcttagtttggattttaatgccttttttcgcacagagtggtttgaagatgggttacgcctatttgttaggcttttttaggctatattttggatcgattttatgttcgtttttcactgtgttaggacagaattacgcttgttttctatgttttcaggttctttagaataatagaggtctcaggatgcaaaaatccagtaaaagacgagctgagccaaaaaaaacatcatttttgaggaagtatgcatatctgcccgcggctagatacagcttggccgcggctagatacagcttggccgcggctagatcatgaagcagatgcaagatttttgaagctacagttgccgcgccgagatataccctcgccacggccatataagagttacagaatcggatttttgagcatcgatctggccgcggcgagaccatacttggccgcggggagatcccgtacgacccaggggtatttttgtccgacgaaccgtaataattagatataaatagaaaactgcgattggaagtcaggggaagcgatttggagacccaaaacacagcaaagagcggcaggaagagtagagtgattcaaagtgaagatccaaaattcatcaaccaatagtttctttctttattcctctttaatttatatatgttgaacattgtcataggaatcgttatggatttatttctgaacgaaatttccatttagggaggatgatgattgttgtttaatgttttgccta

SEQ ID NO: 401072 - DNA, 598 bp, Cannabis indica
attaattactaaaatatatacaaataaattttaaaagtaaccaaaatgtatctcaaattatataaaataaaaatatatttttttttatataaaggtaattaattagttttttattaacaatattagtaaaaaaaaatacttttaaaaatataaaagaataaaaaaaaaacgaaaaacatcaaaaaaaaaaaatatatatatatatatatataaaaaatttaactcatatgacaagtcagtaataacaataatgttattgttataaattagatgaaaaaaatatatattattatcaactttcctttaaaaatttatgcattaaaattttatgcagcaaatttttctaattgtaacttttacaaatatataaaattttgccacaaagatcataaagtttcgaaaaatgccaagtttttctagaaaaatatagggaaatttatataaaaaaaatagtggaattttggttaatttttacaaaatactgtcacgcggaaaagttttaaaaatactgtgtttttataaaataccaataaaacacaaaacagaacaactcaaaataacagtagaacaactaaaaaataccagtagaatactagtg

SEQ ID NO: 401073 - DNA, 549 bp, Cannabis indica
ctaccatagggataacaagtagttactatgttatagtaacctattacctcaaacttaaatttgtacttaatttaatatcttagttgcataggaaaaagttacctattttataggaaccagttacctatattataataacttattacctcataatttactcttatatatcttatagttacataactaatcaactgattttataacataatgaataaaaataaataacacaaaataactcaaactaactataattgatatataactagttctgtaacataatgaataaaagcaaataacacaaaataactcaaactagttataattaaaatagaaccggttcaataacagtgttataatgaatgaaaataaataacacaaataattaactcaaaccggttataattaaaatagaacaagttatataacataattaatgagtatttttgggtagatgtggtatgagtgtaattatttagtgggttagagcatgttgaatggatgtttttgtttgagttattttatttaactgatttttgtgtgtgagttttt

SEQ ID NO: 401074 - DNA, 732 bp, Cannabis indica
tctcatgtcactataagaaaaaatgcttttgtcggtgagttttctcgctgaaaaaaagtttgcatatgtcgtcggcattgtttgcatgcgagcttttaccccggcaaagggtgccagcaataattcgttagcataaggtgttttgcttgcaatacggccataccttgctagcaaaattatttacattgacaaattaattgcccagcataagttcccccaccggcaatgagctgtcagctgaggggtccctgacgagatttcgccaaagaaatattgtgtcgacaaaacttttgtgccaattcgcgccaaatttttacttaccagcaaaagttttttcggctcatcgtacttcaccggcaaaactcctcaataaaaaattattttagttttggtggcgatatataattcgctggcaaaatattttataaaaaaacatattttctatttataataaaattaaaattaaattttgacttaaataaaaattcttaagataataataaataaatataatccaaaatatattataaaactaacatttatattataatttacaaaactatataaattttttaaaactaaataaaagtatcgttagtttataaaaacaaatataatttcactactacaaaaacaccctttagaggcggtttttaagccctttcagcgtcggtttttgcgaaattcgccactgacgctgatcagggcgacgctaaagggtttatatgaacc

SEQ ID NO: 401075 - DNA, 663 bp, Cannabis indica
tctcagagacaagaaatcagaaactccaaagaaaccaaaccgattgatagaaagccaaacaaacagaaaaaaccaatcaaaatactcaaacatcaaacacatgtcaatagacaagacttcatcactattagtagaagaagttaatacttcataaaactcaattttacttctcctatttcaaactcctaatcctctttctttctctcttctctcttaatttttgtgtatgcttttcttttgatattatattacaaattgttaatttttatttagaaaaaaataaaacattaaaactaatcgttaaactaaatatattctgtttcataatgataattaattttttttttttatcacatgcatgcttataaatttatatttttgaaaaaaataaataaactaacagatatataaaattaaaaaaaattataacataaattttgatatttttgtaattctaataaatagtattataccattgttatggttataattataatattaacaatttacttttcccacatgatgaatgcatgcatgatgagattaaccatatcatctccataattaaatctatatgttaggttgatcatcaattttgaaatttatatattaaagatttctctaatcactttatatcatctatatttagtatatatatataca

SEQ ID NO: 401076 - DNA, 603 bp, Cannabis indica
tttcaaataaggtctttttataacattaattaaataaaatgaaatagataaaatatctgaccttaaatttaaaaataagataaaataataaaaaaaatttagaaaaaaatggtaaccaattaagcaaaatatcagattttatccattttcaggtttaaaatctactaatatctaaaattaaataaaacaaaattaattagttttattctgataattagatttgagacttgacaaataaaaatttaaatacaaaattacataaaaaattcaaaattaattccatgaaaaatttaaaaaaaaacgaaaaaaaaaattacatttggtgcggatggtatgcattggataccattcgcgctcgcatgcatagtggctaaccgaggttttccccgcaggggaggctgcaagcagcattcccgtgcacggatggggcttcagacacggcaatgagcgtgtttctttggacgaaatgtgtccaaacacgcgtgctgatcgagtaaaactccgttctgcgcgcgcacgtggttgaatcccaccctgatatttttttatttttcaaaaaatcataactaattcaaatactattgaaatcaagttctgtaaaaa

SEQ ID NO: 401077 - DNA, 873 bp, Cannabis indica
gattcatggatctcctgatcgtgaccttaagaactgttaactaatatttgcatgtttgatagctattctaggtgattagaggtggaccatcctatggtcattaagataagaaagtgtttgttttaacaaatactactttctaagaaaatgactaagtttgaaaataaagtagtaaagtagaggagatatttttatcttgattccaaattgttctatcatcttattctgtataaggtggtctcactgcctctgttgtcttgacacaaccgatgaggtcgctaccacttatgttcttagacaaaaagttacggtaccttgtcgtagtgggagagtttcaagaaactcaccctgttatgacttggaagacacttgtgattaaaaattcattgttattttaaacaagtaatggattgtcaaaataaggaactaagaagcaaagccaagagaactatagttaaaaccattcacatggagtaacttataagttttctattacaaggacaggaaaggaaattttgttaataagtctattcaatggacttaacaaaacttcctgttcctagtgttataggtttaattttatctaaacctaaggcttgtggtatacttggtgatttacttactctagttcaagaaacttactttagtaagatgctgaagcatttttttttctaatggaaatctataaaagcttctcgacttctaaatttagattttatttatctaagggacagattcaactatttcaaaaaagataaaggccaatgaaagaatttcttaagatcaacaatgagtggtctcagatatgcacatatgcttttagtatgcgttagactagacacctgttgttgagtgggagtaatgagtaggtat

SEQ ID NO: 401078 - DNA, 768 bp, Cannabis indica
aatattatatatataactaaaaaaacacagacacacatgcatgcatattatatttatatatataatgaatgaattaaattctaaagtgaggaagagcagaattgccatcgagtcccttggacctgtaataagtaagataatcaaagatagtagtttgtgtatacttaggaggttcttcctcagatagaaactctttaatgggtccatagggtttgtttctgtgtgtagcacttggatacaagaaacatgctgctgaaaccctagctccattcttcatcgccaccactctgtgctccacacttttcaatttatcgttcgttattaactacatatatatacaattatcaatcaattaattaatctcatgatgataacaaaaaaatgtgtaagagtagtagtaatgttatgttgcacagtaatatataccaccaaaaattgggagtgttatatgataatatatatagagaaaaatataaatttgtaaaaattgttaattatttgtaaaatttcaactggtaataatgatgtgacgcaattaccttatgaatagagctttgtggggtcattttctccctcaatttttcataaattaaatttttgtatacaaatttttgaatattttaatttggccctcataaaaattatatttttcatttatattcttacatatttttttaggggagttatatatctcatatactaatttttaattttttttttaatttacggttccggtagtttgctccagtagtttctatgtgaattttg

SEQ ID NO: 401079 - DNA, 832 bp, Cannabis indica
ccccaagtggtcaaagtgagaaccgaatatcctgaagttaacgtcaaaatgccatcacaatcaagttatatgatcatccaaaagcaaagttcacatttctaaacctagattctctagagttttcctagaataagtgcaagatgaattttctgcaaaagaaacttagaaaattagagattcaaacattaaaggagaaaaagatgagaaactcactcaatgttcgaagctttgacgttgctcagatgacggtgatcgacactttctagaaattcttcgaaggatttgagaaagaatgatgttcttgcgctgaactcactaaacaagaaaaatgctaaaagtggtttattaggactttttgccctatttataagcagattagtgacgggtgcaattacttttaatttcaaacgcctcgatttcctcccaaaagtaaatattgggaaatcaaaagtaattaagtacataaaaaagggtaaccgtcaaagcatgcgaattgttggagtgtctcaatgtacgaattaattagagctttaattagccgaatactgaagggactcttggtcagaatcacatcaaatcaccaataggcacatcgaacacgtgccacccattcagacccgaacataagctgagtgaagtctactcgcgactttggaagtcccatgcagacttgggggaaaaattttctcccatttttttttgcactatgacgtggcagcacatactggtgacacgtggctgttacttcctacatctggttaaagagatatttcgaatagagcttagtatacatctgtacggacaaagtctgcctgaccgagcagggcaaggg

SEQ ID NO: 401080 - DNA, 605 bp, Cannabis indica
attacccgccccaagcgggaagctgaaaaagcgaaggaagaagcaaagacaacaaagaaggaagctgaaaaagccaaaagaggaggccgagaaggcactcaatgtccaagctgatgagtttgaggagaggcttgctgagaaacatttcgagaaagaaatgaacgctgcgaaaaagtttgtttttgcactgtatactgggcttggctttggaaacctaacatggataccagattcttggaggagaaggatgaggaaactttagctttctacgagaagaccaagatggaagaagaatacgacgaggttgaggaagaagaagaaattctatccaagtctcccagcatgtagacttggtttatttatctcccttttcttttcttttaggaaattgcaatttggccgagacgaatgttttgcccctagtggaactttgttttttgtaaagacatatttgaaaggttggacggccaactttccttttttaatgcctcgcacttttaagtatgaacttcattatgtgaatgtttacttccattttattcacaatataaactatcacaggcataaagtttattaggggtttccattgattgtcctttcttccg

SEQ ID NO: 401081 - DNA, 897 bp, Cannabis indica
tagtatttaccttatatgtttgtgcttatttttagttttatttttaattttaccaccaagaggagaaggttgaaaaatattagaatatgaaaatattattggtgcttattagtaatttgcaaagaatgtgaaagtctataaatatatagttgtgtagctattattagatatgaaatgagataatagaacttttttcaattagaagattaatgtacattttttaattaataacatacattattataacacaactatgttttacttactaaatatactgacacatattttatttttataaaacaaatcgttcaaataattatactattttaattattaattaaaataaaaaactaaaatattaaataaaactaacactacgtggcttggcacgtaacaatcacctaatatatatatatatatatattttaatagttaaaagtgattctagtgtggttatcaacacttttaatagtgtttgtactaaaggggagattttttctaagaatgtaagaatttggtatagtggatatctcttccataactagaaatattttatgtaataatcgtgaggtctaattttatcttatcaataaatgttttttttttaaaatatatttattttatacagaattaatcttgttttctacttgttttaggtttaaatagtaaaatttataatatgaattgaagatgagaataaacatgttaaatgagatgaaaatgatgaattatcatgtaattcggagttataagatataatggtgtgaaaattattgggaaacttacaaaaatactggaatttgggttaacttttacaaaaatactgtcacacggaaaagttttcaaaaatactttgtttttataaaacatcagtaaaacacaaagcataacaactca

SEQ ID NO: 401082 - DNA, 653 bp, Cannabis indica
ttttattatcttattaaaacaatttacttaaattttaatagttttattttgttttgttttaattaatattattacaatattttatactatatttttatcacgtgtaaataacagtttttttaagaacgtgtgaacaatagtctttaaggaaaaaaattcgagaaaatataaaaaaaactaaattttatcaaactcttttaatttgttatatcaataaggctaataaggattttcgtctctcgaattttgatatgtccaaaccctgtcctctaaattttgaagacggttaaattttctccttaagttattgagattttggatttaaggacttttgtctaattttagtaagaaaaatctaatatggatgaaagtttaggagcatgatttgacacatgtcaaagtttaaggggcataatttggtagatatccaaatttggggagcatggtttagtacacgaacaatcactgaattagtaaaattagaaaataatccttaaattcaacaatctcaatagttcagaagtaatttttaacggctaaaaaaattcaaaggtataatttattacatgtcaaagttcaggggcaaaaatcttaattagcggaggtgcacaattgatttaggaataattacataaggtaccattttttgtaaa

SEQ ID NO: 401083 - DNA, 1197 bp, Cannabis indica
cctggtcgctgtttacttcgatcgaatctcccagatgcaaggggagttgacgtgaggaagagaattgtgcatggaattccaaggagaaggttttccatgaactaaacttcctaggagccaacttgaaataccattgatgtgcggcttccgacaaagtggcggggaagattctgcaacttatctcccctcgcactccttgtaaatccatttgcatctcaaaatacttgagatgggagagaggatcttctctcccagtgtacatcttccacgttggcattttgaacttgtggggcagttgcaggagattgatctctggtgagaagggagttccgcacgcacggtctaactcaagatcattgatacgctgtccggccatgccatgaaacatattcttcaattcatcaagctgcgcctgtacggctgggctgactagattggcgttctggtcgggttggattacgtcagcgtctttctgagcggggattttaatatgggctccaggctgcacgatcgttgtagtattttgctcgtctatcccccttcttctgtttagatcgtcccttaggtcatgggtcgttcccagcccatcgaacacagaggagcctggttgcctcaacgattgatggcttggttgacaggcataatggctccattattctgagtggattcgtcgggtatgactcctcctaatgaattcccgaataaggtctgcccgcctacgtcttggcccacgagtggaactcatgaccggggattggacggctgactgttggttgtctaggaggcattcaccgttgggtcgtcctccatttctcccaagggaatgacgctcggcgtttgttggcctacagtttggtaggctctccgtatcagcacagtagcttgccgactacgatcttcgatctctgcatggtaagcccttaacgcctccatctctgtccctccattcggcaaacatacgcctctgttcgacaaacgtgaggtttactgcggcacgcagttcctcctgatcatgatgtagagtattgctgtgaccctacatgtaacaccctaactaacataggcgtattacgtgatttttaaacatgatgtgcagctcgttgctaatcaacgaggtttatagaaaacgtgattaattaaaatttttgctttttaattaaacttgtaaaatatttatataaaagactcgggatcccg

SEQ ID NO: 401084 - DNA, 558 bp, Cannabis indica
ctcacatacccatctaaccctaatgggtcatgtagcttattgggttaataaagattaatagatggtggactataactcaatggaccaattatagtcatatgggtgctttcatgtgcctctaaataattaatagttgttaaccatcccatcaggggcggaggcacatataagcctagagtggccttggccccccacccaaaatatgttatatattcttttcatatcttttttttttatatataagtgagtcttttttattatttgtttgtgacatggcccctctaatcaaactaaaatcgaacagtaaaaaaaaatgtcagagaataagaaaaataaatctatatatacacattgtactcatttagaatggtcaattaaagtgatcagttttcatttttcaatttgtaaattatttattactttccatttattattagattttaataagtaatataatataaatagttagcaaaaccacaacctacaacataatttattaacaaaaatataaaaattaaaaagttaaaagatcaacacaactgccttataaagaattag

SEQ ID NO: 401085 - DNA, 789 bp, Cannabis indica
cttggcatgaacgtggtatagtggagaagaaagctaaagcctaaaaagcaggcaggctccatttaaaggggagatggatattcaggataagggagatggatattcaggataagattatctccggagctatggtacttgtaaatctttcaggagaaaaggttacagatacagtgaggtgatttccatttatagctttcaatctgagctgtgattagaaactgtgtagattgtaattttatttatttattttttttttttgatagaacagattgtaatttaaaacacagtacattatatattaagctataccatcagcctttttttattttttttttcttgttcttcatttatttttttcttgaaagccactacaagaacttgcaatacaccatccccattttgtgtcaattaaaattctacacattctataagcgtgagaagggttgcctccatattgacaccaagtactgatgaatgtaccactgtccaagaaaagatgctacatattattcacatactaaatttttatttattattatttaaaaagaaaaatcacaagtttgtgcaaataattaggttcatagtttttactccaattttgacataagtcgtgaagtaagggtagtgtaatttttcttcagtaaaaaatttgaaaaacattttggatcccaagaatcagttttaaatcaatagcttataagtaacttttcgttacattatgcacttttttacaagacatatgggtctttgtaggaatttcgtaaactattttaattttaaaaatagctt

SEQ ID NO: 401086 - DNA, 767 bp, Cannabis indica
aagaacaatagcatttaatgctttcaatcttcttcttcattttaagttcactaaggtaaaaattgtgctatatttagcttaaaaaaagattttgtgatatatttatattaatttttagcattgtgtttcaataataaattacaaatttttgatgaaatatttaatatttttattaaaagtattaaaaaaataataatttcatcattaattctattattattttattatgtaagatagtaaaaaaatataaataattaacagctaattaggagagttcataaaaattaaaaaattgaaattgaccatcaaactgaccagaccgtaattgaatttttagtttcacgtcatcaccaaatttggtagtcgatttcggttatgaactaaaaaactgccaaaactgttaaaaattaccataaaccattcaaaactgcctaaaaccgccaaaaaccatccaaaaccgtcaaacagattaaccactaaaaatcgccaaaaattatacgatcggttttacatagttactgttttacatagttactaaacggtaggttacagtttttgtaaaataaaaaccgtaaccgaccagtcagttataaatttgtaaaaactgaccgtaaaataatttcatcagttataatattaatatttgtgtttcttcttttatattaatttttgccaatatatttaggtcacacataacatctcaatattatttgggtaaataccattttggaccctgtgttttgcaaaagttacagattggaccctgt

SEQ ID NO: 401087 - DNA, 1298 bp, Cannabis indica
aaaaaagaaagaaaaaaaatcaaaagctgatgaagataacatttgttttagaacaagtaccacaagatctcacttagaataattattaataataatattttaattcatatagtcagatccagagtacttgctctcttaattatcacttccttctcaccatgatgatgatttttgctaggctttgatgaagagtttgatgatgatgagttcaaagataaagataataaactactatcatcaattacttcatcatgatcatcacttgatgaactaataacccttttcttcttattatgatcattaatttccacaatagcattattatgatcagtagtatttgtagtagtagtagttagccttagagacaaatctagatcattagaatctgatgaagctttccttttcattgaagaagtagaagtagtagtagtgctaattactaaatcagaatgtgtaacattattattactactagtaagaaaatttgtgagctcctttggtttgttcacttgaagatgagcaatggagttttggtcaattagggggcttaaagaagaggaatgatcatgatcaataatatctttgatgatgagtttgttattatgaactttatttctccaagatgatgagtgttgatgattattgatgatagaagaaatagtactactaatgttgtaattttttgaaggaataaaattgcaagcattattagtattattaatagctaagatgttcttcctttcagcctctgatgaagcataaaatccagctctagaatattgccttaagttgccaaaagaactagttgtacttatccatgaagggtcaccaaatccatatctagggggaatataaagaaactaatcaatatattaaatatatattgtaaatttaattgatgtttatcataattaatatttacctgaagcttgaactatggctaatttgtttgtatccttgaagcataggaagttggctgaaattgtaaaatatttctatctccacattccactaaatgcctatgatgatgatattgatcatgtgagccaataactgtgtcaaaaaacaaaatccatatataattaggatatatataaacctaattaaacccatttctttcatcaaattagaccttaatttaacttgtagtaaaaaagaaatccatgtaattatgtgtgtaccttggcctgcatcatcaatcttcttgcttctatcatctataatatgaccaatcaaaaacccaattacaggaaatcatatatatgaactataccaattaaaaaatttgtaaaaaaaaa

SEQ ID NO: 401088 - DNA, 714 bp, Cannabis indica
aaaatgataaccgtgatagaaacggtattctataagagactcccaagagaagttagacataacacatttgatcataattgaacccttgaagtggtcctatataggtacctataaatgatatacatatttgaaaatatgtaattgttatacaaaaatttggctgcacttcataagttgacatgtgtccaacagaaggaatacgaataaattctgaatgatataataatgttattatatcaataaatgtatattaaaataactcgttattattaaatgaaggtttgatgaataatattcaaaactcgttgactttatagacaaaagcgagacaagaataataactattgagctttgtttaatgagatatacgcatgcctcggaatatacaaacaaagaaaggatatttgtttactcaaacaaaataaatataacaacataactaccttgcattacacgtagcgagaggatcacctctcattgttaatgccaacaagagaatataacgagatggaatacttccatacacttaacattttttcttatcaagacagacaaggaagataactcgaattaagcaagatacaaccttccaagtcagcaataactgtttaaaggataaaagtaaagaatggttgggcagttattaaatattatcccacatgtgattaaatgaaacgtggggattatcctgttgggtgttatgccctaaataaa

SEQ ID NO: 401089 - DNA, 1236 bp, Cannabis indica
agggggttaatgccattactactcgaagtggtcaaagtacagtatcaccattacctaagaccactagtgtaccaatgcctgctccagatgctaatatgccacagaaccctccagtgaaggtgcccttccctcaggctttgaaatcttctaggaaggtactggaaaatcatggtgaaatcctagaaaatttaaaacaagtgaagatcaacctgcctctcttgcatgtgatcaaacaagtaccagcatatgccaaggtcatcaaggatttatgcaccatgaaaagaaaacaccatgtcaagaaaactgcattcttgacagaacaagtaagtgcggtgattgaacaaaagataccgatcaaatacaaagatccaggttgtcctacaatcgcttgccaaattgggacacaaggatttggtcaagctctcctagacttaggcgcaagtgttaatctcatgccttattcaatttacttgcaactaggcttaggagaaatcaagcccacatctgtggtgctacaattggctgaccgctcaattaaaaagccacgaggaatagttgaagatgtcttgattaaagttggaaaattctattaccccgctgactttttgattttggacactcagtctgaggttaatactgagtcaaaaattcccatcattctcggtaggcctttccttgcaacagccaatgctctcattaactgtaggaatggtctcatgaaattatcttttgggaatatgactatggaggtcaacatttttcatgttgcgaaacaaccaccagacgaggaggaagattgctatcatactgacgtgatagacacaattgttgaggaggaagttcttattcatgatgattctgattctttaaatgatctcctccatgactttgatactgaaaatatgctttatccacctgaggaagccaatgtttcttctattcttgagatgtcccaagatgaagcatcaccgtcgcaatatgagaatttgcgattccagacccgatctatgaaacgcttcttcgggtccatgtgcgatattgacaaattttggtaagagggtaggcttacctgaggagatcacctttgtgactctggcctacccggaatgatcaggttgtttctatttctgtttatgtttatattttattcgctatttatttcctttgttatcatttttttttgttttttagaggatcaatatcgctgctatccatggttgcttgctctccaggtgt

SEQ ID NO: 401090 - DNA, 701 bp, Cannabis indica
aatcagtaggcagatcacaagttttggacaacctttggtaggcgtgtgagggatgaagtgagaagagagaaggagagcccttagggccgtgtagcagagagaggaagagagactagggttttgactgagaagaatttggaagcttagtgatctagaggcaacttaagtttctaagctagggttaaggcctctatatatgagcccaaaaatctatattacaggtttaaatcctagatatttacataggttgttggataaatataaaagactaaagagcccttaaatctagatattattaaaccattctcttgggcttttagggcccacttcacagcccatatctgttgtccacgtgcagagctgtccaacaaagcttgtagttcactccttggctggccaggtccctacgaaggccacggtgttgttctaaagctggctggccagctcttgagagggatctagtttgtcgcttgatccctttctgagtgtcggggtcttcgtttgctcaagtgttgacttggccttccttttagtgagttgtactgccacgtggcactggttctgcccacataagcatgccatgtcctgaggacaaaaattgagataacaaacatctctaatctcttaactataaaagatcctaagatcattttgaagtcttttgaacatgaaacatgttggtaattattttaccaggatct

SEQ ID NO: 401091 - DNA, 980 bp, Cannabis indica
gtttcgatttctccaccacaacaaacaaagatgggtcctcaaaggaggctaggaatatatgttgggtatgaatctccgtctatcattaaatatctcgaaccaacaactaaagctatatttacgacacgttttgccgattgtcattttgatgagacaagtttcccagctttagggggaggggaaaagaaacaactagaaaaggaaattatatggaatgtaaaatcattacctcaatttgatcctcatacaaatcaatgtgaacttgaagtttaaagaataattcatttaaaaaaatattgtaaatcaattaccagatgcattctctgacccaaagaaaattaaaaacatcatatattcgagctgaaaatgctacagttttaattaaagtcccagaaagacaattaactaatgattctaaagcacgtttgaaacgcggtagaccagtcggttccaaagacaaaaatcctcgaaaaataaaaggagcaaataatcaagatggccctaatgaagaggttgcaaatttcgaggaagatgttgacataaacaaatctcttgatgagattcaggtacctgaaaatattagaaataatgagatcttaataaattatgtcattacaggaaaaaaatggaaccaactgaaagtaattgtcgacaatatctttacttataatgtagcgctagaaattgtaaatgaaaacgaggattttgagcctaaatctatcaaagaatgtcaatgtagaaaagattggccaaaatggaaagaagaaattcaagcagaattgaattcacttgctaaacgtaaagtatttggacctatagtccaaacacctgaaggtaggaaacctgttggatacaaatgggtatgtttaggatgcaataacattaagatatttggttagcctggctgtgagtgaaaaactcgatatgcgattaatggatgtagtcacagcttatttatatggatcactagatagtgatat

SEQ ID NO: 401092 - DNA, 514 bp, Cannabis indica
accccaccttctctttctttacctggtagtcgaaatgtgtcgggagatcgctttgagagttggaaggaacccaacaaacatgattgttttgctttttctaaatcccctatcttccgatcatgaggaacatgtttatcaaacccaaattgtctagccacacgatcagagtgatatgaaacaaatgaccaagataaagatttcggatcatctcgaagacataacagtgatcggggaaggcaaacaataaacaaaaatcctgcttcaccagcagaagtagtgaaagaagaacgaacctcatctgtcagcgatactacacttcctgggtacatatcgagggtaaaataggtacaattattggtaaggtaagggcaaaatgtaacattacacaaggttttccaacacttcaaacttacccattgttacgaaaattatgaacactacgcaagtatacacagtcaagtagtagctcacgcaagtgaggtcaaaccacagggaattggactaattactacta

SEQ ID NO: 401093 - DNA, 554 bp, Cannabis indica
ttttcaataaattattaattagacataaaatacatcttttccaacagttaataagtgttgggtataataactattttccatagttataaaccgttgcgtgtacttactattcccaacagtaaaaacgttgggataaactatttttttttaaaaacaaaatctatttagtattgccaacggttattcaccgttggcaaaaactatcccaacagtatttttgctacagtgctaaactgatgggaaaaacttccacttactttttccaacggttcccataattgaccctcttcccataattcgcccctggccggcttgaccgtaaatggattggggctgctgctccaacctggaaggtccctgacctggataggctggcgaaggaatggagtcgggttcttggagacccacttacagaggacgaagtttgacaactggttgaacggtacctccataacgattgttcctggcagatcaatttgggtgatgaaatttaatgcaaaattaatttaattttgaattttttattgttaatcaagatcgtaaatattatatac

SEQ ID NO: 401094 - DNA, 687 bp, Cannabis indica
gtgacattaaagagaaaggaaagtgaactcacctgagcgccacatcaacaagcggttgacgcccataataagcgtcatgcaagacaacttgaaagttgttgctgtaattgccttcgagcttggcatgcgatgagtttggaccaaaatcagtgccaacaacacaagacttcggatgatgagcttggagagaagtctttcgttgctcgtagatgatataatatggtggggatggtgttgatgaaaaatatggatccattggtggtgtataagtcaatatcattgatgaattcgaatcaatgatgccatgtgcttcctcatcctccaatgtcacactttctacactttcacctaacaacccttcttcttgttgctcactctccacttggctgtccatacccttacttgtgatttcatattcaatgatttcatgatcaaggatgactcattctcttccatgatttcattcactacaacacattcacgatttgtcaagtaatccgatttagccaaattttgagttaataccacttcaaaaggatcttaatcgtcaattgtaggctcattctcttctatgtattcaactaatgacactttttcattattcaaacaactctcataactttcattattggagttattgttgggttttatgccctaaataaaactcatttccatataatcagattt

SEQ ID NO: 401095 - DNA, 998 bp, Cannabis indica
acataatttagtatatatcaaagctctgaggacacatttgatagatggacaattgttacgttagtaaaattaaatggaattggacaaaaatccttaattccaacaatagcaatagttcgaggaaaatttttagtggcctgaaaagtttagaaggcaaaaatcgcaatagttcatttcttttatttatttttttaatgaaccatttaagttgttttagtaatgtactaattgacatattgaaatttataattaaaaataaaaaactttataaaaaactattaatttgatactgtgatatatataaattgaatagaaaaaaattgtatggccactaatttatatttataactactaatcaaacaattaaattataattaatttagtgtataaccaaaagtaatatttattttctaaaataattttcttgtgatttttaaatgagaatataaataattaaaattaaaaataaatcactaaaattataaaataataataaaattattattaaatataattaattctttttaaaatatacctataaattgattgtgatgtttatcaattttaaattataattttatattaattaaaagaaaatatctacataaatttaataagatttttttaataaaaaagccacaagagaaatgtgaaattgcacataaaaaaaaaatagtatataaatatatttatctataactactataaaattgagaatatttttaggctttctctatataaattacataattaatcttcattaaatattaaattacaattttttttttatgaacaacaaacccattaatatttttttatgcttaaaaaaataaaatattatattataatcatctaactcaattacatctaattaagaaatggtttatttattattttattaaaaaaaaaatagaagtttgcttatacatgtataattagtgtatataagatgttaattttttattaaaaaaaaaaagaaaactatatatttatatcat

SEQ ID NO: 401096 - DNA, 1104 bp, Cannabis indica
aaaaacgttacaacaattaaagactagaaaaaaaaaacagtaactagttactagttacaaaattttattagcttttgcaaacactactccaaaccattcccacattattttatatcacttatacagtttataaatgacaaaattcaatccccaacactatatttgaattatagtttaaatttcaaaaaaattaagttgtgttaaccacttctttactacacttaattagtgatcatgtggaagttacaaaatatgagtaactccacctcttatgttacaatttatgtgaatattagatgtatgtaactctcaatcacatcatatacattaatctcatattaatattttaatctacattatattataacaatataatataacaagagataacatgccctgcattttttttgagtcgtgtatgaaattattatggtggggtatgatacaggataaggtcattgaatgtagagataccctaccctatatttgtccgatttgtgtatgacattattatggtaaggtatgatacagcgacaatgctgttgaatatagagataaatgtgcccaggatattgtagggccaggctaggcccaggttatgtaagtaatggctatgatatgccaatgttatggtaaagacatgatatgattgaaataatttttatatgttattgctatgattgtgctatgagtatgatgtcagggttgtgatccctacatatatgtaatggtttcgtttagtacaaatatatggtatatgatatagctttccatatctggagttatttaaattacaattatgagctaaggcatataattttgttaagactggatacgttaatgttataaagaatcgtattattgtgaattttaagatatgtttagtgtattgaatgctattgtatgttaagcatttccttactgggcttttagctcacccccttactttccccctacaggcaatagacagggaacattgaatgtaagtttgatgagttgggtcagttctggtatgtatactgcgaggggctatggacgagcaaacggtctagaacgccggtggagccttggtttttttttttttatagtaaagtaatctgagct

SEQ ID NO: 401097 - DNA, 663 bp, Cannabis indica
cattcaccaagaagacctcctcggctgtgctaacaactgaggggatgaggaaaaactcctttgctgtgataaaagccaaggggaagtggaagacctccttcgctgtcaagatagccaaggtgaagaagaaggccttttctgttgtgaatacaacaaaaggtatgatgaagacctctaaggttaaagactaaggacaaaatggagaccgcacctacaatcactctaaggtgtactcgagacggggaagacatcacccccatcttagggatattaattcagagttggtcacatcctcaattgaataaagaacgaccatcgactacttcaatacatcgttgacagtcatcaagaagacctcctccgctacaaagacgaggggatgttgagggcttcctttgctacaaagctgaggggatgttgaaggcctcctccattgtaaagttgaggggatggtgaagacctcctccaatgaaaagatgaggatatgatgaaagcctccgatgctgtaaagctaaggattgacaaagacctcctctactatcaaattgaggagatgaataagactacctccgttgaaacacaagtgagggaatgttgaataacttcaagactacaacttaagagaagacaaagactaaatctatattcacataaacacatagt

SEQ ID NO: 401098 - DNA, 647 bp, Cannabis indica
acatcaatttagcagcctacataataaaccttgactaatggaatcaatcctcctttgtctatagctatacaatctatactttacaatccttttaatctctttaactatatgactaattgtgtaagagttattattattattattataattattattataattattattattgacataaatgaaaaaagtgtttaaagaaaaaaagtggtttgttaagaatgaaaagggcatgcacaagagtcagctattccatgtttctttccgcaatttggcattagaaagtgtttagaaagtgacaatgatccacacgcgtgtgtttcacaaggatggaaaatgtatcataagattttatattattatttaagaaaaatatgattttgggaattttgattttatatgcttaataattaaaattttattattatacaaaacttaaaccataaaaaactatacttttttttctaaaccccaaaaataaccccctcacaattctctctctctgcatcatcatctctctctctctctatctctctcagccaactctctctctctcaactcacagtcgacccaaacgccacccacgaacccaaaccccatcggacccaaacgccacccactctcggacccaaacgccacccactctcgga

SEQ ID NO: 401099 - DNA, 865 bp, Cannabis indica
tgagtattttaattttacaattacagtttttcatggttgcatctgttatgaatgatgggccaagttacatcatgtgtatacaaaaaacaaaaacaatactaatgaatattatgaccattagtattgagtaaattaatttttatactctttttatattttttcttttatttttaagtttttttttaatattgtaccaattttatttctgtcactttaagatgttctccatgtgattttcttaaataaaaagagatatgccttaattaaataaaaattagagataaatttagttaattaattaataaaagagacattttttcaacttactcattagtatcattccttaatcaattttattcctaaactagtttcacagccatgtacaaatatttattcggtattggattggagccctacctctacacttcataaatatcttttcaaacctttgttggggttaactgaaaagtgttaaaataacaaatgttcattgtctatcttttaggacatgtagagagatagacatgtatcatataaacttaacaaatttggccaaattaattataatttggccaaaaatgaaatgttaatttttatcaacaattatataaaaaatacttataattattaaaatttaaatatttactatcatttgagtccagagatgtggatctcatttgtaaaatttcgctgcatgcgttgccgaaattggacatatggtattggttttttgaaacttttggtggatattcagtaaggagtgtctattgtgctttcaagtgcgtaatggaagatggaatatgcaggataattctggtttttggagaaagttttggtatttgaaacttcctccaaaagttaagaa

SEQ ID NO: 401100 - DNA, 528 bp, Cannabis indica
attaagtcttatataagttcagaaagttaactactttctagattataacccaacattgaacaatagaaaaatgctattgtggtataccatgctaaatcaagtcaaatattttctcaattaaagaataagaagacacaaatcaacaaaaattctttcaagaagcagctgacattcacaatcattatccagcaattccaagtgttcaggctgtgattagcaagaatgggacagatgcacgttcactcaaccctttgaaatccacatgttttgagaagcatatacaatgaaaactagaaagtgcgtatgtaaaatattgcaaccaaatttaagaacgagacacaaggcacaaaacattcaaatgatgcatagcaaaaggtattcaaagttcattacttttgaaaatatgcatcatcatatgatacgcacctgccaatacttaatagatatatatatatatggaagaggtttcaatagttacatttttattgtaaccatcatggttacatttttttaagccattggattact

SEQ ID NO: 401101 - DNA, 931 bp, Cannabis indica
tgggggaacaattcttctaatctttctaatgctgatcctctttccacctgttggcttaagcaggactcatgtattaagactgttcagtcttggagctctactaagcaaaactttagccattgaattaagtctttacaagatcgtcttgagactcttcactcttgtcaatcccattctgattttaatagtaatcaggccaaagagcttcaatctcaactcgattctcttcttttcaaagaagaggttttctggaagcagcgttctagaataaattggcttaaggctggggacaaaaatactaaatattttcattctaaagccaattctcgtcgtaggaataatctaattcgtgagattgtccttgattctggagagcgcattcattctcaacaagatattagtaaacattttcttaatttttatagtactttatttacctcgcaaggttcggatgcaagggctgtggatcatcttttacagtttatccctaaccgtctctgtgattctgctatacaacagcttgatgaatcttttcaaagtgatgaggttaaggatgctcttttccaaatggctgaggataaagccccaggtttggatggagttaatgccatgttttaccaaaaaactggtctacatttggccctaacttatgtagtgttgttctttctattcttaataatcaagctgatatttcttccattaatgaaattgttattgttgttatccctaagaagaaaaatgcttctcaaattcgagattatcggccaataaatttgtgttctactatttataaaattgtttccaaagttttagctaatagacttaagaatgtgcttaatgatatcatttctccaaatcaaagtgcttttattaaaaatagggtcatttttgataatgccttcattacaaatgagatggtcaatgctattac

SEQ ID NO: 401102 - DNA, 763 bp, Cannabis indica
agctgatttttcaactttggaaactagaaattaacaactagttattatgtacaaatacaataggttatttcgtagaaatgggcagcaaagtcatcaaaatactatgaaaaaaatgttagaatatattagtagtatctagctagcattttatatcgttatcacagtagtgttttttaacaattttttaatttaatttaaaagttattattaaatattgttaattaattataaaatatcgataaatatgatatttatagcaatgtccaaatactaatcgtcatttgactttactttatttttgtttgtatattacacgaatgatcccattaagtccagatttatgaatcattaaatgaaagggtcagcatgaactacgtttgattttattttataaaagattacaagtttttgcaaataacgtccttatcacattcacatttattgattcaatgcactgttcattataaacttaagaccttgatttggtagtatttgaatgagtggaataatttaataagtccattttgataaatactctcacttggtagtatttgaagaagaggcatattttaaatagtatgatttgaaaaataaatggtcctagctaatgtgataaattaaacccttaactttccgtcatgaaggatgaaaaaaaaaaaagataatataggaattaagattctcggttaaaaattagtattttatactgtgttaattattaatttattaaaatttgacacatcaactaatttaatttatatta

SEQ ID NO: 401103 - DNA, 751 bp, Cannabis indica
tgaatgactatgacagccacctggcaatccgaaaacacatcaacatttgtccacccctttccttacgggcgcccaacttcagagccataaattaaataatgcctccatttccgcctcccaaagtggaagtataggacagcttgttacttctccaataccactagttacttagaattgatcatcactttaagagatggccaccaaaccagcccaattccactatcctaaagggatgcatcccatttataaaacaccccaaaatacaaataatcacatatctaattatatttcttaaaaatattttaatataaattcccttatcatatttctataaaactagtagagctagccctaacttaaaattattattggagattggatataaggttgtgatctttacactattttttttttatatattttgccctaagagagaatacaagaattataattataagaaacactttttatttataggctcattaaagaataagttttcgatatttataatttgccctcttataaattttaaattaacttatagtatctacataatattttcatgacaatttaacactattttgatgcctataatataattgatcaattgattttgtatcacttcataatagcataaaaattatacatatatgcccataaataggataatccaagaatctcctactttggcaacataacaccacaaaaaatgtcacttttagtagtaataaaattttagtcacaacaaaaa

SEQ ID NO: 401104 - DNA, 1211 bp, Cannabis indica
tcaggggatgatcgttgtaaagactacgatcaactttgtaaattaatttcttactatgtgattataaatagtggcaggttagatcaaaagagggacgaaaaaatcatcacctgaacaggctactagctccgagaaaacccagtattggggacttagaatcgaagggcctaggataaacaacgagcaatctcttcctaatcaggttgataaggatggcgcctacgatccaaccaggtacatacctatcgttgagttagaaaactgccatcttaggcgctgattggaggaagcaaaccggcgtaatgccaaactaaagcgtgaaatagccgcagtcagggcgacacaggagaatagttcccaaaatcaacctgaccttggagatagagatccacaaggaaaacctcgtaagtcgcaaaccaaggggcaggagacaacccaaagatattcccaaaactctcaggggaggcaacctgaggaaactaaggaaagtctggggaaacagcctgggacctgtagaacatcaatcagagattgtcaaccctctctccaagctcataaaaaaggagctcgcgcaaacccctatagggggaacgaggtgaatcaaaccttaagaagaagagcagaacgagaagaggcgagggctaccgcgaggcatacagtacctcataatcgatcaatgcaaggaggagagaacattcatcacagcgatgatcaaaaaggcataatgcagcatataggaagagcaagatccgagagctgtcacgacacctacgagaaagaacacttgaacttgaaaaaacctaatcttcgtcaacaacttggtccaaagcaaagggatttattccacttgcaaatagatgagttggagactaagttcaagaggcatcaagtcagggaatcaagaaagcaatcaggtatgattctgttggagaattcgagtcggaagctccaggatcaaagagaaaagacaattccaaaaggctgaccaaggactagaaatagaagaaacacaacaaatatgtatgctgactatactgagcttaatgaaactctagaaaatatctacctcgcacatgtacaggaagtcgtttttagtgagccaaaacctatgagacacgtgaaacgtaaaagggatccaacaaaacgatgtgaataccatggagatattggacataacacggaagagtgtcgtcagttgaaggatgagatag

SEQ ID NO: 401105 - DNA, 1841 bp, Cannabis indica
actacaaaaaaaaaaaaaacttatgcttcatttgacttacaatatttaaaaaaataaaaataaaacttacacccaattataccatataattaacgattcatcacctttcatacgttcacaataatataatcatctattcacatacatatcacatatatataaatacataaaacccacacaacatttaatgtatatacatttatggaactgcttttgataccgattgttaattttattagtactaaatcaggtacgcaacggaaaagttctactatctgattattattgtaccatagcccaatagatatccaaatgtatatacattaaatctaaacataaaattcaagataaaaatatatacctcttgatgactatcaaggtatccttgaaacttctcgtatgttatatcatttaatccagatgatgaggaaaatgcaagtgaactcacactagtgtcttctaaattgttccaccatatacaaggaatattgtgggctattatgataaagtgtataatgtgttcttgtttaattctcaacacatgagcaaatataatttgagagagaaaactatttttcttttctcttgtgaatttaaaaaaatatgttgtgaaaatcatcttttgatttttcaaattaggcttccatttataattgttaaatcctcattaattaaattatatttaattatttaaataaataaaaatctataacagatttcggttactgatatttatgaaggagtctctcaactacttgagagaatatttcaacaactttaaaatatctttaaccacttttcaaatttaaatatttacctaattgaattaattaattaacccaaaaagataaaactaatagggacaccctactataagggtaggcacctatcatgtttgaattaagacaaggaaggtgtcttttgtctaacaacttttatctcaacaaatattgtcttgacaaattttgtcttaacaactcttgctttttgttttcctatttaattaatttgaaaaattatttatttattacaaaaataaacaattactttttcgccaatttaaaatagattttttcgaacaacattatacaactttttattcctacccttgatagtgtttcaaggtggcgattcggggaccctggacctataattctaagctccaataaactagattatttattgagtctcatcaaccaaataatctttgtttattaattctatgattactccactgtaaatataaaattgaactctaggtaattataaaattatattattgagctatactgcagtgtccattgatataattaatttcagtgattagccctccatgtgttggctcataattagttttggtcaaattattgttttacctttttaattacttctttatcttttagtgccattaattcactagttgaagtataaattaaatctcacctaaatttctgtacaatttccaattctagaattaacactaaaagggagccaacattctatctgttaggaaagtcaggattctataattataaatcatgttcctagtcatccacattattagattcctaaaacagaagttgtaaaactcatattctctgagaaactttagcaagtaaatcaaagaaactaataacatgaacatgagttcatgattactcaggatttaggcctttctactattgatcatcgttatgatatgaattaggtccttatagcaaatgacatgttagataaatataactttattcttatcggtcaatgtcatatataatctctactacataaagcaccttcactttgatgtcatactatatctgtaatccgaactgagattactt

SEQ ID NO: 401106 - DNA, 575 bp, Cannabis indica
gaaagatggactgaaaagccaaaatgatgaacaacatggagataatattcatgtatgtagaaattttgtttacaattttggttgactagacgggtcatattattgatgttaatttatcttaaatagctagtttgcagtgataatgttattaaaaatattgttcataaaataatgtaattgaattcatgttgttattgatgttattgagttgactaacaaataatttattagagtgaacgattcaaagttggcaagtactcacgctaatgaagttgattgggtactgttatacactaagagctcgtttgttacgccgtacaagggtcgtattgtattaaataataaataatactatgcttggataaagcaatgtattgtattaattattacgaccaaattttttaatacaatgtatgttgtattatttaatacataataaatggtccgtattagcttatattataatatttacaaaggatttggggtcaataccaatctccgacccggacccagacctgagacccgggaccaagacccggactcgaattggacccaaacccagacctagacccgga

SEQ ID NO: 401107 - DNA, 518 bp, Cannabis indica
cattattgattatcatttcagtgcaaatcttgtgtactgattaatcgtgggactaaagtttaatcacataatcttgattacttttactgtgtagacaacacaataatcataaataataatgtgataaggatttaaatgaatttataaatcaacaaataatcatgaagcaaacatgtgaaccaagtattaaacaagcagtaaaataattctatttcgttattgataaatgaaattcaagataacattgaaatattgttttagttcggtcgtgaaacccaaaaaaactcccacttgcactaacataaaacaataagtacatttcaattaatcctaggttctcttttgtgcttttcaaatacaatctctatcaaagtcttggtgaatgggtcgactaggttgtcttcaatatcaaccttttctaccagcacttttcctgttgccacatattctctgatgatgtagtattttctctcaatgtgtttactcatcttatggcttcgaggctctttactgttggc

SEQ ID NO: 401108 - DNA, 915 bp, Cannabis indica
aatttcttgttgattatagcgatataaaaagtgacacttaacgatatttagcaatgtaagttcgtgacatataattacagagtctaaaaaattacagcaaaaactacccctaaatttaaaataggtccacacaccaccttttgcgaaatatcctttatgttaccatcattaattttcttcagtgatcggttcatcatgaggtgttcaatatactcaatggcgcacattccacaattaccactgtaaaataaaaaataaaagatttagagacttcaaaaaattaatgattagtagaggaaatatactatattaatgaatattactttcatttactttggggaactacctcaattggcatgcgtttagcatacattagtcttagttgactactatcccctagtactacattgagaatgtaattattgagattgaaataaccagttgacttcagcagatgtgggaacagtagcgtccaaggtagcatatgggctttaaaagcgtcttcgctggtacacgagatatcattattgtaaacccgaatctgccactcctcattgtctacctcaacaaccacccaatgttttgtttagcaaagtgcaggacaaaatataagaaggcttggtccttccaacatggtaagtaacgaccatccatacccttgtggtactctgtcactacttttggccattggaaggtgcttccgtcaccttggtgagcctcccaaattcgcgcgaggaattgtgttagtgttgtgtcaaaaatcacaccatgttgaaggtacgattctgaaaaataaaagcgtctcctcctcagtaagtgtgatatggcatcggacccacgtatccccatgacattcggaccatcgaaccccatggtctgaccatcggacccattgtttttttgttttgttttttt

SEQ ID NO: 401109 - DNA, 776 bp, Cannabis indica
atttaataattacaattaattataaaaatacttcatttgacttatttaataattacaccttacactgtctcttcattaacaaataaactctaaatcttgatttttttctcaattgagcccatgcttagtgaaaatttataaataagacatagtctaatttagaattctaattgattaattaaaaccaattaattgtgtctacaagccaatattatctcaactagtgcggggactatgggcctatataatcaagtttccaataagtagttctagaacacaccaagtaaattctctatcttattaattcctcatggctccactatagattcagaattgcactcttgattatatagaacgttgtatatgtttcaaatatagataagctattaattgttgattgtttcaatccaaataatcaataatcctctatggatgatctacatcgagtagggataattttactgttctacccttcaatgtattttatccttaaaatacttaggtccttgtaaatgatatttcagtaaactaatataattgttgaaatgagtactctaccatttaatctcgtttagccaagctcgaaagaaatcatcattttatttctattcatttatagaagctgtagactctctatctatgattagcgctcccactcaattttactaccatgttcccaagatgtaagtattggaaaggtctaatcagtcaattttaacgaataagtcaaagaacacaaataatacaattgaaccataacctaaccatctcaggat

SEQ ID NO: 401110 - DNA, 1282 bp, Cannabis indica
aacacccgaattaatatttgtcttttttttaaaacccgaactcgagacccgtgtggagcattttcgggttggacccgacccgaccacacgggtttttaattttttggctttttttggcagcgggtcggggcgggtggccgggttttcgggtttgcgggtgtaaatgttcagccctagcaatcgccacagcacacatagtttcaccttcgactttgacatcgcagttgattttaacccaatcttccggcagcggagaccaagcctgagtcccaacagactgtggaggggaaaggaggcaggagccataatctgtgtaacaagaagaaatagagtcaatatagtctttaatgttacccattgatttattatgtaccttgtcgttgagggccctccaaatcgtatctaccacaatcgaggcatagaggaacagctcatcagtatcagctcctctggatttaagattccatataaaagtaacacagtcccacattcaggctcctgaatccagaacaggcataaccccccaacggagaagatcgccaaaggtggaaggcaaagttgcaatacaggaacaactgctctgtggtctcctcagcctcccaccaaatagggtaggaaacctcctcaaaacccattctcttagcaagaggggctcttaatttgagttccaaagtttgttccatagagccgaagcaatgttgcacaaaggagcccgatcaagggcttgaataagataggcagactaggttgaaaacagatcatttgattcttttgtccagacccatctatcccttccctcgccactcggattaccgcctcttaagatgttactaatgttggaaattattttaccaggatcttagatctactcacaagtatgttgtttaaacaccctaaatatgaactttctaaaacgataaattaaacacatataaagttaagaaaaccttacattgatgcagcggaattaatgtctccttccactcagatctctaacccttgattcctttctgtagcagagtataatcaagatctgagcccgaatgtccttcttcttcaagtttgatccttcacagtcttccaatctatgattgagttactgcttgctgtgtgtgggcacttactctttcactagggtcacgaaaaagatgaaggagaaaagagagagggtttcggccaaggtgtagaaagtggggaaggctcagtttttctgaagagagaaatttctgtcagaagacttattgaaaacttgtgttttgactgagccatcactttctattta

SEQ ID NO: 401111 - DNA, 567 bp, Cannabis indica
gtgttcaaaatatttacaactaactcaaaatacttattacaaaagctgtcgcccagcgaccatttaaatacagcctgctgtccaaaagattgtatgctccaggcataaccaccctgacatgtataatcttcctccgctcgctctcacggctactcaaccttatccttgcccttacctacacatgcaaacaatatctgtgagtcgatagactcagtaagaaaactataatcaaaacataaacatatatccagatcgtaacaaggcacccatacacctaatcacgatctaataaataagtcaggaacattctcgacaaagtatggctagctatgaatccagcctatactcagtactctggtactgatgtggtagtaggtaattcattctatctaatagcctagcatatatatgttggcatctatgtgaaactctatgtacacctcaccgatatgctaatctaatggctattcatttgcctaacatatatatattggtatctcggtgcaactttatgtacacctcactgataccttgatatgttattctaacggcaactaacatgcacgc

SEQ ID NO: 401112 - DNA, 1024 bp, Cannabis indica
acaataagtaagaaacctaactgtgatttcaggtgtaaatactcgtaacggtaatgatcgtttccaatctttatttattcacaataacagtaataaccgggcctctccttcgattacaatcgagtcacaaacgataataattgcttctcctcattaccttgatcatggtcgagtcataacgaatatatatcattattctcgattataatcgagtcacaataaatgcatatcgtagtctcgatcataatcgagactataacaatcatatcattaatcataaacaatacttaatacttttcttacctcaagttctagtttaggtatgttggttgacctgcttggagaacgatcgatcatcccgggccctatgtcataacgatgataaactaatgagtgtttatcccaaaacattgcttaataagtgtaaaagaacacctagggtttcttaccaaacctcgaggtaaaaattcactaaaattaaacttatgtattttggctctaaaatatacaccatatcatagagctcgttgcaagcttcaaaacggtatatagaacatccaaaacggacaccccgagtgaaaagttatggccaaaatacgaaattcgactttttcgaaaactaaccaaacggaattccagttggtacatccggaattccggttttgaacagccaataacacgatttttctcaactttaaaccctcaaaactagctccaaacctaaccaaatcattctaaacttcatatgacacatatatatcatccaaataacagcttcaacgtaatagaaatcaacaccatgcccttaaatcaaaagtgccattaaagctcaagctttgagatttaaaagctcaaacttagttcatacctcaaaactacagcaagtcaaacaaaagagcattcataacacctctaattccaccaagaaactcaaccaaaaccttacccaactcactacagccacaaaaccaaaattccacttccaaaatcctaaactttttatgaaaaccaagggaagaaatta

SEQ ID NO: 401113 - DNA, 605 bp, Cannabis indica
ctgcttgtccatttgtctgtggcgttgccaccacagagaaacttttaatgactccgttttggttgcaaaagtcggtgaactcttcgtagtcaaactgttttccattgtctgagactatcttatgaggcaggccatatcgatacactatgtttttgataacaaagtctaatgcttttttagcgattatggtcttcatgggctcggcctctgtccactttgtaaatagtccacggctattatggcatactttacccgtccctttcctcttggtaacgaccaaatgagatctatcccccacaccgcgaagggccaggggctagtcattagggtaatctcgttggggggctctttgtatgttcgcgaatctttggcacgaatcacattttaggacatagtctatacaatttttttcattgttggccagaagtgtccttgtctgagtattttctttgagagactcagacctccagtatgatctccgcagaacccctcatggacctcttgcatgatttgtctagcttcagggtctgatacacaccttaagtacgacatgctaagtcctcttcgatagagaatattatccatcatcacatatcgatgtgcct

SEQ ID NO: 401114 - DNA, 484 bp, Cannabis indica
actgaccttgaattgactgaattgtggaggaagagagataagcactaaagcacaagcaagtcatcagaaagctcaagctttagtgccttcaactttgaagcaaggtgagacatttccataatgtactcccttatgttttccttgcccttaaacttcatggaaataagtttctttaaaggagtacttgtttctgccttctcgctttttgcatagcgcttctcaatttcagcaaggaaagttgtggcatcggtgacctccttggacaccgcacccctaatagcctcaggtatgctgcgcttaatgatcataatactcatgcggtttgaacggtcccacttctcatatatcctcctttgctcggaggtactagtatccataagaggagcaggatgatccatccttaatgcaaggtcaatatccatgcagccaagaacaataaaaatgttctccttccagtccttaaagttattaccattaaggaccg

SEQ ID NO: 401115 - DNA, 517 bp, Cannabis indica
ttgcgatttaggttgttccgttactaagcgatactatgtggaaattccgtaaaaattaaaaaaaataataaaaaaaaaacaattttgaagtgtaaaaatgaaatttttttttttcatttttacaaaaattacatagcaacttacataacaactaacagaataacttaaattgcaattaaaatctacaaagcaagctacatatatagaaacacagatcaatccaaatcataaatttaaaatatatacatatatggaacacttcttaatgggtattacccattgataggtaaaaattaaatttaaccataaatattaattttaaaaatattaagccattagattgtgatccgatgacgaataataaaagagaaatttgaatttctacgcttaaattagtttcttaattacaaaaaaatatcaaaaaatacatcttacactatacaaaaataagtttatataaaaatatttaagtgaaattcaatattttttcatcattttttgtcgattttttttttat

SEQ ID NO: 401116 - DNA, 539 bp, Cannabis indica
ggcaaccgtatggagccgttgtgcaaaaggttccggatcaagcacctccagtgtttctgggaggtcctgatgtaatgaaggctgagcagtgggtcacagtgatcgagcgtatcctcaattttatgggactggttggtaatgaccggggacatgcgccactttccagtttcaggaagacactctcgtgtggtgggagatgataaccctcactcgggacgtcacagtgatgacctgggaagaattcagggagttgtttaactccaagtattacaacgaagcagtccgcagtgcaaagcggaaagagttcactgaactggttcaaactgagggaacgtcggttactgagtacacgacaaagtttgaccgcctggccaagcttgcagcaggaattgtgccaactgatttcagcaagaaagagaaatatttggcgggtgagtgcaaaaattcagcacaatttggtgattactaccactgaggcaaccacatatgcagagatggttgaaaaggctttaagagccgagggtgcagtaaaatttctt

SEQ ID NO: 401117 - DNA, 898 bp, Cannabis indica
agattgtaattagcattcttcataaattatatgggactgatatttagttagactaaggggtgtttataaaattgtcaatttaatttaatctctacgatccaattcaatctaatttgtaaagtgtgtatatccgcacttatgcggattggattggattagaaaattcaaaattcgcacttgtgtggattgaatattgattgacatggaaaagtaaccgatccaatctaactcactcatatttataaaaaaaattaaaaattatatatagaattaatattttaatgtaaaaaataataatttaaaaatataatgcatatgatacaattatattttaaaacttaaatgatcaaatttatattccatttttatatataatttttttctagatacaatttaaaacaagattaaacatttctttatacatacaaattttttttcttcatttgaatttgttattggatacataaaataacaataatttgttttattttgttactagttatgtgaaaaaatatttttttcataaatattaaaaaagtaacaaatccaaaatatcatatatcggattggtttgagctattgtgcggattggattggatccaaaatataaaattcgcacttaatgtagatcggatgtactatgagcaaaataatacggattagattggatgaacacctctaagaccaatagcgatattgacacatagaaaagtactagacaccactaatatcttttagcatttctcttattaaaatacacatatcatcataaaattattttttttttttattttatctctcatccacataaattttgttatattctaaagtccacaaatcacgttgaattattgattttttaggtaaaaaataattttttttaaaacaaatgacatgt

SEQ ID NO: 401118 - DNA, 706 bp, Cannabis indica
gttgcgattcgcacctctaggacaataaagaatcctggtagaatgttcaagtgctgcccaatccataaggtatgttctcttttcctaaaaattctggcaggctgaggggtttttccttaaggttgaaatctgtggttttttttttgttttgtgtgtaaagctggtcttttttcaattttctgaaactttccccctcttatttttggtcttgattgtttggtttttcagaggaatggtgggtgcgattttttcgagtgggttgacagggagatgtttcgaaattgtggaggtggatgttgtatctgttggaattattttaccaggatctagatttactaataatatgttattaacatcctaaacatgaacatctaaaacgatatgaaataaacacatataaagtttcaggaaccttacagtggttgcagcggaatataatatctccttccactcagatctctaacccttgtatcttttctgtagcagagtatcaccaagatctgagtccgaatctccttctcttaaaactggattcttcacagccttacacactatgattgagtgccacttgatgtgtgtgggcactcactcttttcactataggcttcggttttgaaaagaggaagagagagagagagtttcgaatatggtaggtgaaggaggctcaaattttcactgaaggaacgagatgcatcatcttttccct

SEQ ID NO: 401119 - DNA, 794 bp, Cannabis indica
atattagtcacaaaaatcacaatgttatgactaaagctcaacagtccaacaaaccctaaaataagaatgttttttttttttttttgaaaaatgtgtttataaataaaactgaagttagacctcatggtcattacaaagaatattaacaggtatagtagatatctctaccatgcccgtaacattgttggcaaacgcccatttggccacattatgagctgcgtaattacagtttctagcaatacaagaaaaattacaattagtcataaaagtagaggagcttgcaatgccgcacatagttctcaatcccccaaatggagtcatccccttttaggttcttaataacaatctcagaatcactctccaccaaaacaaaaggatgatgcaatgagaccgctgtctccatggctataagacaggctgcagcttctccagtgagtgggtcagagaagtgtagcctttttgccggtacccacaaaactgattcgttatggtctctcgcaatcgccacatcacacatagtttcacctccgactttaacatcgcagttgattttaacccaatctttcggcggcggagaccaagcctgacgcccaacagactaaggaggggaaagaaggcacaagctataatccgtgtaacaagaagaaatagagtcaatatagtgtttaatgttacccattgatttattatgtaccttgtcgttgcgggccctccaaatcgtatctaccacaatcgaggcatagaggaacagctcatcagtattaactcctctggatttaagattccatagaaaa

SEQ ID NO: 401120 - DNA, 584 bp, Cannabis indica
aaaaaattaaaaaaaaattcaagtcttttatttattatttgggtaaatatcagcataagtactcaaagttttgagcttgtatatgacaaaaaaccaattatttcaatttttgtaaaattataattttcctccatttttatcaatatgggttccattttgaatttattaaaagaagattttgaattacatgtttcagtctagacctaatgatctaaaatttagactttatatgtatcatgtttaagacaataacggtctctatactgacgaaactataaaaaaattgtagttttataaatatttgagtacttataccgctaacaaaagttattaaatttatgtcgcttacaaactcaaaaatataagtagttatgttactatttatctttattattttcatatattataatttgaattgctttactatcattcacgttatttattttattattaaattgtgtggtaataaaattttatgatattattattttatagttcgatgtttactgtgggtttatgattacagagaatttgtgataagtttaattttaaaaaaaaaaatctgttgaagagacattttgttt

SEQ ID NO: 401121 - DNA, 733 bp, Cannabis indica
taagaaaaaaagatgtaatctgaatgattaagaattgtaagttgtttgtttgggagtccccttgctttgtattagtttggtggttgtttgaatttaaattttaattttttttgtttaaaaaaaaagataataacattacaacagcgatttttttaagaaacatatatatttcttattttatatttaaaaaaacaataatagaaattatattttttttagatatgtggttttagagtaaaaaaaggataataatagaaaaatatatttttagatatgtataatgaattttaaattttaaatgtaatgttaaaaaaaatactttatattatatagcaacatttaataataaaataaataaaaataagaatacatgtaattaatttaaatttaaattgcaatattttaaaaataaataatactttttgttataaaattatatttaatataacataaataactgtaatctataatagcaatgttcatattattaaggtattaataataacaaaagcaaagtaacaaactaaacaaaaatgaaagatttaagtagtacaaataataatcaattaggttctcacatacatgtaaattaaagttgactcgacaattgtgatatattgtgacttattttcaagattcaatcttcgaacttatagataatattaggaaaatttgattttctatacttagaaaatcttaaaatttttccctaaaccaaaaatttaaatcctaa

SEQ ID NO: 401122 - DNA, 603 bp, Cannabis indica
aatgagagtgttctagggtttttgagacttagaactttggtcttttccatttagcctaatgttctttatatagtttagagcttacaaaagatctacattcaaataagttaatatccattaaaaataggagatactactcttttatcatatatttaagccatagtaataactaattaatattcctaaaagataggtaaatattttgggattgaaaccatattttcgtgggttgttggagtggtttcacagctgagaacaagctgtgatcccctagggtgaaggctgtagaaatataaatcgattgggcctgtttttgggaccatttacatgtgctggccgacctaccctttgcttggggttggccagtacatgttgtgcgtggtccggccagaccctctagttggccattttcttgtaacttcatcctgtctgagcatttggagccattgtcaattgataagttgtgcatggtgacttagctcatctattgacaggttgcattctccgtggcattaatcttgcctatgtggacattgttggaaattattttaccaggatcttagatctactcacaagtatgttatttaacaccctaaatatgaa

SEQ ID NO: 401123 - DNA, 1103 bp, Cannabis indica
agacagatatcccagaggaagaacgaccaatctttaatcttaagaaaaaacgtaagggacccatgtccttaagctgaaacactgagttaagttgttgtttgaaagaagtaacaacgtcatcattattgaaggtaatcacaatgtcatcaacatatattaagagggcgagaaaaatgcctttatcatttttgatgaacaaggtgtggtccgagagaaattgggtgaaaccagttgacagaagataattgctaaattttgtgtaccattgtctagaggcttgtttcaagccacatagacttttggttaatctacaaatagaatttggggaaatttttcccttgggtttgtatccttttgggagtgtcacatagatagtttcatttaaatcgccatgaagaaatgcattgttgatatcaagttggtacagagaccaattgttaatggtcccaatggcaagcataagttttagggtattaaacttttcaacaggggcaaaggtgtgaagataatcaatatcttgtttttgattgaaacttttggcaaccaatcgtgctttaaagcgattacctgagccataaacattgtatttgattttgtatacccatttatagccaatatctggttcgtgagacacttttcaggaggaaaagtgcaaattagacactctttaggagaaagattgcaagtgacttactcttcgggaggaagtgtgcaagtgctacaatttgaaaggagttcaagttttgggtacctcataaatttgatcagaagaatagattacaataattgcggcaaattcaaagagggagtctgtatttgtataagtcaatttggttttgtaatcacttgagattcatctaataaattttattctctggacatggccccgtggactaggagcaattcaaaaggattgttgataccacatataaaatattgtgtgtcattttattttctgcagtatatttctgttttgtcagattctatatctgataagatagaagtaaattttgttcaaacaattttactactgttccacattatttaaattgtttgataatttcacttggtaattataaaaatggaatttcaaacccaatatt

SEQ ID NO: 401124 - DNA, 813 bp, Cannabis indica
tgatcttagataagacatcataatatctttctaactaaatatcaatggttgatcttaggtctatggatcttaaacgtgatatggttagggtcaacttagttgtattattatgttcttcaattttttcgtaaagttgaccaattggatcttctcgcgatagacagattaaggacatgataattcaattgagtgggagcgctaaacatagatatagaatctatagcttctataagtatttagaagtgaaatacattaaagggtagaacggtaaatttttccctattcagtgtagatcatctatagatgatctttgactattaggattgtaacaatggataatcatagcgtatctatatcgtggtaaatataaagcattatatataattaagagttctattcaattccaaatctatagtggcgcaaggaggaattaataagttagagaatttacttggtgaattctaggtctacttattgaaagcttgattatattggcccatggtcccctcattagttgagataatactgcttggagacttagttaattgattttaattaatcaattataattctaaaattagactatgttttatttatgaattttcactaaacaagggcttaatggtgaagaaaagaggttttggggtcagtttgttaattaagagactttgtatggtctaattaataaataacataaatgaaaattttatttgataattacttataattattagataaatagttttggcatttataagattgaatcagaaaatatggtattattgaaaagaagaataagtggttgaaataaag

SEQ ID NO: 401125 - DNA, 692 bp, Cannabis indica
cacgttataaatcataacgttcttggatgtctcaataagaactcagtaccaataaccttgatagcgagctggagcatttcccttatctctatgaggttgataatgtaaacctcatcacttcttcacttggagatataacactttgtatgggcaatcatagttcttggtaacaagggatacttcggcaattaacatcatttgaatgtcaacttctactcgagagaatcaactcgccaagactataatctcattgaaagatgtctgaagctgattagtgcaagtaccaggagtgtgccttccaataaagaggtaggcgcgtcgctattagttgtttggattcactcgactgttatactttgtttgtatattatacgctaagtgttttcacagtcattatatctcgcttacgtctactcatgcgtaacgaggttgatgtttcaccttgcacatccagtgccatatggtttctcgttaatacacgaggcaacagtttgtatatctttatctcgcataagaccatatagtcagcaagttataaatatactatgttacttccgcatttaatgagttattccactaaatataattatcgtttcatacattgatccaagttcccctaaatttgacatgtgtcctccgatggccgaatttcgtgtataacaaatgtatttattaagttttagcaatatcat

SEQ ID NO: 401126 - DNA, 683 bp, Cannabis indica
attgtttccttaggttgattattgttgcattgatcatcacaagccattgaatgtgggtatataaagtttataaggaggaatttttctgagcttttatcacaaagactctcaatgaaagcaccaaactgttaacgcagattttcgttaaccaaaataaatagcctttcgcaataaatacactacagaaataaatatataattaagaaacaccagatatttttacatgattttgtagttaaaatctacacactccacgagtccttatcattaaggatattttttagtacagaatacaataataaattttgaataagtaatactttctctcaaattttgctgtccccttttcccatagattctgccactatttataggaatataggtagacaattattctttttgggtattggttcaaatataattgttcatgaaacgtgaataatccccacgtttcatttaatcacacatgggataatatctaataactacccaaccgttctttatttttatctattagacggttatgctaacttagaaggttgtgtctcgtcgttcccttaattggcattagtaatgcgaggtgatctcctcgatatgtgtaacgcgaggtagttgtgtgttgctacatttaatctgcttgtacaggagagtatcctcttgttgcgtatgtaaatgagtttatc

SEQ ID NO: 401127 - DNA, 513 bp, Cannabis indica
tatatagatatatagattaggtagtaaattcttttttatctttgtgttttattttatttttataaataatttttgtattactttttttataaataattttttatactattattactatgtggcacattgcttaataacatactgattcacatacaaaataattagttagtattttttaaaaattatattaaattaaaatttatgaaaactgatattgaaatattacactaatatatttctcttaataattatttaaatataattaataaaaataaaatatataattataaggtaaatggcggtaaaactcccaaaactttcattttggtttcacttaacccccaaaatctaaatttgggcggttaaaactcccaatactcaggttctgttagcaatttaacacttccgtctaaatttagctgttaactgccatggtggattgtccacgtgacacagtattattggcccacataaataaattatttaaaaaattaaaaaataaaatatattttt

SEQ ID NO: 401128 - DNA, 809 bp, Cannabis indica
attacattccaaaaacccaaaaacattttacccaaccattatttttttttcacattttacaacatatcccaatgataatttttcgctttacaagcaaaattaaattacaagaaaaataaattatttacaaaagaaataatctaaatatttacaaagaaaaaaattataataatcattggaagctttgaggtctccatcttcgtagtgggtatgctctccacacttcctcttgcaaacttcttacttgaaatttgaaatttgatgaaatttttagcacttctttttgttagttttctccacggccggaaatggcattgaatccttgggatttttgagtttttgataaaatgtgagtgtttgacgattggattttgtagcataggctatggtaatgtgtttttggctctggtctaatgtaatttggtgagaaaatgaataactttgaaacttttgggagattgtgttcttgaatattgaagaacattatgaacatgcaaaatttcaaatttcctcccttttcccaactttgattttcatgaaatcggtaaaaaggtatttgtgggggtgtgataaacttgaatgatttgtaggcttgaacacactttgtgtttaaaagaggacatggagctcgccccccctttctgttgaccatcaaccgctacaccctatgaagtgtcggtggtgtaccccgagcttagacacttgggggtcggggtggtacccctagcctggacccttgagggtcggggtggtacccctagcttggacccgtgggggtcggggtggtacccctagcttggacccttggg

SEQ ID NO: 401129 - DNA, 1149 bp, Cannabis indica
gtctgaccatgtaattacactgtaactgtgtaattggaagtaattgaggggttccaattacactctccaattctcatggccccccatgagaattgaatgtaattacattgtttaattactaaaaactttccatattaaacattagctactaaaaaatattattttcccatgtaattactaactattttgccaaataagatattaggaattcatatgtaattaccacctcatatccaaacacaccttgtattttaaaatatagtgtaattactacactatgtaattaccaccctagtaattaccctacctattaattacacagttacttccaaacgcaacataaatatattttaaattataagctaccataatgtaatttaaaaataattaattagctactaagatgtataaataaattttggaggtaaccaaaatacattttaaactatatgagatacaaaaatgattttttttttttatgtaaagataattaattggcttcttatcaacactattagagcatcttcaatagtcgacaacatttatagttgccaaaatacacacattatcctaatttttttttctctttcatccacataagatttgtcacattttcttaaaaaaaaaaatactccaatacttacaactcttaaacttgtgtcccacatcacattgaattaataactttttaggtaaaaaattaaaaaaaaaaaaaaaaaaaaggaaaaaatggtcatgtacccattgtctaatgaacaacacttcacataaaatttgtcttgaaaattggaacatattacatatgtggcaagaccacttcaatgcataaccctcattagagatgctcttagttagggttgggcatccgatccaatttaatattagggttgggcatccgatccaatttaatattttctcctcattcgatccaatttaattagtaattgaatttaaaaaaatcatcattcgatcaaatctaattagacctcaaaatctaatctaattactaattgaatttgattagtttcttaattggatatccaattacacacttaaattttaatattaacttaaaaatagtaaaaaaaaaaaaaaacataaaaattaagtatcaccctttatttaagtttaatacaccataaacatatc

SEQ ID NO: 401130 - DNA, 860 bp, Cannabis indica
gttttctccctaatttgtgtgggtctcaatattttttccattttcaaaatttagtaaataattgtatgagaatcaataccaaactattcattcacatttctggtaagtaaatatgcccgttgtcgactttaattttgttaaaaaaaaaaaaacaaaaattgacaggcaggtgtcccctaatacattttgacaaaagcttgcttatgtatctctttattagaaaacaaaaatacatactaggcttgcttatgtatttctctttttttttttttttttcttttttgatggaacaccaagttacaatttagacaggtatgttgttatataaaaaaacttagacaggtaggaatatatctgtattagaattctttatttttgtaaattaaaatagctaaaaattaaaatagagagttaatttttatttttgctgttctaattatggtctttattttagttaataaatttaaatttatcaagtataaattacttttataaaataataaaaatataatagtacataagagcatctctaatgagagtgtaaataaattgtaaaaagttaaaatatagctcatttaacaaaaagtgtgttctaatggtgtgctaaaaaataatgtaaatttggcatatagcaaattttgtactaaatttagcacaacatttactatgatgtaaaatttataccacaataaatacactactttcttatttacatttatgtaatttctattattttattagtatatttaactatcacattaaattataaaacatttatattatttttttattgtcttacatattaaaataataataaaaataattataaaattataaaattttattttttttaaataaaa

SEQ ID NO: 401131 - DNA, 466 bp, Cannabis indica
aaaaaaacaaacaaaagtgagtgcatatgatcttacgtggaacaatttaaaaggattaaagcttcttcattgtacactttgaaaaaattaaaatttcttcactaaactttagtaaaaataatgctacatataaaaatgattttacaaaattaaataggaaataaaaaatcaaatctaaaaaaaatcaaaaaaacattaaataggaaggtataaaaagatcaatattaaaaatcgaataatttagtcaagtaattttatttagagaaataataatcattaatacacttaggggtattacagaaagagattacaattatattagaaaagaaaattttaaataaagtaaatatagtaatgtgaaattgtaaatagtacaaattgtgattatacatcaggcaaatttacgtgtcataatttattgttaaaaaaatctaaaaaaaattaacccaatttagggtaatctagg

SEQ ID NO: 401132 - DNA, 63 bp, Cannabis indica
agatacatataggttgttgttgctaaaataaattatcacagttcttgatagaatttatttagg

SEQ ID NO: 401133 - DNA, 512 bp, Cannabis indica
cgcatacaattatgaaatatggcaaatgaatatcaagaatacttttctaaatggcaaacttgatgaaatcatatatatggaacaaccaaaagggtatgtgtcactaggaaataatcgaaatgtgtgcaagttgcttaaatccatttatagattaaagtaagcctctagatcatggaatatcatctttaataagactattaaagagaatggcttcaaacaaaatgaagaagaagcctgtgtgtacaaatacattaagggtaatctaatggtattcctagttatttatgttgatgacattctacttattggaaataatgtagaaagattatcagatgtaaagaagtggttagccaacaaattccaaataaacgatttgggaaaagcaagctatgttctcaggatcaaaatctataaagatagaaggaggagaacgttagcactttctcaaaaaacttatatcgatgagatgctagaaagattctcaatggagaattccaagaaaggacaactac

SEQ ID NO: 401134 - DNA, 582 bp, Cannabis indica
aaagtgggtatatttgttacacctgaaatttgactgtcatctcagtggtggacacgtgtcaagataaagagaatatagatcgatgcaatcgctttttatggaataactcatcaattacgtaagtattagagtatatttgtaacttgctgactgtaaggtcttaggcgaggaatcaatagacaaattggcacttagtatattatcgagtaaccatatgttgctgaatgcgaatagcgaggcatcaaggacagcgacacatatcaattgcaaaagtccttagtgtataatttacaaactaagtgtaacattcggatcgactcgagaccaagtaagcgaggtgcccgtctcgctatgggaaggcttcctataattgcatctagttacgtcagcgaggcttacaaccctagcgaatcagaagctaacattcaaatgagcttcgaacgactctttataaataagaaccacgattgtcacaagacgtgcatcgtcgacctcggaaggaaaaagggccccagttcgctattagatcactggaaccaagcttctgtcgagacatctgcagatacaacaattaaagatgtg

SEQ ID NO: 401135 - DNA, 611 bp, Cannabis indica
attatttatttactattatataacttatttctatttgttatgatatattttctcttggtaaaaaagacttggagttgagtgagccaatgttattatactgaatagtgtctctaaagagactttggattggattttcttaaaacgcaggcttctttctttacatatatatatatatgtatacattttgcttgcccgaaatcccaaaagaggcaagtatgagattatcacattgggtcattctttgtattgtttgttgatagactgtgcggcttcatcatatattaaattcgtttatgttgattgttgcattccattctttcttctttttctcaacttgaaaatgtttttttatcttttgttttacagttgaagttagacgctccctatagtaacgaggagatgaatgtcgtacgggatgagtgggccgaatttgtgaagcctttgattatagattaagtacttaaggttactacacttttgttataatacatgagtaacaagttttatgattattgttatcttttgcatatgtcattagtttatatttagtttacgatatatatggaatttaagttttagaattgattttattaacaattttggtattgtgt

SEQ ID NO: 401136 - DNA, 1359 bp, Cannabis indica
ttagtgtaatgataaagctattcccaacaagatgctatgatatattacattgtgtaatatacggtttgtatagacgttatactatatatgcaggctgaatagataatgaatcacgagtatgtatgttatgttatgataagaatacttgcgtttttattgcttttgatttaatagcttttcttgctgagtcattgtgactcacgggtgcttcatggtgtaggtaaaaaggtttaaagttgtgtttggccatgagtcagaggtcttctagcagtgtacatatcagccatggtgtcttggctttcgggaagcaggattgaccccttttatatgattggaaatgtaacctacttttgtaataacggttttgtaattaattgtaaaagaattttattagcaagggatccccatattatgatagaattttgaatgaaagttttattttaaacttaaccaaatgttttaattaaatcacacttttccctaaattgatagattagtgataataagattgtaaaagcacgcacgtggcgtccctgagtgtcagggtgttacatctatgatagtgttataatgaataaaaataaataatacgaaataactcaaactgattataactaaaatagaaccaattatataacataatgaatacaaataagtaacacttaataactcaaactgattacaattaaaaaaataaagaggaaaccagttcctaaaatactgaaacataaattaaaaataaaactagttctgtaacaaaatatctcataccacatagtacattataaaatcgattatatttttaaaaaaaaaatgggaatcaattccaaaaaaatattgaggcataaatataaaatgaacgggttccataacaaaataaataaacataaataaattgagttatttcgtattatttgttttttattcattataacactattatagaaccgattttaattaattataactcatttgagttattttgtgtcatttgtttttattcattatgtttacagaaccggttaaaatttcaattataaccggtttgagttatttggtattatttatttttgttcattatgttatagaacctgttttatttttgtttatatttgagacatctacttctggtgacttttttagtgaattttccagtgacttttttcggcgacggtgactttttagtaacttttccggcaccaatgactttttcggcgcctctgactctttcagcgaaaatgtattattgttttaaaaatatgagatttctattttttttacaaaaataggacataaaaaatcccaaataaatgtaaaaaaaataaaaaaaaaaactcataacctcatggtattatttat

SEQ ID NO: 401137 - DNA, 1469 bp, Cannabis indica
ttggtatcagagcgccaggttttctttcgaagataatcacgtcatgtaccatcatcatcaatagtcagctcgtttaacgattgagtaagcttttattgctttagtagtttattttattagtatgatttaagaaaatcctgtttaggaagcatgttagtagcctgatagtagaagaggggcatgtttttaatttttaaattagcggcattagtaagtttttcttggatcacgatctgactagtctagctcttggttacgcaggctgttcaaattagtatggacgccaggcgaagcagcaggagtcgggataatacggttggatcaagtggtggtcagggagcttagattcctctaaatattcgcggtcgtggtcgaggtgatgataacgcgccacaggctaccaaagctgcccaagagtgggaaaaccggttttagaaatgcaagccaaaattaatgaacgagacgaagagatcctacgcttgagacagcagggtgcttctgcaatccctgctccaaaattaccagtagctcctgcccctgctgtgcaggtcgaacctgtagctgtggtgaacgggatggaacctctgtatgaaaggttccgtaagcaggcacctccaattttcctgggaggtcccgatgtcatgaaagtcgagcaatggctaactgtgatcaccaaattcttgaattttatgggcgtcattggtaatgatagagtagtctgtgccactttccaatttcaagaagacggtttagtttggtgggacatggtgtccatgattcacgatgttacaacaatgacctgggaaaagtttcagtaattgttcaatgccaggtattataatgaggcagtcagaagtggtaaaagaaaagaattcacacagctgactcagaaggagaacatgagcgttactgaatacacgacttagtttgatcgcttagcgaggttggcctcgggaattatgccaaccgattttaacaagaaagagaaaatctggatgggttgaatgcaaagatcagacacgacttaatgatcactactgatgacagtaccacatatgctgatatggtggataaggcactgcgagctgagggcgcagtggagtgcaccttagagtgtcgaggaactccagttgttggcagggctcctactccccctacattaggctttagtaggggaggtagtggcttggccactgatcagaaaagaaaggcacctactgcatccagtggctcaagtctgagcaaaaggttccaggggaaccagggtcgaggcagtcaacagggtagctctgagacccgatacacttacccagagtgccccatttgtaaaagcaccatttaggggagtgtagagggcaaggatgttttcagtgcggtatgtcaggccactacaaaagagattgtccctaactcaagactgaagcaccgaagactacaacaaacccactccagcaagggtgttcgcgata

SEQ ID NO: 401138 - DNA, 345 bp, Cannabis indica
taataaatactgaaattcaaaaagtagtaacataaatcctcatttatggtataatttttattctaatgtgtgtgttaagttttgggttcgaattttattgtgtattttcaatgtttgagttttagtgttttactggaattctaatgtttgagttttagtgttttactggaattctaatgtttgagtttgtgtttatgagatctatttttatttatttatttattttagattttgagaacttgaaatttgatgttgtttccattgattattgagattgaaagttttatttttcatacgggaattaaagtgtgccttttcgtttcattgattaaaaaataatagtag

SEQ ID NO: 401139 - DNA, 846 bp, Cannabis indica
attaaaaattctatacaaaccgtttttttgtatttttctttttgttatttttgtatttttttttttaaattatctcaatttattaacttttattttttatttttctaacccttttttccccttttcttaccaaaataaaactttcaagagtaatttgcggcaaaactcctttatgttttaatttttgtacacttaacctcccatttttttttgtggcaaaactctcttttgtttaagttttaatacactcaaccccttattttttttagtggcaaaaccatattttaatttttatatactttaacctcttttgtatttttagttttggtaggcaaaaccctttaagtttacttttctttgactaaatttaaagtttttaattagatattaccatttaaatactaactggtattactactgtatcgtactttaaggttttaccgttatgtatacacaggtgtatacagtggttattcagttgatatttaacagtaatatttaactgacgtgtacaaatttgtaaaagaaaaataaacataaaagaattttactaactaaaaaaaaaataagaaagttttagtgtataaaaattaaaacataaaaagattttaccaagaaaaataaaagataaaatgtataaaaattaaaacataaaaaaattttaccacaaaaaaaataaataaattaagtgtataaaaattaaaacaagtttcccctatcgcagtctcctaacaataaatataaatgttattgttgatagtggcacttaattcaagtcaagggagttctacaatcacagataagtctctctcgggtaggttaactgctaaagccaaaataaatgct

SEQ ID NO: 401140 - DNA, 667 bp, Cannabis indica
gtggatggctgagcaggtagaccgggatccctgatctggatcatatgtttgatgggcctgtgctcagtcagaagtttcttcttacttttaagcggcctttcctgctcttcctcaacctcatcctcctgctcagaatattcttgagcatgttgctcagccccgactcctcccttcaacttagccttgcacttaagttgaataagctccttctcctgctcaaaatgctcatgagcatactgcttggttcctgcacctcccttcaacttagcctcacacttcagttgaatgagctccttctcttgcttagctccctttgcccggccagcactagacttcctcttcttctccttgacaggctgaggaacgaaatctgttggataaagcccgtactctacaaagttggcctctgaggtcaatatggtggtattccgagcatcatccgagagctgaacaatcctttgagctctgtccctaagagctagcgtgaggggcggacggtaatatatagggatctactgaaactgagtgtaagtggtgcccatgccttccacgaagtaatactcgtcaacaaattcccaattttgctcatgaccttatccgtggtgcctgtcaactacttcaagtttggctaagagaagtagaaataccctaacctgccttgcttggg

SEQ ID NO: 401141 - DNA, 446 bp, Cannabis indica
tgataactcaagaccggccctgaggtgagacgaagcaggcggccgccttaagccccaccgctcagggtttcgaaaaaaaaaattaaattatagttagtaataaaataaataataatacttttaatgttgaatatatgttgtagcctagtggtaatttgattagcataacaactaaagtggcatttcgttgggatgaatgaaaatatagaaataggaatggaaatggaaattgaaatagaaatggaatggaataaaatttaatgtataaaaaaaattattaaatttgtttgaatcttgcattggaatagtctttcctttcattttaaaatggaatggtcattctaccaaaataatggaaagacccttctattggaatggtattcccatagttttaaatgcaaccaaacaaaaaaatagaataaaaattatttttttccatttatttt

SEQ ID NO: 401142 - DNA, 605 bp, Cannabis indica
ttcattctctcaattccgcaataaaattaattatatatataactgtataacaaaaaagattgaaatacctcaaatattgatctttaagcttctatcttaaacgagctgcagatctacacaagaaaaccaattatatgagttactgttggaacttattttatcaggatgtagatttactaatatgtatgttgattaacacccgaaatatgaattctctaaactaatagaataaatacatataaaattaagaaaaccttacattgactgcagaggaataatatgtctcattcagctcagatttctatcatttgttcctttatgttgttgagtaataacaagatctaagcctagatctccttctccttcattttgattacccaccgtcttccaaactatgattgagtacttgacttgttatgtgtgggcatggtactctatctaaaggtttgaattaatagaagaacatcaagaaggattcgaaatcactatagaaggaaactctcacttagtagttgtttaagagagttagaataccaggtttagattggttgatgtaggtttgatgagaataagagcatcatatttcttttatagtatttcaacta

SEQ ID NO: 401143 - DNA, 772 bp, Cannabis indica
ataaaacccaacaaatatgtggtcgtttgattttgattatttgagtaaaaatgataatattacaaaaaataaattatatgattattgttattacttttatgagcgagttcttctggctcacaggtgctatatggtgtaagtaatggcaaacaaaagctagttcagccatgaggtgacagtcttctctagcaatgtacatattgagcctactggcctaggtggggagttgccaagagttgtttatgggatgtatctgccatgtattttgatttagtattttggcttgttgttgtatttagtctttttgtaaaacttttacaataaggatccccggaacacagttttagtgttgttatgatgtctgattttagtgttttaatttagtgaagtttgtaatattatcagactatattaattaattattttattagcactaaattagtttataaaactacacacgtggcatcgctataggatagggccttacaatttggtgccagagcagccatggttttgaaggtcctaaagactggtcgaacatgtacatttgctgcgaagataggtcaactcatgttatagtaagtgtttatattatttgctattggattatctgcctagtctattataaaacatgttagggaaagtagcgtagtgatgattatgataagaatatgtgtatggtatacacatattgatattgaaatctgtctgagttttaaatggttagaagatgttgattaaatgtgtgataaattatgtagccagagcaatc

SEQ ID NO: 401144 - DNA, 513 bp, Cannabis indica
aaaaggtcattaattgttctcgttgcggtggcgtgatcgaggattctttgatccaagtctggtttatctatatgcggcacctcctcgattctgaagatctcctggcgaggaggtggcgcctccaacagtagataacatttactgtctttttctccgcaagtttgactgctgtgttgtagcattcccgcgaatctgcttggactccccgcatagaacctactccagcgggagtagggaacttcattgttagatgatagatcgaggttatgatcttcatctccttcaggatcggtcgaccaatcacggtattatatgcagaatactggtcgattaccgcgaagtcagccattgacttggctgttaccggggcagttcccaaagtgattgggagtttgatcattccttttaatgttatgacgtcgccagtaaaaccatagatgctcgacgtcacaggccgcaggtccttctcctgcaatcccatttgtttgaaggcttggaagttcaaaagattca

SEQ ID NO: 401145 - DNA, 593 bp, Cannabis indica
acttcttagttctttatgtgacaatccatttacttcgtttaaactcacaatggatttttatcacaagtgctttccaattcataacaggatgagttccttgaaaccctccactacgacaaggtaccgtgacttttgtctaagaatactaaaatgcattctaaatggtgtgcatcatatattttggaggttccccacctttcaccatccaatacataccctgcaactcagggattgggccaattgtatcctctcattgccaacctcaagatggaatatttgcaagttggcaacgagagagaacttcattatgtatggcctctacccttccacgggcaaaccttaaggttcaattgataagatttctctaaagaagaaatcaaaaatcaaaaggaaagaacccaagattgaagctccccttgagtgaggcccttattctcattaggcctcaagagtcagagtctaacaggactgttcgcctagcagttgttgatggcaagggtgaggcattattaatgaggaaagtgaagattcttcttcaaatgatgattgtaaagcccgcttagttaatttggaaattagcagttatttatgtt

SEQ ID NO: 401146 - DNA, 567 bp, Cannabis indica
aaatataatatacactatataacgttacaacatacaaaataataataaaaataaataaaccctaaggtaaacaatatcaaaaacattcaaacagaaatcaataaaattctaaaaaaaaaataaaaaaaaaaaaccattaagcatacaaaatcaaaatcacataaaaattccaaaataaatatagatacaaaaatatacccagcaattttttttttcaaaaacaaacttaaaaatgaaactatatcataatcatatgaaaaatgcacctacataacggtcctatataatgtacaaacactttttttaaaaataaaaaataaaaaaccctaaagtatattgtaccaaaataacatccgctcaaataaaattctcaaaaataaataaaaaaatatatacaaaagtttttacaaaaatcacattatataaattgacatgtatatttgtgccagagaaaatatattaattatcaaatatatgatcaataaaataaattagatgcaaaaaattatagtatacaatatataaccctataatatgccaaaaaaaaaaaaaaaacaaaaacctaat

SEQ ID NO: 401147 - DNA, 585 bp, Cannabis indica
aatttttatttttaaatattataataatattataaaattaattagaaatattcgttaagtaattgagatattctgttaactttaacgtaaaaaatcaaaaaatattattataccaaaaatttgttacataaccatattttatataaaataaatatcttaactaatccaaaaatttaatatatatatatataactattcttaacatttaataaaatatactaaattaaaatgttaactttaatagaagaatataatatattactagcacacttttaatagttgcattctcctacataagaagcacccattgaaaatactacataaacacctatttactcaatcattaatattataaaaaccacatattatttaacacacattactacaagcaaagtcatttattccaattttcactaaaataaaaaaggaaattttaaattttatgcttacataaggtagaaatttttctcttcaaccctaaataccctatattggttagatgggacaatattttgttaattcccacattaccccctcattcaaacccctctctctttcccctctttctctctttctctctctgtc

SEQ ID NO: 401148 - DNA, 623 bp, Cannabis indica
tgactttatggggccattccctcgatctttttggaatctttacatattggtggtcgtagactatgtatccaaatgggtggaagcaatagctagtccaacaaatgatgccaagatggtgatgaaatttttgcataagaatgtcttcataagattcgggacaccgagagcaatgattagtgatgaagggacacattttgtgaacaaagtcttggttgcccttttagccaaggatagtgtgaatcacaaaatagccaccgcttatcacccacagaccaacgagcaagctgaaatttccaatagagtaatcaagggaattcttgaaaaagtggtgaatcctagcagaaaagattggtcccagtggttagattactcactttgggcctaccgtaaggcatttaaaactcctctaggcatgtctccttatcgcctagtttatgggaaggcatgtcatcttcccgtggagttggaacataaggcattttgggcattaaagaacctgaattttgatctttcagctgcggcagaggcccataaattgcaattaaatgagttagatgagctgcacttgtttgcctatgaaaatgcaaagttttacaaggaaagatgaagaagtggcatgatag

SEQ ID NO: 401149 - DNA, 495 bp, Cannabis indica
aacctcgctcccaagtaaattgatacctcaccagctccaaatcaactaagtcacactcttgaatcacttgacgaaaaccttccaccaaccacttaggatagggtcggcccccacgcttgtctatttgagaaacaacattgttgaaatctcccataagacaccatggcagctgagactcatccttcaaacttctaaatatatttcatgtattagcccgaaggcttcttttgggttcaaaataaatgcaagttaatctccaatccaccatacccaaaattcgaacaatgacatcaatatggttgatcgaaaatcccaccacttcagcttcatcactttccttccaaaaaaaaatgcaagtccccctccccttccttgaccttccacaacaaacgaaccatcaaaattgatggagcgaacacgatcaatcctctccttgctacacaatgtttcactaagaaaaacaaacttgggcttcttttgagaaatcatctcttt

SEQ ID NO: 401150 - DNA, 1155 bp, Cannabis indica
tgacatatattctaagattaattgtaataaaactcaaattgtacttggatttatcatttatacatgaaagttttgattgtatcggtttcaaagctcgttcgctttcattcttttatcaacaccattaaacaaagtgacaatgagtaatatcaaatacctcactaatcaatttcctattatttttgtaaatttgaagatgaataaatttgtaaggttgcattaattaataattagaggtacacattcatggtccttaatttaatggtaaaagcctatattatatagttttatcccggataatattcatttagttaacaagaaagagataggaaaagaaatcaatatggctttgaaaagattcaaaacaatttacatgactcatttaaacatgattttctttctagtgttttgactaattgggatggctagttgatcacttttgatgggatatcttttgcaaaaacaaaattcaatagattaagatggatgcatttaaataaattaaaagaggggtcctctttattcaacttggcctgtccaaaccttgaaaatgtcaagatgggatagacaccaaatgaccaaaaatgtggggtactttgcttttcatttcctctcatataattataagagtattggctagcagtggtgtccatcagcttccataagtggcgtcttataattgattaacaatattatactaaaactaattttcttaagttatataaaatctaatacttaattacattaatagcggcatgatagtaaaaaaaaagtattagacaccataatacctattagcaatattgtaattataatcactcttcaattggttttggaagatgaccatttattaaagctgacatccacattactacaccaatttccaagcttctactctcaaattatagtagttgagacacttgagagattgagagatgatagtaattgcaaataagaagtcatatgtagatatgatatatctatttcgatatttataaaagttttttcaatttttgttttagtgtatatgttatagttatttataaaataaattttaaataattaattagcacacgtataaaaaaaaaaaagataattatgctaagatcctgatcaattctaaactttaagagctcgtttggaacgccgtattag

SEQ ID NO: 401151 - DNA, 1170 bp, Cannabis indica
gtcaccgtgttttccgttaatctcttagatcaacgggaggatatttttggccccttcttcctctccctccaagttcctggtgcacgaaaacgctctttcggtcctctcgatcgtgagggccaagattccctttttggagtttgcccctctgcagacctttccatttcgggaaatttgagcggactttttgcggatcctgcacctttttctttttcccaggagtggaagtagggtttttctgttggttcccttcagagggataccttatagggctaggttccctagatttctgcttttgggcacttggcgaggattcctctggagtttctccaagtccagcagggatggctttatgatgcacgtggattccagcagcctccatggctttttgcatggccatcatcacctcttgcatctttttgttttgttctttttgggcaatgatttcagcttcgtgataaacaaccttttgtctcaagagtactagtttcgtatagctgcatccgtcgtaggcgtcgtactcatcaaagtttccttcgtattcgtcgtcgtgggttccttctccttcctcagagcccacatttactcttgaggccacatcctcatcgtctgggtcttgagcgtcttgaggaggacggggttgatgtgttgcgagtctccaccattgttgttttgtaatgttactgtctacttgcagacgctttcttcagctctcaatgaaagcacccaaatgttgaccgaggttttcgacaaccaatataataataatatttaagagagctgtaagaagttaatccacgagatttttacgtggttggggcattaatgagccttagtccacgagtctttgttatttatgagagtatttattacagagaatgttcttggtggttttttctctctagttcttatgaaacctagaattcttgacccctgccttaatgattttggagggatttatagtgtttttctggggtgatccccagaaccgaggtacatgtctttctgtattattcagtgaaagcacacgttcccaacgagtacatcataggaaatgcatggtctaatccctaggctttttaggggggttagatggatataatcctttatcctttcttgactgatgtgatttctcataaagtagccgtcactaggctcatcaatcatagc

SEQ ID NO: 401152 - DNA, 949 bp, Cannabis indica
aaaaacgtgattagttaaaatttacttatttaataaaaaaacttaaagtattacatatataaaattctggactcccgtttacaaaatactttttcaaagtttgctatacacctaaacaaaagcttgttgcccagcgactatacaacaaaagcctcgatgtcccaaagatcgtacgctccaagtctaaccgccccgacatgtacaatcttcatctgctcgtcctcaagattcctcagctttagccttgcccttacctacacatggaaatagcactgtgagtcgacagactcagtaagaaaaccatagcataaacatacaactatcccgggttataacctggcgcctatacacccgatcataaccctaatcctcttgtcccacacaatattgagtctagaacgttcataagacaatgtaattgacaataatgtcaacctataatcaatatgctagtcatactgtagccatattgatgtgacagcatcgatcaatattttacccaacatacatttattagtaatcagcacaactctatttatactattactgctatcaatataatctaacaggcataacaacatgtacgctaaacatgtaataacatatgcatgatattatactaatcttacctaaattccaaattcaggtgtgccggtcaacctgagtggaacaactgctctgtaaattataagctcctaagtcatattgataataatacgcataagtgactcgctaaatcacaatcgggactacggtttaaaaccaaaaccctatctactacaacttaatatggtaatatcccaaactagcagggaatcaaccaactagaaacttgaaactgacacgaaacgacaagctgaaaaaccgatcttcccccctactacaaaatccgggtaaccggttttacccaaaaaaccaacaaaaaatcataccctaaccaaatcatttc

SEQ ID NO: 401153 - DNA, 496 bp, Cannabis indica
acttcttttggcttagtcggtgactgcatttctactaatgctttgatcttcgcaggatttgcccctattcctcgctgatgaaccataaactcaagaaactttcctgaaccgactccaaagacgcactttaagggatttatccgcattttatatcgcctaagtatctcaaacattgcttgtaaatggttggcatggtcttttgcctgttgagatttcacgagcatatcgtcaacatacacttccatagtatccccaagcaaatccgcgaacatcatatttaccaatctctgatacgtcgcacctgcgtttatcaaaccaaaaggcattacttcataacaatacagacctcgatctgtaatgaacgatgtatgttcttgatctggctcatacatcgggatttggttatatcctgagtatgcgtccataaagctgagaagttcatgacctgcagtggcatcaacaagttggtcaatgctaggaagtggaaagctgtctt

SEQ ID NO: 401154 - DNA, 1107 bp, Cannabis indica
ctatttttttaccgtatatgatgatctaatggtgaaaatggactttcagaggtcggtcgtcaattttttggagcttgagtcgcgtctgcaggacccaccttggggaaaactgtagcttaaatttgtaactctcttgaaggtaaaattttgagccaataactctagaactgtgattaaagtgtgaaaaatgacttgatataagttgaatcgcgtcaattggacaattattcagtgaattatggcgattttcttgaaggttgttctcgaccaaacacccaggttgacatttgggcgcccaggttgacatctgagcacccatgttaacatccagtgcccaggttgacatgtattgtcaacatggatgctggaagagtaggaaaacgtgtcgatgatgtagtttttgatgcctaagtgatatttggacatcacttagattgtttctatgttctagtaaagttggtcactaattctcagagatgtcgttatattgggaaaacgtgagactcgaaacttttgatttttgagtaagtcacttagccagataagtgaaaatttaaatttgtgaatttgaatcttctaacttcatggctctcagtcattacgaaaaactaatcgaacggtcgagacaaaatacaaatcagataagcaaaacccagtgcactaggccatttgttaacttgagtgttgggtgcttattttggagcttccgagatgtcattttgacacttccaaggttcttgaacttgaggacgaggtgtcctacctaatattttaccattttagagagaattttcagagcaaaatttacatttgagtgatggaaaccagcgcactagcttgattgtcaacataggcgatgggctcagttttgaagcccttgaaatttattttttttctcccaggtttttcttatatctttgttatttctgatgatgaaaaaaatccttaggacactttttcaaatcaacaatctgtcaacttgggcactgggtccagtttaaggcctcctggaagtttcattttcttcctgaaaatagttgaatcttaatctttgatgaacacaaagaatattcccagaataattttgagaaaaactcctcaaaatcg

SEQ ID NO: 401155 - DNA, 667 bp, Cannabis indica
aataaaatacaaccgcacgcgaaacgctgtttgtttcttagatctataagatctatattatttgttacatgtcaactttaaaataaaatacatgtcactctaagatctctctaatttagcatttatttgtttctctttaattttcttatgttttaattttttattagcttcatagatataattctaaaatctatatttaaaaatgagtatttaattatattatttagttatttatttttttcattttaattttttattggtattatctaaagttatattttttgcttttttattagtattattgaataatgtgattgatttttaatttttcttctattcctgattacttttgcatataaatgtagtcatttgattagttagattttactttcttaatgggtaatacctattgattggaaactaaaaaaaattaataaggtaataatctaataaccttttatggcaagtttctaacaattattttttttaaaaaaaaattatatttattatttataaaattggaaataataattacaactaataatttgaaaaaaaaattataaattatttttaaaaattaattaaaattactattttattattttatgaaattgtgagtttgttaataatttattattgtaaaactaaaaatcatttacatgtatat

SEQ ID NO: 401156 - DNA, 1258 bp, Cannabis indica
attatagtgttttaacgtttatcgttttacagaaaagtttcatattttagggtgttttaaacacatactgtgagtagatctaagatcctggtaaaaataaattacccaacaacaggtactactcgtaatatatcgaaattcagttctatttcacatagcataatcgacactcacttctcagatactcgcaatcgaaatacataaaacagttatttgataggccagacaattaaaagtaattaagcatgaatgaaatagattacatagaaattagggagaaaataaatacatattaaaaccataaaacaatgtcaaacaacatccatctagaccctaatcaagtgtttagctacacatgttcatgaaagtaaaatcacacatattaactttaagaaagagaagaagatagagaataaaataatgatgaaaatcttctgcataatatccacataattatttaaacacaataaatttcctgtgggataaaattattatgtccacataattaattataagttatgttcgttaaggtaaattttaattaatatatataattttatataataaggatgttgtggctacttccaaattatttaaaattatgttttcacttagacattaagtattgggttctacctaaaagcaatttcgttattaacacaatagataattactgagatttgtgcttctagtgtggtcctctgaagatcattaaaaaccgttctatatatgagcatttgttgcagtttcatactttcttatgtcaaaccacaaaaaaatttgtttacattttattcatattatattcattttatgaatgttttatgaaaattaatgtgctaaataaaatattcaacgtatcttaatttttgaatatattcttaatatatctagcactatttatagaatctatatacaatatttaaatcatataaatattaattaattacactaataataaattataaaatttaatacgaaatagtataattattatataataattaattaaatgataaattccataatttgcaattagtagtaaatatttttcaaaaataaataatttagacattaaattatttaatttggtaaataaatatgataattgtgtagctttaagtgttaaagtcaacacaattattaaaattacatgtctaaataaaattatgtaattaattatcaaattatattttttttaattttaatttatactaaataacatataaattctgaatatatatttttaaataaaaat

SEQ ID NO: 401157 - DNA, 985 bp, Cannabis indica
gttaaatttgttaaaatggcccctagttaaaaaattaaagatattcttcttctcatggtaaattttaacaattttgttttttacttttacactcgttattgttctcttaaaatctaaccctacacatcttgaaaaatcataaaatttcactgggacggagcccagaccgctgtgcatcacttttttattggacaagttgagagaaaaaatagttttcaagaactaataatcaatttaatcaaaatagtgaatacctcatatttctgatagtggtacccctttttgaaatgtggcctgaagccatcttagaatatttttcacccctagtcttaatgaatttgtactactaagacatgaatattaagattagtttcacgttaaatttaattaaaatgacctcataattcaaaatttaaaactattcttcttttcagggtaaattttaaaaagttctttccttacgcttacactcgttagtgttctcttaaatcctcacgctacagatgttaaaaaattgtgaaatttcacagggtcgaagccaagaccatcgtgcatcagttttctattagttacgttgagagaaaaagtagttttcaaacactaataatcattttaatcaaaatagtgaaaatctcatatttctgatagtggtttccctttatgaaatttggcttggacctatctcggaatattttttcccactagtcccaatgaatttgtacttctaaaacgtgaatataaaaattagtttcatgttaaatttggttgaaatggccgcctaattcaaaaattgtaagtattcttcttctcatggtaaattttaacaatttttttctttattcttacattcgttagtgttctcttgaaatctcaccctacacatctcaaagagttgtgatttttcattgcaaagaagccaagaccattgtgcactacttttctattggacacattgagagaaaaagtagttctcaagcactaacaa

SEQ ID NO: 401158 - DNA, 1526 bp, Cannabis indica
tctctcttcatcatcatcttcttttcttcttgtatattttatattattcataataattttataaaatattaaaaatttgatgaaatataaactcatagggttaatgtacaaatatagtaaatacatttgacaaaattaaatatctataacttccaatctatattattaataattttatattaccatatttcgtgactatatagtaaatacatttaataaaatcaaatatgtataaattccaatttttattattaataattttatattaccatattttgtgattataccgtgtcattgctgtcaaaagctttttttttattaccataccctaccttacaaaataaataaaataaatttcattcaagaatcaaaaataaaaattaggcaagttctactgtaaagcaagacttacacaaaggaaattaatctcaatccacatgactcgagttttatttgccaaccgtaccttaccttattatcctttaaaattgggtgcattgtatctagtgtctaattataattacgttatttcaaaatggaaaaaataaatattcaaaagattggaaaattaaattttgaagcccttctttgaaattaatttcttgtatgagtattagaaaaataaaatttttatttattcatacaaacttttattttattttcacaatagccatgtgattaattcagttttcatgaaatactattgaatatatagtaatataataaaccatgaaatcaaaacaaaagcccccaattcttaaacaacaacataagaaaaaaatttaagttttgataattaaataaatacttattttgacttttggaatgatttatatataaaaatgcaaaacaaaaaaacttataaaaatattattgaaattacataataagaacactaataacacatataattattaattgaaaaacatgaaataaaattaacaacgattgtgaacccggcaacaagagaattaaaaaaacacaccaaacacaaataactcatcatgagaataagaactaagacaaatgaaacacaaataatcaccatggctaaacaacttagttaaagttcatgtgaagtggttattagcccaattatttttgttgttgtttcctaatggaaaaatcacgtctcttcccccaaatctcattggattattattattaatattagtttgagtttgagggttcgagtctccccttaatcgctgcctctgcatggcctcgttatggccattaatgttagttgccgcagaattagcagctacattgactttcacttccccattcatgagtggaggcattgttgctgcagctgcagcagcagcggccatccgagcagactttgtatctttagctattttttccattctcttattgatatccttcaaattctggtcaatgagccaagtgagatcattcaaatctgtaacagttaagccttggaggttcatcttaccagagagattgccatataagagtcgattcatctccttgtcacgattctctttcttcagcttcttcac

SEQ ID NO: 401159 - DNA, 1039 bp, Cannabis indica
ctgctgaaagagctggaggaaaaactacttgatatgccacttgtccaaccttctcgagaatctcgcaaggtcccgtaaatctagggcataacttgtctcttttcctaaaacgcctgatccccttcattggagatattcgtaaaaacacgttatcccctacttggaaatcaatatttttgcgtttcggatctgcaaaactcttttgcctactctgagaggcaagcattctagctttaatcttcccaattgcctcattggtccgctgtactgatcctagacctaggtatgtcttctcccctgtctcatcccagtggatgtgagatctacactttcggccatataaccattcataggaagccatccctatagtactttgataactgttattgtacgagtactctatcaacggtaggtacttactccaagagccctcgaaatccataacacatgctcgtaacatatcttccaatatctgaatttttctttcagactgaaagctgtactgaattttagttcagtacccatagcccattgcaaactctgccaaaacttagaggtaaacttcggatctctatccgaaaatatggatttcgatacaccatgtagtcttactatttctttgtcatacaaatccgtttactgatccactgaaaaggttgttttaactggtagaaaatgtgcagacttcgtgaatcgatctaccacaacccaaatagaatcaaacaaacccatagttctaggtaacccaaccacaaagtccattgcgatatcttcccacttccattcaggtagtttaaaggctataaaaatcctgccggtctctgatgttcaaccttgatttgctgacaggttacgcatctccatacgaattctaccacattctgctccatcagaagtaaggtttaagatcttgatacatcttggtggtgtcgggatgtagggaatatggagtggtatgagcctcttcaagaatttcatttatgagttttacactatcaggaccacaaaccctggttttgaacaatagcatcccactgtc

SEQ ID NO: 401160 - DNA, 656 bp, Cannabis indica
tttaaaaattataataatagtactaaataattacaaaatacacaatcatacaaaaatattagattaaagactcatgaatattaaaacatattgaagaggtctctaaaaaatctttttaaaggagtgtattataaattataattttaaatggaattgggatttgatcaaagaacactaataatactcatgaaattattaggattattgtatcatagtaaaatttaataatattcgttttttttttttttaataaacttaacaactttattatcatagaaattatcaggattgttgtatcatagtaaaatttaataattctatacatttcatctaataattattataaaaaattgtttataactacttgtgaaataaaacattatagtaatggtgtggggtcacatgtgcttaataatttgctttatttatttaatacaatcaacgtagtgactaggtgaagataataatcaacataatatccctttttaaacaactaaactaatctaatcacaagctatatctaatgtatcaatctaataaatgtgtttgatattttattgggttgagttgagtccacatggtggagcctattgtcatgagatccatccataatcttttcttcttctttcaaatgctaaataccatgaatggtggtg

SEQ ID NO: 401161 - DNA, 588 bp, Cannabis indica
tatgtcttcaagcgcaagaacgatgaggcttagattatcaacctcgaaaagacatgggaaaagctcctgctcactaccaaggttaatgttgctatgattcccagtgagacgttccagaacgacgtgatttacaacatatttaacacatgtttacattgacccggtaaaagtagacctatcgcagctgtgtgatttttaaatattaatcgcatttattttacgtggtatgtaaacaaataccatgacttcaggagataattgttgtaaaatatcagttaactatgtaattaactgtcctcctatgtaattataaataggagcaggttatactaaaaaggggacaaaaaattcatgagaaaaaaggcctgagagctatattagaaatccaataagattgactcgtggactatgtagcattttaactgcaaaactacgtaaagacctttgtgttcttaccttttctttacagcttttaatttgtgtgcaagtctatcacaatttaggcttaaatatagttaacgaaaatctgtgttaacagtttggtgctttcattgagagctttcgcgaaaaaagctcagaaaaaacctc

SEQ ID NO: 401162 - DNA, 733 bp, Cannabis indica
aattccgtattagggtatcattagtagttgtacatgagaaaatcactaatcaatttaaaattagtgtttttcttagtagttctgagacacaaaatgaacgatcaactctatattagggtaatataactagttgttcacagaaaatttgttaatcgatttaaaattagtgttcttcataatagttacgagacacaaattcaacaaacgattctgtattagggtatctgtaacgccctaatgctaaggcacactacagtgctttttcaattatagtgcaatctttgctaatcaaagaattttcttgaaaaacgtgtcaaattaaaacttttatattaattaataaacttttaatatattaaaatatttacaactgccgcgatcccgtttctaaactttttaaagttactgtttcaaaatatacataatccaagtcgcatagcgactacaaaatataatccccagctgtaaagcccgcttagttaatttggaaattatcagttaattatgaaattatttatagctatttaaataatttattgctgttatttatggaattcagaaatgcatatttatgttatttagtagttttcgtattttgcatttccggtgcccggtattttggaactcggcgtttggctcagtagaaatcacaacttagtatgttagcagtttggggacgggttttagacattgggaatgtcgggagtggccgggaatttagaatgtcccaaaa

SEQ ID NO: 401163 - DNA, 503 bp, Cannabis indica
agactgaatcacgttctcatatttgtaggtataaaatgaatgcacaccaatatagctttttttaagtctccatgtgatagagaaccaaacaggatgagattttttttttttttcttctgaacaaacagtgtgatattttgtaaagagataattacataaataacactttttttttcttttaattttaaacatttttacatttaaagttcttttttttacaatttttatagtattttataaaaataacacaaaaataaaaaaattacataaaaataacatcaaaacaatataaaaacataacatacaaatattaaaaaattaacaatatcttgataagagtacaatagaaatatacatatatatgaaataaaattataaaaatatttaaaattttatacaatcgaattttaatatatatttattatttttatgtatttatgaaataatttttttaaaaagttggctcaaagagaataaagccccataacagtcccaagccccaa

SEQ ID NO: 401164 - DNA, 518 bp, Cannabis indica
cagtaatacccttgccgcatgatatttaagacaagagaattacagccagtatgatttcagcagataccactatgtacttcgcggaggacataatcgcattcctccccgtcattgcatttgagtagcggttggctgaagcttctgcgatatagtcttccatcgtagatgacatatcaggcaactcgatgtcgcaattttcttgcttctattttatcattgggaaagacctccttttccaagtaattcactatcagagtcatccaagtaatccctctggcaacgtctatctccatcacttcatctcgactcaccgttgggtgggttagcacatagacaggaatcacatcgagcaatttagcttctcttgttgaggccaagcaggccaaagctctgcgtgtgaattatgagcacgcggtactcgtgagacaatcactttcttgaatttctgcaacaactcgcatgttatggcgaggtacttagccaaacgctcgcctttggcaagatattctccatttacc

SEQ ID NO: 401165 - DNA, 746 bp, Cannabis indica
ttcaaagtcaagcacacatgcctaaagcatgtcttctaagaactgaatagtcctctcagactgtccatccgtcttaggatgaaaggttgtgctaaacttcaactgagtacccatagctcgatgtagactcttctagaatcttgatgtaaactttggattcctatcgaaacaatggactttgggacaccatgaagacgaataatttctctaagatgtaactaagcatactgatcaatggagaagttcatccaaacaggtaaaaagtgcgttgactttgtaaatctgtccactatgacccacacagagtcgtactgtcccgtggttctaggcaatcctaccacgaagtccatgacaatatcctcccatttccactccgggatattcaatggttgcagcaaccctgcaggcctctgatgttcagctttcatttgatgacaagtaagacacttacaacatactcagcaatatcattcttcatgccttgtgattaatggtaaaatatatacatttaataagcttaaagtttaaattaaaatcatattttcatgaaatttacgagatatatttttatgttgaaaatatttaatttaaatttaatttattgtctttttttgtaggaattaaaattattatggtatattaaagtgaagaattggagtgaaaaaaataatatttttttacaaaaagatcagatttcggatcctgatagaagcccactcgcgcatcagcaagctcctcaatctggg

SEQ ID NO: 401166 - DNA, 1035 bp, Cannabis indica
atcttttatagcgaagtctaaacttgattcttttttacaactttagctcatggatgccaaagcttaccacataaaaattcaacacgactcttgcatgcacgatgtattttgtagaagaaagatcactgggggtttgacacgtcttcaaccctcctcggaatggaaggatttcttgaagtctaccttactccccattgtttctttctccttttgattattttcaaatgatgtctaagattgaaattttctgctaactttatcgttctttcacggaagtcgaagcacgataaaagttcaacgttactattgcatgcacgatgtttttcgtgctaagaaagatcacttgggtatggcacgtcttcaaacttccttcctagaatggaagaattgcatgaagtctgaattattccctgtggtgctttctccttttgatcttttcaagccaagtctaagcttgacttatcatgcaatttccgccttcttttaaggaagccaaagctttcctcataaaaattcaacgtgactcttgcatgcacgatgtttattgtgcaagaaagatcactaggggtatggcacgtcttcaagcctccttcccagaatggaatgattgcttgaagtctgccttactcctcattgagctgtctccttttgatattttcaagtaaagtctaagcttgaatttttatgcaacttcaactttctttaacggaagccaaagcttgcctcataaaaattcaacgtgactctttcatgaacaatgttttttcgtacaagaaagatcactcggggtattacacctcttcaaccctccccgaaatggaaggactgcttgaagtctatcttactccacgtgatgctttctccttttgatcttttatagcgaagtctaagcatgaatttttttcgtgcaagaaagatcgctcggggcatatgtgaatggcattactgattagatagtgtagtaaatatgtatatcattactttatattgtattggtgggattggctcacgggtgctctactgtgcaggaaaggg

SEQ ID NO: 401167 - DNA, 916 bp, Cannabis indica
atggtaaatgcagtgtacttttcctgattctcccgcggagcttactcgatttggttggtgaactttccttttttcacattcccttgcctattgttgttgttggaacgtttaccatttgagcttgaattatttgggtaattggggatttgggtggacgttccagtagaaggagctttggacttgccatgcttttactcaccttttgctcgttgaatggcttcttcgagcttgatgaagccttcagcgcagtcaagaaaatcactcattgagtctactaggttgttcttccttatgtccttccaaagttcaacgaggacttcaatgccccccagtatcgcggacaactttccatcttcaattacccgtgaaactttggtcgcctccgtcatgaatctgcagatgtatgctcgaagaggttcgcctggtctttgcttgacttcgaccaggtctcccatatgcaatggaagttggcgagaggaggagaattgtgcatggaactccgaagagaaggctttccatgagttgaactttccaggggccaacttgaaataccattgctgggcggctttcgaaagggtagcaggaacgattctgcaacacacatcctttcgtatcccctgcaaatccatttgcatctcgaaatacatgaggtgggaaagaggatcttctcttcctttgtacattttccatgttggcattttaaacttgtggggcgacgccaaaagattgatctctggagagaaaggagttccatgtgctcggtccagctcgagatcattgtttctcagtctagccattccttggaacatattttttagttcgtctagctgtgcctgtacaactggactaacctgctcagcattctggtcgatctgaatcacatcagtatcttttttagcgggaatttgagcacggg

SEQ ID NO: 401168 - DNA, 796 bp, Cannabis indica
catttcatcacacacacataacacatatatttcataattcctcatttatcacaataatatcaaaattaaatctcaaaaatgtattttgggtcccgaatctgattcggcctaaacccgattgtgactataccgtgccaactcgtcagaaaatacctgcagatagacagaatacacatactatataataatatcatccataagcacgacatatcattaaattacgattttacccttctcgggtcaaaattacgaaaatgctcttggtacaccaacggggcctcaaaatgcaatttatcagtaaagttttatatattaaattatataataatataattcttcattaatacataattaaattagttagggttgcgaatctaattttgaaaatcttagggtattacaattatcctttccttataaaaattttgtctcgaaatttacctgaacaactctggatatttctgttgcatatccgtcttgagttccctagtacatcttctactttactattcctccataacactttgatcagtgcaattgtcttgtttcactagactttttctgttttgtctaatacttgcactggttgctcctcgtatgaaaaatttggctgaagttacaatgcttcagaactcagaatatgagacggagatgagacatatttccaaagcattgaaacatgaaacacattatgtacacctgctagcgctggaagcacaaccaacatgtacgctacttgcttgcttgctatttgaggcgaaataataaattatgcatgattaggaaagtgatttag

SEQ ID NO: 401169 - DNA, 541 bp, Cannabis indica
caaacaatcatcataaacacatagatcaacatgaatcacatccaaatcacacatatatcgtttaggttccaaatttattgaaagtaaatcaattaccatggctctgaggccagttgttggaattattttactaggatctaaatttactaacaagtatgttattaacatcctaaacatgaacttctaaaacgatatgaaataaacacatataaagtttcaaaaaccttacagtggttgtagcggaatataatgtctccttccacttagatctctaacccttgtatcctttctctagaagagtatcaccaagatctgagtccgaatctccttctcttgaaactggattcttcaaagccttacacactattattgagtaccacttgatgtgtgtgggtactcactcttttcactatagggcttcgattttgaatagaaaaaaagagagagaaggtttcgaatagggagagtgagggtggctaaaaattttactgaaggaatgagttgcatcattctttttcctttgaagccatcactacctatt

SEQ ID NO: 401170 - DNA, 665 bp, Cannabis indica
ttggttttgaacatattaaggaattttatcccgatgaacatgattttggggagatttatggtgcttgtgaaaaatctggtgaagataagttttataggcatgagggtttcttgtttagggagcataggttgtgtgtgcctaattgttctttacgagatttgttagttcgggaatcccatggaggagggcttatgggacattttggagttgctaaaaccttagttatattacaagaacacttcttttggccccacatgaaaagagatgttgagcgaatttgtggtagatgtgtaacttgtaagcaagctaaatcgagggttcagccaaatggtctttacacacccctacctattcctagttcaccatgggttgatatctcaatggattttgtgttgggtttacctaggagtaaacgtgggagagactcaatttttgtggtggtagacagattttctaagatggctcattttatcccatgtcataaaactgatgatgcttctaatgttgcagatttgtttttcagggagattgtgagattacatggtatgcctagaaccattgtatccgatagggatgctaagttcctaagttacgtttggaaaacattgtggggaaaacttgggacaaaacttttgttttctactacttatcatcctcaaaccgat

SEQ ID NO: 401171 - DNA, 810 bp, Cannabis indica
tagggattttatatgttgaactttgacatgtaggggtattcattcaatctaatatgttttcgtgtggattttatattttagatccaatcaaattcgcataataacttaaatcaaattcaatctgcaaaagtgtatttatcagttattttggattgattacttttaatattaaattatttaatataactaataacaaaataaataaattattgttgttttatgtttctaataacaaattaaaataaataaaacaaaaaataataaattcaaaaaaaaaaattgtttatgtaaagaaatatttaatttttttaaaattatatttttttttacaaataagaatggagtaaaaatttgatttgaaatttttttatatcatatgtattagatttttaaattattaatttttatcttaaaatattaattgtatatataatgttttttactttaaaatatgtgtagattgaattggatcggttatttttacatgtaaatcaacattcaatccacacaagtgaggattttagattctttaatctaatctaattcgcacaagtacaaatattcatgctttgcgaatttattggattggattggattgcgttgattgtattgaattgcgtattttatgaacactcctattcatatgtatcaaatcatgttctaactttttagattgttaaaaatcttttgagattgttggattaaaagaattttgtccaatttcgtttagttttaataacacgttgactgactactttcatatgactaaacatacctgttgaccgaggttttcggcaactattaaaatat

SEQ ID NO: 401172 - DNA, 560 bp, Cannabis indica
ctaaaaactagaattgaaatgttaaacttgaatgaaaaataaagctattcaacagtaaagaaacaatgtaaattgatatacatactaataacaaaacataaattcaaagataaattttaatgttgtgaattacacaaccaatcaaataaattggcatagccaggtgaaaacaaatataaaacctagataaacattgtgcatttaatctaagaaaaaaaattaccatgctctcctacgttccctccatttactatacttgtaatatcccgataagcctaatagtaaataattagggtttgtatttttattatgagttaataaggtaataagtgagagtatgatcctactaatttatttcagtataaaatttaaattttgctataagtgagtaaataatcgtagtttgttaattacagagatttatatagcatgtgtgaatgtaatatgagctatatgtggaataaaaatattttgaagtttggcgaccctggagacccgattggaggccaaaaatgtcacaacagttttagttagaaatattgatgggactattgggataa

SEQ ID NO: 401173 - DNA, 903 bp, Cannabis indica
attatatgctttagtgactcgcagataataataaatcaagtcttgggagagtaccaagtgaagggcttgaaaatggccaaatacttaaagaaagttcagaggaacttggaaaagttcgattacttcaaaatagaataaattccaagagagaaaactctaatgcagatgccctagtaaaattgccatcttagtttaatcttgataagttggaactttgtcctggtggaggtactggacgagccaagtatatgtgaagaggaagatgtgacatgatagatgtgaggcctacatggatgactccaatcatcaagtatctattgcatggagaacttcccatagataaaaccaaggcacaaaaactcttatattcgattcctcgctacacaatggtcgagggaaaataatacataagaggatattctatgcctctactacgatgtgtgttaccaacagaagctaatgaaattatcagagaaattcatgaaggcttttgtgaagatcgtgcaggttggcaaaggctgtttaaaaagataatctgtcaaggatattactggccaactatcaataaaaacacacacgagttcgttaagagatgcgacaaattccaacggttttcatatataccttgagtaccacctaccaagttgagaatgatgacctcaccatatcattttgcaatatggaggattgatttgattgggtctttacccagagggcgaggaggcgtaaaatatgctattgtggcagttaacttcttcacaaagtggatagaagtcgaaccactcgtatcaattacatgcaagaaggtgcttgatttcgttatcaagaacatcatttgtaggttgggtatttcaattaagatagtatctgacaatggtgctcagtttgatggagagttattca

SEQ ID NO: 401174 - DNA, 551 bp, Cannabis indica
cgggggggaaaaaattactaattagcctaaaaataaaagtcacacatgcaacacactgtctgaatcttgttttcgacgtgttatatttttttcaaattttttaaaattttaccaaatatcttaaatgactataatctacatgactatgagaaaaaaaaatttaaaaaattattttaaatgtcaaaataaataagaataaaggagtgaattgtaaaattttccaaaaatattttatgtaacttttccttaaatttttaatctttgataaaattgctatgaaaacttcaaaaatttagttatagcaaatctttgctatacgaatacgaattgaacctagtatattatattaaataaaggaattacataaaaacactcatttttgtaaaagaaatttatatttttatgtttaaattttttttttacatttttatgatatgcaataaaatacaagaaaataacaaaaaaattacatcaaattaataaaaaaataacaacaaaacaatataaaaaataatatacaaataataaaaaatcaaacaacaaaataacaa

SEQ ID NO: 401175 - DNA, 759 bp, Cannabis indica
tagaagcaattaattcataaaatttttaaaacacatatagaaagttaatgtcataaatcaatgctaacctggtcagcaaaatcaaatatcaacttcttccccatatttttttgtaaaaatctctcttagttcaaataccagagtatccaaggctgtagcaccatgcctctcaaaaacatcctctatcattgaaaaggctctctttcttatagccatttgtggttttgttaactaaatgtcctacaaccaagaacaccataaataatagtaaatgattaaaatttcaagtggttatttttacctttggaagcttgggaagtcttctagtttcattgctttccacaatctccttcgcagtaccttcatatcaccacaaacaccaatctcatccttcgcagcatagctaatccccaaaatccatcaaattaaaccctgtcatgtcaactttcgaagcatcacatgatatcgcggccactgcatctgcaattgttgaaagcgccgccgtttggtggtccagaagggcaaaaactccgtacatagaagagatcagccccaatgtttccagcgtagtagcctccttttgggtcaagtctagcaagtcaatctctagcttttgcgagttcttcgtgttcaatgcttcatcaattcgtacttgtgcaaggccattggcaaatcaatggcatagacagatgatgaggacagagacgatatcatcccttgcctcaccctatcgtggtaacaaagacttcgactttctct

SEQ ID NO: 401176 - DNA, 636 bp, Cannabis indica
ataaaaatgctttgaatccaatttaatattatgtgtaggctaaagtctctggtcatttaatattttccaatcaaactgactagaagacttatagagttcaagggcttataataagtctctggtatgttttcatcttgcttggtttttatttattggttttactttcctaactaatgatgtttgtttatttgttgcaggacatgaggaacaacgcacctccatatctaaattcctaaaagatatggtaattttaggtataagcagttttagattttgataactctcttttgttcacggtaaacttttgtttagcttcaaaataatttttaggtaaggactgaaatacaaattcttagttcagtgtcaaggcattatgtttgtccttatatttttatattaggtcaacatggcactatgtttgcacttgttggatcaactttacttgtaaaggaagatgagggtgcttctgtgatctctattgaaggggttatatcattcccctcaatgtggtgaagagtgatgatggtttcaactaatctcacggctttgtggtttgttgttattttatatgatgtttttgttaacatttcatgtattattattagtccaaataccctttaatcattcactttcttt

SEQ ID NO: 401177 - DNA, 539 bp, Cannabis indica
aagatgaagggacgattgttggtcttcatttgggtctttggggacaaaaattgccatctggagcggaggttcgtgcgtaaagagagagatggcgattgagagaggaggatgatgcagaacgatggagagagctccaccggagctgggctagacaaccgcccgtaagagagaagtgaaggaggagaaatggtcgggttaggctcagaaaatttagggatttattttcctaaggagaaaaatagagagaagaggaaaaagagaaatttagggttttctattgtgtgggttgttgagtatgaagtaataatttttttttctatgaaaattgtaccgtatgtgctctttaatgagaattaattttttgttttttcaaaaataaaaataccaattcaatatatatatcattcattttaaaaaatatatctatgtttatatatatcattttaagaaaatatatatcaagttatatttttagtatgtacggtgatgtttattattattttaattaaatttatatttatgatatagtgacgcgctaa

SEQ ID NO: 401178 - DNA, 785 bp, Cannabis indica
tttctcaaaaatttgtaggatatcttaaatagctataatgtacatgaatatgaaaaaaaattagactaaaaaatttttctgagtgttgaaattagttaaggatacatcaatacatcccttttatgggggtgcattgtagaatcacccaaaaaaaatatatagagagaggagttctataatgagcgggtcacttttgtgtataatggaaaatttcatttactatacttaaaaaatcacccaattactaaatacctccaaaatattctataccatcttatcttactaattcttatgctcacctaaactaccatcccaattaattttttcaaaaagctcaaaaactctctctcaaaaaacttaaaaaaaaaaaaaaaaaaaaacactaccattcccaccaccacgaatctcagaggaccacatcggaggaccacaccaccattctagccaccaccaaaatcggaagaccacaccagcttctgtcgtcagtcgaaagtcagaccacgtggccacgtgggataatgggaagtatttattcaaccattttgttaagcaattgtaaaggtatagttcatcactagaaatttagatgtaaaatatgaagcagatatgatcgtgtatgaaatgcagaataaatcgaacatataggcaatacgaaatgtattgactgttagaaaaattaataataaacccaagatctatttgtatataacatagaacacaatagtaatacataataattaggtatgtatacctgattgatccatagcaattatctcagtttgatc

SEQ ID NO: 401179 - DNA, 514 bp, Cannabis indica
agtttggcagctgctaccacaacttgggctcctccagctcatggtacccttaagctaaatgtagatgcagcagttcctaagaacggcggaagatcgggttttggtggagtcatcagaaatagcgaaggttcggtagtcgcagctcttgcccagccctatgtcggaggcggtcctgttgccactttagaagccaaggctcttctatcccttctccgctggtgtattgaagagcatttttcggttcgggtaatagaatcggactgtaaagcggtcaccgacgccattaacaaccccaaggaagacctttcggtgttcggagatctcattcagcaaatcagagatactttgtcctttttccctgcagcccgaatatctcacgtcaatcgcaacgccaactctttggccgacaaactggcgcactgggcttcaggtcaagatgaagtagcaatttggataggcgatgacccctgtaacctaatggatttcctctccttttagcgggctccctttccct

SEQ ID NO: 401180 - DNA, 900 bp, Cannabis indica
ttttaaagttaaaatacattgaagggtgtaacagtaaattaatccctatgcaatgtaaattatctatagaggatcattgattattgagattataacaatagataactaatagcgtaactatatcgtggaacatatagagcattctatataactgagtgtgcaattctaagttttatagcggtacaatgaggaattaatatgttagagaatttacttggtaaattctagatctgcttattcgaagctcggttatattggcccatggtccccatactagttgagataaactgcttgtaagactcagttaattgattttagttagtcaatgttaattctaaattagactatgtctagtttgtgaattttcccaatgttatgagttgattgtgaagaaataggattttaggataaatttattaattaagagactttgtggagtctaattaaaagaaatatcatgaatgacaattttattgcataattattttaattattaaataaatagtttttgcatttatagggttgaattgcaaaaagtggtatttgtgaaaaaaaaggttaatgtttgagaaaaatggcaaaaatctaactagtgttgggcccacttcatggtcggccactagttgttatttttgctccagttttatcatttttttattccaaataaatcaactgtaaccctaggtgaaattagtatcaaaggaaagctatggtctcattatccaactaatgcttctaaagctaaaaacctagttttttctctctctaggtttatgagacttcttcttcttcttttcttctcttatttttgaattctatagtgttcttcacaaaatcaaattcaagcctttcgcgattgagtacatgcccacaaatagcaagtgagtcctcaatcatagt

SEQ ID NO: 401181 - DNA, 500 bp, Cannabis indica
ggtgcgaacgtttggggaaaccactgccgttcgggtttcaagtgttgcgcgcatcatgtggtcaatttggaccaccgtagttcggagagaggcctggcaaaatcaccatgcaagggaaataggaaagatagatgaaagagatattggggctttgggttttgtggggttgaggaagccatggctgccggattaagaaggaaccagccgtggtcactccagaccacacgcaataaagggagagagatacgtgaggggaagatgatgagatttattagggttaggatgagcaatggtttgtttcaggaaaaagaaagaatgaggttaattagggtttcaacatatcccttttatacccccatttatttatttatttatttaattttcttttattgcttttaataaataaattaagagagaaagaaggaatcatattgcacgtgtccttcaacttttttttactttttaatttttttatttatttttattgaatctttagtgac

SEQ ID NO: 401182 - DNA, 598 bp, Cannabis indica
aatataaattagattttaaaaaagcataattaaaaaaatagtattcacattgataattaaaaagtatacgagtttagtcgaacagcgtaacgagtctaagggtctaatcgaactaatatacaaatatgttcgatttgtactaaaattagtaagtaataaaaaattctgaagttattagtaaataaacaaaatattaaaatatgttcggaaaaaaagttaattataaaatatatattgttctaaagacgggtaatgtcattgtcgttgttgttctgagtctcgggacgatgcgatgacgatctagcaccaggaagagtggagaatggtggaagatccatacgaggcaagttgacaccagacacaactcgagagagatactcagactgatcttagaatcgcttgaggtagagttgttgtgtatcatactactatctaaaatactgagcttcctgttgtgcctcctctacttttttctgtaaggcatcatactgttccatagtaacagtctgtggggcagaagaagtcgtggtaggtgttcttttagcctcaactgccttcaatctcgggagatggccaaagtgtaatatccagattaaaa

SEQ ID NO: 401183 - DNA, 569 bp, Cannabis indica
ctatctccactatgagatttgttgaatccttgctgctccttgtacttcttgcaaaatcttttcaagtgtttggaccttccaaacaagtaacactttcgagtttccctctctctggacttcaatcttgattgagagtgatggtgtttactcttcgaacttactttcttgggtgatctccctcttgcaaaacacaattattccttcttggattctttttgaaaatgtaattcaaaatcttttgatttgagtgcggcaagaacatcctccaatggaatcacatctctgctattggcagcttttacttcttgatatgcaattgggagagatctcaaaaaatgatggcctggcttttttcaaaaaccttttgatttatattagtcaatcctacaataatctcattaaacatgtcaatattatcatctaaagaaagagaataaatcattctaaaaccaaataacctttctagcaaattaatcttgctagcaattgatggcttcatgtagtcttcaagctttttccaaatcactttagccgtcttttcagcaacaagctttctcctcacactgttg

SEQ ID NO: 401184 - DNA, 664 bp, Cannabis indica
ccacctgcaatcgccatcaccatcgtcgagatcgacaaaccccccactcaatgcccagaaaaccctaccctgattcaaccgcgcacatgagacatgaatggtcctattcaggtcatatctcaagatccaaataccaccttttccaccttcttcagtacttttcccatccgagtccccgaaatctccaggcgatttcggaatcaagactcggaattctcaattgggttcttctcctttgaataaacaaaagtaaaaaattgttagtttatatgatctcttgcttgctagctagatagagttgtaatttcttttatatctcactagatcatcatatgccctgaccagaaagaatggcaagaaaaacaagcttgctgtttccgattctcttgatcattattatcccttgtgtgagtgaaacgacaatggcgatgggcatgatgatcaagaatccgaatatgacagcgttgggcgtgagtactggttttgagtgtgagtactatgagccaatgtatgggttcttgccttgtacgagtaggttgtgggagatgcttttcatgataatcgtgtatgaggttttgttgtcgtttggagagcaataaattttctcagcttttgtagtgcggatgttgtagggggttctgtcgagaagaaagagaaagaaaaa

SEQ ID NO: 401185 - DNA, 605 bp, Cannabis indica
tcgattttgatttgggaggggtccgcgttgtaggcggtggtgactggtcggcgttgtaggcggtggtgagggggtttttgatttggtgagggttcagttgagagagaaccgagagagatagaggaagagagagagttggggtattgttatgagaggggtattcttgagtttttgataaagtggtcatatattttcaattttgaaatgtattagttcaagcataaaatattgggattttttatgcatagttttttaaatttcccctctctctctttcccttctaatttacataggcatcgggccccatcggacccaccatcagaaccatcggacccaacacaattttttttgaaaaatcactcaacaccatcgggccccatcggacccaatgagaaaatccaacataagcattggaccccatcgggtccccatcagacccatcgggtcttcgtcttccccaatccatttgcatgagcatcggacctacatcggactgcatcgggcccagtggttcggtcgagatgggtttgttgggttttatgccctaaataaaaatctatttcaatgtaatctctatcatttaaacattaataaagaaacagaag

SEQ ID NO: 401186 - DNA, 641 bp, Cannabis indica
aaaacatagggtccaatctgtaattttataaaacatagaatccaaatagtatttactcataataatatgataataaatccctacaaatataccaacaacaactttcacaaaatactgttattgccttttaaaaagaaaaatcaaactatttacttaataataataataataataataataataataataattatcttataataaatgtaaataataattagtaatgtaatcataataatatataatagttagaaaaaaaatagagtattttaaattttcatttgtatataatcacttccatttgaatttatattaatatcaatcaattaattgtataaaggaaaatataaaaaatcttacctattttaattttttttctaattattttctacattttttttatattatcttatagaaaataaaaagaaatttttacaccaaaaatacaaattacacactttattacatataaacctacacacggttaaagcaacttttttaccttttctctatattttattacacatataccacatacacatcccatccatgcaccagtcacgtcaactcccctatcaaccatcatgcatccctcaatcacttccctctctctttttcttttgttttccttttgatttttt

SEQ ID NO: 401187 - DNA, 686 bp, Cannabis indica
tttttctttttaaaaggcaataaaattattttgtgaaagttgttgtggatttattatcatattattatgggtaaatactatttggacgctatgtttaacaaaattacagattggactctatggtttgttaaataataaaatgaatcatgtattttttaaaatggtacaaataggaccctaagctgaatttttgacaattttctcttaatttaatcaacttgaagacaattcctaacatagacttatgtagaaaatttaaccaatttgtcacaacacctctaggtcagattattattaagtttaatttccacaaaaaatcacttcaaggtcctatttgtaccattttagaagatacatagtctattttgccatttaacaaaggtccaatctataatttttgtaaaacacaaggtccaaaatagtatttacagttttattattatatttattcttaaataactatgtaataagttgagtgatcacttagcgtcactttttacttaattaatgtattgttatcactaaatattttttttattaatggtactacgaccaaacaacaaacagcttcaaacaaagatagagacaaaggcccagagccccaacccagaacacaaactagaaaaaaccaactctaaaacagttacactgacgctccatgttgacctcgcttttagccagcgaca

SEQ ID NO: 401188 - DNA, 678 bp, Cannabis indica
tttttcttttttcttttttattactttagtcaattttaactttctgatttctagagccctattcttaacaacttttttttttttgatgaaaccctattcttaacaactcattctagatattttagtttttttttaaattacattctagatatttttgtgagtgttgctttctttagacactagtagtatccgaaaaatactaaaagatatcagtagtgctagacttaacagtagaagctattagtacaaataattagcatttttatataattattcgatttaaaatatatgagacttaatatttaattataacattcttaatagtgttagaaatttaacaaaaaaaaaaggtattaggctccattttacaaataataataataaaggtaaaaattagtataaatacttaacattgtaattagtataaatttaatttttttttttttaagaaaaatggtaaactttattagaatgaactttcaaccattacaatagataaaagatcagcaggagcattactctcactgaaaatacgatctgaatacaaacaaaagctacgagcaagacagtgtgcagctttgtttacagaacgtttaacaaaattaatcgtgactaaaggtaaggaagccaataatgtacgacaagcagacacatgttggccaaaaggagatggaatga

SEQ ID NO: 401189 - DNA, 734 bp, Cannabis indica
agagagagagagagtaaaaatgggggaaaggtgggacaagtgaggaagacgatggttgatcagttgttcatggtgcacgggtgacggaatctaaggagtatctttaaagtttttttttttttttacttttttctcttactgcagaaaaataagaagaaagaagaaagaagaagaaaaagtaaaaataaaaataaattaatttttttaatttttttaaattaaaaaagtaaaaagaattttttttttatttttattttttttttaatatttataattatttttttaaaattaatattacgtgaaccactaaaaacttgccacatatacaagcgtgtacacgtggatagtccaccgtggcacttaactgtaatttttggacggaggtgtgcagagcaaaacagaacaagggtttaggtagtttagccgccaaaatttcgattttgtggttaagtgttacaaaccataaagttcaagtgatttagccgccaatttctctatatatatttatagtttctttttcgcaatagcacaatcttcatcctcttgttttgcctagaattttaaccaagtctatattttaatcatgtttgcatattacatgtcatatagtgtttgtttctttctttgtttgttaatgtagttatgatgatccgagctaaaagaggcttggttatgatgttcgaccctgttttatcatcatcaatatttttgatgtgtttattattattattatt

SEQ ID NO: 401190 - DNA, 405 bp, Cannabis indica
taaacctcaaaacccaattttctaaattttatcactaatttttgaataattaaataaacacagttctcgtgggatcgactattacttacaattatactaaaaataattagaggtattgaaaataaatattagtaaatttattgtggcttatgacacatatcaaatttttggcgccgttattggagactattgttttattttattattcatgtttagttttttctttactatcttgttcttctagttgtagtgttaatttttaaatcttcctttagaaacatggcgatgtacaatcaacaatactatgatctatattatacatcgccacaagtgtatcaatatgatccctattacaatacttacacatacaatctacaatggagagattatttgtaaagcccgctt

SEQ ID NO: 401191 - DNA, 721 bp, Cannabis indica
actagggaattaagccgcgcttcacgcggtgtagcccaacttttgtaaattatataaatatatattatatttattgagttatataatctaaaatataacatttagatgtgtgtattataaacaaagtaataatattgaaattaaaaacatgactatgaatagcacttttattattttattttattttatttatatattaatttttgatccgtatttatatatatatatgtatattgcattagattgtgcggattgtgagagccactaatccgcgcttcgcgcggttttttcacaataattataatctttgtactgaatgagcgatgtaatataaaatatagtattgtattgtaagattaataagagatgaattttttaaatgatgtctattattgaaacataatttacaattattggaacatatctatattttgactcttttctccttttattttcaacacttatttatttataaaattacagaacaaattaataattggaaattcaaataaaatttgataaacacgttcgaactaattacttgcatcatcaccaacttcatcatcaacaattggatttttttttctcttcgtactttgaaccgacacaacgacatgatagtgttgtagataatcttccaaatcatgacaatcctatcataaaatgatgcttttttttttaaaaaaaaaaaaaaaaaagaaaaagaaaagagaaaaaatta

SEQ ID NO: 401192 - DNA, 614 bp, Cannabis indica
gcttattattgttttttgtttttgcttaaatgggttttcttttctctttcttcacaaacacccttatttaaaaacaaaaaaaatagattatttactttttatttattttttttatctttacacattttttttttttttgctgggtcactaatttttaagttgtacagatgttttgagcggataaatttgactttccatctaaatatatatttttaaaatatttaaattaaaatatcttttttttagtaattagaaaacaaatggctctttcggaatggtaatttaaattatccgcgacaaatattaataaaaatttaacagaagaataaataaaagttgttgatatatataataactaggtaatatagcaacttctgttataattttgttagtataataatataaaatgattatttatcaatataataaataataattttaaaaaacaattattctaatattaaaattaaattatctaattacttatttattatacaccgatgttattatttgatgctattatacatcgtacttttagaaataaaaagtattatcatttatggaggaagttctaatggttacatttttcattgtaaccacatggttacattttt

SEQ ID NO: 401193 - DNA, 880 bp, Cannabis indica
tttttttggcccaaaaatattttcgacctaaatggactcaaaccatgtcgcttgacccgttttggagctgttataggttgaagacaacctgtctaggacaaagcccactcacgactgccagagtgtgagggagagtgtcttagttttcaaactctgtttttgacgattcttttctctaatattattagaatttaatttatgatttttctataattttaattaatttttgatcccatttaataattattattattaataatttaataataattatgcaatgaaaaaatcattaaaaataatttttgatgattttttggaattagtaaatcatagcaaattttttgggctttttctcgttctatttgacatagtcactctcttattttgatatatcttgatgtgtattctccacaatactctttctttcacatatttccattctttgttgttctaaaatttttaaaacttgattatttaatgcaaaaataatgtattatggtggacactatatttgttgattatcgatatatattattaatatatctctttttagaaatctggctaaaaattattattattcagtaattgtttaatcactaaatttcatatattgtaaaaactattatttatttttgttaactatatgtataattacttgtctaaagatagtagttatatatatatactagatgaaagttatgtggcgagccacgtaaatattagtttcatttaagttctagtgaattttgtttaagaatttcggtaataaattgtaaattaattatttaacgatatgttttatgaaaataaacttagttaagaatgtcataataattgtgtatataaacatataatatacacattgttattcaaatagttt

SEQ ID NO: 401194 - DNA, 820 bp, Cannabis indica
gaaaactgtatgtcgctcatcgggggagctgctgcgggcacagtgcctgagagctgggctccgggcacatatcctgcgatcccggtgggatagtaccctccataggcaactatttggtcctcttccaggttaatgtatttatggactctcttctggaagtcttgaaggtttgaagctccttcttgttgtaaatcgttccagaatggagtccttgtacggatgcctgcttgaagaagagcaagctgttgtctgtcatctactttcttggttttggaggcttcttccctaaacctctttatgaaatttttcagtgtctccgtaggcagctgcttgatgttagtcaaggcgctgacctccagattgacttttcttgcggcgacaaattgtctccggaagctggtttgcaacttattccagtagtctacggatcctagtttcagttttttgaaccactcttctgcggatccgcttagagtaagtgggaagcacaaacacttggcgtcattgctgacactcatgattgtcataacccggttgaaccgtgacaagtgatcgcttggatcagagttcgcggtgtaagctgccatttcgggcatcttaaagtttttggggagctctgcttccaggatgtgtttagcacacggctcccgatcctcacaatcagaatcggagtcgtcgcctttctgtctccgggagactcgggcgatgtcttttcggagtatggcaagttctgccatgattccttcgtttaacgttcccgtggagaccgcgggtccgtatttcttttggtctaggtgatcccggagatcaccttggttcc

SEQ ID NO: 401195 - DNA, 624 bp, Cannabis indica
gttgaagaaaaatgcttgaaaattaaagatttaattgtaattttatcgctagcctactaaaagtggagtcattagaatatttaagaagttttggtacaattgaagccattgaagttcaagaattcaagaagttagagtagcgccatgacataaaaattcaatgccaatgcgctgatttggaaaaaatagacatcgacattgagttttagaggcaaaaggtgtgttaaggcattggtgtgaaccatgtcgaagcattaggagagagaaagtttactgcccaaaagtgcctattgcctacccatgcctcaacatggtccagaccatgtcgtagcgcgctcccaaaaattcatctttttaggatttcataaattggacagggctgtggcgtgggttttaccatgtcgtggcccgcatgcttaaaaattgacttgattagagtttttaaacccttaaaaattctaaggcgatttttttattggaactttaggaggacgaaaatagagagttgaagtgactttggagactacaaccattgatcttcaaagagattctctcttctatctttaatttcatgtttctaattagttttaatcaattgttgacaatgacaatgagtagttaaat

SEQ ID NO: 401196 - DNA, 659 bp, Cannabis indica
aattagataagattttaatgaacactgttgttataggagagcatgcttggacaccttcatctggaataattctgtctgagtctgaaaaaccttttaatgatactgaaaccttacatgaacaacttgagagtagtgattatgatctagagacgcttaatattgatagattttctaaagagaaaattagcaagagatcaactgagacacttgagaaacaaaatgaaaaggcgaaaaatgaaaaagggaaaatgaagaagaccgagcctgtaatgatatttgaacaaattggtcgccttgctgatgtcgtggagacaagaagtagaaatattgaaatagctagaaaggaaaatagtattgccgaagttatgaaaatattaaattatttgcttgaaatcgaaaaaagggagaagcttgtatttatttgcaactctcttgtttatcatgaaagagaagagagagatgtttgcttcattttggaagaacctgagttgatgcttacttggctcaagaatgaatatactctggaataattataatgctcgtgagatttcagaccactcaaaattaattttttcatatctacccaatcagagacatttgaggagtacccttcaggtactttcacctgggagatagaaccgcacaaagattatttttct

SEQ ID NO: 401197 - DNA, 532 bp, Cannabis indica
ctctcttaatgtggctattataataaacttttttaatttttttttttttaaaaaagaatacagtgacgctcggttagtgtgtctataatgtcctatagtgacgttccttgagagagactaaaatattttagcgacgtgtgcagagtgtcactaaatattacttttactgactcccatattagtgacgcgcagtgaagtgtcactaaatatttttagactctctcaaaatgagtcactaaaacctatttttgtagtagtgaatagcagattgtgcatcagatttgtgttttatgagtttgatccatgtgaacctagagcaatcatcaacaatggtgataaagtatttaaacccttcaacagttagattgctatagggtccccatatatcaacatgaacaagatcaaaacagttctttgcaatattatgattagaaatgaaaggcaactttctttgcttggcataatgacaaatggagcaatgaaaatgagaatcagaattggaatgaaaattcaagtctttattcaaaggatg

SEQ ID NO: 401198 - DNA, 764 bp, Cannabis indica
tttttgctctccgtactttccatgccattgagaacaaaatacttgcagaagaagaacaagaattaattcgaaaaaccaatcaccaaaattagtaagcaacaaaattctattattattattattattattattattagtcatttagggagtttggttagaagtaatgaaatacaaagaaataaaaatgaaataatttttattttatttttatttggttgcacattaaattttattctctttttgtttggttgcctatgagaaaaaaaaattaatatatattttttttaattaattttatttatgaattttaaattctattcttttcctatttttaattctcattcttatattttcattcatctaactaaaatttgggtgcttatccgtaaaatacttatttttttataattagttaattataattaactattttcttaaaataatgaattaaatattttacaagacttcttttagccattaatatttataaataattttttatttatatttataattattttaacaattaagccatttaattataatatttataataaaattttattttttttatataaattaaatttctttttacacaaattaaaattctctttttataataaatttttaaataattaattatttttaaatgatatttaattattttgttacaattaaatgaaccaagtatgaggtctcaagctagtcaatcgataacaaaatttgtatatctatgcatcggtctaattttaactttctaacat

SEQ ID NO: 401199 - DNA, 658 bp, Cannabis indica
  modified_base (439)..(439): a, c, t, g, unknown or other
gaagattccagagcatggcgaggcccacgacttcactgtttgggttttcggtggactttttgaggcccgcaacttcactgtttaatgggcttttactgcattttttcagggttcagatgtaaaatagttttaaatttagagagtaagttgccgtttggtaacatttttgttttttaattttttaatcacaaaataaaagtaaaattttgtttttgaaaaataaaaatatgttctgtaactacttttgttttttaattttaaaaataaaaaataaaagtgtgtgctgtaaagtttattttcatttttattttttgattttatttaagtcgggtctagattcgggttcgattcagaggccgaattcagcgccaaggtcgtgggagggatttaggtccgggtctgatcggaattcaaaatattaattaagaataaaaaaacngtttaaaaaaaatattaaaagtgatttttttgtttttaaaaattttaattctcaattaaaaaatggaaaagtgaaaacagttttatagaacatgtttgtgaaaaatattttcactttaacaaaaaactgattaaaaaaagtgttaccaaacgccacctaagtttgtaaatattttttaaaaaataaattaagaaaataataaaatataatatattaact

SEQ ID NO: 401200 - DNA, 509 bp, Cannabis indica
cttgtgtaactccataatgtatgttataatttgacaaaattaataatttatcacactttaaatatttgtgacttaattatataatctaaacattatattatacaaaataatataatattctcccactagattaaataatatctcatttgtaacaaataattttgtaacacaatattttatttatttaatcaaacattatactatagagtaatataatattcctccacttgattaaataactccactctaagagaaattattgtatttgtgcgtagtgtaaaatgtctttcgacttgaattttatattagtgtaattaccacaaagtttgctgaaattttggttgccgtagcattaaaccactattctttgataacaaaccagtgataatacacacacctttgctatgctcactcaagaagcttatggattgattttgtaccgttaatggccatgtgcacaaatccaatttatagactttctagagaataactctcaattctcataagag

SEQ ID NO: 401201 - DNA, 1211 bp, Cannabis indica
taggtgctctacaaaatttggtactgttttgattaggattggatgatttatgggatttccaaacttggacagggaggtttcgagctatccgatttaggcagttttaggacggccatttagtttgatttctgttgagaatttgattgagatttattcatgaaaaatgttcattgtgatgtttttagataccctgaaaacttttgtaaggcttttcttataatttcatgagttatgcaagttttaaaattagatagtggagttttggaccatccgatttaggcagaatttaggggtccatctttagacttttcctaggaccttgattgagtgttttctcaatacttagggtatttccatgatatctatcgatagggaaacttttagttgtgatttaagtccgtgaaagtgttagggcaacacttattggttttttttggaaatgtgacttagggcttcgattaccagcaactatttccactaaggttgaccggcacacctgaaactcaaaattgaggtaagactagtataagacacatacatatgtacatgtttatatttttgttttccagatgtatgacatatttgttagaacgatagttggtatatatatgattacattttgatatcatgaatgcatgtgtttggcaattcaaaaagtatgaactaatgctaccaacaatagtacgccagattactgagtgcatgtggtattatagttggttatactatcgaaaacaatgaactagtgctaccaacactaaaacactgaagtactgagtgcatgtggtattatggctagttagtacttatagtatggagtaatgctaccaacactagtacgattaaagtactaatgcatgtggtattatggtcaattatactatggtcaagaatgtttgagactcaactatacatgtttgcattgtttatgacttgttgataggtgtatgggcacttagtcgtaggttagttatatatttacgttttatgcttttctcactgagtctgttaactcacagatgttatgttatgtgcaggtaaaggaaaagctgttcttgaacggcagtgagttttgagctggatgaagattgtatatatcgagacagttcgacctggagtgttggatcttcgggacaactagggctcacgattttgtagtcgttgtgcgacatcttttgattatgtaaagttgtaaaaatgtagatacggga

SEQ ID NO: 401202 - DNA, 922 bp, Cannabis indica
aaacgaaatgttcgcaaactaaataaaacgaacatggaggtttacgtcaatgatatgttggtaaaattgataaagagtaaggatcaaacctcagactttgcagaatgctttaaaacatcaaaaagtataacatgaagctaaacccaaaagaatgttcctttggagtctcttcgggaaaaattttgggattcatagttaatgcgaggggtattgaagcaaatcctaaagaaataaggcattaatagacatgcaattcccgacaaagcctaaggaagtatatgccttgattggaagaatggcggcacttaatagattcattttgaagtcagctgataagtgtgtgccgctctttaacatattgtgatgtaacaaaaagtttgagtggacaaaagagtatgaagaggcctttcagagcataaaagggcatctcgcaacacctcaagttttggcaaagccaataactggagagacattatttatttatttagccatcttgaaagatgcgattagtgcagctatagtgcgagaagagggcaagcaccaacaacctatttactatgtaagtaaaaggttactaggggcagaatccagatatccccctctagaaaaactcgcgttatgcctagtctataaaggtgttaatcgatcagcccttgagacaagtgttatcaaaatctgatgcttctggaagattgaaaaaatggtcggttgaactgtggcagctcgacataacataccatcctcgaacatccatcaacggccaagctttagctgacttcttgataaaaggtataactccagaaagaatcccacctgatcagcaagacgcggaaacctggaagttatatttggattgcgcatccaacgaacagggtttgggtgcaggggtaatattaatattgctagaaggctttaagtttca

SEQ ID NO: 401203 - DNA, 791 bp, Cannabis indica
taataatactcaattttatttttggcgttcgaaattttataagatgtcttaaataactataatgtacatgaccatgaaaaaaaaattaaataagtctcccgaatgccaaaataggtagtagtatatcagtgcgttacttttataaaagtgtattatttttgggtaaatttttttttaaaattttccaaaattttatagaatgtttcaaataattataacatacacaattatatatataaagacaataaactaaaaaaaactgtgtctagtgttgaaataaaaaaaatatatttttacattaattttaaaaatatatattgtaaaatttcttaaaaataaattttcacttttataaatataatgatataaatatatataaatattaattaaatatatatagcgtgactacagtgcacgacatatatgcctatatgccgtgcactgtgaagaaaatctcaaaatggtgcattaaatggagtgttattggaggttgaatcactgcatatatagatatatgcaacctccttgcacttgctctaaagtgacttttagtgataattttatttttattgtgattaaaacttttagctacagactttttaatcataacatcgttaacaaaaaaaaaagtaactaaaacttttaggtcacaacatctttcactttcagtccaaattatttttgtaactaaaattcaaattttttttgtagtgaagtagtggtagtcgtacttgtaacagtatcacctgatacctaaccaacaactatctccatcccactaccactggtca

SEQ ID NO: 401204 - DNA, 933 bp, Cannabis indica
ataaagaatataaagagaaaaatattaataatattactatttgctatcttatttctattttattatagaaaattagactggaccttgactatttgtttaaaagtattaaaaattataattaaatttcatataaaaaattttgaaaattatattttatctaatgcattatcttgataaaaaaatttattatttttaaatattgtggcttttgtttttatgaaatatgataaatatataatttcatatatcataattttatttattattaattaattattacataaaaaaagtagtaatttaataatttatctcattttttataactcaatttgttaaaatactttataattcatatgatattaatttatattaaaaaataataataattaaacttattacgacttatatattgttgattccttttcataatttcttaatttgacaagaaaaataatcataattaacttatagcaagaaaaactaaaaatataatatattttaaaagatattaaaataattactgaaatgattagtataaataagaaattaaaattgatctttttaaaacaaatgcataaacaaaataataagtcaaattaattaatattttaaagatttataattttttaaattcgtatctaaaataatagtactgcagagggtgggtccatgttagtcggcctgaggttatttttgtctttttcagtccttcatattttctatgtatttatacagtgatagtggagtacgctatatcatgtaccgagtacatttatactttatgcatgatgtttagtaaaaaaaatgtaacaaaatattaggtacctagtatgtgcctttatattttatagtacattggttagaaaattttcttataactcatgaaattatgtgttgttaattatattgagttttacattggtgtatttgttt

SEQ ID NO: 401205 - DNA, 932 bp, Cannabis indica
ctaaataaaagaaataatattgcaaaacaaaatatatatatagaacatacctgtttgcagaagctcatcatccattctctcacccattctctcacccattttctctgtaatggaataaaaaagtaattgagcaaattaagagtagatagaaaagagtatatatatatgtggtaaccaccgatttttatttgccgcgctttctaagtaaaactaaatgaaaaattgcgcttttcttttagatttttttcaacaactgaatcaattattattcaaataaaattactacgtaaataaattaaaccgtatttatatatataatatttaaacacaaattagttactaacgatttttagttaactcaatttaaaaacagatttttataatatcaattatatttaactagataaaaaaaaatcaagtgaaaaaaggttaagtataaataagaggagactctaccttgctcataagattctcacaatcaaaaacgaaaaaaaattgagtgtgagagaaaactctcccacttctgtgtgtactcaaaaaagaacttgagaagaaaattaaattattaagattgagagaatacaagattgattgaaagtatagaaggttaccattggatttaagtgatttggaagctccattgatgatataaattgattctttgatagtgcagcaattgagcttctctttgaggtgagctccattgaagatgtaaatattttgtgttcttctatctcttgcttcaaacgtgtgcttgatttgtattgccttaaaaaattactgagttttggtttttcttctagagttttctttctaggtctgaaacaaaataatttgggccttttttttcttgaacgatttaaggctttaattgatactaggaaaggaggtatttattaaaagaagaaaacgacatttttttaaaaaaaaaa

SEQ ID NO: 401206 - DNA, 703 bp, Cannabis indica
ctatgatgacaaagagactaggtagtagaacaacaatatgcacaaatcataatcaacatggctctcatcagtataataaaaagcaagcaaaaataataagaataataaaagaacatattacctttttattttctaaaaaatcaggcagcataacggttgtattttgaataaacccaaaaattataacatgcataattatttgtacaaaaatatatatggcactcagtccccagaatagtccagaaaaatgtgtgattaagtttttaatttttttaaacaatttgcaaatcataaaaattcgaatatgtctaatgttattcaacacatataaaaatcaagtccagtaatcaagttgagtccctacctctcttaagtcgttaaactttgtccaaaagacgttcttaagctctcaagtcccgagctccaactatttagtacaatcttagatatcactctcacatatatcatcaaatggctaaataattatcatcattgtattctacttttaaaaccgaatccaatgataaataatatgactatattttaaatttggagtttcaaaagctcacctaagcagtgcacattaactattggtggcggtaaaaaattggtgtaccagaaacatcactaaaaatagggatagtatatatcaaaatgaccacctcgatgagtagatcacacccatgctaaccatttgtcaaaa

SEQ ID NO: 401207 - DNA, 920 bp, Cannabis indica
ttttttttttcgagagaaattactattttaaaatttacaagtgatgccaggttaaacttttcgtttcaaagctttctcaatcacgtagttttttttttcttttcttcaacactttcgctcacactattcttcattcccccaaacttattgtcgagcttatggtatcattcaaaatacaatgaggacaaaaagcagtggcgatacatcttcttgttcaatgggtgaagaaacgaaacgggtttaggctcaaaagggttaactaaggatattcattttatggtaggcttgaaagggtcaaactatccaaacaaactgcctaaatcatgttcctagtaaatgctgtcaaggatttcgcctcaagaaaataagacatgcaagttctaagctattcaatcaatctttccacaaaccatagtaaaacaagtataacatatttcacaggttgtcaaattgcattcatacacaggctttacaagcatccaaactaatccaaagagttaaaagaattaagcacacagttttaaaatttcaggacatttcataaataacaacaacaacaaaattgatctcagcttaattaacaacacactaaaccacgacaactaaaaaactagactaaacaactaaacaatcaaacaaataacaaaatttaaaattaagcccctcccccaaactaatttttcacattgttcccaatgtgaaacaaaaacttaaagagaagaaagcttaccttaggtccatgtcacatcaacaagcggttgacgcccataataagcatcatgcaagacaacttgaaagctgtttttgaagatgccctcaagcttggcatgtaatgagtttgaaccagaaacctcaccaacaacaaaagaccttggatgatgagcttggggagaaactgttgataactcgtagagaataca

SEQ ID NO: 401208 - DNA, 675 bp, Cannabis indica
caaacaattagcaatgacaatatcatcaacaagaacaataatcaaaaataaaatagaggcaaacaaagtgtctaaaccagaaacagtataatacaaaaaataaagaaatcaacaccaagatatatactggttcaaattcgatagatcgatgtgatctatggctctactccagttttggaacatcaccataatccttctttattgattgagcaagaataggtacaatacaatcgagacgagattctctagcgagctctcacaaagtatttcaactctcacactttacacccaagagtcttcttcatctacagaagattcttcttcaaaatccaaactcaatctctctcttttctctgcatctcaaactcttaatatcgtctgaacaaagttctcaaactcgtgtattcagttctgtcccaatgataaatgaaggtggtatatataggcttaagatcaagatcctaaagtcggtggctgcaagaaacgaggttgttaagttagttagaaataactaacttaacactactacaatgttagcctttagaggctgttttttcacccacatttataaaaagagaagctaaagggtgtgaaaataccagccttgttcaaaattgacatttagaggtcggttttttgataaaaaccgtaggtataaaattgcattataccatt

SEQ ID NO: 401209 - DNA, 808 bp, Cannabis indica
acttcccaaactgcaaatggtcactcgccaaatgcccagtcacgagttccactcatgggcctaggggtaggcgggcagaccttgtctagtaattcatcaagagaagtcatatctgatggttccaaccaagttaacgctactcatgacctaaggaatgatctgaacagaaggagaggagtagacgatcagaatctcacgatgatcgtgtagcctggagcccgtgctcaaattcccgctcaaaaagatactgatgtgattccaattgactagaatgccaagcaggttagcccagccatacaggcacagctagacgaactgaaaaatatgttccaaggcatgcctggacaaaaaaataatgatctcgagctagactgagcacgcagaactcctttctctcccgagatcaatctcttggcattgccccacaagtttaaaatgccaacatggaaaatgtatacagggagagaagatcctctttcccacatcaagtattttgaaatgcaaatggatttgcaagggatacgaggagatgtgtgttccaaaatttttcctgctaccctatcggaagccgcccaacaatggtatttcaagttgggccctagaaagtttagttcatggaaagccttctcctcagaattccattcacaattctcctcctctcgccaatttccattgcatctgggagacctggatgcactcaagaaacggctaggcaaacccctctgagcatacatcagcatattcagaagatggaaagttgtccacgatactggggcattgaagtcctcggtgaactttggaaagatat

SEQ ID NO: 401210 - DNA, 517 bp, Cannabis indica
aacaggcaccttgtctggttcccaacaacgacaggcactaattgcatctttgatcgacgaaagaacgacccactcattagcaaggtttgaatcactaatatgatgatggaaaatatgatgattaatgatgaagcatcatcaaatatcctatttaaacaaactctggaaaaaatgggtttgtccttggaagaatctcaggccatacgaacaactaatgtatggtttcagcagagctgacatcattccctatgatgaaatcagattaccactaacaggcaagaaaacctcgcaatagtacactactatgactacctacatagtgatcaacaccaagtctccttgaatggtcaacaccctacgacctccgagccatctcatctttctaccacctgtttatcaatttcttgacagcagctggtattgattgtcaccttagaaactaaggaatagcatgcaatgttggatatattttaccaggatctagatttactaccatgtatgtttcattaacatccta

SEQ ID NO: 401211 - DNA, 893 bp, Cannabis indica
gtacttttctacaatatccacttagtgagacctaaatttttttctatttgtgtatccatcgtttgagatgctaatgatgattgtataatttgtattggtggtccaagattattgaatcttgatgttgttgggagcctctagttttactagagaagaactttgtaatcccattattaaactttggtgatagtagatgatttgagcggactactgttccgtagtttttttcacattgggtttccacgtaaaaatcttggtgtctcacttttatgcttgatttatgtattttatattgcttgtcgtgctttgattgatatttgatattgcttattctggtatttaataagtatcccatttttgacatacaaagagggaaaatattatgattaattgcaataagtttttccaacaagtggtatcagagccaaggttgataggtattgaatttttatgtgttgaaaaatgtatgagtctgatggaaagatgaaattgaacttatcaaactatttttcttggaagcaattgatggaagatttgctctattataaagatttgcacaaaccaattaaaggtagtgagaaaccgtctaagttagatgatgaggaatgggaagttcaacataaaaaagtcattgcctatattagatgatggatggatataaatcttcatgaacatatctctaatgaaaccagagctaatgttgtttgaaaaaaaactagaaaatctctttcccaaaagaatggttggtaataaaatttctctacttagaagacttataaatttgaagtacaaggatggcggtagtatggttgagcatacaagtcaattttagaatcttgcaaaccagttagttgccatgaagatgaatatggatgatgagatgcaagcatcat

SEQ ID NO: 401212 - DNA, 686 bp, Cannabis indica
gtgggagatcgcatctccactaatggttttatttttgctagattggcttcgattccttactggtttaccataaagctgaggaattttccttagcctactccaaagatgcattttagggggttaagtcacatcttataatgccgcaggattctgaacgtggcttccaggtgagtgacatggtcttttgcatgttgaaattttacgagcattttgtcaacatacacctccattgtctctcctattagatctgcgaacatcatgttaaccaacctttaatatgtagctcctacatttatcaaactgaaaggcattaccttataacagtttgaacctcgatttgtgatgaaagaagtatgctccttgtctggttcatacgtcggaatttgattgtatcctgagtatgcatccatgaaactaaggatttcatgaccagtttgggtagaatgactcctttatgaagccacgcgccaaaaggcaatctacttcttccttgagcgcttggcacctcgtggggtccatttgcggtgcttctatcagacaccttgcacttctgagtgtctcctcatgtcacactataattttttttgtattagtttattaatattttaataggacttccttccctataataacagagctcctctagtttatttttcacattcttctaagttcccataaggtcagag

SEQ ID NO: 401213 - DNA, 675 bp, Cannabis indica
taccttcaacaaatttatttataccaatacaacattagcagtagcagaaatattggattaccaaaacaattcctttaggaaaataaggaaaaaattagaaaaatctagaggttgtttgattattatttttgttttccgaattgttattttaaaagtgagagcaataaaaaaatatttttgtctattttaaaattttaataatgtttggctaatgtttactaaaattattttaagtttctttttttttaaaaaaaaaaatacttcaatattttacaccatatcaagacataaacccaaccctataccttgaactcggaccatcgaatttgaacccggagtacctggaccggtaccaaaacaggtgccagacctggacctagcttcgttatattttctattttttttttaagttttaaaacgtaatattaatttttattacttttgatgcaaataaaatgtcaatgggttactttttcataaataatataaacatacataatactcttatttcaagataatattatatcacacacattaggttacttagtttgattatttacttttaaaattattattttaattttaaatttttaggtcagatattattttgttgttttagatatgtaattattatttttttaaaatgtaactcatataatgtttatgatactatct

SEQ ID NO: 401214 - DNA, 782 bp, Cannabis indica
agacccatctaatgtactacggattggactaacatctaatatcctatccaatactcatatataagggggtgtttattggactacatctaatatcctatctagatctgatctaattatatattagatgttaaattttaccatctgatccgatctaattaatttcggtgatccaattgattcttcaattgaatcagttctatccactgaatgtatttaatttatatatatttattagtttaatttaggtttacccaatattttaaacatattattttttggatcgaatcggataatccatccaatattttagatccaatgtattaaattggaatggatccatctaattcaagaaaaaaaaaattaatgttaattttcaaatatataaatagattttacctataataatatatataaaatataattactaattcaaactaaatgaaaatattaattagtttgattggatatggatgtattgaatttttgaacacctcatccaccatttgatccgatccaactggatatttaaaaatagcatccaaaccgattcgatcacaattagatatctaatatttagtgatcgattataattacattggtcgattctcattagattggatcaatttatgcacacttttatatatactagtaaaaaattacgtgcgatgcacgtatactaaattttatgctagttttttttttacgttattaaaaagtgatacaattaaaaattaaaaaaaatattattagttattaggttcaacatcattaccctgtgttca

SEQ ID NO: 401215 - DNA, 736 bp, Cannabis indica
cactaccggagaccgcttcctctatatagagagagctcccgaagggatcccaacaaaagatgcgagtaccacaacgacattagacacagcaccaatgaatgcaaaaaccttaaagatgagatcgagaacttaattcgattgtgtcatctctatgagtggatcaagaactggctgcccatttgaacccggttctggcagtaggacctttgccccaaggaacgccagggggtgcgcccagagcgttagcaccagtcgctccccccggggaacctcagcaaactcctggcctgccaccgagacccaatggaagagtggctatgatctctggaggggcccatatgggagggagcactcgaaaggaattaaagcgctacgccggggccgttaaacacagcgaggtttcggaagatactcagctcccagctcagaggccccgactcatggatgaaccaattacattcacggaagaagactcaaagatggtgcgttttcctcaccatgacccccttgtcatagaaactcccatcgccaacaagattgtggctagaatactgatcgacaatgggagttctgtaaatttattatttaaagaagccttcacggcgataggcctcacagaccgagatctttcatctagcggttcccaactcatgggattcaatggaactacgcttattccaatgggaaaggtgaggttgccagtcccattatgtccggactgttggaaatattttac

SEQ ID NO: 401216 - DNA, 626 bp, Cannabis indica
tttagaaaaaaaaaaatgatgtacataaaaggagaagtttttttttaaaaagaaaatctaagaaaagagtaaaacaaaattttaaaaagaaaactcatgagaagaacataggtaaaaagatagcacaaaacaataaaaaaaaataaaaaaataaaaataaaaataaaaataaaattgaataaaaaaactgtgagattttttgggctttttttttcagttttaatcaaaaaagataataacattacaaaaatacttctagttagccaaataaatagataaacaactcaaataaaaaaaaattacacatatacctcttacacacaccttcaacccatgatccatgcttcttgagattgaaacattcttcttatgtaaccttcgggcaaccacggagaaacccaacataactgaaacgaaatctaaccagaaagagaaccaccattaattccggcgacttcacctgagaaaatgatcaaaatcaatcaaaatggaggttgtttcaaattcatgaaaaaaagtgcagaaaaactactacaaaactaaaatttaactagagatccagtttgattcgcataaaactagtgtcttggcttcaattttctgatccatgaaatgcagatctcaaa

SEQ ID NO: 401217 - DNA, 850 bp, Cannabis indica
gtctcgagacatctggggttttcatttcttagtcgctatgcgacctgactattgtattttggaatattatgtaaaatgtttaacaacgggatccaggttttgtaaatatatataaagtttattaagtttcatagttaattctaaaattttcatttgacacaatttttaagaaaatttctttgattaacaaagatagcacttcgattgaaaaatcactgtagggtgccttagtatgagggcgttacactgcaggatccctgttaggctatttctagcctatatttcagatcacttttatgtttgcttttcgatgttttaggacggaatcatgcttgttttctatgttttcaggtttctcggagtaatggaggccacgggatgcaaaagtgcaataaaagacaagtggagccaagaaaaatgccaaattcaggctaaatacacttctagccgcggcgagatagccatggccgcggctataaagtccaaaatagacgcacaatttttggaagctccagtcgccacggcgagaccactagtggccgcggtgagggtctgtacgaatgggggtattttcgtccatcgaaccctaaaaatgagaaataaatagaaaactgcgattgaaaattagggtaagcgatttggagacctaaaatgcaagaggagcaaagtgatgatccatagtctttccaccaacagtttctttctctattccttttttaatttctttatgttgaatattgttttaggaatggttatggacttgattatgaactaaatttcccatttagggaggatgatgattgttgtttaaagtttttgccaagttaatgaataattgccattcctccat

SEQ ID NO: 401218 - DNA, 1018 bp, Cannabis indica
catcaaatttttggcgctgttgttggggactattgtttttattttattattcatatctaatttttgttactaacttgttttactttgataatctcaggtgtacatgtctagtgcaaacgatactcaagagagactttcaagggttaaacaatatcttgagtcatcatctgcttcttgatcatccaagactatcaccgacaacccactctttcaacctcttggtcctgccaaacaaacaaccactatcaactaatctggagttagattctgacgactcgattacttctcacaagaccatggctcaaaataggacatcgaaggagttggccgcgccgaatttggaccagcaaccactgtgcatccattatccacctttggatgtcaattttgaactgaaatccgacttgatccacttactacaagcttttcatggattacccggagaagaccccaacaagcacttgaaggagtttcatattgtgaactctagtatgaaacctacatcagttactgaagaacaaatcaagctgcgggccttccctttctctttgaaagatgccgctaaggagtggttgtactatctaccactgggtactattaagacatggaatgccatgaagattgttttcttggagcgatatttcccaacctctaaagttggaagtatcagaaaaaaaatatgtggaattcagtaagttattggagagtcactttatgaatattgggaaagatttaaaaggttgtgtgctagttgccctcatcaccagatcagtgaacaactcctaattcaatacttttatgaagatcacttattttgatgtgcttaccgaatttcgagtataacaatttaatatttataaaattataccttaggaagatctgaaaaataaaatttattttccatccttagcattaattttcaactcaaatttaattttctattaatatacaactgaatttcgaaatccaatgtattaagaaatacattttcaaaatttcattaaaataaaataaaata

SEQ ID NO: 401219 - DNA, 404 bp, Cannabis indica
tgctggcattgatccaagtagacgcttgaggtatgctatttctgtcttttgaattgttatgcacaattgtctcactaaaactttgtcatatcatatattatagcaaactttagagttacatcatattcaaattacattgaaatggaagacattacaaatttcattccttgattgaaaataaactacttatagataagagacttcttacttcgtctccaacaacaattattacagcctcactattaatacttcttcaagtggttggcattattggctcaagatattactgtgtcatccatacgggctagcgtatacgttctacgcagaatgatttttactgtgcgctaagggcattcctagtttgccccaacacacacgctactgttggattatattttaccagg

SEQ ID NO: 401220 - DNA, 618 bp, Cannabis indica
taataactaaatgaattagtacctacatttgattttggtcacgattgaccaaaaatgagtcagcaccaagattatcaatagcttcttccttcttatcaggagaggtacttatcactgtaaccttaacccccatagcctatgaatgtgtcaaagagaacaaattatctatctatatgtgttaaaaaaaaataaaataaaagtaaaaaataaaatgacaaaggttccattacattttttttcagagattttaattggtataatgaaaacaattacctggctagcactgctggtggtacttcaaccaagtctttcagattttctcttcggtaggataactcttttgatgccttatcgatgtgccgccaatatctgcacagatacattttctgcattaacttgtgtgcttctaaataactcatttacaacaaattgttgtttcagtttttacaatgggctgaagactttgatttcttgaaaaatttatacagctaaagttacaaagccaaaggattagatgttatattattttatataatataatatttagattaaataattaagttgtaaataattaagtgtgacaaagtattaattttgtcaaattgtaacatacattat

SEQ ID NO: 401221 - DNA, 1096 bp, Cannabis indica
ataataaaaatattaagtgggaaaacctttccttagtggccgcccataggaagtattgggcctcacttggaattttccattttatcacaattttccttatttttccaaaaatgccatttttccaattttaaccatttaaatgccaacactaattatttaataactaaaattaattattaaataatattgtcatttaacatatttattaactagtaaacaggtcgcgcttcggatggctatttatataaattttaaattatatgtgtgaatattaattgaacaataaaattatatatttatttaaaataaataaataaatttatttatatttacttaatttgttaataatattaatattgatattttatttgatattaactatttttttgaaaatattgataataaaaaaataaaaaataaaaaaatacaatgattttgaaagattttaaagtgtcacatttaaaaaaagaagttatcacacattgttttaatctttttagtctattttctcgattaattttttagcttaaaatatttacatattataatatttttttatggatcgtatctcatattttgtgtatttattataaattatttttttaaaaaaaaggtaagattttatttatatttttcactctatattgtaaaaatatatgtaatttaaatttaaattctgatttgatttattatattttttatttaaatcataatatataacttaaaataattgattttttttttttaaataatgaatgaatattcaatcttcaaggaaggcacatgtctcttgattttagttaattttgaaatctcaaaagtcagattgagagtaaaaattatattttaaaattattattttatattaaaaaataaggtaatatggttatattgttcaggtgtaagatattttcattaattagttggttatttaatttaaatattatatatatatttatggttatattgtttaaatttaagatatttttgttgatattgagttagttaacataaatatttgatcacatgtgttatcctaaaattggcactctgacgtggcatcacaagaatggtgacacgtggcatcaacttagag

SEQ ID NO: 401222 - DNA, 880 bp, Cannabis indica
cttatttctctctcttctctcaattttaaaaataaattctgataacgtcgttactcagataagtctaaaaaaaatatcattgtaatagtttcaatgtgaacattttaaaatgcgagaatcacatgttttttgctatgtttagaaaagaaactaatttagttactaatatagtgattagttactattttataattatttttaaatcttagttaacattaattttataattttgttaattgaattatattatattatatgataactaaataattaattaggtttcaaaataacaaaaaagtatataaaataattggtatttaaaaatagtaacttgttatattacatgacaattgattagttttgaaaataatttttaaggttacctacatgtattttaaattataatctaccataatatagcttaaaataaatgttaattattaattattaagatgtctacaaataaattttaaaagtaactataaaaaaatatatattattgtaaattttcttttttattaatgagatctttttaatgcatggatattaaaattttcgtaacttgtttcatgttccaatactggacaaattgtcgagtgtaataacttctttggttttgagattttctcactttttaaagagaaaacgcaaatgagattatttcacaaatatataaatataattaaaaaaattacaaaaatataattttattgaattttaaataattttacgatttttttgattttatttatagaaaatacggtcttttatgttgtattcttgttaatttgcggttgattttttttttgttatatgtatgttgttgttttgatgttatttttatattacttttatgtagttttcttgttgttttcatgtt

SEQ ID NO: 401223 - DNA, 589 bp, Cannabis indica
tgatgatataagtaatggggtaattaagattatgttggatttgacttagcgccctagaagtatagattttttaatggctaagaaataataagataattatgaataataaagtttttattaatattatgataataatattattataatattatggttttttaaataaacttatctgttacaataagttttttatatatatatattatatattataagtttataacagtaaacaaatagaacgaaagccctcttttcccttcgataaaattctctccctcttatattcattttttcaattttcaattcaatatctagtgatctaagcttcgatagtagcaggatagtgaattcttagtgtcgaaaagcttaaggtaaggtttaattttgttttaagtttaaaacaatttgtttcgtatgggagttttgcgaattaaaatagttataaaacaactgacctaatagaattgttctcgggtagtcatggaactacttctaatgtttacttgctgaaattgaggtaattttcgtttagaaattgagtttagaactttttataacttaaatcagaacactagtggcgtttgccaat

SEQ ID NO: 401224 - DNA, 631 bp, Cannabis indica
ttttacctgattccaagactgatatcacaactttacaaatgtcatcaccaatagtttcccagttaccctggtggaaaaaacttgaaaaaccatctggtccaggagatttgtttccaagaatactaaatacaacaagttttacttcttctttggtaaattcctgaaccaacatacttgtaaagaccgcatatggttaataccttgaattattaaataattaaggtttatgtatgcgattaattaataattatgtaatgtatatcttggaaatatatttaacatcatttatgttattatgctatttaatgtaaattacccaatttctatgtttgtgttcggaagctgtggaaagcggcgttgggcctttagagagtcatatcttatattatgatgtatgttatttgttcggggtattttgttaagtattgacttgtcgggttaggtaatgaccaatttgcccttgggaattggtagctaattttaatagttagaggggtaattaggtctttttctttcaaaaacccttgttttggattttagtgattaatggctgccttttattatattgatattgttttttttttttttttaaaaaaaagtaaaaagagatgagttagaggaagcttagcat

SEQ ID NO: 401225 - DNA, 866 bp, Cannabis indica
gaataggaaaaaaatagatagatgaggaaattgggagagaagatagaaccgaagaaaagaaaaagaaaaaaaatactaaggaaagaaaggtaaaagaaaaaaaaattcaaattttttattttaattcttttaaatgaaataaaaaactgaaaaggtaaaaaaatatttttttttatttacacttttttaattttaaattaatttttttaaaaaaattttttacgttgactaaaaaacttgtgccatgtgtacactatgtccatgtagatgtacatgtggacaatccaacatgacacttaatacctaaaacagatagaaatattaaattgctatcaggacacgaatattaggggttttgtcgctaaaatttgagttttgagggttaagtgcaagcaaagtaaaagtattagaggttttatcataacttgctctttttttttttctaaatacagattgtatattatatatgtatatattttgggccctcaatttgagtgggccctaagtacgggcttagcccgcctaagcatagggtcggccctgttcccaaaccaaaatcaagacttcaatctaggcctcgacctagacctagacacgacctcgattcggtcccaaatttgggcctcataccctaaccccaacccgaccctgatcctaacccaagcccaagtcctagatgccaaccccaaacttattccccgaccctgacccaacctcaatcctgaccccgccttgaactctgaccctgacccagacccagacctaagcctcaaccctggccctgcccctagccctagcctagatgtaatatcccagaaaataaataatatttaaatggacatattttattaaatatgtaattactt

SEQ ID NO: 401226 - DNA, 646 bp, Cannabis indica
ctatcagaaatgtgaaattttaattgtttcaatcaaaatgattgttagtgcttaaaaattattttttctcttaacgtgtccaatagaaaatttatgcacatcgatcttggctttgtctttttcaaatttaacgattatttgagatgtgtagggtgagattttaagaaattactaacgagtgtaagagtaaagaaaaacttattaaaatttaccctgaaaaacagaacgtttttaattttttaattagggggtcatgttaaccaagtttaacgtgaaaacaatcttcatattcaagtattagtagtatgaaatcattgtaactagtggaaaaaaaatatttcgagataggttcgggccacatttcacaaaggggtaccactaccagaaatgtaaaattttcactatttcgattgaaatcattgttagtgcttgaaaattactttttctctcaacgtgtccagtagaaaagttattcacaacggtcttggcttcgtctctatacaatttaatgattatttgagatgtgtagagtgatattttaagagttttggtaattaatatgtgtaaaagtaacaaaaacttgttaaaattaaccatgaaaaatagaactttttcaattttttaattaaggggtcattttaaccaa

SEQ ID NO: 401227 - DNA, 856 bp, Cannabis indica
ctcgagaaggttggattggtagcatatcgtatagccttacctccaacactttcagcaattcaaaacatatttcatgtctctatgttacgaaaatacgtttcagattccactcatgtgctgagttatgaaaaccttgaacttcaatcagatttatcatacgaagaactaccagttcagatcttagacaaaaaagataaagtctttcagaacaaaaccatatctttgttcaaggtactctgaaaaaagaaaaatagcaaggtggaggaagccacccgggaattggagtctgacatgagggctcaatatctagagttgttcaggttagattttgaggataaaatccttttaacgggggataattgtaaagaccgcttagttttaaattgaaatttagtagataattagggcttaattatgaaatttgattattaattataatttatgaatttatggtggtttatttgaattttaggtgtgttatttatgctatatatgaaattctatgtttttcctattttatgcccggaaacattggaacgtagtgtttggccaatagaatcacattttagtgttttagtattagtagggtgagttagttagacattggaaatgtcaagaatatttgaggtttttgaatgaccaaaacacccttaggtggtaatattacctttttgcttaggcaagggaaaaatgatctttttgccttttatctcttttgtcttttagtaagattatattaaatagtgtgtgctaattattctctaaccttagttagataatactaaaatttattctttctattcaaattaggaaaaaatcaaagaaaacacataaacacccttctctctctctctct

SEQ ID NO: 401228 - DNA, 571 bp, Cannabis indica
agaggagaattgtatcgttactttgcttgtggcaccaatggccaactgtacgagtacttccctcgagtacatggagaggaattaatcctaagcgaccaattcgattctcttcgtacttgtgatcctgctgaaaactactttgagggaagtagcaactacaatgctccaaatgaacactcccacagcgggtcatcctgagaagatccatagctcattctggaggcctcactagagttgctttcacgaccccgtggtcaggagacaacgacaagacctaggtcgaccagagtataagatcaacctggaagaccaagaaacctgcatgacctcttaatcaagaagagaacggtggatggggaacttttagagaagaccctacttgggtaatagaagctctgattgggacacagaccaccacccataaggtcaaccgagcataattcgacacctttgcagctttgagttttgcaagatttgccttgaagaaaagaaaactatatcaatataaagtgtaaattattagaaatatacataaattttgaaaagaaaataaaagtacaacaaaatataa

SEQ ID NO: 401229 - DNA, 528 bp, Cannabis indica
agtgtataaccatagatctaaagcctttgtctctcctaatgggggaagatgagtttggagttagcattgttttttggggaccattactaatatataaccttatagttaggttattaattttaaatattctaatttaacctctcaataaattaaaaaatatagcttaaggtatctacaaatttagcacatgacactttaatacacatgactcacaattactaaaatgatcacattctttgggtcaaacttcaaatagcaatacaccaatacatatgagcacatattgaaaattttaatctaataatctctcacttgggttacatatgttttcttatagtgtgtaaccttataagcacttaactttgctatcataattataggtatttttaaacaatctcgtccattgattatactaacataggatcaaagcggctttcaccatatttagtgtggctaaacccatcaatggtcacatatatcaatataatcaaatgacatagatcaatcatgaatgcgtagcatgaaaat

SEQ ID NO: 401230 - DNA, 635 bp, Cannabis indica
gctcattaattcattaattattacttttaaaaaatatatataagttattaaaatctaatgcatgtgaatatatatccatactttaagtgttttgtatattaataatataacaaatgattataaaaaaggtgttattttatttttaaaataaagagtattctattacaataatattatattacatataaatacatgaaaaatgaagtcaaagtagtactattatatatatgaaattaataaaacacaatattatatcataagaaatgaatggtggtgatgacaggagacaactaattaattataattataattagaatatataataatgatgattttattacattaaaaatggttgtaattaatattaattattatatataataaaggtggcgaatattgatgggaaaagtagtggaattatctccatcgagtaattgattagcaatgataatatttgcagcctcagttggatgatatgcatcccaaaacacatacttacttcgatcatcacacattacattattattattattattattattattattattattattattattattactcatgaagcaaatcaaaggtggaatcgatcctccacaacatggatcatttctgttctcaaatcctac

SEQ ID NO: 401231 - DNA, 509 bp, Cannabis indica
ggaaaattaaatcatattaaaacaaaaaatcaatgtcaaataatattcatctaaaccctaataaactgtttagctactcatgttcaacttaacaatttcacacatattaatttagaatagaagaagaaaatacagaagaaaaaaatgctaaaaactctggtgagaaagccttcaatatcaattttgctctccaaaattcggcctccttgattgcttcttgaaagttattaaagtcaacttcttttataactaaaaaattataaaaaaaagataaaaaaaaaccgctaaaaacctatttttttcaggattaggaggggcgggccgcggcatggaaatcctatgcctaggcatagccctcttttatttgggcagtgagctttttcatgcgtcgactaatagtattttggccataaatctctcgatattgcttagaattagacgattcaagatgtttcgaaaagacaaaagagagatctagaaattttagttttgactttttcaaaaatctg

SEQ ID NO: 401232 - DNA, 612 bp, Cannabis indica
atcaaatcaactggctccaatccctctcatttcacagtataacatcattatctttactcccagatgcaagcaaagacccaagcttgctgtaccgaagaacagtgacgacccctttatgcccattcaatgtagtttcataggtttctttctcaaaatccctaattcgaatacttccatctgcatacccaatcgctacatgcaattaaaccctaacttcactcccgaaagcaaacagaacaaaacataacattaagaagctaaagtcaaaaggttaccagagatgaatgtgatgcatagacagcgattgcggtgacaccgatggaaggaccacgagaagacgcagatgggtttaggtttttgatgcggacgccttgttgtaaatgccaaacctcgaccttctcgagggtcggggcaaggaggtgtttcctagagctgtcataggggatgtttgattcgatggaagcgatgacgccaaaggcagaagcgggctcgtacctcaagtaggatttcaccatggctttgctgcttctgcttctctgttatgactctgagagagagagaagaacaagaagagaagaagagaaagagggaattaggtttttttttaatttt

SEQ ID NO: 401233 - DNA, 518 bp, Cannabis indica
aaagcttacttaagattacatccattttcacgtttacaaaaaactattatatttttcactttttattctattttatttttattctatttctttttcactttagcaaaagttttttttttccgcaaaagcttatagagcaatagagcaaggaatatgattccctataattgagatacgtggacattattatatgatgggaacataattgagattccaatgaaaaagaagaagatttattattattattattattattattataattttttagggttaaattatctcgactattattttatttgtatttaattttctaaatttaaatttgaattagtagaaaagcttaaatttgaattagtagaaaatttaaagtgttatccagttgtaatttggaagattatactgtcaaaatttaaacttggaggattaactataagcagggttggcccttaaacaaagtgggtcacaggaaaaaaaatatttttgggcccttatgttaaaaaaaatgtgatattttt

SEQ ID NO: 401234 - DNA, 548 bp, Cannabis indica
gtgggacaaagcactagccgggctcctttcaaggaggcaaggttgggtttccgctgataccacaataatgccctctctacccagagtcattagtaataggattttcccaaatttgtggccaaagagctactgaaaacctagaaagcttccaggcatgcttcttttgttcacttcttgtgagaaatccaccaatcatggtcaacggacctatgtgacagcaatagttgttcaaacaatgttccttttccaagcacaaattttaaaatgtattggttgtgctttttgtgagaaccaggttcaattgtgtaatttagctttcatggaggaaggttgaagccatgctaagatttacaaaatagttccacttttaagaataaaggtgaaaaccaagttgggcattcgatatacttttccgaaattattcttttgggaaggaggattgaggaggtatctgttggaaattattttaccaggatcttagatcgactcacaagtatgttgatttcgcagagtattatcaagatcttaacctggatctctttctctga

SEQ ID NO: 401235 - DNA, 259 bp, Cannabis indica
gtttctttttctgttttgccaattcaatggggggttactgaaaaaattggtggtgataagccacaggttttcctaaatgggattgctgataatgggttgcaacaagtgtttaagcaagttaaagcaatggaggtttgatctttctgatgttaagcctgagatatctgtattatcaaaggagaatgattggatcatacttcaaaagcccagaaagagttttgaggatgtggttagatcagtcttgatagtagtgaactgt

SEQ ID NO: 401236 - DNA, 1516 bp, Cannabis indica
gatttgtatgggaataacagatgtttggtatattttggtgctataaattttggacgataaatttctgaaccagaatgggacatctccacggaagaaggacaatcccaatttctagatgaagtttaccaaactaggggtttatggaatatagctagcataaactatgccaaacaaaaaaaatgtatatgaaccttagatgttgaaccaaatgaagtaatgaagcctaaggcagatcatcactcgagtaaaatcaaaggaagaatgaggtacttactgtgtgaaattaaaaggcgggtttgaaaaaagtcacaagaaaaatatcaaagatgaaaatggaggaaaataggttcttaccattttatactttgagcccagtcacagtaaggtcacaagatggaagatctaacggctgggagtgagaagaagtggaaagggtgggtcattaatgctaataatgaccctcaaaaccatgaagccgtcaaaatcaaggacatatgtgattttgaaaaaagaggttatgacaaaaatactctttacaatcatttaaaaaatactttattattaaaaagaactttttaacaggcaactgttatacctgaaattcaattttcgttttaaaggaggacacgtgtcaaactggaaagaatacgaaccaaaaaatgtaatgataattatatttgaaatgaaataactcattaatgtagaattgacagagtttttttacaactaactgaccgtaaggtcatatgagagataaagatataccaattgttgcctcgtacgttaacgagaaactatacatcgttagatgtacaaggcgaggcatcaaccttattacgcattacgagatgagacatgataactggaaagacacttagtgtataatacatattatacaaactaagtataacaatcgggtaaatccaaacaacaaatagcgaggcacccatctcgctataggaaggcgcgcccatgataccttcaccaacaagctccagacacctttcagtggggttcgtggccccatcgagtcagctctctctcaaattgaagttggcacgcaaatgatgttgactgctgaggtacaccatgtgacaaagaactgcaatttttagatggagcataatatcttcaagcgcaggaacgacgaggcttacattatcaacctcgaaaagacatcggaaaagctccagctcgctacaaaggttattgttgctgtgttcccatcgagacatctctaaacattacgatttacaacatatttaatacacatttatattgacccagtaaaagtggacccatcacagttgtgtgattttaaaatattaaccacatttattttacatggtatgtaatcaaaccccatgatttcaggggataattgttgtaagttatcagtcaactatgtaattaactgccttatgatgtaattataaataggagcaagttatactgaaaaaaggacgaaataaaatcactagagaaaaggcctaagagctatatcagaaatctaata

SEQ ID NO: 401237 - DNA, 561 bp, Cannabis indica
agaaaacaatcaatcacgaaaatcatattgcaaatattaaaaagataggcataaaggaagaggagatgaaccacttactgttttgacgaaagtttctcggtaatgaaaaactttgcgattgagtgttcgatggctgaggccatgggttctgaaattctctgagaatggaaatgtaatctgatgagatgcacaagaaaaaaggtaaggacggtgagggcatgcaaggtgaaaaagaagaaaattaaaggatgcaaaggaaatttgaaagcttaaaatttaaaaatggcgaaatagagtaatgttcttgtctttaataccctattgtaaaacaccgttagatcaaaagaggactgatctaacggatgggaatatgcaaattggaaaagacagatttaatgctaatgatgtgcctcaaagttctgaactgccaaaaaaccaaggcatgcatcttttcaaaattgggttaagacaaaaataccatggtaatcatttaaaaagttcttttttaatcaaaaagtactttttttaatcaaaaagtactttttaaggagcaattgttat

SEQ ID NO: 401238 - DNA, 606 bp, Cannabis indica
atgtaataaagttttaaaaaaccttgtaatttcctcaatgtataccttttatcttaaatatgaaaaataataaaattatctgctattttttttttttttcaaatgaactatcatttcactatttcactatttatgtaatatgtatactattttttcgaaataaaatatgtatatcttttagacaactttttcttattttgataacttatcttttattgaacttagtatattgaaagtgtataattattataaatttgagcatttcatattattttcaaaagtaaaatatttaattcaataaattaattgatttatgtagaaaaaaaaaaggtttttagaaaatgctaaattttaaacaaaagtttacagttttactatcacatggaaatttttataaaaataccgtatttttagaaaacaaccgtaaaataacaaaacataataactaaaaataacaggggaacaactaaaattaacgatgaaacaacaatgaaaatttaacacagtacacaatataaaaaatatacaatatttttgaaaaaaaaaatacattattttttaaaaaaattccaccccataataaaaaaaaatttaaaaatttaatat

SEQ ID NO: 401239 - DNA, 561 bp, Cannabis indica
tttctagtcacttaattattcaatctttttattaattttccaaatagaaacacaaatctaattttgtggtacttgataacaattctctgtggatcgacctcacctgtgtgagtttaaaactacaaacgattacctacacttgtgtaattgctcataaattgtgtaatagatatcacaaaatatttctaaaacacaaaaaataaaccagaaaacaaaaaatttgagaagcttaagtttcaagtacaagacaaccaaaataaaagagtgaaatatgtagatctattcaaatcaacctaaatacaactagatctaacaataatcactaaataaattatacacccattgttttttttcaagatttatgttggtaggaaatttgggttgctcctacacacttggttgtcaattgagatactctaggaaatggtgctctggcaaggtgtcatgggccgcctatttggacacccccaaataggtgggacgtgcggcacttgctggcacaccgagctagcaagtcagcctaaacgcgcatgtaggcaaacaagttcaaaggttaggcac

SEQ ID NO: 401240 - DNA, 578 bp, Cannabis indica
agaaccaaactgggttcaagggccataaaatgtgcatttgttggttatgccaacaatagtaaggcatataggctattggatgtggaatccaatgttgtaattgaatctagagaagtagaattttttgagaataagttgtatgaggacaactctcaaagttccacacctctaggtgagaatattttatatgaaaataattctcaagcttctacttctaaaagaggatctcaagaggagaacactactaaagttgtagaacaacccattgaacctaggagaggtcaaagggtgagaaaagagaaaagtctaaataaggatgaaatagattctcaactaatttctttctacgtgttagaagggactagagaagaagtaataaggaaaattcctttaatacttcttattgaggatgatcctaagacttttctagaagccatgcaatctagagatagtgcattttggagagaagcagttgatgatgagatggactcaattctctccaatgacacctatgatgttgtggatcttccgcaggatgcaaagcaatgggtgtaagtggatatttagaaagaaatatc

SEQ ID NO: 401241 - DNA, 557 bp, Cannabis indica
tgggtcatcaatggcatgttttactttagagtgtttttttggtttctattggtttgattatattgtgtaagctcattataggtgttctggaaggtttggtagcttttagacatgttttcagtaggttatgaaattttttgggaaacatgatacaaaccggttaatcggcttgccaagacccgtaaaaccagttaaccagttttggcagattccccgaataactcatttcctcgactcgtgtccatttcagtgcctcgtttggttgattccctattttctaggatattgtagttcctattagtaataacagaaccttaagttgtaggtttgggttttctagattagggttttgacgtgtgatttatccagttttaatatgtgattagggcatccattgagcacgagactttctgttcaggtcagccaactcacttggattcgaaaaagaggtaagaacatcgtataatatgtgatatatatacgaatgtatgtatgtgtgaaatatatatgcatgtttgttgtgatttgtacactacaaacactagttcgattgcggt

SEQ ID NO: 401242 - DNA, 1191 bp, Cannabis indica
aaactctgtaaataacagagtatctcacagagaggtcatatatgatatattgacattttattggcaacaatttttataacatgaattgtttttagtggtactaagctaagtcgatcggcccattgttagggaatagggaataagtagtagttatgttatgcctaatatgcttcggctcaaaacaagacccacaagtagtcaatcaatgtctactatgggtatcttccatttctaagatagtaaaagatcatgtgatttggttgtcacatagctatgcaaagaaagcataaataaataaataacaagtatagtaaaattgtggatatcctcaaaagtaaatgatgattctccttatttagtgtatgtatgtactttggaacttgtggcttaggtgtcaatgtaaggcatctagttttcagtgaaatgacgtaatcttcagtacagtactgtacatgtacatttaaaaacaaaatcactattgaaagaaaaaaagaagtacgattaggccacggttcccagcatgggatgggctggcaactatactaaagtctcaactcagtgatttccaaaactgttattaagccgaaagagttggagattagaagcatgtttgatattcattcttatttttttgttttaaaaaagtgttttaagaaatagaaaataaaaatagtttttaaaattttcaaaactgactcaaagtgaattattttttaaaatagtaaacaatattttgttatttttgaaattcttatttttttgtgattttgttttctgaaaaatgttttcaaaaaataaagtcaaacaaacctaattgtattaaaaaaactattttctattttcaaaaataaaaattattttttttgttataatgttaaacatgcactagatttttgaatgtgcgccaccttattttttttttttcagacaaaaaaaaaagaaagaagttaagattgatactcctattatagtatacatgtgtggtatgtatgttgtaaacacaatattacatgttttggggggctattttgttaatatgattctttacattagggtaattttattttgctaatatgattctataatacgtcagggcaactacaataaatttttggggtaatttgaaaaatgcctcttttattaattaattaaccaaatttgtctctaattttatatttatttgaaacatac

SEQ ID NO: 401243 - DNA, 770 bp, Cannabis indica
tttctcctcctacagtctcgagagtcgagttttgtttcacaccttgaaatatctttcgcctttatagaaaattctatccattgctcccaagatacatttatatatttgatttgtcacaaacgttgacactcttcaaatagttataaatttgagtgtggagccttagaagttatgcagtagtagaatgatatggagttccactaaccaatttttgttaggaggtatgaacttttcctaaggaattcctaaaataggcaaccccccaataaccttcaagtcatacagagatattcccatctcaccgctgctatgatgaagtgagttagacagaggaccccaaagttcagaaaaagcctgccaatatagatctctcatagttgaatggatatcttgatatataaacaactccataaattccagcctgattcaaagtatcttgatttgtacgcagaataaggtctgcccattcgataagatatgtcacaaatacaacatgtccatgaaagaaaaaaattgttattagcctttttctctgctaaaacatgatgaaggcttggataaaagtccatagttacttggtaaaccatatgagcatcctttttttttgtcaatatccccaagaactttagcctagaaattgggaccaaaacctcgggtgtgctggacaacattatcatcaagtgaagaatgatattgtaagtcacccgaaattacatcttcaatcttacataaagaaacagggtattgatgatcattggatgctttaactt

SEQ ID NO: 401244 - DNA, 770 bp, Cannabis indica
aactggtgcgtgttgaagacagcaagcttatatgtgccatatctgtctcatatacttggctgtcatgcaggatggtcatccaccactgggttggcatgacacagcagcatacctagttttaccagtcctccttgttgcttctcagtacgtttctatggagatcatgaagcctcctcaggtatacacatgtctttctgatcattatctcgtcccctcccccccccccccccccctcccccttttaatgtttaaaaatctcaaatattactttggcagactaatgatccagctcaaaaaaacactctacttgtattcaagtttcttccgctcttgattggttatttctccttgtctgtaccctccgggctatcaatttactggttggttcttctgaacacactctttttaaatttgtgtaagctaatgtgaatgcatgcaagtaatacattagttgtttttcctactgagagtactaataaatttaagaatgatctctcaactttttaaaatttctcattgttttaactaaggatgaaaacaaatttggaatttgtttcaactatgagactacaattgtatagttgctatagttagggattaggagcatgaaggaatttgtgcatttatgttagttgggagttcgcaataaaaagcgaattactggcatttggtaacactttcacttctgaaataaaaatggaagtagaatttatgtctttcaaattttgttttcaaaaacaaaaatgtgttatgtaattacttttgttttt

SEQ ID NO: 401245 - DNA, 571 bp, Cannabis indica
tttgggtggagaccgactgcctcttggttgttcaggccttaagaagttcaactcttttgtcttcttattttggttgtgtgattcaagaatgtaaagccatgttggctaatctaagtaatgtttatttttgctttattaagcggtcagcaaataaagtcgctcatgagtttgcacgagcgtctctattttatcctgattgttctttcagtatggaaaatgttccaactgatttgttgcctatattggtgacagagtttgaaggttaataaaacttgattttcctttcaaaaaaaaaaaatatttcgatgtgtaatttcgaacatcaaaattaactataaaattataattaacacttcttataaatatatatatataatgtttaataaacaaaatttttaatgtgatgaattaatttgactttgtaatagtatatctaaaggagatctcagaaataatatatcttaaataatttgaagatatatatttttgtttatgtataaatataaacatgtagtttatacgatacacacaataatgttattttattttttaaaaaaaaaaaacttaaagg

SEQ ID NO: 401246 - DNA, 832 bp, Cannabis indica
catattagtgcaggggccacccttccacttcgggactacttcaaagactatataaaccacattggagttgccccattccagctgactcccatctcctataggattcttgctagtttgaaaattttatataaaattctgaattgggggttccatcgaggaagaaccctgcagtgggatttttctatctcggtactcatcctagcgagcctaaaattattgtagacttgccaaataaagtttctttcaagaacaacttcttctggacatctggtcttcccccatcgacacaaccacgttttgtaaactttgtaactgatcgttctcttcttacttatttacattagtctttctttttcaagtttttgactaatgttttgtttgttctggcagctcttttgacgagacctactcctaccccgagatggttagtaggcacaagcgcttgttaactcttccctacaaccttcgatcatgcaacttccttttgagcgaagttagcttgcgatcggtgggtcttctcgctgataaagaatatacttgtgattacaagattcccaagtattcttcttggcaacagattgctgttccgcgcgaggatcaggcctaggatcacttggcccaagcacaatatctttaaagtactgcccctcgggaatccggtgaaggagcatcccgaggtaatcattgtggttggtctcctactatacttagagctgagcataatacattagtcacctttgacgactcccgtcttaattttttatatttggaattatcttctcgtggactgcattgctcataagtttggcagctggtacactagattccacgt

SEQ ID NO: 401247 - DNA, 2001 bp, Cannabis indica
ttttgtttgtctgaataactctaaggctaggaaaatttttaggttattcgattcatagactttttgggttaaacttgtgttctgtttttctgaaaattgggatattattgtttataagtatgtccaaatttattccagaaatcacaatcctagaatccctagaattagattgtcctcaaatttctaccattcaattcagacccaaaaaacacatacccagaaccgctcttgaaataaatgatgcaaaaattaggaatcatctcattaaaaccagccaagatgaaatctccggtcgctataggaaattcttgcaagaaataattgagggtaaacactattttttgcgagaagctgcttggcctgaacctcagagtttattgatattcccttagcgagacctctgttattacctccagtcactgttactttttcatcgggtgacttagattttgagattatggcctagaaatcacgtaaattaaagacccctcaaaaccctacagttacctttgaggcataattgatcgagtttagagttagatcgataggatcttatgttggagaagtattaaaatcgtgcactactacaaaaatagattttcccgacatttttaaatagtcgtttaaagtattcgcgtcagtttctataaccgtcgcctatacgactgtcgtaaaatgggcagaataggcgatagttcaaaaccgtcactaatatgggtttcccgacggtttaaaatcgtcgcctataacagggtataggcaacggtttataactaggtataggtgacgatttaaaatcgtgtcctatactataggcggcagttttaaatcgttccttataggctggttacgttttttaatttttttagcgacggctttttttagtcgttacattggaaaaatagggaaaatatagtttttttgccaatttttccctgcaataaattggaaaatttttacaaatctgtatagtcacaataattaaactaatgttattatcgtctaaatatatttgaaattgtgtataataacaataattaaaatgacgctaatatcatctaaatatatttaaaaaaatctataattaagttaacgctaattataataatctaaatatatttacaaatctatatagtaacgataaatcgagatatatacacactgactaacacggcaactgttgtcgctccgctttcactttcacgtaatgaatccaccgatcacgcataatatttatctcatcattagtgtaaggagtagagaacctatcatgtcgggcaacagttgtattggatcttctacgatcatgaaacttttaatgaatttcataaggtagtatccacactatttgttctcgggttgttcagaacagataggattcatccactgaataggtcgatcaggtcgtcctatcatttgattatacatggtgaacgatctacataaaaaagtaaaattaattagcatatataaatttataaaaaaagaacacacttacatattaggatgtttggtatagaacttacgtggatatgatgaagttcagatcatccggtatgtcgccattgcctgaatctaagtacgccaccgtctacgtacttggccggatgagtacaagcatctagttaaacatgtccctgcatggacaaatatgtgtaaaactgttaatatatacataataataaattttatgaagagttataatactaaaattatttattttaaatctacatataccgattattatatgggacaataagccatttgtctgaattagtcatcctagtcatttgagtgaacttcctcttcattaccaacaaaggcggcaagttatacatcacaagcaaaactggccagcaactatacttactgctaaggctggtatgtggattgattccgtccgcagaaagaccaagacaaatattcctaggttcattgccaaattcaagccacctagcatcaattaattttcaagcgggtgagtcagctggatgtctcatc

SEQ ID NO: 401248 - DNA, 579 bp, Cannabis indica
cctgttcaacaaaagaggtggttactgacaaggagtgtgcccagacgctcaaagatgaagtcaagcaactgagggacaatggcttcataacaaaagcattctaccctcaatgggtgtccaatccagtgttggtacctaaacctaacaagaagtggagagtctgcatcgacttcaccaagaacaaagcatatccaaaggactacttcccgctacctagaattgactagttggtggatgccacagctggacatgaagtcctgagttttatggatgcatattcaggttacaatcaggtaaagatgtatccacctgatcaggagcacaccaacttcatgacggacctaggcctatattgctacaaagtcatgccttttaggttgaaaaacacaagggccacttatcaaaggctagtgaacatgatgttcacagatctcattggccgcaacatggaggtttatgtggacgacatgctcgtcaagtccaaaaaggctgaggtaatgtggaggacctaggcgagtacttccaaatccttcgcagctacaacatgaagctcaccccctcaaatgctcttttggcata

SEQ ID NO: 401249 - DNA, 1074 bp, Cannabis indica
tgagcagcacgaatggattcattttagcatttctcataaaatagtgcccttaatgcatcccaagtcaaagtattgagattatgaccttgggaaacaatctcccaccatattcgtgcatcatcccgtaacatatagatagcacatcgtacctggtcattatcttcaacctgcataaagtcaaagatggaagtaatcatattcatccattgttctgccttcagtgggtcttgtttcctaaaccgctcataaattagttccatacaatcccccatattctgtagcactacctgaggtgccagtataggtgcaggtcaagcctgatgctctctcaggtctcgaatctgctccccttgctgcccaatcgtctcttgcatggcatcaaacagctgttcccagtcctgagggggtggaggatgcttttccccaccacctaccctgagccccaactcgcggtttaaacggctagaccgctgctgcatgatctaatatcctgtaacccaaaaaaaccttcaacaatttagaatttagacaatatcaatatcaatatgcataagccattcatacactacgtcttctcattatacactatgattgtctaagcaggtaaggcaataacagataacataaacacttactaaatcatgagtcgacctgtcttcgcaataaatatacatattcgaccagtcttcaggacctttaaaaccatggctgctctgataccaagttataacgccctattctatggagacgccacgtgtatgattttaaaaactagtttaatactaatatattgattaattattaaaaactgtgaggataataaaaaaacttgactaaaataaaacactaaagataaatattataacgacaataaaaaggtgttttgggaatccctattataaaagatttaaccaaaagactatatacaatagcaattcaaaacgcaattcaagatacaccagatacagccagtctaaaacaactcttgacaacttggcacataagtcggtgggtcaatatgtacattgtcggagaaggccgtcatctcatggttgttctaacttttccttgccc

SEQ ID NO: 401250 - DNA, 1404 bp, Cannabis indica
tctttgcttgtttcttcctttctggacaggtacaatttacttaatttagttgaacaatttcataatcagaaactctgctgatctattcttttgaggtacacaacaaacagtctttaatttacgacctgattgtagtactatctagtatctattataaccattcttctcttcttccattgagagctttgtttttattgtcgttttagcatcagggaaggcaaattacttcttatatatttggaaattaatagattaatcggaattttaattgaagtttataagatatatgaagctcatgtatctgttctttatatctgtacttataagtttttgttatgtgaaatacagtgtaatttgatctacaaatgatataataactctagctctgtagtttatttacaatgattctgtatctgacatgctatattaattatcaaatagatgaagggagaaatgcatagcaataatttgggtcgtactgacatggaaaatgaaaatccaagtgtaaagataaaggtgttattctttgccagagctcgagatcttaccggcttaactgagacgccattagaggttccatcaggtagtacagctcgtgactgtttaagcaagattatgactagtttcccgggcttacaagagattaagagttgcatcgttgttgctttgaacgaggaatacacaactgactcagccattgttaaggacaaagatgagttggccataataccacccataagtggaggctgaatgaagctcctcctatctattcaaatttaacattgaatgttcggacaaatcacaactattgcttcataataaaaataacaaaaaagtgagccagaaaatgcaaaagatacccaggcaaccttgatatatttgtgaaaaaagctcttatatatgacccttcaatcaaacacttgatttgattatcaagctagatttattttgaatttttggccctcgctgttcgagaggtccataggtttttgagtatttgggattcgaaacttgaaacaaatgcctaacaacactttccaaacactccataccgctccaccaccacttggggttttaattatcaagctagattggctcctagcaagctaatacgtttactaaactctaattggaattagaataatttatgagagaaatgtattcgtttaaaataaaaaattggaaataataatttattatgttgtttattaaattgtctagaaaaaaaattagaatcatattattttctttatataaagataggtaatcagaatgttttaatttgataaaattgtcattattagaacatgtagttattttctgtatatagatttttaaaagatatttttgtctttttcatttttaattaatatatctatatataatataaaggaaagcacaaga

SEQ ID NO: 401251 - DNA, 1016 bp, Cannabis indica
acgagagcatcctcctagaactaaaacatggcataggtcacccgatcagtcccaatgacactgataaagttaagaattctctcaattactgtcaaccactgctcgaccttccaaacatctggacctcccaaaaaagctagaggtgcttgtttatgaaacctcttatacaaaggctccatacattttctatcagttggttgttctactcgcaccaccggaactaaagtggtcggcaattactgtggtggcactgcagaaggaccctgctgtctcagcctctaactttattcatcttactggttaattcaggcttgtattttaacaaacctttgctctcaatcctgaggagcttgtggatgatttttcagaccacccctttgaaaccttctacgacctctaccgtgtccatggggatttagaggattttgacctccctgaccgcctccaatcttgaccatattaccttgactccttgtgttttgctgggcgtccatattataggacttagcctgcaaacccataagtaggtaggtaagatagtgatcacataaaattttattactacattcatggaatttaggcaacacatttaaacatattactaacatgactcctatgataattttctaatcagataatttactaaagaagtaaaggcttactgaaccatgagtcaaacttatctctgacgatgattgtacatgtcttgaaaatctttggtgaacaacctagaggctctgataccataattgtaacgccctaatgcttaggcatgctacattgactttccaattatagtacacacctttgctaatcaaaaggttttatcgaatattgtgacaaatttaaacttttaatttaactttaaacttttataaatatatatatatatccataaaaaaagttaaaaattctgcttttaaaacttatattcattttccaaaataaattttacaaacatgtcacacaatgattaaaaaatgaaagtccaaatcgtctcgagaccaaactctcca

SEQ ID NO: 401252 - DNA, 512 bp, Cannabis indica
tttaagtggtcaaacctcaacaagttacaaatcaaataaatatatattcaaaataggaaaatttttaaaaatactctttctttatgttttatttactattttacgatttaaaatttttatctacaaaaatacaatttcaaaattttaaaattacaaaaatagaccttgttcagcaaaaagtaagaaaacaattaaaaaaataatcagaatttaatctcacgacaactataaatcaattataaataaattataaaacaatcagagaaataaacttgcgataactataaagcaattataaaaaaagtagagaaataaactcataataattataaaataattaaaaaatagtttattattttattgaagaggtatttttgtaaataaaaaaattacaaaaaataaaaataaaacttttactatgtttaagtattttgtaattttttaaaattgtttgatttttttttgtcaaattttcctatcgtaaaattttactctgaactattcataatttt

SEQ ID NO: 401253 - DNA, 813 bp, Cannabis indica
agttatgaccaaaatactaatctaaacacgcgacaatatttttttggcaagaagttgtggccgcaacgaggctcctcgtggctgcggcgaggatgcaaattctaccagatttcgaattttatcttttttttttaaaaaaaaaaactgagatatttttaggggttatatataggcttttagggttcgaaatttagtacctttgaactacgaatttgagagagaaatttagagagagagagaataagaagaagatggagattacgtcatcgatttttctacatcattgttcttttacttctccttaaactcttacttttattatgatttttattataatgtatagttcagagtagtttctttttagttaagggttattttaaaacccaagacatgaatttttaattttaatgatgaatgtttattattttctattatattgaattatttatgttcttctatattcaatgccatgattattgttttaatctcatttagatgatcactaaattaggttttactttaatctatttcatcttagaattactattcacctaatagtctaggattctaagtgtttgtgataaattgtaatttctaatattgtcaaatgtatttttaattgtgatgaagaatagaacctaggttaaataaattatatgtttcattaatttattgcttggattaatctccattaaacttaaagctttatctaagataaataaattacatgcttcgtggatttaatgcttaggtaagagagttacttattgagcgttttgccttgattacatgccatagggagattgagataat

SEQ ID NO: 401254 - DNA, 297 bp, Cannabis indica
gtatacaaagtacatgactataacatgtcttacataataaacttagataacaatatatacactaaccctgctattgacagccaaaactacaaaattcctattatggtttttttgagtcattgaattactattagttgtgattaatttgaaaattaatagaaaataaataataaataactataacctaataatttatttccttataaaagtttaattaagattaattatattttaaaattaaattaattataattattaattaattttttgtaatttattacttttaacatttttttt

SEQ ID NO: 401255 - DNA, 888 bp, Cannabis indica
gtcgtcggtggctgggcgtggtgatcaggcgcagaagccgtggtcagcgagagggagagagagggtcgtgcgtggtcggcgagagggagagagaagttttgattttttgattttttcaaatgggaggggtatttgtgggatattaggaatgtagtcatatatgaccaatattattaagtatgcatgtaaggaaaaatttttaaagtcttgtaaggatggaatttcaaatttccctaacagaattggttaaacacattaatacacaagacaaataactaaacaatcatttgttggactaaacacgcatcatattagacattaatttgttaactgtttttttatcattattctcttttaaaaaagaaataatacggtagcataactgtttttactagaaatattgttagttaagaaaattttaaaataaagttacagtagaaattgccaattagcacgattagcattttaaaaaaaaatacttagcaattttgccctttgaatttttgacaatgttgattccgcggtttacattcggaccactacaatccgaaccattgtaaaccgtaaccggaaaaccgtttttggtggtttgatcaatccggaccgtttacgtcgtaatggttcagttgcggttcgtaatatataattaacggttaaaccggaccggaccgtttataataaataattaatttatatatatttttcatgtatgactatatgtataatttagaacttttttgtgtgtcaaattttttattgcataaattttagatttgtatgttatgtttgacttttgagaatgtttttatatcattatttatatcttatagatcaaatacgtatcatgttaaatatatattttgaaaaataaaattaaaaacttagtaa

SEQ ID NO: 401256 - DNA, 594 bp, Cannabis indica
catatataatattttcccaaaaattaaaactgataaacccttgtcttataaattaaaattaacgactcatatatagaatatgtatgtatgtatatattaattaacaaaatagaggctatagaagttcaaaatcaaagtagtagaaccaaaagatcttcccaccttcatgaatagtgatgaggtcaaaaaagagaaccacatgccaaacgacaaacatatatatatatataatgctacatatatatatacattatggaaccttggagattctctcaaaaaaaaaaaagagagagagaataaaatttacagggtttctaagtgaagcaaactccccaagctagatggtatgggaccttggagattgttgtccgacagaacactacttagttcacacgagaatgttgtcattaattcttattattaagtcatatagagaatatcattcttatcttaataaaatagagataataataaaacaaagacccaatttatttgaatattactttttaataccttaaagcgtcaaataccatataccattttttattgattaactgttactcatatcaaatattagattcaaatatgtgaaca

SEQ ID NO: 401257 - DNA, 1392 bp, Cannabis indica
tcgtgtaatgtttatattaccattaatccgtatatacctgtaatgtctttgtataatttgttttgttttttcggttttttattttcaattttaattagcattgatttttcaggttatgaaggttaagaagaggatcagaagcaattgaagaaattacctgaagaggatcggagctgtagaagacgatcggaggtcgatgatcgttgttgaagctctgtcttcagacgattgactttttgtgcatgttaattgcgtttgagatgagtagaatgtgttgaagaactgtccgcaggtggagaagacaatcggaggcggcgatcgttgctggtttcggagaagacgatcggagtcgactgttgcatttgagttcggtttgcagatcgaattgcaatgatcaattgagttcagtttgcagtcgactgatcgtggctggtgattgtgcaattccgaacgtgatgatcggagacaaaatcgcagagagtagggagagagagatcgaatcgtggttgggtttgtgcaattctgttatgtttttcagttttggaaagtatgggattatacattttaagtatatttatacgttttttggattttcatattttttcatttaattaattttttttcccatatcctttttatttatttttttctgtccataaaaaagtcaatggcaacaaaaaatctcatatttatattttttttttcccctattggaaatctatacaaatcagatgaagtgggcttgcttaaagcccaatgagcagtcgtacaggccacttaaagggcccgttcttaacttttcagttcagggaaaggtaagtaagaagtaagaagacatgaaattaacgaaggggcttaaaaatgttgatatttacaaaatggcccatctctgaagtaaaaccactttcgttctaaagctcaaatcccccaatactttctcatcgcccacaactcagctcctagcggcgtagagtagcaaagactcactcttcgtatctattggtttgcattcgaatccaatcaacacaaaggtaattcctttcgattttgcaattcgatctttttcgatttacagctcatcaatctgtttcgttagtaattttgttttgttttagatctggtcttttaaacacgatatgtttgtgtatatgattgttccatgttcttaattttgaaaatgaatattcgtcttttcctgattgttctgtgtttggttacctttttaatttattttgttgtgtttatgtgactgaatattggtttgcgattgctttttgactttttgagtaccagccatctgaatcacgggtgttcgggatatatctgaatttgagttatacatacagttatagattcgagttttttaagttctttgtttattcggagtgtttt

SEQ ID NO: 401258 - DNA, 873 bp, Cannabis indica
tttgggttcagggtctgggtttgtataataaccaacaaaactacttaaattgcaactaaaattcacacaacaacccatataaactatcggagcaacatcaattgtaaattttaatatatatatatatatatatatatagaataattctcaaaaaaaattatcttaaactttaattatccctcttggattgtggattaaaatatcccaagttgttttttttcttaccattaattagatttaaaatatatatgtgcattacatatattttaataattaaaatttttaaaaataatgaaattttaatctataaaataataaagtagttcaattttaaaagtttattaatatatttttctttttatttgttatgtttattaatatgaattttaaattatagaataataaattatatattataatttgtacatattatttaatttctagagctattaaatttattgaaaattatttattttaaaatttttaattttattacatatttatttcacattattctttagtgacaaacaaaaataaaaaaaaaaataaaaaaataaaaataaatttattaaaataaactgtatactcaatagtcctgttctaaaccaaacataatataaatcttttttttttttcgcaaagtaaaccaatcataatatccaatatccagtccaatcatccattacgttatataccaaaagagccctaaggaattcggggccatgatatatgaaagcataagcatataattttgtcaggtacattaagtttagtggttcattgaaatatcaatttaaactttagaattagatcgcagagtgttttggttgaattgagtcatattataataatgtcttaataaagctattttat

SEQ ID NO: 401259 - DNA, 599 bp, Cannabis indica
aataccaaggtacctgaatgacatatcttttttgctaaaacccgatgcatctacaatacgttgcacttctcaatcttgcatattacaacaatatatggctgatttggccgaatttggttgtaagccgaaggaacgagagaatagcttcaagccttggagaatataatagatgcttttgtaatctccatgacagaatgaaataacatcatatgcaaaactcaaatgatttattttcaaagttgcacacctatcaaaaaacttgaaatctggtttagctccaattcgttgcaatattcaggaaagatactccattcctagaacaaaaagaaggggtgacatcggatccccttccctcagtcctctttgagcttcaaagtatccatgcattgtgccattgaacataagtgagaacctgggggttcgcacacatgtcatgattagttttacaaacttatctgggaaattgaattctctgagcatctcttccacgaagtcccattcaacggtatcatatgctttttggaagtcaagtttaattatacaccctgactttgatgatttcctcccatagtgacgcactagatcttgacaaatcatga

SEQ ID NO: 401260 - DNA, 551 bp, Cannabis indica
gaacatccttttaagggttgcattgtaaatttttctaataaacatgcattgcctatattgattttgttgtgttggtttgatttgaaggttatatagctagaaaattttaacctttttattattttttttatttgatttgtgaattaattaaaaaatttcacttttttttttcagctcggtagttcgatcgaaagggtctcgaattcttttaagtaagtgggattcgaactttggaacaaatgcctatcttctaaaattagagagcaatccttacaaaataagaaacaaagggctcgtttagtacgccgtataaaggtcgtattgtattaaataataaataacactatatttggattaagcaatgtattgtattagttaatacgactaaattttttaatacaatgcatgttgtattatttaatacataataaattatctatattagcttgtattatctatacaatacaatacaatacaacacaatctaatacaatacaatacattacaatacggcgtaccaaacgagttcaaaatagataacttagggtgtg

SEQ ID NO: 401261 - DNA, 558 bp, Cannabis indica
tactgctcacgattctgtgggtatgaaaacagaaattgttgggctgattgaagatctattttaggaaattatttagtgagttgtggttgtattcagactgtgtgtgagcttttaatatggtgtatattgattataaatacaccttatagcaactagctcatgtatctcattcttagactttgaattgtattcatttcttgagaaaagtgtgtctttgtttgtagagaagagagtgttcatctcttactctgtttatatgtattttgtattgtcttgagtctgtattcaagtctgctaaagaagaagaacaatagtgctacctttaggagaaggttctacaagctttcgaaagatttcttttcaagtcttacctcgggaggaagcaagtactcttcaaggagatcgaagggagttcgagcacttgaagttttaacaagattcgattagaaggtcgaacacctcaagcttgcggcatacaataagagggagtctatttatgcataagtcaattactttgtatttttgagatctatctaatgaatcttatctctggacatg

SEQ ID NO: 401262 - DNA, 748 bp, Cannabis indica
atattaatacctataatactcttctcctttatcttctcttttaacttcaccattcatactctccattttcatctatattgatggtagtctgatggcagtccgatgttacttttttttttttataaaaaaaaatggtagcatcaggccatcatcagatcatattttacattttatagatgttaaatgctattcattaagctattcaagaaggcatcgggccactattgggcctagcaaaaaaaaaccaattttttgctcaaaacttagatccgaccgttttcgaccttaaatctaacaactcacaaataacaaacattaatcatacaatttattcctttgacaatattatcgatggagaagccgtggttgatggagaagtcatgggtctgtgggtcattaggtccatagtggtcattgggtccgtgggtcgttgggtctgtggtcgtcgtggagagaagggactgatgttttgggtggtaggttgtgagttgagtccttggggtgagttcacaagagagagaagggaggaagaaaaaaggtcaaatgtttgaaataaaaggggtagaattgagttttataaaatgttagcctattctaccaatatgggttaacttaagtttaagaaaataattttaattcaataaatacatagaaagtgtgttactttttagttctgtatatgtatgttatatggattttctccatagtcaaggatgctttatagtattcatctctctattttcatttg

SEQ ID NO: 401263 - DNA, 1109 bp, Cannabis indica
tgattgtgataagaatatgtgtgataagttatacaacaagggctatggaatagtcttgttagcgagctatttgggctcgtggcaaacggtaaagaagagaatcctttattgctgtaatattggaaacatgtaaattctactatgcaggatatgattagacaacaaggggaaacagatctcagaactaaaagaacaatatgctcaactagagtctattcttatattaataacatttcatgttgcaccactaaatgtggtggaatatatgaagccaatttactagtagatcaggaagcaaaaactaaatgaaccaccaattatgggacatgacagaaaggttctagggtggtcaaggtgagaataagaaatggtgaccttatcctgagtgttcacgatgcaaaaaggtgccatttgaaccaatgtagagccaaattttgttttattgtagggtagtgggtcatctgaaaagaacacgtccacacttaagaaagattgatgttaaagaagaaaagtgtacggatcccatccaagtaccagttatgattcaagggacccaaatatcggtccttcggccaactcaagttagaatttatgggcaatattaaacattgtacatttagttagagacatcaagaaatctaaatggactgtgcatgtatgttatttaatggtaacctatttaacaggataggcagattagaaagatgacagtatgagttaaattgttgatattccctagtggaatatagaacatgagtacttaatagaggcatcgatctaattgattcaaataacaaaatcttttgtctagaagtgatctagcgttaccaaaggtaagacaaattatgactattgtctggaatcctagatgaattgaaagcgacgattgtgtagtaattttgagattatgtaggcgtgggactagctatgttagcaagaaccatcttattttggtagttcaccatgaaggaactccatggttgagtgtccttgacttggggtgatttaatttaggaaatttccccatgaagtgtgcgagtcggagcaaagcacgttggaaacacttagattagtctgtgggggggggggggggcaatggtcagttcggg

SEQ ID NO: 401264 - DNA, 634 bp, Cannabis indica
aaaaaaaatctccaattttaaaaattagagtttcagtctgtcccaacctaaaattgtcacgacccgagcccaaggccgtagtagatttgtaatatccataacttgggtggtcaaaggtcacactttgacccttgtaggaagataaagcttataaatgattcttttatttataacacaaaatactaatttaaaataactggattaactcctatattaataaaaaaatattagtaacaaaatgaggaccactcatcaatataaaagaacaataatatccccacagttatgtaatcaccaaatagatagatttaataagtcaataaaataccaaaataatacctagcatccatcattcctcatttctaactagtacatagctaatttaagtcatccagaccatccattttagcttaattacaaaatcagtttcattaaaagatttaagagtagaataagactaaactaataacaacttctttttcaacggtaccattctcatccactagcgtcaaactgagttcctggaatgggagaaaatagggggtgagcttataaagcccagtagttaaacaactaacatcaaaggacccttgatttaataaaattcctgcatggttagcttagtaaaaataaa

SEQ ID NO: 401265 - DNA, 577 bp, Cannabis indica
ttactccttgagccctgggaagaaccaggtaaacttgccgtcggagcggagtgcgagggggcttgtccacttatccctgagggattttcgaaatgggaagatgcgggggccaagggttggcattggctatatccaggagtagcagaaaactgtatgccgctcatcggtggagctgcggctggcacggtgcctaagagctatgccccggacacatatcctgctatcccggtgggataatatcctccataggccactatttgggcctcttcaaggttaatgtatttctggactctcttctggaagtcttgaaggtttgaagctctttcttgttgtaactcgttccagaatggagtctccgtacggatgcctgcttggagaagagcaagttgttgtccgtcatctactttctttgttttagaggcttcttcccggaacctcttgatgaaatttttcagtgtctccgtaggcagctgcttgatgttagtcaaggcgctgacctccagattgactttccttgcgcgcaaaattgtctccggaagctggtttgcaacttattccagcagtccatggatcctgg

SEQ ID NO: 401266 - DNA, 875 bp, Cannabis indica
atctgcgcgactttatcaagttacagagatggatgcatacttctaaaatgcataatcaactttaagttttttggtggcaagttttactttatcaagtactagagatggatacatacttctaaaatatataatcaacttaagctttttagtggcaagtttaagttagactcttttctcataagttgtaatttagagatgcatgaaagattatgaatcaaccatgcaaggagggttagtcctaacattatttagggtttaagtaagaaaaaaaaagaacaattacataaatattattttttattaatttttatatttttacaattctaatttagttttttttttttgttttttttttttttttttttattattttatatagtattttaataaaattatacaaaaacaatatggaaactatataaagaaaataaaaaaacaacaataaaaaataacatacaaataataaaaaattgacaacacacattattttttttataaattttttatattttcccttcaaatatttgttctttttttttatattttttttgtcaaaaattgggcaatccaattccacgtgatctcccatttcaaaagtcatttgaatagttattaaatcatatctcgccattgtctatataacggcgagttcgagtatttttactaactgtatttttcgaggagaatcatctgaatgcatttattgatgtataatttgagctggttcatattcctactttgttacatgtgtcagcttcctattactgttcaaaatatgggtacaacataatttgataagctatttgagtatttgttaaaaaaaaaattatgttataaatatatttttgaataactattttatgtttcattttttt

SEQ ID NO: 401267 - DNA, 818 bp, Cannabis indica
agacaagagaacatattttcttgtaaacttccccggtgaagggtagtaggtgctttggaaagaagggcaagttaagccctaggtttatagggccatttgagattcttgagaaggtcaggcaggtagcgtatcggctagccataccaccagcattatcgactgttcataatgtatttcatatttcaacactaaggaaatatgttttagacccgactcgtatcttgagttatgaagtcccagagctacagtcagacttatcctatgaagaacaaccagttcaaatcctcgataggaaagatcaagttcttcgaaacaagaccatagctttggtcaaggtactctagaagaacaataaggtggaaaaagccacctgggagctagagtccaacatgagggctcaatatccatagttattcaaattagattttgaggataaaatccttttaacaaggtgtaatgattgcatgttatattatggattagtaaaggcaattagcattaattcttgatattttataattttatatgattttatattgttgtgggttccacttttaaaaaatagcctgtcatttttcctgacagtttttctaaagtctcattttttttttgtgtttcctcaaaatttagagcattgccatactatttatcgataggaaaacttttaattttaagtttaggtctccttaaaggttttagcaagttatttattcgttttgtgtattgtgacatagggcctcgttcaacgagtgatatttgcatttagattgatcggcatacttgaatcaagaagaggtaagactagcataagatatgta

SEQ ID NO: 401268 - DNA, 983 bp, Cannabis indica
tgcgagtggttcggcttcagtccggttagtaaagtagtcgactgccatcactgcgtactgcactccgcctttacttttaggtaactgtccgattaggtcaattccccaaatggcaaagggccacggacgttgcatttgtgtcagctccttgggcggagctcttggtatctttgaaaatctctcagatttatcgcacttcttgacataagctttcgaatcttcaattatcgtcggccagaagtagccttgccttagaattttctttgataagctctatccggctgagtgatttccacataatctgtcgtgaacttcatataaaagctgtgcaggttcatttggtgtgacacatatgagtaatggcattgagaatccccttctgtacatgatcccttctatgatgatgtatcttgctgcctttcttctcattttccaagcttcatttcagttatttgggagttccccagaattgagataggctactattggcgtcatccagttcggagatgtgtcgatcatttcgatttcttctgtgtcggtgatgctaggctcctcaagaaactggatcggaactaggtttgccttgtcacttatattgctgctcgccaatcgggctaatgcatttgccgttgtattttcttctcttggaatttgtctaaggctgtagcttttgaattgtgcgagcagatcatgtattttgctcagatatgctatcattttttctccctgagcctcgtattcgccagatacatgatttaccactagctgtgagtcactgcagatctcgatgtgctcggccttcatctccttcgctagtttgagtccagcgattagggcttcgtattcggcctcgttgttggaggctttgaatccgaatttgaccgctgcatgcagttgtggccccccaggtgtgacaagggcaattcctgcgccggatagctgatctgtggccgacccatccacatgcagcttccaggtcggtt

SEQ ID NO: 401269 - DNA, 951 bp, Cannabis indica
ccgctaatagtattagcggcgaacagcccgctactaataccattccaggaacaaaaaaatttacccggccaaattagcggcggacattggggttcaccactaataccctcattattagcggcggattgtgtccgccgctaatgcctcaaattgttgtagtgctaccagcactatgatcgcactacgggatcggtactatgttctttccactatgatagtatcaataacacccaaaagtacaattggtcatgatatcactcttaactagtactatgctcgtactgccgaaccgacacagtggtacaaaatggtttttctgaacgtttttaaacagtcatttaaagtattctcgtcaatttctataaacgtcgcctatacgaccgtcgcaaaacgggcaaaataggcgacgattaaaaccattgctaatttggacttctcgacggtttaaaactgtcccctataccctgttatatgcgacggttttaaaccatcgggaatgtaaaaaaaaaagaaaaaaaaatacagatttttctgtaaaaatctgtattttcctctagttttttcctgcattagttttataattttacctaaattaaaataaaacagctaattaagtttattataataacaactaactttaaaacacattaaatttatacaataacaaaataaatatatataataaaaaagtatataaataaataaatattttataacgagctcagagagagagggagacggacgggaggtggcagtggttcgacttatgagatagagatgagagggacactgacgggaggtggtggtggtccgacatatgagacagagatgagagggacactgacaggaggtggtggtggtccgacgtatgcgatagagaggagagggagagcgacgggaggaggggtgggtggagatcgatggacgagagagatgagaagaaagggagat

SEQ ID NO: 401270 - DNA, 710 bp, Cannabis indica
aatcaatatccatatatataaaaaagataaaagatgccatatgagctatcttcaatcatttttctattccctattttcctatttatttaatatttttattaatttatcataacttttaattaattgtacctatgcttataagttataaaaaaaaattaaaaatcaaaagacatatatactattaaattgcactttatatgagttatcttcaattttctttcttttctctattttttgatttatttaatatttttattaatttatcataactattaattaattgtgtctatatttataagtcataaaaaaaaatcaaaatacatatatactattaaattatataataaattaagccttcgattgaaaaaattaataataatacgtaacttataatgtaattactaattctgtatatttatatatttgagattattcattgtcctaaaatttttcatatatttaacatactaacatgttgggaatattttatcaggatctagatttactaacaagtatattgaattaacatcctaaatatgaattttctaaaacaatgaaataaacacataagggtttaattaagaaaaccttacattgattgcagcagaatataatgactccttctgttcaagatctagcccttgattcctttctgtagcagagcattgaaattccgtattttaatattcccagtttgattatttaattaa

SEQ ID NO: 401271 - DNA, 856 bp, Cannabis indica
aaattaattataaataataatgtgatttttttccacaagttataaatatataaaattatagtatagaacattattctatgaatctagagtggcaaaaaataagtttgagacttgatttacttttttctttttattttatgttacttataatatttattttttcaaaatttaaaatatatataaatatagatatagatattgttaattttttatattgctctaaaacaataaatgtgggagatgaaacacctaaatatattattgtcaatagcctaattctctcatttatattataaatgttttattatataattgttattaagattactatgatttgaattttagtaataacacataataaaactaaattaatcctagcataaaaaatgaagagtctcaattatatactaaatttgtctcttcaattaataaattaattattattattattattttgaaggaaaattaataattattattagtttatattaaattaaaaaaattataaaaacccacaaaattaaaatattacagtactataaaaataaaatcgtctctttttatttgaagattatatagataaagatagatacataaatatagatataaattatataggaacacttttataaaatttatttttcaattagtaattgaaaaaatatactatatataattaataataattttaagttgaaatatttgttttaatgatgagaatcaaatggtcatgattatatatcatgtacaaaaactatataatttctcatgcataaaatacataattttataaatacatcatcattatttttaataattaatatatagaaatatattactaattattaataaaaaa

SEQ ID NO: 401272 - DNA, 1176 bp, Cannabis indica
cgtgctatattcatttaacgtttttgacgaataaaatagtaccgtgtacttaactactgctattacttagtttgtaagagataatgtatggataagtatttcgtcttcgtatttttgagttcttactgtaaaagttgactgtatattttaataaaatttttaacttcaaaaaaaaaaaataaaaaccactatgtatctccaataaagtattataaatgtagtgaatatatatattttagtccataattattcaaaaaaaaaaaatgtagtgtataatgggctgatgttaaaagttatgttaaatttgacacaaaatatattattaatcaaattctacaccataataaatattattttttttattttttcctttggtcactcattaatataattaatatttttttatatatttttattttatatttaatatagttttttttatacattttcaataacaaattaatgttatggctaattaggatttttgccccctaaattttgacatgtaccaaattatgctccctgaacttttctgaccgttaaaaattctccctaaactattgagattatcgaatttaaggacttttgtccaatttcattcaattttactaatttagtgattgtttatgtactaaatcatgttccccagactttaatatctaccaaatcacgtccctcgaactttgacatgtgccaaatcatactccttgaacttttatccatgttaggcttttcttactaaaattggataaaagtccttaaatctaacaatctcaatagtttaggggggatttttaacgaatagaaaagttcaggaagcataatttggtacatgtcaaagttcagggggtaaaaatcctaattagcctaattttttgttgattttcttacatcttttatcaaagtaaagtttattttgtttgggaatattttaccaggatctagatttactaacaagtatgttgattaacatcctaaatatgaattctctaaaacaatgaaaataaacacataaggatttaagaaaccttacattaattgcagcggaatataatgactccttccgtttaagatctctagcccttgattcctttctgtagcagcgttatcaagatctgaacttaaactctttctcttcttcgggtttggttaccaccgtcttactcactatgattg

SEQ ID NO: 401273 - DNA, 657 bp, Cannabis indica
atataaaatttttacttaagaaaaaataaaaatcccaaaaaattgttaaagacactttattttaataaattttattttatacaaaatttatatctttaattatactaaaattttttaacttttttctttcagttcatattcttaaaaaatatatctattaaataaaaataaattatattttaaatattatgacaaaaaataaaataaaaaattatttgaaagtttcttaaaaaaataaaatatttatatatatgatttaaaaaagtaaaaaataagtattgaaattaacataaataatgtgagaattttttttataaaaaatattaagaataatttttaaaaatcatttaagtttattttttgttttaataattaagtgtatttatcatttataaagtacaaataaaatttcttttgtcaaaaatacaataattattggtgcttaagattatttaaaaaaacattatattactattaatgaatttgaattatatatcccatcccaaataatttaatatataattatatattagaaatttttacatgaaaaattcattttacacaatttattacaaaattactcacacacgcttatacctacttttttacttacaaagtttgttttattacacatataccacttagtcatcattccat

SEQ ID NO: 401274 - DNA, 758 bp, Cannabis indica
tactcccactgaacctgtgatattgtaacacctttatttaaaaacttactaaaccataattaatattattatataaccttataggtcgggattctgagatttaatatatagttgaaaattacattttctatgtagtttcgtaatatatatttttttttacaaaaaacaggcaaccattgtaatatcatgataagtctaatggtaaataattagtgtttatatttatattatgagttaattagataataagtgggattatgatcctactaatttatttcaacataaaatttaaattttgctataagtgagtaaataagcgtaatttgtaaattacggagatttatatagcatgtgtgaatgtaatatgagctatatgttgaataaaaatatttttcaggttcggggaccctgaagactcaataagtggatatataagcgtaatttgttaatttgaagagatttatttaaaatatgtggatataatatgagttatttgtgaaataaaaatattttcaagttcgacgaccctggagacccgattagaagccaaaaatgtcataatggttttagttagaaatattgatgggactattaggataaattgattttaaaaataccaaagtattttgggctactcgaaatcgaccaaatacacttaaaatatagatttcttagcggctaagaaataataaaataattattaataataaagttttttattaatattattattaatattatattattaatattttatt

SEQ ID NO: 401275 - DNA, 1529 bp, Cannabis indica
ggggtaaccaaggagaggcaagatagtgttataacgctgcagtaaacttgtcggtcctaatagcacagggtcccggattggcgttggcagtagagcaagaggaattagaatctcgtatcagttttgaggcagcattagaactaatggaagacattgaagaagtaagggtatgtgatcgcgacccatctaaagtgatccgcctaggtaagaacctagagctggaagagtggagtaaaatcattaacaccataaaggcatcaacgaatgtgtttcaatggtgccatggggacatgaccgggataagtcaccatgtaatcactcacgtcctaaaagttaacccagatatgcccccagtgtaacaaaaaagatgtccgctaaacctagtgaaagttgacgccttagaaaaagaagtggacaaaatgttgtccaacatttttatccatgacgtgtaatacccggagtggctgcccaacccggttcttatacccaaaccaaaaacatggcgagtatgcatatacttcaccgatcttaacaaagcttgcctaaaggattatttctcgttgcccatactcgaccaaatggtagatgccaccttaggttttaagctattatctttcatggatgcatattccgagtataaccagatcaagatgcacgtcgccgatcaagagtgtaccagcttcaggaccgacaagggggtatattgttatctagtaatgcccttcagataaaaaaatgctagagcgacctatcagcgcatggtcaaccggatgttcaagggcctcttgggacgtaacatggaagtgtccgtggacgacatgctggtcaaatccaaaacaagcatgggccatgcagaggaccttacggaatgctttgaagtagtctggaggtacggaatgaaacttaatcccaagaaatgtactttggcgtcaaattaggaaaatttctgggattcatagtaagtcaatgtgggatagaggcaaacccaaaaaagatacaagccttgttgagtatgccctccccgaagagacacaaggatgtgcaaagcttaaccaagaaggttgccgcattgagtcgcttcatctcccgctcaaccgataagtgcatcccattcttcaacatcttgaggaaatgtcagaagtttgaatggactaagaatgcaaggaagcatttaagaagctgaaggagcatgtaatgccctgtccaacagggacgcaacgtgtgtacttttataaaattattatataaatactatataattataccaaaagtgtgggtaattaaatttttttttgtaattaaaatcaagcatgtaaaaacttctttatagcagaagataagtaatgagaagaactatggggaccccctgttttacaaaatattacaaactagtttattagtacttttacaacataaactttgtaatcccaaaatactatcaaaacgaaacatcatgttcaacttggccgatacactgcgactgatatgtacattgctgctacaaaccctcgaactcatggctgctcaac

SEQ ID NO: 401276 - DNA, 576 bp, Cannabis indica
aatattatttttaatacattattaaataatatttcaaatataaatatttaaatttttcaaacaaaaaatttgtaaatctttaaaaataaataaattcaaaatcttaaaagatcaaaatcttaaatgaaactagcaatacattatgagtttatgtatatgtatatattttagaatattgtttatgtatatgtatatattttagaatatttgattattaatagttagattatgagtttattgtatgaatttattgttcaagaaaaaaaaatagtatgagtttatatggtgtagattatgaagcaaatacattgtaatgtaaaaaaaatataaaagatcatataacttatgaaaaaataaaataaaacttttatttaataaaatatccaataatactcttattcattgctgaaaggaaaaaaaaacttgaagatcaaactgtatagaaattagtcagcatcttactgtaataattattgtaataattattataataattcatgtaataattcctgtaataattcatgtaatatttctggtaataattattataatatttattataatatttattataat

SEQ ID NO: 401277 - DNA, 1603 bp, Cannabis indica
gccttatgtaattatccctatttaaaaatgttatatatatggtaaaatttcttaatgggtattacccatgaatgatactaaataaatttaactataaatattaattttaaaaaagctaattatgatttttgctctctgaactttgacatgtaccaaatcatgccccctgaacttttaaggtcgttagatttaaggacttttgtttgatttcattcaattttactatttcagtgattgtttatatactaaatcatgctctccaaactttgatatataccgaatcatgtccctcgaactttgaaatgtactaaatcatgccccctaaactttcatccatgttagacgtttttccaaaaattggacaaaagtctttaaatctaacaatctcaatagttcaatggacatttttaacgatcttaaaagtttagggggaaaaattcctaattagccttttagaaatattaaactatcaaattttgatctaatattaaataataaaattacaaatttgaatttctatgcttaatttaactacttaattaaaaatatgttcataaaaaaataatttaaatcaaattcaactttttcttttcttttatttttgcttaaaaaactttttttaatttttttttcttttaccgatggaacaatctcagcccatatgatgtagaaatgagagattttttttaattagatagaaaggggagttatatttgcaccacataaaatgataaatacacctcataattaaaaaaatataaacttaaataatttttaaaaattactctaaatatttttttaaaaaaaatttctcacattattttatgttaattttaatacttattttgatttcattttcataattttttctaattcatgtatatatatatatttttatttttttattggagaatttcatataattttttattttaattttttttgtcataatatttaaaatataatttatttttatttgatagttatattttttaagaatatgaatgagaagaaaaaagttaaaaaaaacttaatacaattaaaaaaataaattttatatgaaataaaaattattaaaatgggtgtctatagaaatttgggatgtaaataaaatttcttgatagaaaattaagcataaaaactcaaaaaattttaaatttacccactcattggtaatacccattaaaagtgcacccatatatatttgagatttttacagttggtgccccattttgccattttttattacatttttgtctttatttgattatttaaatatttataaaaaatttgttattcaatattatattttcaaaagtttgataattacaaaaatacctatgcatgcctatgtcatgggttttctcacatattacacgccatccctaccatcttcttctctttcattattctttttttcttttattttctgttagttttttttcttgttctttttccataacccacgatcatcacatgtgaagccctaacccacaaatttcaacctcccatctatgtcacgatctcccctttcttccataacttcatttcttttttcctcttatagtttcttttctttttctataaatggccaccactaggt

SEQ ID NO: 401278 - DNA, 615 bp, Cannabis indica
ggtagtcgaaaaaacttattacattcctcaattacatcttaatactcattccaacgttcttgttgttcccatgttctttaatttctttaatactccggctttttcattgccttgtctcttttattaattgatcaactcctttaaaagagtttgcacttgacacagtcaatttgcttcatcctcctcttcaacttagttggcacaaatctgcatatatagaaatgagatgtgtactcttggtgttggtccaatccacataaataaatctttgcctgaattaatattattattggattgatcatcaaaacactacttatatggtatatatttaaataattaatctcttgatgaggtataaaaatattgcacttgatttgtatgtaatgttaatatgtgtgattaatttttctttcataaacatgtgtagctacacacttgattagggttagatggatattgtttgatattgctttatggtattaatatgatttatttttctctcagattctatgtattctatttcattcgtgcttaactacttttaattgtctgatcaccaattaactgtctataattttgatgcgagatctgagaagtgagtgtcaattatgctat

SEQ ID NO: 401279 - DNA, 942 bp, Cannabis indica
tttgatgcatcattttcatggtggaaataagtaaaaagaatagtaagacgttgctaatgtggcacactattttgatactaacatcaactccttcttcattaatcatcatatctcaaattccaataggataaactctaacttgattctaccttttacactacactgacaaaaaatttaaaagagacaagtcaatttcttactaattttttcaacgagaaatatgtatttttttttttcatatgaactaaaattaatttttataatttattagtaagtttttaataattacaataaatatcaccataaaagatttttttttaaattgatagtatgtatttttaaaaataaggagtatttatgatcttatgaaaactgagtgaattattaattttttttatttttaatattaattattaaaaacatattatttttcatataattactaactattttatcaaaaaaaaattaaaatttttatgtataattaaattgtataattatactacttagtacttacacacagttattctaaaaacctctcaaacagttagaaaaataaaataaaataggaagttgtataacccacacttttgacaaaataattaattttgagagcttattaattaatataatgactgattttaaaagaagaaacatttatatatagtatacgtaatatgataatttttttttcaactaattatatttattcttttctcaaaaaaaaaaaaaactaattatatttattgaaactatatctcattatatttacatgttcttttttcataaaaaaaaacaatccttatttatagtaatttttactgtcttcaaccagaaatatttccaataatatcatacaattacagtttacagaatattaattaactaattttctttcatattttttttttaatttctaaaaaaaaaaactaaattgcatag

SEQ ID NO: 401280 - DNA, 607 bp, Cannabis indica
cccccaagaaccttcaccttgtcttcaaggtgaaaacttagaaatcgtactttaatggtagagatatattcctccgttgctttaaaatcttagagaaagtgccacttgatcaacatttcaagtcctgcatatgaacttggtgatgggctaagtttcggtttgtatttccctctatcaaaaatccattaaatgtggaagactcctagtgtatttttcaacccattcatacaagtttcttcgtcaatgaagatgattaaactgtgaaatcttattagatgctgtagcatgatcagtggcatcttcttctcttcagacggcagctgtccatcgtgtaggtgatgttgtggctgagaataaatgtgtctttcttgcaacaaataagtattttttcttaaaatattccaccttaaaacagactcctttttcggaagtacctttgaggtctcttctctattattctattattgtccatccttgcaaattgctccaaccagctgagttttcatcagcaacagcaccatctgctcgggtagaacaatattctttttgtcacagacggtattatccacgccatcaaaatttttctcgtcaaatgttggcattttta

SEQ ID NO: 401281 - DNA, 558 bp, Cannabis indica
aaagttgactagaatatgtttacgacagtcatccttaaaatcattggatttgaatcatatcgtgtagtgtaaatacgatttatgatttgaaaatcgtatagttgtgtttttccccgcttttacagggtcaagaaaatcgtgtattaaatacatctttaattgttgtttctagagatgtctcaacagaaacttggttacaacgatcccaatagtgagctggggccattctttctttcgaggtcgacaatgtaggtctggtgtcgatcgcggttcttacttgcaaagacttcttctgactcgctagggttgtaagctatgttaccgttagttggataaagctacaggaagtcttcccatagcgagacggtcacctcgcttacttgctcttgagccgatctaacttttatacttagtttgttcattgcatgctaaggactttcatggttgatacgtgtcgctttctctggtgccttgctattcatatttagcgatatatggtttcttactaatacactaagtgccagtttgtacattgattcctcgcctaagaccttatag

SEQ ID NO: 401282 - DNA, 728 bp, Cannabis indica
tctatcccagtatagtgaacgttttagaaattttatttgaaatttgataagaagcaactctactcccacattgtcataggtgagtctatcaagaatactcttgtagctttgtactccaatccacttgaagtatagatctcattaagagcttctatttactcagccttaaatcactttaggaattcatgcttctcttttcttataattatagcatgatcttagttttatcacttcataacttattattatccattgaacctattttttaggatctctagtctataggtcaggttgttattctgagtgatttatcaatctaagggcaatagtcctattccttttgatgttttaaggactttctctctagctaaacatttcgtcaaaggataggttaatatcatcatacatgatccactctaacggctcctgttgagagactctctaacaatactgtgcttatgacataatttattgtcttttgcaatagctgtggtactatcgcaataaatcaacatatctgaaataggtctttcccataaaagaatctcagctagcagacttctcagccacccagctttttcactagcagtagctagtgcaattatttcaggctccattatagattgagccaaaatagtctgtctcttaaatttccatgaagcagctccaccaattatggtaaaaatatagccattggttgccttggagtcatcaaataaagtattcca

SEQ ID NO: 401283 - DNA, 1284 bp, Cannabis indica
gaagcggtggcgtgctgtttgcctatttctgctgctttggattttgatgccaagtttgtcatcgtggagagcgactcgagggtagtcatcaatgctctcaatgggaaggagtctcattgggttattggaaactatgtctctttttgtaatagtcactcttctttattttcgagttgtattttctctcatattagtaggacttgtaattttgttgcccataatgtggggcgtttacccacaagttatttggtgatatcccgctatcgaccatcccgttaaacttattatgtaatgaccatgaggtctaacttattctattaatgaaatacgtttttcttcaaaaaaaaaaaaaatataaactgatacataagtttcagttcgtacgatattatatgtatatatatatattaagtttaacatatataatatatataacactaacgaacgaacgaaaccctcgttctctctccttcgtcaaaacttttttctcctatatccattttattcgattttcaacccaaaacctagcgatctaagttctggtagtagcgcaataataaatccttgaaaagagaaagcttaaggtatggtttaattacattttaagctaaaaacgattggttttatatagggattttgtgaattagaatagttatggagattcagactttgcataattgttctttggtacctatgggactaatatcgatgtttacttgttgaatttgagatgattttgagttagaaattgagttttgaactttttaaagcttagtccgaacgttaatggcatttttttatttaagagcgcaaggatggtaatatttatggtatatatgcgccctgtgaagtttggagtgatttggcaaagttttggtagtgtttcagtgagtgcgaaaattgtaattttcgagctttatagtttttagaaattcctaatagatcagaaatcgtatttttgtcataacttttgacttggatgtccgtttcggacattctgtataccgtttcgaagcttgcaacgagctctacaatatggtgtatgttttaaagaaaaaatgtaagttttattttagtgtatttataccgcgggatttggtagaaaaccctagattgtcttatgtgaatattaagtagtgttttgggataaacacttaatggtttatcgttgttgtgatataaggccgagatcatcgaggatagttctccacttgggttggccgaaatgtgtgaacctggattaaaggtaagaaaagtatattgtactgcatagtacgttgtatg

SEQ ID NO: 401284 - DNA, 1120 bp, Cannabis indica
agtgtaactagacctaggaaatactaccactttttttggaacttttgagtttctagaaaacttttcaaagcttagacatttctagggatagagaagatatttattttttgtgtaattatattattaattcaatgagaactagcaaaacaaatgtaacattctcctacattgtgggttgaatgaaagagcgaaccctaagcctatatgagcgtgttaactaacctaggaatcacatcgcttttttggactttgaatccaatttcgaatctttgacctctaacaaccaactcgtcatctcatcaccattcacaagacaaaacttggttggcactctctttctcatagtatacatatttccctataaaaagttggtccttgttcaccaaaaagatctgagtttgtagcgaatttagcttttaggtataacttttctataaattctttaataaattattttttaagggtttaccaaatactttttttatcacaaatttttttaaaaagtagtttttaatttttttcaaaagctataccaaacaggtccaaaaaaatctcttcaaaaagtcataagaaatcacgtataatttaaattttatgttttttttttctaatattgaaaatcaagtataaaattgaaattcaattaaaaaagtgaatttaattgtatttggattttgaagcttaattaaattagatcggatgatgaattttcaaatctaaaatctatttgaatgatatcagattagaagaaaaaaattaaactagaccctgactctaaaaaaaaaaatatatatataaaactcaacaataataacaaaaaaaataaaaaaaataacctaaaaaaaataaaataaagaaaaaaaaaaaaaaaaaaaaaacagaaattacaatatacatagcaattattcaaaaaaattaaacaatatagcaactcaaaagttaatcatataccaaaaaatatgaaaactatttaaaaaaaaatctaacttgcaacccacttaatcctatatatacactaatataaagtagcttttcaacaatagaattcctagacaatattattttcaaaataaaattaatggttcgaaacgtttacttgacattttgaccactaccaaaa

SEQ ID NO: 401285 - DNA, 552 bp, Cannabis indica
tccactgcagcgtttcacaatctgttttcgaagattgatcatttcggggtcagttacataatttcctccttctcccagacccacagtcacttggcggaatagtaacaaagaagccttctcctctagctcccccaactgaaaaattcggtctgtttcgcctgtaatccgtgcaacacttctattacgagtagttacaataactctgctcccatttccaccaagaaataatatgcttcttaatgttagacttttatttgggcttacattaaattttattggttttattaaaacttgggttgattggatagttctttgctgtattagcccatgttgttggtgatcaattgttaatgggcttagcatctgtgagtaaagtctaggtgaagcagaagtgtgggcttttctagttgactgaagcctttgatgagcaggcccagcccaactagggttttgtagctaagtcccctccctaactctataaatacatattgtctcatcacaattgtataccttttgataatcagagaaaataaactgcttctgatttagaga

SEQ ID NO: 401286 - DNA, 537 bp, Cannabis indica
aatcaatgaacatgaataacactgctaagaatgaacctaagaatgtcaggattaagatcttttgatctaagatctgtgggaatttatttctcaaggatctaagatctactcacaagtatgttgtttaacatcctaaatatgaactttctaaaacgataataaacacatataaagttaaggaaatcttacattggttgcagcagaataatatgtgtccttccactcagatctctaacccttgtatcctttttgttgcagagtattatcaagatctgagtctgaatgtcctctttgaattggatccttcacgatcttccaaactatgattgaggtaccacttgttgtgtgtcggcactattctataactagggtgtttcgaaattatgaagaagaaaagaaagagagagagagggtcggctatagagagaaagtggaaggctcagtttttctgaaaggcaatctcttgaattactgaaaaaactcttattttagtctgagccatcactttctatttataggcaactactaggtttaggt

SEQ ID NO: 401287 - DNA, 1057 bp, Cannabis indica
ttatgtacgactgctaaacttcacgaacataaactgatccccgagaacgcgagtctttggagagagccgagtataaggaaccttctgaaaagcagcaagagcgaattgataaacgcctttccaagcaaactcctcgaccatcatcaggtattttatcgcatacgcaaacttagggtgttagaattttatccctatttatattaacccttatttttccttttgtaatcgcagaaatgactttcctaaagtctgctcctatgctcaaccgcaaactgaaacccgggacagcagcgacctctcctattacatcccagaagaggaaaagcgatgtggttgttactcctgtcgcagattcctccaagaggcctgctaagggtgttcaagagaaagggaagaaggttgtgatcgatccagcggctcgagctcgtcatgtgctgtaccttcaggagaggtttgtcagcgatgagttcttgtcgaagattgacaaggcatcttcagaggagctgcttcctcgcgctgcggagttagcttcgcagttcatggccacgtttgcgaaggcttttgctgcagggcccaaagaggttgaactcgcgaagaaacatattgctcagcttcaagaagacattaagaagctgaagcaagatgcgtcttctaaggccaaagaactagaggaacttcgtaaggccaaggagcaggtcgagcttgaagccaaggcgaagatcgaagagatgtctcgcgacttggaaactgagaaggagaacggcaaaaaacagtacgaccaggcggtctcggactacatctatactactctttccaaagttccagacttcgacttctcgatccttggagcagaagccgcagaaatggccgaggcttttcgcgctatgtcacccacaccaactcaaggtggtggagggaaccttctcgaggagaccgaagtcgcggaggtggaggaggttgagaacgaggtggccagtaaagtcgcggatgaatctgttcctgctgctcccaacgcttgattttttccttctatgtttgctcatgttgaactatattt

SEQ ID NO: 401288 - DNA, 827 bp, Cannabis indica
tcgttcccagcctatcgaacacataagagcttggttgccttagcgattggtttgcttggtttacaggtggaataactccattattctgattggatccgtcaggtatggctcctcctgatgaattcctggacaaggtctgcccgcctacctcttggcacatgagtggaactcgtgaccgggaattggacggctgacaattggttgtctgtgaggcattcatcgtcgggtcatcctccgtttcacccagcagaatgacgttcggcgtttgctggcctacagtctggtaggctcttcatatcagcacggtagcttgtaaactacgatcttcgatctctgcattgtgagcactcaatgcctccatctctttgtctctccattcagcgaacatacgcctctgttcatcaaacgcgagatttactgcagcacgcagttcgtcctgatcatgatgcacagtgttgctatgactttgcatgagtccgagcgctgcatggagattttgcaattcggttgcgtctctgatggttttttgggtgttgattcctggcagagttgtagggattgagctaatgactcataatgcgaaagctgaattcgctaagtgttgatcgccctgcatggctcgttgaatatctcattctggatgtgctagcgaggcatcttgctcggtctatcgttccgagcagatgctccaaagtggactccacatgtcaccattctcgtgatgccatgtcagagtgccaaatttgggataacaatacgcattgtaacgagagaggaaactctcctcctcaagcctcctagccctataaaatagtgatgcatattca

SEQ ID NO: 401289 - DNA, 640 bp, Cannabis indica
tgtactccatgttatgtccccgggcaaatgaagaggagtttgtgaggactatcaccggcggtgaagggccgatatttgttgacttggaagaactagtgttgggtgacgatgggcaaccaactcaagatgctctgcgcagccaagcccaaaaacttgcctcaacattagaagagcatgtagatgaagcccgaatatttagagagactacaccacctgtaccatctcctagatcagatgatcctcctgttggcccgttagtatctattctcagcacttcacagcctcaggaaccaatctcttctgccatactgacaagattggagcgtgttgagagggaacaacttgctttgaagcaaggccagatggatattctgagagggcagacagagataatgggttatttgaagaccctattggcactcgtgggagatccgaaaaggcccagtgcggttaggcttggagcgtacgatcctcgggacatcatggcttctgtagttagtcgctgggcgacaagtattttgtaatgaacagtaaactttttgtaaagtattttgtaaatgggatcccaaagtattttgtatgaaatgttataagtatttaattaaataagcaaaaattttaattaatcacgatttccata

SEQ ID NO: 401290 - DNA, 635 bp, Cannabis indica
aacatcctaaatgtgctacctcggtttgttcgagtcaaaaagaacatatatatataaaaaagaaaaaaaaagaaaaagcaaacagtcagactttccctcactcactcgtcccctttctctctctctctatctatctctcctttctctctcttacaaacacaagaccaaaaaacccataaacctccagaaccaccacactccggcgacccacctccggccactgcccgacctcacgcgccggaccactcgaacctcctagtgctggcgacctcacccccaagcagtgccgcttctctcgtcgccgttagcttaagatcgcaagtcaaagtttggtgtttcaaactttgaacgtatttttcggtcacctccggcgtccgtttgacgagaggttttcgtcactaaaataagctcgtcgaggagaacaacctacactaaacaatttttcccggttcgctactttttccagttacatttttgtagctccgcccctttccggcaactttccggtgacatcgtgtaccgttttgataaacagttggcatgggtgtgatctactcgtcgaggtggtcgttttgatatacactactcctagtttcggcaactttccccccctagacgcctacctactcgtgctc

SEQ ID NO: 401291 - DNA, 558 bp, Cannabis indica
atatttcaagtagctgatagtatcattggttgtggtacttaaagggatatgagcatatttagtgtggtctaagccaaacttttcaagcatctttttgatatatttggactgaaaaataaaaataccctggtcagtttgtttgacttgcaatcaaagaaaaaaactaagtgtaacaccctactagtttaggcgtgttatcgtgattttaacataattgtgcagctcgttgctaatcaccgagtttatgaaaaattgtgaataattaaagctttatttaaatacttttaaataccaaaataaacaacatatataaagctgggattccatgtacaaaacatttacaactatttcaggtatttgatacaaaagttgttgcttagcgactatacaaaatatgaccagttgtcccaaagatcgtacgctttaggcccaacccccctcccgacatgtacaatcttcattcgctcgctcttgcgtctgctcaaccttagccttgcccttatctatgttgggttttatgccctaaataaaactccatttcaatgtaatctattttat

SEQ ID NO: 401292 - DNA, 786 bp, Cannabis indica
tgttcttaaatttgatttatacagtatatattaaatacacgcaataaagattttatttaattaattatttaaatttgaatatttttattaaatcatatttaattatttgaataaagaatttaaccaaattctattatatacatttatttcttataactgattgaaggaatctctcaaccacttgagagaatctatcaactaccttgagagaatatctcaactaatagaaatatctataactacttttcaaattcaaatttaaataaatatttatcttttgaatatctcaaccaccgtgtcaggatataatgatgctgacaccacctatgtcttaacaagacattggtagtgtcttttgttcggaaaacttttcttttctcaatttatttaattaataattatgaaaaaaataaaatatttattataaaataaataattactagtttgacaaatcaaaatagattttttcaaatgttaacccgaaaactttccatggtgacgtggatatcaatatttgacacatgacaaggaagatgacgtcacagagttgagtagacccgagttgggcccatcgctcaagttgacaatcaacctggtgcgttggtttcgatcattcgaatgccaaatctaatctgtgcattctctttgaagtggtcaaaaatgggattggagatcttgtcctcaagttcaagaaccttggaagtatcaaaatgacaccctgagagcccaaaaatgaagtacccaacacccaggttgacaaatggcctggtgcgctaggttctgctt

SEQ ID NO: 401293 - DNA, 579 bp, Cannabis indica
cgcgacggtttcatatcgtgctttgctcgtgctggcccgtattcttaaacagtccaatccattttcatatcttgggtttattattaatttttctaacacagtatttttgtgccatgctcggattcatattgtgctttgctcgtgctggcccgtatttcttaaacagtccaatccattttcatattcgagcttaaattcgtactttacttttatatatatatatatttacaattacaaaattatatgtatatttcaaagttttagttgtatttatataacttttgaacaatattttacaaataatcatataaaaaaaattattaacatcattagaatttgaatatttacttataaatactgaaatttttatatcacaccctataaataaattaatatataatcttattttttttatatctaaatagttttaattatagaactataatactcaatattatatttaagttttattattattttgacttatttataattgatcaattaatatcttattattattactaataaattttagagcattttacataaatgtatacattttcttaaataattacaaaa

SEQ ID NO: 401294 - DNA, 578 bp, Cannabis indica
acctttgtggttgcatttgaactagtatataataatatgccatttattgttttttttttttttacagcatttcggatcatatctccaggtaggatgagggtgtacgaacatgttcatcaatttttggtatgtccaatttttttaacattaatgtccaattattaatgttatcaaattaattcaagggtttttaattaataataataataatttaaggttagaaacgagataaaatagcatttttaaagaataattagcatttttaattttcaaatttttgacagtacctaattttgcctcttaaaatatataacttgttaaaaattctctctaaaatataataattacgtaattatacctcttttattaggttctgtttcttttaccgttaaaagttaatatttttatctattgaactttgaccagaaaaaaaatacaaaattttgtcctattttattaaaaaaattaattttaaaaaatttaatgttctattaattctgaaaaaattaataaattattaaagaaaaccttataaaaatattaagtttacttaaaaaaacttaaattatttctaaaaa

SEQ ID NO: 401295 - DNA, 648 bp, Cannabis indica
aaaaaaaatcctttaaaaaaagaagatcaaattgtatttaatcaatataactattattatatctaacaaaaaatatatataaggtgaaaaaattaacatatacaattaataaaataaaaaatggtaataaaataattaatattaaaaatttaatataatttgaacaattgtatgaaatataatatcataggataatacttagggagagtcacaaaaaacgtgtttacatacagacattttttttattatgtgtcactctcatatttaataccaatatttaattaattcctttcatattatttttatttcgttttttttaataatttcgtgatatcaataaggaaagttattaattctgttgtcgagtgaatttcgcaacaccaaattatattattttgttaatatcaaagagaattttatgtgtaaagacaagtgcgagtattcaacctaaaatggcgagtactcgactgggaatgggaaaacaatcaacgaaagctggaaaataacaataaacagagaattataatggttcagtcagattatgatctgcttagtccactgtagcaagggattcgtaggtgccatttcatggtggatcacctctttatatacaaagcaggtgtccaatcggttacacaaggatcacat

SEQ ID NO: 401296 - DNA, 1052 bp, Cannabis indica
cttcttgtatattagttgggacatcaaggtatggatttgttttccattttgctgtagccaagtacatctttggtttaaatatccccgctttccctctggttgtcataggatgagtgggaatgattgaagcttttggaggttgtattacatcttcatggtcatcagtaggcatgttctcgggtacaagatcaacagctgcttcctgttcttcttcatgtgctatttcaaattcaccagatgttagtgaagagggtgagttatgtacctgactgatgttatgagtagattgaggtgcagacggtggttcttcagaatcatcagctggtggtgtaggtgtttctggttctgatggtacagagggagtttgacttgaactaagaggtatgtttagcattgtagaccatgagggaactgatacatggacagtttgttcattttgatgagtgtttaggaaacctgtcaagaatggaaactcatcttcattgaagatgacatttcttgaaatgtatagtcttcccgtgctactaaggcacttgtatcctttatgcctatcactataaccaagattaacacacttggttgagtgatattgaaacttgtgggactggtatggtctgaggcaaggatagcaagtgcagccaaacgtttagaatttgtagtcgggtttcttaccaaacaagacctctaaaggtgattttcctttgagcgacaggggtaggcagtctattgatcaaataaaccgaggtttggaaggcatcccaccaatatttttgtgggataccggcctgagcaagaagagttagacccatttccacaatgtgtctatgcttcctctccgctcttccattttgagctgaggtatggggacaagattgttggaaatcaatacctctttcagcaacatgattgttgaaagcttggtattcaccaccaccatcagacttaagggactttatttttctatcgagtaagttttcagcaagagtttggaaatgagtgaaggctgagagagcatcggatttagcttttaaaggataaatccaagtgtacct

SEQ ID NO: 401297 - DNA, 1321 bp, Cannabis indica
gatgcctcataaatcatcccttacactcgtcacccacgagctttatatgtcacgatcgttgcccgatacagcaaccgataagtaagaaacctatctactgtttcaagcgagtaattacgcattcacaatgaatggtaatgaccgtatctttatctcgatcattattgagccatacacgatagtaatcgttacctcgatcataatcgagtcacaaacaataataatctttcctcatttaacatgcttagcagtgcaattagctttcttacctcagtctactaatcaggtgtgcgcgccaaactgagtagaataaacttcgacgatcccgagtcctatgtcacgacaacaaaatctgataaaataacttaatcaaactccaaaacaaaccctaattccatatccgaacaaattctaactccccactggttcccaataacttaaacatcactaaaataccctaatctaagctctgaaaaacaccccgatccaaactaatttcaaagccaaaaactagggtttcccttgctggtgaaactggttgatcggtttcactatacctgttaaaccggttaactggtttccctgatacgaaaaagggaaactctgatttttgcaccaaagcccaaccaaattgcctccaaacctattcaaactctcctgaacagttttgtaccataaaaacaatggattcaaacaaacaattctcaacaattcatcaaaatattcaaaacaccatgcttatccaaaaattaggttcttaaactaaaatttctaattctaaaccaaacagccactaaatacactcaatctaaactcaagcaaacctgaaatcaaacctaaaaacataatctaaactcagtttagcaccccagacctgaaatcctaaaacctagccaaaactcaattcaaacttcaaaaatcaagtagagaaagataaagaacttaactcacaacttaggaaacttctaaccttgatcaatcctgctaaaaactggttgaaattgaaagaaaatttctaatttcttgcttgggtgctagggctgtcgaagggaagagagagagagagagacttggataatatttggtttttgcttcttttctttctttataagctctaccccttttattttattaaacttaattttaaataaacttatctaactaatataaatcccaatttcagccaaaaatccatataggacaaaattaatatccatcaccaaaatgactaatttacccctcttataaccctaagactaaaatcaactctaggagtattttggtcatttctaattttaccgatttaacctacttctcaaca

SEQ ID NO: 401298 - DNA, 554 bp, Cannabis indica
ccttatatcttctgatactacttgtttctcttgatttctctctttctctctctatgaaactctctaacactttctttctctctcactttcttacgatgaagaactctctctaaagtcttggggctctgaagctttttctctacgggaaatgatccaaatatgaggtataaatagatctttgtagcttctagttatttcggttagttagtttcaagtcttaattaagactcatagttgtatagtgtcagctaggataagtgtttagttgagtctgctaagagtttttgatgatttgttgtggtagagtcaacaatatgattcttgtatttgcttatgagggaatttaaactaacaattccaccttaaattttctcatatgaaaaataatgcataatcgatcttcctgagagtctttactcttcattggtaatggactactctccattacctattcttaacaggttcaagcaatgcttgaactttgttatgttggattaaaatcctattgtgggcacatatgtataatgtatatgctattataaagtgtgatacaa

SEQ ID NO: 401299 - DNA, 1015 bp, Cannabis indica
attcatgtcccaagtcagggtctgggtttgggtcttcgtccaagacttagactggggtctagtctgggtttcgatcccaattcggggtcccgagtcatgttcaatgttctggcctgaatttaggtctttgttcgggtctcgagtcctggttcgggtttggatttagattttggagcccatcgcagagtggctctttgaccgagtttgggtcttggtccggttacagttttggctctatgttcatgtcttggtcatggtttattcttcggtcctaatctacttctagtttcgattccagtttcaagtcacgggctacgggttttggtcgagtttggatccgactctttgttcgggtcatgatttgagtctgtggcaaggttcagttccgggtttcggtcttaggtagggttcgaggctgggtctaggtccaggtcctggtcccggtccagttcaaagatcttggtccaattctaattcatgtttcggtttttgttcccgagtgtgggtctgggtcttgttatgtgtccgggtcttagtttgagttcgagtttgggttcggattctggtctatgtccttgatctagacactgattagtggtcgggtccaagcatcgatccgggatcctaggtcccgacgtgggtcctatgtccaggtttgggtctagggttgggtcctcgatcccgagcaaagttcttagacaaatttttggtcctagttcaggggcccaattcccaggtctgtgtcccccatttatgttcaggtcctaggtcccgttccgggtccaagttcgtgttcgggttcagtccgagtttaggtcgtggttttggttagggtcccagttttcatcccaatcctagtcttggtttgggcttcgggtcccaggtctgagtctgtttattgggtcttgggttcggccccggtgtccaggttcaggtcggagtgccgtgttccgatttgggtctgggtttgggtttaggtctaattcctggtctgagtctgggtctgagtctgggt

SEQ ID NO: 401300 - DNA, 525 bp, Cannabis indica
ttgagtgacttgaggattggcctcccaaggctcctctttaaacatacccacgagtatgtgggtcaatgagttgcaagctctaaaaaactcgttatcttccctttctacttaactcattctttcctgctattcacttgccccgtttatctcagtctagttaggaggatttaacttgtaatcctggcatccttctaaatcattatgctgatagtacctcgtcatgtcatcacatcttttaaactgtagcttattgctacgatgggacattccttcattcctagcattcattcattcttcgcatttattatttccttcattctattagatttatatgaaacttgtcatgtctatatttagtgctcaaaatatgagcataataattgtccttatattatattaaaccatataaagtagatgcaatcaaaattaatcacttgaagctttaatcattgttaattttaccttaattatttgttttctttgttttctttttagtagaaataaatatattttcttatttttatt

SEQ ID NO: 401301 - DNA, 1595 bp, Cannabis indica
taatattatctattttagacatgggaaaagatttggacaaaaatttattaactaattcatccctcctttggtgaagtagtctacagcgatgacaacaaattgtacccctccttttccctttgcgagttaaccaattaggtctatcccccacactgcgaagggccaaggagactacatcatcgtaagctcattgggtggagctcttggtatcttcaaaaatctctagcacatgtcacattttctaacatagtccatcaagtcttcaatcatcattggccgaaagtacccctatcagagtatctttttggacaagctttgcccccggcatgattgtcacagaagccttcatgcacttctatcagaagtcgatcatcttcgactttggtaacgcaccttaagagaggcatagagaaactttatctgtacattatcccatctaggatcaagtacctagcagcttttcttcttagtttgctagcctcgtttttgttttctagcaaggctctttttggaggtaagttgcgataggtatcatccatgttggagtgtcatccagcatgtcgacttcctctgggacaacaatgttgggctcttcaaggaactgtatgggcaccaagtttgctttgtcagctatcgtactgctcattaggcgagcaagtgcatctgttgtggcattctattctctagggatctgcttgatcatgtagcctttgagctgacttagcaagtctctaattttgctcaagtagggcacctttctatcacctcgagctgtgtattcacctaggacttgattcacaactaattgagaatcgctgaatatatctaggtggtcatctcgtacttcatgtgccaacttgaggccaactatcagggcttcgtatttgacctcattgtttgaggctttgaagccaaatttgattgctccgtgcacttgttgccccctagctgttgtaagggaaatgcctacaccagacaattagttagtgcaactttcgtcaacatggagtttccatgttagatctttggaattttattgctgctcttgctctcgcttcttctctagctctttttgttctgctgagtcttaaagggtctcaagagttgagttggtacactcagccacgaagtctgcaagggcttgaccttttatggctgttcttggttggtatgtgatctcaaattggccaagctcaatggcccatttgagtagtcaacctgatgcttcaggtttctggaaatgtgtcgcagtggttaatcagtgtacacctttatggggtatgcctggaagtagggcctcagttttctagaatctaagatcaagatgtaggtcaccttctccatgagtgggtatcgactttctgtgtcgactaaccttttgctgatgtagtatagaaggtgttgtacactaccttcttctcttgtgagtacagcactcacagcatgctctgtgactgctaggtacacgcctagctcttcattgtctaggggtttagacaataccggtggttgggccaatttcttcttcaactcttggaatgcattttcacattcctccttccacacaaattttttgttgcctctgagaatgttga

SEQ ID NO: 401302 - DNA, 761 bp, Cannabis indica
atactccacgagtccttattataagggatatttattgagtacaaagtacaatctcagaatttgaataataataattctctctaaaaaatttcgtccattttcttttgaaatctgcccctatttataagaatatagattggcagctatcttttttgggactgattcaaatacaactgttcatgaaacgtgaataattcccacgtttcatttaatcacatgttggataatatctaataactacccaacctctctttagttttatcctttaaacggttattaccgacgtggaaggttacatctcgcttaaaatgagttttcctccttgtaaatcttaagaaaaaaatgttaagtgttgagaagtagttcatctcgtcatattcttttattggcattagcaatgcgaggtgatcttcttgctatgtaatacgaggtatttatgttgttacattcattctacttgagtgggtgaatatcccccttcttgtgtgtatatcccgaggtatgcatatgtctcattaatctcagctcaatagttattatccttatctcgcttttgactatatagtcaatgagttttgaatattatttatcaaacatcgatgtaataataacgagttatttaatatcgattattgatataatattattatatccttagagttgattcatattccttctgttggacaagtgtcagcttttggagtagagccgaattttaggtataacaattgccccttaaaacgtacttttaaattaaaaaa

SEQ ID NO: 401303 - DNA, 1588 bp, Cannabis indica
gattccatgatttgtgcagaaatgtgtataattggctgtcaaagtgcgtgccattgtctgagtattttgtatgagagtctgaactgacatattatatttttcaccacgaagtccaatgctttcttaaatgtaattgttgccaatggctcggcttctatgcactctgtaaaataatccactacaaccactgcatattgtattccccctttatctttaggcaattgttcgaattaggttaattccccaaatagcaaaaggccaaggactttgcaactgagttagctcattaggccgtgcacgggctatctttgaaaatatttggcatttatcacatttctttacataggcctttgaatcttccatcatggtcgaccaaaaatatccttgccttagtattttctttgataaactttgcccagctgcgtggttgccacagaatccatcatgtacttcggacagaggtcgtacaacttattcttgtgtaacacatctaagtagtggcatggagaatcctcttctatacatgactcattctacattgatataccggaaaaccttacttctcatcttcgagcttcatttctatcatatggaagttctccaatgttgaggtaggctactattggtgtcatctagttcggcgctgtgtcaatcatttcaatttcttccgcacaggtgatgctgggttcttcaaggaattgaattgggactaaattagccttatcagctatattgttgctcgcaagtcaggctaaggcatcagtagttgtgttttcttctcttggaatttgcttgagagcgtaactcttgaattgtgcgagcagatcttgtatttttcttaaataggctatcattttctcccccgagcctcgtactctcttgacacatgattcactaccaattgtgagtcactatagatctcgatgtgttcagcgtgcagctcctgagcgagtttcaagccaataatgagggcttcgtactctgcttcattgttggaatccttgaacccaaatttgactaccccatgcagatgttgcccccaggtgtgacaagggcaatccctgcaccaaacaattgatctgtagctgacccgaccacgtgtaatttccaagtaggtatgtcttcattgttgttcagctgggattcttgtactggctctgggttacctttgaactgctttcttctttgccagtgtactcaactaaaaagtttggtaaggcctgtcctttggctgctgtttggggttgaaagattatttcgtactgacctaactctactgcccatttaagtaaccatccagaagcgtcgggcttttgtaataattggagtaatagttggtcaatgtacacccgaacaggatgagcctggaagtagggccttaacttccttgttgctaagattaggcagtaagtaagcttttctatcaaggggtaccgtccttcaattccaatgagtctttggctgatataaatagtactggatgctagacattattttcttctctgatcaacacgacactcacagcatattctgtaacagttaagtatattcctaattcttctccgtctagaggttttgagagtatggg

SEQ ID NO: 401304 - DNA, 555 bp, Cannabis indica
cgatccaaatgatcaaatagctagttataaataaaggatgttcactgctaccatccctcacgagttgcacgaggcatgcatgtgtaagggatttgggtcgagcttggctagcccagccttccaatggtatacgaatttacccaataattccatttcctcttttgctcaattaacagatattttcgtagaacaatttacgagcagcaagaaattggagaaactctcatatgacctatgtcgcatcaaacaagggagaggtgaatcgttacgagactacgtggcaagattcaatgctaaaaaagtttccatcactgcatgtgttaaaatttattttaccaggatctagaggaaaagagagagagatagggtcggctatagagagagaagtggaaggctcaatttttctgaaaaaagtaattttctgacagaaggcttgaaaaaacttgttttttgactgagccatcactttctatttataggcaactactaggtttaggttagtaattatttggcattaaaataatgaaaatattaattggaaaaacctgcttaagt

SEQ ID NO: 401305 - DNA, 551 bp, Cannabis indica
aagaggtgcggcaagccagattgctcaaaggcttcaggctctcagagtcgctcaaatataaaggtaccactaacccaatcagttatcttgatacgattattgaagtagctaggtacgtcagttagtgaagtgtcgaatacttgctacgactttggaagacaattctcatgactgtttagccagttacctgaggcaacgatatcaacttgggaaacatttgtggatttatttttaatgaatttctaagccacgatgacatacaaaccaccatacaggactttggccaatatcaagtaagatgtaggtgtgttgacctcgcttttagccaacgacaatgagtcaaataataagcgataagaaatatgattaccgtatagtataagcgaataaataaagaacacaagatttttaaagaggttcagctccgttcagttcggtaataccctactccccttgatttgtattgactcaagaacaaagaacacaacgtttcctctcttgaagctctcacaatgaaatctctgagtgtaatatccagattaaaatagtat

SEQ ID NO: 401306 - DNA, 792 bp, Cannabis indica
aacgacaacctcacagactaaagtgagtataccttctttcttctattcttcattttttcagccaagaacaagcttctttaaattactaataagtccacacttaaaacatgatccttcattatctgatcgtggacaattcctcttgtaatctctcattacgccacatcggaaacatgcttttcttttacactcatcctgatgaagtttcttacagctaggacattttgagaaaatataagggccttcaaaaactccccactgatctccttgaacttgtttttctcgagagttcttgtatggtgactctatctgattatcaacaacaaatcgtactgctagaaacaccatggcaggaacaatgggcaataagggaagagatgcaacataagatccatgctgccataacctctgaatttcctcaccttgactttgaattttagcttgtattttctacaaaattttgctcttgatcttgcaaattatgtggcggaataacataacttcctcctggagccctccaatagcatctacttcagttgcggaggtgcggggaattctaatctctccaactgctactaggctcgaccttcttgacatcctatatattaggccaaatgtccatactataggacagacatgccaattcataagtcagcttggtcaagcagcggtctaagttgtaatcttactactgcatacatacaattttaggcaatacactattcatctaacatattactaacatgcttcctatcaaatttaattttctaattaaataaattactaaataag

SEQ ID NO: 401307 - DNA, 666 bp, Cannabis indica
actaccaaaacattcaatatccattaaagaataatattagccgcaaaagaaatagaaaatatatagaatgagagtaaattactagagttgttatcttgatgaaagaaaccagttatgttgtagatgtcaaaaaaattataaataaattttacatgcttatattctagatactgtatggaatattgaacaaatcaaatacaataccaaaataaaatagttaataacttctcaaaagctccaagatttaattatcaacccagtacactatccaaaatagtaattatccactaaaataaaatattagccgcaaaaagagtagaaaataaaatgagaacactactacaaaaataccctttagaggcggtttttaagccctttaggcgtcggttttcgcgaaattcgctaccgacgcctatcagggcgacgctaaagggtttatatgaaccgacgccatatatacccctatggcgtcggttcctagccaataaccgacgccatatatggcgtaggaaccgacgccaaaagtgagcagatttcagtttttttcatttttttaatttaattatataattttaattttatatttattaatttatatattattatatttaatttaaattacatatttatttaaattttaaattacatatttatttaatttaatta

SEQ ID NO: 401308 - DNA, 746 bp, Cannabis indica
ctaggaagatgccctagtatggtcggaatgggtgaccctcaccgggatgtcactgttatgacctaggaagaattttgggagttgttcaactccaaatattataataaagccgtccgcagtgctaagcggaaagagctcattgagctagtacaaactgaggggatgtcagttactgaatatactataaagtttgaccgtctggccaagctcgtggtgggtattgtgccaatagacttcagtaataaagaaaagtacttggcgggtttgaatgtgaagattaggcatgatctagtgatcactactaatgaagcaaccacttatgctgaaatggttgaaaaagctctgcgagctgagggtgcagttaaatttcttcgggagccctaagtgactctgaatgttggtgagacccctacccttcctactcctgtttatggtagggagggtggtgattccaccattgatcagaagaggaaagttacctcagcatcttgtggttcgaggtagagtaagcggttccgtgggaaccaaagaagaggtggacgccagggttattcttaccctgagtgcccacgttgtaagaaacaccattcgggagagtgtaactagaagacatgcaatctgtgtggcatggtggggcatttcaaaaaggattgccctcaggaaagaaagaagagcataagtcagtggcaaaacctgttcctgctcgggtgtttgctatcacccaagctgatgctgcagccagtcct

SEQ ID NO: 401309 - DNA, 615 bp, Cannabis indica
ttggtgtacatggcctcgtctctgttggcctaagaatgatggtggtatgggcttccgggacatgtttctgtttaatcaatctcttttggctaaacaggttgctcggttgataactcgcctgactccctggcagccaaggtaatgaaaggtttctacttctgcaatggctccctattaactgttcaagtaacaaagcgtgcttcttttctgtggaaaagtatcttatggggtcgggatctctggaagaatggttgttggtggtgtgttagctcgggtgagtcaatcagaattcgtgaagatgtgtggatcccaaaggatcatgtggggtggacgtattccttctcgggtgggccaaacctacagttggttagtgacctcaaatttgattctggaagatgggattcttctcttgttgaggagtgtttcgacgtgggggaggcttctgccattttgtctatcccgtgctccttgtttgatagtcaggataggcatatttggcatttctctgacaatggttctttctcggtaaagagtggatattggagtgcaaatatgtgacacgtgtgcaaacttatggtttcgatccccgaccacggcgccaaaaacttgttgtga

SEQ ID NO: 401310 - DNA, 608 bp, Cannabis indica
aaaactctaacatctcttcccaacacagctcctcccacgccctttcttcttcacattctctctcttcctttctccttcttctaaggcaagctgcagtgcgacctctgtccgtcgtcgccaaccgatggagttctctcgacgtcaagtcccaagctcaacatcgtctctctctctcgtcagtttcaatggtggaccacaatctctctctcgtcggtttcaatggtggactgcaatctctctctcgtcggtttcaatggtgtactgcaatctctctctcgtcggtttcaatggtggactgcaatctctctctcgtcggtttcaatggtggactgcaatctctctctcgtcagtttcaatgatggactgcaatctctctcttgtcggtttcaatggtggaccacaaagctattccttgatccaccgtcaccatgaagctcgagttccctctgctcaatttctccttctcttgtctccttaccggattcaatggcggaattgccatccccaagctcctcttgcgagaagacgagatctaccacaaaaggccatatttggatatgggtttggctaaatagaagattatagaggtattggttgtttgatttttt

SEQ ID NO: 401311 - DNA, 568 bp, Cannabis indica
ttttaaagcaaagaaagtatatatttattatgaatttaaggtcagaataaaattggtaaaattggggtgcaagagagaaaaacatatgatttggaaggtggtcaactctgaaacaaagaaatggacaaaaatgttgtgatttttgtatagtgctgatctgaaatttaatataaaacattcagactttgttgaattgtcattttgtctatgctcgggtccaatcaaattcagtgcactctcattgttttaagtcctgccttcacttctttaatgcaactctcttttatattttttttacatgtatctataatacaaaaaactaaagaaaacacttaattttgacactaattcattccaatttaatgtatgatgtcaaatgttagcaagttcattccaacacacaatttaatatctgaaaaacacaaaaacacatatttacaatcaaatatgtattctaatttttcaattatcaaatcaactattatgattacatcttttgatcaagttaattagacagattatgggacaaaaatgacctaattaactatgaaaaaatgaaaaaaaaaaa

SEQ ID NO: 401312 - DNA, 868 bp, Cannabis indica
atagttgtgggcattcagggctttaaaagtattataaaagacaagttgagccaagaaaaattgaaaaaccaaggtttggttcacttttggccgtgacaaatttatttacggccgcggccaagattaggcagagaggtgcttccgagacgggctcagtagccgcgacgggcccctccaccgccgcggcgagggaatccatggccgtggcgaggttccgtacggagtgaggctaattttgtcttttgaaacctgggataaaaataaaaagaaaattgcgagaaagagaagggaagaagcaaattttagacctaaaagcagtcaagaacggcaggaggaggagagtggcggcccagattcattccaccaacactttctttcttccttcctttaattttcttttatgttaaattttgttttaggaatggttatggatttgaacatgaactaaattcccaattagggaagatgatgaatgttgtttaaagttttccctagttaatgttaattgccattcctttcatcttgatttgtgaaattatccttatttgtgtttaattccatgtttaagcttgatcaccttttacatgttctacgatctcaattcaaaatctaaaaagtgagaattgagaatgctaaaattggataatctaggttttatgtgaaacgagagtatttgcgtgacctaagtgactattagattattgcttaatgctgatcatatgtgattctaattaagagattaattagagaacatgtgattgagaacctaaaagatcctaaaagagttaggtgaaattgtataatctgtcattcacatcaaggaaaaggatagcaattaggcattaacaattgggtaaacaaatcaaca

SEQ ID NO: 401313 - DNA, 1001 bp, Cannabis indica
gagcaatttttccatagcacgtaatacactataaatagtgtacaaagaaggggatcgtcttctagtataatttcgtttagtaaagtttaatcttatattttatttctcgcatgttttctttaaaattgtcagaatgaatattgtattaggcatttattttggtgagtttagagatgagactatatgttgagtgatccaaattgtatagatgattgacgtagtccttactctactagtcaaatagatgattgatgtagagaatggaatttatgttttttttaaaagaaaaagaaaaagagagactagtgtctatgtcttatttttatttttatctaacaaactatacaattgcattgatttcttaatataatgaataaatcatgaatttttgttacttagtacttcgttattagttaatcatttgcaccttgctgataggtataaaccaaactcgagatgtagtctcgagataactcttattatctcttttgcatgttttttccttgccaagtcatgagtctccaaatgagtgacatagatgttgttgaaaatttttctgccaagacgagtggtggacccaaaatttaaagtgagaggaggtgtaattttttttgtaaaaggggagagggcaaaaataaatttaaaaagaaaaaatatagtgtaattagtggaatttgaacatttactttctaacatattaataatctaccttaactattacaccaaacttactattatgtctataaatatcatcttttaatacaaatatatgttgtgactaactaaaatacatatacattttttgtccaatttttttagaggggactgtcataatgtgggtccgcccctggccacgacctatttaaaaatacaccatttaaaaaacattaaatattttagtcattatttacgggttgtgactttcatttcaaaccaaaccacaataagatttgagcagtttatactattataattatcacattataatgaaaatataaaaa

SEQ ID NO: 401314 - DNA, 633 bp, Cannabis indica
ttttttttttttttatcattttattaatttactttttatcaatacatattattattattataaggttttttaacgtagtatgcttttgagatagtctattcgtgcttacatattgtgcctttcaggtttgttgtgtcatatcgtacttaagcccatatttttcgtgtcgtattgtgctaatttatagtattgtatcgggtatgctagcctatatttttcagatttagctgtactcaatttaaaaataaaattgatgtcattgcattttgtggatttaaagggagttcatgaccattaaaatgtagtgtattgtcaaaaattgaaatttaacttttgacatggctcccacttatttaaagttatgtttgattgatagtaaaaaaatactctatattttctttttttttttaaaaaaaattacacaataaattaaaacactcatttttcttttttaaaaaataaaaaaattaattaaaaaactcttttgatattttattacactacattttaactaatcacttcactatttttttagttgccaaaactaaattctttataaataattatatatttattttaaaaatatcacatttcattcttttgagtcacattacagtttttatttttttttat

SEQ ID NO: 401315 - DNA, 696 bp, Cannabis indica
tttttcctagaatttatagcatgtataatttcctgagcaataagaatattatcaaaaatgacacgaccagagacaaaagcactttgatagggggaaataattttatccaaaacaacatttaaccgattagccaaaaccttagaaataaccttataaaaggtcgaacaaagacttataggtctgaaatccttaagagtatgggcattctgttttttaggaatgagagagataagagtagtgtttataacggagaaatcaatcccctcattaagacaagaaagaacagccctagcaaaatcaattccaagagtggaccaattcttttgataaaaataagcatttagcccatccaaaccaggggccttatccccagaaaggttaaacagagctctccttacttctttagtagaaaaaggtgcatccaggaaagcatagtcaaggtcatccaaaggagggcccaaacaatccaaaatgagatgcacagcatcagcatcactaccaggagaactaaacaaatcagtgaaataagaaacaaccaggttactcatatcactatgattagaaacaattctttgattatcatctttgaggaacttaatggtaatattcttttttcgtttagaagcaaaacgatgaaaaaacttagtatttttatctcccgctttcaaccaaagggttctagatctctgcttccaa

SEQ ID NO: 401316 - DNA, 652 bp, Cannabis indica
ctattcaaacccttaggtgccggcgacctcaacctccaagcgacattgctcattttgttgttgttcgcaagtcaaagttttaaggctaagactttgaacggattttccgcccacctccgttgtccatttgacaagtcgtcttcaccactagactcaactcgtcgaggagaacaacctatgttaagctatttcacccaactcgctactttttccagtgatgtttttatagctctgtccctttttggagctactcgtcaatgtggttgttttgatatatactacccctatttttggcaatatttctagtacaacaatttttaccgccatcgatagttaatgtgaaccgcttaagatcgcctttcggacaaagtttaacgacttgggagaggtagggactcaactttattattgttcttgatttttacatgtgttgactaacattagacatattctaatttttatgatttgtaaattgtttgaaaaattaaaaacttaatctgtattttttttctggactgttctggggctcggagagccaaatatattttggtacaaatatttatgagggttataatttttcggtttattcaaaatacatccgttatgctaccggattttttagaaaataaaaaggaatatgttattttgttat

SEQ ID NO: 401317 - DNA, 1366 bp, Cannabis indica
ataaaataaatgctccaatttgaaccctatggtcgaactttttagtgggccctataggtttcaattttgtcatttatttaagaacttatcttttctttcacaaatgccatattttaattctaatcctataaatgtcaaatatatctatttaataattataagtaattatcaaataaaattttcatttaacttatttattaattagaccttacaaagtctcttaattaacaaataaatcctaaaatctctctttcttctcaattaagcccttacttagtgaaattcataaataagacatagtctaatctagaattctaattgattaattaaaaccaattaactgagtctacaagccaatattatttcaagtagtgcggggaccacgggcctatataatcaagctcccaataagtagttctagaatttattgagtgaattccctatcttattaattgcttatgactcaactatagattcagaattgcactcttgattacatagaatggtctatatgttccaaatatagatacactattaattatctattatttcaatctaaataatcaaagatcctctaccgatgatctacatcgagtagggataaatttactgttctatccctcaatgtattgtatccttaaaatacttagcttcctataaatgatatttcagtaaactaatataattattgaaataagagctctttcatttatctctattaaaccaagcttgaaggaaattatcatttcacttctatgtagttatagaagctatatatttcatatctatgattagcgctcccactcaattgtactaccatgtttctaaaatgtaagtattaagaaaatccacttggtccactttaacgattcaaagaacacaaataatacagtttagctagaacctaaccatcacaggattaagatctattgacctaagataaactaagtgatatttacctagaaagatataatggtaaatttatgatatcttatccaatttcaatattggtccagtccaatgtatactccatacattttatactagtatacttcactaatgtcctggaaaagaaataccacttatccaagtgtaagtaaactttatcgctgattattagtgtaaatccagtgcactgataaatcatgaaaataaagtctttgaagcatataatcacaaatactttccactgtaaagacatcactgtaattgtgaatacctatatgttttggatttaacaatacatgtaaataacatgtaaatttaaatgacttcttatctttattgatagcaaattagaatatattaaaataagttttatttagggctgttaaatgccaaaatattacatattttatagtgtaaa

SEQ ID NO: 401318 - DNA, 1428 bp, Cannabis indica
tagttaagttttctagttttcttttttttttttttttttttttaattttacttaatttttttctctgactaataaattccaaaaatgactaatctaagctgaactaaatgtggccagctgtctaaagaaaaaccagccacctaatccccatagcaaaactaccaaaataccctctttacttatacttaagccattttaaacctaggagtaaaatggtccaaaaccactagacttactcatgtgactcaaatagccatccatcgcattttccgtggacgccgagcaaaaatcataaaaattgcatagttcatatttaacataaataatactcctagagtttaataaaatctttggaattgagaaattataactctagtgcccatttctaaaattgggaccaacaacataataaaatcataaataattatgacaatgtcaataattaatcctaattgtcttcactaatccatattctaacatgcagtcattacaattaccccccccccccccgttaaaaaggatttcatcctcgaaatctaacctgaatagctttggatattgagtcctcatgccagactctaactcccaggtggcttcctccaccttcgtgttctttcaaagcactttgaccaaaactatggtcttgtttcgaaaaactttttctttcatatcgaggatttgaactggctattcctcataggacaagtttgactgcagttctagggcttcataaatcaagatatgagtcgggtctgaaacatatttcctcaatattgaaatatgaaatatattatgaacatctgataatgctagtggtaaggctagccaatacgctacctgctcgaccttctcgagtatctcaaatggcccaataaacctacggcttaattttcccctctttgcaaagcgcctaatgccattcattagagaaactcgcaggaaaacatgttttcctgtctgaaatgtaatgtctctgcacttcagatcaacataacttctctgcctgctttgcgaagcaagcatccgagccttgatcttttctataacttcattggtcctttaaactaactcaggaaccaaatacttcctttctccaattttgttccaatggattagggaacgacccttcctaccatacatcatctcataaggagccattcctattatactctggtagctgttgttgcaggaaaaattctatcaaaggcaagtacttaatctatgaaccttcaaagtccatgacacaggctcgcaataagtcttctaatatctgaatagttctttctgatttcccatcagtttgagggtgaaaagctatactgaactttcagttttgtgcccatagctctctgaagacttacccagaattttgatgtaaactttggatttctgtttgaaacaatggatttaggagctccatggagacaa

SEQ ID NO: 401319 - DNA, 1276 bp, Cannabis indica
agaattatcttcaagctagttatcttaaaaaaaaaatagttgtcgaaaataattaagctcagggtcttattttaactattttataaaatatatggtctattttaccatttaacaaaataaatagtctaatctgtaacttttgcaaaacacgggttcaaaatagtatttaccgaataattaatcagagaaataaatcggtttaataataatttattttattcttaatttgtgtgggctatactaccattttcttttctaaaatttattaaataattgtatatgaatcaatatcataccattgattgtcatttcgtttaagtaaatatattcgaaaaacattcgtattgttattgctattaataagtgtatacgagtcggtttgattggattattgtgtattttaaccaacccaatataaatattggggttttgcctctatcatataaattaaaaacttggcctaaaagaattttctatccttgcccttttacttcgccttgactctacttggacttcatcagtttccttttcttgttctcgatcatccatcgtttaaaatgtttgcttaaaagagcttggtccaatcccattatctttgcaaggaaatatatgttcaaagaatgatggattctttgattccattatcgtattggtgtctcctgaaggaattagacttcaaagtgccctaagttttaagttcaacgcctccaacaatgaggcaaaatatgaagctttacttgtcagacttcgattgtccatggcaatgggagcatcccacgttgaggtattcaatgattcacaattagttgtcaaccaagtcttatgagaatattagaccaaggggaaaacatggaatcttacatctctgcagtcttaataacaactttaaggattcaaggagtataagatcagctaagtcctaagagagaaaaatgcccaagcagattgtttagttgcctcagataaagaaaaataagaattaggtgtagtctcaattgactaccttcacgagcctagcatcactgctcacgtataggttaaagtcacccatcaagaacccacttggatggatccaatgatcaaatatttgaacactagagaacttcctactgaaatggctacttgagaatgctttggtaccaagctctgagatacatcatgatggacgacaagttttgttggaaatattttaccaggatcttagatttattaacaagtatgttgtttaacatcctaatatatgaacttctaaaacgataataaataaacacatata

SEQ ID NO: 401320 - DNA, 605 bp, Cannabis indica
gatattgacaataacgacatctgaaacttttgggcctgaaatggggcctgacgatactaagtctcaagcccatttaggacagccagagatggccatgataggccgagaaataggatttgggccgtctttaatttaacacaatcatacaaacatatgtacttaattacacattattatgattagggaaacttacaaaaatattgtaatttggagtaacttttacaaaaatactatcacacggaaatatttatagaaatactgtgtttttataaaacaccagtagaacacaaaacagaacaactcaaaacactagtagaacaactaaaaaacaccagtaaaacaccagtgaaaacttaacacagtatactacagtatgaaacttataacaaaatacagttaaaaagtaaaaaataccgcatggtaatatttttgtaaaaaaatgataaaagttagtataccatgtaaatttctctaataatataacattaaacaattaaattataaacaaaataaacctataaaagcctgtacttaaattatgtaagtataaaaaaatatatgtaaaaaatgaaagaaattaattattaagagattaacgtaataaa

SEQ ID NO: 401321 - DNA, 1227 bp, Cannabis indica
aattatagttgttcgatcccttcctcgtaaaaaaggtttgatcaggatgctataacaattcgacccctctctcgtaaaaaaggtttggttagtaagttataacagttcgacccctctttcgtcaaaaaggtttagtcgagaacctttaaaaaattcaactttaattttatttttgaagtagtgggtttgcattgtatcatgtatttccagatgaattccggttaatcatacacaaatccccttaagtaattttaaagaatgaaactttgtaattacttaaataatagaaatgattctctttattcataactgaagttaaaatattacatcagtattgtgagttacatcatttatttatgggtaatagggtcgcaaatgttccacgttcaagtagttctttattaacgtgccattgagtcgaaccaatttgtaaactccaattccaactactgctttgattacatatggaccctcccagtttgggttgaacactcctgcagatgcatccctcgtttttgtaaatacctgccttagcacaaagtctccaacattgaatagtcttttcttgacattttttgttgaaataacttgtaacttggtgttgatacgctgcattagtgacttgcgactcagttcattttttatcaagtagatccaaggataactttagaagttcctggttttcttcttgattataaaactcttgtctgtgagtcgatatgttcactttaacaaacaacattgcttctgagccaaatgctagcaaaaagggagtgtgtcccgttgccgtcttctcggtagttttttgagcctagagtacatgaggtaactcgtcaacccacttgcctttggcatcatctaacttcttcttgatagtatcctttaaggttttattaatagcttccacttgtccattcacctgaggcctgaatactgacgagaagctcttaattattttgtttctctcacagaacttagtgaataagtcgccatcaaactgggttccattatcagatattatcttcatgggaattccaaacctctagtgttcttgacgacaaagtcgaggaatttcttgcaggttatggaaacaagaggctcaacctcagtacatttagtgaagaactcaaccgctacaaccgcgtacttggctcctcctcgcccagtgggtagtgccccaattaggtcaatcccccatatagcaaatgggtagggcgaggtcatcat

SEQ ID NO: 401322 - DNA, 1122 bp, Cannabis indica
ctcgcacatgagcaaaatgttacgttcggcaagctcgagtccatgagaaatgcgaggaacaaaagagatcctaacaggtattgtaaattccataaggatattgggcatacgaccaataaatgtcaccaattgagatgagatagaaagtctcatcgctcgaagtcactttaaacagtacgtgaagagaaagggccatggacacaaccaacctagtttgcctaataacccaaacaaccaagggtgacaacctcttcctgttgaaggagaggacatcctggttatttcgggggggccacatggggagagcaataacgcccaaaaaagatatgtaaaaggataaagaacgagcagtcagcattcgccccaaaaccttctaacaaggtgaaaactaaggaacctccaatcatattcacggaggaagacgagaagaatgtgagatatcctcacgtcgatctgttggtcattactattcaactcgccaataaaagaataaagagggtgttaatagacaacggaagatcaataaaaatcctttataaggaaacgctaaggaagatggggctcagaagagctaaattgaggccttttatggtagatctttgtggcttcactagagacagcattgccagtctaggcataattgagctcgcattaaccttgggcgaggcacccctatccgccacaattatgcaagacttcctagttgtcgacctgccatcggcttacaacatactgttgggatgtccacatatctaggggcagttagttcgatcaaggccctacacttgaagttccaaacaccagaaggtgtgggagtggtgcggggtgaccagatgctggcttgctattgctatcgcatagagttgcagcatagggaagccggtcaccagttaatggcgatcttggcagaggaaagtgaaaggaaggacgaagatcttgaccctcaagttcaagaggaaagaaacctatttaaaccaattgaagaattgaaagaagttattctcggcccaggaaatcccacaaagtgtgtatacgttgggacgaacccggacgagcaactcaaatagcagctaataattttgtaaagcccgcttagttaatttggaaattagcagttgttta

SEQ ID NO: 401323 - DNA, 658 bp, Cannabis indica
taaaaaaaggcctaattttaaattctcccctaggcctcccaataccttgagacggcctgtaaatatattagatggtttattggtgtatttatatttaaataatataattataataattataaaaaaagttattactttttcagaagaaaaaaaaaagatttaagttgtattaatttttgttttgcatagtttcttaaaaaaaagcttacaatatttatataaatattaattattactttgttttattttaaaatatatgtatatgttttttttatttttatttttatttttaatgtggttaattctcttataaacaaaagattagtagaataattatattagaaagagtagtgacacaattgtaataacattagaatattataactaattattaagtaaaaataactcttgttgaaaatatgatatttgtcattacattaaagagagagtgcaaaaagaaagtaggatagaaagttccccttagcacctcctctatatatttttatatgtagattttatttgaaaccaatatttttcacgttttacattaaaaaaaatattataatcactttcaataaattgattcaaattatatagactatttgactattattaaaaaaaaaaactatttagtgtgacctttttacgtattttagta

SEQ ID NO: 401324 - DNA, 647 bp, Cannabis indica
ttaaaataaaaaatattttaacagaacaaatatagatataccatgatttttaagtaatatgcttctaattctaaaaaaaatatatatacaaaaattttttatgtcacaaaaaataatataaataataaatagtataaaaaagagacctttcgctgcaaattttgaaatgagaacatttacttacataatgctatgatttgggatcatttgctataattttcctattgcaaggttaatgttttgttatttttatgttactttgtaattatctttttgttgttttatagttgtttgttaagtaattattttttagccgtcttagttatttttaagatatttttttattttactgaaacatagtaattttgtaattttgaaactttaacacaatatttttgaaaatttggtatagtaaaaatgttaaaaaaaagttcgacagtaaaattataaaaatgataaaaaaaaaaattagtactttagtaagatttcctttagatattaattgtttaaataatgataatttaaaacttttttgacaaataaagaaattagaactacaaaaatcatcttttaaaaaaagataaatagcggcataagtacctaaagttttaaatttgtaagcgacataaatccaatatttattttta

SEQ ID NO: 401325 - DNA, 623 bp, Cannabis indica
ctataaactccaatcgctatctccctctcattcccgtcgctctctttttctctttagaaactcacacacacacacccttgtcagatttttcatttggcggagcaccattgacaactaagcgtcaacccaaactctctactaacataattcttgaaaagacaatgagtgtgtaatatatttagtaattattgttagatttaattgtatttagattgaaataaatagatctacacatatcattctgtaggaaatttagctctgatacataggaattaactactgtaatcctaaattcaagatcatacttaaacaaacaaaagtcaaatcaaaactaacaaatgaagaacaaaaaattagcaaacacataaaccagaaaaatataacacagatgaatccaaatggctgtcagacacaataacacatagatttatactcgttccgatcctaagttcaatgtgaacttggtcatactccagtttgaaagcattgccaccaatctttattgataatgagaacaagagatattaatctcaggagctacaaggaaagaatcacagcaagtcatcaatggtgtaatccctcaacacacattatgtaatgaccgctttagtaatttggattag

SEQ ID NO: 401326 - DNA, 184 bp, Cannabis indica
ccgaccgagacagattggtcgggttaacccaacgaaaaaggtttttagtttttatgttataaagtcaaataaaaaagtgtttgactataattattagtaggaaggaattcataaaatgtatcacttatcatttttatgcatacatatgatatatatatatatatataaataatcaaatatactt

SEQ ID NO: 401327 - DNA, 592 bp, Cannabis indica
aaaagttgtcactaaaagttgctgcttttgttgtgataatagtaaaaaaattaaacataattgaaatccatcatatattttaaaaagtataaaatttaattcaaaattttaaatttaaaatttatataaacaatatctacctaatcttattatagtttgaaataattatatataaatattattttttgaaatatagaataaagaatttaaattttgttattttaagcaaaataatgaatatgtttactaagaaaataaataattaatgatttaaaaatagtacatttaatcatttacattaacaaaaaaaaaatttaaaactttgttataaataattatactttatatataaaaatatatctattctatataaagtgtgcctatataactgaattcttgcgtttatgagaaattcatggataactttttttttaaaataattttctattacaaaaataatatatttttttttattaagatgtattttaatattaatttttaaataaattaatattacttttaaattttaatcgggtttatgagaaatttatggataacttttttttaaaataattttctattcaaaaataat

SEQ ID NO: 401328 - DNA, 874 bp, Cannabis indica
tcggtggtttcaaacccgccagctattggaggaactccgctggcgccgcctagctccatctccaattttgattcggtatttctctcaaccttactcttcaaacccctaaatatatcttttttacttttctttttcgatttatatatattatcgtataatgatctattgtaaattattgaaatatttactggttatttacgatttcttaggagtctttgatttattccaaaaattgtttgagaattgggattattctaaagtttggttaattagaaatttagaattacatttgctgcccctttttgtcttgtaagaacttttttgccttaatctgttactggttcaacatacattaagaatatttaaagtttcataaaattgtttgattgaagatcaattagaagggtcattgacatattggtaattctactaagcatacatatctggttagtttaaggcttcatatgaagtggtagcagtgacgaggagtaagttctaataggcatggcctcacttatgtgcacatgtaacaagtttgggtatgactgtttctcaaatacaggcaatgctagaatctcaaataaataatcactgtaagaactgatgtgagtgatgcttccatttgggttttattgatactttaatttttttatgagcttctaatattaaatttttaagtatggtttttgattattttatgtattgtttaatttactatatgtaataaagatttgttttttctttatttttatttttctccttggtttcccacattatgattgtttaaattgttgggttttatgccctaaataaaactcatttcaatataatcagatttacttattaagatagatcagaaataacatttaatgtt

SEQ ID NO: 401329 - DNA, 538 bp, Cannabis indica
gaaactactactccctttcttagaactggatcttcgtcagttcaacctcggtacattggcgcatctacacattttacgtaagaaagacacagggaaaaacaatttcccttttactcggtgtcgcacattcaaaatctctttcgctatcaccttgccaacattaactcttttttccttccacgatgcaatagagcatccacatcctttcccgaatcacggtggagtcatgtgacgtaggcagcagagtggattgcacaaaattataaagacacttgatattatgcttcagatccgtctgtttgtaaacggaatacaccacgcccatctatttcccactctgcttctggagtggccaattcgggcacaatcttgtgcattagctcatcagtgagcttaccgacatctttagagaactcacaagtcatatttttaagcaagtagtaatgattgatgtctctgtcagaaaatttcactttaacttctcgcaccgtaatctcagctggcaattcatgcaccagaaaattcgcgtagaactcct

SEQ ID NO: 401330 - DNA, 642 bp, Cannabis indica
gaggatcatgtcatgagtctcgactaggccagccagtagcatcaaagttggtagtaatttttcccacattgccaagtgactcttgaattcattcgggaaaatcgatccgaggctcgagtcaaatatgttcaacaaccaatgattcagatctacctctagtgtcaccaaatgccttgcactatcgaagtacagagccatatatattctctccttattcttctaattatccaagtattgtccttcatcccctcgaatcaaatccagtatgtcctcatcccactgaaagttagtgtggtaatcatccgcagcttcccatcaaccaataactcttgatgggaaaatacacggcatgatgacacatctatttgggtacacctccagataaaagtgttgtcgcatccttatcaaatgaaatgcgccacatccaaatgctaaaacatgaaaattaaatatgtcagagattaaataaacagagttagatgaaatccttaacaaccaaagtaaaagaaacttaaaaacttacttcgtctccaagtcatgtcttcggagtatgtagttcgaggaactaaaacatgaaaattaaatatgttagagattaaataaaaagagttagatgaaatccttaaaaaccaaagtaaaaaa

SEQ ID NO: 401331 - DNA, 1008 bp, Cannabis indica
caaaaaatgtgataacagcatattaatatattgtaagaaaaacgaataaatgtatacaacaatatttgatatatcgtatcattaaacactaatataccatagtaacaaaattatatgccacaaaaaaattataataatactaaattaatacttaaaaaatatatatcatgctaacaaaattatatataccattattaaaatatgtaaacataccaaaaaaattatacataattattatatataataaaatagaaactaaatttcatcttaaataaatgatatactatacacaacaaaaaatcatatatcatacaacaaaatatgtatatctacaataaaaaataaaataatataatattattaaaaacaattatatatactatattaataaaattatatacgaccataaaataattctaacatacttacaaaattatatatcacctttatatataataaaataaaaattaaacatgcatgatctaaaataaaatgatatactatacaataaaatttatatatcatataacaaagaaatatatactttataatagtaatatatataataacaacaaataaaagtaaaaatatgtagaatgctaataaaattatatgtcatgtcaattaaacaatagaaaatagaacttaaatataatttttttttaaaacaaaatgatataccgtataacaaaaaatacatatattattcaccaaaatatatatactaacaataataaaaaaaaaaatataggctaattaggatttttgccccctaaatttttaaggtcgttaaaaatgccctattgagattgttgaatttaaggatttttgtctaatttcatttaattttactatttcagtgtgaaattccgtattttaatgttcccagtttaattatataattaagtgattaattaaatgcagaataatgaaactggtactgaaaacagtttttccgtagttacagaatacaactctgtaactccagagaaacccagaaaaacaaac

SEQ ID NO: 401332 - DNA, 518 bp, Cannabis indica
aaaaaaaatttgatttcaaggcttctgccattttttttctgttgattactgtatatatgttttacatatataaataattgaatgtgttgttttggtttccttcttactgtggggtatacatacatatatattgactacaatttagtaaggcaattacatttttttattgcttctcaagattataatatatatatgtatgagaataattatttggggctgccccaattatacatatggctcataaacaatatatattttagttcaaataatttaatttaaattttggtgttggtttatgtttaatattttgaattaattaattgaaacaatatgtcaccaaagtgacctcttttgtgtagattaatttatttaaatattaggatggttgtgtgtttgtaattgatgcatatattgactaacccaaaggtaagtgaatatttcgctaaatttcaaacataattgtggcgataaatgtgtgacaattataatgtattttgtgtgagcaatacgttagtcca

SEQ ID NO: 401333 - DNA, 1475 bp, Cannabis indica
agattctgagcaagttgatttttaagcactagggccccgagcacccagcgcccaagttgacaatatgtcaatctgattgaagatctgacttttgtattgaattcgtcttcatcaaaaatcggggaaatgggtcatttcagaggaaaaacaacaattcatgggtagaaaaaatggggcccagcgcctaggttgacaacttgccaacctggacctcaaaaaatggagttttcccaaaactctttcgagcatcatctctgtattcagaagatattgagaatcaactatttctggggaccaaataaaactcctgaaagggcaaaagagggaccttgcgcctaagttgacattttgtcaacctgggttgtttctaattcatatcagcaaaaagtgctatgggcatcttcaccgtcataaaaaataactaagaccaagtaaacttgaagagaaaaacacaaacccaagtccttggaaacaaggcccagggcccaagttgacttggtgttgggcccagtgcccagtttgacaattaacttgggacgctgcctttaattgctcgaatgccaaataatctaatgcaaccattaaatttgaaatggtcaaaaatagggggagagacctcgtcctcaagttcaaaagccttgaaagtatcaaaaacagaaccccagaagctcggtttaaaggccccagcacctaggtcaacatttggcctggttcactggttctacttatctgaacctgatgccatttcaactatctattaaatttttcacaagtgcaatgatccatgaagtcatatcaatcaaattcacaacttcaattttggctcattcagaagttgaaagtttagagtcttctattttcacaaaatagcaacatctctaagaatgtgtgaccagcttcaccaaacatataaaaggtttaaggggtgtcaaactatcacttaagagtcgcaaaatagcaacatctctgagaatgttaggcactggaatgtcaacctgggcataaggacttgaactgtcttcagtaaaacggccataactcactcaatttttatttggttaatgcaattaaacttgcattttgaagctattaaagccctctatcaagtcctatcatacacactagatgaaattttgaagctatcatcttcaaaattcaccctcaagggagttacgaaaataaactctgggtaattcgcagcgggaaccaccaaacataaaaaattagctatcactactagaagctaatttttcacggttagatcatcatcaacggtggaaaaactttatttgtatttaatctcctatatttgtgggcctcctaagagctcccttagcttatttttcacattcggaaaactacccataaggtcagagcttctctctttagagtttggattttcttatacttaggctattgctatactcaccatctcgtgagaaataaaaacttaaagtagacatagccccattact

SEQ ID NO: 401334 - DNA, 613 bp, Cannabis indica
tctttaaactgcttgattttactgtctaaattttttactgccttcaactttttcaacactaaaaatgactgctacatttataggcttcaatcaagcaaaaatgcaaaggcggagcagtgttgctattcttcagcttactatgctcactatgctcacttatgtggtttttttttttctttttttgagataagagtgacttatgtgttgttatcttatattttgtgtcattttcctaaaaactttaataaaagtttctatattttattcttaaagtttcaatttttttgttttcccttaaaaatcttaatcaattataaaaacaattataattaaactcctacggtcatatctaattttggtatattttaaattgttttctttcttttttttttttaatgagaaattttgaaataatttatagtacttcaaacagtcatttacatgcatattgttttatttgtgtgtacattatactattttaaactttatttttaatattaacaataattaagaatatgttgaacataacaactaactttattgacataagctttaggaaccaactaacataaagactaatgtaaaaattcaacatattgaagttaagtgtgag

SEQ ID NO: 401335 - DNA, 886 bp, Cannabis indica
ctctctctctctttcgaacccactagaactagctagggtttgggttgttcttcagcaattcaagctagtttcagcaagattttggtggtctgaactctaggtaagctcttagtaacctcctttttagttttcttgagttttaagaaaattgtttatgcatcttttatgaatttggctactatagttgctgttggtgtttagtttgtgtttctaaagttagattatggtaaaatatattgatttaagcttgtttggtgggttgttattagatttgagcaagctttgagttttagaaatgaagtttcgctcttcaatggtaatttttgattatgagcttgggtagttattttattacttggaatatgtctattggggtataatatgcaggtctggaaggtttggtaaggtttggaatcgatttggttgagttttggaattgtttgggttttctggtgtaaaccggctaaccggttttacaagacctataaaaccggttacccgaatttgctgctgggtttcccgaaaaatttgtgttgtcgattcgtgttagtttcagagctttggttggttaattccctattagtttagggtattgacatgttaagttacactagatagggttttggtttaaaatctaagtccccggttgtgatttagcgtgtcccttattcgtgttgttatcgatgtgatttaggagcctgtaattcgccgagcagttgttccactcaggttggccggcacacctgattttggaatcaaggtaagattagtgtaatgtaatgcatatgttattacatgtttagcatacatgtgtgtttatggctgttagaatatattaatagcagtaacagtatacttagagttgtactgattactgataaatgta

SEQ ID NO: 401336 - DNA, 996 bp, Cannabis indica
aggttcatccgcaaccatgccaaacttccactggaattctttatcagcatgaggaggacctttaagatcgctcacaagatctatacccccggggatcatttgtgagaatcggccatggtaggctatggggttcccctgatgtggattgatcgaaagctcatcggccttggaatccatcgttttcggctccagttgaggcttgaagtctttgggaacaaatggaaattggttggtgcgtctgggtaagataagtttaggaggatgaacttctgaactcagaagggacattctagcaggaaagaggtgatccattctaaaaatggattccaccaaaaagccagaggtttgtgaaaaataacaagcttaagccgcccttttatacacaaagtccagtgacaagaaagataaagattgggatatctaacggttggaagattgacagatatgaagagacgattcataatgatccttgaaaccgtacaactgccagaatcaaaggatgcgattttttgaagaagaattttggcgaaaatgccctctgtaattattaaaaagctctttttactaaaaaaaataactttttaagggtcaattgttatacccaaaattcggttgccacctcaatgaaggacacgtgtcaggatgaagggaatctgaatcaatggaattgcttttatggaataactcattaatttcataagagtcagagtatatttgtaactcgctgactgtaaggttttaggcaaggaatcaatgtacaagctggtgcttagtatattagcgagaagccatgtatcgctaaatgcgaatagcgagacaccggagaaagcgacacgtgtcaaccgtgaaagtccttagcgtgcaatgaacaaactaagtgtaaaagttagattggcttgagaacaagtaagcgaggtgaccatctcgctatgggaagacttcctatagcttcattcagctaacgggagcgagacttacaatcctggcgagtcagaa

SEQ ID NO: 401337 - DNA, 510 bp, Cannabis indica
accacagttgaccaactatcatcagagtactatccctctgtcttgccattctgattaatagaatcattgtggcattttttccttcccctgggagtgggtacttttccaccaggtcctttttgcgcaactcgtccattgggatttgaaggacgtttgagcccagaggcattggtggccttctatatccgcaacggcttgttggctaggttcatatttttctaggaggtaagagctattgggatttgaggataacctacttttgccttccccttgtcctttgcaggttttaagatttcagcattagtagggttttctctattgtttctattgacaagttccatcgaggcatcttctttagaatcctcttctatgtttccaaacttttcttggaggcaggccatcttcctctccatcttctgcaaaaacttctcttgatgggctaacttctcctgggtctcatgtatctcattggatactcaaccaaatctgagtcttgttcataataatatc

SEQ ID NO: 401338 - DNA, 687 bp, Cannabis indica
tcttacacactacgattgagtacaaacatgttctgtgttggcatgtacactatcactatagggttcgaaaaattgaagagagaaagagagagagaaggattcgaatgagagagagatagaaggctcaaaatttgactgaaaggcttgagtgcatcatctttcaatttgagaccatcactatctatttataggaatccatctaggttgaggtttgaattatttggcattaaaaaattaataaagaaatggtaaaatagagtataagtggccgaccctggatgtggacccatcactttgcaattttgccatttttcaactatttatcttatttttcttaaaaatgccatattttgtaattcaaccactcaaatgccaaaactatttatttaataattaaaattaattatcaaataaaatttccatttaacatatttattaagtagacttaataaagtctcttaattaacaaataaacccttgaatctcttttcttcacaattaagctctagcttagtgaaaattcataaactagacatagtctaattttacaattataattgattaattaaaatcaattaactaagtcttacaagcagtttgtctaaactagtgtggggaccatgggcctatacaaccgagcttccaataagcagatttagaattaaccaagtaaattctctaacttat

SEQ ID NO: 401339 - DNA, 792 bp, Cannabis indica
caccataggcttaaaatttaatgaagaacaaggaaggagattcaaaaataaaaaagggaagaaggaggtctcaagaactctagttatctgacagaatgtaaacaaggttatatgagttattggataatgagaccatcctatactttttatactatttcacctaaggttaggatttaaattatacagaataaaaaaagataaaataatagcaaaaataagcttaagtgaccgaccatatagatgagccccactagttataagtttgccatatttcaaccatttatcttttacttcacaaatgtcatattttccaattttaatcctataaatgccaaaactatttatttaataattataattaattatcatttatattatttattaattagactccacaaagtctcttaattaataaataaatcctaaaacctcttttctttacaattaagccattgcttagtaaaaattcataaataagacatagtttaattttagaattataattgattaattaaaatcagttaactgagtcttacaagcagtattgtctcaactagtgtggtgaccatgggcctatataatcaagcttccaataagtagctctagaatttaccaagtaaattctctaacttattaattcctccttgcaccactataaatttggaattgcactctaaattatatagggcgctctatacgctatgaattatcattgttataatcctaataatcaatgatcctctatagatgatctacattgagtagggagaaatttactgttacacccttcaa

SEQ ID NO: 401340 - DNA, 575 bp, Cannabis indica
atgcaaaagttatgcatgatttatagagcaaggtcggagcagaaaaatagagacaaaaaatagcctatggtgctatagcgcccaaatttctgcgctatagcaccgattctgaaaaaaaatatttttttgcgctaaaatgaagcctcaaagagtaccgcatggcgctatagcgcgcaatcttctgtgctatagagcagcacttatcttttttataaaaaaatcctaattctaatgggactcatctatctttttttggcctatttaaagaaggggtaaattgaatttagggacgactggagagatagagacaagcaactttgagattaaaaaaaatacaatgaagagtaagagagaagagattcgaagcgatcgtcatcaactttcatcattagagttattttcttctacctctttcttctttattattttgtttagttatttaattatgaacatgattactgtagttattatgtttgtgattatgaactaaacactcattttatagtgttgatagaactattttagattataaatttaagtttttagtattattcccatatttgttcttgctattt

SEQ ID NO: 401341 - DNA, 706 bp, Cannabis indica
tgggataaaaggggtactttttaccgcgattttcatgaaaaaactgggataaaaagtatcccttttatcctggttttttaaataccttttatcccactggcatgcatcccagtttttattttagcgaaaatcgggataaaaagccttaaaaaccgggataaaaggccttttcttgtagtagtggttggtgatggcatctctaccaacgccctgatcttcgcggggtttgcttctattcctcgttgattaaccatgaatctaaggaatttcccggagccaactccaatgacgcactgtagagggtttagtcgcattttatatcgacgcaatatatcaaacattgcctgtaaataggtgatatgatccttcgcatgttgagattttacgagcatatcgtcaacatatacttccatggtgttcccaataagatttgcgaacatcatatttacaagtctttgataagtcgcacctacatttatcaaaccaaaaggcattactttataacagtataggcctcgatcagtaatgaacgaggtatgctcctggtcgggttcatacatcgggatttaaatatatcccgaatatgcgtccatgaagctaagaagttcatgacctgcagtggcatcaacaagttggtcaatcctaggaagtgggaagttgtctttgggacaggctttatttaaatttgtaaagtcaacgcatgtgc

SEQ ID NO: 401342 - DNA, 613 bp, Cannabis indica
gcatgatataataggaaatgtatatagagccttattttcatgttaaaaactgcgtagttttttggagaatatgggcctgaaacttgagtagccacaggttttaggaagaatacttcgagtattcgcatcttttttgttgaatgccttgattactcacgagtattgagatgatcatcttgaatactcacatatgtattttagtaaatctgggatttggccatttcaacctttgtttagaacttagggttctgattcatatgtgtttttgttgtgaatattggttaggtccttcaaatggtgggtgtgtcaccgtaacttaatgttcatgcgtgcgcctgcatgttccttgggtcactgtgacacacccagccatttgcgacatatggccaattttcacttttcttgcattcttagtcgcatgttggaactgaccagatttcttgaaatgatgggtgtgtcctagtaactctatggtcatgcttaaaaatgcatgccccttaggtcactgggaaacacccagccattttttgagacatactgttagttgcacatgtgcgacttacaccttgagagggttagttaaattctcgaaatggtgggtgtgtctcaatac

SEQ ID NO: 401343 - DNA, 549 bp, Cannabis indica
acagcactttaactagcagaataatcttgtcccgcatcaccttttctttcctgtccaaaatctgcactggttgctcttcatatgacaggtcggtctgaagctcaatgtcttcataacttaagacatgagttgcatctgatacatattttcgaagcatcaagacatggaatacgttatgaaccccagataaagcaggaggtagagccaaccgataagctacctgacctactttctcaagaatctcaaacggaccaacaaatctaggactcaactttcctttcttcccgaacctttgaattcctttcattgggatacccgaaggaaaacaaaatccccaatctggaattcaacatctctacgctttggatctgcgtagcttttctgtctactttgtgaaacaagcgtacgagctcgaatcttttcaatagcctcacccgttctttggacagcctcaggttcaagatacctacgttggccagcttcatcccaatgaataggtgaacgacatttccttccataaaactgttggaatttattttaccaggatct

SEQ ID NO: 401344 - DNA, 1020 bp, Cannabis indica
atatatatttctgcgataatccatcgattcaagtttttggtttgggtttttttattttttctttgatcgttctctgctgatgcatgttgcgtcgaatatatatgtatgttatatgtgatctcttttgaatttgggcttaacttttttttttaggaatatacatatatatttctttgttttatgaagtcagtggcatgaacatattggattatacatgttgatatatacgttttatacagatatatattctggttttattttattttaaatacaaatagcatatcgatttgcttctggaattttttattgtttagttttggttttttattattattattattataacttaaataataataataataataataattcagtaacaatttaattcaaattttggtttaaagtttattaaggatatctaatatttaattaaattaattgaaacaaaatatcaccaaagtgatctcttttgtgtagattaatttaataaaaatattatgataattgtgtgtatgtgattcataaatttattaactaacccaaaggtgagttaatatttggatgaatttcatgcatgtttgtggtgataaatgtgtgacaattataaggtattttgtgtgaacaatatgttagtccaaagattgcatattgtttgacataatttattgtcaatatttgatcactacaacaagagtaccgcttacaattaatattactgtccaaagacttaatattaatgttgtgtttggtatcttgagatgggattaaccaatatttgaatttattgttttatttggattcttatatgagcatgttatttatgaaattgtattgttcttttcagctgttgctagtgtatctgctaatcttaattcggtaccggtccttaatggtaataactttaaggactggaaggagaacatttttattgttcttggctgcatggatcttgaccttgcattaaggatggatcgtcctgcttctcttacggatactagtacctccgagcaaaggagg

SEQ ID NO: 401345 - DNA, 945 bp, Cannabis indica
gcctcgctattatcccttagcgaaatatggatatggtttctagttaatactctaagtaccagtttgtacattgattcctcgcataagactttacagtcagcgggttacaaatatactctagtacttacaccattaatgagttattccataaaaaatatggcaccgattcacattccctttatattgacacgtgtcctccaactgaatttcaggtataacactcatgatagtagtatttattttctaaacattgtgttatgactttaatatatgtttgttatgtttatttttcactttgtattttctctttagacttttttctttattgaaaattgctctcaagacttaatgttatcactatttaaaataaatatgctttattattttttacttgtattttctatgaagactttatggctatttgatatctatatcatatatatatttttttatttaatatactacaggtatttattttaaaattaaaaataatgacagacaccgatgaggagattgagttacaatcgatgtatgtagctacataccttgttcaacattattatacaatataatttgaaaagactccttgtaggaaagtagatgttatagaatgtttaggatggagaaatatattttcattaaattatgcaatgaattggaagctaattatggatttgaaggttcaaggagaattagtgctcttgaaatattaggcatgtttttatttacattaggtcacggtattggaaactggttaacacaagagcgattccagcactcaagcaagacagttagtcgatattttaataaggttttagatattttatgtcatatgagtttagatgtattaaaaccaccagaccctgaagttaaagatgttcctgaagagatattgaaagattctagatatatgcctcattttaaggtaagtcatactttaaaatt

SEQ ID NO: 401346 - DNA, 1011 bp, Cannabis indica
taaaaacataaaactaaaatacatagtaaataaagcccaaaagaactcatacaactcgtgaggtcaatatgtacattactggagaaggcagtcagctcatgacagctctaacctttccttgcccttacctgcaccacaaagcacccgtgagtcacaaggactcaacgagaaaagaaataataataattatatattttattattcgaatattatcatttatactcaattagaatcaaaccatcacgcattgctcataagatgaaatctaaatcactattggcatctgccacgaataagcataagaatatagatatataatacaaaactattataccaattatataaataatattcatttaataatatattatatatatgttacctcataaagtaaccatcttcatattacatcacattgcctaatcaaacaagtcgatgctttaatctgataatcctctattgcactgcctaatcaggcaagtctgtgccatagcctagcacacacatatcacataattgtatcacctaatcaggtgaacccgtacatacctacaccttgtactcatatgtcactaacgcctatacctacggttggtacatcgtcaagagtatcgtagaacctaattagctgagctcgtatatcatattcatagtatcattacatcatcattgcttaaccaattaatcttttcattatataacaatattaagcgtagctcaatctcaatattaatcaattcatagcaatattaagtgtattacaatacaacgtactatgtagtacaatatacttttctaacctttaatctaagtttgtacatgttggctaacctaagtggagaattatcccgatgatctcggtcttatgtcacaacaacagtaaaccaataagtatttatcccaaaatactacttaacagctacaaatgacaacctagggttttctaccaaacctcgtagtaaaaatacactaaaataaaatttatattttggctctaaaacatacaccata

SEQ ID NO: 401347 - DNA, 780 bp, Cannabis indica
ggtaggcggctattggtgtcatcattatggggaagtgttaatcattttaatctcttccgtgccggtgatgctaggctcttcaaggatctggataggaaccaagttcttcttatcacttacatcactgcttgccaatcaagctaacgcgtctgcagttgtgttttcttcccttggaatttgtctgagactgtagcttttgaattgtgtgagcaagtgatgtattttgctcagattcgccatcatcttttctcaccgagcctcgtattcgtcggatacatggtttacccccagttgtgaatcactagagatttcaatgtgtttgattctcatctctcgggctcattttgggccagcgattaaagcttcatactcggcttcgttattagatgctttgaatccaaatttgactgcagcgtgtaggtgttgcccgcagacgtaacaaggtttggtaacagcggatctgtagccgacccgtccacgtgtagtttccaagtcggcttgtcttcactgttacttggctgaggtgtttgtaccacaaagtttgctaaggcctagtctttgattgttgttcagggttggaaggtaatttcgtactgtcctagttccactacccacttgagtagtcgtccagaggcgtctgccttttgcaatatttggcgtaatggttggtcagtgtatacccgaacaggatgaacttgaaaatagggctttaactttcttgttgctagaatcaggcagtaagcgagtttatctatcaatgggtatcggccttcggcctca

SEQ ID NO: 401348 - DNA, 1067 bp, Cannabis indica
ctttttccaattataattcaaaaaccttcaatttgagtgtggcaagaccatcatccaatacaatcacatctctgccatatttgatggtagccttgagtttttgatatgagattgggagagacctcaacctggctttcttcatcaaccttataatttacattagtcaatcctacaataatctcattaaacttgtcaatattatcatctaaagaaagagaagaaaccattctaaaaccatataacctttctagcaaattaatcttgctagcaattgatgacttcatatagagtcttcaagcttgttccaaattcctttagccgtcttttctgtaataagctttctcctcacactgttggacaagtacatgatgattgtgcaataagccatctcttttatttttttgttttttcttctggtttcttttcagccagtaatttctcatctccaagaattttggagaccttctggtgcactaggatcccttttaaactctctccatggcgcaaagtcccatgttccatcgaatttttccaattcgaatctttccattgatgacaatgatttgttttttcaagaatttcagtggaaatgatcttgattctacgttcttgatcgatttccatgctctaatgtgtggaaaaaattacaactgatgtgcaaaatcaaatcaattaaaacttaattaacaagcaattaggaatgacaagattaataagtcacaaacaatacttggagataaaaacagggatgaatagagtatttaaacaaaaaataattaaagcagtaaaataataaaattaacaccaagatatatactggttcaagtcctataggtcgatgtgattcatgtctctactccagttttaaaacattaccaaaagcttctttattgattgagcaagaacatggtacaatacagtcgagatcgattctcttttggattctctcaaagtgtttactttcacactcttacccaaaaattttctttatatacagaagattctccatacaaaactcaaactcaatctatctcttttctctgtacctctctctctctctacctctc

SEQ ID NO: 401349 - DNA, 430 bp, Cannabis indica
tcttcatctcaaagatttaattttgtgtccatagctgttttatggattctcaggccagagcatagcaccactcagaacatatcgcctaccactcacagtgggaaaatctccaacttaaacaacacgcatggcacagtttttagtggtggatgttccatatgcttttaacgtcatgttaggtcgtccagccttgtatgacttaaaagcggcaacttctgtttatcatttgtgtgtgaaattcccaacacaaaatggggatcggttgtttagaaggcaatcaaaggactatgcgagaatgttataaccttgccctacccaaggctaaaaaagaaaaaaaaaatcatcccaaatcagagaaaggaaaagacatttctaatgaagaaggatgcaagcaaaagggtgttggggttattttaccaggatctaaatt

SEQ ID NO: 401350 - DNA, 870 bp, Cannabis indica
ttttggagttcccgaagtcaacttgggcgcagagttagggacccctcccaggtcgacttgttataattcgggactactcaacttcaagatgtcatctttctttgccatgtgtcaaacattgatgtccacatcattaggctattcttggtgtaaacaacatgttttttaaattcttgctcagtttggaattatgattttataaaaaggtccaattttaacttttcgcccaaggccccgaaattccttagggcagccccgattgcaaaacaagtcaagattgactctcccttctgccttgtgtgtgaatgggatcttgaatcccatgatcatctaatacttttcatgctcttattctttgagagttatggagcatattgagggttgctaggtagtctgctttggccaaactagtttgaagatcggattaagagtgttgtccatgatttgtattatgcaacactgggtggagctgtgtatggaatatggtataatcgaagtttgtgtgttttttaagaaaaaatgtttggccccccttcttatgtaaacaccttaattaagatgagcattaagactgctagttttttaaggagaataatttgtctaaaaaggatataacatttatgaaacttgtaaataatatgtagatatgtagtagattttctttgtgagaaaagatggggtatgcccctatctaatatgcatgtttaattaatgaaaattttataaaaaaaaaatgaagtagtggtcgttgttaggttttacagtagagaagagagaaagtacaaaagttttggtggcatttggtaatacttttattttgaattttttaattataaaaataaaagtaaaatttttgttttttaaaatttt

SEQ ID NO: 401351 - DNA, 1083 bp, Cannabis indica
taaaaaatagtctcaaacaatggaatataatttgattgtgatgaattcaaagacttctgcgatcaacacagagttatcaaaaagtttctctgcggtcgcaagaccccaaacaaatggacaagcggaagctgtcaatcagatactcaaggtcaccctaaagaaaaagctcttggcctacaaaaattattggcctgaagaactaccatgtttattatgggcctacttttacttggctgaggtatttatactggcttgaggttgccttccgatatgctttcttctttgcctgtgcattctaccacaaagtctgctaaggcctggcctttgattgctgttcgggattggaaagtaatttcatactgacccagttccactgcccacttgagcaaccatccagaagcgtcccacttttgcaatatttggcgtaacggttgatcactgtccacctgaacagaatgagcctaaaaatagggccttaacttttttgttgctagaatcaggcagtaagttagtttctctatcaatgggtatcgactttcagcctcaacgagtcttttactaatgtaatagaccaggcgttgtatgtttttttcctctctaattagcacgaaactcacaacatgctccgtcacagctaagtatatcccaagttcttatccgtccagaggtttcgagagtacgggatgctttgcaagttgaatttttagctcacgaaaagctttttcacattcctctgtccactcaaattgcttattttctcgcaggatgttgaagaatggaacacacttgtttgttgattttgaaacaaatctgctgagtgcggcaatccgaccagtcaaacttttgttggactttgtgccctaaataaaacactatttcaatgtaatctttaccatttaattatcaataaagagacagaagtattttcatcacttagttagtgtgtcatatggttgatgttatcatttatatgtctatttgatttataaattcatccaaacccttatcacagtgatattcttgtttattgtgtcgccagcatagtggaaagtaatcaagattgtgtgattaaatatatattcc

SEQ ID NO: 401352 - DNA, 905 bp, Cannabis indica
agatttcaccaggaaacaaaaatgcgtgagaggaatgaatgccataatcaatcgggacttgaaaattaccacttgacatgacactttgtacaagaaagtggtagagctagccttaattactgaggaggctgagcaacatgtaacaaaagagcagactgcaaaagatgccatcacggcatcgaaccctcctactagtggtaatatcagtaaggggaccgatagtggtaaccctaatcacaaatagaaggctgaagcttttgaaacatcagggggaaatagagagttttggggaaacagagggggctgtcagggccgcgaatcttcattctgagcttatcttgagtgtactaaatgcaagaaccaccatcagggtgaatgtcgggccaagacttgtttctagtgtggcatggtgggccactttatcagagattgttctcaggccaagaaagaggaacctaagaagaatactactcaaaacctgggacgaatttttaccatgacttaggttgaggctgatgctagtttgttagtagtgacaagtcagttgtctataaatggttgttcttatactgtattgtttgactcgcgagctactcattcttatgtgtcgagtagaataattgaaagttctcataaaccatgtgatacttatttttcggggtttggtaccctgctaccttcgggagaccttatagtatccactaggtggatttggtccttatccttctggattgactgttgttaattaaccgccaatctaacagaattgcaactgcctgattttgatataaccctggatatggattttttatctaagtatggggcaacgatcgactgcaagcggaagatggtggtgtttgagcccgatagtgctaacccagttgtgtttgtgggtaaagttcagg

SEQ ID NO: 401353 - DNA, 528 bp, Cannabis indica
aatagaaaaactcatacttagttatctaattataaaaagaataatttaatatcattgaaaaataattaattatttaaaaatttattatacaagaagaaaattctaatttgtgtaaaaagaaatctaattttgtaaaaaatataaagtttcattgtaaatattataattaaatgacttaactgttaaaataattatagtaagaatttacataaaaattatttataattattaattgctaaaagatgtcttgttaaatattcaataattattttaaaaaataattaattataattaattgattctaaagaaagaagttttacctattagtaacctgctattacaggtaaaaagaaatgtatcatgatgattacaataaaaatgtaacaattgagtagtcacccataaatataaatattaatattaatattattaatttaaatatatataaatattattattatctattttaggttaattaaaattataccaattttaaattatttaaatatatatataatattaatatta

SEQ ID NO: 401354 - DNA, 818 bp, Cannabis indica
gatgaagtttagtgatgatttgtaatatttatcgatgatattagcgatgtgtttcgcgatattgtggattggagacatttagcatgtttcatgattttgtgatgtttcgcgacatcgtcaaaaactagaaaaaagtacaaaaaccaagtgagttgagaagttaaagattttggggctttgggtttcacgatttctctttgtagtttcgcgatatcctcctcgattttgtcctatgtttcgtcttcggactgggttttgccagaggtggtgcggtggtcgtgggtttggtctgggtctggttcggtctggttctgtggtcgtgggtatcggttgggttggtgagagttaaagagagagagagggagagaaggcaaagacaaagagagaaggtatgaggagggtattttgggatttaattaattttagagtattaaattcttatgcattttaatgtggcatactaaaagataatgaactgttaaatttcccatttatttatcaattaaacttctaaattttactggagaattaccgcatatatgttttaaaaatattatatatatatatatatatattaatatattaggtattaataacatgcaacttatgtttgttgatacttatattagagttgctattatctaattattaataatttaaataataatattaataaaattaaatctaatttattttaattatatttttttaaatataaaaaatttaatccaaatttatatttattaataaaaaatatatataactaatcttattaaacaataaaataagtaaataagtttagatattttaaataatat

SEQ ID NO: 401355 - DNA, 1078 bp, Cannabis indica
agggatcaaactgcagcatcgacgtggcctctggaaggctggctgaccatgaccatagcaggatggtcggccatagaatcatcaacatggtcggccaccacctccacaagttggtcgaccataaagtcaacaacttggtcggccatagcctcttccaaatggccaggcaatgctccaaaaggccaaccaacctggtctataccctagctggcccgatcctccaacagtctactctcatacttctagtctacagtgactaagaggtaaaccatatcttactagcaggatcccttgatgaaagagaaaaaaaagagaccaagccaactcaaaacagcatgtctacccacaaagagttactaggcccgtcaacaaacagatcaaggaaagaaattcttcgaaagagacttactccctaaagagtattccttgacaataaagatcctgcagcaagcatgtttgggccaaattgaaaaggttcgcaccatgttacaagatgacaataaaggtgcatacaatcctggcgagtacaatgagaacttgtagttggctcttcgaccataatactagaatagagaacatctcggtgagtactctcactagctaacttgtcaattagttcctctaatgtttcaccatgcagagacccatagaagagctagtacccattactttttggcatggactcccatcactcttcagtgatggctattgcacggtaagtcacgcaggggtagccacagcatgatttcaaaagcagacactaagctgtaagcttttgttacatgttagaccaaatgtgtctaaactacttgctaacaaagataaatttttacagttattctttgtcagttccacatgtgtgacagtcattaatcttgtgatccgtaagggcaaataccgggtaagttgtgcaatcccacatcgtctggggaaggtcaagtgtgatgattttgaggctgtgtaggtatgggattacacagttgaagagggcttaaatgaattgattggtactacctatatcaccaaggtgcatttttgtttttttggtagcccatcgcgaaagaactccacagttaag

SEQ ID NO: 401356 - DNA, 649 bp, Cannabis indica
ttttatttaaattaatatcagcctaataaataaaattcaaattaataatcaaattaaataatcactaaaggacaaaattctaattgggaaaaatgaccatttttcccctcagttagccaaaaagtcataaaatcatttaggggtaattttgttaattctaaaatctcaactaatcccgacattcccaatgtctaactatatttccccactataataaaaatactaagatgtcattctaatagccaaacgccgcgttccaatgttgtcgggcacaaaacatgcaaaaatatgaaattccatatacaagatataaaatgcattctaaattcaaataaatttccgtaaaatgacaattcataactaatatgcaagtttcataattaaaccctatttatttgctaattttcaaattaaagttaagcaatttttacaatgtgtattatacggtaagtgtcttaacaaccatcatgtctcatctatttctcttcatgcgtagcaaggttgatgcctcgccttgaactactgatgttgtatggtttctcgttaatgcacagggcaacagttcgtatatcttcatttcgcttaagaccttacagtcagcaagttgtaaatatactctgccagttccacatttaatgagttattccat

SEQ ID NO: 401357 - DNA, 571 bp, Cannabis indica
taaacaaatctagatttttggaggaagaataacagactcaaacttgttcccataaaatttaactttacaaaaattgaatttttaatatatatttttatatataaatatatttttaataagagaataaataatttgtaaatcatttaattatttttaaattttttcttaaatttttttaatcattaaaaatgattttctaagatctaaattattttttcaagatttattaaaaaaatattgattttttctcatttttattttgaagggatgcgatttaatagttgtcaacgttgaggggataaaattactaatttacaaagacatgtcactatttaaacgaaataatggaacataacttaatagaaggactaaatttatgttattgtcgaaagtttatgagataaaattactaattattttcttttttttcaacaatttttaaaatttaatttgtggattaactaatattttccgtttttaatttaaattgtgatcctataagtttatgtgccgtttggtaatacttttttaattagttttctgtttttaaaattgaaaaagtgaaaatatt

SEQ ID NO: 401358 - DNA, 807 bp, Cannabis indica
ggtaatttcagttttaccccatgcaatttgttataaattttaattgcgcattagtctttttaccttcctataaatagaagcttagtttttagaattcaagacaatttcagacagagaaatcttgagaaaacactttaagcgctcaatgttagattaccactttttcttagttaattttcttatgggtttctaagttttcttaatattaaagtggacgatgaaacttagtgtatttaattaaataattatttttatgttgattctcagtataaatgcttatgatttttcgcttcttaaaataatttctttcatctttaatatcacatattttttatagttagaaattatcaatgtttggttctatattttattaaaaataatattatttgattttatgtatttactttaaattatttcacatttaatgcttagaagttataattttaaagcgaatgaaaatctatttttgttagaaaataattaatttgattactaattaaattatgagaatcgatataattataaatatttctataataatttctccgaataccattaaaaatatatgttacttgtcaattgtcatatttactactaaatactttattttattgtgttaccaaaaacatcattattttttaaattaggttagaattttaataatttaaattaaaaaagaattttcttcgatctcacgcaattcttatggatttggctttgttctacttttgggtccaacagtcaacaaaataattgaatttttaaaatttacttgagtgctaattacaatctcctattacaatttct

SEQ ID NO: 401359 - DNA, 703 bp, Cannabis indica
ctttcatcaatcctctttgctatctttctggtttctctttcagtctttctttcatcttcttcttgttctgtttaatctttagctatggccaatagattcaacagtgcgcaatagcaatgctcgtaatatatataacaattatacttaaataattattaatttttttttaaaataaggacataatgtgatctaattttgttaattgaaggtaaggtcattagtggcatgtctaaaagtaagctaatctaattttctctgctattatatactaataagtaaagtttaaaaaaaaaaaaataaaacaataattaacaaaaatttatatatataaaaaaagaataataacataaaaaaaattaatatcacatgctcgcattgtcttttatataattatatatttacttaaaaataaataaaaagaaaaactaataaaaattattaaaacaatacgagagaaaaaaaatggtgaaaaaaaatatacaaaagactttaaaaaagtattttaaaaaaaataaatagagtgaaaaatgagagattttttaaagaaaaaaaatgtgagagtttaagagaaagaaagagaggaaaatgacatattgtattcaagtattgtcatagaggatcccacataaaattgactatataaaattacttataattttggaatttttttttaatatatataattgtctaactaattaaatta

SEQ ID NO: 401360 - DNA, 526 bp, Cannabis indica
acgacgttccaaacgagctactaaaattgaaattactggattaggattaccctaatgttaattgattgaccattatcgaccgcaaagcaacacccttattttttgttaaaataaatttaataataatttgatctaaaggtgttatgtcaaagttgtttacatttttctgtatttgttcatgttaggaattatcttcaagttggttatattaaaaaaaaattgtcaaaatttaagctcaatgtactgtttttaccattttggaaaatacagggtccattttattatttaacaaaacaaatagtcaaatcggtaacttttacaaaacacaaggtccaaaatagtatttacccttgaaataatagtatttgcataatgataaagcttcaatggttgatcaagtgatcaattttatgtctttgaagatattttaggattaattgaaatgaagaaaagcacctccaacaaagagcagggcaattaacatttgctgagtattaggttatttttagtattaattttagattaa

SEQ ID NO: 401361 - DNA, 658 bp, Cannabis indica
aagggccaccgagttaatataaatcattcttccgaccttagaaagagatttgagtctccagccctccaatctttcccagagctttattttgaggaaattaaagtccttcctcttgctacgcacaaataaaaacgaattaccccaatgtttctccgtatcacgaataccccaaatcctcaaattgctttcaatggactccctcaggttactagaacagttactagagaagagaattcccaatttctgcttactacaaacttgacctgaccaatcttcaaaccttttgatgcagcagttgaccgaggttttcggcaaccaataaaatattaaaagattcgagaactgtaagaaaatttgagaaggatttttacgtggttggggcgttaatgagccttagtccacgagtctgtgttatttatggatgtatttaatacagagaatgttcttggtgagtatttactcttataaatacagagaatgttcttggtgagtatttactcttcttgctattatgcaacccaaaattctcgaccccatttaatgagcttttagggggtatttatagtgtttttggtggggtaatccccaggattattgtacatgtgtatctgtaaaatccataaagatgggtattcccaatgaatataccatgagtaat

SEQ ID NO: 401362 - DNA, 503 bp, Cannabis indica
gaagtggttcattccatctggcagcatcaacaaaatcaacactcttcctggtggaaagcacatcagttattttcttcatgtcatcgtactccatgttgaatctattcacaaagaatttgtcagctacctccaactaaaaatgttattcttctgacaacgaggaagcacagacagacagaatgaccctagaaggaggaagaagtggaagactggttctgtcccttggcagctgggcggaaggagcattgatttttattggtggtagaggttgagaactgacaacctccttgttggagcgtgtggtctgcttatttagcctctcagttagtgtttgctcctctcaggttgagaactgacaacctccttgttggagcgagtggtctgtaacgcccgtattttataataataaacttgataattaattttaataatttatatcttaataatcatatgaatcaggatcccgagtatcaaaatacaagttaaaagtattttactaatat

SEQ ID NO: 401363 - DNA, 528 bp, Cannabis indica
atgcatatgcagttgcaggcagggcttatcttcacaacgatgactcctttaatgggccttcttttattcttttgggcttcggcttaggcttaacttattagcaagcttagccctatcttttaaatgggctttcgctccaaatgtatctgctagaggttttaacacctgaattttttttttttttattgtggtcagaattttttaaaaaatactctgtgttaagtttttacggttgttctacagttatttttagatgttccactattattttaattgttctattttattattttatggttattttataaaaatacagtatttttgtaaaaaattttgtgtaactctaaaattataaactttttgtaacgtcccgacttcaagcttccactgggtccttacacccacggaatcatggctcttatacacgagtacgccactctggctgcttcatggaatgacgactgaccctacaaaccaacacgaatgtttctagcgtgctttgtcctcacttgcacgcttcttgggaaa

SEQ ID NO: 401364 - DNA, 829 bp, Cannabis indica
gttaattaaacattttataatatttttaaagctattataactgttgaaaattgtataatattgcatcccttaaaaaatgagtgcattgatatactgttatttgtttcattatttgagaggtttttctcgatgaatttattttgtatgatcgtgaatgttgtagttatttaagatatcttacaaaattttaaaaaattcaaaaaaatttaatacaccaaaaatagagttcaaacaatctgttatacgtgtgactcttttatttgatatgtgtgtgaaataaattgttgaacaccattttttatattgtaaactattctaaattctcaaagttttgtaggatgtctcagataattataatgtacgtgactataaaaaaaatagactaaataattatcccgataccaaaacaaataggtgtgcaccagtacacatcttttaaggggtacattataaaaacatttataactattttgttgagtctattatatcttattgggtgattctagagtaatttgcggcgtaaatacctaagtttatcttttagttgcagataaatacctaacttatttttttggcggtgaaaataccttctgttagggtcttgggacttctgtaggtacctggacgttaagtgacaggtcagtacctacatggcacgttatgattggtccaagtggatttatttttattttttattttaaataatcatttaaagataaaaaataaaaagaaaatgttttttatagaaaaaaaaatagaaacaaatatattaatactaaaaatctaactaaaataataataaaaaaattgattttgtatccctttatta

SEQ ID NO: 401365 - DNA, 1178 bp, Cannabis indica
tttttgtaacccgatctttacatggggtaaataaaatgtaacgtataccgaccaaaccgatcaacgcacacccttactcaatagatacatacactagttcgggataagttgagaaatactattttttattgggaaatatcgatattagtttaattaaatatcaagtcccatataatttaatacaataacgagtatcgctagtcaatcgtaagacaatacgtctagaatgtgttagccgatagcaatgttcttttttattatacattaattaaatataattgtaaaataattttaattgataaataccttattttataattaaagtactaaatataactttacataacttattaaaattagaattactaatgcacataatggagatatgatctataaaagtgggtataaatttaaaagtaataaaattaaaatgaagtaataaagtgagtatagagtgtaattttctctttttattcttctttaaatccaagtccattggattttattgggctaggcccatttaaatttgctttgggatgatttttagaaaaatacaaaaataataaaaaaaaaatacaaaaaatacggcatgtacagaatttttaatatttatataattttttaaattttatttatataaaatataatttttttgtgtatttttatgttctattcttattattttgttatttgtatatatttttttatattttttgttattattttgatgttattttcttgttaattttatatgattttcttgtttttttttttttttttttagtgtgtttttattagtaatattgtaaaaatgtttaaaaaaacttgaatataaaaatgtaaatttttttataaaaatgaatgttatatgtaattattgaccatgaaaaatttgtgaactgttcaacatacatgaatatgttttttaaatgaatagtgatgagagcctaacatttatttatttattttctttggaagaaaggaaaattttttatttatcaacaaccaccacttacaaacagagagccaaactcagcaattaaagattgctcaacatattgacaatgcttctctctctagaactcaatttagcatggttacagatagtaattctagctttcaaactaagtttaaccaagctactaatggccttggcggatccacaagcttcatcaaag

SEQ ID NO: 401366 - DNA, 622 bp, Cannabis indica
atatgcctacaaggccataacagaattcttgtcgaggttaaaaaatgacaaaacactagccacccacttggaaccaaggcctaggccagtcagagttcccaagctttgagagggtaggctagggtcccatgacccagccaacaatcagccagggtcaccaaacttaggcatgaaccagccagtttttagggtgaaattctagaacccaccaactcctatggaaaaaccctagagccagccaggtctcaaacaagactcctagggccaaccagggttagtttcgaatcaaattttgtgtttttcaaaactcaaacgtgttcttcatgttcttcatgaatcgagtcaagaatcacaatgaaggccaaaattaaatctttttcatcaagaaatcacacattatgcattctaaaactatcatgcaaatcaaaataccaaaaaaactacaatataacgtgagaatcaaaaagtttctaaatgcttaaaaagcttcaaacttatcaatggcagattcaaagaagatgaggcatatatgaagagagaaatattaaaagatctaaaaagcaatgccatggaaaaatctaatacttggctagcaaggctgctcgcaaaggccagtacaagc

SEQ ID NO: 401367 - DNA, 847 bp, Cannabis indica
attttgagattttacactataggcgacattttgtgtgactatttttcaggagtgttttgtaaaaatagtctttatgaaactttttataagtaaaataattttataaaaaattttattagcgaaataactttttatggtcactaaaataaccatgaactgcactgtgtgaccataaacgactattatggtcgcaaaacgacgatagatttacattgtgctactatcatggtagcataaagtaaattaattgaggttattttgtaaattttaatatttgaaatagttagtttgccaaatttttttattttctgcatgtattttataacattttttgaacgttgtgctctgttctaacaactcccataactttcaaatcaccaatttaagtccataaatgtccaatttaatattgttaactaccaagagctttacggtgatcatttatgtttaattgagagtgaaaactctataaatagaggtcatattgttcacttgaaaaatgttgttgaatacattttattgttgttaaaacccttgtgagaatatgatcatttttagacactaggctgagcatatgaggcttgaaaatccttaagagtatttctagaatttttctaagtgttcatcttgatgtaataattttacttgtattttaagtattttaattgcaatcttcttattttttttcttgtaatgagaatatttttaagagttcctaatccattcatgttcagggacggacccattaacataaatgtggtagctatagctcctactaataaaaatactgcctcttaaaaaattaaatgtaaattttttaatttaataattatagatcaaaatagta

SEQ ID NO: 401368 - DNA, 546 bp, Cannabis indica
aaattgaggtatcaatctatgttaagttgatttatttttatgaattttgtcgtcatgtgtatttactgaattggatcccaaatgtattggtagtttgatcctattgaagccagactggattgtgttagaaaaattgtcaccagcgagagtaacaaggctaaacatgcggtgatggagggagttaaaaagcaatttggaatgaccaaagctcttccatcagtatccataactttaccagtacgtagtccatcaaggtgtcctcgagacccccgattcagcacagcgaaggctaggtccgagagcatgtggactggaaagagtaagtctccaaaaacccgtcattctaaaaggttggcatcaagtaacaagtagtgaaacactattgtagcatatttagtacaactgttacaaaagtgaggttttagttcataagttatatttagttatgttatatatttgcatcatactactgttaggtgatttggaattgcactaatgttggtgattttagcatttactatatggtaagacttgtggtagtttttg

SEQ ID NO: 401369 - DNA, 434 bp, Cannabis indica
  modified_base (377)..(377): a, c, t, g, unknown or other
gttaaaaatgtaaactatgtaattattgtttttttttttttttctattttattttgttggtggggtatattttggtacgttagagcatctcagactcagagtatcaaaaaaaaaagtctattgttatagtttagcacatttaaaaaaaaattatgctccaatgatattttaaaaaaatgtattaaatttggctacatactaaaagttttactaaatttaacacagatataatattgtgttcaaatttaacttataataaactgatattttttacaatagccaactaattttaataattcatttacttttactaaacttcatattttttatttaccatagtaccattatttaaataatgaaagaataaaaaataatanatttttttttgtatgttctttataaaatatgaaataactatccgtataattaattaa

SEQ ID NO: 401370 - DNA, 722 bp, Cannabis indica
cattatataattctatttaattggacgaaattatttacgttattagaatatatattacgtatatatataaaaatttcccaagattaatctagtttattggttctattattactccactataaatatagaattgcattctttgacaatatacaattatatttacagaattcttacttatattccattgatataatcaatataattagattttcctctaattttagttcataattagagttggtcgaaataacgtgttacccttctaattatctcttgatagcttatgtacctttaatttaatgcgaagaactattttataacttattataaatttagatataactgttagcactcccagacttaacactattagagaacaaatattcaatctgttaggaaagtttggattccactattgtataacatgtttgtagccacttgtgttattaagctcccaaaatagaagttgtaagaatcatcttctttgagaaactttaacgagtgaatcaaagaactcaatgaacataaacaggatttcatatatactcatgattgaggctgatctactaatgatcatcattttgatatgataaacttttttcatagtaaacaacaagttggatgtctagctatgcataatctaattatacacaatacctttactacatgtccatctacatatgtgatccaaatcaaaatcacacacactagaagtatagtgt

SEQ ID NO: 401371 - DNA, 527 bp, Cannabis indica
gcagctacggccaacctgaccgtggaggtgaaggagctaaggggatttcgagagatcaggcctgaaaaaggccaaaagagatgagctcctgacccccgtcgtctgcaagcatgcgtcaagtgcttgatgacagcgtctacatggcctggcagtcgaatggccagagtatcaaacttgacttctatccaaagcctgaagaggctcttgctaagtccaggagaagaagaaaaggcttgatgctttacttgaagagcgccggggccctcgtcttcctcctcaaattgaataggccgcggagtccaactaatttcatcactacaacttacccttttttttttttttttatttattttacagtctattttcttcccttttagacaattttaattttattattatcttttcaggggagacaattattacggcccatccccaagcccttaggatgttatatattttttggacctgccctttgggtcaggatattttaaatatacatgttcactttgatatatattctgtttgat

SEQ ID NO: 401372 - DNA, 530 bp, Cannabis indica
ttgatgtccaattgatttacatagtgctgttatacaattattgtttagttgttattaagttgtttgactaatataaaaataagtatataattatttgtttatgggtacatatatctttgagttgttcaaagtattttgtaattacttttaatttttaagcatttttgtatgttatttttctatttgttttgagttgatataatatgttgatatttaatttttattttataattgggttgttgtctaattgtttgtttattgtcatttaattgttcaatttagaaaaataaaatgaatatatatatagttttttataggtgcatatatttttattttatttttttattgtaaagaaagtgtattatattttttaattgattattcttttagttattttttaattgaagtctagataacttattgctatttttatgaattctataaattgtatatctttatatataaaaagtggctatttaactgcaattgttgatttaacgatttttttttaacgattccttttttttatt

SEQ ID NO: 401373 - DNA, 1070 bp, Cannabis indica
atggccgaaccacgtaaaaatcacttttattgaagcttctacaactcttctccttctattatttaattggttgctgaaaatctcgttctacattttggtgctttcattgagagctgagggaagcgtcatcaaaaagacaacagtcaaaggaaaagtcagattaacaatggtagaaactcgtaacaatacacgtcagccctgtcctcctcaagatgctcaaaacccagaaggcgaagaagtgcaagagtaaatgtgggatttgaggagcgagatgaggcaaacaatgaggaatacgaggaaaacttcgaagggtacgacacctatgacgaaggcagctatacgaaactactggtcttgagacaaaaggtggctgatcatgaagccgaacttacagctcaaaaggaacagaataaaagaatgcaagaggtggtggtttccatgcaaaaagccaaggaagctgcagggatacacatacatcccaaggccatcccagtaggacccgaggaaataccggaagaatcctcaccaattactttaaaacccgaggacaggaaaccaagccctatatagtacccttccgaagaaaaccctcgaaaaaatccaacttcaatccctgggaaaaagaaaaaggtgtaagatccgtgaaaagtccgatcagatttcccgaaagggaaaggttcgtagaggggaaagctccctcgagcgagtcttggccctcaagaccaggaggaccgaaagagcgtatccgtgcaccaagaacccagggagagaggacggaaatgctggaggtaccctccagctaacctaagacaaaaaatcaacaaaaagcatggtgacttacgagaccatatagacaaaaagaaacacgcactgccggcttccatgggcacactaattgaaggattcctggctaagttagcaatactgcacaaagacattgctagggttgcccggagacaaaaaaaaggacgactcagattctaattgtgaggattgggaaccatgcgcctgttggaaattattttacaaggatctagatttactaacaagtatgttggattaacaaccta

SEQ ID NO: 401374 - DNA, 637 bp, Cannabis indica
ttccatccaactctactaatggacgcctaatgtggatgatagttcaggaagcttaattttgtaagtgtcaaaattcaagaaacacaattttgtacatataaaaaatctagagatcacgctttgatatacggacaatcgacacattattaaaactaaatggaattggacataagtccttgaacaatcatagtagtttgggaagaatttttaacggtctataaagttcaaaacacgattttatacatgttaaaattcgagggacaaaaatactaataataatgtaagggagttctatttgtacctaacaaaatgataagtacaactcaatattaaaaagaaaaaacaagcttaaaataatttttaaaaagtcactctcaatatttttaattttttttcacgttattttattttattttattttcaatacttattttaattttatttttataatttttttaaaataaatttcatgtaattttttattttattttttttgttataatatttaaaatgtattttttttttttgtataatatgtatatatttttttttaagaatatgagttatgaattaaataaacttgctgttgtgaaaattgtattgttttataattgcgcaagtgtacacaatcacaaac

SEQ ID NO: 401375 - DNA, 888 bp, Cannabis indica
gatttttgttgagaatttgattggtatttccacatgaaaaattttcattgtgatgtttttagataccctgcaaaattttgtaaggtttggcttagaatttcaggagttatggaagttttaaaatgggatagtggagtttcaggccatccgatttaggcagaatttgggggtccatcttaagattttttcccaagatcccgattgagtgttttctcaataattagggtacttccatgatatctatcaataggaaaatttttagttgtcaatttaagtccccaaaagtgttagggtaacacttattgggtttttttttataaatgtgacttagggccttcgattaccagcagctatttccactaaggttgactggcacacctgaaattaaaattgaggtaagactagtataacacacatacatatgtacatgtttatgtttatgtttgccagatgtatgacatatccgttagaacgatagttggtgtatatatgattgcatcttgatatcgtgaatgtatgtgtttggctattcaagagttatgaaccaatgctaccaacactagtacaccagattactgagtgcatgtggtattatggttggttatactttcgaaagcatgaactagtgctaccaacactagtacaccggagtactgagtgcatgtggtattatggctagttgtgcttatagtatcgattgatgctaccaacactagtacgactagagtactgagtgcatgtgctattgtggtcaagagcgttcgagactcaattatacatgtttttatggtttattacttgttgataggtttatgacacttagtcataggtcagttatatatttatgttttatgctttttttactgagtctgtcgactcacagatgtt

SEQ ID NO: 401376 - DNA, 742 bp, Cannabis indica
gagggaaataaaatttaagatggaaaaaataaaaatttaaaatctaagatgcatgcggaaaatgaaatttcagatgtgaaacgggtgaaattgaagtatgggaatcgccgacggctaaaaactaacagttttactatagccaacgatttagtcgacagttttataaccgttgacaagtccctacacgtgattttttaaggcacgtttaaaaatcgtcgtctatatctcccgacagtttaaaaccgtcagaaatactttattttttctgataacactcgcttaatttttttagcgatagttcctcaaaaaaaaaatatttttaaaactatcgcagatatctttttttgtagtagtgatttatatataagttaatctatattgtaagagtaataacagtaaaactactattacaagacaggctttgagaggcggttttttgggccctttagaggcagtttttgagaaattcgcaaccgtagacattgtataggtaactaaaattgtagcgaaggaactgaaagcatagaggacttatatggcgacgtttattacataataatagatgccataggtgttgggttttataccctaaataaaactctttacaatctgatcagttatcaatataagaaatttgaagtgattgatgtttgcatgaattttacatgctaacggtttaatatgtctattactattatacacaaaatcagttaaatccagatcatatgtttattcacaatta

SEQ ID NO: 401377 - DNA, 2073 bp, Cannabis indica
gatgtaccttgaaaccgcaaaacctccaaaaacagaggatatgtgtcttttcaaaaaaagaggaaaatgacagaaataccctttctaatcattaaaaagctctttttaaggggcaaagggtatacccgaaattcggtgagcacatcagaagatgacacgtgtcgtggtaggaataacgaagaactcaaacacgcaaacgaaaagtacaattagcatggaacgagtagttggaaatataattcgtagggtaagtttataactcggctggctgaacagccttctgcgagactgaaaagtacgaactgctaccttctgtattgacgagaaaccatgtgggtgcacgcgtgcatgacgaggccacaacctcgctgcgggggagagaaacggtaacactaaaagcacagcgtctattatacgatatacaaactgagtgtggatagtacagcgagtcaagatagcagacatcgaggcgtttatctcgctaggagtagtagacacaaataccgtgtgttaaacacgtatttaattgttgaatctggacacgtacaaaaaaaaaattgttgaatctggagatgcttgaaaaaacttggatgtagtgattccaaattcgagctggaacgattcttctttccgaggtcgacaaggtatgtcttacgtcggtcgtgggtatacagaaatcttctgatttggcagggttatgagacccgctcctgttagttggatgaaactataggaggtttcctcatagcgagatggtcatctcacattcttgttcttcgaagcaatttgacttttacactctgcttattgcaaccgatctgacttctccattagcgacatatggtttctcgttaatatactaagtgccagttcgtacattgattcctcgcctaagaccttacagtcagcgggttacaaatatactctgatacttacgcagttaatgagttattctataaaaagatcttgcaccgattcacattcccttttccttgacacgtgtcctccagccgaatttcgggtataacaattgccccttaaaaatttcttttttagtaaaaaaagagcactgattctggcagttgtatggtttcgaagatcattatgaattgcctattcatattctgcacgattcccatccgttagatttctcaatctttggctttcttgtcactaaacttcatatataaaatgggggctcaggcttgtgaaatcttctggctctttagtgaaatccattttcagaatggattacttccttcctcccaaaatatttcttctaagttcagaagtttattctttcagactcataatacccagatgcaccaaccattttccatttgttccaacagacttcaagcctcaaccggagccggaaacgacaaattctagggttgtggagcttccgaccaatccaaaccaggggaaccccgtagcctgccacgaccgatcttcacaagtgatcccagagggtagagatcttgtgagtgatctcaaagatcctcctcaggatgatgaaaaattccagaggaagattggcatggtttcaggtggatctcggaaggaagttggcatttttcaggttgatctgggaaggaagttggcatggtttctatcagagaatccacccaacccaaatccctgacctgtgccaggagatctttgcgtcagcctctctccagtgttgagaaaaatcctaaggctgggaattagatctcgggttcaggaaatgggatcttctgatgatgaggggaataaggtctgtgcagagcaggccatgtcacatatttcagtctgattttgtacttctgttgagagtacaaaatgggatgggaaatagatctcggcttcaggaaatgggatctgctgatgatgaggggaatgaggcctgtccaaagatcaaggctctctacatgtagtcggtctttctcaagctatgtgtagtttggtctttttccgagctacgtgcagacggtctttcttgagttcatcgacttcccctctcatatgtagttttggagaatgacttaatggtttgcccctagtggcattttcgtaaagacaagtttgtaa

SEQ ID NO: 401378 - DNA, 523 bp, Cannabis indica
aacccaagacctttaagctattacgttattcaaatgattataataccattacgctacactcaaaaaaaaattattacttcaaatacatttgtttattttttttcactaaatttagcacaatttttagattttgaattggagctaagtttagagaagttagtgagtaaaacttttaattttgggtattaaaagtttttagtttaataaaaaaacacacacatacctagttgtactagatcaaagttgtcctattggattgggcctctaacttgattcgctatcccattttgttatgcttacttttatgagatatcgatattaatgtaatttgatattaaatctcacaaattttataagtatgtagtattttattcaattataccgatcaaaataaatagtagtatattggatttcattagtgtctcatttgattaacaatgccattacaaaaaaaagaatattgttaaggggcacttgatataatacaatttaatattaggccatacattttaatttaataaat

SEQ ID NO: 401379 - DNA, 941 bp, Cannabis indica
ttttttagtttatattaatttttgtttctttaattttagtaagtgtcgattgaatgaaattctgtggacaatgattgctcgtggttgatatgtgtctttacgttgatatcttatgcatggtcttgtggaacataatttttttgatgatgaaattcttcattgtgtgatagttataattctagaaaataatagaatctcatgatttgtgtgcttaactcattattaattactgctcaaacttgtttttttaaaaacttttgcacattaatttaattgtcatatttactaatatttggaaagatgaatgcatgtttgaattttaatttaaagtctcaaccactctagaacttgtttgataatcatttgaggcgaaatcgataaattacccataattttgagatattatatgggtaattttttttggatcgattgagcttttcaagcctacattatttgtgaattccctagtgtaatatcccaaaaaataaatgatatttaagtagacttattttattaaatatttaactattttgttaatgaagtaacattatgatcttacttagggtaattaataagggtttattgaatgatcattaagcgtaatttattaattacggagattatattaggatatgtgtgtatcgagaataccatttttgaaataaaaatattttatcgggcccgacgactatggaaatttagcattatggtcataaatgtcacgacattaatggaagaattattttgagggtattctcgactaggttagaatttttagaatgttagtttaaaagattagtaaaattaccaaaatgcccctaggttatattttagaatttaagtttctttggagggtaaattagtcattttgttaaatgggaattttgacttttaattttatgggctgattgtatattttaaaaaaagaaaaaaactaaaaa

SEQ ID NO: 401380 - DNA, 1295 bp, Cannabis indica
aactggtattcccagtctcttgcacgccaggcgtgatttcactcacaggagtcgtcatactgtgacccgcagttaatggctgtccgggatttacggttggcggaacccttgtgttccctaggttctacagtgcatgatccaccgcctgtggattcaccggatcaaccacgcccctacgagtctgtaccaccatcgtacttgtgattagatttgagataaaaagcgatccttgagttcagctctcaatgaaagcaccaaaatgttgaccttgcttttagccaacaacaatgagtctaatttgtaagcaacaagtagtttgatacgagtgtaatataataaagcaaataaagacacaagaattttatagaggttcagccccgagcagttcggtaatagcctaatccttgtagtttgtattgacttaagaacaaggagaatggttccttttcttagagctcttacaatagtatctctgaatatgaattcttagacaaatgtttcgaccctttgcccagtgaatatgaatcactatttatagggctataagcttgggagggaagtatttcccttcttgttacaattgatataagtggaaagattgcatagtaaatacagaatacactaatcgtgggattcagacagcttgccatatctctgtgatttgatcccaaagttatagggatttctttgatgactcacgatgcgaaagttgaatttgctaagtgttggcgtgctgcgcggattgctcactgcccggctgagagggcttcgtccgagcgaatatatgaggtgccctattcggcgtatctcttgtgagcaggtacatagagtatattccatgtgtcaccatcgtgtgatgccacgtcagagtgcaaaattcgtataacagtatgggtctgggcctgtgtctaggttcgggtttagggtttagggttttggatttagtatttagggatttaaggtttagggtttagggcttagggtttaggggtaagtgtaaagagtttaggatttagggtttaaggtttagggtttagagtttaagggtccaattccagttccggctctaatttttggtcacagggtacgatttatggttcgggtgtaggtctgggtcagtgttagtctggctctaggttcgtatttgggttcagaactgagtatcggtcccaaatccaaacaccaaccacatgtcgagtctagttcgagttttggttcgggttcgggttctagtctgggtctgggtccaggtcgaggtccgattcctagatttagacaccgactatgggtcgggt

SEQ ID NO: 401381 - DNA, 1333 bp, Cannabis indica
tttttgtatttttacggaaatccttatagcaacctataaatcaactaacaaagcaaccaaaatccacatagcaacccacataggaaccaccacagcaactcaaatcttaaatttgaaaaaaaaaaatagtatatggggtaatttttctttaaaaaataattatagtagaactatctatgtaaacaaattagtgacaaaagtacttaaataatcaattttattagtataaaaaaaatgatagaaaaatttgtaagtaaattattttttaaaaataaatacctatataaaaacaattttaattcactttttttaaaaaaataataataattcaaataaaaaattaatattttttaattattaatattattttattttttaaataaaatatataattaaatattattataatatgtataaaatttttattaaatatcttaatgaccacatgatttaaaattaatagtcaaaaaaaactttgctaattctagggaacttataataagtcctatcacaattttacctcatacatatatagaaatatcaaatatgcatgaaaatattacttattagaatgtggaagtttgttattgagataggttgaagagagtgtttgtaggataagatgtgtaagattctatctcaaaataattaattatgagaaaaatagtttaaatattttatagaaatttttacatcaaaaatacaaaatgtaatctttattacactaatacctctacacggctatatcaacttttttactcttcttttttatttcatgactattttaccacatgcacactcattccatgcatgagtatacgtgcttgacttatgacccctatcaatcaaccatccatcatttccctttctttttttcttctttttccttttattttccatttctttttcagttttttttttttaaatttagtaacctccattgctgaacattccctctccacgatcccaccattttccctcctctttgtgttcttcatttttttttaaatcccagtaaccgaatcccataaccgttttccctctttctatttctttctcaatccgtatatatatggctattacctgttcttcatcatctccttcccccgttcaaaagaaaagctctaaaatgggtttgaaatccttagctaataagaacaagggtaaacgacctgttatggaggaggatgactctgattttgctcctccattatctaagcgtggttgagctcctcctaagaagaaatcgaaggtgggtgcccaagaaaaaatggctcaagatgttgctgaaaaaaacgataatattggtggtggtcttcgaactgaggtttgt

SEQ ID NO: 401382 - DNA, 917 bp, Cannabis indica
gaagggtttggacagacaagtttagaaggttatcagttgactcatgataaaactcagagatagatccatcctctagcaaggttcgcggaagcagacataatagcatttgcactggcggtagtccaacaaactgaaattgaagagcccagaagttatgaagaggtaatttcaggtggaaacaagtctaaatagcttcaagccatggatgaggagtgcaaatagattctcaaggtaaaagaaaattatggagaacaagaaaattatggagtgcaaatggattctcaaggtaaaagagggaatcaatgagaatgaacctgtgatgttcaaagccaagttaatggctaagagtcttactcaggggttttactcaggtggaaggtatagactatactaaaatcttttcacctgtggtaaagtataaaataataaggttgatattttctttatctgctcaaatagagttcgaggttgaataacttgatgtcatgactgtctttttgaatggattcttagatgaagagatctacatgaagcaaccacctggattttaggtggaagggaaaggagttaaattagtgtcaagcttaacaaatccctctatggtttgaaacaatccccaaggaaatggaataagagattcgatatgtatatgcattaaatcgggttcaaacgatccacgtactatcactacttatatttcaagaatttggagcaatctacggccgtgttctttttactctatgtggatgatatgctcatcatgagcagagataaatccgtgatcaaaagtatcaaagccaagctcaaaagagaatttgagatgaaaagacttcaaccagtatatattttggtgttaatttctttaatttttgcatttattatattttggttttcattactctgtttgtccttatttt

SEQ ID NO: 401383 - DNA, 305 bp, Cannabis indica
aaaggtatgactactgatgaacaattttaagttgctgttatgattgataaattaccctctttgtggaaagattttaaaaacactctcaagcataaaacaaaagaattttcattagaaagtctgatcactcgccttcacattgaagagaaagctcgaaagcaagacaagaagaaagagatgcttgtgttggaaattattctaatcactaaggtgtttcaaaattatcaaggaagaagagagagagagggtggcggccaaggtagagagagaggctcaggttttctgaatcagaagtgtattttttt

SEQ ID NO: 401384 - DNA, 556 bp, Cannabis indica
taataataataataatattacttgtatttgtttagggaaaattttattttgacatgttgtttattgataatttaatcgtaaatctatatgaaatttaaaattttaatatatattttttaaaaataattatatgagtaattattttactataattttatttttctattactcataacaataaagaaattattacatagaaaatataaattgacattttatttataaaaatacttttataaggtaaagtcaacatttataccttttatgcaatattaattaccaaaatatcacttacacaatcagacaatggttgcatagtagttgttgcgtggttacacggtggttgcatcagacgatggttgcagggtggttgctaggtggttggctgaaagttgcatcagacaaaggtttcaatcagacgaaaatttctaggtggttggccgaaggttgcatcagatgaatgttttaattagacgaaataactgttagcaaaatgtttatgcaactgtaatgcaactgttgtgaaacattaaaaatcagaacagtatttttacgt

SEQ ID NO: 401385 - DNA, 789 bp, Cannabis indica
tctttttgtttttggatcattattaaacgggattaatttagaaattaactaaaaataattaataaaatatcttcaacctaataatattctattttcctttcaaaaaaaaaataaataaaaaaatcctattttattatttctataaatattaaaaataaaaatatttatcaatattaattattaaaaaggtttatcaaatattttaattaaaaattttatttattttaagtgtataattaattataaatagtttaaaatttttaaaaaatttacttgttaataacttaatatatagcaggttaaaaatgtaaccaaatagtcacccataatcttatttgtgttattaaaatttaatatatagagtttcatttgttagaatttaataattaagttgtatactactaagtaccttaaaatgactttgaccatctctaattggataaacaaaagttaatatattatattagttacaaataaaagttttgtgatatttttgcattaacttttactattacgttccaatgtataattgtaaatcttgatacaaagtttaagagaaataatgctaaagagcattagtagtgattagcaccctctatgagtcaatatcgcaattggtccaactaagtatcaagtagtttaatataataaattttaggaaatattgctagccaatcgcaatgcgacatgcctagaggtgctagacatcacaaaaattacaatttgttttggctaaatatatttttaattataatatttgttgtgactaaaattaatattagtgacaac

SEQ ID NO: 401386 - DNA, 577 bp, Cannabis indica
aaaattctcataaacacataaaattcttttatcactggcaggaatgctgaggtaatgctataacatctgggaaaaattagcataagaaggattagttattcaagccacttttaccatattacactttttgaaagaatttttctagcaacaatagcattaattctagcaagtttacttactgtcattttaattttgaatcatggctcaaccagttttatttttttccttttactttaagttgtaattagttggttttacaacatatttttgattgcaatccctgtggagacgatcttacttatcattttatgacttgtttgactacgtatacttgcgtacataattttcacatgtttttggcgccattgctggggattgaaactaaaaattatgtattatcaactattttgcaatttattttattgtttgagattttaatcccattttgggtgcgctgaatttttcttttgtaatcgagtgtatgaacgagcaagaagaagaccttgaacttgctcctattgaccccgaaattgaacccactttcagacaaaggggaaaggaacaaacggctaaaaaa

SEQ ID NO: 401387 - DNA, 584 bp, Cannabis indica
ttttttccgtgtagtactacacatatatatataactagtgtgtgtaacgttaaagaaacctatgattgaaaaagagtgtcatgcaacttaaacatacactattgtataatatatcatacatttaaattaactacattatgaacaattattgttgattatacatttaattttactcaaatgatactaccataaattctcaagaactaatttagggatgttctgataccacatcttagaatactgtaaactctgaatatagccctaattaatttaagagaatcaaataataagattaaagattagcggaagcttaccggagtccatagaatcgacctttaaatgatctttattggtatgatcttttaatttgcatcaaaacctttctctgtaaacttttgctcttggtgatggggatacaagagtgaaaagatacgatgcaaatggggaccattacccgttatattaccaacagacaaacctgttggcaatatttttgactatttctatttggcccctcatcattatagaaattgtctaattggtatccacatattaaaatcatgacaatcatgcccttaagtcat

SEQ ID NO: 401388 - DNA, 653 bp, Cannabis indica
tacacatttgaaactgcccttgctaatttaattgtaagtgctcggttcagttgaaaaaaaaataagactttagctgtttgcgtaattttcttgtcaactttgcatttaattctcttctcttcacaaaaaaaaaagaaaaaaaaatcatcaaagacttgttaggtatgacattgatgtgatatttttatcattgatacatgattggatcgctttgtagtttgtggtttttagggaattatttatggttgtgctagttgtatttgcaacttgattgttttttctcttttttgctctaacttactacgtaaggggactgaatttgaacttgtaatactaatagtttcctaatgtacacgtgtcagttatagttaggtattgttcggtaagttagttatgttaactaactcctagctagtcctaggatctatataagtacctaattacctactgtattaatgttgttgtaacaatacacactcataatatacaacacaagatttgttatagtgagatctctctcacctagaaactcgagaccagactcctctttaaaggacacgtgtattcagatttccaatgaaggctgaatgtccgcgagagacttctcgaagtttagacctcgctcagaataaaaccagcgagatactgcaagt

SEQ ID NO: 401389 - DNA, 909 bp, Cannabis indica
gtaattttgaagtcaatagtcttaaatcttcactatagtggcgtcgaccgtgaaatgtaacaagatagtagagactgctacgaagataataacttgctttaaaattgttgtctccttattgtgtcatttggacctgataataaaaaaaaaaattaatagtatataacaacaatatttttaagctataacaaaaattttgaaattttttttaaaaaaaatttaaaattggcagaatagtttaaaattatttctaagtttatatatgtagacacatatttttctaaaaaaaaataaaaatatatataaaaatatttttagttatatatataaatactataaaatcctatgagatattatatggtaatttttaaaaatactaaaaaaattaatcaattataagtatatatttatatatatatatttatagaacagaaaagaaatctaacctcaacacagatcttaatagtgaggtgtctcagctaacaaaaaaaatattattacaatacataaaatttattatatatatataaatatatagtaaataagcatgtgaaaactcacatggatagagacaaactcatcttacactaactgaaaaaaccaccatctgctatcaaaaaatatcacagtgtgccactgccatcaaagacgaagagattgaaagggataagaagagaaggggcgagagagttctagaagaagagaagagatgagagtgaaaatgagaagaaatgaagtctgaaggaaaagatgtgatttttgttttttctatataccaacttattaccggcgggactctgctggtataagtgtctccgccggtaataagtataaaaataataaattaatatttattacagcggagtccgccggtataagtccgctgctaatgataaattaaaaataaag

SEQ ID NO: 401390 - DNA, 537 bp, Cannabis indica
ttatatgtaccttgtataaatgaccctgccaaaagaatatttgagatacacaagcagatggacccactcataataatgtggggagctatagactccactaacaaaaatattactttttaagaaatcaaatgtaaattttttattttaataattatagaccaaaataatataaaagccccacaaaattaaataaatttagtaatagtgattataatgtaggtataaatattttttttatgataaataaaccccgcagagtaaaaattctttttctgtatatgtgcttcaagtatatagatatgcaaattctcctattgtaaatatatgtgtacgtgtcatatgaaggattaagaaattttgtaaaaatttagtgacaaacatgttagacttttatttgggcttacattatattttattggttttattaaaacttgggttgattggatagttctttgctgtgttagcccatgttgttggtgatcaattgttaatgggcttagcatctgtgagtaaagtctaggtgaagcagaagtgtgg

SEQ ID NO: 401391 - DNA, 522 bp, Cannabis indica
ccacttctagcctttcttttttgatcattggttcggttactgggtctgtcaagccttctcgaggcctgagacaaggggatcctctctcaccttatagcatatttaaaccaataaaaaaaacttaaaactaaaaaaaaaaccatgaaaattgtcttaagtaaaaggtaaggatatgcataaagtcatctaatacaattacaatcgatcgatccaattccaactgatccaatagaatcggatctccaatcataattggatcgaatcgaatgtaaattttgaaaatccaatccaatcggatcggataggttgttggatgggacatccgatccaaaggataaccgaccaaaccgatccaattatcatctaatagtcattcaattatatttagatattttttaaaatatatttataattttatatatttaatatattttatttaaaaaaatatattaattgatttaatatacatttaacacataagattaaagaaaaaaaccttagatctaaaatattaattctcat

SEQ ID NO: 401392 - DNA, 534 bp, Cannabis indica
tctagctctgctggtcatggataggactgtacgtcactacaccaaaaatgacactaataaattttatatattactttttatattataaatgattttagtgacattttaaaattgttactaaaataatcaaaacaaatctaataagtttgccaaacaattgaaacaccacttaatatctgaaatgagaaggattgcaatcacaaaataaatcaaagaaatatattactgtctaattttcaaaatcagctatgcgagtaaactcgtgcagaagttgctagtatctttcttatgctatatcagtggaataaaacagagaggtccttaaccttaaacatatatacattagagttgtacatcagtcagtgtggttagtttttactacatattttccaacccaatgtaaagaatgggttacaaaagtctaagtgcaacccacccaaataaagaaaaaaaatgtgtaaaccaaccaaacttttaatttttttttttatataaattcagctcaattatcgtccttctcttgatggacaacaa

SEQ ID NO: 401393 - DNA, 579 bp, Cannabis indica
aaactttcctatacatgacaattatcctaattaatattattaaattgtgtaattactaatgtatagaaagacttgatatccaaacacataactcccttaatatatctttcatttttaaaagaaaaaaaatgatagatttaattacatggtttttttttctctaccaaattgttgcttatactctaataacttcataatctttaatatacgttaagattttagaatgagcaagaatatagtggaatgcaatttaaagattaagatttgtatttggttagacagaataaaaatacatgaataataatcagaatgagtagaaagacaataaaatcgaatttataatgcataaaaaaaattaataattatttttattttatatttagttgtaagtttaattttttatttcggtattgtattttaattttactttgttataataaataatgtcatataatttaattaaataaataatgttatttttaaaaaaatatttaatgtatatttcaattttttttattaaaaaaaaaagaaaaataaatgaaaacagagtatatagtgtagaaagagagattaaattca

SEQ ID NO: 401394 - DNA, 515 bp, Cannabis indica
gattgggtgggtgccagtgcatccactcaatggtgcactcattgtcaatcttggagatttgatgcaaattctatctaatggacaatttaagagtgtgttgcattgtgcagttgtgaacaatacgcatcatcgagtttcagtggcaaatttctatggcccatcaaatgatgtgaaactatcgccgttgattcaacttggtaatattgatcatcttcctttgtatcgttctgtgacatggaaagaatatcttgagattaaggcaaaacacaataccaaggcacttgagtttatcaagaattgaacttgttgttacatataactttattttgatctcacaaaaaagttctcatctctttgatctttctctcatgttttttaaccttaataataataataataaaatttcattaatgaactgcttctcccattaattttgagatggaaacctcattcatctcaataaaaaaaaaaaaaaaaaaaaaaaagtcacaaaaaaatccaaaaaaaaattgatc

SEQ ID NO: 401395 - DNA, 591 bp, Cannabis indica
atattttaatttaataaatgatagtaaaaatcgttagttacttatacattatacaaattattactattagtgataattttttagtcgcaagataattattttgtgactaaatatgacttttagccacaacaaaatattacttgtaactaaaaataatatttagttgtaacttgtgattaataaattataatttttgtaactaatatatacctttagtcacgaattttttagtcacaatataaaaataataatttaaaattaatcacaattttttttaattttaattataaattttattgtgacaaaaaataagattttttatagtaataatacgtcacaatttttttttatatatatacgaataaaatgaaagttttacaattataccttataatatttaaatggctatttatgacgttacacgtcagccaaataatgccgtatgaggaaattatacacccaattcaattaatacatatcatcacacctcactatccctaaaataaaaaggcaaacatttagttgcttacaatatttgaaagaaaaaaacttaaaaattgttttagagacataaaaataaaatataccaaa

SEQ ID NO: 401396 - DNA, 1005 bp, Cannabis indica
ggggatatatttatctttcaaaataacacaccattaaattaaaggattatatttgtctttacaaatataccccattaagggctcgtttggaatgtcgtattaagtcgtattgtattgtattgtattattttaaattggattatatatcatatttttaaataatattatgttaaacttaaatttatactaaaatattatatatttaggtgtccacaaaagttaatacagtatatatatagttttacataaaaatattgcataaaatataatacaatataatacggtgtaacaaacgaactctaagagatttttataataataacataaaattttgtctttacaaacatcatcccatgtctttacaaaataaattgtttgtcatcaaattagatgataagggtaaaatagtcaaaatttaatatagactttgtcataaaatttgataacaagggtaaatattaaaatattatatatttaggtgcccatatatagttttacatgaaaatattatataaaatacaattcaatataatattatacaatagaatacggtgtaatacggcgtaacaaacgaaccctaagagatttttataataataagataaaattttgtctttgcaaacatcatcccatgtctttacaaaataaattgtttgtcatcaaattagatgataagggtaaaatagtaaaaatttaatataaactttgttataaaattagataacaagggtaaaatagtccaaatttaatatagacaatgatagaatacttttaatatagtaagatatgtaatttaatatccttacaaaaaaaaaatccacatatatatgtaatttaatatgggccattagatgagttttatctaaaggccgtgtaaaatagtatgtctataaaaatttctcatatatatttatttaaggaggaaattgtattgtatatctattttactttatttgttttaacttttacttttatttttatattctttaagatatacctactttt

SEQ ID NO: 401397 - DNA, 583 bp, Cannabis indica
catagccaaaatgattaccaaagaattgtcatagataaggaatcaatcttaataaaagaacaaaatacaagtagagtagaaaggacaatcatacgaaatatccacctagtagctttgtgaaaaaatggacaatcactcatggaagttactgaaagagttcaacaaatacaactattcatttggtgcaaaaaggtaaatgcccaaaagtgagtgactttcgaccaattgcttgttgcaatgttttatataaaatgactaaaaaaataatgatatgctcaagattgggaattatccttctctctctaattgtttctaattaataggaatttgtgcacggtaggtttatagctcataatatagtgatttgtcaaatttagttcgtcactatggtcggaagaaatcaaggccaaattgtatgatcaaagttgattagagaaaaacttatgacccagtggagtggaagttcatagaggagatgtactggaagctctttattttctaaagttcatagtgttgggttttatgccctaaataaaactccattttaatataatccattttatttaacatcaataaagaaaca

SEQ ID NO: 401398 - DNA, 1240 bp, Cannabis indica
gatctctctatatataagggttatattagaaaaaattttgacaaaatttagagtttaattagagaattaattactttcaaaatatattttatatattacaacatatatttttaaaaaaataataatagtgatggatacattcttaatttgtagtaagaagagtttggttataatatagtgtacaaattattagaaatatatatatatatatatcattaatcatttttaaaacaaaaggttgtggtgaaattaaagttttaatatatatattagatgtaatttttatttttaaatatatataataaaatttatttttttatataaaatatttacataatttttatttttaaatatataataatattataaaattaataaaaaatattctcttaagtaattggaatattctgttaaaattaacgtagaaaataaaaaaaataatgttaaactaagaattccattacataactagataactagattttatatagaatagataaatctattaatctttatttttatttgtcacgaaattagtttttttgtcacattaatctatatctatatatttatataatggaaagaaaaaaaataaattaggtggcattttatatggttttctttctatttttactaatttgtgaggttttatcattttgtgaagaaaatttataataaatgttttagaaataatttcacattgcttaggaactattttttatgatgtcctatatagtataaataagtctattaatctttgttgttatttgtcacaaaattaatttttttttatcacatataatggttgcataaaacatttttattattcaatctaatattacttaattagttatagtttttttatttattattttattaaaattttagtattaagacaataatatattataaaataataatagtaaaaaaaaaataactattcacaacatgattatttaacatagtaaaaaaaatcacatgtttactttagattggaggtgagtatcataaatattatttttatttttaatatttttatatattaaaagtgtctatctaacggcaattcttggtttaacgattcttttttttatttagccttacacgattaacttaacagactgttaacgttaaacgttaacaaataaataaacccaataattaaacccaaaaaattaaaaaatctttttttaaattaaaaaaaatatcttacccacgacttcattcaaatttcaaaaaa

SEQ ID NO: 401399 - DNA, 575 bp, Cannabis indica
gtttgtagctttttcgataatgtattaggtagtgtaaattggaggatgacaagtttactagaagtttttatacatggaacaataagcagcaggggactgataatatattctaaaatcaattgagtcatggcaaaataatagtggcttgattggtgttatccaaaattttgtccacctaacgtggcatgtccacgtaagccaaagatagagtacaggtggaatacagccttgccaatagcaagacaggatctccatacaaggtatggcaaaactatcaagcagcaattgaaaagagtgaagtgagccatcaaggagctataccaccatccctggctggccaagagaagcctataggctagccagggtgaccttgtatggctggccagggtctgggcacaagttaagtggccaaaaggtgactttcagaccaagggagcctccgtttgtctaagggcacctgacctctgcaaaggaaaggtgtacaaagttgtcctccacttcccaaaggttagcctccacatcttaaggctggcctcctcttggtaaagatgaaagaacatgacctgcaggatcct

SEQ ID NO: 401400 - DNA, 961 bp, Cannabis indica
tgacactactacaaaatactagtttttaatgtcggtagaaaacgtaggtcaacataaataattacacttttgatcactccaagttttttaagtgtcggctaaccgacgcctataagtcgtcattagcgtcggttcatacaccaagactcatacaaatataacaccgacagttaaataaattagttgagtcttaatagcgtcagcttagaaccgataatatgttaccttattatgactctcccagattttgaagtttccaaaatttttattctgaagaatagagtagtaacatcatatataattgggggctctctttacatcctgaattatgtaggcaaatttggtagaaaacttctcattattgtcctttatctatttccactcatcagcagcaccacaacccctagtgttcctttcatacaaaaggtaacagtccaatatatatacatccatagttttagtaattattattacttttgtcaaaaaatgcacaaaatgtatttaccggattgtgtatatatttagttgagatattaatttgtatattaaacattttattacatgcatttgtagtgttcgtttgtttcaatgttaaatttactcgtgatttaattactttttgttgcaaataaaagttgcacatacgtacgtcgcaacagtgaaaaacaaactgtacttattagagaccaaaatattggtacggacaaaaccagaaataaaatttaaatgagacgatatgcttaaaaacatttagtaaatattatagagtagatatatataattatctcaaaataactttcagtataatacattaattctatctctttatagcaatagtgtaattaaaatatatattgttattaaataattatgcccggtccacttctctctctctctatatatctttatatattaaaagtgcctatctttatatattaatgttaaacgttaacaaataaat

SEQ ID NO: 401401 - DNA, 1245 bp, Cannabis indica
tttgtgcggtttttaagaggaatatacaatcaagggatttttaaaggggaaatttagataagagattgaaagccattgagtcttgtcttatgacaaggtgtgaagagttcgtgttttgctgctagtttttttgaagttttgatttgttttttcagtgtgttctcttgctctttcgggatatggaagatgaatatggtgatgttaggatggaggaggctcctatgggtagattggtgtttgatgatgaagatcccgaactgtccgaattcgatgatcgatggtgtctggtgggacgtttccttacaaaacgtaacatcgattttcaggcaatgcaaaacaaagtggcttctctctggcaaccaggtagaggtgtttacgtaaaagaactcagccccaatcattatattttctaattctaccatgaggtagacattgaacgtgtgattgaaggaagtccaaggacgttcgatcgtgcgcctctaatctttgtgagggttaatcatggtgagaatccacgcttactagcattggataaacttgacctttgggtccaactccatgacttgacatccaagttcatgtctgaaaaagttattaaggatgtggggaattatattggttcattcatcaagtcggatcccaataatttccaaggggtctggcggaattacttcagaattcgcgtttcaattcgggtcaacttaccacttcataggaatatgaagtcagagatgagaagtggtgcttcatgtaccgttaacttcaagtatgaggacctaccaaccttgtgctttatctgcggaatccttggccattccgaaaggttctgtgatcgtcttatcgatatccctatgcatttgatcgagaaaccatataaccttgagttgaaagcacccccgcgtagaagacaccataatattggcgcccaatggttacgtactggtccggtggccaatcctggtagttcaacttctcaggcgaatcatcaacgttccgacaatgggggtcgacagagtgcacctgttcatgcgcaaaatcagggatcaggtattcatatccctgcatttaggggattctcggctggagttttggggagtcataatgttcatgagatatctggtggtaatagtagagatttggagagattgaagggggcaattaatgttcctgctatttatagtgatcctttccagttggcagattcgaaaaaaaggaaaacagctttactggagggtcctcttgggc

SEQ ID NO: 401402 - DNA, 784 bp, Cannabis indica
taaagaacttgtcacttttgtgatagcccacatcccaatcagtcaaaaaaaaaaattgtgtacacaaaaggcagtatctgccgaaaaaaaaaaataaaaagttaatatccgagtgtcacagtataattgtaagaaaatagaaaaaagtttgtaatctatgtaaatttccctatatatatgtatataaatatactagatagatgttacctatgttaattttatttaagtttttagttttttttaatattataattttaaaattaataatattcaatgtagtgataatcattgaaattcgaaagtataatagtgatttaaatcaaaacaaaaattactattatactttgtaatagtaattaaaaaaaaagattattattcgtccaaaattattttcggaattaatgaaaatgctcatctattcaaattgaatttaaaataatatttaaaattaaactaattctaaatatcaaaatttgaaaataatttttaataaaaaaattaaccgaacaaatttattattaattgcaacactttaggtggattaattatatttaggtttaactaactaccttaccctttacgtgacaacatctaataattttttattttttttttaatttttttaaaaaagtcacccaatagtttccataaaccaagaattctattatatagacacatttgatatagaatagatatcatatgagtaatagtgtaatacctagagatggaaattggtcggttaatgtacggggaatgcaatccccgcccccatccccgctaccta

SEQ ID NO: 401403 - DNA, 610 bp, Cannabis indica
tggaatcaactctgggtacctgcccgtaagaaatatgccgaacaagacacctcatacatttgctcggacaaagtcctctaaaccgagcagtgagcaatccgtgcagcacaccaacacttagcaaattcagctttcgcatcgcgagtcatcaaagaaatccctataactttgggatcagattaacagagatatggcaagctttccaaatcccacaatcagtgtattctgtatttactatgcaatctttctacttatatcaattgtaactagaagggaaagacttcccttccaagcttataaccttataaatagtgattcatattcactgggcaaagggtcgaaacattttgtctaaaaattcatatccagagatactattgtaagagctctaagaaaaggaatcattctccttgttcttaagtcaatacaaataacgaggattaggctattaccaaactgctcggggttgaacctctataaaattcttatgtctttatttgctttactatatttcactcgtattaaactacttgtcgcttacaaaattagactcattttcgttggccaaaagtgaggtcaatattttggtgctttcattgagagctaaact

SEQ ID NO: 401404 - DNA, 532 bp, Cannabis indica
cctatgcctagggacgggcctgtggatttattcgttcctgatctcaataatttggtagcgttgtgggtatagatcttggataatctttgttggtaggtaatgatttagattgagagaacacttaaaggaaataacaagaaaaataatagtgatctacattttttttttaattttatttactcattaaaaaaagttatagaaatgatagatgatgtcgattggtgaggaataaataaacaaaattgacatgtgggtgtgtaaatttatgaaagataaaaatacattgctagctaaaattaataaagttataaattaaaaagtaaaatgacatataaacatgtcaacttataaaaaataggagggtatagtacacctaagcattttctattagttttataatagtttttatattattattattgttagattttaaacttgtttgtatataattttataatttcttaataaattattaaataaaaattaaatatttaggtgtaatgattttaaattaaggttataagtgtaataa

SEQ ID NO: 401405 - DNA, 1021 bp, Cannabis indica
catcaaatggaatattaagaactaggaatttacacttgccctacgtgtaaatagaacaataaaaaataatacttatacaactgttaaaaaacgtataagatattcaaacaaatcaaatacataaacataaacaaaaataagacactgttataaataaaattgaatatagagaaagacataggagaagagagaacacaaagagaagaagaaaatgagatattgaatgagatttttctcagtagtttatttcaatggggtgaactcctatttatacaaaaatatgactaaaataatgaaaaactaaatcaatgaaataaaggaaaatacaatagtattttatggtataattgattttggtaacatggacatccatatatataatattttataacattctctttggatatctataataactgtctaattaaaaactttgccaaaaaatctaataggataagaacttggccaagggaaaaagaatgcagtatgaattcattcttccttatttaggaaattgtggagatcttctaatcaacaaattctaattttgtgaaccatcttctcgaatattgatgttggtaatgactttgtaaataagtctacaagattgacacttgattgaatatgttagacaccaatatgcattctcttgaaatgtattgagaagaatttggtgaaatatgttttaaatatatctccttcaatgtactctcttttaagttaaatgatacaagcagtattatcttcataaagaactactggtgttgatacttttttattgagtgtagtccatatgtttctcaattatgttatgtcataatttcactcccgcgcattctctactcgctacataaagatgttaacatgatttaaagctacctcgttaaaaaccttgtcaagaaaattcaatgagacaaaacttgagctaaggaaaaaagagtgcagtatatattttatagaataattagcttttttagtccctgtacttatgacactatactatgatgccccttaatttata

SEQ ID NO: 401406 - DNA, 566 bp, Cannabis indica
cctaaaacgaaaatcttaactctacaaaaccctacgcctccgcaacatcgccctcctctctcgccgtcttcctccctctctcgatctccctttcttctcgtttctctcgtccatcgatctccacccacccctcctcccgtcggtatcccttcgtcgcatacatcggaccaccaccaccacccgtaggtgtccttctcatctccgtctcatacgtcggaccaccaccacctcctagccgtctccctctctcttcaagctcggtataaatatatttatttatttattatatatatttattttgttatcgtataaatttaatgtgtttaaagttagtttttattgtaatagaattaattcgttgttttattttaattcatataaatttaatgtgtttaattcgttgttttattttaatttaggtaaaattataaaattaatgcaggaaaaaatacgggaaatacaaatttttatgtcattaatggcagaataatttgtatatatatatttttacattcccgatggtttaaaatcgtcgcctataccctgttataggcgacagttttaaa

SEQ ID NO: 401407 - DNA, 658 bp, Cannabis indica
ccttttttttgtttttttttttttttttttttttgtcatgtgcattggttcttataagaaatcaaattttaaggtacttaagttccaacaaaattgtaacaccctaggaatgtttgacttttcttatttgtatagatgagaaaagaattcatttttatagtataatttgggtctttcttcaaacattagtgatgagtgagatatgtcaaacttcgatggcttggtggttaaatatttgtttaacgtgtgtaattattaaaataatttgtagcataaatatttaagtttaagaaaagaaaaataaatacttaagtttaattttttgtgataataatacttaaattatatttttgaaactctataagtatttgactattaaatgttgttattatccacatgtcatttttattggtatatttaaattaagttttttttttttaaaaaaagtaatgatttggaccaatcaaaaattgtcatgtggtaatttacttaacacttaagagttaagtacctacaaaaattttagaattgtaacttagatattattaattaccattaaaaattaaacttaagtagtatttatttacaactgagagttaaacttaaatatttatgccgtaaattattctaattattctttttttctttctttaaaaag

SEQ ID NO: 401408 - DNA, 592 bp, Cannabis indica
caaattctataggcctacatcgatagtagtcttgagagaaggaacatcatggaccgttaaaggagacttaccgaatccagataagctaggcatcaagagccccagtattgggaatagggagtagaagcttaggccgagaaggcgcccgttccttacccgcttcaatccggagggttctcccagcagcagcttgagccttaatgtaggctaactcctgttccctcctaaagaggtacttctggtaccggtcctcagctgaggcaatgatgtccgcccagagtgccttttcagtgtccggggtgcggatgttggggcagaggaccttagagaggttgaagtcgtccatagattggctctccgtgataagcttggccttttggaagttcaccgttgtgaccaagtctcccacgttaaggccatttttgtcataggtggagaagatcttagcatgctacaggaagatttggtaggagcagtgcgatgcattggagggatcctgacccactctgtgagcagttatgggcggtccacggcttgaaagccggaagagaagaagaaacggtggcggtactccttaacatttttttgaaaa

SEQ ID NO: 401409 - DNA, 525 bp, Cannabis indica
ctataacccaatgatggtcttatatgtttaaagttatatacaatttttttccgtctttccaattctcaccccgtaaatgaggcgattcgcctgaaatgtatcgacttaactcattatgaatcatgtcaaggttagattttaagttgatggtcaccaattgaggaaaattttcatctaaaatgattgcattttgtgcgatcacatcttgatacaaatgttttcgccttctaatcccaaacagagcatcgtcaaacctcttttgttttccagaatcaatatttctcaaaggatcaaattggatatgatcacctcgatgagctttagtataatgaaaacggtccgtatatggtggctctaagtagtgtgaacattttagtaccctctttggattttcttgcacaacttgataagattcaccttcaacatcatcctgtagaggttgctcttcatagtaaggagtagattgctcttcaacatgagtgtgttgcctttcagaatgggaagaatgttcctcttcaacatgag

SEQ ID NO: 401410 - DNA, 726 bp, Cannabis indica
agtgacgacgcaaggcatgttgggacatgtgtatgtagcatgccaggcgtgtcactgtatgttaaaaaaaagggcttactagatttttttaattaaatcaaaggcaagccaaattttaatttattaccctttttaattttatttatttaggtttggtatataaaaagaaaaggaatgaaaccctaaagcccaaatcacttttcatcttctaagtcacgagagctctctctactctctatccctcaccgcggcagccttctccagccattctccagccgtccatgcctaagaaaaacctcaagcttgctttctctttctcgtccctctcccctgatttatctctctctcgctcgctccgttctccagccgttctccaccacaatgagacacttttgacgacttggccattgccaccccgtgcgatcctcctccatttctgtcgttctctctcgacagttcaaggtggcaccgaagttatttcccggtctcctccatttctcgttcttgttctccatttctctgtatctttatacctctctctctctgtctcatttatgcaggtggctatgttaaagcaactggtcttggctgttttgcatttgatagattttgtatttgaaggggagttctaggttcgatgactggggttaggccttcggtgtttgatggaaaaaattgattggaagttttttggttttttctatggatttacttagtagctgttcc

SEQ ID NO: 401411 - DNA, 900 bp, Cannabis indica
gtttatgcaacgtcaaggagctaattcaagagtgcattttgatcttgagattaagaagacctatagacagaatagaaggaacaagaggttagaaagcgctacattgagggctaaaccagaaatagtcatgaatgacaacgccaacaatggaaataacgaaaaataatgggggtgcattagaagaccaggcaagcaatcgtaatccacctgacagtattgtgagggactatgttctcccaacattgacggtggttcagtcatgtataagaccacccgccatagaagccaacaattttaatataaagccagccatactccaaatgatgaaatcttcagtccagtttggtagactgccctcagaagatctaaacctgcatttatcaaacttcgcgaagttatgtcaaatattcaaagtaaacgaagttagtgataatgctatctgcctaagactatttccattctcgctaagggagcgagctaagagttggttggtgtccttgttataggttatttttagtattaattttaagttaattttagcacctttttctatttagtttaaatcatgtttggcgcatttttatgcttttatcttttaattttgcagatttaaaatagatgaagagttggaaaatatcaatagaaaaaggataaaatatcgcataaaaatatcccagtggaaaatatcagaatcagattcagaaaaaggataaaacatgtggaatttggagcagaggagcacacgggccgccgcatggtattagcattccacggcccgcctacatgaagaaaatctaaggaaggatctcacttgaccacacaggccgcggcatggatttagcatgtcgcggcccgcctctttgtcaacagagaaaaatatctggcatgaggtttcccaaa

SEQ ID NO: 401412 - DNA, 808 bp, Cannabis indica
ttggctcatttaaaagggagctcataattttggaggagtattaaaaattagagacctagaaacaaaggagagaacctcaagagaggcttgtggcgattcgaatcgatttctccaaccatttctttcttctttcttaatttttctatattattttctgttttaaatttgattgtaaatttgattatagagattatgaactaaacttctatttggggagatgatgaatgttgattgatattatttcttaagttaatgataattgctatgttttctttcttgattgtgaatttatctatatttgtgcttatttctatgtttgagattgatcacctttggcatgttttatgatcccaattcaaaatttgaaaagtgagttttggaaattcttaaattgaataaacttggtttggattatgtgaaatgaaagtatttgcatagcctttgtgacatttagattattgtttaatgcagattatatgttagtctatctcagagatgattagataacatatgatttaggacctaaaaaatcataaaagagttaagttaatttttataatttgtcattcacattaagaaagaggaatagtaattagcattagcaattaaatatttaaagcaacaggagtcttttccctaatttctcatccttgattgaacacttttattgcttaattatattttctggttattctttatttttatttttataaaaattattggttaccaaatagaaatacaagtccaatttagtggtattcatctcaattccctgtgggatcaacctcacatgtatgagtactacttg

SEQ ID NO: 401413 - DNA, 522 bp, Cannabis indica
atacattttagttcccaccactggtatattccaactttcagcaactagcttttggtattggggggagctcgaccacattctgaaatatttaaaccgtttcctaccacttggaagtgaaggatataccggcaatattggaggagtgtgatcgaagaggccctcattcgagaaaattgcttcagcaacagggtactgattcagccaacttatattcgccataactctatctatcttggaatctattctatcatctccttgttgtctgttattccaagtaaagaaactccctccaaatttaacatcctctaattggcaccttattgtacattcacagaaggttgtcgcattaaaatgagctcgcttacctattctttcccctttctctagaatatcattaaaatcaccaagcactacccacgggtcatttgttttcaatccctctaattctttccatagaagtctcctatcctcttccttcttaaaatcataaataaaagaaacaaggaacttattcctattatc

SEQ ID NO: 401414 - DNA, 653 bp, Cannabis indica
aaagatattgtttatatattgttttcacattatggatatatagtataatgttacagtaatataaaaacaatgttattttataaagaaacattaatccttaaaaatataagaaaaaaactgtaaaatgtggtatataatttcaaaatcaataaaaaaaaatatgtgtatatttgaaaagggaaatctttttgaaacttctaagcgagatgggccataagctcgcttatgcttaaagtcgggcctgtatccacatttatatattttctcacaaagagaaaattcaaattaaagttagaatcttttttataagagttattgtagaaattttaaatgcatttaattaaaatgtgaatggtgttttatatatcaatttgtacatatcttgccactccttttttggaatataatccttctaaaataatatttttttaactttgtaatatcaaaattacagtagatcatgagagagaagaatattctcattgcaaactatatggatattaataatatgctttaaaaaggcatattcttaaaataaataataataaaagaagcatataacatatggtaaaaaaagcaaatctaaaaagaaaaagaaaaacactaaattccaaaaaaaaaaaaaacgaaaaagttaagaacatagattacaa

SEQ ID NO: 401415 - DNA, 723 bp, Cannabis indica
tgttcaatgagtcatacgatagatgactctctcaaaacgcaatatcgttttgatcatgtccaataaccctcataaccctctagacctaggtcatttacactcacacagaccaatcgaaaccttagcagagcttcgagtttcatccaagaaactcgaaggctgctatcaacccaaaaaaactagcttaattcctttctagaataccaaacagaagcctagatctatacacacaaatataaagcaattagtaaaagcaagaaatgggagagattgtaccagattttatagaagttctccaaaatatttcgatgggtactttctctttcgagctcgcctaaaaaataactcaatttcactataagatcttcaagatcaatgagttacaagattagattccaaatcacatgattttatttattttttattttttttttaagaaaaatagttttattcaattgaaacattattaacttaaaaatgtgtgccactaatataaagattagaggtgcacattgggtgaattttaccgagtttcagatgcatagaattagaaacctgaactcacacgtttgtgtgactagatttttgggtttcaatgcgggtgggtcaggttcgagttaaactgggtccaggttggttttgaccgggttcaaattgggctgccctttaattttttgaaaaatattatttttatatattttttcattaaaaaacaaaaaaaaa

SEQ ID NO: 401416 - DNA, 516 bp, Cannabis indica
agcaacaagaggctaattacaagaaaacgccaaagaaccaaaacagcctagaaaggaggctaaaaagaagtcgcctagtcttcatctcttgtcttgcttttgtttgttcaacactacctaatttgtcttctctattaaaattaactaggcaatatagtcgctgtgaagatttaattttttttaatattataataaataattacttaaaatataatataatatataaaaagattataaatatattatcttattttatatactaaaaattaaatgcacaattttattaattattatttattaagaaatttgaaatttattatatgtaatatttactttgttaaaagaaattatttttataaaaataaataaatagggttgcgtagaaaaaaattatagtgtttcctataatgcattattttcatatctcgatcattcaaaactattattattatttttatctcacttgttgtcttattgtatctcacttattttcatcaccgtatctcactcgttgtc

SEQ ID NO: 401417 - DNA, 1243 bp, Cannabis indica
ttcatttattgattgaaacaatactctaaatcttggaatatcacatttaataagactattaaagagtatagcttcgaacaaaataaagacgaagcatatatatataaatacattaaaggtaatgtagtggtattcttaattctttatgttgatgtcattctatttattagaaataatgtagaaatgttattaaatgtaaagaagtggttagccgacaaattccaaataaagaatttaggagaagtaagatatgttctcgggatcaaaattcatagagatagaaagcgaagaacattagcactttctcaagcaacttatattgataagatactagaaagattctcaatagagaattccaataaaggacggttacagtccagacatagagttattatatataaggatcaatgtccaaatactcctcaagaggaaggtgacatgagaaagtattcttatgcatcagcagttgggagcttgatgcatgcaatgttgtgtacaaggcctgacatatgctacgatgtagggattattagtcgttatcaatctaatccagatttggaacactggattgttgtaaagcacattgtcaagtatttttggagaatgagagatctcatgcttgtatattctggtggggagttagatcctactggatatactgattcttattttaaatcaaacaaagatagtcgaagatcgacatctgggtgagtatttacatttggttaaggagctgtagtctagagaagtattaagcaagccagtattgcagattcaactatggaagctaaatatatagcagcttgtgaagcagctaaaaaaataatttggttgaagaaattctacactgctttagaagtggttctaaaagtaaaaaaactactagtgctttactgtgacaatagtggagcgatggctgactctaaggaaccaatgagccacaacaggggcaagaacattgagaggaagtaccatctacttaaaaatataatagagaggtgatgtgacaatcttgaagatcatatcgaaatataacctgatggattcattcacaaaaccagcaaaatcttttatgggtaacataactaatatgattgtgtgactaagggtgtcacgccctaaagaaaggcacattacgattaaccattaaacataacctaatcccgctaagccgagattattaggaataagagcagaaatttaaactttaaatcaagtgcaaagtgaaaatataacttgtaac

SEQ ID NO: 401418 - DNA, 553 bp, Cannabis indica
gtatctgttctaatggagtccgtgtctgctgtgttagacgatctattagaggtcgtttctctagtggtggtggttgtgttaaaggagttggtggcctttgtaattgacctccacttgttgtttcatgataagcctatgtatacaactaattaaattaacacttagtgtataagaaataaacactaataataagtataacataatgatataagtatgtgatatgaaaaattacttgttgatgtacatcattagttataattactaaatgacgaggctaagggatcggtgtcccaatactttgatcaacataaaggatgtccaaactaggacatggaataggggcaagaatcattctcttcaaaactttaataaccatgactgtcatgtagtttgagtttggtatccctttgtaaatgactataccagacgcaacaatattagcctcattaccaatagctaattgacaacttggcccctatagaaaagataaatagatatataattagaaaaatgaaaatataacataaaagtgtaattgaagaagcagctttgt

SEQ ID NO: 401419 - DNA, 661 bp, Cannabis indica
attctttctttttcttttttttttttttttttttgaggaaaaaactctactttcattaattaagatagttctttaataacataagagaagatagtagaggggatattctctaaccaagtacaatcattatccaacactaaagcttgtttcgccaaaccatgagcagcttggttagcaaaataatgctacgccaatagtagctttattataaagaaaccaataaagaatagagaagcactactttttattttctaaatactgtatattttattagtatatttatattattttattcttttatattatttaaataatatagagatagaaaatataaaaattgatgatggtttaatataacactttgaggtaaaataataaaaattgaggttttattaatgttttaaaatatatagcatagaaatttataggagtgcttttagccacgaaagttcttttagtgcctccttaatcttaagagtaatttgcggcataacctctttaagtggccaagtttttgcaactaaccccaaattttaaaattttggtggtaaaacctcctaaactcaagttctgttaacacttagccatttctatccatttttagctgttaactgccacggtggaatattcacgtgtacacagtgtacacgtggcacaattt

SEQ ID NO: 401420 - DNA, 1016 bp, Cannabis indica
ttccctgacccattcccattcccgtttgcattcgtattcccattcccattccccggcccattcccattcctattcccattcccattcctatacccattcccattctgattccccagccgattcccattgccattgccattcccattcccattcccattccccgacccattcccatttcaatctcgttcccattcccattcctggcccattcccattcctattcccattcccaatccccattctcattcccattccccaacccatgcccattgccattctaattctcattcctacttccattcccaatctccattcccattccccgacccatgcccattgccattccaattcccattccccagcctattcccataacgattcccaaaaccctaaaaccccaaatgccaaaactgcaaaaacccaaaaccccaaaccccaaaacccaaaacccaaatcccataccctaacccctaaaccctaaaacccctaaaccctaaaaccttaaaactcgaaaccccaaaacgccaaacatcaaaccctaaaccccaaaccctaatcccaaaaaacagctatcctaaaaaccccaaaccctaaaaccccaaacccaaaaaccccaaaccctaaaatccaaacacaaaaccccagacttaaaacgtcaaaccccaaatactaggtccaagatcctaaactctagaccctagtcataaaaccccaaaccctaaacctcaaagccaaaaaccccaaaagccaatgacccttaacccaaaaccccaaacccctaatcccaaaccccatacctcgaaccccgaaaccctaaatcccaaacctaaaaacccaaaactccaaactcaaaaccccaaacacctaatgtaaaacaacttaaccccaaacccaaaaaccccaaaccacaaaccccaaatcgtaaatctaaaaccctcaaacgtcaaacccaaaccccaaatcgtaaaaccccaaacccaaaccccaatagaaaagtgatagacaatggtcttggc

SEQ ID NO: 401421 - DNA, 731 bp, Cannabis indica
ccgggtctggtcgaagtttaaaatattgaattaaagtaaaaaaaaaactatttaaaaatatattgaaagtgactttttttattttaaaatttttattcttaattaaaaaattgaaaaagtgaaaacagttttgtagaacatgtttttgaaaaaatattttcacttttttaattttaaaaacagaaaactgattaaaaaaatattatcaaacaccacctaagttaaaatatcttaaaattttagctcataaatagcaatatactacaactctatatttagccaagatttctctcttagctagatattttttatttcttctttttctttcacatcatatatatttataaatacataaaataaattaaatgaataaaataatatattaaaaaatataatagaaaaagtagaatagttgatgtataatgtcatataaaaattgaaggtaaaatagataaagtaaaatttcggtaatgtattttattagataaaataaaaaagctactcgaaggctcttaaattgtattatattggtgtcttgtactctttatataagggaaatttgattttctatacttagaaaatcttaaaaaaatttccctaaaccaaaaatttaaaccttaaaaaaactatacctatttttttcaaaacccaaaaaaaccctcaaactctcacagcatctctctttctctctctatctcagcatcccacaccccaggtccgatggtcggacc

SEQ ID NO: 401422 - DNA, 677 bp, Cannabis indica
aatagtatatggggtaattttccaatttttaattacaaatatacacttataaagttttaaaattatataaatacactttgctcactaaaaaataaaaaataaaacaactaaaaataacgagaaatcaaactcacgacaattataaatcaactataaataaactataaaacaacttaaaacaatcagaaaaaaaaaatctcataataagtaaaatacaactataaataaattatataaaagaacaatttattattttgactgcagagaaaattttttaaataagaaaatttcaataaataaaaataaattttttctgttaatgttttttgtaatttttataaatttttgatctattatataaattaattttataataattatttgatcaaagctcaaatgtaaggatgtcaagctagcgaatttcaattattactttcattattagaataaatactcgtttgcaatcttgtattttctcaaaatacatatacacgactttaactattacaaaaatggttttttatgatgtttttaaatagtcgtttaaaatattcctgtcggtttctataaccgtcgcctatacgaccatcgtaaaatgggcaaaataggcgacggttataaactgtcgctaatgttgacttcctgacagtttaaaactgtcgcctataccatgttat

SEQ ID NO: 401423 - DNA, 581 bp, Cannabis indica
tttgttggaaacttagggcatgagtgaaatatcgacgtaatagcttttaagtcatacaaagttggtcggcctagcatgacgttaaaggcgaacggaacatccaataccaaaaattgtgccattatagttatacttgtcggagcttgaccgacagtgaggggtaagccaattttccctagaggtgcgactccttggtaggagaaaccatacaagggctggagacagggggttaaatctttgagttggagtcccattttcatacgtggtcttgaataagatgttggaagaggctccattgtctatcatggttcgggccaccatcttgttggctatctggacttccacgaccaacgtgttgttgtcaggaaatctgatcttgacagcatcttcatcattaaatgttatggtgggctcccctacccatgggaccttcgacttccttttttctacggccaggactacttcttcttgctcgtgctgtactatttagagatacctctgccgggctttgcctaaatctctagctatgtgcggacctccaataatgacttgcagatgtccatctactggtggtggtagca

SEQ ID NO: 401424 - DNA, 525 bp, Cannabis indica
attttgtatcaagtcatctccctattttagttattgtatcttttctaatgttagtaggtattgtaattatgttgcccataatgtggctaagtgagccttctcctaccaactgtttggctctattccgatctctcctctttaccgaagaatctattttgtaatgactgcgaggtctaattgttttatttgattaatgaatggtcacacttattttaaaaaaaaaaaaaacaactatttttaaataaatacaattttagttacatataaagtgttatttttataataattattattaggtatctatactcaataatataaatttatttcaatattaaaatctaattacattaaatgagattcatttaaaatttttgttctaattttaaataattaataattttatatttattcatatttagtcaagttaattattatagctacttataaggggtataatggagacatcatttataaaaataaatatatcttaaagaatatagaaataatgttgtgatcgtgtttatg

SEQ ID NO: 401425 - DNA, 530 bp, Cannabis indica
tattattttgtgttaatttcaattactttttaattttatttttataatgtttttaagtaatgtataatttttttaataaatttcacatattttttttagggaaattaatctatatactatttttttattttttttttccaaatttactgtttaggtttataaagtgatttctccggtggtttctatgtaggttgctatacgattttcggttgtgatttaggttgttccgttaattacaatagggatttctatatagaattccgtaaaaatgtaaaaaaaaataaaactattttgaagtgtaaaaataaaaaagcccctatttttattttaatttttcgttataatatttaaaatataatttatttttgtttgataagtatatttataatatatgaaatagaagaaaaatattaaaaaaattaatttaattaaaaatatttattttatgtaaagtgaatggaaatcactttatatactattatttatttatttatttttatttttacggtagttgctgcataggttgcgat

SEQ ID NO: 401426 - DNA, 832 bp, Cannabis indica
attccttttagtaattttttttttctctcctttgtgtgggatttttttttggtaaggtgtctttaatttgtttgtatttagtttactttaatttactaatttttttttttgctttctcaattaaatgataaaaggatatcattttgttttctttttttggagattaggataaagaatattaattacactctcctattataattttttaattaacttttatgcctgaaaccacattttgaaaattttcgaatatttttcatagtggtatttgttatagttacaatatcattcttgtaaaatttttaaaaaaatctcaataatttacagtacttaaaacaaagttcttgatatttcaatttacctcacgtgtttaaaaaactttatgccacatcaggtggacaaaaattaggataatggggcccatccaaatcagtttgcttgtgtgagcctatatatttgctattggacttagatgcatataggaatttctggatatataaatacactagattgttaaaataaaatatcacatattatagttttatttaggcccaattaatattggattattcaatgaataataattatttatttaaaggttaaatccttctcttttgggccttgtatgagagttaggggccaataatagtgggtacgatatactgcacacatccctccctcacatgatcaatccctattgtgaaagctcatttaccttatttaaataattatattaggctaattatattagtttaacctaatttaaaatgaattagcaacaaaattaattttgaaataaatgaaattgatttttttcattagattattttaa

SEQ ID NO: 401427 - DNA, 596 bp, Cannabis indica
tttttgctaaagagaattatgtgtatatataattaaattgagataatacatatatatattttgtgatacatgagtattggttttttttttttttaaaaaaaaaactatctattccctttttagtgttagaaataatattaaattttaaaaataatactattatatcattaattaaaaagtaagactaaaaataattttttaatatcaataactaataactatatttttaaaaaataatattatttttggaatcctttaaaaaatacaaaaattattttgtaatctttaacatcacattcaattaataattcttttttgtacaaaataacttaaattgtgtaattttaaatattactttttaaaaataattaaatattttctagcaacaaataatcaaataatattttaatttctaaaaaataatttatctataatttataaaaaaaataaagacttagaatagtcacaataaaaaaaaatctcatgtattgaggctgcaacttaagaaagtcacagtgcgaccttctatattttgtgataaagtaagttgtaagttgtgacaacattctcaacatgattttcaaattttaaatata

SEQ ID NO: 401428 - DNA, 1303 bp, Cannabis indica
acagatgaattactcaatagattttgaatctccaagaaatttctaactcttgaccgaggttttcagcaaccgattaaataatatataggaaaggctgtaggaagtttaatgcatgcgatttttacgtggttggtgtattaatgagccttagtccacgattctttgttattaatgagattatttattacagagaatgttcttggtgaatttctctcctattttctctctttgattcctctgaacccagaatcctcaacccctgcctcagtgcgtttgtggggtatttatagtattttgctggggtgatctctaggaatgaatcacttgtctttctatccaggcttaacaagggcacatattcccagcatatacaaaataggaaatatgcccatgacttggataaaatgacttagagtactcgtggatgttttttttttttcgataatctatgtttcttggccgttacattgaggtgaacaaagaagaaattttttggatcgagtttaaatttagaaaaattggtgcgttttgttaccactgtggctgacttgatcatctacatcgtagatgctctttctctggcctagattcttttactagcttgaatgggtcgtacttcccgttatttggtcaatggctcaacatcgactcctcatactctcacggttccttcgacaaacctatctattctttggtgccaattgatccaaagggagtgactgacctggttctcccccaagccatgcaaccgtcatcatcttcccgacgtgtgattaagaacagagaggtggtgctccaatcatcattgccagtcgtgcttaggtctcgagaagatggaaaatgacaactcctaggccttgttcggttaaatctagaggaattgaggtgatttggcttcccgaaattcccaaacgcacgcctgaaagctctttacctctactggtaatactgccacttgtggaagagctgttgaagataaagctgaggtggactccccttattttaagatagatcatttgaatgagaggggcccatgtgttcaaagtggattttcatttgaacttctctcatccttgctggcaaaaaatgtggagattggttttgggcccacggttggggctaaggaaatagttattgggccttccctattgggtctaaatgaatgccataatattatgtaacaccctaactagcatagacgcgttaacatgattttaaacatactgtccaactcgttgctaatcaacgaggttaatgaaaatcgtgattaactaaaattgtgctatttaattaaaacttataa

SEQ ID NO: 401429 - DNA, 489 bp, Cannabis indica
aggggcggcacaacaaagataaacaacacagcagtttctattcttccaaattgagtacattgtcgctgctatgacaatattcagcaaccgcaactgaggctgctggttcagatttttgcaccagttcaacagctccaagttagatctaggccaagagaagcagcccaaccactccatgactgcatctataacctgtttagtgaatttacagttgaaaaaaaggtgttcatgcgtctcaacttcagcttcacaaacaggacagtggacattttgaattgaaaggaaacgaccaagataatctcgggtcagcaattgggagttcaaaatctgccaaaaaacaaatctatgtttcggcactatgagtttatcccagctagctttagcatattcagccttagccacttcaatagataaattatagaaccttttggcactaaacttacctcctttgactgcttgacaaagtctagcttcatccatggtatctct

SEQ ID NO: 401430 - DNA, 561 bp, Cannabis indica
gattgaatcgaatttctgaaggagctacatcaaacgaaggtggagcaattaacgctttgaataaatgacatgccacattcaaaacattcctaaagtatttagatgtagttgaggtgagtgttgaaatcactcagccactacacaatatcattcattatgtccaatgacaaataagaacataggaagtttctcctcaattgaaagatagcgagagttcttcaataattttaccacaaaatagtttaatgatatccttatcgattctgaataaatcataaccctctccccagcctctcccttgccctagtgcaatcttgtttttgtgatatcttttgattgaaaaattatttttcattgaaacaaaagtcaaattttgttagaattttgtgtagaatccaaattttcaattaaaaatctaattgccagaataaaattaatttttaattaattaaaattagttttagataatagtagtctttgaattttgaaaattttatttctcacaaaaatagccttatggttgattttgaaattttacattattttaattataagatcaga

SEQ ID NO: 401431 - DNA, 461 bp, Cannabis indica
atatacttggcagtcactgaatatgttgtgagcattgtgctgataagagaagaaaacaatgtctagcattaagtctattgtatcaacaaacaacttattgaagcagaaggtagatatcctttaattgaaaagcttacttactgtctgatcttagccataagaaagttaaggccctatttccaagctcatcctatttgggtctataccgaccaacccttgcaccaagttttgcaaaagcccgatgcttctggatggttactcaagtggactatagagttaggtcagtatgaaataatcttttaaccccacacagtagtaaaaggacaggctttggcggacttcgtggtggaatgtataggcaaagaggatgacagttcaaaagatagcctcgagccaaataaggaatccctgccagaagaaaataaagacaaacctatctagaaattgttgggttttatgcc

SEQ ID NO: 401432 - DNA, 1570 bp, Cannabis indica
gaataaaataataaacaaattatatttatcctaattatatgtcaaaatatctcaaattaagtattattcaaatttttacaaaaatctctaggttatttagatatttaaaatactatttataaatttctaataagtaaaatgatataaaatatcatttttctaacttataatttataaagaataaaatatttaacaaaataaccaattctgaatttgaaaacattatggttagaatatctgtaaaaatctaagttaatttcaaatttattaattatttaatttatcttataagacaattttaatatattatttcaaattaaaaggataaggctatcatttaatttaaaatatgtccaatattaaaatatctgatcttattattaaataatatataaatattaaagaaattaataaatttttaaatctaaccataatttaaaaaataaaataatcaatttttaaatttaaatctcaaaatatcaaaaattaataataatctattaaaattaaatattattaatttaaaattgatatttaagttaaatatattaaaaatatatttattttaattttaggttagcaatttaaaattcaaaatttgggaaaaatccacataaacaaaatggtgtggttgcgagcaaggctgcatgtgcagccatcacaaactacatatggcctcacacaggcgcggaatgaaggatctacatgatccttgcccgagaaacctcgtcaggtgcagggtcaagaaatgggcatcgtgtctgaagacacgggcgtgacacgttcagagaagcatctttctaatgcttccgcgcgtgtgtgcctgtcttgtccgactgcctggtgcactcgatgcacccactccacagtcatggccaaaacttcaaaaattcataacttcctcaatttttgtcggaatcgagttccgtagaaaataaaattgcttaatttttcacaaggaatccaaataaaatattttcagaacgaaaataaaattattttcatgaaaaaatttcataattcgcatacattcatcaattaacacataaaccaacatgaacacatccaaatcaacacactaaccatattcatcgatttaaatccatatttcatgaaagtaaatcattaccctggttctgaggccagttgttgggaatattttactaggatctagatttactaacaagtatgttgaattaatatcctaaatatgaattctctaaaataatgaaataaaaacataagggtttaataaaatcttacatttattgcagcggaatttaatgaatcgttccgttcaagatctctagtccttgattcctttctgtcgtaaagcattatcaagatctgaatctggatctctttctctccttcgggtttggttacctctgtcttactcactttgattgagtacttgacttgctatgtgtgggcatggcactcattcactatgggttcgaataggtgaagaaccatgaaggaggttttgaaattattaaggaaggaactctctcatctagtttggttgaagagtcatgttgacaaaagttcaagtggatgagatgatagc

SEQ ID NO: 401433 - DNA, 583 bp, Cannabis indica
gacaaaaaaagcaaatctgtcttcgcttaatgttgaactcttcacctcttcaaagcacatttggagatttaccacttgtgctaattcaattttcatgtacttaggggattacattctcatatattctattgcttctatatataatatatacaaacttttatttttggatctccaaaattgtggggcctgggcatagcgccattcctatgttgttgaagtgcaccaagtagatgaacaaagagatttgagtgaaccttggctggtcttgctaggtacgacaagaattacaccactcaacaagtcaatctcaatcaaaaaaccaattgagcaatgtcctttgacctcctggcatcaacaaaacgagttgaggctgaagaaaaactttttgatcagaagcctttggacttggtagccaatcctttcccgtttaagtgtgacatcaagtagtttaccattggtataagctatattcatcataacctgtcaaaaactgaacgcgatatcaacactaggataatctcaaagctttacttctcaacagctaaaggtgggggtggataggatccaaaccaatccaattgca

SEQ ID NO: 401434 - DNA, 791 bp, Cannabis indica
ttgattaggaacttatgatgaatactgctctaggtttggagttttaatttcatgttgttgaatctgaatttctatgcatgtggattgaaattttaagcttaataatttgtggtttaacttcctttttatggttgtttaattgtataagaggttatgttggattgaagcatgttttggttgaaatagatgagtttagggggctgaaattcattgtaaaatactgaattttatgttgttggtttttggtgttgttggagagtaaattaggtgtaatttctctctaattactttgtttatgctaggtaaaagtttggtatgattgtgggttgatataacatgaaaaattagtatttttgaatgcattttttgtggctggaaactgggtttcctggggttttaaaccagtagccgcgaccattttatggcagcatgttatgtttttttttttttgagtttttgttttggtcataacttttgactcgggactccgttggggatgttctttatatccttcgaaagctctttccgagctatatgtgaatatttggaatttaaatgccagttttataatttgtggaaatgaatttaagggttaaccctatacttgtgtactccgggtttgtgactaggattaccatcacttggtcaagagcactggggatttggaatctccatatttgtgggacattaggtaagacatttgttagaacgtagagatatgcgcaatggagtttatatggaatgtgatatatatgaaaaactagaaaccgagattagagttattactctaa

SEQ ID NO: 401435 - DNA, 922 bp, Cannabis indica
ttgtatgtttaataatatttattttgtattttgtattttaaaattttatgaattttaaattcaaatttaattatttgattaaatttgtttggttaaattaattaaatttgactttaaagtgctaaatgtatacaatttaaaaatatgagataccaattgtagttttttttttttttgtaaataaaatcatcatctttattaattgcaatccatagtgattacatgattaaaatctggagtaacatcattactcctgataacacaatcgccaactaaataggatgctcgagctaagaagtgagcaacactatttgcagaacgtctaataaaattgacagaaacatctctcaaatcatttaacatcatcttacaatcagaaataacactttcaaagtatgaaaccataggaagagaactacgtaacgcttgcaccactgtaaaactatcattttcaatgacaacctccttccaatcctttgctttaatccaactcagcgcctccttaacacccaaggcttccaccatttcgagttgcagcactcctgaacgatagcagctaaacgcctctaccaacacaccactttcgtctctaattacccccgcgaagctataagttccattctctgaaaaaatggcatcatcaacattaatcttcaaggtattaacagctggtttgatccatgtttcatctccatctacatctataaggaaagcagcagtgggaatcatagttgtatcttgagcccgagtccaatttgtgaggagggctttagctaaaatgaacaacgctctcaaccgtgggaattttcttcagaccaaactaaattcattacgatgcctccatatcgccctacacgtcattgcagctagccttcgtttttcctcatctacctgctgtaggactgaagcaaaaccagttggc

SEQ ID NO: 401436 - DNA, 670 bp, Cannabis indica
tgtttcggtgagtgcaaaaattgtaatttttgacttttatagtttttagaaattcctaagagatcagaaatcatatttttgtcataacttttgactagggtgtccgttcgggacattctatataccgtttcaaagcttattacgagctctataatatggtgtatattttagagcaaaaacataagttttattttagtgtatttataccgcaagttttggaagaaaactctagattatcttatttgaatattaagcagtgttttaggataaacatttattggtttatcgttgttgtgacatagggtcgagatcatcggcgatagttctccacttgggttggccgaaatgtatgaacctggattaaaggtaagaaaagtatattctacttcatagtacgttgtgtaatacaattagacattaatattgagatataattaatattgttatataatgaaaagactaattggctgaatattgataatgtgatgttattatgcatgtgatatatgggcttacctgattaggtgatgcaattttcctagcgacgtattggcgtaagtacgggcgtcattatatatgatgtgtaccgagcgtaggtacgagctcacctgattacgtgatgccattttcctggctacgtactgggcgtaagtacaggcatcagtgatat

SEQ ID NO: 401437 - DNA, 1208 bp, Cannabis indica
tgacatgtatcaaattatacctcatgaactttataaggttgttaaaaatgcccacgtaactattgggattgttgaatttaaggacttttatctaatttcattcaattttattatttcagtgattgtttatgtactaaatcatgctcctcagactttaatatatgccaaatcatacttctcgaactttaaaatgtactaaatcatgcccctgaactttcattcatgttagactttttcactaaaattggacaagagtccttaaatccaacaatcttaatagttcaggagatatttttaacaactttaaaagttcaaggggcatgatttgatatatgtcaaagttcaaagaataaaaatcctaattagccaactgtagaatttttatcgggagttacataaaagttagaacaaaaccgtcttctaaaaatttaaatgataaagttatatcatctttcaaaagcactcgaaacttattaaaaaacacaatacatttgttgatagttgttatcaaaaaaaaaataaatctaaataaatctctctttatgtatatataatttaaaaaaaaaagaattaggtaaagtaaccttgccaattccttaacaaaaatatatttaactaattttttgatgactttatttttgatatatttgattatgcaatgtcatctctaattagatgcatgcgggaataatatttccatgccttaatagtacctgtttaatattttaattattttttattaatattttatattttaaaataagatttaatattttttttaagacctagtattttttggattggattggatccctttaatattttaggtccaatatgtattggattgaattggatccatccagttaaaaaaaagagtaaaatttaatgttagtttttaaatatacatatatattttacgtataaccatataacatctaattactaatccaaactaaatgaaaatactaataagttcgattggatgttggatgtattgaatttttggacacctcatccaatatccgatccgattcaattggatattcaaaaataacatccgatcacaattagatatctgatgtttggcggtcggttgttattagattgaataatttatgcacacccgtatatgtaatggagattacaatacatagtgtaatgaccattacaatgtaaagctattacaaagatttaaaaataaaaacaaa

SEQ ID NO: 401438 - DNA, 515 bp, Cannabis indica
acaaaaaatattctctctcaaaaatagtccattcttaaaatattctttctcaaaataatgttgagtgtactccattctccttgttcttgttttggagtttgttttccataaattgtttttttcttttctttaaagaaaaaaacatacactacactgagaaaattttcctgacaaatatcatttcactatttaatgggtggagtgaatgtctatatacatttgtgaagtgaatactataacctataaactaccgtattttatattttttaatacttaattacataaattgattctttcacagtaaaacctactgaatcccttttccatttaaaaatctcaattaagtgcattagtagactgcctacgtgtacacaaatatacacgtgacaaatttttaatagtctacataatatatattattgaaatattataaaaataatttaaaaattataaaaataaataaattaaaaaaaaatatttatttatttatttatttattttctttttctcttttc

SEQ ID NO: 401439 - DNA, 1150 bp, Cannabis indica
gtattttttaactttttcggtaattaaaatagtttatacaccattacattatgaatattcattcagctatcgtacgtactttccatagttataagattcctaagctattatatgacattaattacatgaaaccaacatgtgaagctttaaaaaatgcagtggacatataagatgcttaccatattagagtgaagaaaaataaagaaataaattgcttagaaatagtatcatttctatcttctctttcttttattatttttcataaactaaaaaatgtaatcatttaatgtttattaaataattatatataatattattttaataatttttaaagatacttaacattatgtaaatttgaaactttaagacaatgtttatggaaatttaacacagtaaaaatataaaaaaaaatatcacagtaaaaatatgaaaataacaaaaaataaatatttttagaaaaatcccaagaatatattgcacgaaaaaccattacaacaagctctaagacctgtcaaattaagaaactaattaagcccccttttacaaaatttgaatgaatctataaaccaaccctgattatcttgactaattctactattgtataataaactctattatatacatcaaacatatcctcgaaattatttctatggtagaaagtttatgtctaaatatttaactagaatattaaaaatgttactttagttattattcctttattatataatataatcccttagatgcttaaaatgacaaatgatataaaatcaaaatatctctccaatcctaagcaactctaaaagatgcttaaaatgtctacataatatcacaatataatattttattttcattcatatcattttttagtaatttttgttataagtatctccaaccacttttctctatttttttagctaaattttaattaaaatggctaaaaagttaaaatagaaagtaatttttctatttttgctctaattatactctctattttaattagtgttttaataatatttataatttaaatttattaaatataaattaatttaaaaaaaaaataaaaaaaaataatagtttttaattaaaatactattaaaaattaagcaaaaaatagagaatttttatccattctgaatcactttttgtatgg

SEQ ID NO: 401440 - DNA, 1109 bp, Cannabis indica
ggttccaacaaagattaaatgagagacaccctacttcgagccggtagactattgcaacagtacatagttgattcttacatggcaattgaagaagaaagatttcgctatgtacgaaagtaccaaaataaactaagaactcacctttactctggtttaatggatgctattcatcgaggtgattcagattgtacaaaagtcggaaaaacaattatcctgccttcatcacatacagggggaccacgatatagagcacaaaattatcaagatgcaatggccatttgtaaatgggcaggatatcctgatttgttcttaactttcacttgcaacccaaaatggccagaaataaaggatatgctcaatttaattggacagaaagatgatgagaatcgggttgatatcatatgcagagtctttcagataaagttattccaactaatgcaagacctcaaacaagaacaaccgtttaaaaaataattgcatgttagttttctttgttatcatatccacccaaaataaatttattatacacaatatttattttacaactttcaacaaaatccctaaaaagttattttttttttacaaattatcacaggtgtctacacaattgagttccagaaaagaggtttacctcatgcacacatactacttttcttggatccaacaatgaaaaatccttcggcagcccatattgataaaataataagtgcagaaatcccatacatcaatgtcgaccctgatggctataatgcagtaaaaaagtttatgattcatggaccatgtggaaagctcaatgcaaattctccatgtatgatgaaagacaagtgcacgaaacatttccccaaaaaattcaatgatcaaactacaatcgacatagatggctttccaatctacaaaaggagaaatacaggtactcaaaaattataattacaaaatttagaattcacatttagttaattatataccattttaacaattgtgattttaaaaaattcatgaaataagctataatattattattctttggaaatactatacttattttcatcaattcatttaaaaaattcaaattcttttatacaggtattcatgttgaaaagaaacatgtc

SEQ ID NO: 401441 - DNA, 956 bp, Cannabis indica
gagaccactcaagtataaacctctcctgaactagactttgcgagattatgtgtccccgatagagtctagttgcattattacaccttgtatggagcaggattaagaaggctaggtttaaggctcgcatataccaagatatatgtgatgtctatagagttttttcctataaatcagtaaagatcgattctttatctagcgagctggtccggatgacctcaacgtgctcgatgacctgataagtactcgcacatcctaagtcatcggcttgtaaaagatatccatatacgcggcttagataggacgcagatatcttaacacctagactcgttagtcctttacgcatcctaggcccgcgagcttatgcaagaatacgaacagacaactcgcaccataaaggtcgcatacattgttgtagttagtgaaatgagttgaaactattattcattattccatttacatttttattgatttaatgttgatattcaatgtaaaatggtttgataagtaattaagttttgtataatcaaaggaaacttgctttgtatataaaagagtgatccaatatggaatggagaggatagaaaatccttacagcagtagactaagtagaccgtgatctaactaaaccactataatttgcttgtgttcattatattttccagtacgtctgtgtgtttattcattgaatacttgccattctaggtggtgtactcgcacgttttcattaaatatttatattttcttttttacacggtgttgtcaaaattcctccaacaacagtgtggaaatatagaaagtgtttcaaggtcaagaatgtgatccccaaaccctagcctatcattatttatgtataggcttagaatttgttagtgatcccccaaaagtcgatgtatctcacttcaaatctcgtatcatgatgtcgcccaattagttacactgcggtcgcggtagtaaac

SEQ ID NO: 401442 - DNA, 438 bp, Cannabis indica
tttatttctttccagttttcatttcaatttttcatacacgattttgatttttagtttttatccaccattaataaaaaaaccaaaatcttatttttcttccaaaaatttgatctcctcctccttctctacgttcttttttgcaactgctcacaattttcccttactttcttttttttcttttataaacttctatatataatggcagtcactcggtgctcttcttcacttcgctatgtgaagaatctcgaaaaatgggtgttaaagatcgggtcaacaaatctaaaggtaaacgtcctatcgacgacggtgatgatttttgttttcccttgttaagaaacttgttcgtcatcctccttagaagaaatcaaacaatgttgaggctgagaagattcctttttcagaggctaaaaaggggaacaatcaacttgatcatattat

SEQ ID NO: 401443 - DNA, 630 bp, Cannabis indica
cttagattttgttaagacttaaaatgtagataaaatatctttctttcagtcatttatgttacaacgacaaaatatttttaaatttaattttaggttgatttgcaatttttcctcccgaactatgacacttgctaaatcgtgccccctgaactatttttgacgttaaaaattcccctcaaactattgacaatgcttaatttaaggtattctgtagtgttcgttcattttagtaacggagtgatgacgtggttgccattaggcagtccgcgtcatttaacacatgtaatttttttttttaaaatcaaattagggtaaaaaaccatacccaccattcttgctccatctcatagccgcaccccaccccacgataccccacctcaccccacgataccccactagccacaccccacccacacgaaccccacacccagccacgcgaacccagccacccccacccaccactggtgtggaaccgacggagacgcacggtcacgactccgaccagacgcagcagccccaccatcgacaattcaccagccacgaactcgtgtctccatcttttttgggtcttctccttctacgcagtggctgaaattcgaaaatcaaaggtgtgagttttggtattttttt

SEQ ID NO: 401444 - DNA, 1163 bp, Cannabis indica
attacttttgttttaaaaaaattctactcttaccagcagatttagtctgcccctaatagtttcgccggaaataaaacattttcttgtagtgaatgcaaaattataaaattggcttctctgactttatggatctttattattgtgagaaactagacagatgctcgacacgatatccgattcggatacgcgcgcaccaggccttttgtgaacctgggcgttgggtacttactcccgagctcccgtaatcttgtttttaatacttctaaggcttctaaacttgaggacgaggtctcttaccttattttttgtaccatttcaaattcaatgatcgcattgaatttgacatttgagcaattgaaggcagaatcccaagttgattgtcaacctgggcgttgagccctatttttaagctctcagatttgtggttttcttctcgagtttgcttgaatcttcattattttttatgacagaaaaaatgcttgaaacaatttttactaaccttgatcggaaacaacccaagtgtcaacctgagcactaggtccagctttggccctttagaaattctgtttggtccccagaattagttaaatcttaatattttctgaaaacggaaaagatgggcaaaagaattcttgaaaaattccatttgaaatggcctaggttgacaaaatgtcagcctaggcgtagggtcagccccacgtgtcaacctgggagctgggccctatttttcgtacctaagaattgttattttttctttgaaaggacctatttccctattttttatgaagatgaagaagatgcaaaaattggatcttcgatctgatacttggaaggctcctagattgacagattgtcaacctaggcgatgggtgctcagggccttagggtccccggtgctaaaaaatgaacttgttctgatttaaattttgatgcctcaaatatgttcgtggtatgtctagttgatgtcccaatgcaggttttgacccttttgcactaaaggagtcccgaaaaccaaaatcttagttgaggatgtcaacttgggcgttgagtgaaaccctaagtgcccatattggcttcagggttgtgtaatttcagttttttgggccttagattaatttgttcaatgtcttcatggtacaaaaatctaaaaaaatagtgatttg

SEQ ID NO: 401445 - DNA, 792 bp, Cannabis indica
tcaaatcaaaaacacctaatcatcatagatacaaaattatttgcttattctaataatcatcagagaaatgaagatacagaagtgacaacaaaatctcagatcatggagaagtcaagccaagcatcatcctcatttaacaaacgtaagatcaattgaaatctttatacattactatgttagttcgagagaatttttaccttatacacatctaataatataaaaaacaggcttatgggatcctaataatcataggatggggaattctactgcctgttgggataataatagcaaggtattttagtaaatttctcattcacttgaatgaatggtattcatatcacataatgtgatatgaatacttatagaccatatttccaagcaacattctcatgagcttagatcacatcaaattcttggtaattatttttagactcacaactatacaggtaaaatgtaataataattttattgactaaattttctactgagaaatatgtgcttaatcaaatcaaaaacacctaatcatagataaatacacaagcaaatattcaccataacatcattaaaaagcaaccaaccagtaaactttatgcagaaataattaacttaaaaataaaaaataatacaacagtactacatagatcaagcacaaacctattaaaaatatacataattaaaaagaaaatcaacaaaaactaaatagtataccaacaaaaattaaaacaaaaaaactactaaatcataaattaatcacaaacatattaaaaacaaaaaaacacactaaaaaatcta

SEQ ID NO: 401446 - DNA, 566 bp, Cannabis indica
ctgttccaaattccgtggcagcaaaagtgatgaaaggaatttattttcctaatttggattttctcaatgcagttgaaacttcaaaagcttcgtacatttggaaaagtaccatttggggtcgtgaacttttagaagatggaacttgttggctcatagattatggtataaatgttagcataaaatcttaggtatggattcctaaaagagtttgcttctcttgcttattcttttggtggccatcctatgatcaccttgattagtgatctcattcatgagaatggaaagtggaagggtcagttgtttgatgacttattctctaatgattaagctaggcagattttatccattcctcagagtcactattctcaggatcatctcatttggcactataactcctcaggtgagtatactgtgaaaagtggttaattagaatgctattagacttttgtgaaggggtcaatttgactcttattaccgagccatgttcttggtggaaatacatttggagtctcaccatctctctgaagattaaagtgtttatatggaaggcttgtttagattggttc

SEQ ID NO: 401447 - DNA, 1052 bp, Cannabis indica
caacttttttgagatctgcctttcatggatctaaaaattgaagtcaggacattagttttatgcaaattaaattggatttctaattgaattttagttttttagtagtttttctacacatttttaatgaattcgaagcagccctagttttgattgatactggtcgtcttctaaggtgaagtcactggaattaatggtggttctctttctcattgaatttttatttcggttgcgttgggttgctgcgtagttgcacgatggttgcacgatagttgcccaggaagcatggatcctgagttgaaggtgtgtgtaagtggtatttgtctaattttttttatctgggctgtatatttgtttatttggtcagctgaaaatatttttgtattatagttacttttttaggttaaaactgaaaaaagtcctataaaaattatatctttaatttatactaatttttcttaatttttttcttccttcttatatgcttaaaaaaatatacatataaaagaaaaaaagaaaatatattttaaatattaagacaaaaaattaaaataaaaaatatatgaaattttattaaaaaaataaaagttattataaataacttttaataaaatataaaaataaaaataaaataattatttaatctaatgtgaaaaaattaagaaaatattaagattgattttaaaaattaatttaggtttattttttaaaaaaaatattatacttttatgagttgcaaatataactctaaacataaaattaagcaaaatatgattctggcaaaaaaaaaaaactatagggaaattctacaatacacctctttaaaatggatacattaatgtgttagacatttatatgaataaactgaaatatatatgattaagtataaaatgcagaattaagtcaaacatatatacactttgaataaggatcgaaatacctccaaccattgattcttgagctttaaacccacataagctttgatctgcaaagaaaactaggttgatgtgggtaatcgagcttcctcgctctctcaactctctttagatggattt

SEQ ID NO: 401448 - DNA, 768 bp, Cannabis indica
taagtaaacaataaaataaaaagaaaaaagaaatcacgtcttcaaacttattttttgccacttcagattcatagaataatgttctatactataattttatgtatttataacttgtaggaaaaaaatcacattattatttataattaattttaatactaacttacttaaaataagtaaataattttcttgtatttgacataatatatatacacgtatatgagattgttcttatacatacaaatattattatacgtttcaaagagaagtatgaataatgattcttcacaattaaaatcgccaaccaatatatatatatataaatattaatctctatttttgttctttttttgctatctatattatcattttatatataaatttattatattatattttgatatatggtgttttatttaaaaaaaaaaatagtgttgatttgtagagtaatagaattataatgagtttctcttatgtgttttttaaaaatttatatacaatttaggtgtttgataaaatctttttaaaaacaaaaatatattcatatcaaatatatggaccaaaatagaattattataagaaaaatcaattgtagaatatatgtagcccaaaagagtaattggtcaaaacacataaattctttcataaatataaatttatttatttataatttagatgtattataaagatattataaaaaatatgagtgaatgaaaaattacataatatataaattattcatcgagattataaatgtatttaaaacattat

SEQ ID NO: 401449 - DNA, 636 bp, Cannabis indica
ggtgctaactatttatgagtgattaaatataactcacttaaattaattttaaaaatttataaatattttttgcaataaaatataatacatgaatcaaataatccaataattaataagatttataaaagtaattaattatgaaactgtattgattaaaaaatattttatatcatttcgatatctaaaacaaatgattaaattgatggtagagcatatttaaaatagcccgtgattgatcatagtaaaactaacaatacaaatagtattaaaaaaaataaaacaatatgcaaaactaaaatataactacaacttgcctcatgaaaaaaaaaaattgaactaaaatatatttttagttgacgaaacagataaaaaatctaccaaaacaattcataaaatctcttacaaaaattcaaataatatttactataaaaattaattaccattaacattaacttattttaaaatactatatattcacatgacatacatttctatttctttacttgattactatgtatatataaattttaaagttgacttttcaactcactttttttctattatatacatataaggaacacttcttaatgggtaatacccattgatgggaactaaaaaaaattaataaggtaataa

SEQ ID NO: 401450 - DNA, 615 bp, Cannabis indica
aagtcgcatggacttagccatagcatcaacaaaatttaaaacagttcttttagcaaacagtacatgacaagtagaaaaaagagaaagcattttgaaagatctagttgaaagatctgaatatcatctgaatagttgaaagatctagcatttatttatttggagttctcatttaatattatctatttcaagttatcaatttagataattgtaatttaattaggaaccattgttttttaataatatcaaagttcattttgaatttagaacatgaggaagtatttgtgttctagactagaccttcaattcagtataatattgagtttacatgcacttccaaaaaaaaaccaaacttatgggttggaccatttgatgacttggcattatctgattggattaggatatgagtttttcttttttttaatctgaaataaacttcattaaaggacccaaaaacagggcagcagtaaaaaccagtaaaaaacaaaggaaaaccagaaaaaaccagcacatacacacaaaaccagtgtagaaaactaaaggattacaacgaaatcaaaaaggactccacaaagactagaagatggcagatgtaaagagggaacaaaactgaatttt

SEQ ID NO: 401451 - DNA, 576 bp, Cannabis indica
atgagaattgagaactgagtttaccaaatggatagaggaaattatactatatatttcttttaatttgatgtttttaatttttactctttcttgtaaaatctattatgtttattttttttaattattctaccaattttacccttatcacttcacgataataatttcattcttctctaatcaaaattttaccagaattttcttacaaacctacacatctactacaaagaatacaaatctattatgtttgaaattatgtcttatagttatgtgagtctgtgttagagttagttatggtttagttacttgttattccttctgttacagttagttagttacacatttcagtcacatgtttcttttgccctctgtaaccaatgtaacagtacatctataaatacaatatcagctcacatcagagattgagcttttcctctcatttttctttctctgtttctttctctctctctctgcttcaactcttacatggtatcatacctatggctgatcctgacgatccacgcaatatcgctccccctcgtccaccgcaagctccgatcgaagctcaggctgccgctc

SEQ ID NO: 401452 - DNA, 865 bp, Cannabis indica
atccacctagcaactcagatgaaataccaactcaagatgacagcactgacacccacgaagctcaagaatagcttgatgactatcctggccagagatagaagcagaagaagcatcagaccccctgccagatatggtgttgcagattagtctacatttgctcttgctgctgcaaatgagttggaaaactcagaacccacctgatataaagaagccattgaaagcaacaacaaggagaaatggctgaaatccattgatgaagaaaaatcatccatcataaagaataagaccttgtctattgtcatcaaacctcagggacatagattaattgacatcaaatggttgtttagacaaaaagaagggctaccaggtactgaagaagtgagatacaaagctaggctagttgcaaaggggtacactcaaaagtaaggtgtggattttaatgagatatttgctccagtagtaaaacaagcatccattagagccaattatggctaaggctgcagatcaagatcttgagatagatcaaatggatgtaggaacaacttttctccatggaaatattgatgaaaaaatctacttgaagcaacctgaagggtgacaatggggatccaaactaggtgtgtttgctacacaaaccactatgggttgaagcaagctccatgacagtggaatgtaaggttcgatgaattcatggcaaggatcaaattcaccaggagctgttatgatccttgtgtctattttgatggcaacctttgcctattattgtatgttgatgacatattaatagtaggaaaggacagacacaagatcaacaagttaaaagatcaactaaaaggtgaatgttagatgaaagatatgggagaag

SEQ ID NO: 401453 - DNA, 501 bp, Cannabis indica
tagagaaagcccatttaaaagctccatatgacctctcctttcattgaagaagtgcgataagctcaactccccaagggattcaggttgtctgaatcgctaaaatataaaggtactaataatcccatagattatttagaaaaatttaataaaattatggaagaagatcaggtacctcaactagcgaaatgtcgcatccttgcggcaaccttggaggataatgctcatgattggttcaaccaattacctgaggcatctatatcaacttgggagaccttcgtggatctatgttgggctttgtgccctaaataaaactttatttcaatgtcatctttatcatttaattatcaataaagagatagaagtatttttcatcacttatttagtgtgtcatttcgttcatgtgatcatttatatgtttatttgatttataaattcatccaaatccttatcacattgatattcttgtttattatgttgtcagcacagtggaaaataaccaag

SEQ ID NO: 401454 - DNA, 932 bp, Cannabis indica
tatatatatatatatttttcaattcactctctttcttttttcttttatttttttctcaattttttttatctttgtatatatataaattgttgggtcctgttcttccatcttgtcgggtcgctacctcactttgacttccacattagtatgatattatccgctttgggcttagaccctcacgattttatttttgggcaccttcccaaaaggtctcatactaatggagtaggtagaacacttatatccaagacaactcttacctattcttccaatgtgagacttggattgataccccaacaatcatcccctcaaactaaggaccacatactcgtggcctctcctccagcaaaaccaccttatgccgccgctatcaccaacggaactcgctgcctaaccattacctttgtcaggaggacttttgacatagctcttaacactgattgccatattgtaccgtcgtaatcgtcagcgagacacgccacctggctacctcaatatcaggtcgacttttgatacaaggcactatatagatcgtcagtcgcgaggtcatcacattcagagcttctcccacacatcgcaaatgcagcccactatcacagtgctcctaaacctttggctctgataccacttgttgaaaaaaacgataaacttcaagcgcagcaaaataacaaagaaataaaacaaagcaatttactcaatttggtaaaactataccaaacccataaagagagatatatttcacttatcacttcaaaattacacaataagctcacacacttctctgttcacaactcaatatttttcaacacacatacctctctaacacataaaatacatatttataaagttacaaaacttggacaccaagataacttggggaccaagacattaagcttccttaagaagaccttttaaaacttagacactaacac

SEQ ID NO: 401455 - DNA, 513 bp, Cannabis indica
aatttttcattaattatttattgaagtaaatagacatatattatattgtaattagaaaataaataataagttaatgaaatatttagatggttattttctgagtaaacttttaatatttttatagatatgtttaatcacgtaatttttcattataatttattaaaataaatagaacataatgtattatattttaattagaaaataaataattagttaatgaaatatttatatggttattttctgagtagatttttgttattttctatatatatttaattaaatagaaaattatataagttgattttattcgagacacttaaatattagatatttttcagacgaatttaattaaataggaaaattatatttatgtttaattagtatattagttttaaaccaacataaattagaataattttttcaagtttattttattttatttcatatgaatttcaaaaatatatttttttaaatacattggatttcgaattcagtcatatatatttatagaaa

SEQ ID NO: 401456 - DNA, 760 bp, Cannabis indica
ggacatgatagtcatccgggaattcccttccggaattaacaacttagctatccgagaacaacatctgggagacacctaactttccaggaacaactttctaaaaatgatattggagatcttttcatttggaggaactataccacatcatcatttttgaaacttggttagagtttaataatttagattaaataagttttttttcgatctcacgcaattttcatgggttttatcttgttattcacaatctctacactacaataaagattcatgcgcttgtggttgataatctgtcttgtacatctcgagcataatcttaaaaatgaaaaaaaaaataacataatttgcaactcaatttgaaaaaattatttgacaatattgtttttaattttatttcaatgcagtaacaattatggtgacttagtcaatcttaagttttaaagctcaattttgatgttgttggttagttactggtgtctcaatttaagttaaagggtattctctaattcccttgtgatgaaagttaggactattcttataggagttcaattgtgtgatgtattagtacaattgagtttaattgtaaggtgatgattgacaaaacgaagaataatgttatgttagtgatcactttgtcctttgagtgatgtaattaattagtgtagaaattatactatatatgaaaaaattataagagtttacttttttatggcataaataaataaagttaaaagggttatgagttttttgttttttgtatttt

SEQ ID NO: 401457 - DNA, 692 bp, Cannabis indica
tataaatataattggtattgatatatttaagataagataaacaaagctcaattcataaatgcaattcatttcaaaaatagaaaactttattataaaattctccaaaattaaaggaattgtctgcaacaatatgaaaaatagggaataaaatctcaaactaaaaattgaaatccaaattgttcttaaactaaaacaattaattcaaaaaaaattgaagaagattctgagcttcatcttcatcttatactatctccacccttctgtccaactatccgattcaactcactaagatagcatccgagttcaagcagttgaggctgaaataagaagaaaataaataaacatggttagtaggtccaaaattaataatccaagtggataataattcactaaaacacatcagtttataggaaaagaaataccttgtttctttgctagcaatttagggcactggggtttccagtggcctttttcattgcaatagaagcattttcgcattaccaggattagcagcctttttctttttaactgttctcacagcttgaacaagattttttctattcttccatttcttcttgttcttgggtttggaagtagaggcaaagtttgcctcagctttagtcgctccattaccatttccagaattaggagctttcggtccctttttctacggtcctccaatcaaattttca

SEQ ID NO: 401458 - DNA, 570 bp, Cannabis indica
atttggtttgtttattgttattgaaaaactggaattgtaattcatgtaaactaggaaattacttttcctaaataaactgacttgaaaagtcattttataccaaccaaaaattatttttccttatctaccattctcataagtaaatgattaaatttgtaattatatgggtaatattttttattttaaaacatatattaacaacatttaatattacaataatatgtttgctatatattttttttaaagagttataggaaaataatattattattataattatatggatagtgatgattaaattatatgattaatatttatgttaatacttaaatatttaatataaaatagactattaaattaaatatttatatatattttattatttgataattaaatctaaaaaatacaatttaagtgtgatacataaatatatattgtttttttaataatatatcattttttttatttaaaccataatggtaattttataaaacaaaaattattttaaaaagagtaaaagacattttggtcaaaataataaaaattatatttcattccatactataccat

SEQ ID NO: 401459 - DNA, 1155 bp, Cannabis indica
catctaacaatgaagccaagtataaagctagcacgggagatgaaagccaaacacattgaattctgcagtgattcatagctggtgataaatcatgtatctggagaatacgaagctcagagagaaaagatgatagcatatataagcaaaatacatgatctgctcgcacaattcaaaagctaaggtcttagacaaattccaagagaagaaaacacaactgtagacgcgttagctcgattggccaatagcaatgtaagtgataaggcaaacttgattcctattaagttcctcgaagagcccgacatcactttcacggaagaaatcaaaatgatcgatacttccccaaactggatgacaccaatagaagcctacctcaactctggaaaactcccagataatcgaaatggagctcaaaaaatgaggaggaaagctgcacgatatatcatagtagagggaattatgtatagaagaggattctcgatgccattgctcagatgtgttactcaagaagaagctgcacggcttctatctgaagtgcacgacagcttttgtggaaatcatatcgctgagaaaatcttatctaagaaaattctaaggcaacgttacttctggccaacgatgattgaagattcaaaagcctatgttaggaagtgcgacaaatgccaatgattttcaaaaatacctagagctccacttaatgagttgactcagatgcaaagcccgtggcccttcgccatttggggaatttacctgatcggacaattacccaagcgcaaaggaggccgattcggactgccgtacaagatagtttcagataatggcaagcagttcgacagccaatcctttgctgacttttgtgcaaaccatggcatcattaaaagtttctccgcagtggcacatcctcaagcaaatggtcaagttgaagcagtcaacaagaacatgaaggatacattgaagaaaaaactaggagatgccaaaggaaactggccagaagagcttcctgaagttctatggtcatatcgcaaaactgagaaaacggcaactggacacacaccgttcgcaatggcgtacggttatgaagctatgctgcctgtagaactcgagctaccttcccacgaaagattgatgtacaatttgattagttatcaatataagaaa

SEQ ID NO: 401460 - DNA, 748 bp, Cannabis indica
attgagaaccatggatattaaagtaaaaatagtatcatgttttattgtcgatgggtgacttgagaggattaattgaatattagaaatatgctgcgagcatatttgattaaggttagattatcttggaataatcttttccgctaacggagtgtttgtctaaacaaagatagttaaatgtagcattgtttaggtactttattgagtgtagtacgagggaaatattagacacctattcactggagtaacacatgtgagagaaaaatatgatggactgaaaagatccaagaaatttataaaaccatagagtgaattcaagttgtatgcttgcttcgttgagaacacagaagagctatgatgattcaaagcttaggaatatcaagttccaaatgggagaatttgtttatctccatgtatcacctatgagagggatacgtaggaagggaagttaaaccctagattcattaggccttttatactgcgttgtccagagtatataatgtgtttcatatctccatactaaaaaagtatgtatcaaacccaatccatattctgagttgtaacgattttgagctaatttattatatggggaacaacctatcaaagttttggactggaaagaaaatgtactttagaatgagacaatccactagttaagaaatagttgtagagaatcgtgaatacacgagtaatatcccgaattatttaggtaaattttgaggacaaattttctataaggaggggatggttg

SEQ ID NO: 401461 - DNA, 985 bp, Cannabis indica
ctaggttaatgtaatccctaatgaatatagcagagccttgagttgtagattcaggtctcctggattagggttttggacatgtgatttacacggttttaatatgtgattaggccatccatctagcacgagacttttgttcacgtcggccaactcacttgaatctggaaagaaggtaagaagtgtgtataatattttatatgaatatacgaatgtatgtatatgtcaagtgtatatgcatgtttatatgtttgtaacactaccaacacttgtatggttttggtacaaagtgcattggtatagtgtataatgttaaggagtacattacggtgataccagcacaagtacgggaaagtacagggtgtgtgtggtatatcactcagtggtactcagggtacgaaacaaaccctaccaacactcgtgcagtgaggtaggtagtgtatgtggtatagtggttgtaccctattatggaacgttcttactcatctattaagccttgtaaatcgctgtatgggcgcctatgtacaagtcagtattatatgacatgttatatgcttttcttattgagtctatcgactcacagttctccttccatgtgtaggtaaaggaaaggcgaaagctaagcaggagtgagtccgagctgggatgaggttgcacatgtcatggcaatgcgacatggagtgttcggtcttaggacatctggggatgttattttgtagtcgttgtgcgacctggttatgtattttatgtattttgtataaaagtttagaaacgggatctcagaacttgtaaatgattatttaaagtttattattttttataaaggttttaatttgacacgattttcaagaaagttctttaattagaaaagatagcactgtaattgaaaaatcactgtagcgtgccttagcattagggcattacgattttggtattagagccgctaggtttgtctgccgaagcttgccaagacatgtacaatcttcat

SEQ ID NO: 401462 - DNA, 811 bp, Cannabis indica
agcttttttgtcccaaactaaagtattttttgccttccaaagtgaccaacacagcatcccaacatgacaagaaatgtcatcatcgaaaccaatgaacacaagatgaagaaagtgcccaacagttccagcaaagttaccgtaaggaaccaaatcagctttttgccaacaacttaacgcaaaaggacagctgagtaaaatatgcatagcagattcagcagtatgatggcaaacagggcacatgggagaaacacttacaccttttgaactgagttgaagacaggttgggagcacatcagaaactgcacgccacatgaaattcttcactttgggtggtatcttgagatgccagagtttccgccaaaaaccggaattgttatctccaggtttgttgctcttctgagtttgaagcaatttgtaagccgatttgacagaaaaatagccggttttttcaccaatccaagcccagtgatcatcaatagcagagaagctaagaggaatgctcaatattaaagttgaatccctaacattaaacatgtctcgaacaagagagtcatcccagcttctatcatgaacatggaaaagagaatcgaccgtatgatgattgaggcccagagtagtggaggtcacaaaagggttatcattatcagaaagccaaggatgagcaagaatacttgtagtcgtacctggaccaataattcttctaacacctgagcgaaccaaatgttgagcactccaaatgctgcgccaaacaaagttaggattactcccaagttcagttgaaaggaagtctgtgttggaattaattttacca

SEQ ID NO: 401463 - DNA, 605 bp, Cannabis indica
gatgggcgaaggaggaggagggtcggggtgaattttgggggcgaaaaaatggaaaatattttctaagttaagggatgggattatatagatttttattaccggcaggactcgctggtaataataggggttccgccggtaataaaaaaaacagtcagaattcattaactaataccggcggaacccgcctctaataatctgtcggtattagtcatatttcaaattttggccggtcaaaattctgcccaaagtattagaggtagattttccgccggtaatactctatatccaccggtaatactataatttattaaatatttttttttaattattaaaaagtaatactggcagaaaacttttttcgccgataataaccccattaataccggcggtttggctccgccggtactacttccgccagtatgaagcaaaatgttatagtgattggtcttaggtatatcgtttgtatgtgatatgatatatcgtgagagaaagaaagaaaaaaaaattaaatattagtttaaatttgacgtatatattattttcactacattatatatattatgcattacattatctcattaaaaaaaaacaagtaaaagacaaac

SEQ ID NO: 401464 - DNA, 611 bp, Cannabis indica
gggtggttatgaacccttgtatggactagtattttgattttgcaatgattaagtaatcttgtcttagttcaattagttgtgatgaaatgttgattgaatgttaatttttggccaattttaacatttagcaagctagatcttacttggaaaagtaaaaactagttgaacccctctaattgatgcatgatttttaccttttttttaggtaaattagtagttaaataggcatatttggctgccatgcataactaaagatttgatgcattattgggctatttgtgatctaaactgatgtaggaatgcattgtcagattatgaatagtttattgcaagttttggaaaaagcttgctattttttttgaaatctgttaactctgcaaggattgctgagtaattgctgggtcattgctgtatcaactgggacatacaagtggaaattaatcaccctagtcaaatttccaaatctgaaattatcaccttcttaataacttttagcctcttatttttagtttatttagtttaaaatattatttctcaagtttagaattaaggttaagaatttttctcttgaattaatttgttactttgttttatttttatttgaaattctt

SEQ ID NO: 401465 - DNA, 1069 bp, Cannabis indica
tattacaatagaagaaaattaaaatgtattaaatatatgttataatacacatatacatactatatatcgtatatagaaataaaagtagtagaagaagaatacaatacatatgatataataaacatatcaagagaaaaatatacatatatatgtatatacactcactcacaactttgagtgtagattagtagagatcaccataccttgaataaggtattacactttcgtccaaaagcttattttccttatctttaagcactaagagaactctctagaaaatagctttgagaattattaagccttaagaattttctaacaatgtgcttttttgataaaaacttctcatctttatatgagcaccttagatctctttatatagtgtttaagatatcaccatttgaaatcaaactcataacaccccatagatcttatggattaagatatgtaacatctttttatgcacttaatattggtgataatggtggttactcgtagtaacaagtaactctcccaaatgttataaaatgatgacaactaatatatattgtcatatattacataatttatttaccaaacacttaatatatattattcacataataatatatattatcatattttaatcttcatattatattaacaaataatataataatttctcataagattaaaatatgtgacacacttgtaacatttatttgatcaatcaaaatcaaaatatcaaagtataatattctcccactttgattgtataaatacccacttttgaagaagtcttacttatgtacatttggtaaaatatctttcgacttgaattttaccttagtgtaattaccaaaaagtttgataaaattttagttacgtagcattgaactattattcctttagtaaaaaccggtgataacctacacccttttacaaatgctcacttgagactgcatgtctcgctcttgcaccgttaatggccatgtgcaaaattccaattcatagactctctagagaatactcccaattctcataagaggcggcaccacctctagtccatataggtggagttttagtgtctcac

SEQ ID NO: 401466 - DNA, 544 bp, Cannabis indica
acacaaaattgatgataggattttaaatttatgaaatatagttgtgacactcatttatatgagaaaaatgagatggtgtgtgtgaattctaagtgtgatcacctaaaacactatataaaggagtctaatgtgctcatttgtatgaaccaagtttctatcaacaaagcactttgctagaaattctaaaaggcttgataattcccaaaactatttcatgagagttctcttagtgcttaaagatagggagaaataaacttttggacaaagatgtaatacattgttcaagtcatggtgattcctattaatcaacacttaaagttgtgagtgagtgtgcatatatatatattcttcttcatcatattatattatatatgtattatattacatgtgttgtaattcatctcttctacatttgttatatataatatatatagtctgtatatattgaatatatgcgttgtatcctttatgtaatcaatctcttattttagttattgtattatttttacaattaagttgtaatttatttaatttatttttcatt

SEQ ID NO: 401467 - DNA, 588 bp, Cannabis indica
aaagaaatatagatatcaatgggaaaaaaaattgtagaaacatactgggagaaggtacactaataatgtgtaagtatcaagtgtactccaacttctaaactttgtgacaagaaactacatattgaccatttgaactattcaaattatgttgatccttccaattagatgtgttcatcaaactattatagctgaatccttgacaatgattatgaccttccttacaactttgttataagttatttatttatttgaaactttttatgccgtactattttttggtgttgcgatgcggtttaagagcatctccaaggagtactttaaatttgatgttacactattaccaaatttagtgttaaaaattatcttctctccaaccataacaccaaaaattacactaaaaaatattttttattattatattattttttaataaaattaaaaaaattaatattatatcaattgttatatttaaataataattagtgcatcacttttaaattgaaaatttaattttattactataaaattaatttatggtattcacatttaaatttacacacaataaattaaaatatacttttataatgt

SEQ ID NO: 401468 - DNA, 829 bp, Cannabis indica
ctcatataacacatgtagtgtatcaacaaaaaaaatcttaatatgcgttcaggggttccatccaaacatttaataatataaaaatatattactttaaatatacatatatatcatatatataaatatataaacatatatcatatatatatatatgtatactgctttaaataaaaataaaacacaaatttacgtagttcaacaaattgtatttgcctacgtctacggtagcaaacagtcagttgggcatctttattaatgtgaaatattacaaggatcaatagcaaatgatgtctatattcttaaaaaaaatgatcaatctcgggcatacgtggtgaccttggcgaactgatgtgttggaaggtagtgtgaacggtttggtttttataaaggttacgaaataagcagtcttgtttttataggagcttgctaaataggcagcctagtttttataggagcttgctaaataggcagcctagtttttgtaggagcttgctaaataggcagcctgatttttataggagcttgctaaataagcagcctggtttttgtaggagcttgctaaataagcagcctggttcttgtaggagcttgctaaataagcagcatggttcttgtaggagcttgctaaataagcagcctggttcttgtaggagcttgctaaataagcagcctggttcttggcagaggtgatgggatggttttgtgtaaggagaaaattgatgagacgggatggttgtgtgtaaggaaaaaattgatgagacgggatggttgtgtgtaagggaagagaatagggagcaatgatgaaaattgagattttagagagaaactc

SEQ ID NO: 401469 - DNA, 733 bp, Cannabis indica
gtactgtcaatcagaagaggagcctgaacaacaacttcaaatggttctacagcggctttgagaacataagttgtatgccaaattcaagaagtgcgagttttggctatctcatgtgtcttttcttggacacattgtcagtaaagatggaataaaggtggatccagggaagattgaattcgtctgggattgaccaagaccgaaaacagttacagaggctagaagtttattgggtttggctggttataaccgtcggtttgtagaggggttctctaagatttctatgcccttaaccgagctcactaaaaagaatcagcagtttatgtggacagacaagttggaagcaagctttcaggagctgaaacagagattgattaccgctccgatattagccctaccatcaaataaagaaaagtttgtagtctactgtgatgcatccagacagggtctgggttgtgtactgatgcaggccgatcgggttatcgcctatgcctcccgtcagttaaaagaatatgaacaacgatacccaactcatgatttagaacttgctgcagttgtgtttgctttgaagaattggcggcattatctctacggagataaatgtaaaatttatactgagcataagagcctcaaatatttctttactcataaagagttgaatattagacagaagtgttggttagagttggttaaggattatgactgtgaaatcctttaccatcctgggaaggctaat

SEQ ID NO: 401470 - DNA, 683 bp, Cannabis indica
aaaataaaatgatcgtcatcgtgtcataaagatatgctttgaaagaattaaaaaaataaagtaaaaatttctccaaaatatttaatgaatcaacaggagacgaaggtgttagccgaaattcaatccatcaaactccatagccaatcttatttatttcttgttcatggtcttgctgtcagtagtcctagtctccttaggtgacaggggtttcttatcttgattatcagtactagtcacgaaggtctccccaaaattcagtccatcaaactccaaacccaatctcatttcattctgcttcttcattggcagagatttgtgatcttcatcactactcgtcatcactttgttctttgtcgacgctttgttatgcatcaaccaagaagtgaaaaatttctccccaaagaagatttcagcacccctaatttcgaagctactgaacagagaattcatggtggaaaatgttattattaatttgtgaaattaatttgatcaaatcctaaaatgagcccttgaaacttgaaatagagagagtattagtattagtgctaagtacgtaggtaggcagtaataatatttgagtttgtgaaagaggaaaggggcatatttatagagaagtaatctactgatagttccttattccttttaggattaggatttataatagtactgatttttgaattaaa

SEQ ID NO: 401471 - DNA, 1030 bp, Cannabis indica
ttgacctcgctttgaaccaaacttgcgagagatccagcctcgacatagtctagtcgcatactacgccttgcgcagtgtaagataagcagaactgagagggatttatacaagttgcacatatatcgaaacatatgcgatgactaagtagcattctcctacaactaggtaaagatcaccttttttacataacgattggtccaaatgatgaaacgtacttgatgacctaatggggactcgcgtgtctcatgttgttgatacataagatgtccgttaatgcgactcagttataacgtagacatcctgatgataggctcatcagcccctttttatgaatatagaacgcatctaaagcctacaagcttgtgcgggaatatgaacagacaactcgcaccttaaaagtcgcatacgctgctgcacttattaaaacggattaaattgttcttcatttattcttttacttttattctgatgtaatattgttatttattgtaaaggagttctataactgatcagttatgtaactaaaagaacacttgctttctacataaaggagtgatccaagatgaataaattaagcagaaattatttataacagtggactaagcagaccatgatctgattgaaccactatattcccttgtcttcattttatttttccagttgttatattttcttggcagttttctttgaatactcactattctaagtagagtatttgctatttttcttttgattatttactgtttgcatacattttggtgttgtctgaatccctccgacaacatttggtgccttttgtgaaaactctcttatcgattttggagcaaaatcatcatggccaccaaccaaacaaatggaaataacaacacaagatcctttaatgttggaaccatgcacgttcctatccctggagatggaacaaatccaactgatacaatcataggaggagtgggacggaccaacgtcaccccctcaatctattctcaaaaattgctggacatgctggggagacatctgttgggttttatgc

SEQ ID NO: 401472 - DNA, 657 bp, Cannabis indica
catcggtgcatgaccttagggctaaacattaagtagattggctagacttcagattaacaggtactgagttcgcaagtttagagcaaaaaaaatattcgtacctgcttgtgtaatgacagagtcagccaagtgcacgagtccgtgggtgtgcgggatgagtgggttcactaattgaatttatttatttatttattttaggttttcacataataaatttaaaaattaagacaataataataataataatgaattaaaaaaatcttgttgccttgctactagggatgcacacggggcggggaattagcaaggagtgctctccctgtctccattcccgttaagaattttaatccccatccccgcctcatccccgcttatttcccatcagggacgaggcggggaatcccttaatggggcggggacggggcggggaatcccctattgtaaaaataaagtttattttaaaaatttaaatgtataaaattattaaattacataaaagataaaatattacatattatttactattcaatatagtaattattatacaaaaatacaacttcaaaaattgtaaaaatgatattaatatactaagaaaatacaaacacatatataaaatataaaatattaataaaaaataattaataaattaaacgggtc

SEQ ID NO: 401473 - DNA, 566 bp, Cannabis indica
gccttttgtttcttttgtttattctacaagtaatttcaatttcaagatcaacttgtagtattacactttgtcattgacgtcgcaagcaccccgaatgcctgaaataaaataagactatctaaaagaaacaaattagtaataagcagaaagaattgaccaaagtagaatttaatctaatttttgtaatatcaagttttaaacaattccccagcaacaacgccaaaaacttactataaaaaatatgaacaactacgcaagtgcacgtaatcaagtagtattcacacaagtgaggtcgatcctacagggaattgaactgaataccagtaaatcagacatatatttctttctggtaaccgataattttgatgaaaataaaaataaagaataataagaaaataaaattacgcaataaaagcattaaatcaaggatgataaattagggaaaataatcatgttgatttaattacctaatggttaattctaattcctattctctttcttaaggtgaatgacatattataaaattaaacgtaactcttttaaatcttttaggccctaactcacat

SEQ ID NO: 401474 - DNA, 513 bp, Cannabis indica
atggatccagtccaatccaatccacactaggcctaaaatattggatggatctgatccgatcttaaaatattaagtattaatattagataaacccaaattaaaccaataaatatatataaaatacatccaatggatagaaccgatccaatccaacatccaatggatgttggatcgattggatgactgaaattaattgaagcgaattggatggaatgaccgaaattaattgaagcgaattggatggtaaaatctaacatgtaatatataattggatcggatctgtataggcctaaaaacattagatgtgatccaatgaacaccactatctgcaccttatacaattttaagtaccatattttttttaaaaaaataacttatattaataattaaatacctaagtttaatttttagcggtaataatacctaagttatatttctggaactctgtaggtacctaaccgttaaatattaacccattatatccacgtgtcattatcttattggtatatttga

SEQ ID NO: 401475 - DNA, 637 bp, Cannabis indica
taatactttttattttcttaaataaattaatatttgtttcttttaaataacaatataaattgattaatattaaatatatttaaaattaaaatattattcattaagtaatattaacagcataaatgctatataaaaatatttatcattcaatatttatttatataaatatttaaacattacatacttacacaaattaaataagtaatatatacattttaacattcacataactaaataaataatcatgagatcttccatacaaaaaaatcatgagatcttaatttcttacaaccggattatctctcaaattttttaaacatataaatatatatatactcttacaaaaattacataaaagtgtacaaatgaaaaatattttctcttcaaatccaatgcaatatcttctatattacctgcagacaaaataaactttatcatcatatgaaagttttattatattattaaaaagacattataaaccaataataaaaatttaacactaaaaaaagaaaagttcactaataatttacaattattttttactaaacaaagtttctcctaaagaaactcaaatttcttaagtcaaccactttctaaacaaaccaacagtgttcactcataaaatttagaaatacaa

SEQ ID NO: 401476 - DNA, 670 bp, Cannabis indica
taatttgaagtcatttgctataatttttcatatttaaaggtacaaataattactaaatgtaatctatattagtcataattactaaatttaaatattttaaaagaattactaatgataatatacttgaaacaacagtaagtagtgctgatttcataaatatatatatactgtatataataattatgctgtgtatatccaaacaataaacatacaacatcaatgaaaatgtatgtggttgtattttaattgaggtgataaaatataagagaggggatatggaaaggaaatgtgggtccactgagaaagaaaatatgcgaaccaacaaaaataggaggtgtattgaccacgtctctacaacgaagattagcaatgcaatgcatgtgcattatggtttttgtttttgtttgtgttgtgttgtgttctgttttatttttttttttcttgtggcagaaaattaattacaatatgcattacctttattaactttgtattttaatgcatatatattgatagatcaacccgtgtctaacttttatggtgactaggaaaaaattttaaaattaaattttatttgagaaataaaataaaattcaaataagaatttaaactgcttttctagttattaatcagacttacttattaataaagatcagaaataacattttatgtt

SEQ ID NO: 401477 - DNA, 844 bp, Cannabis indica
tccagacatggtctggagtgtgttttgatgcagtgcttctaatatgtgaaaggagtacgagaaatgttacccaaaaaatagttagtgttatggtacttaatcaggaacgcagcagaagagttccgttttatttgattatcattgtaccatagctcctagaatctccagatgtgtgtacattaaatcaaaacaataaaaacagtacgtttagagtatacttgaagcctatcaaggtatcctcaaaacttcttgtaagttgtatccttaatccagttgattaggaacttgcgattggactcacaccagtgtcttccaaatcaatccaccacacacaaggaataatgtggactattagaacaaagtatataacctgttgggattttatgccctaaataaaacctatttcaatataatcagatttataaattaataaaatatcataaataattttaagttgcatggttcacatgattactttcatgattatatgtttaatgtataaattctattaaattcagaacatatagttattcatgattatagtgttgtcaacacagtggaatataatcatgattatatgtttcaaagtttatgtcccatgatttgtcagtacactggatttacactaacatgataattagcgataaagtttacttacaccttggataagtgttatgtcctttccaagatattggtaaagtatgctaggatcatatgtatggagtatatatcggactggactgatattgacaatataagatatcataaatttaccattatatctatctaagttaatatcacttagttgatcttaggtcaatagatctcaatcttgagatggtta

SEQ ID NO: 401478 - DNA, 723 bp, Cannabis indica
atttgattttgagtgttgtacaccacttccttctgtcgattttttagcctattttttttttttgatttgattggttgtaagatgagtgtgacaatatagaataaactttgcatatatagatagacaaacaaacttgattcctgtaattctttaaatactcaacttaatgaaaaaaaaaaatagacacggttatatatatgagataaataattattttcaatttaaaaaattacattaaaaaaagtgaaaatttattgttaactataaatttacctttccaatacagatttgagtaaattccaataaattttttatttagagtcccaaaatatatttaacaaaaattgttaatcatactcactacacatttaattttaaataaaaattcttaataataatgaagacatcatttaattatcaatactaatatttaattacagtacacacggatttttgaaaaattaaaacaataatttatttcgttaaataacaattttaaaggcagcctaataaaattaaaaaaaaatatctttttgagattataaatttattttcttagtaaaataaatgtaatttcaaatatttttagtgaatattttaaaaccaacattaaccctatccctacaattaatagctttttaaataaaataaaaaatatttaaaaaattttgaatttaaaaaaaaaatcaaaaaattaatattgccttttaaaccaaatatttt

SEQ ID NO: 401479 - DNA, 995 bp, Cannabis indica
tttcaatctcgaataacgaaatgctactgtgtaaagcttaggtttgtgttcctaatatttgtgagcttaagaaggaaatcctcaatgaagcccacaccacaccttatttgttgcatccgggaaccaccaaaaggtactaggatctaaaactttatttttagtgggtatggaatgaaaagagatgtggtcgaatacgcgtcaaggtgtttagcctgccagcaaatcaaagctggacatcagaggccggcagggttattgcaaccattagcccttcccgaatggaagtgggaggacattgcaatggatttcgtagttggtttgcctagaaccacgagaatatatgattcgttatgggtcatagtggaccgattcacaaagtcagctcattttctaccagctaagattacttatacagtggatcaatacgctaaagtgtatgtgaaagagatagttcgtctccatggagctcctaaatccattatttttgatagagatccaaagtttacatcgaaattctggataagtcttcaaagagttgtgggtacagagcggaagttcaacacaacttttcacccttagactgatgggaaatcaaagagaatttattcaaatattagaagatttactgcgagcctgtgttatggactttgagggttcatgtagtaagtacttgcctttgattgagttctcctacaacaacagctaccaaagtataataaggatggctccttctgagattctgcatggtaggaaatatcgttccacaatttattgggatgaaactagagaaatgaagtacttgggtccggaattaattcaaaagaccaatgaagctatacacaagatcaaggctcggatgcttgcttcgcaaagcaggaaaaaaagttatactaatccgaagtacatagatattacatttcaggcatggaaacatgttttcctgcgagtttctccggtgaaggatattaaacgcttcgggaagaggggtaagttaa

SEQ ID NO: 401480 - DNA, 1401 bp, Cannabis indica
cacaacataaacatatatattataattttcttctacttcattcaatatttatctaaatcattattaataaataaataaataaatgaaagagaaaaagtgagaagagactaaattttcgggtgtttatttactaaaaagtccttgtatctctcttacacgtttcatccacgtgtcctgtctcatttcatgcataggtcttttttgtttgaataacaacatgcatagcataggtttttgttaacatatttctctgttggattgtattgtattagtattatattgtatagtattatttaatacaatacaatatttagtattgatttgtattaattgattgtgtaaagttttaatatatttttaatacactcgatcccaacaccaactacgggtccgagtctgggatcctgggtgcgggtatggggtccggggttcggggtccgggtcgagctccgggtttagggtccggggtccgcgtccgggtctaggttcgtgtccgtgtccgggtctggggaccggggtctgggtccgggtcagaaatcagtgttgactccaaatcattcgtaaatattattatacaagctaatacggactatttattatgtattaaataatacaacatacattgtattaaaaaatttggtcgtaataattaatacaatacgttgcttaattcaaacatagtgttatttattatttaatacaataaaacccttatacagcaaaccaaacgagccccaaaattgcttaataatacttgtatcttctatttttcttcatattataccgcacataattcaataaaataatttttgaaaagggttaaataaaaattttgcctttcaaacttgagttgtgttagggaaattcttttttgcactctcttttacactttctttttaattgagtgacatatgtaactttttaaagtatgtttaaatatagttacaattatactttttttacttttcattaataattaaaatttgttatctcattcacttgttcattcttttttttgactattttattaatttctcatatattttttactagataatatttactattctgcatctttcttttaattttttttataataaatatgcaatattttatgttattaaaaataaaaaatactaactcttttttcaacaaattttacattagttttatttttatattgtatcattctttaaattattttatttcatatttattacatatatatatattaaaaaacaataaaagacaaagaaataataatataattatgtctaggcaatagtatatgttaaatcgatttacttttatttattttcttaagtaaaaaataatctttcaattgatagggaaaaaaaactaattagaattaacatagtatatataatacatatttagatt

SEQ ID NO: 401481 - DNA, 536 bp, Cannabis indica
tcttctattttcgatacctaaacacattcacgaaaaaagtttttattttttcccttttcacagtaaactaaacccatacaaagaaagtgtcagttttacctctggccaccgatttaaggattatattattaacattgttgttgtgtatgtgtatagtggctggactttttatagaattagttaccgcattatgcttataaggtaaaaatataaacagtaaatagtacatacatgtgtattttgtgttttattgaatatgtacttatatatatgtattgtgtgtatattatttatgtaaatattgtaattgtattgtatatattctatgtaatatatatgcatgtatatttatgtattgtgaatgagaacgagactggaaagatttaattagtttagaattaaagtttttaaaattttgttagtgtgagatataatttattatatatgtatgtatgtgtaaatttttcaaaaattaatgtatataatttagtgactagtaacttgttactttttttttataactagtaagtaattaa

SEQ ID NO: 401482 - DNA, 1071 bp, Cannabis indica
gcaattagactcactgcacaaataggtatttaatataaatagccaaaagttgaacaaaattaaaaatctaattataaattatattgtcaatatcaaaccactaaaaatttacattatatagattcttcacattatctattagcaatctgaaaaataaagtaaaatttacacatttaccttgtaaataggaatgacatacccatggggactatacgccattaaattggctacatcaatgtcttgtgtcttggacatagattagaaaggaaagggtcacggggagggtttgtggagagaaccactaaaaataaaacatatggtgagaagaaattagactgctcgtggtttaaaaataagcacaaatccaaacctccaatagatatgttcttcacaaatctgttttacctaaatacaaaatacagaaatcaacaatcaataaaaaaataaaaattaacaaatatgtatatatatatatatatgaatggatacggcttgcacaaaaaactcacaaaagaaaattatttttcattactttaccttgtcaataggagaatgttgatggagactactaaacaccattaaaattacttacattgagctcatgggtcttggactgaggttggacaggataaggttttgggaaggccttactgtcgatgtggataggtgaagggtttgtggagagaaactctctcatctaggttgaagaatagtcatgttgacattagttggatgagtgagagtatcatgttccttttatagtgtttcaacaagggcttaaggctgaattatatggattaaaaaagaataaaatattgggcaaaaaaactcaatggccatacacaataataagactattctctagttacaattttgccactttatttcaaccacttatatattcttcatccaattctatattttctaattcgatcctataaatgtcaaaactatttatttaataattataattaattactaaaaaaattatcatttatgtaatttattaattagaccatgtaaattctcttaattaataaattgtcaccaaaatctcttttcttcacaatt

SEQ ID NO: 401483 - DNA, 806 bp, Cannabis indica
gaaaatattttaattcacatataacatatacattacccatataatccgataaaatctcagtaaaataagcctattttctcatatttaacctaataaaattataatcttagtcatttattttcctaatatacatattacttgatagttcataaaatatgcttaaatagtcataattaaaattttgaaatattacatgtatgggtgaactcttaatgggtattacccatgaatgagtaaaattaaaaaaaattaagtttttatacttgatttttctacctaattagaaaaatctcacttttacattatatgggctgagattgttccatcgattaaaaaaaaattaacaaaagatttttagctaaaaaaaaaagataaataaaagttgatgagtttcacttaaatatttttatatgaacatattttggatatagtataaaaaaagatatttttttatatttattttaattaagtaattaaactaagcatacaaattcaaatttctcttttattattcgttattaaatcaaaatttgatgatttaatatttttaaaattaatatttatatagttaaatttgtttagtaactatttatgggtaatacctattaagaaatgattatataggtactattggtgattcaacaatattatgagtagcggcaaaacgaaaaaataaaatttaagtggacgattatctatttttatagtgtaatactaaagacatctatggaacctaacatcttctatgaagtgtcataagcaattgttgtaatttaatatgtaatcccacttattttacttttaat

SEQ ID NO: 401484 - DNA, 1269 bp, Cannabis indica
tgtcccaatatgtacaaccttcatctacttgtgctaactactgttcagtcttagttttgtctttacctacacatataaacaatatctgtgagtcgacagactcggtaagaaaagcacaatcataacataatataaatcggattataaataggcggccatacacccaattacaatcatatcctgcatctcacgcatactgagtctagaactttcgtacgacagtactattgaccataatatcagcctatactcgatactctagtcgtaccgatgtgatagcatcaatagtactataccaaacattatattcgttagtatttagtgtaactttgtgtacactaatatttccattactaatatgttatctaataggaattcataaacatgcacgttaagcatgtaatcaaatatgatactattataccaatcttaccttaattccgaattcaggtgtgccggtcaacctaagtggaaactgctgttcgacggtttagaggcccctaagtcacaatttacgtaaaactaataagtgatatgctaaatcactttttgggaacttagactcaaaactaaaagtttctctatcgatagatagcatgacaatacactgaagattaagaaaatactaaaaaaaaagattcccaagaaaataccacaaaaaacggcagtctatttttttgggtccctaactgttaaaaccagtttctattttttacaacagaaacataaaaaatcttatttctcaaagaattctactccaaatctctcaaagagctctagaatacctaaacaagccatacataacataaactaactaaaaaatccatcatcaaggcaagaaatcaaaaaccacatcaatttactttaatcgacatttatttgtgttcatcttgcttgtttacgatttttttaaaatttgttgataaaaaattgcgtcaataaattgtttacctttagtttctgcgtttataaagcgttattctatttgtaatgaattagtttgctttctaatatttttgatgcatccctagtttagattcatcaaacaactaataaaatgttcatgaattagttgtgtatacgcttagagtaagagtagatagtaaatcaacttagattgaagatttttcatgttttttttattagtttattaaactcttatggcacgtttactatacagtaatcagaatcggaataaattaatggagaaatgtaacggaataaatgaaaaataatcggaatcaatatttgtaatatgttgtttactaa

SEQ ID NO: 401485 - DNA, 511 bp, Cannabis indica
taagttaatgcaaaaatattcctaacattaagaaattaacttaataatcatggtgtttatcgagattttcgaaaagcgattaaaacgagagttgagggattaactagattaataaaaaattacataattcaggtgttaatgaatcttagtccacaatccacttgtatttgaccgaatggccttgatgtattacaatgagtattttacaagctcaagaaccctagttttttgctataatattttcacaatgatttcatacactctccagatttctctcccttacatgagggtatagtgcagtatttataggctaggaaccagacctgggttcacccatgacctattagggtttttgtctcaacttggcacactcagcgccgaccctaggcataggcgggctaggcctgtgcctagggcccactcttttggggcccagaataaaaaataaaaaaaattaattaggctttgattaaataaaaattaagtgtattataaacaataaatagtcata

SEQ ID NO: 401486 - DNA, 781 bp, Cannabis indica
aagagtttctagatagagttgacggtttcatcaaccttgaagaagccgtcaagagggttagaggagttgctcaaccagaagcaaccaattacacgacttatttatttcctcaatcttgaacagacattgaccaagaaagtgaagaagagtcaacacctaatatctccactgaaaaagactcctcctctattttccaagatgaacttgagtagggagatagtgatgacgagtcccctgctatttctcaagaagatctcaagcaagaaaccagtgatgaataatctctccctacttcctaagacaactcaagagagagaggcagtgacgaagattctccctctgtttccaacaatgatcaggagtagggcagcaacaatgaagatgtgccctatgagccttctaaagatactaacaaagaaagcaacactaaagactaccaatgagagacggagggaccttatatcgtcacagaagcattagaacctaggacaaataggttagagtttgttatgattaccacttaaatttaatgttggttcaaggtactggaacagggagcatctgagataatatcatcaataaagtaacaattccctaaatagtttgcttcacagagagattcattttaccttatgcaagtaaattgatcacctcctaaaccaacaagatgtgacaaatacatctttagaaggtccattactaagtatggcccctacactattagtcaaacatggcattagtgtagtgggaatcactttagctaagcttagatgaaaaatga

SEQ ID NO: 401487 - DNA, 859 bp, Cannabis indica
atttagggggggaaaatagtaaccagtttgtgtttttgttaattttaattaattaatttttaaaaaactgacaacgattgacgtttgacgtttgacgtacgggtgacagttaccaattttgaaaatacactaaatagtgggttcgtgggttattagggcacatttcgttcttcttcacacttcttcacatttcgttcttcttcttcttcacattgccttcttcttcttcttcttcttcttcttcttcttcttcacatttccttcttcttcttcttcacagttccttcttcttcttcacattttcttgtagtgattaaaattattttcaaatttgggggaggaaactgcagtacgttcggagttactgtacttcgttttctggttctccgtctccggacctcggtgtacaagtaagtttctccgaatgtaccaattttattcttcttttgcatgtttgttcgttctttagtttggggatgtgaaaaattgtctaacattgttaaagaaagatttaaacttttgtaaagagaagtgttgttcttcaaccgtgtatgtgcatttaattttgtttttgtgttccatttttggtttattgagtaattttaatcctttgtacatgcattaaatctgcttcgtgaacaaggtttgattctcagattgctgaaaatcgaaggtacatgtgtgtaccctttttgtttgtttgttttttaattgtgaaagtgttttggattaatttataccctgtgtattaggggtctttgttctgagtctgttagagttagttcatcactgtaagtggttgttatttttcagttagtgaagattgcatttaattttttttggttatggtgtgtactca

SEQ ID NO: 401488 - DNA, 1036 bp, Cannabis indica
atagagagctatttttattgttgatgcaccaacatactctctactatagttagtatgtgattatttaaataatatttataatttaaattatcaaatataaattaatttataaaataataaaaagtaatagtattttgattaaaatactattaaaaagtttagaaaaaggtaaagagcttcctattcattttctattatagagaatcgtcttttatattattggagttcaactatcattctcttttagctaaggagtgtatttagagatgctcttatctaagagcatctttaatggtaagagcatctctaatggtactctatttttttagctaaaaagttaaattagagagctacttttatggttgttgcttcaatcagactccctactttagttagtatttgattataataatttttaacgcagatttttgttaactaaatttgagcctaacaatattgatttcacacagaaaaaataaaagatatcaaactgaaaatatgaacacatagttttttacgtggttttgcagttaaaattctgcatagtccacaagtcaatcttattcagatttctaatgtttttttaggaactctctcatatgagttttttcgtcccttttttgatcttgtctgccactatttataattacatagtggacagttaattacaaagttgaccgaaatgtgtttacaacaatcatccctaaaatcatgggatttgattacatatcacgtagtgtaaatgcggtttacaattttaaaatcgtatgactgttattttcccgcttttattgggtcaaaacaatcgtgtattaaacacgtctttaattgttttatctggagatgtctcgacagaaacctggttctagtgatccccatagcgagctgggggtcattcttccttccaaggtcgacaatgtatatctggtatcgatcgcggttcttatttactaaagaatcattttgactcgctggggttgtaagcctcattactgttagctggatgaagctataggatgtcttccgatagcgagac

SEQ ID NO: 401489 - DNA, 517 bp, Cannabis indica
atttgcaatattacaatttatagagttactaaaatagtaaaataataataataagcatcccaatattttaaaatacaacaaaaaatgaagataaataacagacaattaggaggtacataaaagaaaatatttgttcataattttttagaaaatatactagacttttagtgcacgacaattataataattgtattcagattggcaacttcatctatataaatttgagaactcatggaaatattaaacataagagttaggggtgtccataaaatagtgaatctaattcaatttgtacaatttaatccaatccaatttgcaaaatgcgaatatctacacttatataaattgaaaaatctaaaatctacacttgcaaattaaatattgattaacatgtaaaagtaaccaatccgatccaatcagcacatatttatataaaattttaaaaattatatataattactatttcaatgtagaaaatcaacaatttaaaattttaatacatataatacaaatatat

SEQ ID NO: 401490 - DNA, 503 bp, Cannabis indica
atatatatatatatcaaaaaatctctaaacataattgtataaaattattaccaaaaatattaatttatctaaatttttcaatatttattatgtcattagtagggatggctcatctcttaccaaattaattaattaggccggtcccatcaattatgatgagcttgaattttttaattattgaaatgaaatcactttcaataataataataacaacgatactacataaggtaaatattattttagactttgtgttttataaaaattactgattagactttctattttgttaaattaatcttgtattttccaaaataataaaataatacactgagctgaatttttgacaattttttttaatataaccaacttgaagacaattcttaacacgaatagatataaaatatgtaaacagttttgtcgcaacatctttagttcataatattaaattttattatgtaaaaaatcagttcagggtcttatttgtactattttagaaaatacag

SEQ ID NO: 401491 - DNA, 563 bp, Cannabis indica
gcattatattcatacttataacaatttgcttttgaagcttgaatcagttactggtcgatatggatttaatttcaattatgacaatattaattagtcgtcttctttgtatattgataatatatatttttgttcttccttaagttcttcttcttaattttcttttttttcctttagtttttgaaatttttagtcacgtttttggggaagataagagtgtgattgttttttattctgattttcgaggactggatttgcaaatagcctctattacatctagtgttgagctgtgcagaagatggttagtatttttttaatcatttttttcttttgttttctttatatttgtttagtgttgttttgccatgatttatttatttaatgtcgattttactgctcttgctctatctcgccaaaattaatggttattttttaggtattctcgtattactgtggtggttctatccgtaggtgtggaagatggaggttataaatacattttttcttcgttctctttgactatttttgtatttttttttatttctaattctcctataaatacattt

SEQ ID NO: 401492 - DNA, 656 bp, Cannabis indica
cgcacgttatctccaagcactctttcgtgcgccaagggagtgttaaagactaaagtgcgcacccctagtaatagagtagtagtagtagggttaattctttgttggatacgaatacaagtttctagaaggtggatttagttcaaccaataagaacgtaacacgtcattggaatattgttctaaaactgttggcacctgtgaactgctttaattattctctctctctcatactgtgccacttgtcagtcaaatcctcttttaaatgcgccacctgcccatcacgtgaccttcacaatttaattgaaaaaggacacctatggctaagagtagtgtttccctcaatcttttattacaattttttaattaatttttcatgcttgaaaatacatgttagaatatctttttaaattttttttcatgacaatatttgttatgtttataatatcatttttgtaaatttttgaaaattttcgaatagtttacaataccgaaaatacattttaagttttttgaacatgcatggtaaaaatatcagaaactctcttttcggtattgtaaactattccaaaatttacaaaaataataatgtaaatataacgaatatcgctataaaaaaatttgaaaaaaaaaataatttcgacatgtaatttcgggcgt

SEQ ID NO: 401493 - DNA, 596 bp, Cannabis indica
tagtgatttcagacctattgcatactgtaatattatctacaaagttgcaactaagctaatctattcccgattaaaagtcatcttgcctgagcttgtagcacaaaatcaggagggatttgtttttggcaggtttattgctcatagcattatgatctgccatgatttaataaggcattatggaaggaaaaaccccaagccaggctgtatggtcaaacttgatttgcagaaagcatatgacactcttgattgggattacttggaagagatacttcatgctttccattttcttgataaatttgtcaagctgattatgacttgtgttcgtactccaagatattctcttatgtttaatggctcactgcatggatactttgaggggaaaaggggtctaagacagggagatccaatattaccattactttttgtgctaggtgtggagtacctcttaagaataatgttaaagatagcatccaaacctgacttcaaatttcatgatagatgtgcaaaactaaatctgaaccacttgatgtttgctgatgatgtcattgttgggttttgtgccctaaattaaaccctttacaatcttattagttatc

SEQ ID NO: 401494 - DNA, 659 bp, Cannabis indica
gtcaggattgtaagcctcaccgaaaaaatatctgaagttaactgcgcgaagttactggaaaccttcccatagcaagatagacacctcgcttactaggtctcgaactaacccaattgttgcacttagtttgttcattatacactaagtgcttccgtagttgatatgtgtcactttcgtcttcctagatgtaatgtacttgatccctcgctattcacattcagcgacatatggtttctcactaatatactaagcaacagtttgtctattgattcctcgcataagaccttacagtcagcaggttacaaatatactctgacatttacgtaattaatgagttatcccataaaaagtgattgcatcgatccatatttctttaatcctaacacgtgtcccccactgagatggtagtcgaattttgggtataacaattacaaactgatgttcaaatgagctaataatctagaagtagttagctactgagattatgattttgctagttgtactgattaacttaaatcagcacctggttatgtgtttagtgttttttggtggtagctgtgtcgtggatgagtaaaaaacaaaaccttgactgctacttctactagtggaggctaaactcgtttttttgttatgtaggctacataacatggtgtatggct

SEQ ID NO: 401495 - DNA, 533 bp, Cannabis indica
ttcatcaaaagcattactcaaactgaaagtgcaacctctagaaaaataagagtcacgaacaacatagtgaacggttttctttacataacgtttaacaaaacaattcttaattaactttaaaaaggcaaataacaacatgcagtcaagaacttccaaaccaaaagaagaaggcatttggattgaactccttaaacaatcacaagacaatcggtttcaagttgaacatcttcccacccttttcgtttgatccgattaaaacctccttgatgttaaacatctcagcaaaagcagttgctacacaccatttactaacggaaaaggcttccaaaagcataccgaaattgtcccgagccacatcaccagccccaaaccaaccttcccactcaaagatcgcaccatgagcattcaccttaattgtattcaacaccaatttcatccaataatgctccacgtcttcatccattccagtaggaataaacaagggccctgtctttattgattgagcatttgtccattgattaaggaccacctct

SEQ ID NO: 401496 - DNA, 565 bp, Cannabis indica
tgtcctttatatacagagccaaaccctccttcgcctagtttctccttaaaccctttggtgatcttcctaatgtctcgataagaatatcgtataggtataagattgttatgactttggaggaattcttcgatgtcattgtacatcgataagtgtcgtcttctccatttatacaccattagataaattattagtagtagtccaattaatgttcttggtgcccagaatcccactggtaaaattgttgaaattaatgagtgaaaaaaacattaaattatcttcttaacaagtatttcaaaagatgtaaatacactacaaaaaataactttttggtctcaacttaaattttttgtgactaaatgtgatttttagtcacaacaatttattatttgtgactaaattataatatttagttataagttatcactaatttagttttagtcacaacaagtattgtgactaaaaaacttcttatttagtcacaacaaatagtaatttttgtgactaatacctttagccacgatccttttagtcacaatataagaatgatttttataattagtcacaa

SEQ ID NO: 401497 - DNA, 628 bp, Cannabis indica
gaacagcagtgagtgcgagcagatgaagattgtacatgtcggggcagttagacctaaagctacgatctttgggacagtaggctgtattttgagtagtcgctaagaaacaactattgtatcgaatattttgtgttacgattgtaaatattttaaatacgagatcccgatttatgtaaaagatatttgtttccaattaaagggtaattaagtaaagttttaattaatcacgatttttaactaaacctaattgattagcaatgaattgaacaattaatataaaatacacgataacatgcctaaaacgagtagggtgttacaattcggtatcagagctaccaggttgtcttccgaatatcgtcacaatacgtacagtcatcatcaatgaaaagctcgactcaaagttatgtaagcctttattgctttagtagcttgttttattaatatgttataagaacagcctgataaaaagcatgttagtagcctgagagctgaataggcgtatgttttaatttatgaaataaacggtaattagtagtttattattgatcgcgatctgaccaggctagttcttagttttgcaggttgttctattagaatggacaccagacgaaatacaagaagccagggt

SEQ ID NO: 401498 - DNA, 956 bp, Cannabis indica
ggtatactatatcataacttttaaatacaaataacagaatactttatggtaagttatgatgttacttgatatgttaaaatttattaaacttaagattttattattttttattataaaatataaaaaggaacaaaaaattacttttaatattgatcgtcttttctcggagatagtgttaagtaagagcgatatgtaaatattagaggaaaagtaaaaaaaaaaaacaaagagaaataataaattaagagaaaaagataaaagaagtaataataataaatgaagaagataataatgtcagaaaaagaaaaagtaaacaaaaggaaaaaaaaaagtaaaaagatcaatattgaaggagggttataatttcttttttagtctaacttttaatttcagtaattttttttttttggtagcagaaaaatatatgcgtctaacatgtcaaaatgatcaccctaaaaaatagattataacaatgtaatttttgtgtctaactaataaattgtgtggctcaaaaacttttgaaataaacaaaaagaaataagaaataaagaaagtgacaataattacaatctatgtcctttattcacataaaaaataaaattaaaataaaggtgattgtatattaactaggaaagtgaataaaatgtaaaaaaaaaaaatatatatggttaagttttaatttcggcaggcatgtagcggtatttaaaacaataaaatggtctaagataatttcataaataatttataattcatattgataagtacaataatttctttctaaaattactaattagattagaagataaaagagaatgtaaaaaatatatatttaatcagtctaatttactactattttgaaaaaaaaaagaattgttattaaaaaaaaaaaaaaactaaacaatgatgtgtctaaaaaaagaaaaaaaaaaaggaagaaaaacaataaatatacattg

SEQ ID NO: 401499 - DNA, 585 bp, Cannabis indica
aatgtaaaatttaatgataaaatcataataataatgcaagtatgttagttaaaatttaataataaaatataaagcataatggtaaatataatagcattgctattaggcactactggtgtctagcaccttctcgacatattgcgttgcgattggctagcgatactccctaaaagttattatattaaactatatgggacccgatacttagttggaccaatagcgatattaacacataggagggtgctaggcatcactggtgtcctttagcatttctctaaatataaaagcataacatttattgtaatgcaaattttgcatcatgctatattgtaatgtaaatttggattattttttatcatgtgagatttttgcatcataatttggcacactattagagtagactttaacaaagcaagttgtattttgtatttgcattactaatttgtatctccaatattggagatgctcttagatcttgcacacatatatttgggtcattgtcaaaagttctttctgaggcaattttgaggcaatttttgttagaatttattggggtcacaattgtatatataaaatgtgtgttgg

SEQ ID NO: 401500 - DNA, 641 bp, Cannabis indica
tgtgtgtgtgtgtgtgtgtgtatctccggtaattatgttttgagatagcttcattttttttttaatgactatcccttgtaccagttggtgcatacacatatttcgaagtgtgtgattgtgtacattgtcgttgttttttttaaagcttcttgctttgtaataggccattttaggtatgtataatgcatatatacatatcgaatgacatttacattttaagttagtattggtttttttttacaagttatgttttactctcactcgtgtagaatgtaaaaagtagagaatgttttatcatttcaataaaactaaattagttaatatacatatatataaatatatattgtatgacactaagagtagaaaatgcgaagatgtgtatatacatattaagttttatttcttaggtctcatcttaatgaaataaaactaaactagttaatatatattatgtgacacaaagagtagagaatgtgaagatataaatatatgtatatatattaagtcttatttttttttagatcttgagaccttttattatcattctaagaaaagtacttcttaatgtattttatatttgtaacaggaagtgttactcctgtgttaggatctaagagggtgcaatagccactaccttttat

SEQ ID NO: 401501 - DNA, 333 bp, Cannabis indica
acacattaaataagtaatgaaaagaaaatctgtttcttttcgataaatgaatataataaattacgttcaaatagagttttatttagggtacaaagcccaacaaactcccacttacactaacatataataattagtacattttaattaatcctagattcagtctgtacttttcaaatgtaattacagtcaaaattttggtgaatggatcagctaagttgtcttcagtatccactttgtccatcagtctgtcccctcttgccacatattccctgatgatgtggtatttcctctctatgtatttgcttcaattgaggctttgaggccctttactat

SEQ ID NO: 401502 - DNA, 611 bp, Cannabis indica
ttctaaaatttttatattttttataatttttttgctataaaatgaataatgaatttactaaacttgtatttctttttgaatatttttatgtgtttatttttttttaattaatttattatagacattatgatataattagtttttaaaatatgtatcatttaaataaattaaattgaaattaaaaaatatatatataacaattgatataaattcatagaaaatttattgtatgatttcaaaattgatgacataaccttatcacacttgttgttattacattcaaaatcattatcatcagtattgtatctcatttgtcgttaccgatttttttcctaataagtttgaatataaatttatagaaaactcattatataatttcaaaatcgcagtattcttatttgtagttaccactacatctaactattgtaactgttattatctttcaggtttaaataaataaaatgcttttctcaaaaaaaaaaatgctatatttgctaatagaatataaatataataaattatcaaaataaatgataaagttttttaaaaacattaattaattatcaatactaatttatatatgttttttgaaattataaggatttttattt

SEQ ID NO: 401503 - DNA, 731 bp, Cannabis indica
tagaatttgtattatgtaattatatatacttatttagtagtgtaaattttgttcagtttctatacgtagatagtctttccttgaaattaaatgaaaattttcttgtgatgttttgttatgttaaatactattacagagttgtgaaatttataggggaaaaaagaatactttttatgcttttgcttttttagcaaagaaattggtattctatgtttgggtgataaagaatcaatttttttatatgtgaagcataatataaatctgggattgcttgaatacctcaattgaattgtttgattagtatatactaaaattatgggcatttttatagcgtttatgtgttagtttttttataataatttactaatttacatataatttcataatttgcataaacgagttactaattttaggtttctcaaaagccctaactgtctccatgaattcttttatgaacaactgagttatcgaattgtggtatttaatatattcaattgtgttactctatactctgcagtcgtttttatcagtctgagatggacgaagccaaagaagataaacccatttttagggacataaggaggtatttctgtgactactgtgggatttgcagatctaagaaagctctcatcacctctcacatcctcactgaccacaaggtctgtcacttcctcctcggttcctttttttttcattcctaacaaatgttaaatcgaattgggatttgtctc

SEQ ID NO: 401504 - DNA, 513 bp, Cannabis indica
aaacccaacagcacgttgcaatgaacttagtactaagattgaagagttgacctctgctttaaagaaagcccaagaggaatttccactgacccatattttcaaaaacgagttgggcgtagctcaaaaatcttgcaaagaatcttatgtgagtgttacagtttttgaagaagacatgagaagaaaagatgagatttgaaggaaaaagatgaacaattttcactaaaggagaaggaaatcttctagttgtctgaagtagtttccaaagcacagagacaaatggctagtaaaaaaatgaaacaaaatcgcacagttttagatgaaaagctcaaattgcaagacaaaatttgtttaccacatacataatgtcagatgcaataagataattgcatgctgatgtagatattttcatatggctaattaggatttttaccttctgaactttgacatgtatcaaattatgtcctttgaacttttaaggtcgttaaaaaagtttcatgaactattgagattgtt

SEQ ID NO: 401505 - DNA, 741 bp, Cannabis indica
gaacctattcctagctatttgttctgaagtcaactgtggcatccatttttcaaaataaagtactaaaattttgaaaaacattatcttaagttataagctcaaaagttctattatctgtttacactatggctgacaacagagatcttgaaaaagatgcgtaagttgacgtaaaatattttggcgagtcaagagattctatgaggagaattattaattaataattaatattattaactaaataaaaattaaaaaaaaagacagaattaaggagagaagagatagtgagatcacaataattttatagtgtcacgtcaccgtttcatacttctcctttatatatagagattggtggtcacatattttttgagaccacaatgcatatgtaaatattcattgatcatattatttaataattattggtccttcctgatatataattaaaataatggtaataataatatattgttcttattttctattagtaattatttggtgctaattttgtttagatgcttaattatggtggtaatctttcgaagaattcgcttgaacgctagtttggaattagtaagctacttaaactttgtttctttgtattttataaatcctagaagagttgaatatcccagatattcattcatagtaaagtaagttctgggattgcatgactgcggtgaaagtagaatatgcatgttagaagagtttgaatattttggatattcatccgtagtgaagtaggtt

SEQ ID NO: 401506 - DNA, 485 bp, Cannabis indica
aatcatatataactttacttattattaaggtcaattttcatttatatacaagcaaatgtacaatattataaaaaaatatgcaaaaagaaaaacataattacataattcaatacaattttataaatattacaaataaacatatatgtttacaattttaacatgttgattactttcaatttattttattaaaaaagacgcattgagctaaatatgtaaatataaaagttaatatttatattttgatatcttaataaaattaataatatgtttactaaaatttaatatgaaactaaaaagagaatatacaaacacatttataaactttatttatgtcttataaacaatgcatatacatatgtttattaaacatttgattagtattattaatgtttataatatttttattaatctagtatgtttattatgataataaatataatttgtttattttttgaataaaaatcataagatctattaattaataa

SEQ ID NO: 401507 - DNA, 592 bp, Cannabis indica
tctctattcggccctctttgagcggcaagaagttggccatttctcttggtgtttcaagcattttcaatcaatttaggtgcagttcaagttgttggtaagatccttgaacttgtcttgttattttcttgaatttttgaggaaaatggataggttgcatgcttagttttgattcatagttgctgctgtgtttttgatgttgtttacagaagtttaatcttgattatttgagtagaatagagctacttgtgatgcatgttgtggtgttgtttaaagttatggaatttttactcaaagctatggtttttcaaagtgaaattgtgaaatttgttgctgttaagattgtttgtgtttgaattcggtttctgcagtttttatatgcatggttgagtagatttaagcttgttttgatgcttgtaggtaagctttagccaagtttgagttttgaactcaaagcttggagctcacatggcatattttgtatctgtacttgctgggttgttttgatgctttagaaatgttctttggggtatttagaacaggtctggaaggtttggtttaaattgggtttgatttgaaagagttgtgaattttt

SEQ ID NO: 401508 - DNA, 851 bp, Cannabis indica
tactctcacaactatatttattcttatcttcatttactttacttataaattttaaattctcaaaaaaagtatatattggaacaactatcctaatctatttgctaatttctctaactactttatttgctagatccattatcttaatgctaattattaaaatttaaattatctccataacacatatattcataatacttagttagcaacaatattactacgtataactaatggttcccatatatcattcaagtgtccattacttgaacatataactaatagattattaaatttcaaaataaatatttgtctatgattggtatttatgtaacgagtcattattcaccttgaccactcaattatcgtgccctataatgcggtccaaataaattatatttgttctaagtcacgatcaaaatggactacacctaaagcccataatgatctataaaactctaaaatgacataatttcttagaacttagtaaaatactatttaatgagaaaaaaaaaattctaagcactcctctatctccacaacgagattactaaaactatgtactatagaaaaattgtaaatattttggttattacatatatcaaaaacgaaatgtcgttttccacactgtgaaaaacaacacgtcgtttggggttgttttcttcagccaaccgggtcattttgacccgtttttctgcacgtggatccgacggacccgatccaaacccgatcggaaaagacaattccgacgaccgaaaaggcccaaataaattctaaatgaatctaaatgcaaaaattaagacattcatatagattttatgcatcaaaaatacataaaacaaagactttaaaaatca

SEQ ID NO: 401509 - DNA, 528 bp, Cannabis indica
gactccatttgccatgttatatggatatgaagctatgctccccgtagagttcgagccaccatcccacagaagattgacgcacaaccaagaagcaaatcaagtactccttgccggatcactggatgaaatcgatgagaaacgaaccacaacaaacttaaagttgatagcccatcaacaaaaagtagctcggtatttcaacaaacaagtgaaggctcgaaaattctttgtgggagatatggtcctgagaagagtatttgtaaacaccaaagacagtacggcaattgtactcggacctaactaggaaggaccatattaggtggtcgaagttctcgaatcaggagcatacaaattaggtaggtatgatgaaaaaattcaacttgttctagtaccacggtatttgaatgtgaaacatttaagaaaatactaccaatagaagtaccaggtcggatgaccacctcaagtactaaataaaaagaacatttactcttaagtgaatggccttctaggcggaccacacccaaaggtttg

SEQ ID NO: 401510 - DNA, 1093 bp, Cannabis indica
attgagtgtaaaataagttttaaagtggttgaccaagtatggagatagtgatgattgcaaggaagcaatggtagcatatgaaccagggagtagaaccttagtggtaatgatggaaaaaagaacacgagagtcttagatgttgatgaatcatcatcatcaatgggagactcactataagttggtatggtaattcgtaccaaggggttatcaataaaacaaagaatatacttgaggtatgtatatttctggatgtgtttgaatagattaccaagatttctaccaaacaaaaaaaaaagaaaagaaattttaggatcaaggaatgatctttaattaattgttatttgttgagaatttgggaaatgggtatttccagtttagttgtgggtacttggtatgagcaatgttgcctccaccgtatagtatacattaattcactttataatggtagttaactttaagtgattgagaaattttaaagttgtgtcagctcaagagaaattgatgcaagttaaaataagtagaaacaaacaagattcaagttcacaataagatgggaattcctcaagtttaagtgaacaaaaaccgatgaggaattgcaagaggttaatgaagggagtgatggcaattgaatttttttttacgaaagaatgaaagcaagaaatacaattaagaacgacaaaaaaagcatctaatttctgataacccaccatgagcttactttgtagttaagcataactaatttgggtaatctcaagatgggaaatctttcggggagtcatcccaaaaagcgtatgagtgaggacaaagtacaccagaaagattcatattaggatgcagaatcgatagtcgttccagagattatcaagaggaatggatgtgttaataagtagatattgacaaggtattgagaggagtatatagtaatgggtggaaataagaagtactcaaattgaatatctatcagaaatgaatacttaacttattattaagctaagtcagtaggtaagcttaggaggtcccatataaggaatggaaagacataattatgaattaggtattgggggatcttttgatttcgactgaatagtaattg

SEQ ID NO: 401511 - DNA, 644 bp, Cannabis indica
cagtgcctgctctagaaattccattggcacctgaccctgctgtccaggccgaaccagttattgcagtgaatcggatggaacctctgtatgaaaagttccaaaaacaagcacctctagattttatgggaggtccggatgttatgaaagccgagaaatggctaacagtgattactagaatgttgaatttcatgggcatcacgggaaatgataaggtggtctgtgccacttttcaatttcaggaagatgctttagtttggtgggacatggtgtccatgatacatgacgttaccacaatgacctgggaaaagttccaggaacttttcaatgcaaagtattataatgaggcagtcagaagtaccaagagaaaagaattcactcactgactcagaaagaaaatatgagtgttactgagtaaatttgatcgcttggcgaggttggcctcgggaattgtgccaaccgatttcagtaaaaaggagaaatatctggatggattaaatgggaagattagacatgatctaatgattactactgacgacaaaaccacctatgctaaaattgtggataaggcactgcgagctgagggcgcagttggatgcatgacagagtctgttgggactccaatggttggcggggctcctacccct

SEQ ID NO: 401512 - DNA, 626 bp, Cannabis indica
ctctctctctctctctctctctctctctctctctctctctctctctctacaactacaatttttttttattatttaatttcttatgataatttttttttcttgtttgctaataacatttcagttaacttattataccaaccaactcattcattattatcatttttgtatttgtagtggcaacttttatattttgaatactttgaatgcactttctgtagtaatacttattcagagcactgttattaattgttgtttcagattcacttatttacccttaagttgtataacactaatcatagggtttgacaaaaataccctttcatcaaagacagttacaaagatagttacaaagacagttacaaaacagttacaaatatctatagggctctgccctagatcagatcacagaacagtatataaaggaggtgcttttctcagatacaataagaaataatatacagagcaaaaataaagagtcacagccagagagatacaacaacagagaacaacatcagaaataacaacaaagtaaaaagagagccttttggctgtgagttgtcatctccatgtgagctcctcctagagtgttcatgtaaaagaaaaagagagtttttgttagtatcaaa

SEQ ID NO: 401513 - DNA, 519 bp, Cannabis indica
tccttcttaataatcaatttttgtgaaataccttgtcacagtctagtatagcatcaactatcctaagccattacctacttcctataggttgggattcctttcataactaggtgtggagactgcttcttcaaccatttgtagacaggggcaattctatgcattggtacttagttggctattaataaataatataaatgacaatcttatttgataattaattttaattattaaataaataattttgacatttataggattagaattgcaaaatatggtatttatgaaataatagataaatggttgagaaaaagagaaaaaatataattagtgtagggccgactatgtggccggccactatgcccctatttttgctattattttgtcatttttttatattatataattcaatcctaatcctaaatgaattagtatataaaaaaaatagtctcttaatccaactaatgcttttaaacctagttttctttctgtcagacaactagtgttttgagacttcttctt

SEQ ID NO: 401514 - DNA, 534 bp, Cannabis indica
aataaaataaaataaaaaagagagtgaggcgtttgtgtcttgacttgtgggctaagaaaattttgagctttgtttggtaagtatcaacatttaatctaaattgatttattttgataagttaccttttaaagtttgatatcatgttcattgtattttgtcattgatcttgaaggattttcttaaattgcctaattttgaaaagtattttggttattctagtttctttttatttattttttaaataattttggaaaaagagtggggcagtttctttgtgttcgtggactggtggtttttcaaatttgaagttggtttccttttttgcgcctctctcccttgattatttataccaactctctttgtcatttattctcaccacctacccgattcctcttctttgtttccttgtttctttatttttctttctctctttcagatgcccatggcgaagataaagaacttaagccaaccaaaaagtgtaaagcccgcttagttaatttggaaattatcagttgtttatgattaattatgaaa

SEQ ID NO: 401515 - DNA, 1044 bp, Cannabis indica
atatttgacaagtaatttggttattaccaatctcactatcctttaccaacaaaacatgtttttggggacaaagtagtgttgagtagtctccatttcaatctaataaagacaactgccaaattaatcaaaaatattagttatatgttttaagtaagaatactaaaataatttaagtaagaatactaaaataatttaagtaagaatactaaaataatttgaccaaataattagatatactcaccaaatgaatcaaggaattgccgggcaaccaacttaaataataacaaaagttcacacaaattaatagtactatatgtttgatttcttatgccttgtgaagtggtatggtatatatttataagatctagtgaaccaaaagacaaaaagaaaaagtaaataaattctttgcttgctgcaataaatatattcataatcattaaagtttcaaaatttgtctaaacactttagtttattttgaaaagttgttaacagtattgcagagaacaataaccaatgatttttttgaaagagaaacaaaaaaaataaaattgatcaatattggttttgtaaagttgatgcattagttggttgtgattgtagtttgtagtttgtagatgatcatcatctccctagcccaatattattgcaaaagcacacctcttatcgtaagtctaattaatattgattaggcaaaacgcatgattggcatcaatatgcaatgtaaataaagtactaaaattggaacaaaaatcagcacaactataagctttacctctcttcttttttaggttttttgctcatttttacattcgactttaaaatagttttttttatttatttattttttgtatttttactgaaattcacaactcacatagcaattattggagtaacataaatcgcaactaaaatctttatagcaacatacaaataaactactagagcaatccaaactgtaaagttaaaaagaaaaaaaaagtcaaaaaatgttatatgtggtaatttcttttttaattgagataaaatatgtaaagttttaatttg

SEQ ID NO: 401516 - DNA, 598 bp, Cannabis indica
taataataataataatattcaagagctggaaagttttccatcaacaaatctagtaaatgatatatggaattccttcgatttttccgggtttgagattttctcaagatcctaattatatacattaaatggcatcatgattatttattcatctgatttgcctatatattcttacaatatttttgtaatttttgaatcaattaaaagaaaatatatcataatggtataaataggtaattatatacaataataatatcatatttttctgagttgtagtttttgatttttactgcatatatttatacttataataataataataataataataataataataatagctcttcgatcgatttagtgattgtgtactcagtggcggaatcagaagacgaaataaggaaaagccaaataaaatatatttttacctaattttttttagtatgtaatatttacaaattaatataaaaagttaattacttttatacaatatatataaaataatgaaaaataataaagagcgccttatagtgccaagtactaaaaaatactataaaaactgttacttttagtgacaaccttttagtcacaacataaattt

SEQ ID NO: 401517 - DNA, 514 bp, Cannabis indica
aaactgagcttagaggtggttgtggcagtcgtagccccgaccgccgcttttggtggagaaatcattgaatctcaatgtctatttaaacaaatctaatctctaataattttattaatgtaaatttctttaattttattttttaaaattttttagggttttcccatattgttaagattgtgttcttgtggttgtgcatggtggccggatttcagtaataaagtaaaaatttaaactttaatagttatgtatgtattttatattttatcgaatgtgtattgtatgtatacatattttgtaattgtatatatattgtatgtatatgtattgtattgtatatatatatgtatgtatacaaatattgtaattatattgtatattttttatgtattaaagtgtatctattgaatatttttaacaaataattttgttaaatattatgaatgagaatgacatattaaaacaaaaagtttagaaattatttcaattttttatcatttttttctattttttattt

SEQ ID NO: 401518 - DNA, 919 bp, Cannabis indica
ttgttggacccaaggaaaaatctgctatttgctttaagctgctctcgaaactgcttaaatttgagatttctcatgttctcggaagagaatacatacataatcggcgaaatcgaatcaattaatcgaaagaaaaaatcaaaaaatgattcgatttgattcttttgattgattgattgattcaattggttgtgtgattcggaggaacccatcgtcaaggagagactgagagttgagagtagccatttttgatgtagtttggagcttggggactatcatttcaggtctgtaaaagagaaacttaaaatatgagaacccaatttttttttacacatatatggcataaaaaaagtccataatagtgtaaacaattcaaaatatccataagcccaaagagttatttaaatatgccataaaaaagtaaacacttaaaaaaatcccataattcatgtaatttctactaaattattttggtaaattggtagctttgtattctggtgagttgagtgctaatgaaaattgattgtaggcagagacggacctactcctatcaatgtgggggctatagcccccactaacaaaggtattgccttttaaaaaattaaatggaatttttttaatttaataattatagaccaaaataataaaaaagatcccacaaaattaaataaatctagtaagagtaattataatataagtgtagatattttttattgataaataagccccacaaagtaaaaattctggatccatcactgattgtaggtgatatttattgatgctatctttgtaaaattgaatgctagctatactttacttgtaaagttgactgtaagtgtattttgcttgtgagagtaagaattgatcgtagatgtttcttgcttaattgattgtaaatgttgcttatgttgggttttatgcc

SEQ ID NO: 401519 - DNA, 563 bp, Cannabis indica
cttcgttccaatggttcagaagtttgggacatctagctttcaaatgtcccttctctccacagtgagaacatagaggaatacgtatgctcatttgttctttaattatttcaattgttggttcaatttcgattctagctctcaaaattgaactcgaagaagcagcattattggaggaatcatcctcaatgtcataagctttccttttggccttatctgtaatgctagaggaagccctccttgcaagtggcaaagtccgttcataagcacgccattcagcgtccagcttatctaagtcggatgagttaaaattattgatcatatatgatacaacaaatccattgtactcaggtggaaggttgttgagaataaattgaacccattgctcttttgataaatcaattcccaacagatttgctttcgggaatttaaggttcatcatgagtaagtgtgataagatgcttttaccatgaaacattttcacactatagagttcatttgcaaaggcatgtaataattaaatatcattaagcagaaataaattacttggttcaaataaattcata

SEQ ID NO: 401520 - DNA, 484 bp, Cannabis indica
ttcctcattttttgttaattttttcatttaattatgtaacattatttatttataaaaaaaattgtgacttttcattcttataaatctcattctattttattattttattgattaaacctcataacaatcttaaatttaattaatataatataatataatacttgagaaatatatacttatacatctactaaaagaaagttacatgcgaggcacgtatacttcgttttatgctatgtgctttctactttattataataatacaatacataattgaagaaaaaatattattagttattatttgaaattatttttacatatatccaattaatgaataatagggttgcaaattaaaagtaaatcctgaatgcaatatattaataattttaattgggtaaataccattttggaccttgtattttgtaaaagctatcaattggatcctgtgttttgttaaatgacaaaatggaccttgaattttctaaaa

SEQ ID NO: 401521 - DNA, 657 bp, Cannabis indica
ttttatatatttaattatggccttttggtttcattgctatggaggtgttcatcaatgatgaaagccattttcggattttttgtattttatgaataatgtttttttgtaaaaaatggttgaaatggatgttagaaattgatagagggttgaaaatggaacaaaacccctcaaacgccgttggttttggtggccaggaatgctccaaccgatcgggtcacgaaacgggtcgcgccgatccgagttgcagacccacagacccatggggaagtttgttgggtgacgggggtgacaaaaatgtcgtttatcatgggtgaaacgtcgttttttggagcagaaaaatgacttgtcgtttgggctctgtcagccaaacgacatgtcgttttgcattgaatggaaggtcattttttgagcagcaaacgacgggtcgtttttggaccctacgacacgtcgtcctccacaaacgacatgtcattttccaaaaacgacatgtcattcgagtagtaaaaaaaaaggaaaggccgtgggggcgcgtgcaaggtcaaattttgggccattttttaccaatttattccatttttagcattctatcatttccacatcttaattttatgcataatattaattcatgaatttattcataatcttagttattaatat

SEQ ID NO: 401522 - DNA, 675 bp, Cannabis indica
acagaggtcttagcttgaaagattgatctctcaaatcatcattctcaatggcagctttaagaagctcaatttctatcaccttcccactatgcgccttgtctaagttcttagacttaggcacacttcgcttagttctaatgaactgagacacatggggggtcatactcatcagtaaaccttctaattctcttcatcattgccatgaaagctcaacaatacaagttgcttacaatctaagaaaattctgattggattgtgaaaaaaattaagcaattttagaggaaatttttaattcactagaaaattgttttggaattttagaggtcttagaaaaaaaaatacaaagggttttgggagtctgaaaatcattggattaagatcaaaaaaggaggagaagaagaactctctcaaaaaaaaaattagcaacctaaaaaaaaaaaaaaaaaaaaaaacttttctaccttgagatgaagaaaacttgagggcttgatgaacttttaagaggcttttcaaaggcttgggcatgtgggatggaatgagaaagtgtgaaaattttcatttataactctcttatttataggtgagtgttcaatctcctaatactaaagctaatgtttgtggtaaatttaaagctttaaaggaagatgtaaatgacaagtaaaagatataattata

SEQ ID NO: 401523 - DNA, 974 bp, Cannabis indica
gctcggtcacttgggggcaactacacgcataaaaagcattggtaaaagtaaataacaacctcaaaaaagaaaacaaacatagttgcacaaacaattataacaacacggaatgatattcattgaaaaaagataatgaagcacggtaaatccgggattaaaggctgcccagttagccagttgtcttaaaaatgaaaaacataatccaagtttaaaaacctcttggctggacattttgtctcaaaagaaggcctataggccaaacagacatatactaaaaaaaaggaagaaacaaatattcaaacggcaggagtcacaggctcttggtacggatcgccttggtctaatggggccagaggatcaacactctgagcagcagagatttcgttgctttgatcagctggagctgtagaggtagtcgcctcggggtttcctttggccatcttagccgcgcagaaatcaagatacatgctcttggaatcaccaaggtagtcaaagtttccttcaggattggcattccaaaaatcgtagaaaaccttaagagcagctatctccagggactctatctccttcacgagctcctcctccctggtttgcttatccttgacatcctcctctagtttggaaagaagagtctggagactctccctctcatccttgagattattgacctccttggacaaagagatattatcagcctacagttgctcggtcgaaggcatatcttgcagctctttggttagctcctcaatcttggtgttagatgcaagaagcttcttattcaccttcccaagctcattcctcacttccgtgagttggcttctcacctcttaagtttcctttctggccatatccacctccctctgcagtgtgttggtggtagcaaggctcttggcagcagttgatttggctcgggaataggcataagccaccttcacattgacctgtacggaaaaaatgttagagtctgagctaca

SEQ ID NO: 401524 - DNA, 583 bp, Cannabis indica
cttctgacaatcttgtgtatgaaaaaagatgatgaagctcttacgccagctgctcattttgtcaccagctctgagagatggggagtaagcaatgttgggcttttcgcagggaatagcaatgctacctatacaagtaattcattatctcaatttcaaaatactttagaccctgaactataccaaactacaaggctttctgcttcatcattgagatactatggtctggggcttcagaatggaaactacactgtcaaacttcagtttgtagaaactgctttcgactatcctagcagctggaaaagtttgggcaggcgtatgtttgatatttttatccaagtaattaatgacagcctaattgtcttgtccccaagaatattttcaatctttttttttcaacattaatgttccatcaactgaattgttcttgctctttatgtctaccttatttgtgtgcaattatgacagggaaagcttgaaataaaagattttgacatcagaaaggaggctggtgcagtctctctccgagcagtccagaaggaatttaaggctcgggtttcagagaactaccttgaaattcatcttt

SEQ ID NO: 401525 - DNA, 1048 bp, Cannabis indica
aaaattaatattacccctacacctaagccctgctcattataggaaccatccacgaataacttccaagtgtccgcgtctcggtgaacaagtggattttcccctagagttattccttctattaagaagtctgcctaagcttggcccttgatggatgttcgagggtgataagttatgtcaaattgccccagtttaattgaccattttatcaatcttctagaagcgtctggttttgataaaacttgtctcaagagttgatcaattaagacttttattgggtttgtctggaagtaaggccataacttgtgagacgtgtggatgaggcataaagcaagtttttcaagagggggatacctcgactctgcccctagtaaccttctactaacatagtaaacaggttgctggtgctttccctcttctcacattatagctacactaatggcatcttgcgagactgccagatagaggagtaacgtttctctagttacttgttttgccaaaactggaggcatcgccaaatgcctttcaatattctgaaaggcctctttgcattcttctgtccactcaaatttcttgttgccgcgcaatacattgaaaaatggcaaacacatatcagtcgacttcaaaataaatctattaagtgtagtcatccttcctattagggcttggacttccttaggctttgttggtgatggcatatctatcaaagcattgattttctcaggatttgcttcaatgcccctcgcattgacttcaagggaaattttttttttcaggttaagtttcatattatacttctttaatatttcgaagcattctgcgaggttcatggtatgactcccacttttcaatgattttactaacatatcatcgacgtaaacctccatgtttcgtctgatctgattcgcaaacatctcattcacaaatcgttgatatgttgccccagcattcttcagcctaaatggcatgactttgtaacagtaaagtcccatgttagttacaaagctcgtatattcctgatttgggacatgtatttttatctggttatatc

SEQ ID NO: 401526 - DNA, 521 bp, Cannabis indica
cactaacaatttagaaaaactactaataccacttgtaatagggtataatttagcatatatacatatacagagagtcggtcttaaggtatatgaggcttaagacgaaattaaattttaacctctatatatatatattttaactattataaaaatgatagttttagtgcttagtgtaatggttaagcttttaaaagttcttaagagctccaaggtttaatccctcataactacactaaatattttttaaaaaaattaaaaagagtaaaagttggaaattgatcccatgatttcttagtttaaagaaagatcttttaccactacactaaataatttttattatatttttttcttatttaatattttatctatatattaatatatttttttcataatttcaggaccttaaacgttcggggacccgaggcgtacacctaatccgcttaccctcaaggccagccctgcatatacaaatacaaaactctatcccaaagtacaaaacaaagaaccatcaccactaatct

SEQ ID NO: 401527 - DNA, 581 bp, Cannabis indica
atataataagcgtatatttttatttctcatttttctaacactttttctttcccttacaaaaaaattaagagcacttctaaagtctttttttggtaatttagatgccaaaatattttttatttatggtgagatttctttgtgttaataaactgattttctcacataaataatgtatttaaatgcttctttctatcataggaaagaatctttattcagctgtttattttctaagtttggaaacttcttaagagaagaaattctcttatggaaagttaatttaatatggaaacttagactatagttatttctctttaatgtgtttaattgtgtcttaataaaatcatattaagcacactatttttgacacgtatcaagtccatatacataatcggacaccattttggcaagtttcctttttctaatctggtttgttgctgaagaacctgtctctgatgctgcaaaacaggattatcgtttaagaaagtctgtgcaactgtagaatcgactttgtagctgtctctatggttcctatgttctataaatagaacctagagagcagctaatcgattcaactcttctag

SEQ ID NO: 401528 - DNA, 719 bp, Cannabis indica
ttacgttaaaaatgttcatatgaatatatgcaaagtgttggtgtgaatcaaagtgataaatgattctattttgtgtttcatgcaagtaaaactggcttatgtgttgcgtattttacgtaagtttttgtatgagtctacaaattcatattttgagtatttttgtatcattgaatgcgtaggatcttgttctcaacaaaaaaatttattgaggttcctgaagtagcaagaaggtattcttaacaacagaggtaagaagagtggacatctgagcacagggtgtattttgaaacatacgactttattgtgggtttgacgttcatgtgcttatgagattttgtattctgaattgttatttatgttagttttgttagcatgtgatagtgataaggcttttgactgtttgtgtgacaataacacttatatgataggttttctgctgcttgtgtgagtatagcaccggctggatatatttttggctgcttgtgggtttacttgcaggttatcctatcatgggtgagtacaacttgtgagaagggattgccctattggatgccgagtgtgagaacagcacaaggcaaggcaggttacacttcatgtttgatcaacatgagtaggagtagattatcatatgcgaggataatgtgcgataagatactctgttatgtatgtgagtataatatgcattcagtttataatgtgatatgatgttatatcgtatg

SEQ ID NO: 401529 - DNA, 866 bp, Cannabis indica
aatgaaaatttttacctttatatttttcatacctaattttttttttattttttttttctacttattaaagcttaaaaaaaaaaaaattaaatcttttctttatttattttagtcattggctgaattcttttttttttaactctaacctttattattattattattattattattattattaatctttctttcttcttctctcttatttttttttttcttaattctcttctttttttttctcaaactatttttttatctttatatatgtattaaaattctttattttaatattaccaattaattaattaatgaaatgacaaaataataaatattagtactgaaacagttattttgtagctacagtaacacaactctgtaactgcagaataaaatcaacaaacagtccagaaaaataaaaacacacacaagtgttttgtacgtggtatcaataatccttacatattattactaattcacaggaccacacctagtaggggtatttatcaaactgcctgcactgcaaaaaaaaaatacagtttgaatttttcttaaaccgcacggtgcggtgcggtttgcggtttgaattgttaatatgcagttcaaatcgcaccgtatattataaaaatactaattttatatttatttaggtcaaatatgtgaatgtccagcccaaagcccactaattattctattgttaaaacttaaatttttttttcatatttattttcaagccttatgatatttttgacaagtgttgctcaagctttgttgtatttgtgataatttaattatttggtgatagtccaaactgcaaaaatcgccaaaaatcgcaccgcactgcacccattttttgcagtgtgatttct

SEQ ID NO: 401530 - DNA, 787 bp, Cannabis indica
tttataagaagggaaggtaaataaagaaacaaaaacaagcaaatcatttagttaacccgaggaggaagacggggacccctgtgttcctccagaatggcctaaagtttcttattcttctcctagaaatgggccaatacttcctcaggattagggtagaaagggagacgaggttcgaagttgttagctttccagcacatgaacacatcgtcatcagagcgcttcagacagtgttgacaagtgactggggccagcatggcatccctctttgctttagctgcttctttgcgatcctgctccttaaacttacggagctcctttacttcaataatcaggctagttgttgtttccaaatcagtccggtgcagctcctccaaagattttagcttggcagctagttcttgaacttcttccctgaaatctcaaagatccctcctcgctgcaacaaaaacctcatccctggtcttcgatgcctcccggtggttctgctccataagagactccttttttgggcttcatcatggattaccttcttctgctcctctaactcccggagactcttcatcgcctcctccataccaccaaactcagacatagtgtatccgtgatcaattaacatctttgagagacgaccgacctctactacaatctagcagtcaacaaatatatatatatatgttattagaaccttcactactacaaaatgtgtaatttgcgtcggtcaacgcgtctccctaaaatggttgaccgaagtaaaaaataggcagatattttatgcttttgtagataa

SEQ ID NO: 401531 - DNA, 669 bp, Cannabis indica
ggtgtaagctccaaccgaaataattgtcagcttgccactaggataggtattttgctgatgtggcagagaacaaatgagtcaaatccaccacaaatccacctgatttgattcacttgttcactgtctggacaaatctggctgaattgatcatgtccttgcaatctagtatgtataataggttcaagcaatgaatgaatttgtccctggtaacactttttgtaaaaatgtcagcagggttatcatgagtgcaaattttctttacttgaacttgctttgacataactacatctcgaataaaatgtagctttatgtcaatgtgttttgatctctcatgaaacataggatttttcatgaggtgcaaagcactttggttgtcacaatggacaacaatatcttcagagtttaatcccaattcacttgtcaatcctttcaaccagatggcctccttaacagcttctgttgcagccatatattcagcctctgtggatgacaatgcagcaactttctacaaattcgatttccaactcacacagcttcctagcacagtaaatacaaaacctgtgcagcttcttcttgtgtctatatttgcagcaaagtctaagtctacataaccagtaacctcttcttcatattggtgttcacatttgaacacaataccagtgtttagtg

SEQ ID NO: 401532 - DNA, 632 bp, Cannabis indica
taaattatttattaaattaaaatctatggaagctgatattaaaatgcaccaatagcagtatgctactttttgtagtgcttggcattttaatatgtcctttgatattttctttattaatatgtaggggtggcaaaacgggtttcaacacggcacacgaacacgaacacaacacgaattttacgggttagggtcgggaatattagatgcgggtcgaaaacaagtcgacacgacttaacacgaaataaaaataggtcaaacacgacacgacccgctcaacacgaatgtgacacgtttgacacgatttttttaaaatataataaaataaaaaattaataataataatataattatataaaaatatatatttagtgattcaatgttaagttaaaaaaattttaatttaattttctttaacatgaaattaaaaatatttttaatttttttaatttttattatacatacaacaaactatatatacataaatgtatataagttttttaatggagcttaaatttattaattttctctataattttagctttaataatagcaaaacgggtcacagtgggtcgacacgaacacgacacgattttttacgggtcgggttagggttgagataattagacacaagt

SEQ ID NO: 401533 - DNA, 714 bp, Cannabis indica
aaaaaagcatatactttctagttcttataagaacagcaattgaatcaaactcaaattcattgttttaatctgctatatttgtatatttaagttgaaaaacatattacaacctctactttacatcccaatctacctagtaatgttaacaacagaactcaccattatgataaagttacaaacactatttcagagacttaacattgtaaaactaacatagaaaaacttgtgtctcatctcacaatcaatcaaaactaacgaacaacataaaacatggtattttaggctctataaagataaaaatatatctatatcaatatatgtctacattgaaaattaattaataaataaataaagggaaaaacaaagaagaaaaacacaacaaattccaataaggcatttttacaaacacatggtatgcatcaaaaaataaggtgcacatattttaagtctatgatgaaatcccaaatttgatatgcattaccatatatgaaaatactaaggaaaaaaaaactcgtggattgaagaatgtgcaaaggaacaaatttccagttcaaagaagttttgtacaaagcaaaaaaaatacaaaaaaccaaactcgaggaatatctattctatataaagtgtgtctatataaccgaattcttggtttatgagaaattcatgagtgactttttatttatattaaaaataaaatggtttattattaaaaataaa

SEQ ID NO: 401534 - DNA, 603 bp, Cannabis indica
gatttttcaagcattattcatcccatataagtgttgctcaagtgcttggtatgatttctatagctttctttaagtttcttggaatttttgaagaaaatgagaatttgcatgcttagttttgatttatacttgctactgtatgttgctgttgatttctgtagttagaacttgatttaaaatgttgactcaagcatgatagggttggtgattagttggttttatcaagagatgaaaattttacacaaagctatggtttttcaaagtaaaattgtgagttttgttgctgtggttgttggggtcaaattcctgtgttttcagaggttttattatgcatgtttaagtaggtttgaactgatttggatgcatgctagttagatttaaccaagtttgagttttgaactcaaagcttggagctttaatgatgattttcgaatctgtgttttctggttggttttgatgctttagaaatgttctatgggggtatttagaacaggtctggaaggttttgtttaaattggatttgatttgagcaagttatgaatatttgcatgtttcctgcgaggaatcggtattccggttgtacatccggaattctggatgggg

SEQ ID NO: 401535 - DNA, 995 bp, Cannabis indica
gattttaatagcttgacttgctccagtaacgtccatggggaatggctcacctggtacaaccttagcggggccttcaaggactcaggcgtagccacgtccaaatcccagaacgccgaatccatggtcgtcctcagcctcgccatgttttggaggagttggaagtttatgtgtattttaattttgtaatttttttaatttaaaaaaataagttttatttttattttttatacatcataaatatatcattttaattttaaaataatttttaaataagttttaatgaattttaaaatgaaaaataaaaatttatgatgtggactaataaaagggtgacacatggatacttacttggaagaaaacggagaggtacctacggaagttccagaagtgtgacggaaggtatttttaccgccaaaaatacgacttaagtatttatctgctactcgggataaaacttaagtatttttgccacaaattactcaaaagaaaatgtatggctatttgaatgtataaagtataccgagtatgaatataagataaatgaccttcggtatatgctcaaatttaataagcgatcatatatctatatataaaatgtaatgtacgtctttccatgtaattaatcctaaaaattaattgtaaagtagttattcccttacatttgtttacttatttaaataaaattatgaaagaggaaacttaattaaataagaaataaaagaaaagaaatacttctcttaccaatattttaaagaatgtcattaagggtattaatttttatttatttttattttatttttaatattaaatatataacgacaagttttttatttaaaatatatattacaaaataactatcatatactctagtttaactcaaaattgcaatttagtcaatttaagtattctaattacgtttcttgataaagtaaataagaaaaattattattattttatttctaaacaattttagtaaataatatattataaatatt

SEQ ID NO: 401536 - DNA, 972 bp, Cannabis indica
tttattttaaatctgcaaaaatacaagataacaactgtaaaaatgctccaaacacgattaaaactcaattaaaaatatactaaacttaatctaaaattaatactaaaaataacctaacagcgaccgtaatgtaacaaatcggcgacatcaagtgacaatatttgttgtgactaaaactaaattagtggcaacttatatctaaatacaatattttagtcacaaataactatttgttgtgactaaaagttacatttagacacaaaaaatttatgttgtgactaaaatagtgtcactaaatgtaacttttttggtagtgatttacgctattagtgggccatgttacacgcaaatcttagcaggttacgggtatattcatatccagataagggttggaaaattcaatgcacaaacactataacaaaaagttatggttcttaagcttgtaaataactctattgtataatacttcaaagcgttttagctcaatacaacttattcgaggattaggatttattaatatctccaaatcacgtaaaaatttctatctttttttttgtttatttgatttattttcttagttcatattttaatatattgagtttccgaaaattttagtaaatagttttaattttattttatttttgatgattatttataatgtagttataagattgttctttataaatttttaaatatattgttgtattaatagattgcttttttttttttatgcaataaattcttatttaaattattcaaaaagaaaaaaggtaaaaacttgtgagaaaaatctcatgtgctaaacttcttaattacagtatactgttgctcatcacacgtaagatcatatctaatgggagatgaaaaaaattgtgttatatttggcacaaaaaataattttgtgataaatttataccaaattttagttttgtgctccaatacacaattacaaaattttaatataaaatttaa

SEQ ID NO: 401537 - DNA, 99 bp, Cannabis indica
agaacattagtacttgtttaaacaaacactttcttatctattgactatgggatgttccacccctaatcacttagaatagctaacaaacatgcaaaccat

SEQ ID NO: 401538 - DNA, 440 bp, Cannabis indica
atgtaacattcattaagtatttttgtatgtgcacttacatatccaacgagattgagaggactattttcttcataaagggatctactttttctcccacttacaatttctaagatcaatatgccaaaactgaatacatcggactttattgagaatatgccatcagaagcatattctggcgccatataaccactacatcataataattattagtacacaataaacatacattagaaaaaaaaagaacaatttgcggccaaatttccttatattttaatttttatacacttaaccctcttattctttttttttcgtggcaaaactcccgtaagtttatttttctttgcaaatttaacactccagttaaatattactgttaaatatcaattgaatgaccactgtatacatttgtgtatatgtaacaataaaaccttgaagttgat

SEQ ID NO: 401539 - DNA, 789 bp, Cannabis indica
aaatattaaaatatcgtaacactaaatataaaatatatttatagtgatgtaattttcattatgactaaattaaaattttaatttggatcaaattctaatatgtaagaaatttacatcaacttttaacacataattagagtatactttttataaaataaaactatatattttagcatagaaatgatctaattatatattcacgtgaaatatgatgaggatatgaagttaatttgggtttagggatgatgattaagtgtgatcttgtcaacattatgatgttccctactcgtttgggatgattcattgtatcatagaataataatataaagttttaacaagcatactctgacgtgtatgtatgcatttgtgcattttattgttcacttttccatggtacattgcttccaagggacctttttcgaatgcactgcatacaatataatatatatagcaaaaacttaagactttggaaacggacaatctcaaatttgtactaaaaaaaaaaatgtattatatttagtccataatttataattatattttaatacacaagatgtaaaattaaaaaaacaaaataattaattataagaaattatagcaaatgacttcaaattatagcactatataagtaaatgtccttattttaaaatttatagataaataactcttttacactatttattatttatattgtttataatcacataaaaaaattaataactgtttttcatagttttttttttaaaaaaaatattagaagtagtatattacttaaagatcatagtatat

SEQ ID NO: 401540 - DNA, 1164 bp, Cannabis indica
ggtttgtatgaatgaattgaagttaatttggtgtaacttaggaagtgtggttaattgtgaacatagtagtgtattgaaaggacttttataatggtgttggacatatagtaaagaagagaaaagaatagagggaatttgttgtggttgtttagtgtgcaattgaaaaagaagtgagaatgtcgaatgttaagaaggttgcccgcagataaaaacaaaagtcacttcatgaaattcctaaattttattgtaagacagccgagattaagtattacaccaaggtggacaatagggaattctatatggagcgagaattagtggcaaatgtagaggacattgacaagttacctaaatgggtgagtgaaatgattcaaaagagaaattggagattttttgtcaagcagccagaacatgcagtaatggaagttgtcaaagaattttacgcgaattttttgtcccaagaatggccgactgaagttattgtgcgtgaagtaccgatgtcattctcagctgaagcaattaacaacatgttcgggttaacatcagtcaaatgccattacacttccctcaaaggtcaagtgagcaatgagacattgtctgacatgatgtctgagctcgccaagccaaagttagagtgggacctcgatgagtatggaaaccttcgatttcggcgaaccgacttcattattccaatcccctaaaaataaaatttcaaccaaatcaacaaatagagatttcttcaatcaaattaaacaacacaagtattttattaccccgaaaatacataaatcaaaatacaaaatgacaaatttgttcatcactgttggtaatcaaaaattaaacaatacagtacaatgcacactttagaatcagaacacatgcacggagacagagagagagatagatacctcaacagattaataaggggtgtacgttggtcgatttacgttacattttatttaacccaatgtatagaccggattacaaaatctaagtgcaacccgcctaattaaaataaaaatttcaacccacccaatgaattggttgatttagtcgggttaacccgtctaaaccgagcactaatatttattttctttttcacattcaattgttatattttaatttttatgataataagataaatataaagattgaatttaaagttca

SEQ ID NO: 401541 - DNA, 576 bp, Cannabis indica
ctactatataatataacactttgaagaaagcatatagccgtagccttcattttcaatcctagaaactaactaagattaactccccccataaatcatttgaactgggcacccactatattttatgtttcactcacatttatacaaattaataataataatgataccatgatacgtcctacgtacttgtcgcgtaacgtaatatatctactttgagatatagccatatatataggggttgaaagtatatttagctaagttgtagagtagagttttgcaattaaatagaggtatataatgattaggctaattatcatttttgctccctgaactttgacatgtaccaaatcatgccttctgaacttttaagatcgttgaaaatgcccctgaactatttaaattgttggatttaaggaattttttccaattttagtaaaaaagtctaacatggatgaaagtccaggggccatgatttagtacatgtcaaagttcgaggggcatgattttgtagatatcaaagtctggggagcatgatttagtatataaacaatcactgaagtagtaaaattgaatgaaatt

SEQ ID NO: 401542 - DNA, 953 bp, Cannabis indica
aaaggcttaatgtatcacatatagaaactgacaatgcaacatagccaaagtataaactttgtatatacctttgtcaatttaaagaaagtctattggatctcaagctttctatctaatacaaagtgaaattaaaatgtaattcactcttgaaaaaatcgcttccgttgacactatgttgggaggagcttaacattttattcacaaacatagttgcaaatgaatagaaaaaggtaatatggtggagctgagggaaaaaattaccgtacaaatgggattgatttcacatgaaagaaacaaaaacatttttattggaccaaaatcaaaaaattagaacaaaacctcctataattcattattaacacatattcatattataaaactctaaacaaaacagagaataatttgataaaactcaaacaactaaaaaaaaaaagttttcatcgtaatatgtacctgaacagaagtccgactcacatgttcgtcgatcgactgcagcttttactctgtgtgtttagatgtaattaataggtatatatgaaaagaaacagcagcaacaacaacagataaaataaagtaagaaaatagaaagaaataaaaagaaagagcaaaccagtaatgcaatagaaaataggaataaagaccaaacaggaggcgttatcttctacggcgccgccaatgtcggtttgggcgaggattaatttctgggtttgggcgaggatttagacgagagggtttgggcgagagggtttgcgtgagggtttgggcgagggtttctgggtttgggcgagagggtttctgggttgggacttgggggttgtacgtcgagctggatatgtcgatcaagaggctgacgtttgggattttagggatgactttttatcccggttatttagttaaaaccgggataaaagggtttcacactaaacccttttatcccggtttttaactaataa

SEQ ID NO: 401543 - DNA, 478 bp, Cannabis indica
cccaagtcttccctagctccgactcactctcttcattctaccacactatccatcatgcatagtacgaaatcttgttttctccatcaaaaagttgttagtgattgtttcgattcgttatttgtagatacttttagtatatttggtatacaaataataagttataatttaatttttgggcaattatagaaaatataatttttttttttttgaaaattttatatttttatgttcaaagattttgttttacatttttacgatgttctataaaaacaacaagaaaattatataaaagtaacagaaaaataatatttaatcaacaataaaatatagcatacaaataataaaaatataaaaataaattaaaataagagtataacataaaaatatattaaaagaccatatttttataaataaattataaaattgtaaaaatattaaaattccgtacaaccgtattttataattttttattgttttt

SEQ ID NO: 401544 - DNA, 580 bp, Cannabis indica
atttcccaatataaatttaatttatttgatttatatttttttttatctgaatgttgaaggtttttttttttacgatcctgtattttttttttacccttagatcctgtatttatgtacagaatattatcaaaattctgcaattaatcgattctctattttgtgatattctacttgcatttaattttttcaattctaaccccgcttgtaaaaaaattgtgtctttaacttgttcttgttattattaatggcatatttattaataagtaatgaaaatcaatagtaaattaattattttttttatatttgtttacttacattattaaaattaagaaagaaataacttaattaacctaatgaattttaattatttttattttattttggagagttatatttgcagcccataaaattataaatacaccccattactcttaatacttttttaaaaaaatttcctcacattattttttgttaattttaatgcttattttgatttcattttcataattttttctaactcatgtatatatttttctatttttttctaagaaaatttcagataattttttattttaatttt

SEQ ID NO: 401545 - DNA, 661 bp, Cannabis indica
catgtatgcttgttggtttatcattacaaaaacaataattcaaatcaaaagtaaaatggctctatatatagcctataaaaatgccaatataaacttaaaaaatgatgtgggattaaaatccactaaatttttcattcaaacaaaagagttgataaagtcaactttttccaacaatcccccacatgaatgaaaatgactcgagaataaccgacaaatggattagaccttgtaaaagagtttaacatttgaaacctgtataggataggtaggtcttaccctttgaaccttccctcgcgtgagtatatttactttactagctgctcagtagacgcgatgtctttgaactgttctaccgttcatgtaaacgatgatataccacacacaagaatctctcatggcatactttagttctcactaatatgttcgttttggcccttaacattttcctgattttgcaagagatattctaggaataattaatccttaatcaattcttatagaagcgacccatgttctctcttatataggtgattacttatttaagagtaactcgtattactctgctcgacgtacgcataagaatcattaaaagcatagcttaacctttccttacgagtatcattgtttcatcataggaatggacttgaggataacccccaca

SEQ ID NO: 401546 - DNA, 626 bp, Cannabis indica
ctactcctgcatatgatagggatagtggtgattccatcaccgatcaaaaaagaaaggctatcccgacatctggtggttggggacagagtaagcggtttcgatggaaccaaggcagaggtggatgctagggttattcttaccttgagtgcccacgttgtaagaaacatcatcctagagagtgcaactggaaaacatgcttctagtggggcatggttggacatttcaagaaagattgccctcaagtgaaaaaataatagcagaagcaagaggcaaaacccgtacatgcttgggtgtttgctatcatacaagttgatgttgtagccaatccttccgtggtggtaggtcaagttattgtcaacaactcctattttactgtactatttgactctagggctacacactcatatgtggcatctcgcgtaattaatcaattggataggccatgtgactttatcaaaagagggtttggaaccctacttcttatcgaggaattagttatctccaaaaggcaagttaggtctacgccaattagagtggaaaatagggacttgagtgttgactaagtagagctggaattagcagagtttgatatcatacttgggatggattttctatccaagtattcg

SEQ ID NO: 401547 - DNA, 1131 bp, Cannabis indica
ctggtctttcttgtagagtatatcactgacattggtaaagccaacacgctacgcaaatgcttcactctagacaagttgtcaaactgtattgtatctttcaagtctttcatgtatgatagatgatgagttttgctactaggcttgtgcaagtccttacaactatcataaataaaacaacattgacttgatacatacatagctagatcatgcatcagatcatgcatagaaagagaatgatctcttgtgtttctttgaaaaaatgatcttgctattaaagcattcaagtagtcttctccaacatcttcaattcttttttctttttgaggtttcaaaaggccttctgccatccatattaaaatcagtttttctctatcaatatcactaaaattgtagtctttgggaaatattgaaagataggaaaaacatggttttaaataagaaggcagaagtcggtaactcaaccacaaagctggaacaatttcgatattgtgagaattgggaaactcccacacatcactcagcagtacatgtctccactcgacaggagttgacatagatcgtaaaagaccagccatcgactttacagctaaaggaaggcccttacacttgttaacaatttctcttccaatttcctggaactcggacaacaccacctcgttagagcctacattatcaaacgcatgatctgcaaataacttccaacattcatcatcagacatctttttaagctggtaagtttgaacatctctggtcttcatcttcagtgcgacatcttcattacgtgtggtgacaataatcttacttcctcgtgcgcaagattgaaaagagcttttcaaaagatcccacaactcgtaattttcattccatacatcatcgtgaacaaaaagaaatttcttcccagccaaaacatcattcaagtctttttgaagttgatggagctcattcgttttatatcttttttcagtgatcttcaaaataatttttgttattttaagaacatcgaaattgtcagatatagttacccatgctttcaaagaaaagtgttcttggacactagtatcataatatacattctgagcaagagtagttttgccaattccacccatccctactataggaataacagagatc

SEQ ID NO: 401548 - DNA, 937 bp, Cannabis indica
aagaaatctatggtttctaaaatcttctcaagggagtttcttgggacgaaatggagaaatagtgaaagtaacccaataaagaaaaaagggttggcttttatagaccagaaagggtgcaagacagttgtggtcagacagcatcgtattgtgggaatcgtaattgattcgtattctacaaatccaacgactaagataaatgggtgccaggacggttgaaaacgtttgagtacttctctgacactcagattcaatgcgccggtttctcaatggacaggaagtgaatcattgcctgtaaaagggaataaatattaatgatgaccatcataaatgcagcccacatgcctaaagcacgtgccattataccaataagccaaccggaggcatcaagcaagcctcacatacccttcactaaatgaggcttgaggggtaaatgttgcccttgacttttcccaaaatacgtggacgcggataagaacgacacgtggatctgaaaggatcatcacttatgaaaatcaactaagtctcagacaaaagaggaacatctcagggaagatgcctcccggaggaacgcataaggagtatccttactctccaggacgtcagaggcacgttaaggcagttccgggaggagtggagatctcttgaatagtcccttcacatttaatgccgcatgggggaagacgtattgaaacctctataaacgatgtgacagttgtcgtaagccccgttctacgactattacgctgtaatcgatgggtctagtgacggctactttatgagatatcacattagtcaagaggggataaaagattacatctacctaactcctaagatacctacaacataggttatgtatttcctattttacatctgttaggaatatgtgcccctatggagtaagcacaaaaagacaagtgatccattcctagggatcacc

SEQ ID NO: 401549 - DNA, 551 bp, Cannabis indica
attagtgcaacatttttagaaatttcttcattacaatcaatttcatcatcactccatgtgacattgaaacttttcttattctttttcagtgtatttgcacattcagattgaatatgcccaaatccttcacattccctgcattgaattctctttttattagtcatagaggatttaaaagatgcatttccttttgaaaatttcgatttattctttttattattcgtctttttcatatatttttttaaaactcttggttaataaaaaaaattcatcatcacattcatcatcaaaaattttattatcagcaacttttaaagcgatacttttacctttatcggcaatggatttgagtttgtccttttgtttgatttgttaattcaattcaaaagtacgcaaggaacccattaatttttccatttccaatgtgctaaaatctttagcttcctccattgccaaaagtttagtattgaatctctctggaagaattctaacaatttttctcacaagaacaaaatcatcaagcttttaattaagagcaaaatattcattag

SEQ ID NO: 401550 - DNA, 555 bp, Cannabis indica
aagagcaaccacggattgtaactaagccttccagcacatacagttctagtttgtcaagaaaacataggaagtagttgattttctcgtatctttatttgaggcatagttgttatgagatttctagcctattgtttacgccatttttagagttaattttcttcttcgttgtcaattttaaaacaagaattacgcttgttttctttaacttcaggtttcgacacttagaatgtataaatttatcaaattttagaaaaaaataatctataaaatagagaaaattgtgcaagaaaataaaactgaaacttcaagcctaaattagactatgttctgattagattttggagaaagttctagatctctctttcaactttttagaacaacttgaatcgtcttccaagcaatatcgagagagttatggacaaaatactatcagacatcgcagcaagaaaatctggaaaaaaaaaggataaaaagattgcgaaaaaatagctcttcaagtagagttgcgatttttatttttttttaagtttaaattttaaatctttttagtatctt

SEQ ID NO: 401551 - DNA, 854 bp, Cannabis indica
atataatttcttttagttagatatttttgtatttattattattataattagcttaattgtaggtttttttttaaaaaaaaaaagtaatataaagtaaaaaattagagaattaaaaaaaaaatagataaaggtattgaaacatagtctataattaggggagaaaaacaaaaattatatatataattaaaacaaattataattatatatacatttaaaataaatcataatcataattatataattaaaacataaattaaagttatccttttttttcagaaaaaatatatctatatgtatacatttatacatataaagttcaatttaaagtaatttttgaggaaaaaaatattaaaaataattatataaaaaacgataaaaatataataaagaatagagagtatcacatgagaatgagaaaaaaagttacaatagttttttcatcatttttcatgaatttattattaaaaaattatttttttacattaaataatttatactaatgagtaaatttatgcttttttttataattttttttaataataaaaaaattattaaaataataataaaatatcaatttgtagatttatgttttaataaaatattaaaatttgagagaattaaggagagaagagaaaaatagttttggagtgattttagaatgccatgtcactgcttcatacttctcctttatatatatatagactagcaaaaagttacgtgcgagacacctatattaaattttatacttcgtttttttctatgttatttgaaagtgatacaattaaaaattaaagaaaaatattattagttattaggtgagattattattatttgtataggaagaaatcacaaat

SEQ ID NO: 401552 - DNA, 521 bp, Cannabis indica
agttgtaagcaacttgtgttgttcagctgtcatggctaggataaagagaagtagaaggttgcttgatgtgtatgacccccatgtggttcagttcattaaatccaagctaactgtgcctaagtctaagaacttagacaagacgcttaatgggaaggtgatggaaattgagcttcttaaagctgccatcgagagtgataatctaagaaatcgagctttcaggctaagacctcttgtgtttagtactcttactgaacatcaagctcaattaatacaagatgattactatcttcctataactattgtctgaaagccatgatacagtggtcttaatggctcctaggacacttgctgtagtgctaggtcaaggttccatatgaatacgggcacttacttacccttgcatccatagttcatattcatagttgatttcttctgtgtctgcccttactagataaatccaaatggctataggatactgttggattatgttttaccaggaacttagatctactcacaagtat

SEQ ID NO: 401553 - DNA, 594 bp, Cannabis indica
aatctcaaactctttaaatacttaaaaaaatttcttacatcaaacaccacattaatatttatctttggtggtctatcattatcattttcgttaacaattatggtttcatttatgtttgcatatgtttactaaggataactataatgaatcttctaatttttttttaaaatatgacactaaatttattcaaaccatgctttaaaagttatcctgcatagatataacatgatttacagtatctcactaatattaatggaatgtaaaccataccaattctttttgttattattatcgattttttataattaaacaatgtatttatattaaacttttatatataatataaaattttgtattttaatattattaatttattatttaattaattaattaattaaatgcaaaatgataaatatagtactgaaacaattattctgtaactacacaacacaactttgtaactacaaaataaaatcagaaaacaaatagtgtagaaaaataaaaatacacaaaaaaaattatgtggtatcaacaatccttgtaaattgttaagatttattagatatatctcaaaaatacaaagtaattgactta

SEQ ID NO: 401554 - DNA, 1020 bp, Cannabis indica
ttaactgcctatcgagaacgaaaaatagatagactgatgctgtagcattctgccagtagttggtttagtgaaaaaaaatgttgtagtattctgctagtgattggtttagtgagctataatgtccaacataagcctttcagggatcccatttcccgtggtatcgaggcacattctcaatcagtctaagcccaagcccacatctcactcaaggagattctcaggtgatgacatgtattccttacaaaaaagaagacaacaactcgatatgtctatcgtttgactttgctctttgtgcatatttcttggaatgtaacattaacccattagtaaatagtttcttttactttttttaaaaaaaatatataattattttaaaaggtaaataaaatttttattaataagtaaatgagacataatccatcacatgcagataatgctcatcgagaagaatcaacaaaaataggctctgtttgcaataactaggacaaaattcctaacaatatctttaacacaatgacccatgtaaatcatcaaaataatgcgaagaatactatttttatcctgaatgaacatacgacagactagacctatcaatgacaataagcccaagatctttcaataaaaattgggtaaagacatgctaattattcaaactagaataaagaagaatatcatatcagaccatattaaaattcctgacattacatattgatcaaccataaaacaaagtatcaaaaagtaacaagaccatgaatcaacttgtgcatcctgtgaaaagttagttggttagttacctattgtacacgtgtcaagttagtagccctagttcggtatgttaggtaagttagttaataactaactcctagctttcctaagacatatatataaatgtctaactagtgctaattcattgttgtaacattcatacacactcaaatcaatacaattcaatttactaaaactgttcttgtgttcaatggccaatcggccaatcaccttgtgagttcatcttgagagttt

SEQ ID NO: 401555 - DNA, 520 bp, Cannabis indica
gagtctcgggtccgagttaaggtctgagtcctaggccctaggtcccaagtcagggtctgagtcccgggtctagatccgggttgttgggaatattttatgaggatctagatttactaacaagtatgttgattaacatcctaaatatgaatatctctaaaacaatgaaactaaacattaagagtttaaaaaaccttacattgattgcagcagaatataatgactcatttcgctcagatctctaacccttgttgctttcaattgctaacagggcggggcggggcgggtgcggggatttctcccccagccccatacccgcttgttaaattcacccccatacccgccccaatacccatttaaattaaagcgaggcggggcggggattacccgaagggggaaggattcccatcgggtacccattacatatatatttttttaaaaaaatgatgtctcaaggtgaattaaaaaaaaataatcataaaaactcagtaaaacaatagacttaagtggaacagtgtgtata

SEQ ID NO: 401556 - DNA, 563 bp, Cannabis indica
gattgtatagtaaatacagaatatgttgatcatgggattcggatagcttgccatatctctgtaatctgatcctaacattatagggatttccttgatgactcacgatgtgaaagccaaattcgctaagtgtttgcgttctgtgcgaattgcccactgctcggtttaaaggacttcgtccgagcgaatgcacgaagtgtcttgttcgtctcgtgccttgcaagtagatacctgaagtcgattccacgtgtcaccatcgagtgatgccacgtcagagtacagaaattgggataacaaataataataatattaataatattaataaaaactttattattagtagttatcttattatttcttagccacttagaaatttatattttaagggtatttggccaacttcgagtatctcaaaatactttggtatttctaaaattaacttatcctaataattttatcaatatttctaactaaaaccgttgtgacatttttacctctaatcgggtctccagggtcgccgaatctgaaaatatttttatttcacaaataactcatattatatccac

SEQ ID NO: 401557 - DNA, 618 bp, Cannabis indica
atagcttgaaaatatatcagtgagataaataaaaaataagaagaaggagatagataaattgtttaggaaaaagatgaaagagaaagaaacaaaaaaaacggatcaaaaaaaaaggaagaaaaaaaacaaaaactaacttatatgtaaaagaggaagaaaagaacaaaacaatatactaaaaatctgaagcaaaataataggcagccacagacgtatatacgtgtttaagaaaataagaaaattaacgctatatttcacaattaaattactagtgtggtagttgtgatatttacttcaaattttcgataactggccgtaaatttctctttaatttagtgtgatacatccttttttaaaaaaaaaaaaaaaaaaaaaaaaactatagggcctagtacctggttgcccacccttgggccaactatgtagcatgtttgatataacgcacatgtttttttgttctttgaataagtaagtacaccataaacaatattattattactatatataattatttgtatggtatacctttaactaataaagttgtgagttgtggtttaggatataccaaaatttgtttgtgtttcatatatccatctcagccatgtcactatcaggttt

SEQ ID NO: 401558 - DNA, 578 bp, Cannabis indica
ttgatgggcttctattgattaggggaactgttgttaaggcagcttctcccaaaaatccttgagatagtaatgactgaagtagcatacatctcaccttatttagtatggtgcggttaattctttcagccaccctgttttgctgacatgtaatcctcattgttctatgtcactgcaagccattttctttacagtagaggtcaaattcattattacaaaatttcaaaccattattagtattccttaaagtttttaacttttcattagttaagttttcaaccaatagtttccaatctttgaattttgtaaaagcatcatttttattcttaagtagatatattcatacttttctagaataatcatccacaatagataaaaaaaataagaacaaccaccatgtggactagttttctcaacaccctataggtcagaatgtacatactcaagtattcttttagatttgtgagtacctgttgtgaactttaatctgtgatattttctaagtatgtaatattcacaaaaatctagtttactcactttattcttacccaacagttgttgctcactcatgagttgtaagc

SEQ ID NO: 401559 - DNA, 676 bp, Cannabis indica
gaaagtctctactatactatactttaacctctcttagggtgtctttgaatattagggttatttttaagatctattaagtccttgttatctatctttttaggtgtatatttttacatgtaatgtgaaatagtaatacagccgtaacacatgagttagatgtgcactacagataaaagataaaatttttagttggaagaaattcctccatatatttaataactagtgtattatttgactctcaccaataaactggttattatattcaaaaagttaaacccctcctattcttccatatttttgtaatcgatgaaattatctttaaatttaaattatagtgatcttcctcaatatatatatatatatagatatatttaaatttttgataataatagtattactttgctacgaagtatctagaatttattggaagaccatataatttttccttggcaaaaaaaaaaaaaaaaaccatatttaattctcaaataattgtataaagatgtacactcctaaaatagttgtttcgatatattctttatccctattttgacatttcatataattttgtagtcaagtttttaatatatacacataattatttaagattattagtaaatctttagaaatttttttattgtaagtaaaaataaaaaaattgtgattaattataaattat

SEQ ID NO: 401560 - DNA, 578 bp, Cannabis indica
attgcttgtagaatctagttttactttaagggaatcccaataactcattctgaccaaataacaaaattccaatattacccttccataggccatagggtactgatattgtatatgtcatatgactcatcatattatatatactcttaacagaggaaatcccaaaaaatgacaagcaaacaacaataatacaatacaacctccattattattttcccaattcagtaccaaaagaaaaaataaataaaaaacagtgcacatattgcaaagatttatgttaaaaacactaatagtgcctgatactattgcaaaggtacaattaattatcggatttcatattaattttaggtagtattaggtatcattaacacctaataataataccctattgcataactgcaatagagagtaagaacaaatcaattacataatttttgttaagagtattgctattgggcaccagtggtgcctagcacctttaaaacgtgtcgtcttacgattggctagcgatactccctaaaagttattatattaaactatatggaacccgatacttaattacaccaatagcaatattgaca

SEQ ID NO: 401561 - DNA, 532 bp, Cannabis indica
tttttttttaagaagctatatataaaagcttttttttttttaattgcagttaatagcttaaagtccactaagctaacctctcactttttcccatccctcccttatcactaagctaaccttttttttttgatgaaatatcaacttcattaaattaacattctgagtacaaaacatccagaatagcaactggagcattagacacagaaatattacaaccagataagtaccgtgacatcctagcaacaacatgtgctagacgatttgttgatcgtttaacaaaacagacttttattgaaggcatagaaagcatgagagaacgacagtcttgagctagatttccaaaaatggaacaaagaggcaagcagctacgaatagcttggatagagactagactgtcagattccagaacaacatgttgccaaccgtttcgtttgatccaacttagagcctctttgatacccatgatctcaacaacctctggagtgaaggcaccattagaacagtgagttgtagcatcaataagagaacctga

SEQ ID NO: 401562 - DNA, 600 bp, Cannabis indica
taaattatcaataacatgtgcagggccagccatgagctaagaggaaggaggcggctgccttaggcccccgccgctcagggccccatttcgaaaaaaaaaatttaaatatagttagtaataaaataaataataatattttaatgttaaatatatgttgtagcctagtcatggtaatttgattagtgttgaccgaggttttcggcaaccaacttaattttatatatgaaagctataggaagtttaatgcacaggatttttacgtggttggggcattaatgagccttagtccacgagtctttgttatttatgagagtatttattacagagaatgttcttggtgggtatcactcctattttctctctttaattcttatgaaccctgaattctcgacccctgtcttagtgcgtttggggggtatttatagtgtttttctgggggatccctctgaatcacttgtctttctgtgcaagttcagtaggggcacatattcctgttacgaattttatgttattacgcaagtatacgcaatcaagtagtatttcacgcaactgaggtcgaaccacagggaattggattaagtactactaaactatacttat

SEQ ID NO: 401563 - DNA, 1083 bp, Cannabis indica
tacctcttttatagcagaatatacttgaactggcataagatttattaaagctccattatctactaaagtatgtttcatttttaggccattgacttttgcctcaacatatgacggttggttgtgaaggaacggagatgtttgtatgtcagcattggttaaaacaattgttgctttcagatttttttatcaatattatgcattgggtgccctaccatataacaaaaagggctatgttgttaggaaattttaagcaaaacttttgtagcctcaattcttgtatcttgcccaaattttaagcaatcaaagaaattacgaaacaatttagtttttaacaacggctccaccatgctatctacttttggttgttcttttataaatttctcgatatgtatgtcccatgatatccctattaaaatgagggaaaactcttttctgtgtgttgtagcggctcctccgtttcgatgtagggaaaccacatttgttccatttcattttgatccaaaacaatttgtcctttctctagtcgttcattaaaaaaatttcttaacatgtaacacctcattgttggatgactagccttcagatggaaataacaatagaggtcatgttgcttttcttttggagtgggtaatttcgtgacaaacagaagaagacatatcacgataattaaaatatgcatgactaagcttctatttatagtagatcaagaagaatatttgagaaaaaaataaaattaaaacgtcagtatacaagtttgttaaggatgaatatatacatatatacctgagacaagagatagagtgagttgatagaataacaaaatttatatattaaataaaaacacaagtacacttttccttggagtccaatactaaaaaaaaatatataaaatattatgtatattacaaatagccaaaaaaaaaaaaaaaaaaaaaaagtaaagatacaaagtagcaaactgcgtgctactattgaaaatatgcagggtacctatataatttaaaaaaaaaaaaaaagaaaaaaaactaaagtgcataaaaaaaaaaaaaaaaaaaaaaagaaacatgtagttcattctattgt

SEQ ID NO: 401564 - DNA, 1400 bp, Cannabis indica
tgatttcctacactccccctcaaactagatctatactaaacattcctaattttgaacttagttccctaaaattaagacgatagctttggttaagatatcaactgcttgttgtcttgagggaatatgtttcaaggtgatgatcttgttttcaatattttcactgatgaagtgatgatcaatttcaacatgtctggtcctatcatgatgaactggattttttgctcttgctatggttgattgattgtcacagagaacatctattgggccttcatgtttgattatgagttcatcgagaagacgtttcagccatattccttcacaaattccatgtgctaaggcacaaaattatgcttttgcaatgctgtgagctagcacttgttgtttctggcttctccaagatatgagatttccccaaatgtaggagcagtacctagaagtggatcttcggtcattgagagaaccaacccaatctgcatctgtgtatattttaagatatttgttgagagtttttctgaacattaacccttcttggtgttcccttgaggtacctaagaatccagtagacgacatccatgtgttcctcaaagggattattgagaaattggctaacaacactcacaacgaagcttatgtcaggctaagtgtgagttaggtataataactttcccacaagacgttgataccttcctttgatcaacttttgttccgtctatctgtacttcaagtttggtatgagggtccatcggagtttcacttggcttgcatccggtcatcccattttcctataagagatcaatgatatattttcgctgcctagatctttaatctcaaattcactggagagaagctgcttgagatgagaaatttcttccatgaaattacctataaccacaatatcatcgatataaacaatcaatgatgctaatttttcaccagctaagtgttttataaacaaagtatgatctggttggcattgagtgtaaccatctcctttcaacacttttgtaaacctgtcaaaccaggctcgaggagattgcttgaggctgtagagagatttttttagtttggatactttttccttttgagaatcggtcctcaaattctggaggaatgcccatgtatacttctttcacaaggtcgccgttaagaaatgcattctttacgttaagcgtgaataaaggccattcattgttgactgcaatagataagagaactcgaatgatgttcaacttagcaacaggagcaaatgtctcttggtaatcaatgccatatgattgggtgaatcctttagccactaatcgagcttcgaatctttcaatgctcccatcaggcttatacttgaccaagaagatccatttacaaccaactgtgcatttgccattaggcagatctgtgatgat

SEQ ID NO: 401565 - DNA, 519 bp, Cannabis indica
gaattgtatacatcttcctctccgataacaatatttcgggcctcccaaatgcagtaaactatagaatttagagtagcaatgtgaacttcactaggtaatttggtgtgtctacacctttctatccatttcaaactaattaattagagttagtgctacattgtttatgtgtgcattgtgatatataatatgaatagactacttcttccatcaattggttttgagatgaaacctcattcattttatcccaaattctaaaatataagagccacttgtaatccgttgtgagttcaaagtgtcaccgatctaaaaaaagccatttgtgatccgttgtgagctaaaattctgtcgcgcggtgcaaaaaaatacttctatggtctcccctttaaccctccatttgagacttttcggcttatgtgtgtcaatttctagtgttggggtcttttacctgtttcaaaatctataaattttcttgacatgtttcgaatagagatctcctttaatttatatatttatatattg

SEQ ID NO: 401566 - DNA, 1351 bp, Cannabis indica
aaagagctgacgggtcatgggctacttgggataatggtttgcaagatattattgtccagtattttcaagatatctttactgctagaaatcctaactttgattatgtcatagctggtataaggtgctctatcactgatttacacaatgatatgcttttgcaaccgatcggtgatgatgaggttcgacttgctctcttctaaatgcatcctgataaagcaccggggcctgatggcatgggacctggtttctttcagaaatactggcatattgtgggttcagatgttatttctcttgtgagagacttctttaaaacagactcttttcccgaaagcctcaatgacactaacttggttcttattcccaagaaaaagacttcagttaccatgggtgatctccgtcctattgctttgtgtaatgttgcatacaaaattgctgccaaggtgcttgccaacagaatgaaacctctagttgatcaggtaatctcccctattcagagtgcctttattcccggacgccttatttctaataatataatgatagcttttgaagttatgcattacttgaaacgtaaagttcataaaaagaaaggatatatggcacttaagcttgacatgagcaaagcctatgatcgagtagaatggggttatctacgggcggttatgcttcaaatgggattcagtcttcgatgggttaatctgataatgtcttgtgtgaccagtgttcgctattctattattcatggtggccatgtcttgggacctatccttcccactcgtggtattcgacaaggcgatcccctatccacttacttgttcatcatttgtgctgaaggtttctctgctcttatttccaagttcgaagatgacagattgctgcaaggctgccgtgttactaacggtgctcccaccatctctcatatgatgtttgctgatgacagctacctcttttgccaagctaattcaggtgcagcacgcagtgtcatgactcttcttcgtcgatttgaaactgcttcctgtccacaggtcaatctcactaagtcttccattttcttcagtccaaatgtccaacatgttgttcggcaccaaatatgctcacttcttggtatggttgaagcctctgacaacagcttttacctgggtctaccaaatatcataggacaaaataaaaaaaatcaattcttggttttctgaagaataaagtgatcaacagaatcaatagttggactggaaaattattatcaggcgctggtaaagaaattctgttgaagtcggttgtccaatcccttcctacttatgctatgagtgtgttccttcttcctttgggtacctgtgatgaaattgaaaaacttatg

SEQ ID NO: 401567 - DNA, 821 bp, Cannabis indica
tcattacacattcaccatgctcaggtgtattcaacttaacatccaagcaaacacattcatatttctcattataataataaccatagtaactcataattaacaatttaatcttttcactaaatagacattcatccaatccataaccatataatctcagtgctttgtaaagcactctagtcatacatcattgtaatcacataattttattgcttcgttaagcactctacttacacaataccataatcacctaaactcagtgcttcataaagcacccttaccactcgttatcaacgagctatatatgtcactaccgttgcccgataacgcgaacgataagtaagaaacctatctgcggtttcaacaagtaattactcataacggtaatgaccgtatcttttactcgatcataatcgagtcacaatgataatatcgtttcatatcatttccctcgatcataatcgagtcacaatgatgataatcgtttcatatctttttccctcgatcataatcgagtcacaatgatgataatcgtttcataacatttccctcggtcataattgagtcacattaaacacatgtcagaatctttatcacaatcgagactatcacaattatagtcattaaccataaacggtgcataatacttttcttacctcaagtccaaagtcaagtatgtgggccgacctaagtggaatgatgctcgacaatatcgggtcctatgtcacgacaaaggtaaatcaataagggtctattccaaaatactgtctaaaaccggcataaaataacctagggtttttttaccaaatcttatggtaaaaaca

SEQ ID NO: 401568 - DNA, 818 bp, Cannabis indica
tcttcaattttattttcaactcaaagtaaccgattcccataaccgttttccttcttttactttttctcttaatccatttataaatatggctattactcgttcttcatccactcatttccctatgcaaaagaaaagttctaaaatggggttgaaatctttagctaataggaacaagggcaaacgtcctgttgttcaggaagatgactttgattttgctcctcccttgtcgaaacgggagcgagctcttccaaagaagaactcaaaggttgctgcccaggaaaaaattcctcatgataatgctcaaaaaaatgatcttgatggtgctggtcgatctcaggtttgtttctgtttcttttaggtttcccccatttttgatattttttcgtattcgacctttgtgggttttgtgtttatcgatttcattattttaggtttttcattttaacatttcttttgttttgtttggttttttagggcttatgttttattaatttgatttatgtgttatttttatgggtttttcatttttcttttgtttagttttaatttctgtttcatattgttgttttttttttccttatttttatttttctatatgtgttattgtttttcatttcagttacttcatttgatcatttctcattttttaattgttttttcatagtttttaatagtttaaacaccttgatgtatgcgtttttcttaacatgtttttttcttagttgttttctgtaaatttttatctcatcaataggtaaaaattagatttatcatggatgttgatgttcaaagagtttttcctgtatgttagtttgttt

SEQ ID NO: 401569 - DNA, 765 bp, Cannabis indica
taaaaaaaaattacaaaaaaagagtgaaaaaatagataggaaaaaattaataaggaaaaacaaaatgtaaatataaaggcgtagatgaaaaatttagggtatacaaagtttaaaaaatataaaatataaaagttttttaaattaaagtgttttaaaaaatataacaaaatcaaatagaataaaaaaaatatgagaactctagctacattcatgctgccatcatgaagaagagaaaagcagaaacgagattgtattgtactggaagggggactctattgttgaggactatcccaaagtggttgatcactttcttcaatattttgtaattttatggggaagaaaagcttagctactagaaggatagatgaggaacgtctagggtttgggaacaagctagaccttccatctgattcggcctttcagtaagtcagatgtcaagaaagcattattcaatatccactccaccaagagcccgagtccggatggttttggttcaggttttttcaaagggttgtgaaatgaaattggaggggatatttctcaagccgttctgggattctttcaatttggaaacctgccaaaagaactcaatgagactactatttcccttatccccaagattgacaatcctaagaatgcgagtgactataggtcgatcgccttctgcaataccctttacaagtgtatctctaagatgatctgtgctcggctctcagaagtgcttcctagcctgattcatgataaccagggagcctttactaagaa

SEQ ID NO: 401570 - DNA, 877 bp, Cannabis indica
attatttagggcgttacatccttgttcttcttggggcaaggcatctttagtaaagcttgaatttttttggggtttgcctctattcctctttggctgacgataaatcccataaattttcttgacttgatgccaaaagtgcacttcttcggattaagcttcactccataccttcagaccacttcaaagcattccgtaaggtcgtcttcataatccatgcatgtcttggatttgactagcatgtcgtccatgtaaatgtccatatttgttcccaagaggcctttaaaaatatggttcaccattctctgataagttgcaccagcgttttttaatctgaagggcataaccaagtaacagtataaccccttgttagtcctgaagctaatgtactcttcatctgcaacatggatcttcatttggttgtatccggagtaggcacccatgaaggacagtagcttgaatcttgaggtggcgtccaccatctggccaatccgaggtaaagggaagcaatctttcggacaggccttgttaagatcagtgaagtatatacacacctgccatgtcccatttggtttgggtaccagtaccgaattagctagccattctgggtagtacacatcctagatcaggtcattggtcagtagcttatctacctcttttttctaaggtgtcagcttttaccagatcaagtggacgcctcttctgctgtatcggcgccatgtctggattaacatttaagacatgggtaatcacgtgggggcttatgccggtcatatccccttggcaccacacaaaaacatctatggctgcctttaatgcttcgataatcttgcttctttcctccgactccaggttttttcctagacggaggatcttggtg

SEQ ID NO: 401571 - DNA, 710 bp, Cannabis indica
gctatgttcccagcgagacgtccaataacaatatgtgttacaatgtatttaatacacgtttacattgaaccagtaaaagtggaccaaacacagttgtgtcattttcaaatgttaaccgcatttattttacgtgggatgtaattaaatcccacgatttcaggggattattattgtaaaatatcagtcaaatctgtaattaactgccctcctatgtaattataaataggagcaggttacactgaaaaaggaataaaaaacttattagaaaaaaagccctagaactgtatcaaaaatctaataagattgactcgtggactatgcagaattttaactacaaaaccacataaaaacctttttgttcctattttttctttactgcttttgttttctgtgcaaatctatcacaatttaggctcaaatatagtcaacaaaaatttgcgttaacaacgttcaatgattatgttgatacatcgttgttttagcattttttataagatgtttatatgttattttcaaatactttcattttttatcttgttgttttgttactgcaattgaatgcaagaaacttgatttccagtgatgatgtacttaaatgttgatcagaataggcttgtcatctacttctattcctttgataaaatgaagtgagttacatacattgaaagtgtacaagaaaatattctgatcttccaagaaggttcaagcta

SEQ ID NO: 401572 - DNA, 815 bp, Cannabis indica
atcctctatattgtgaataaagaaaatttgaaattcaatttctaatattgattttgagaagaaaaaaattgtaacttgtgagaaattacattctttgagaattaaaagtgatagctatctcattttatgagataagaaaagtaaactatgagagttacacttatgagaattgtcttgtcataacaagaataaatggatcaaaagtaaatctaaacttgtgaaatgagtcatatataaattggaagagcaattatattagactcaaacaaagtgatcaatgtaaattcaaaaaaaaattgaaaaggtaacaagcaattttgaatctaaataatcaaagttgtgaacaaaattcatgagaattttgtaaactttagtgtaatatttgtggttaatggcattgatgagataattttaaaataatgggtaaaataatcatattattttataaatggtgatgtgagtttgatattttagttttgtttagaagactaagaatatcaaacgacatttttctaacaatgatctctaagaggcattttagaaaaatgattaaattaagttgttaaaataatgtggagattatttagataattaaattggtgaaaatgattcttataaaaatttcactttatgctagaaatgtaagggcgagccacaaatttaatcaaaatgtgttgcgacattgttgattaatttatttgattttgaattcaaattataaatcaagtttggctatgtgcatactaaaaatattgacatatttggtgtcaaattttggtaaaaataattttaagaaggaaattaaatttaagaga

SEQ ID NO: 401573 - DNA, 1208 bp, Cannabis indica
gacaatactataatcattaacaaattcatatcttctggacttaaatagaattcatacattatatataatcatgaaataaatcatgtgaaccatgcaacataaaatgttatttttgatcattattaataagtagatctgattatattaaaatgggttttatttaggcacaaaactcaacacaagtctcaatgtaattacccttattcttctaagagagattaaaaaaataaaaaaaaaatgtgaaatgtaatataatttaattaaatagatatttcaacttactttctcataacgcctctcagccatagatttcgttccctatgttgtagggtactacatctttttctattttctatatttattttagtaacgagcaataaactctggactagtgaaaaacctaacaaactaggaagccattgctctggaatcagttcactaggcgggtgggcaacatcattatcaaaatccacaagacttttatagtattttttgaaatgaacatgtcttaaaatctttcgtttcttatatatgtctgccattttacccatgcaatgtttgtaattatttcagaatgttcattgttgtcgatattgtaataatactggattaaaagaaaagaaagaaatatgttagcaacatagaaattgtatgtaataaaaaacaacatacaaatatttttacccgaactctgttgaagactgaatcacgataaaaccttggaactttctcccaactatcataatgtcttgtgacgtgaattctaatctctctcccaatcaaacgagaaaaggtgccactctctattccaactattctacaagcacgaacatcacccacaagaggtagtggcactgaagatttttttttctcctatcctctaagccattaaggacattacaaccgcgtttcctctttcttgaagaaccagaaagctcattttcagcttcagaagcttcagtagtaaactcacactcagtgaaaatcctaggatctggtgggtcctcacccccaccatcacctccatggtatctagcaatatctgcatacattatactaaaaaaatacaccatctaattaaattgtatctaaatatatgttacacattatactaaaaaataatacgctacattgactaaaaaaattaccactaaaagacagatacaacttaatttcaagaatactataactaaatacaataatcacta

SEQ ID NO: 401574 - DNA, 846 bp, Cannabis indica
tcaattattaagaaaatgaaacccttgattctggtaccattgttcataataaactaattacacaagctaagtttagaatcttccagtgtcgtaatgctagcttttaatcaatgaatgataacaagtttttctagttagtagttagtccaaattttatgcaagtacacaaagcataaacagttagtcttggagttaaggtatttgacaaagtaggttgctaaaaaggcaaccaatcatttggcataagaagaaacaagtgaaaaagttgaaataataaaagaaaaaacaatcatctagctctcccaaaatattaatttatatacaaagagggaacaaataaacacatgaaattcagcttcacaaggctctctgcgtgtacaaaaaagagcaaagctgatcaaacagcttgcaatagaacttcaaagttgtcttggaaaacccttcaacttatagctaataaacctctcatttacaaaagaacatcacatatatcattatcatcctgcaaatcttctcggcttctcttggggttctgcaccagctatttgctctaccatactgcaaaacacaaccaaacatggaatgcttgtttagtaaccgacggccaaagtggcttatttttttagtgatgacttgctacacatgaatgaaatgaatctcatttctgaaataacatgaattggtaaacaatcgatcgtgtaacatacttgggagctcagaaccagaaacatttggtatgcttgctgatggtattggatagaactgaactgagatcagcccaccaccttctgttgcacccgcagcatggaaggtccttggagactctcggtagaacttcttgatgat

SEQ ID NO: 401575 - DNA, 894 bp, Cannabis indica
tcaagcacctatccctaaaatttcaaataccagagggtgtgggaatggtgcaaggtgatcaaatgctagctcgcgactactatcgtatagagctacaacatagaaaagccaatcatcagttaatggcggtcttgacagaagaaagcaaaaagaacgacgaggatcttgagccccgggttcaagatgaaagaaaattattaaaaccaattgaagaatcggaagaagttgttctcgacccaggaaatcccacaaagtgtgttcacattgggaagaacattgacgagcagctaaaatagcagctaataagtgtcttaagggtgaatcaggatcagtttgcctggagccatggagatatggtaggaattgaccctagtattgtcttccataatttaaatgtcgatccaaactacctagcaaaaggcagaaaaggagacccttggatttcaagaggtaaggggcactaaaacaggaagtggacaagttattggtcaatgactttattcacgaggtgttttatccctcgtggatagtcaatcttattctcgtctcaaaacctaatggaacttggagaacttgtattgatttttctgatctgaataaggcgtgcccaaaagactgtttcccactacccaggatcgaccagctggtggatgcaactgctgggcatgagcttgtatcatttatggatgcatactctagatataaccagataaaaatgtatgtcccagatcaggaacatacgagctttgtaaccaacatgggactctacttctacaaagtcacgtcgtttgggctgaagaatgctggggcaacatatcaatgattggtgaacgagatgtttgcaaatcagatcgaacagaacatggaggtttatgtcgatgatatgttagtaaa

SEQ ID NO: 401576 - DNA, 578 bp, Cannabis indica
tattttttataaactattatatatgtaactaaagtagtaaaatgaaataagatgttaaaacataaataattataatttgtgaaataataataaaatttgtgtaaaaaacattaaagatattttaattattattattactgagatcttaaatatttgtaattgaaaatgtttttactcttaaaaaatatcacaataataatagttgaagatacaaaatttaaacatttaagtctaatcttaaatatttgtaattgaaaatgttttcaaaatttaaaaaactcaaaagttaaaaatatttgtacttttttttttcagcattacaatttaaagtataaattttacattcttataatttgttcaaattaatccttttatctaatatttatattgaaaaattcaatcaccaacatttttatataatctctcattttcagttttcaaaagtaaaaaatgttgtgtgacctattttatatcctacattcacatttgtggaaaagacattcaatttttgtttacacgctccgtttattaaacttagaaagttattttttttttaatttaatttagtgcattgctat

SEQ ID NO: 401577 - DNA, 620 bp, Cannabis indica
aacaaccatctgaaaaaaaaaaatcgcataaagatcgcattaatatcgcataacatcgcataaactaacaagttggcaaataataaaagtaaagtcgcacaaaaattgcatgaaaattgcataaaatagcatgaaaataacaatttaaaatcgcacaaaaatcacatgaaaattgcataacatcgcaaaaaaaaaacagattagcaaaaaaacaagtcatgtcgcacaaaaatcgcatgaacatcgcataaaatagcagtttagcaaacaaaaacatgtaaaaatcgcacaaacatcgcattaaaatcgcataaaatcgtagaaattaataggttagcaaaataaataccaaaaaaacaaagaaagtaagattgacatacccttttctcaaatagtgcagtcacatcaggttgcttcacatcatgtttcgtaaccgaatcgggggtactccaattcaacattcgagggaatctagtccctttgcactgcccatacttcttccctaaatcttgcatcacctcgaaggcccagtattgcagcgggggtgcatatccatagacattgtacttcgcctctagttgagtaatttttttctccttctttcctttcttcttcgtctt

SEQ ID NO: 401578 - DNA, 591 bp, Cannabis indica
tgttgattttcttttattttattgaagctttgctccattgatttattgaatttaagttttactgtgttataagagaaacatatatcgtgtcattgtttagcactaattagttctccaaaacctactatcttttagatgcgtagatggacttttcatatcataagatcaaagatcaaagtctttaacttgtggttatctccagtctccagtactattagatacaactactttggaggataatattaacacactattttttcatttactgtgttacatgtcaccttctttgacctctttgcatgattatagtcaagctcattcatatagataatattgtgtaatgtaaatgtaatatatattcactatataagatgtttgttcgtgaaaaaacttgtagcaggatgttctatcagtcagatttgttgtttttggattgcctttttataagaaaaaaatagaaaacattgattcgttttaagtattagcttacaccatttttaatagatggtatatattttgggttaaatttgactaagatatatatatatatatatatatattataaaactatatttagctcaatttttgtat

SEQ ID NO: 401579 - DNA, 304 bp, Cannabis indica
acctcaaaagaaaatgttatttaattatttagtcaaaataaatctcgtcaatttagaaccataccataatattattatttttgttagaaaaaaaaacataatattatttaactatttagtcaagacaaatctcatcaaattcaaaccaaagacatcatttttttgtacatatggttcacaaaaagggcagattcatatgtatttgagatagggattaaagaataaaaacaagtttatttatatattatgaaagtagttttctccaataataataataataataataataaatcgaccaaattag

SEQ ID NO: 401580 - DNA, 674 bp, Cannabis indica
gttaagtactaaaataataatatagaaataaagacatatatgaacgatatgaatagcaaaataaattagtaaacatatcgaaattgtacatgcatataatatgaaataaaacatatatgaatgatatgaatagagaaattaactataaacatatcgaaactgtacatgcaatgaaaggattgaaatacctcaagctattgatgtttgggcttcaatccttgccatagtttcggtatgggaattcaggctttctcgctctctctttagatggaatcttgttgtttgcacataatgagtggtgagctcgggcactgagaccctatatttatataggtgagaccttccatcaaggtctctgccacaattaattgtcaaaatattttgacaatcaattctggaaattaaatcgggtaactgaaatatttggtaattaaatctgaccaaaattagaatattttatatatattattttattattattataattaaattaaaacataaataaaaaatttaaattaaataaaaatttacattgctctaaatgtttgtatattagctatctttatattatatttattatttataatatgtggttgtattttcttagtgttttagttattattttattatttttaagtttatgtttgttatataattagtatattgaataataa

SEQ ID NO: 401581 - DNA, 728 bp, Cannabis indica
gtataatggaaaactaaatcaatgaaataaatagaaatacaattaaccatttatgatgataattaatttgataatttggacatctattaataatattttataatatttttctttgaatgtccataaaaacttcttattaaaaataaaaaaacttggtcaaacgaaaaagagtacagtatgaattaacttctctttatttaggcattcgtgaagatcttctaatcgacgaaattcaatcttgtatgtcatcttctcaaatgttgatggtaataactttgtcaataagtctgcaagactgacacttgattgaatatgttggataccaatatgtattctcttgaattgtattaagaagaattttgtgaaatgtattttagttctatctcattcaatatactctctttttagttgagcgatgcaagtcgtattatcttcatagagaattgcttgtgttgatacttttttatagagtgtaatccatatgtttcctgaatatgttatgtcatgatctcactcccacaaattttctacttgcttcataaagtgcaagtatgttaacatgatttaaagttgtcttgctaaaaacattgtcaggaaaatctagtaggacaaaacctaagctatggaaaaaagagtgcaatatatatatatatatatatttcatattcataactatttgcaagttgtctcattaaaaaaccttgccaggaaaatccagtaggacaaaa

SEQ ID NO: 401582 - DNA, 528 bp, Cannabis indica
agagagagagagaaataggatcttttcccttgtttgatttctttgtaaaataaatgagtaaaagctttgttttactaaaaatatcagccaacataatctataaaaatctgatttaataaatcccacaaaaagacaaaacacacttggcaaaatgaccattttgcccctttaacactataaaacataaaaggccacttaagggtattttgggaaattctaaaatcccgaccaatcccaaagacaaaataaaccgccccgctacactaaaatactaagatgtgattctaatagccaaacaccgcgttccaatattgccgggcaccgaatatgcaaaattatgaaatttctatatatgacatataaaatgcattctgaatttcaataaatcaccataaattaataattaatattaataaataatttccataattaaaccctgattatctactaatttccaaatataagctaagcggtcttcacaactatccccccttaaaaggattttatcctcgaaatctaatctgaata

SEQ ID NO: 401583 - DNA, 641 bp, Cannabis indica
aatgatgatttcctttgagcttcacttaacaaagataaaatagaagagctcttatttcagtaattatattagtttactgaaatattatttataggaagataagtaatttaaggataaaacacattgagggatagaacggtaaatttgtccctactcgatgtaaatcatctatagaggatctttgattattttgataataacaatggataattaatagtgtatctatatttggaatatgtagagcattttatgtaattaggattgtaattccgaatctatagtggagtcaagaggaatttataagatagagaatttactcggtaaattctaatactacttattgggagcttgattatacatgtccatggtcctcgcactagttgagataatattggctggtagactcagttaattggttttaattacccgaacagttagcattttaaactagactatgccttgtttgtgaattttcactaagcaaaggcttaattgagaagaaaagaaggtttagggtttatttgttgattaagagactttgtaaggtaattaataaattaattaaatggtaattttatttgaaattaattataatttttaaataaatagatttgacatttataggattgaaattaaaatat

SEQ ID NO: 401584 - DNA, 604 bp, Cannabis indica
tcttacaaagtacattctgactgctcatgttatgcttattctaatattataatttttgtaatctagaggggtaagtttaaacgatctggcctatggtatgctcccacaaggtctgagattgagtggtacctgcacagatattgtagttcctctctcctcaaatgttatggggtttggcaaatagccctaattgaaaaataataattaattttgtaggaatacttttaactttgttattaatcatatagatagcatatgatcaattgagttgcttaagggggagaaccatgcttcctaaaaaaaaatacaaaagtttcatgtcaagataactactatatgagtacgtatatattaagattaacgtactttttattattaataacaatgtacaaatcataaatttatagatacaactatgttttacttataaaatatactgacacacaatttactaccactatttaatatacctaaaaataatttgaaacaataattaataatatgttttttttttaaattatttattgtactatttttaaataaagtagaaaacacttagcataaaattaagtatacgtgcctcgcacgtaacatttaactagta

SEQ ID NO: 401585 - DNA, 669 bp, Cannabis indica
ctaaatataatatataatacgtgattataaaatgagatgcttacgtaaaatattcatttttataattattttatatttttacgttttatatttatttttttgttatttttgtgtttttatgaaattatccctttttaaaatccttatttatatgaatatgattggttttttttatttatttttaagcatattatagaggatgttactattgtccaatttatcatacaaaaatatcatctatgggccacacaaaaaagtagacattaattcggcttgaaggattaattatcccacttctccaataagtcggtagcatgataaaacattgttctttgttttaatatgaagtgagttgagttaactattaataattagaattaattaaaaaaaatatgtttatcattgttacgattagattattagtcaaaatttaccattctaatcaaatggatcaatcataacttcatctatccactgatgcaactaagggattgtctatggccccatacctcttatctttcttacaaattttaatataaaaactacataattatgtattataatattttaattttttttttactagtatttttctactctaggtcggccattagaaataaatatctattctatgtaacagttaatggtttaatacgttaactttaacag

SEQ ID NO: 401586 - DNA, 654 bp, Cannabis indica
aaaaaataacaagaaatcaaccttctttaaatatgtaatccttcataaatcaactatgaataaactacaaaatatctaaaaaaaaatattactttttgttatacccatattttgagtagtaatatggtgttgacacgtgtaacatagctggaatacgaaccaactcaaattatgcatcaataaatgcattcagatgactcgcctcaagaaatatagttgatagaaatactcgaactcaccatcttgtagataatggtgagacacgagtactaacttctgattgatgaaaccagcgagacgaataaagaaagtcaatctcaagataaacagaatacattacagaattatttggaatgggtagatatataatgagtttgtagctcattgacccacatacacgtgagtatgttgaaagaataaagacaacaacttcaacatgattcatctcgcttttgtcacgctgtaatagatgtctcacatataccttactaaatattaatagaagaactcgaggaatactacaacattgtaatgaccacttagctttaatatgagaattagtagataattaaggtttaatttagaattagacttttaattattaattatgtaattatggagatatatttgaattctaggtgtgctaattaggtt

SEQ ID NO: 401587 - DNA, 1190 bp, Cannabis indica
atatttaggtgtccataaaagttaataccacatatagttttacataaaaatattgcataaaatacaatttaatataatacaatacaatacaatacgacttaatacggcgttccaaacgagcccatagtgaataataatatatacccaggaactaatttgtacaaaatagatttagaaaattaatttatatgtatatagagcaatatattcatccaatgaataataatatatctagaataaatattatatactcacgtgctaatattttgtagtcagatgttatcttattatacactataagttgtgtacatgataacgaaatactaatactttaaatatccctacatagttgacattataatagttgtatttagttaatttgattgttgtaattaagtaataaaatatatcattttcttagtgcaaatattaaaaaaaagttggcatatacctgttgagaaaataattctataatacttaataataaactatgaaaataatattataatgaagagtctatacactaaggagaagaactaattgaaaaaaaaatttcaataaaatattggtccatgaaaataaaaattacaagcatataaagtaaatctaaaatattaagaaagaaaaaataaaataatttagaaaaaagtttcacaatacttaataatagttcataaaaataatagtcaagagaatataaattaaattaagatagaaacttacaagatgctaaatgaaaggcatactaaaaagattggaaggagccttgtgtggatggggctagaacgtttgtcatttcttgtgtaagatgatgttcctacccgagaggccaatttggacctcaagtgacacgttcgcttattatggtcctaacctgcgcaacgtgtgcattgtcgacttccttgtatgccattatttggttttcttctagaattgtttgggatactcatacctttggtcctcaccctaattggatcttgtacaatattttggattatcatgatgtgttctagctatttttttggtacctgtttcagtactttgtctctggtcgtaagtccggaacatttttgaggttgaaaaaataaccttattgcttcatgcaatcacaaataagcatctcatttgatgatcagagtctatcgttagtgatttgaccactttaaccactagcactcgtagtgagtact

SEQ ID NO: 401588 - DNA, 749 bp, Cannabis indica
aggattcaaattatattttgaaatactaaatattattttggagtgtattttgtaaacgttatttattggaccatctattttgttaaatgataaaatagaccttatattttttaaaatagtataaataggatcttcatgagctcaattttcgatattattttttttaatataactaacttaaagataattcttaacacaaatagatatagaaattgtaacttattttgtcatacacctctagattgggctatatattaagttttattttaacaaaaaatgaattcagggtcctatttgtactattttggaaaatacaaggtcaattttatcatttaacaaaatagaaggtccattaatcaacaacttttacaaaacacagtgtccaaaatagttattcactttaaaatacattgtccaaacaagtaatgatacaaaacaaaagatcaaatttgtataaattaatcctaattataaatatttgtgtaatattatttttactgaataatggttaaatgttacctttgataaatagtggatattacatgattggagcgacgaaaatagcgtcaaaatactaaaaaaaatgcaaagaggccataaccagaagcgagaagaaaattggaaaggtggttgtcatcgacatgattattgaaaatgagaaagatgaaatcgatgaagaatcatatgaaactcaactcttcatggatatggaactaatgactttgtttagtggacgagagagaaatgag

SEQ ID NO: 401589 - DNA, 485 bp, Cannabis indica
taatcttcaagtccccgactaatggcggcattcattccccttacatactttgtttccgggtgaagtccgttggtaccagatcactagtgaacttggatagacgatcgaattgtagggtatactcggccactatcttcttcccttgggtcaatttcacaaaatcttccatatacgaagttcttacagcaatgttatagaatttttcttcaaacagggtaggacatggtactaacgtctcgagtctgacccacaatatcccaccaaatgcgggcatgatcttgtaacatgaatgcagcacaatgaactcgttatgttcacgtcatccccatgttatctaggatgcgggtaatagtgctcatccactgctcagacttgatagtatcagtacctcccagaaacgttaaaggttgcagcttaacaaaacattcaagcacagaatcacaatatggcagaataatgttggatattattttactaggatctta

SEQ ID NO: 401590 - DNA, 1008 bp, Cannabis indica
ctctctctctctctccaaacaaaaggaacaccatcccctcagccaactgcttcgtcaccctcgtcatcgtgcgttcgagatcgcaaggcagccaatgtcacacttccaccccccttgtctaggttgggaccggactcttataattaataaaaaaaatcatgaatagtattgtattttttaaaatatatgttttgtttgcttcaaatctgtatgcttttaatagtttttgtgtaattttctatctatgaactaagtatatttagtttttctgcatctttctgctatatttctaaatgtaataacatatttcgatagcttcacgatagtttttcgatagaacatgatggtttttcaacatttttcttacaaacattttttatgatttttggatagcttttctatagaagataactttgaagttggcttttaactaattcaggttatttataggattttgagttcacgcaatttttcgatagtttttgcaattattatcgagaaactaacaattgtaaaaataattaaaaagaaattgttacatatcgtcgtcctttggtttgtcttctggcgaggacggacaaatattggtggttcttagcctttaaggctctcgttcgattagtcttcgacggcgaggacacggaagaaccatagggcgtttatgcttttgaaggtttgaggcttcttggatttcaatgcaagagaaatgggccagaagaagaggtggcacttgaagaacttagggctttggcggggggcttccgacggtggagacaatgacaggaatgggacttagggcttcagagggttttcttttcaaatctaaagagatagaaagagatatagagatgtctttttaattgaaagggattgaatgtgtatgttaaaataaactaagaataaattggtatcaaattattttaggaagtattttttagggttgttccaaaaaatttacaaaccgcccaatccgaataaactgctcaaacaaaatcgaataaactgaca

SEQ ID NO: 401591 - DNA, 718 bp, Cannabis indica
gaaatattaaaatcataaagcttctgaaactcaagtccctcatgaaccttgtggacacacatccgattccaactaatcaatgccactaccgtttttaccctaatccttccacttaaaaaacaataataatgttatagatcaataaatataataaatgtaataatataataataaaataaattttattattttaaaaataataaaagtattatatgtgtttgttattgtaattttttttaaaacaaaaaaattaataataatggaaagatattttaaatttgaatagttaaagtttttttttttttgtaaaaacaagataccaaacatgtagaggaattgttaagacaaaaaagaaaacatgtagaggaattaaggtaggtgtggctgagggattttagggttgacgatgatgttgttgggcaagtgggtgcatgcgtgttaaggggttagggcatatatatatgcatgcgtgtgtcagcccatatatatatatttatatatataaggtatacgtgatgaacggttctgatcataaagctgcagctttaataatgatcatgatcatcagttatgatatatgatcgatcgatcgaccgacaattataactattgttgttttacttatattatatatctaatattatatacatgatgtatatatatatatatatatattaggtgattgttacatgccaagtcacgtagtgttagttttatt

SEQ ID NO: 401592 - DNA, 1186 bp, Cannabis indica
attttgttgagtataaaaaatttaaaggatgagtttagtattaaatttgatgaagtcattgaattattgaagagcaagaaagggtcatttgtgcccaaagattttgaggagaaggttgacgattcttgttctgagaatctggatgttggtgggaatgacgatgagtttcccgatccgccgtcacctgaggtattttttcttttagtttgtttttttctgtatatataactggttatttcttattttctatggccttttatgtttcctattttttgtgttttataaccggttattttttggcatgttctgttttttttattctttatctgtttagaaaccggttatgaatatattttttgttccatctttgtaggttgtttcaaattccaaacttcctgaatatgatgatgatgaaggtgggctgcaattgtcacttgttcgggaagataaggttgtttgtttgtttctttattattatggatgcgtttattataactggtttttttttagattgcaagtttaattaattcgtcttttttttttcaggttccagctggcttaggtgaggggagggatgagggccgtttgttttcgtatgaaaccattaaagtcgaccaatccattttggatttggttgacagcctcactcgggcatgtgcctctccaattagtgcaaagaatgatcaatgggatttggtatcaattcctgagtctgcaaagaatgatcaatccatttttctgtttttaaccggttatttttttagcgagcttattatttttttttatttattaagttgttcgtgttgtatatattatatagaactttttttaatatagaacatgtatgttggttcatgtttaaatataatcggcttctttttctttgattttttttttttgttttggtgcatgttgaatataactactttttttgttgttttatttttttttttataaggcaattctatgttatgaaaattttcatttttattcaaaaccaattatgtttgaagatatagttcatgatcaacaaatattgaaatgatttttggaacatacaaaatctaatatagtattttttttttattgtaaatgtatctttgtattcaataaaactggttattgttgttgtgtctttgctttcttgctccttggttgttttggttcttgttgctttggtggtaga

SEQ ID NO: 401593 - DNA, 793 bp, Cannabis indica
attgaaaatttacaagtgaccctaaataactataacattcacgattatcataaaaaattgaactaaaaaagagatgtactataaccactctataatatttcacaatattaatcttgttataaatattaataattatgtggatgtccaaatcttttatttattaccattaattgtaatcaacattcctctttttcttagtttccctttttcttagtttcttaatatttcactcttgtatttgtataaataggggttcaccccattggaataaacaactcagaaattctcattcactttctctttctctcttcatcttcttcttctttcttctcatctattctatattatgttatattattttataacacgttatcagcacgagtctctgcccaagcttcaagcatgagtctctgcccaagtcccaatgtaagtattttgttaaagttcttgaattgtttcaaagtcacgatacactaaatatatatttatatatatactcatctgactgaaacaatttcaagaatcatttggtttcctttttctttttatctatatatctatatattatatatgtatgtatatatttttatatatttattattgatttcatatatatatattacgagggattattattgagaagtgtaccataatctttttctataatttattgctactatgattttgcataggtgtaatataatatttttttgacacaattttaatttgtcttaacaaaagtaaaattaagtacatgcattatcttgttagtatagtagtgttgttgttatga

SEQ ID NO: 401594 - DNA, 500 bp, Cannabis indica
ttccttaataataaatctagtgaaactaggcagttattaattttcattaatgaaaatatccactatttccaagctagtttttcaaattgtttttaacggttattaatttgatctcatcatcatatcatcttcatttaatttgtttgtcgatcttgttgcatttggcaatatttaaatggtcaaatgaatattatctactatagctagctatttttcaaaatcaaataatacattatttatttcgccaactttcacttatatataagtaaatctactataataataaaagaaacataattaaataattctacacaattttataaattaatatttataaacaatcattatataatataaataaacataaatatttacaattttaatattataattttttaattaatttcctaaaaaaataaatacataaaattaaatatataaatacatgaattaatatttatattgtgatattttactaaaatttaatataaaattaaaaa

SEQ ID NO: 401595 - DNA, 626 bp, Cannabis indica
attacccctagatcaatctcagcgcttagattaaataactccctcatctaacggctgccgtacatcacggaatacatttcgtgaaagtacaatcacgggacaaaatcatgttcctatttttatatgtcatattgtgctttttaagtttgtcgtgtatcgtattttttaaactaatttatttgtactttcatgcttctcgtgtcatattgtacttaaatatatattttttgtgtcgtatctaaggatgcacattttctccatgggatggggcctcgcgtagaccccctggggcggggattccctgcctaaatggggaacggggcggggacgaggataaaaatttgtccctgaatgttaaacgggacagggaaggggatgacactccccgccacaacaggaacccgtttaatttattaattattttttattaatattttatattttatcgtactaatttatagtatcgtgtcatatcatgcctaaatttatattttttcgtgtcttccatactcgtactaattttgtatcgtgtcaaaaaacctcactcttatttacaccttttaaagggtaaataccatttttagaccctgtgtttttgcaaaagttaccaattggaccctgtgttt

SEQ ID NO: 401596 - DNA, 854 bp, Cannabis indica
aaataaaaataaccttaactctcgcctactgggacaacgttagattcttactttgatcgaataaaagattggtagaatggtgtccattttagatgtgttgactactctattcaatgaatgatatctttgactctcacctatcgggacattgtatcaatttattggaaaccttgaaaattatttaagatgtgtttgttttgtattttcacatgtctttcttacttgctgaatgtatgatagtttctgaatgtgtatgaatttatattgaatcatgttgttttctattattaattgttgtagcataaattttaaatcttcattgttggtctaacttaacttgttgttttaacatgacaaattctaaagaattgtcatccgttagacaaacataatagtgttagatctcgataaataagtatttgtaaatgcaacatctagttgtacatctaaagatgacaacttagacgattgcttacaatatgaaacaatgaagaaatttataaaaataagaataactttgactctcgcataaacgggacatcgttggaatctaattttaaatcaaaattatcctgtatttttcatcttagcttttcatttagaaattgcttaaaaagtatatcattggataaatggtttataaatcatctgcttatgatgtcactctattttcttccatgaaattaaatggcgcagatgactatatttctgacattctatcccgaaatgatataaatcctcgatcttagaaattttctacttgtatatgcttacttaaggcagccgaaacttagagttagattagtagtggtggtccaagaaagaatcattactcaagaaatatttggtataaa

SEQ ID NO: 401597 - DNA, 807 bp, Cannabis indica
aatgacgttttttaaaaacaagagaacaggaaatgaaaaaaaaaaaagtaaacgagccccccatccccaaactcatctactcagaaaatgagacccaatgaaacaccataaatattgaacagaaaaattagggtttgtgtaggtgaaaagggaacctgttgaattgaggtcattggcgttgagggagaggaattgagtggatctggagttggaggtggtaatgaggtgagcttgtcgtagtcgcaattccatgtattctctctgtctatatatcgaaaatgaaagagaagagaagagaagagaagagaaaagtcagaaaagtcaagaggagtgaagggaatgaagtgaaataaatgaaatatatgtgtatttgatttttattattaattattgattattacttttatatggtttttacaatgtttccttttgaattcaccactactgcatggaggaggagaggagctactattgggcctggccataaaatcccttcttttaggaagttagtagaaactagacaataaaatcataaaagtttacttttttttgtataacataaataaataatatcacgaacttatgagtttttttatttttttttacatttatatgagttgttttatgctacttttttataaaaaaatatagaaatctcatatttataaaacaataataaattttactagaaaagttactggcgttagaaaagtcgtcgttgccagaaaagtcactgttaccgaaaaagtcaccttcactaaaaaaaagttgccgaaaaaaagttaccgtcaccgaaaaaattactgc

SEQ ID NO: 401598 - DNA, 687 bp, Cannabis indica
agttagtaataaaataaataataatatttttaatgctaaatatatgttgtagccaagtggtaatttaattagtttaacaactaagaggatgagagttcaagtcccaatagcctcggcaaaaagacccaaattaacatagggtcggcctaaggctatgtttggtgggagcgagggagagaaagatggatggagaggttagagaggatgggaagtaagagggaaagagaggattgttaatgtcctttatattgtttagtattaagtgtgaggtgagaaggatggagaaaaaaatgattattaaaattacaaaattgtcttttaaaaaataaaattttattattttttaagggtagttattgtattttgcaaaatatattttgtctttttctaccatcattccaaatttggatggattaaattttaaagatttgtagggagacatctcgctccatctctcctctccatcttgccaagcaagtaatttagttcatccttccatcactctccccctccacccctctccatctacggtctacccatctccccctcctaccaaaccatagtgtaaaaagttgccctactatgttctcaaatactactttttcattaaattttataataatatatttttttcctctaaaaaaaattaattaatgataaagtgttataaatattaactaattatgt

SEQ ID NO: 401599 - DNA, 827 bp, Cannabis indica
cgaatgaattagtttattagagtgaatattattttatgtataggatgatatggaattgtttaatcaaactttaaattttcttactttattagtccatttcaatacagtagagaaaatgtataatgaataaatgcattctaataaacgtagatttatttcttaacttcatttacttaaattgccataaaactaacaatactaggctcatcacgtaatattatctaaaaatattatatatattattaaaaaaatactatttatatttatagaaaaaaaggtaaataatagaatatactttatattaagcatttaatttttgtaaattattattatgtttattttctcagattttatatttagtttatttttttaagttatatttagtttattttaataagtaataattagacttatttaaaaaaatattatttatatttattttgaaaaaaatattattatttatttaattaaattatatataatattttaaatatttactataacaaacaataattataatattatttaatgatattaaacataaaactaagtaactagatgagccgaaataaatattgtgaatatttagtcgtctttgttttattttgttatttttaagttaattattgatatgtttctgtacttgtaactagatgagcctgaataaatttatatgcctattaatatacaaataaataaatgtggtatacagttaagatattacataaatatttggctcgtttggcacactgtattgtattgtatagtattatattaaattatatttcatgcaatattttatgtaaaattatatgtggtattgactt

SEQ ID NO: 401600 - DNA, 758 bp, Cannabis indica
aaaaccaaacctgttcatataaggagtaacatgttacaagaaaattagacacccaccttagtttaaccatatgagatttgtactcttctagacttaattagtttactgtttaaagttgttggtgaaaacaggggactttctaaagcagttttttaataaaaagtcaaatagtaataataagagacatacgtgggggttattaaattaaatatataggttagttattcaatttaatatgtatagaagttatagttattgcattatattaaattatattagactcaataattaattatactacttagaattatagttaaatagcaatacttcataaaaaattattagattaaattatatgaagttacaccaacaactatattacaacttgaaaggcacctattaataaataaaaaataatattttatatatttttacagaaaatacagtgtaaaatataaaaataactctaatttatagtatcaaaatcgcattttataatggcagaattaatgtttaaatttagaaactttacaaatattttcaagatcataatttagactttaatgatctactatatacataaaaaaaaactgaattaactagtaaaaatgaaagtcaatcttttttaaatttagacaactttttgtaaagagaattcattctttttttttttgataaatcaatgaattgtattgcactaacaaaattacaacctaagagcaccccattccaagggcctcaaaatatacatttttatc

SEQ ID NO: 401601 - DNA, 746 bp, Cannabis indica
ctattccatacctcatgactccattttactttgctttagggagggaaaagagtcttgtagccatttgatatactgtatttggtgcttgtgaagtgttgagtgtccataacacctttgatttgagttttgaccaaattcaatttcctccagtactagcttgcctgaggtggagcttgataagtccaccaatcctctcatttaatgtatacacaatgtatccatttaatccataggttatcttctttgttcgcaattgcccacatatattttgtcattgctgctattttccactctgctattcttttcaaactgattcctccagcttcttttggttggcaaacatgatcccaagcaattggtcccaattttattctattttaaaataacataaaatctgaaaagtttgtttgcatcttttgaatagatatttatgtttgttgaaaaccgaatttttcaaatttataggtttaattttaaatttaattaattatttaattttattttattattttcgaagataataatttattatttagattttttgaaaataatttaattatataattaatttaaattaaatatatcctatatcaaactatccaatttattgcatgtgtgtgttttattattgtttattattaaaacttgttttataaaacctattattgtttgatctaaattgacatggttaacttgttgtacagatccaatgatctgattttaaccaatggttcaattgtcaattg

SEQ ID NO: 401602 - DNA, 697 bp, Cannabis indica
ataccaaataaatttttatcagaagtaaaatgctaagtgtagtgtctatgggttgtttggtacgcggtataaagattgtattgtattaaataataaataatattatgtttggataaaataatgtattgtattaattattacaaccaaaatttttaatacaatgtatgttgtattatttaatacataacaaatggtccgtattagcttgtattattatatttataaaggatttagagtaaacaccagtctccgacccgaacccagacccagaactcggacccaggacccggacccggactcgggactcggacccggacccgaacccaaactcggacctggacccggacctagactcggaccttgacccggacttgggacctaaacctggatccggggcccggactctgacccgaactcgggccccgacccgggaccccgaccccgaccccgacccaaacccggacccgagatccgaacccagacccgtagttagtgttggggtcgagtgtattaaaaatatattataactttacacgatcaattaatacaagtcaatactaaacattgtattatattaaagggaaatttgcggcaaaagtccccaaaaagttcacgttgatacagattagtcccaaggtccaaaaatagcggcaatagtcctcaaggtcacactttttatttgtccgttggtctccaa

SEQ ID NO: 401603 - DNA, 614 bp, Cannabis indica
atatatatatataactaaaggaaaatagaattggagtgctctagcttacttactcttcttggctttatattaaggagaaatgttaattataactttttattataatattttaattaatttttacatctaaaattatatgtcaaaatttttttttttttaactttttatagcatcatacattatatagttacaatattatttttgtaaatttttaaaaaatttaaatagtttataatatcaaaaatagaatacttgatattctaatatataattaaaaacctttaagtatattttcgacattataaattatttaatttttttttaaatttatacttgataatgttgcgactataataaatactaatttaagaaaagattgagggtaactattttttatattattggagggagtatttgccacgtcaccacaattagagagataagtctatcctagtcgtgtccgtaccttatctatgatcagaagtcacaaccaatagcaaactcgtttttcaaatctactttacagcttactctatcaaccaatacgaactggacaatcatctctaatgcaactcacactactccctttaataattcttttttgtttttttttt

SEQ ID NO: 401604 - DNA, 1136 bp, Cannabis indica
gtgtaaaattgatataacaaaacggatgagcaatagttagtaccttttcaactgagccaatggtaatatatcgactattctcatcttcgtaatgaatgtattccattactttttgaagtgcattctctctcatttttgtaaaaggccaaataccagtaaaagtctcagcaaagtaatagacactatcccacaagagacgttgtatcttaccatgggggtagtagttatcagtctatgcatggttttatcaaatttcattagaacagtataatgtataaataagcaggataacaatttaatttggagcaattacaattagggcacactacaaaaaaaaaaaaattagtcataataaaacttgttagctaaaagtaagaaaattataactaattataatttatcatgcttatatattgtggtgaaaattgcaccctgtactctttttttgttaacccatttcatttatacttttcttttctatatatatatttaatttatacctttttttatttgatatatcccgattatatatacttttatgtaatgaaaaaaaactttcctcacctccctgaacagtaccctaattatgtgagggtataatcggtaatggacttataaaagggtacatttcaattgaatttaaaataaagctattttttggttaactgatgaaaaagacactatattttaacttacctttatattgtgactaaaaagtctgtggttatttagttataaaaatcacaattgtgactaaactaaattagtgataacttgtatttaaatactatattttaatcataagtaattttttattgtaattaaaaatcacagtaactcacaaaaatttatgttgtgataagagaaatttatatttttttttggtagtcgaagatattattaaacgatttagaacgcttgtagtgttttagttttattttaattttcttttataaaaaaaggatcattctcttgatttttaaaacttattgtatttcaagtaattttaattttttttcaaatagaatttgtgtaaaataagagaaaatatcataatgttacataccataattaatattataatctcagctattaaaataagatttgagttgattttttttttaggataatttcat

SEQ ID NO: 401605 - DNA, 851 bp, Cannabis indica
atcacaagcacgagtttcgacttcaagaaggtagttgaccgatttgttaacaagagcaggatgccttgtaacgacatagctgttagtaatatgtggaagccaaagatcctcaagaattgagacattttctccattagcaattgttctttgagcacaggcacgtattagatctttagcttcaagaatacttcgacatatgaaactaggattgtctcccaattcagttgagaacagattaccatgtgcataatatttttacttataaagcttactaaccaaagaactatcattgatcaacaatcgccaatattgcttccccggaagagccaaattaaagtctctcaaacttcggaaactcaatccccctgcatgtttatggcgacacaaacgatcccaactcacccaatttataccttcgccactgctcgaattcgaatgccaccaaaacttagccataagccgttctaactccttacaagtgtccaatggcaagagaaaaacattcatagcgtaattcagcaaggcttgagcaacagattttagcaatacctcatttcccgcacgagataagatacgcccttcctaaccttgaattttcttccgaaccttatttttttacactttaaatagttgtttttatttttacggaaattcacataacaatcatatagcaattaatagaacaactcagatcgcatccaaaatccacatagcaacccaaaccgtaaattttaaaaaaaataatatatgtgataattcctctaaataattaagtaggattatctaagtttttctatattattttttttaaaaaaaaaaaaaaaaagttagtaattacatatataatacac

SEQ ID NO: 401606 - DNA, 641 bp, Cannabis indica
tgcttcaaccgcagacgaggcccttaccttctttgcaaaccacatcattttgttatttcgtctgtctagcaaacccaccgctaaacccgcagtaccctccttccaagaagcattcgatacacaaaacacatccgttgaagtgcagattgttctcccagccaaaccagttggtgttcttctgcctatagccgcgtcagcctccatcaacactgaagattcggagtatcttcccaagatgaagttcctaacctgtataatatgaaccaaacctcccttgaacaagtattcattcctaactttccaaataccttcaaataggcagcctgcaaaggatatgaaacatcaatttgctctcttggaagtcttgccaacatccaatcgagcctttccttgactgaatttccacctcccacccctccacatatgggaaaagggctgctaaaccataatgcccgtgcacaatgacaatcccagaacacatgaatagcagactctacgtcttcatcacacaatggacaagacttatcccttacaaatcccaacctatctctagttggaaggcagcccgtaatcactcgccatagcataaccgaatgcctgtagtgcaacttctgactccacacctgttggaaattatttta

SEQ ID NO: 401607 - DNA, 504 bp, Cannabis indica
attgttaacttgggtgttgggtgcccgggcaccaagtactctgggtgctcaaaaatgaacttactctgaatttgattttgatgcctcaaatatgtccatggtatgtctagttgatagtcaacttaggcactgggtgaaactctaggtgtctaggttggcttccaggttgcaagttcatgtaattttagctctcaggacttggattaggttgctccatgtcttcatggtacagaatacaaatatagtgagttggattcaagttattgaagtctgaacttctattccaaagctcccaaagtcaacttgggcgtagggctagggtcccctcctaggtcgactactatgacttgggtctacccaactctgtgacgtcatccttcttgccacgtgtcaaacattgatgtccacgtcactaggaaaagtttttgggttaacaccaaccaaaataagtaatattttctacaatatatgaaatttggtgataaaataatcattgaaaattaa

SEQ ID NO: 401608 - DNA, 531 bp, Cannabis indica
atgttttagtgactgtattttgcgataaaatcaaaacaaagggatgaacaagaaacggctacgaatcgcaatcaaatgtccttgtcatagtgacatgttgaacacttatatattaatggcaaaaatagctctgttggagctagcaacgatcaagaggactaggtcgaggaaaataaaatgtgagaagaagagggagggtgagtgaactgaaaaccacggctggcagtcaaaagagaagggagttagagccattaagagagaaaaacaatttagaaaattagggtttgatgagagagaaaaattaacaaaatatggtattttaaattaataataatatctggacgcgtacatacctgaagatacattagactccctacagttgatgcatagggaatctttttcatttcctcaatttgaaggctgcttttacggcattgatcactaagactgtatttgtcccctttagcaataggggtatggtctacaatcttgcatgccaaaccttttgagtactttattgatatagctctt

SEQ ID NO: 401609 - DNA, 764 bp, Cannabis indica
tggaagatggagacctcatttttatttttggtatttacaaaagaaaaaaaaaagtcccaaggaagtataaaagttatttttgcagtatgacagtatttttgtaaagattgggtcaaaattcagtatttttgtaagtttccctttttaaattggatatataattacacctaatttttaatatttaacttaaaaatatgaagaaaaatacgtaaaagttaaatatcattatatatttaactttaatactccataaaaatattatcgttacaagtgtaatgtaactaaaagtttgaaataactaaaataataatattatcaagtaataataaaattgaacaaacatcatgagaataatcaagtgttacaaattcaattaaaaaaagccactaaaaatataactaatatatatatatttttttaatttattactttttataatataaatcaatacaaataattttttaatgtatataaatataattggattggatcaattatcaattggattttgatattgaaatccaataaccaatccaattcaattagaatccagcttttatcatccaacccagtccaatctcaatgtgccaggccatagtagtgagttgttaaatgctaaaatattacatatttcttggtgtaaatatacaaagttaattgaattttaaaaaatatatttatgaaattaaagttatatatttgtatgttgaaaatattttatttaatttaattttatctttgtttataaataataattagtattt

SEQ ID NO: 401610 - DNA, 721 bp, Cannabis indica
acgtcttgcttcccactcaggtttgatcccccaaccaatctcgtaaccactctgcccgaagccaccacgtctgtcgcgcccatatcatcgtccctatcttcacttgatcatagacggatcgacagtaatggtgaaatggggctcagttggatgaacggggctcggatggtttcgactggaatggtgaaatggaggtgcttgtttgcttcctcggttgctgatgtgtgcgaacagagtcggagctggagtggggtcgactaggtggttcgcttggtggtgggggattcacgaaatggcttcgggtgaatggaggttactgggtagtgcaatttttgctgctgggttcggtttgggtgatgagggtttcgggtcagcttgctggtggcgattttggtgaacggaggtgggacgtggtgatgggagatggtgaaggtgggtcgtttgcaggtgggggagtcgctggttagtgtggttcgagtggccgggggtttctgggttagtgaatggaggttagaaggaggaagaagaagaagaaagaaaaggaaaaaaaaagaaaagaaaaaaataataaaataaattttaaatttaaattttttaattttaaagtaaaagattttttatttttattttaaataattaatttttattttaattttaaatatttattacgtggactaattaaactgtgccacgtgtacactgtgtacaagtagacattcca

SEQ ID NO: 401611 - DNA, 2052 bp, Cannabis indica
gaagtgaagcaaaggccaggggaaccgctccaagcttatatcagtagattcatgacggaggtaacgaaagtggcacagttaaccaaagaaggaaagttaaccgtaatactagggggcatcgtagttctaggagagctttggaaggacatcaagagagatgggccagtagattctatgagtgacttcctcgatcgcatagatggcttaatcaagctcgaagaagccattcaccgagcagaagttgagcttaaaccaaatcaatcgcaagctccctctgctagaacattcgttcaacacccccaatatccaagcaattcaagctcgggcagtaaaaggtttaacagcaataacaagcaaggcaatgggaaaaaaatgaaaagtttgttggcaaagccgaaccggcccctagagaaaatccttccgaattcattgttttctctgtcttgactgacgattttgagaccatatatatggctactcagtccgtagctccgtacaagaaacacactcccatgaaaaaggatataagtaagagagacatgtccaaattttgacattttcatggagactatggccacgacaccagtgaatgcaacaatttgaagcaaaaaatggaattcataaggaagaacgtgcaaaaaaatgtcaagacttaccagaatcaaagggccgcccagacagacaataaccaagatttattgccactgccagtggacgggcatttgcaagtcatcattggaggcccacacatagctggagattcaggcaaagcccgggaaaggcatgctcgaaccttacaacacgagtaaaaaaaagtggtcctggccgtagagggaagaaaaccaaaaacaccacgggtaggggaacccactataacattcagtgaataagatgctgtcaaagttagcttcctgcacaatgatccattggtcgtggaagtatagatagccaacaaaacagtggcccgaaccatgatagacaaggagcttcagtgaatattttgttcaaaactccatacaaaaaaatggggtccaactgaaagatttaaccccctgtcttcagcccgtgtatggtttttccgcgctagagtgttgcacctttagagaaaattcacccacccctcattgttgggcaagctccaaagagcataactgtaatggcgcaatttttggtgttagatgtcccgtcaacttttaatgtcatattgcgccgaccagccttatatgacctaaaagctgttacatcgatatttcattcgtgcctcaagattcctacaaagaatggggttgggtgcctgaaaggaaatcaacaagttgcacgggaatgttacaaccttgccctaaccaaggctaaaaaggaagtatcctctagttagagttcggacaaggcaaaagacattgccaaataggaaactgcccaaggcagggatgaagatgtggatccccgacttggggaaccgaataccgatgtggggccagtggaagagctggaggagattgaaatcgacccaaatgttctgaccaggaaactcaaaatcggaaaaggtttgctgctcgaggtaaaataaccatcgataaaatttctaagagcaaacctagacatttttgcgtggtcacatgaggacatggtcgtaatcgatccttctataatttcacacgccttgaatattgatcctaatttctgacatggtcaacaaaaaagaagattgttatataaagaacgggccctagccctaaaagaagaggtagaaaagctgcgcaagaacaatttcataattgaagctttctactcggccatgttcgtgaaccctgtactagtgcccaagcaaaacaaaaaatggcgagtatgcattgacttcaccaaccttaataaggcgtgccccaaggactgctttccacttccaagaatagatcgacttgtggatgcaacagtaggacacgagatattaagcttcatggacgcctattcaaggtaaaatcaaatcaagatgcattcaccagaccaagaccatacaagtttctgaacagatatgggtctgtactgttataaagt

SEQ ID NO: 401612 - DNA, 676 bp, Cannabis indica
caaaatctgactgaaccactatatttcattgtcttctgtattttttccagctttgttgtctgttctcgcattcctatttgagtactcgccggtttaggttgaatactcgcatttatcatctttcaaataattctatcttttaccgactaaattacacttcttggtgttgtgaaattctagtaacaacagttatggtatatcacacacaatcatgttgagctttaaatttaatgaaccaaattatgtcaattttttaaaatataattttcattaagacaataatatcatcattttatttatttgaaattgtttttaagttttaaaaaaaaattgattattttaaaaatagagttgacttgtaattacttttagtttttctaataaatatataacgaaaaaataaacaaatagaaagtataatattgttaaaattcatttttcacaaaactaacctattaataaaagtttaaattattgaaaccaacatttaagataaaaatacgtggtcgtaagtataatttagtgacttcacacttcttctaataaaaaaaaaaagcgttaattagtaatttttcctctgaactttgacatgtactaaattgtactccctgaacttttttggccattaaaaattcccctcgaactattgagattgttaaatttaaggacttttgtc

SEQ ID NO: 401613 - DNA, 838 bp, Cannabis indica
accaaaccctcctccgcctatttttgaagtgctggcccaagttattcgtggtattactggtgatcatcatgaccaatcttctctcaacctcaaattggttattcagagaattgttgggtgtacatccaaagtcccacattggctagaaatgggaaggatcttgggtatataaggatgaacactatctccattggaatgaggccttttgggaaggtgcccaaaaacaaatccgtgagggcttggcccaaagcggacaatatcattccaatggagaaatagatggtgtccgacggtccttacaagttcattcaacccaaccttgaagaagaaaatggcttagttttcaagaggtagaaatataagaacgtgaacagtgtcgattatgtcttcaacaaaaataggcaccaggcccggccctaggtatgggcgggctaggcccatgcctagggcccacacttcctaggggcccattaaaattttttaagatctcataatttaaatgctatatttaattaaaattaacaattaacatgagcggctcttatggggtgcaagctgtgctattgcacaggacccaaaaaaataaagggcctaatatatttttttttaggctaattagtaattttttcccctaaactttgacatgtaccaaatcatgccccctgaacttttttggccattaaaaattccccccgaactattaagattgttagatttaaggacttttctctaattttagtaaaaaaaattctaacatggatgaaagttcaaggggcatgatttagtacatatcaaagtttgaggggcatgatttggtagatatcaaagtctggggagc

SEQ ID NO: 401614 - DNA, 610 bp, Cannabis indica
gaactttgtggccacatatagggccttaatggataattttccctagcgcaacgatctctagcatccaatgcgcactaaaaaattatattagaatgtatgtaagattgtacaaaaataatttcaatttattatatagaaaataattagcactaaaaaattaaatagtgtttacccaatattcctaggaataaagaacatttggtggttgttattcatcgatgataaccaaagggccaattgttttgacacattctcaaaagactcattcttctcttcatcattgataccattcactgcaagaagctctgggtcgtaaaacttgaaaattcttctcaaatcatttatgctctcccaaatgtacttgcattaaattgttaaacattagtattttataataatttcactagaatttgatatataaggttaattagattaaagaagagtatacatcattccaaacagtattccacggttgttgatgaagtcacacaacgccgcttgctgcaaattctccacataatgtgatctggggacgaggtgctatgaatcctctgttggaaattattttaccaggatcttagatctactcataagtatgtttattaacatc

SEQ ID NO: 401615 - DNA, 610 bp, Cannabis indica
attaaattagacaaataataatacttaccgaaagttatgtcgttgattatgatcgtaggattaaagtttgctagcaatattaaattacacaaataacaatacgtaccaaaagttatggcattgattatgatcgtggatttgtggggccagagcttgcgagcatgttccacgagcagactcaaagatagtgaacccctcagaccacactctctttggatacaaagacgacattcacgaagtcccgtacctagtagagctcttatatagcaatcgaacgactcaaagcttttgatgggacgatagagtaaaacaacccaacgaactgtggatgtcagtatcatgaagtaattgagatggaatgtcatggttgatagaggtgaaaaattaccccatttctcaccagcatgtcatattagagagatagcagtattattagagttacaaaagattgattatgggtattgactctaagaaattaataatatgatctatgtgaattaagtacccatgtgttagtactctaagtaatctggaaatgggttttgaaatcaattgggattattcgaagttgatgaatattaccattaccatcaccatcatcatcatcatc

SEQ ID NO: 401616 - DNA, 778 bp, Cannabis indica
ttaaataaaggcatccaacattaaaaatggacaactataatactataataggaaatgtattgggtctaacttaacataacaaaattatgggaggattgttctcactttattaagtgcattaagtatatagtgatgtaaatataaatcgggcattttaacgcgatacgaaatcggtcggatgacacaagcacaattacacaccaatggctagtctaaaaagcatattgcatggcggcaactattattaataaaacttaaatataatactgtatagtataattttataaactattaaaattattaaaatttatttgtagtgttagttaaaattttgaagaattacttagattttaataattataataactttttatatcattgtcaatacaataatatgaaaataattgaagatataaaaaatacatatagtttaataattatataaaaaaaaaaaaagataaagcgcaatttaagttaaaatatgaaggctagcttatttaagaaaaataaattagattgagtaaagtacgacataaatctgaacccgaacctaatacaaaaatatcaatcttgaactttaatgggcatacacaacccatattttgaaaaatatgataaaaaatagggatattggcagctaaactacctgaactttacggtttgtaacacttaaccataaaaaccgaatttttggcggctaaattacctaaaccttgattctgttttgctctacacacctccgtccaaaaatcaccgttaagtgtcacggtggactgtc

SEQ ID NO: 401617 - DNA, 518 bp, Cannabis indica
cttcaaaagctttattgaaattaatttattaaattcataaaaaagtcttatttttaatgaaattctgagttaataaaaatatttatacgtagttgtttccttaaaaatttcccccgaactagtgagattgttggattcaaagactttggtcaattttttttttcaattttactaagccaacgattgtctatgtactaaattgtgtctcttgaagtttgatatctaccaaatggtacctcccaaacttagacatgtaccaaattgtgtcttctgaactttcatccacatccgaaatccgttaataaatttgaacaaaaatccttgagtccaacgatcgcaatagttcaaaaaaatattttaacatcttcaaaaattcaaggggtataattttgtacaagtcaatgttggggaaaaatcataaatagtctattattatgtatgtgctaattaattaaaaaatcataagaaaatagttatataatttgttgataagatagaaaacatatattaagtattaa

SEQ ID NO: 401618 - DNA, 873 bp, Cannabis indica
tcgaggctgttggttctcgctgggtgccaccccgagaaggggagagaggaatcaagaaagagagagggaaagagatgaggtgtttatttgggttttgaaattagggtttataaaaaaaaaaataatttgatttataattatttttatttttttttaaaaaaaaactacacatatcagtgacggcttaatagtttaatgttttttttttttttaaaaaaaaatacaaataattaatgacaacattatcgtcattgatgtttatttttagtgatgactttgaatatcgtcattgatacttactttcagcaataatcactgacaaccttttagtgaggacatgtcgccattgacatttattactgacaaaaaacaaccttcgctgacgaaatttatcctcattgaagcttagtttttttgtagtataattaagtacttattaaccaagccatataatggatagggttgagcataaaatctagaaaactaaaaaaaaatattgttcaaaccgacctgccgaacaccgctagaattgaaaccggcggaactgaaatcgaaaccggcagaattaaaaactaaaaaaaccgccattgaacggtctagtttttttttgggtaataaatcgatcgaaaaaaccgaaaccgaccgttatacatatatattaatttattaaggtttttttttttgttttttgctttatggattgtagctactaataatatataataagaatataatattattttattaatattaaagttaaaaaaataataagacaattaatttttgaacaaataatttgtatgtttgtagttgtagaatgtaaaataatgtgcttatagaataaatttgattatatttaaaaaaaaaaaaaaa

SEQ ID NO: 401619 - DNA, 454 bp, Cannabis indica
gttatcaaagtaccataggaatgactccttacgagctgctctatggcaaaaaatgttactccccaattcattgggacgatattagagaatgaaaaatatttgggccctgaattagtccagaagacaaatgaggcaatagataagattaaagctcgaatgcttgcttagcagagcagacagaaaagttatgcagatcccaaacgtcaggataatatatttcagccaggagatcatgctttcctgcgtgtatcgccaatgaaaggaatcaggcgctttggaatgaaaggcaagataagtccaaggtttataggatactttaaaatacttgagaaggttggacaggttgcttaccggtttgccttgcctcaagcattgtcagctgcgcacaatgtatttcgtgcctcaatgttgaggaagtacgtatctgatccaatgcatatcttgagttatgagg

SEQ ID NO: 401620 - DNA, 1194 bp, Cannabis indica
acaacacaataaacatgatcaagtatgtgaaaaggggtttggatgaatttataaatcaaatagacgaacaattgattaagtgaaccaaaacttacacaaatgaatgaaaaatacttctgttactttattgatattgaataatctggattacattgaaatagggttttatttagggcataaaacccagcagccttcacagcaataggcctcacggaccgggatctttcactaagtggttcccagctcacggggtttaatgggacaacacttatcccaatgggaaaaatgaggctcccagtcaccttgtgcctagaaacacccaaaagcaccttcaaataatgcacatttgtggtagtggactgcccaacagcttacaacgcaatcctcggccgaatggccttggtggatttcggtccagtcccatcgattaggcacttgtgtctgaaattcccttctcagaatgctgggataggaaccgtgagaggaaactagggggaggccaggcagtgttacaacgttgttgcccacctacccattttgatggtccgcgaagttattgagccaggagtggcggaagaagatgagttggatccctgtgtgggatccgaaaaagttgtagaacctatggaggatgtcggggaagtatcggtgtgtgacctcaaccccaccaaggtcctcctgctagggaaaagtctagatctggaggaaagagaaaaaatattaagacgctaagggctaccgcggatgttttcgggtggtgccaagggggacatgaccggcataagcgcccacgtcataacccatgtccttaatgtcaaccaacacatgccactagttcaacaaaagtggcaccccctcgattctgcaaaggcagaagccctggagaaagaggtggacaaattactgactaatggcatgatccgagatgtgtattacctagaatggctggccaatccggtgctggtaccaaaaccaaactggacatggcgggtttgtattgattttacttatctaaagaaagcctgcccaaaagactgttttcccttaccgcgaatcgaccaaatggtggatgccacctcttgattcaagctgttgtccttcatggacgcatacgccggcaataaccaaatcaagatgcacgttacagatcaagaatgcactagcttgaggaccgataagggggtatactgttac

SEQ ID NO: 401621 - DNA, 818 bp, Cannabis indica
ctttttttttactaaaaaagacattagaaaaggaaacaaatgagtaaataattaagatatctcacaatatttgcaataagtgctgaaatggaaaaattaaggttaataatctctcaaaacacagttaataagaaataatttacaatagaaaacctgtcaaaaattaaacaaacaaagtacaattcaacacttaccaaaagaaagacaattgactaccatttttaagcccacaaattaagatacacgactcccctcatttttttcgaacaagaaatgtatatttttaatataataaaaacaaaaataaaaggaatctatcatattttatacaaaaatcaagttactctaaaacatgtatgtatatctctaagtttcataaaaatgacaaacaaccaagttatgctttcaaaagtgataaaaatttagtgtctcaaatgtaaaccaatcttaccaggtgttgtgaaaaaataaacaagttacatgacatattatgcaaatcaagattttttttatttgaatagaggagacttacaaatttgtgttagactatatataacatgaaaatgaagcatatatgaacaatatgaaaggcgaaaaaactataaacatatcgaaaccgtatatgcaatgaagattgaaatacctccagctattgatgtttgagcttcaatcccagcaataactttggtatgagaatttgggcttcttcactctctcagctctctttagatggaattgtgttgtttgcacaaaatgagtgaagagctcagggaccgagatcctatatttatagttgagatactccatcagtatctgtg

SEQ ID NO: 401622 - DNA, 572 bp, Cannabis indica
tatttgttgcgtgtgacaaaattatcaaaaattatattttataagagcacccacaactacttttctaaaatagagaagcttttgttagaatttttttagtattaattttagtgtatttgtaatttagttttactcgtgtttagagtaattttacacttgttatcttttatttttgcatatttaaaatataagaagattagaaaaatatcaacggaaaaagatgaaaaaaaaagataaaagatcgcataaaatatcactgtgcaaaattgggatttacctagaaaaaaagatagtatgcgttgaacacgtgtgaaaattacacacgggtcgcggcctaggaaagggcatgtcgcggcccgtattaagaaaaagcagcatcatcgtgtggaaattgcacacgggccgcgacccaagaaggagcgtgtcgctgcccgcccctagtctgaagtagaagaaaaagatttctcagtcattaccgaggcataacaaacacataaataggatctccattatcatcgagactataacaatcacaatcgttaattattgaaccataagtggtgcgtatcact

SEQ ID NO: 401623 - DNA, 702 bp, Cannabis indica
ttgagagaaacagagagagaatttgtgagtttgtaacttgattgtgaatctgtaaggagcaagactccattgttgcttcagggttttttatccctgttttgtacctctgttcagagtaataaaatcatcatctcagccatgtttaaggctgctttctcccgtggattaagctcatgatcaccttgattatgtagcccaaccacgtaagttctatgtgttcatttagtgctttctttaagttgtttactggtttaattttctggtttatgttgctggtttagtgttgattgtatccttgatcattttatgtttattttggtgttgtgttggttcttgttgggagttcaagcctccacacttaccatatgtgtgccccaaaaaaatgtacaagtgtgccacaattgattactctgttcataaatatgaacagattttataatttatagtcaagcattggtggagccctctcgtgtaatggtctcggggcgtgacagtcgactcaaagccaataaccacatcagcttcatatggaaattgctctataggcagttacacttttttctaacacaagatcggatcttatcccccatgctaggccatggtagtgcgcttacgcatgtaacaccctaactaatttaggcgtattacgtgatttttaaacgtactgtgcagctcgttgctaatcaacgagttttatggaaa

SEQ ID NO: 401624 - DNA, 1569 bp, Cannabis indica
agtacgactcgatgtagtgattttctgactgaccagtaaggtttatcaaacttgaagaggccattcagcgggtagaaggtgaacgaaaatctggcaagtcaaaagctcctctactggaacatccatccagctcccccattacccaagtaattcaagttaaaatgggtaaacggtccagcaacaataataggcaagggaatgggaaaaagggaaagttcaaccggaaaaaccgaacaggctccctggagaatcttgccaagtattttgtatttacatcttgacaaagaacatagaaagtgtttacatggccactcagttactagtcccgtacaagaatccctttcatggagactatggccatgacaccaatgaatgcaacaatttgaagggggaaatcgaatttttgataagaaaaataacccgcgtgtacagaagtatgtcaaggccgatcaaaatcagagggcaataacaaccaagacttgctaccaccaccggtggatggacatctgcaattcatcattggaggcccgcacatagctggagattcaggaaaagcccaggagaggtatgcaagaacagtacaccacgagcaagaagaagggatcctggtcgaagaagagaggaagccaaaaattccatgggcaggagagcccaccataacattcaatgttgaggatgctatcaaaatcagatttccgcaaaatgacccgttggtcgtggaggtccagatagccaacaagatggtggctagaacgatgatagataatggagcctcttccaacatcttattcatgaccacatatgaaaagatcgggctcaaactcaaagatctaaccccctgtcttctgcctgtgtatggtttctccagccaaggagtcgcacctctaggacaaattcgcctacctctcaatgttgggcaagcttcgacgagcataactataatggcacaatttcttgtattggacgttccatcagcctttaacgtcatgctaggtcgaccagccttatatgacttaaaggctgttacgtcgatatttcattgatgcctgaagtttccaacaaagaatggggtagggtgtctaagaggaaaccagcagattgcttgggaatgttataaccttgttgtgtccaaggctaagaaggaagtatcctccagccagaacacggacaagggaaaaacatttctaagtagggaacttcccaaggcggggatgaagatgtggatcctcgacttgggcacccaagcagtaatattggaccagtggaagaactagaagagatcaagatcaatcctgatattctgcccagaaagttaaaaattggaaaaggtttgttgctcgaagtaaaatcggcattaataaaatttctgagattaaacctggacgttttcgcctggtcacatgaggatatggtcgaaattgatccttttataattttgcacgtcctaaatattgatcccaacttctgaccagttcaacaaaagcgaaggctgttggacaaagagcgagcgctagccctaaaggaagaggtagagaagctacgcaacaataatttcataattgaagtttt

SEQ ID NO: 401625 - DNA, 657 bp, Cannabis indica
atgagctcctctttggcaaatgtccatatctgtaaaaaaaatttagagaaagttaaaatctacataaaatgaataaaacaaaggtggcaaggctaaaactcccacttagatcattgccaaaagtatcagacgaggaagaactgctacaataattactgaactccctagaaccagtgatcatgaagagatagtaggggttaagtggagacatatcccagtctggactagcagccctattgatgttaatgccatattgttcaacgatcccataatacgagctattacaaattaattggacatgaaacctaggatactgatacaaaccacaccaacagttgtgatgaaacccgataccgattatggcagcctctaagaattcttaaattttggatgtggaaccgcgacccaatgcttagttaagcatgaaccttggcatgaaggaaggcgccacaaatggtggtggaaatccgtttgataagtcaggttgaacgccacaaggaatactccttgataagttcgaatagttctctcaagaactcaagaagaaaacctctcaaaattttattccaaaatattctgatttttcaaagtgtttacaaggctttatatagccaacttacaaccaagaaaaaaagaaactaaaataaagacaatttt

SEQ ID NO: 401626 - DNA, 565 bp, Cannabis indica
ttggtttatgtgcttatgtgatgcatatttgtgttgtacgaaatttttccatgaaaaatgtatatttttttaaaaaaatatttatttagattccttgtgaaaaattaagcaattttcgtttttacagaacttaattctgataaaaattgaaagagttatgtattttggaaaaatcggggttcaatggtgtcaagggtggtgcttatgcgcaccaaaccctcggacaagcccccccattcgcgcgcgtgagcctcgggcgttcaccctgcagcacgcccatggaaccctacagcctgccaagttttctcggcagatagggctgcaatcttctctgtccacgcgcgtaaggctcgtttgcagcctcctgggcagccaaccccaaattgctatttttgtggatttttcccccaaaatctgattttttatgggattgtttcccaaaaattcgatttttccaatttgaaatatttccaattatggttagatttaaaaatttgttaacttctttaatatttatatattatttaattataagattagatattttgaaaattaacatatttta

SEQ ID NO: 401627 - DNA, 676 bp, Cannabis indica
atttcgaactcttggttcagcattttcttaactttgtttatttctctaatgctcttgctagcaatgagcatatcatcaacatataggagaagataaacaactccttttgtgcttttgacatatacacagctgtcataagcactcctcttaaaaccaactttcagtacaaagtcatcgaacctcttgtaccattgccttgggctctgttttagtccatatagggatctcttgagtaaacagacatggtcttccttaccttctatttcatatcctttaggctgcttcatgagaatttgttcatccaattctccatgtaaaaaggctgtctttacatctaattgttccaattcaaggtcttcagttgccacaatgcttaaaagcaatctgattgaggtgtgtttcaccacaggggagaaaatttcattgtaatctattccctccctttgtgagaaacctttggcaacaagtcttgccttgaatcttgccccttcaacacctggaattccatccttgtgcttgtaaacccatttgttgcctatgactctttgtccagcaggtcttctaatcacaatccatgtcttgtttttcttcaaagagtccatttcctgatccatagcattgtcccactccttcttatcatcagatagcatggcttcctcataggaacaaggttctt

SEQ ID NO: 401628 - DNA, 1022 bp, Cannabis indica
taacaaaatagatattgtattttgaaaatagtaaaataggacttgagttttaatttttattaattttttttaatataactaacttgaagataatttttaacacgtacaaatacaaaaaatgtaaatagttttgtcataacacatttagatcaaattattattaaattttattttaaataaaaaatcagttcaaggtcctatttgtattattttggaaaatataagatctattttatcatttaacaaaacagagagtccaattggttatttttgcaaaacacaggatccaaaattgtatttaacaaaaaaaaagtgagatggaaaataactctaaatttagaaactaaggtggtgtttggttgaaggtaattaaatggaatggaaaggaaaggaaacaatctctattcctttgtttggttggttgcatattaaagtgttggaatatcattccaatggaatgacctttccaccactttggtggaatgacaattccattttgaaatggaaagaaagaccattccaatacattatgagaaaaattttaataatttttttatcattttttttgatgtatttttaaattttattctattcctatttccattcccattcctatatttttattcctcctaaccaaacgccacctaagttagtaaatgttttttaaaaaaattaagaaaatgatcaatataataaattagaaaataaattgcgttttgcatgcgattttattttattttagagataattacataaggtatcattttttgtaaaaaaaaaagtacatttttccgtttaaataattttttttatacttttccgttttttatacttttacgttttttatagaaacaacacaataacaataagaaaactacataaaagtaacatgaaaataaaatctaaaaataacatcaaaacaataacaaaaaagaaacatatagataacaaaaaatcaacaacaaattaaagagtacaacataaaaaaataatcgtattttctataaataaaatcaaaaaaa

SEQ ID NO: 401629 - DNA, 616 bp, Cannabis indica
gtctcagaatcatcccacttcactcaccatttaataaattcttgggaacagctatccaaggattttaagaaacaatttcaagctgtcagatataggcgacctgaagtatcatccctaactaacataaaaggcttacctgagtcgcttcagcactgcagctacaaaagttaaaaatttgaaacgatagtattcaacttattgctcttcaagtaaggatcataaccgacctttcaatagctgggggtgagttgtgggatgacttacagggtcgccaagtaagaaacattaatgaatttaaagaaagagcgcaagtgtttgtgtgcaaagaagaagcaaggaatgagatgaagttactgaagactggcttgggaaataaacctagcacaagtactaccacaacaagtaccatctcgaaaaaaattgataacccaagtggttcaaacaccaaaagaaaagatgactcgagagaataatctaaaaataagaagaaacagaaaaagtacgacaagtatgttctaatttaccatgtgtacactgagttgaatgatactcatgaacacatctttctctcaaataaccacagggttgcattccgcaagcctgaaccaatgagaca

SEQ ID NO: 401630 - DNA, 1011 bp, Cannabis indica
attatgattatatgcttcaaaataattagtcccattatttatttgtgcagtgaatttacaatgacgtgataatcagcgataaagtttacttatacttggataagtggtatgtcacttccatggcattagtaaaatatactagtatcggatgtatggagtatacatcagactggaccaataatttatcagtgcactggatttacactgacgtgacaatcagcgataaagtttacttatacttggataagtggtatgccctttcgagtggattagtaaagtatactagtatcaaatgtatggagtatatatcgaacaggcccaatattgacattgaagggtaaaatgatattgacattggataaaatggtactaaatgataaagaagtaatttccatatacaactgttatcccaccccttgacagtgttccaaggtggcaatcggaggaccatggacctataatcttaagctctaataaactagatttatttattaaatttatcaatcaaataatcctatttattaatttcatgattactccactataaatatgtaataaaattcttagtaattataaaaatatatttactaagttttactgtagtgtccattaatacaatcaattctagtgttggttcgtaattaatttttgttaaaataccattttacccttctaattacttctttatcatttagtaccgttaatttactagtgaaagtataatttagatccaatctaaatttgtgcacaactttccagttctaaaattagtacataaaaaaaaccaacattccatccgttaggaaagttaggatttaataattgtagatcatgactccaacaatctacattattagatttccaaagcagaagttgtaagaatcatcttctttgagaaactttaatgagtgaattaatgaaactaataacatgaacaagagtttatgattactcaagatttaagtcgatctaattgtaaagtccttttttggcaagttaggtgacaaaata

SEQ ID NO: 401631 - DNA, 710 bp, Cannabis indica
aatttcattttaattttttattaattgatagattatatttaattttatgtaattaattatagtctccttgtaagaaatttatcttttattttcctttatatatatatattcttttattaggtagcaatttattaattatcagaatattatcaaaattatattaattatcaatcaaatttttattaagtttattttagtttattaatttaggtatcttagtggtttttactatttctttctattttaagataagatctctactattttagatatagtgtttcactttttggctagttgatgctatattttttggttagattatgccattttgtttggctttttgtaccatatttttttggctagtttgcagtatgttcttgactcgttttgctcatggatacaacctcaaagagtgctactatcaattttcacagatttaaatcttgttttaatttatattttaacaattttggaggaatttttctattatttatatcatcgttttttatcttttgttgttagttaattgagttttgttacttttttggcaaaatagttaattttagttggattttgatttgctaagtttgattaatctatcaaatcttatgtatggtgcaggttaattgactaatatatttctgtctttgaagacttagctctacaatggtgacatgttgagtgaaaaaaagcttaaaaaataagttttt

SEQ ID NO: 401632 - DNA, 854 bp, Cannabis indica
ttttattgatggaaagtattccatatattttatttagtttttttaatgtacatatatttatagtgcgaaactaatataatacaatatttattattcattcaagtttttaaattttttgtaaatatgattttgtattgtgaagattattagaattttttatctctatatgtctaaactagtaaatatctcgcgtttcagagatatataaaatattttaaattatatataaaaaataaattgtatattttaattaataataataataattacttaataaaattatatttaaatgttaactttattattaaaaaaatttataacataaatacttaaaatattaaatttattgttaataaatattaaaattcaaaaaatagtaacataaattctgatttaatttttattttgatatgtgtattaagttctaggttcgaattttattgagtgtgtttttaatatttgagttttagtgttttatgcttttaatgtttgagtttgtgtttatgagatctctttttatttatttatttatttatttttatagattttgagagtttaaaatttaatgttatttatattgattattgtgattaaaagtttgatttttcatacggaaattaaagtttaccttttcatttcgttaattgaaaaatattagtagaatgtttatggaatgagaattttgaatatatgaaaatagaattgaaaaatagcatttgaatcgagaatctttattgttagtctccttacaaaaaaaaattaattgttaatctgtaaagataatatggtaagaagaagatggaaaaattaatttttagttcatttaatatgtatataatttttttttaataata

SEQ ID NO: 401633 - DNA, 648 bp, Cannabis indica
tctcaacactcccaccagcattgagtttaatttgtaaaccccatttgcagccaataacatcgttgacccttcgggtaaagaaaccactatccaagtgtcatttctctcaagagcatctatctcatcgtccattgcattatcccactcgggtatgccatgtgcttgactaaaaaattcaaagctcaaaataactcgaaaatggctatatagttgatcgaaaagcaggagacaacctgtgataagataacactgcagataaagggtaaggagtatttgattttccctgaaaagaggaagaaaagaattagcagcaagataacaatgatactcattcaaatatgatggcttatgtgtgtgtctgcatgttctagtaacaacagaaggactgtgaacctggtttgaatcaggttcagttgcatgaggaacctgtttagtattcagaacagaattaggaacctgctcaggaagattaacagactcaggaggactctgtgcaggtgtaataataggttcaaaatcaggctcaggacaagtaggaaagaacgtctgagtgtgatttggcacagcagagaaaaattgatcataggcagcaggtaaaattttagacttaacaaatggaaaaatatgttcatagaactgaacatctct

SEQ ID NO: 401634 - DNA, 688 bp, Cannabis indica
catattcatagttcatacaatataatcaattattcagtcgatatccaaacaagtatttatacgtacttttttctttttctttccacacccaatttaaataagctcctcattataaatgtttaaaaattcttctcacattctaaaaaatatttaatagaaaaaatatccttagtaaataattttactttaattttcttcatatctataatttatatattatttaaaaataaaataattatataatatttggtgctctcaattaaaaagtaatataattttttaagaataaaagaacataattatttgttcaaaaaaaaaaaaaacataataataatcataattcaaattttatttttaactcaaaataaaatgaaaaaaaatatattagcataaataattacaaatttgtttccttagtatcaaaaattataagtacaaaaaaaaatagttaatgagaagcttatcccacaatattattgttgggataccatgttgagaatcatggtgtttcattttaaaattaattggggataactggagtaactcatattatatatatatgactcaatatttaatttatcatttaggctaattagtaatttttcttcccaaactttgacatatacaaaatcatgcttcctaaatttttctggccgttaaaaattccccctgaactattgatattgtt

SEQ ID NO: 401635 - DNA, 1026 bp, Cannabis indica
attttattttattaatcattttaccaacaatttcaaaattgcaatttttaatgtagataactttgaaattttttttttgaaaaatagattaaagttgaaaattaattattttaaattaattttggatcaacttaaatcaagtaaatttttcattaatgatttatgaaaataaatagactaaaatatattatattttaattagaaaataagtaattagttagtgaaagatctagatagttattttctgtttacttgaaatatttttctagtgatatctaattaaatagaaaattaacaattaagttgattttattcaagatacgtaaatatttgatatttttcgtagaaattttattaaatatgaaaattaatttgtgttgaaaattaattttggaccagcataaattagaataatttttcaggatttattttattttattttaggccaattttcaaaatgtacttattttaaatacattggatttcgaattttgcattatatatttatggaaaatcaaatttgagtaattttgaaatatttattgagaattattactaagatggaaattttatttattttcaaatctatcgaagtattattttataaatatgaaattaaaatttatatttagagttttctaaattcgtaattttaattaattaaataaatatatatgtaaaaattaatagattaaaataaatattagatgaaaatacactttaattaatgagctttattataaggatattcgatcttcattcttggttctacatagttcttgtgctagtgaataatcatccctaagggatgaacgtattggaatatattttaccagtatctagatttactaccaagtatgtttttaacatcctaatatgaattctaaaacgatgaaaataaacacataaaaggtatgagaaagtttacagtaattgcatcggaattaaatgactccttctgctcagatctctaacccttgtatcctttttgtagcagagtatcaccaagatctgagcccgattctc

SEQ ID NO: 401636 - DNA, 1324 bp, Cannabis indica
attgaattgaggtgtgggggtcgatttttaggttccccgcacagaaccggttgacgttctgagggacctgttgcaaccggtcgaccggttggtacccaggaaatgggcttccggttgggaaccggtctgccggttggggctttttcccgaaccctagtttttcccattttttgtgttattcaaggtgttagcatcctatttatcgatagggttattcttagttttgatcttaaatcaccgataagtgttttagagcgtctctcattaagttttgaatgttatggtttagggccttgtaaagcgtcgagctgtattccactcaggctgaccggcacacctgagcttggagcaagataagatagcatgaatattacatatatgtgaatgaatgcttgtttggatgtttacactactaacactattacgtatgtgttttaaagagtgttaggatagtgtaggatatcagtatggttacggtgttatcaacacgagtaccaagggatacgtcgtgcatgtgatacaacacttagtatttctcgggagtacattaatggctctaccaacacgagtatggagttggtactttggtgcatttggtacagaggtcgtacttccattaagaacgttcttatccatttggtgagcccaattattgagcttagggcggcttaaacaataagccaatattgcatggtttacttatatgtgtcttgcttatcttgctgagtctgttgactcatcagtttgctaccttgtgtaggtaagggtaaagctaagctagaggaatagtgagatggagcttggcagtgattgtacatatcgcggcagtgcaacctggagggtctcggtctttcaatattttggaaatgtaatttagttgcttgctgtttgtaaaaaaaatatattattagtagataatgtattattaaaaatacttttaaactgtgttttgttaattcgggatcccgacccatataattataaagttatcttttgggtttagtaagttttaaatacgggcattacgcatgaccaccgcaccatcaccaccatcttcccttctcttctcccccccatcagtacctccgcaccaccaccgtcggtgccaccgcaggcccatctcaagaagtatttttaatttttaacttttataattatttaattgtatttttatttaaatgtaggtataattttaggtatatatgtgtataaatatgtatatataaattaaactctaatttttattttaaacctatttatatatgtgtatgtgtatatatatgtatttaagtatataaatatgtgtatttattatgtatatata

SEQ ID NO: 401637 - DNA, 1031 bp, Cannabis indica
attctataagtgtagagtgtgaatagtaaactttaaagaaactttaaaatagaaaaagagtttacagcatctactgtagtgtatttttagtatggttctttaaatgttttaaagcttgtgagtcgtcttaccaaagttaataatcactcattatataccattttttagaaagttatttgattgtttgattaccatggatattattctttatttgtttagctaaagtatctacaaaaattaaaatagagagttatttttattgttgttgctctaaccatgctctctactatagttagtatttgattattttaataatattttttaattaatttgtcaaatataaatttattttgtaaaataataaaaatgtaataatgttgttgattaaaatattattaaaaaaatttagtaaaataataaggagctctctatatttagaaagtttcttatcgattctctattattttgttttttatggttgtagttcaatttttcatgttccactccttattttagctaaagagtgtgtttaaagagtataattggagatgtttgaaaaactcagttttacaaatgccaataaaattaataaattacaacaaaacacaattgtaacagtctccctatatttagaaagctccttatccattctctattatagagagttatttttttatggttgaagctcaatttttcaagttctgttccttattttagctaaagagtgtatttaaatagtataattgaagatatttggcaaatcgagtttttacaaatgccaataaaattaataaatatagtaaaaacacaactgtaacagtctgcagcaacacattgcaattctgtgactgcagaacatagatttacagtaacgaaccaaaaagaaataaataactgtagaatttaaaaaaaacttgaacataagagaattatacgtggtatcagtgttcttttgaacactcctattccatgagtccacacctagaaaatgaaataaattactaaagtactcaaataattacaaatacaat

SEQ ID NO: 401638 - DNA, 517 bp, Cannabis indica
gaagagtatttttaaacaccaaacacagtacgagaggtgtgcgcggacctaactgggatggaccatatcaagtagtcaaagttttagaatcaggggcatacaaattgggcaagtatgatgaaaaaatgcaacttgttctggtaccacgttattggaatggagagcatttaagaaaatactaccaatagaagtactaggtcggatgaccacatcaagtactaaagaaaagaacatttactcttaagtgaatggccttctaggcagaccacgcccaagggttcgaataaaattacaaagtactcaggtcgaatgaccaccatctaaagcacaatttttaatttctgcaatttgttctatttcatgttaagctaaagatcagattagatcaaattaatagctttgatgtaagttactacagtaacaaacacattctcgatcaataaatgaataaagatgtttatttcaaaattcaaattgagtcgaatttactagcatgttgctaatttaccatccaatg

SEQ ID NO: 401639 - DNA, 568 bp, Cannabis indica
aaagatggagttctgtagctactattagtgtttatcaattgagcaagctttgagttttataactcaatcttggctcattaatggtgatttattctaagcttgggtagttattttattgctttgaaaatgtttattggggtatatgtctagaaagtttggtaaggtttggaatcaaattggttagggtttggtttgttttgggatttctaggtaaaattggctaacggattttaaaatgcgtgtaaaaccggttacccggattttgcagcagggttaccgaaaaatttaggttgtagattcgtactagtttcaagtttttggttggttaattccctgctagtttagggtattgccatattaagttgcagtagatagggttttggtttaaaacctaagtcccggctgtgatttagcgtgtcacttatccatgctattatcgatgtgatttagaagcttgtaattcgccgagcagtcgttccactcagggttgccggcacaccttaatttggaattgaggtaagattagtataatgtcatgttgggttttatgccctaaataaaactcttt

SEQ ID NO: 401640 - DNA, 612 bp, Cannabis indica
ttttgatgttgcgcctcttccagacagtgtctcaggcggcgactttccatttcataagttctttctcccacaggttgagcacctccacagttgggctcttaatccctcatcccgggattcagaccattctagtgctgagttctcctcgagcacgttgtccatgtgctaggaccaatgtcgggttgagttcactagggatgtgtggtccgagcattggggccatcctcaggttgagctctcatggaacgggtggtccttctgggctgcagattggtagatcttgtagagcccatgggctcttttccagaacgatggatagtttcctcatgtgaggtgttaatattctctggatttttagccataaaggagaaggtttttcattaaaagaaatgaaggttttttctgacctttttaacagaggctctcaatgaaagcaccgagctgttaaagcagattttcgttaaccaaatttgagcctcatgatgataattaaacacataaaaaataaaaactacagaaaaataatatgaacacaaggtttttacatgattttgtagttaaaattctacatagtccacgagtcaatcttatccagatttctgagtatttttt

SEQ ID NO: 401641 - DNA, 420 bp, Cannabis indica
ttttttttaacaaatcagctctgaaattatttcaataggtatctttttcatttttaaaccataaatttgcagctaaaattttttatgtttaaattgctagatacataactccttaacttttctcttatggtaaaacttttttatctttaattttgtttttaaatttgatgcatgtcattgtttacacatgtgtaataatttaaatattataaaaagttttaggaaataaaccactgcagttgtattttatttaatgataattaagttataaaattataataaattttaaattttaacatttttatataattattttaatagtgagtacttatttaaacttttatttttttaactcataataacacaaaaaaaaattaatattttgagtcttaatttttctaattattttgaactcaataa

SEQ ID NO: 401642 - DNA, 902 bp, Cannabis indica
caatatacagaactgccaaatcggagttagaaatcaaaagttatgcattttcaaaaattcaacacaaactgcccaaaaatcacgagggcgggccgcggcatgcccaaaccatgccgcggcacctaggtcaaaacccaggttccaccaagaggggcaggcctcggcatgctccagagcatgccgcggcatctgggtgcagaacccagaaaccagcaagcaaacttcgaattttcagcaagaaactccaatcaaactcactccaactcctaaccaaaacttctaaatcataaatcaaagttactagcaatcactagggatttaaaaatcatgtttagaacaccaatttccagcaataaactcaagatttcagattggatgacgcacataaactcatgcttcaaactagcaatactcaagctcatactcaagaactgcaaagccaagctcgtcaattaatttcgagcaatcaaacactagaaataaccagaattaaacacaagagaattgcccgaaaattctatgtagagctcaaccaagcacagcatcaaaaatctaagcataacatgctcaacctaatcaaagaaaccactatcatgcaacctatcatcatcatcaagaaaatgcaattcacaaaatcaaacatgctttttcaacaattaataccagcaaggattacaacagaaatttccaaataatctcagctagaaaatacctcaattccaagcttaaaatccttccaattccaagcttaaagagttaagcaattcacacaatttagctagaaaatatagagagggttagggacagaaagagggttcggatgagagggagaaataaccagcaaatttcatctatttccctcaaaatcacttttaattaaatgaaactcaaatatggtcaaa

SEQ ID NO: 401643 - DNA, 561 bp, Cannabis indica
tgtcaagattagattttcgcacagcgacccgttgttcgtggaagtccagatagccaacaagatggtggccaggaccatgataaataatggagcctcttccaacatcttattcaagaccacatatgaaaagatggggctcaaactaaaagatttaacccccgtcttcagcctgtgtatggtttctccggccaaggagtcacacctctagggcaaattcacatacccctcaatgttggacaagctccgacaagcataactataatggcacaattcttagtgttagatgttccatcagcctttaacgccatgctagcccgaccagttttgtatgaatcaaaggctgttacgtcgatatttcattcatgcctgaagtttccaacaagaatggggtaggttgtctaagaggaaaccaacaagtggctcgggaatgttataaccttgccatagccaaggctaagaaggaagtatcctctagctagaggtcggacaagggaaaaaacatttctaaataggaaacttcccaaggcggggataaagatgtggatcctcgacttggggacc

SEQ ID NO: 401644 - DNA, 701 bp, Cannabis indica
ctttaggataggtcaaccaatcatagcattgtatggcgagtattgctcaattacagcgaagtcagccatcgatttagctactacaggtgtggttcccaaagtgattgggagttcgatcattccctttaatgcgatgacatctccagtaaaactgtatatacttgatgtcacaggtcacagatccttctcatgcaaccccatttgtctgaaggactggaaattcaagagattcacagaatttccattgtctacgagcacgcggtggacattatctccccctatattggcaacgatgaccagtgcgtcagaatgtgggtggtggacccatctcgcatcactttccatgaatgtgatgcgtcacattcccttttgaacagcttctccggccgcttgctcaagttgttcacattggtgagcggcttatctttggcttctctcccatattgctcctgcgacttcctagaatctcctgcgacatggggtctgcctatgatagtcaggatattgtgaggagtcctcgaaccactcacattttgattttcttctttgtcatccgctcatggatgactttcctcatttttgttgtatttgctaaattttcctctcctgattagttctttgatctcgtcttgcaaaaaccaacactccagagtagtgtgaccaatatctttgtggtacttacagaattttttagggtctct

SEQ ID NO: 401645 - DNA, 606 bp, Cannabis indica
tgatgatctctttacattttttttagcatcgtaagcatgacaatagtattagggtctcgctgcttgtgtgagcataacacttgcaggttataactttatcatgggtgagtacaacttatggtacttgattgcccataattgatgccaagtgcgagaataacacaaggcagggcaggttacctcatgtctgatcaacatgagtgtatagttgattatcgtatgtgagtataatgtgcgatatgagacttgatttgtgcatgtgagaacaacatgcgttgtggatatatttatggaatgtgaattactgttgattaatattaaagagtacttatgtcaagtaactagttaggagggttatgtcctacatagctcttcttactgggcgttagctcacgggtactctgtgtgcaggtaagggtaaggctaagcagtgagattgaagagctcgaggcgtggactacatataagggggctggcgcagtattttgcttttaacatttttaaatgctaaatattgtggatccattatttttggtttaactagttcttatctaagtttacagtactaaaaatattttgttttaaatagtgagatctcatgcttag

SEQ ID NO: 401646 - DNA, 773 bp, Cannabis indica
gattttttcgactagacaacttcactcaactttatatagttgttggatatagatcactggaagctaccacgtgaggaatctcttgtaattgtaatgtgatttttctctaacttttacgtcgatttctctattatatattatatttaaggttttggatacaatatatttattgagtcactacttatgagttcagctactggcctttatatgaacttggcctgcactgattcaagattttataattttacttatatatatatacatatttatatataatatgtgatgaagatagtacaggacagggcattgctagcaagttgcaaatttagtgttaaagagaaatgccattcaacttgaaaacagctgagctgacatatattagtatattttgttctctgtcacattctttacaagacttattaattatagaaaaatgctaaaaggtacggtgtctaatattaattggtgcaattaagtataaggtcttttataatttaatatattaattttttatagactagatcgctaatcaatcacaagacatcacttttagatggtgctagacactattggtactttataacaatgctcatacttaaagtgcatgctacttttagagcatctctagtggtaacatctttaaaggatgctaaaagtttacacatcatctaaaaatataatattttattttatctctcttccacatcatttttggcactcttacttttataaacattctaatgtataacactctttaaaaatactataattat

SEQ ID NO: 401647 - DNA, 788 bp, Cannabis indica
taggcccgtgcctagggcccatcgaaacccagaccccgaaaacccagcacacatatatatgactcatgtatttaaaagaaaataattacactacaaaaaaaataatacatataaaagggcccatttttttaattttactaaagtagtcatgggtctatttttttcaagggtcgaccctggatatttgttgagcaatcagttggaattttgtctcatctatagttgtgattgaaagtgaagactcgctaactgtattatgtttctttctgagttcaaagtagaacaacagtgagttatcacttattattttcatcggtggtaaccccgagcatagctggtaatgcatttctattagagtgttgcatttgatttcatcctttactaatttcaacaaattatttagactatagtttgtttatattagtagtccagttattatatagtctttatattttgtctcctcttttcattgctctacatattaaaccacatacataattgaatctattactacaatatattgtagacaaatagttataaataatgattaattaggaaactattttatttttttggaaaaaagatgtttatttcatgaaatatgtaccggcttgtagatatatgtttcttttgcatgttatactaagtctttacttagtttatttttaatacatatataatagtaactgtttttttattgttagactttttatttgggcttacattaacttttattggttttattaaaacttgggttgattggatagttctttgctgtgttagcccat

SEQ ID NO: 401648 - DNA, 781 bp, Cannabis indica
ttttttttaaagaaaaaaataagaagaaaatgacaatgagattagatcacctaatcttgccaatacttgattggaataatgcacatctgagattttagtgtttggcttattggaagtaaagcatcttatgagttgaaatttttgtgagtggcttaaaagaatctcagttgcaaatattaatacatggtacatgtgttactgcttttcgtttaagattatcatttttattttatgagacttccactaaccattaaacggtggcctccattttttccagacttgggtaagtgaattaactagtatattaattagctaatgcctacacgtgtcttactcaaaagtaactactttttcatgcaaaattaataataattaattattgagggatggtatacccaatatattatatgataattcaataacactatttacatattttattttattttaaattgaattatttttagactacccaattctacagcaaacaataaaataaaataaatagaaaaatacatgtactacttagcaaatccattttcaaagtaaaaaataaatttcatatttgttatatggtataaggttagtttgataaatatgtaatatagaaaattgttaaataatcataaacattgatttggtggacaccttataagggttaaccacttaatatgttatattattaataataaaattaagcattacttataatttaggagtttttttattttttattttatttttacactttaaagtaatatataaattcatatagctacca

SEQ ID NO: 401649 - DNA, 719 bp, Cannabis indica
gttcgcaggtcgtatttgtgttccatatataacaagtatatgctcgatccgaacacaacccgtttaataatcgtgtcagaaaataaaacccgaacacgacctgtttataaacaggttgacatggcacggcccgtgtaacccatttataaacatattttgtttaaacatgtcaactaataacacatttatgaagtattcaacatctttataacccatttatgacttgttaaaatactaaaataactttaaataggtcattcacgagtcagtttcatgttagccgtatcaacctgaacacgacccgtttattaattgggttagacgagtcaacccaaacacgacccgaagccatttaaggcaaacccaaactcactaactctcatgcgagttttgagtcgtgttatcgtgtctggccctttttgtcagacttatccctaatggagcacggattctctacctagatgtggaacaggacagggacgaggattattttttgtccccgaatattaaactgagcagggacgggaattacactccccgcctcgacgggggtctcattaatatattattatctttttaataaaattttatattttataatgtgtttgtatttgtttagtacattagtgaaagtaaaatttaagtcgggtccaagtccgaatctggggccagggccagaatccgggtctcaaggtccaaattggggtcagagtcgaaaa

SEQ ID NO: 401650 - DNA, 548 bp, Cannabis indica
attgtacaaaatattaattttttactaaaacaacgaagaacatgtcatttaatatataaaataatttacaaaatatatatatttaaagagtattgttattaagtactagtggtgtctagtgctttctagacgtatcatcttataattagttaacgatactccttaaagattattacattaaattatatataaccctacttaattagaccaatagcaaaagtgctaaacatcgctggtgctctttaacatttctcatatttaaaataaaaacgtttttcattataactaatcaatgacaccaattcataatttatttgactttactgagatactcgccgggtgctgttcacaaatcattctccacgtaaatagcgttcaacaattgttattacgtcaacttttaattattattattactagggaactaagtcgtgtcttgcgcggtcttctcaaatttttataatctttatatataaatatacattctacttataatgagtgatataatttaaaacataacatttttatgtttatattattattaatta

SEQ ID NO: 401651 - DNA, 539 bp, Cannabis indica
attatgattgcacatatcgtgacaatctttagaagataacctggcacctctaatactaaattgtaacaccctgctagattaggtgtgttatcgtttaaatactaattgtgtaatttgttgctaaccaatgagtttattgaagttcgtgtttaattaaaacttttcatagttaacctttaaactttaaataaacaaactttacataatctgggacctcgtctttaaaagttacaactattttacaaaatatataactacaaaaattattgcctagcaactaccaaaataaaacctgctgtcccaaagattgaacactctaggtctaactaccttgatatgtacaatctttatttgctcgcaatttctgttgtttagccttatgtttacccttacctacacatgtaaacaatatatgtgagttgacaaactcagtaagaaaagcataaacataaattggattttaactaggcgcccatacacccaattataatcctactacaaaatgggtctttagcttcccttttttcaacccattttat

SEQ ID NO: 401652 - DNA, 508 bp, Cannabis indica
tgagatcggtggacctccttactaacacagagtatacttgtgattataaatttcccaagtattcttcttggttcctaaggaggataaggcattggatcgcctggctagggcaaaataccttcaaaatactgtccctcgagaagccggtgaaggagcatgttgtggtaatcaatgtggttgatcacccacagtacttagggctgagcgtaacatattagttacattccgagatatttgtcttaatttctatatttggaattcccttctcgtagaccgaatcgcccataggtttgacagctggtaccctagattccatgtccagattaattgtaatgagttatattatggtatagccgagcaatatggcaccatgagagatagggcaagtcatatagacggaagctagaatttagaaccaatcgagccctttgatatattcaagattacaggccgtagggattttagtgaatattatggtccttctaccccctcttctagtgatagctcg

SEQ ID NO: 401653 - DNA, 717 bp, Cannabis indica
aagaatcactgttatataacattacttattgtttattttttacaaaattttatttacttaagtttaattttatttaatttgttcgacacaattatattgttctatggttttttgttttctgaaaacacaaaatccagtattacttataaattatttctctttaacaaagaatttcttgattgttaaagaaaaaaaaaaaagaaaaaaggaaaagattttttttttctttattttgcagaagaggaaaaagagtttcttgaatgataatacataaatgatttcggactgtttgtgttgggtttgggtttcggtcaacctcgtttgagtttgggcttcatttttgggtttgggcttttaggaaatatcatttccaaaaatatcattattttcactaacatgacttttacaacctttataattttctttcttttttttttttatgtaaaaaaaaaaaaaagtgttctgaaaggatttgtaccctatttatcatattttgtctttacaatacccaacctatcacaatccataaatagaagaaaggaataggtttaaaatataaaataatttgaaataacattaaaacaacatcaaaaaataacttacaaataataaaattcaacaacaaattaacatgagtacaacatagaaagaccgtattttctataaataaagttgtaaaaatatttaaaattccgtaaaattatatttttataattt

SEQ ID NO: 401654 - DNA, 523 bp, Cannabis indica
ttgggtggtttttgggttttctgagtgaaaccggctaaccggtttttacaatgtttgtaaaactagttacctggattttgcagcagggaaaccagaaaaattcagcttgtcgttttgcatcagtttcaggtttctagttggttgattccttgctagtttagggtatttccatattaagttgcagtaaataggtttatttagcgagtcacttatgcgtgttgttatcgatgtgatttaggagcctataattcatcgagcagttgttccactcaggttgaccggcacacctgaattaaaaattgaggtaagattagtatagtgtcatgcatatgttattacatgtttagcgtacatgttgtttatgcctgttggattacattgatagcaataatagtatacatagagttgtactgattacttataaatgtatgttggctgaaatactgatcgatactgtcacatcaatatggctagagtatgactagcatattgagtataggcggacattatggtcgatagtatt

SEQ ID NO: 401655 - DNA, 420 bp, Cannabis indica
aaataataggataaatatcatttggaccttatgctttgcaaaagttactgattggaccctctattttgttaaatgacaaaataaaccctatatttataaaatagtaaaaataagactctgaactcaatttttcaacttttttttaatataactagctttaagataatacctaacacgaacaaatacaaaaaatgtcgtcaattttgtcataacacttcaagatcatgttattattgagttttattttaataaaaaaaatcagttcaaaatcatatttgtactattttagaaaatttaaggtccattttattgtttaacaaaataaataatcaaattaacaatttttgtaaaatacaatatttaaaatagtatttatcctatataaattttcatataaataaatattaaaaaaaatctaaa

SEQ ID NO: 401656 - DNA, 661 bp, Cannabis indica
tacttagctaccaaccaggatttcgagattgatacctttgtctccctctccactcgtggttttagcaaaaattaatgatatttgtggcattccacgctgtagtgcattcgtgtttttgttactctccgtatcaaatcggttgtttaactttatttttgccctcgtgttttataaaaagaaaatatcagttcaaatactaatagaatttgttttattattattttatgatatataaataatattttattattttattaaataaaaataaaaagtcaccatgaatttctcataaaccaagaatttagttatataggcacactttatatagaatagatattttaaatttaaaaatatctaactttttttctaataaatgattatgtccgattgtattttgtttatcaagtcaaataaataatctttaactaataatctcaactaaaataaataagtttaataatttcaactaaaatttattaataatctttgacttaaaaatatttgtatcattttaataaaaaaaaaaaaaaaatcctatgagtacgtgggtgttattatttgttgaataaattgattagattattttaagatattaacatacctttgagggaatattttttcttaaagaaataaaataataataataataaacaaataaaaa

SEQ ID NO: 401657 - DNA, 450 bp, Cannabis indica
ttttttttaaaaaaaaatctatacacccgtagctaaaaaattgttttaatacattttctatctgtttcgacatctaagtaagtttttagtccaatttttttcatgatcatgtacattatagttttctcgcactatttgtattttttagaaaattttgaatagtttacagtgtcgaaaataaagtttaaataattacttaccacgcgtataagaaaaaataatcacccgttaactttattttcagcactataaacaatttagatttttttaaaaattacagattattcttaataaccgcaacatacataataataaaaataatttagactaagaaactctcctgaatgtaaaaacagttagggggtgtactgaaataaccctttttgaggatatactatagaattaccatactttgtgtaacatatagtatatacacacacacatatatat

SEQ ID NO: 401658 - DNA, 527 bp, Cannabis indica
aatgtgtaataatagtaagtaatgcacaaaaaatttctctaattacataagacattaatttttgtaaaaatgttacatttttatgttgaaattttttttttaatatttttatggtattatataaaaatacaaaaaaaatcatataaaaataataaaaaaaataacatcaaaacaataacaaaataatatataaaataatattcatataacaaaaattcaataataaaataacaatagtacaacataaaaatatactaaaacatcgtattttatataaataaaatctaaaaaattataaaaatattaaaaattccgtacaaaccatatttatataattttttttattattgttatatctttttaaaattatttctattaaatatcaatagtgcattttagcaattgatctgtaaacatttaatattgatcataataagctctattaatatgcttcccctaaaatagcttgtgaaaattacaccatatatgggattctataaaaaaagtttcataaatatggctttttt

SEQ ID NO: 401659 - DNA, 612 bp, Cannabis indica
gagaaaggtcttccctgaccttgggatatttgagtcaagaacctttcaagaacttatcgacaacccgtcgagaaaggtctttcctgaccttgagacattcgcgtcgagaacccattgagaacgtatcgagaaactgtcgagaaaaatatgaacacatagaatactccaaaaaatgagatctcgcgattttagcgaaaattatattaaaaacaaaagggtaaaatggaacgcttgtgtaattaaaggaattaattggtacaaattaataaggggagtcaaaattgatatgaggtgttttattaatcataaaaagtgaaatttccctttgcaaaatagtctttttttttttttacatgtggcgcttaattcatttaaaaaattaatttaatattaaacaaaatcaattaaaacctcataaaagaccatgaatggtcgcaagtgaacgattcttcttcttctcctcctctttcttcttcttgctggtaagaccaaaaagatcagtcattgttcaagaatggtggcaagtggtggtagccatagacaaaagaatttgagattcattctaacagaggtaagccccaaataatttccttgtctcttctcattctgttt

SEQ ID NO: 401660 - DNA, 718 bp, Cannabis indica
tgattatagtgtcgtcagcactataatcattcattaataggaattaagaattaagataattgactgcttcaactttatctgtgggattaatagtttaattggaaatttaaattacattcattaataggaattaagaatgattgtcaagggtggagaataatctttaacagtttcttatatcgtagtctcaattataatttgtttttattttctttttatgctatttagttacaactcaaaacccccctttaatatctgtttgatagtgaataataaattaatcatagtcctcgtgggatcgactcgtacttgcttttataatgaaataattgaaagtattggaattaaaaaaatagtaaatttgatacggcatacgacacacatcaatgttctctatgtatgggctgaattggtgaaagtggtaaaagccttcttctttgcaagttggacttatttcaagtcacaaaggaagtttatttcatgaggagttggaataggctagtttctcaaacggtaaaagataaagatggtagcaagtatctgttgggttttgtgccctaaataaaacccattacaatctaattagttattagtttagaattttaaagtgattacatgtatgttacacgtttatggtttaatatatatatatatatttgatatatgcacaaaatcagttaaatccagaacatatagttattcacaattatagtattgt

SEQ ID NO: 401661 - DNA, 601 bp, Cannabis indica
acgttccccaatgcaattttctcaatattttagctatacttgtcacgtaaaagtggaaaaagaagattttacttatatatacaactacagtacctaaatagttcctaaattatgtgtgattcttttgaaaacagacactatataatatcaaagttgtttatattattttttttcttaaaatatgtgaaagcctaaataattagtaaaaatagaagaaaaaaaaatatcacctagtctttttatttttgtatttttctttatataaatactagagaattaattcacattttgcgcagtgttaaacaaaaaattgtaatctttttatattactaattaccgaatgagtgttaaaccatctctaatgggagatgtaaaattatattacatttgacacaaaaaagtaatttttgatatatttgcatcaatttttaacattattatttcttacaaaacttgatgtaaattttagtgctcttatctacaattaatattataaaaaataaaatacttaatgtaatttataatttgcaaaataaaatatttaaattatatcaataataataagtttataagaaaaatatttaagtaaaactcaatattt

SEQ ID NO: 401662 - DNA, 738 bp, Cannabis indica
cgcatcttagattgctgcatgtcacaaattgtcgctaaatataaccctaataaaaatataaaaattgttattcttattgttgccatgtcgataatgtcatcgatatatattgcaaaatgtcattaaaaacatacccagaaagaaaaaactgcaaaatagatttcataaatcatactaataatgcatgcaattaaaatacgaaaatgatgctcaaaccttggccttgcatgtagctttgttgtgtaccaaggcgccacaatttgaacaatggcgaggttccacaactttttgaccgttagatggatatcagttagtccatattcttcctgcattgctcttccttggacgacctacggatttcttctccactggtacctgacactcatgttttgcatgtgttctggaagcacccaatcatcctcatcactgacagcattaattgttgcatcataagtcttcttccacgtctctttagtgtaataggggaggacagagcgtacagactgaaattttgagtaagcatcacgacacatgaatggggacaatgaattttcaacaattggaacatgccgcatgtgcatgttctctcaactaagttcacatcaccaactttctcacagtcagaaccgtcaaaacctctaccaacgttaagcaattgtgcaccgttacgtaggacgcttctaaacctaccatcctcgtgttgctttaccaaatcttcctcaaaatgagttgccaaag

SEQ ID NO: 401663 - DNA, 571 bp, Cannabis indica
attgcgcatggaactccgaggaggaagctttccatgaggtgaaatttccaagtgccagctttaaatagcattgatgggcagcttccgagagagtggtaggaaaaattctgcaacttatgtctcctcgtactccttgcagatccatttacatctcgaaatacttcagatgggaaagaggatcttcttttccagtgtacatcttgcaggttggcattttaaacttgtggggcaactccaggagactgatctcaggggagaaaggggttccacgtgctcggtgcaactcgagatcattgtttctctgactggccattccttagaacatactcttaatttcgtcccactgtgcctgcacaactggactaacctgttcggcattttagctgatctgagtcacattttgggctgcacgatcggtgtgtcaagttgatcatccactctgctcctcctattcagatcgtttatgagatcatgagtagtccccaatctatcaaatacagaaacacctggctgtctcagcgactaattggtttggctaatgtgctgatcggcaccattaacctggttggaa

SEQ ID NO: 401664 - DNA, 541 bp, Cannabis indica
ttacattatcaacctcgaaaacaagggaaaagttcagcttgctaccaaggtcattggtactaagtcctatcgagacattccagaacgctatgatttataacgtgtttaatacacgattactttgacccagtaaaagtggactaatcacagctgtgtgattttcaaatattaacctcatttattttacgtgatatgtaatctaaccacatgatttcaggggatagttgttgtaaagataacagtcaactctgtacttaactgcctaactatataattataaataggggtaagttagattgaaaaagggtcgaaaaattcataagagaaaaggccctaaaacactatcagaggtataataagattgactcgtggactatgcagaattttaactgcgaaaccacgtaaaaaacctttctattcatacttctttctttactgcttttattttttttatgaaagtttatcaccttcaaggctcatatctagttaacgaaaatccgcgttaatagtttggtgctttcattgagagccttcgtgaaaa

SEQ ID NO: 401665 - DNA, 623 bp, Cannabis indica
tagatttttaaaactatttttctaacgatatcgttgctcacttaaataaaaaaaaaatgttatcgtgatctactctttaatgtgattattttaagatattagaacatataattttttattatttcaaaaaaaaaaaaaacaaactattgaggtggccatgataccaatcatatactgattggttactattaaattatattatatattaaagaaaatttaatttgtaattagtttctactctttctacaataaaataaacttgaaggttactcaaatgtattttaaataataaaatattataacattaaataaaaataactaacttattattaagatatatacaactaaattttagaagaaaccaaaaatgtatctcaaattatatactatttagttaacaaatcaaatttatttttaaaattcaaaatacttatataataataaaaaaaatatgagtgactaaatgtatattacattgttttaattgaatattactatgaagtatactaaacaaaactatttcatatatatgtttactattttaaaaaggtatataaaataattgataaataaaaatagtagcttattatattatatgacaaactcattagtttcgaaaataa

SEQ ID NO: 401666 - DNA, 528 bp, Cannabis indica
taggtagatagcatgatttgaaacattttatatattacaaagaattcatgtgcttggtgatgttatacttgtgactaatttcaattttatacttgaaagaacaaggaatcatatttgtaattttttagtaattgaattggtttatgcatgctaatttgacttgtggaaagttgtttggaaaattctagaacttgcttgcttgctatttgagattaaaaaataaattatgcatgactaggaaagtgatttaggcattttttttgggatcgattgtgcatttcaaactatccttgtaatttttatcctagttacctttttttgagcgttcacctattctttgtttctacacattttgatcatagaaaagataaacaaataaatagccaaaatttaaccttaattatttcataagtagatctttagtttggggaaatttggatggaaagttgttgtatgtgtgtgggaataagtgtgaaaattgagataatatgaaaaatatttagattgacagtaacttgaaaaaaaaaa

SEQ ID NO: 401667 - DNA, 816 bp, Cannabis indica
gtttctgaattttaaaaaattgaaatctcaaaataaaaaagtaagaaaataattgaagagtttttaaattccatgatttgaaaacataaaaaaacataaaaatggtattttcattttttagcctatcaaaaattcttatgtggactcttaccattttaatttttaaaaacataaaacagttttcaaatcctaaaccaatcacaataaattcatacgactgaaagtaaagcttaaaaagtttttgtctgtacataaaatataatcacctagtaaaatatttaaatcttatttttaataatataaaatatttaaatataaccttaaataactaattaataaaaaaaaaataagaaagatttctaaatgtacatagaggtctacaggctgacaattcgcggtacaatactattatgcccatatttcgagccataaatatggacataacacgtgaataattggacacaaaaattataagaaaatcattaataaatgaattgcttcaaggagatagtaaatgagagtcatatctacctcgtgttatacattggcaataagacaacgagataaacaacatatggtgatatgataaagatagaaatcatctcgagtatatcagactcacgttttatcgttgaaaaggataaataatgagttctttaagagattgcaactcattaacccgcatacttgtgagtatgttgaaaggttaagagaaataagcaaagtgcaatttgttgagatgctatcagagaactatcattttttaaagtggccacaaatgtttccttttgttcaacccatgagtcgtttcaaaca

SEQ ID NO: 401668 - DNA, 746 bp, Cannabis indica
tgtcgtatggatctaatgcttgcaacaagttacacaaataagaatgaaaaataataaacacaaagctttgttatagaggtttgacccccttatgatagtgggtaatgacctacttcccttttggcatgtattgatgcctagagataatactattcagattgctataggtgggatcttatatagatctctataagggtacaaagtatgaatcaagtaggcatatctctaatgagaaagatgaacaaccttagaggcgtgtgagagatgaagagagaagagagagagagccctattgggcgtgagtaagagagagagagagagaaagagaagagagaatatggctttcaaacttagagctatctagaggctaagtgacttaggtctctaggcttcggttaagacctttatataggaggcctaaaccctatattacaagtttaaatcctagatatttatatagtttcttagataattataatagactaaagtgcccttgagtctggatattgttcagccattttgttggccttttagggcccaattcgtagacttttgttaactaaatgtgagactggatcagggttccgtcatataacgagacatgcaggtttttgaaacccgaaggaaaaggtggtggggattatttaccaggatctagatttactattatgtatgttatttaacatcctaaatatgaatttctaaaataatgtaatttaaacacatataaagttcaagaaatctta

SEQ ID NO: 401669 - DNA, 856 bp, Cannabis indica
aattttatgtttgttcattttttattttacgtaattgccttctctatttaacatgtttaattggttgtttaatgtaactggtttctttgtgtcagatttttaattgtttaatgtaaataatttctctatgtcaaaaatttaattggttgtttaatgtaactgatttttatgtgtcaaaaattttatttggttagttaatgtacctcgtttcaatgatttaaatttatttatatgttaagaattctcctatggtggtctacttttttttttttttttttaattttattaatttttctgtttcaatatatcattttattattttaagtttcttatgtttttattttattattttttaagtataattgatttattaactggtttttgtatttaatttttgttttagatattttggcatttggtttatgtaagttaatttttaataattattttacgaaactggttttttatatcaaatttttgctaagttgtttaatgtaacatgtttttgttatttagtttataagtcattattaaaaataattttatggtatgtatttttattttttattttttgagtaactggtttttgaaattaatatatctttttattactttaggtgtcatatgtttgttcactttttagttgattgtaatatgaaacaggtttttgtattaaattattgtttttgttattatatgtaacttattttaagatttagtttttaatttggttaatttacataactggtttcttggtgttatattttgaactagctgataaatattactgatttctctttgtcaaattctaaggtccaacttcggcgacaactccaacatccagcatcggtggcaa

SEQ ID NO: 401670 - DNA, 901 bp, Cannabis indica
cgggtagccattacatatatattaattttgaaaaaaaaatcatgtgtcaaagagaaattaaaaaaaaataatcataaaaacttagtaaaacaataaacttaagtagaatagtgtgtatagtaaaaaaaaagagtataattaataaaaagcctaaagcatgaagtaattattttttttttgagttaaagtgtaaagctttattcaaacactttcagccattacaatagagttgaactcagcagaaacattatgctgattaaaaatgcaatctgacgaaaaacaagactctctagcaagacagtgagcagccctattcgcagatcgcttaacaaactttaaagacacattaaataaagaagacagtaaagcccgacaatcgtccacaagcaaaccaaactgagacggcattgaaaacgagctattgatggcttgaaccacaaccagtgcatcagtttcaatcaccacattggaccattgttttctctctatccagctcaaggcctcctttataccaattatctcagctatagcaggtttaaccacccctagccgtgatgcagaaattgcctcaagaaggagacccttcgagtcacgggccacacacccaaagccaaatttgttttgattctgaaaaatagccccatcaacatttatcttgaccatatgatctattggtttcctccactgctcgtcaacattattaatattatgaagtaattattttaattgtagtaattatgattttaaaacttaaatatatacatatatcatatcggggcaggtttggggcgggtatctattcccccacccctgcttcatttccgactcgggtatgaatctttaaacccatacccgcccccgcccccgcccccgaaagtcaacccccgtacttgccccatta

SEQ ID NO: 401671 - DNA, 677 bp, Cannabis indica
atcacccacatattatgaataccttttttccttcgtgattcaaaaacctgcatgtctcgtcctatgacggaactacagatccgatctcgcatttgaataactttagcacgataatttaagcgagtaacgcgacgaacaatttacgctgtattttgttccctacctcacttgttggagcaacgagtagctggtttaacaagttcacttgtcattcaataatttcctcggagcagctgtccagggatttcaagaagcgatttcatgccgctagggataggtgacccgaagcgacctcgctaaccaatataaagcagcagcctgacgaaacccttaaggcaaacttaagtcattttagcatggctctcgctagggttagaaacttggatgacagcacgcaacttacagcccttcaggcagggatctccacggatccattaaccactgggggcgagttgtgggatgacctgcaaggacgtccggtaagaaacatcactgagttcaaagagagagcgcaggtgtttatccggaaggaagaagcctgaaaggaaatgagcttgttgaaaacaagctcgggtggtaaacccaacaatgtttcgacagggactttttctacaaatatgtgccagtgaatactatttataccgagcttaatgaaactcgagaaaatatttacctcg

SEQ ID NO: 401672 - DNA, 540 bp, Cannabis indica
aaaattccctatttgtgttgacttaataggctcctgagcatccaggtgagaaagcgaccaaggtagttaaggaaaagttcgagcgttggcagaatgctaacaacaaagctcgatagtttatgttgtctagcacggtcgacaccttgaagataaggtttgctaacactctcacgactgtagatatcatgaaccagctgactgaactgttcgagatggcatcagatcaagctcggtttgaggcaaccaagaattttattaatgcacggatgaaacctcatcaaaacgtccatgatcacctgctccaaatggcaagttacttcctagaagctgagaatcatggagctattatagatcaggaaactcaagtgagtttgatcttaaatagtttgactccagcttttttgccctttacatcaaattatgtcatgaacaagttgacttttgacttccatgagttaatcaataaccttcagacatttgagaatttgattggaggtccacagaaaggaggaagcaaagctcctagttctggcactgcta

SEQ ID NO: 401673 - DNA, 2093 bp, Cannabis indica
aaaaaaaaaagtggaaatcaattccaaaaaaacagaggtataaatataaacaaaaccaattccataacaaaataagttaaaataaatagggcatgttacacttgaaaccttatttttgatttaattgtaaaaaaggacttgtttatttgggtatgtttcaataccctcgtttatacattttctgtctttcttctttctctctttcttatttctctctctacccttaaattttaaaaataatttctagtcatgtcgttactcagttgagcctaaaaattaggggtggacatacgatccaatccaacttttttctcctcatccgatccaatccaattagtaattggatttggaaaatcatcacccgatccaatccaattagacctcaaaatccaatccaatccaatccaattactaattggattggatcggttttttaattggatatccaattacacagctaaatttcaatattaactcaaaaatatgatttattttttttttagaaaaaaacttaaaatatgaagaaaaatatgtaaaaactaaatattaccttttatttaagtttaatacttcataaatatactatttttacaagtgtaatgtagttaaaagttttaaataattaaaacgacaacatttttaagtaataaaatagatcaaaacatcataaaaataaatacgcaaaacaatcaagttttacaaattcaacatacaaaataaatctaataaaatataataaatatatattatattttttaatattttttattttataaataattttttaatatatataaatgtaattggattggatcggtttttaattggattttgagattgacatctaataaccgatccaatccaattagaatccaacttttaacatccattccaatccaattgtaattggatatccaactttttgtaactagattagattggatcggctcggttgaattggattggattggatgatgcccacccctactaaaaataatatcattgtgatatactcttcaatgtaaacaattcaagatgtggaaaacatatattttttgttatttccagaaaagaaactattttttttttaaagaaagcaagttcattaaatcaaagaaaagtaactaggaatcacagggggaattccctccccttgaacaacacctgactcatggcaagacaatctagctcttttggccaagccgtccgcaacagagttaaaatctctgtggacaaaaaagaacctacaatccgaaatcacattcaacaaatctaaaactgataatgaaacgtttagaaatctccagttaggaggaggagaatgttgcgccagtgctttcacaaggatcctgtagtcagacagtaaatgaattctagaccaacaattctgtactgctagttccagggcagagagaatggcccgagtctctgcctccaaagggcatgaagcagtactcgaatccaacttgaacatccaggagtttgctgcacgatttattactaccaccacataacctccaaaactgtccttccatgatccatctgtgagcaaaatataatctgcaggctcactttgcacaacctggtcatctgaagcttcgtagctgtcttgactgagaccctcagctctgtaatttgaaaactccaagaaagcagtagcaacctcgttgattacagaattgcatcaaaattgcatccctttatctgaaccatgtttttgcatttccatattggctgaaacacacacccaatgtagatagtaacctccttccttaatgcgacagaaagaaactatttggttactaatatagtgattacttaatgttttacacttttttttttcaaaaatattagataacatttattttagaattttattgattgaattatattatattataagataactaattaattttcaaaataacaaaaatatatataaaataattaatatattaaaaatggtagcttgttatattacatgacaacttattagtttcaaaaataatttttaaagttacctaaatgtattttaaattataatctacgataatataacttaaaaataactaattaaatactaagatgtatac

SEQ ID NO: 401674 - DNA, 1053 bp, Cannabis indica
acttttatgtagttttcttgttcttttgtgttgtttatatggaaaactgtagaaatatatataagaaaaaattctttaaacgtaaaaatgtaatttttttacaaaaaaatagtgtcttatgtaattatccttttttttattattattttctttaaatacaatcaaaaatgttttgttattaattgcaataggtaatgtcgtaatagtaattctttaagaaatataaatattttttttttctattttattgcttaaaaaaaaaaaacaatcatatcaagatatttttctagatatgtggattaggtaaaatatgataatagaaatatatattttagatgtgtaatgagtttaaattaaattgataattctatttttgccatatttagattaaaataacattttataatttgagtttccttgaaagtggttgctcgatgatcctctagcaccgttaaagtagagaggacaaatgtgctttaaggaaagagtgtttcatgtgtctcttctttgagtttgtttattttcttgtaatgtacttattttgctctttaattaattataatataaatatagttaaaatgacatatttattattggtgtgtgttttaatataaaatctcatatattttgatttaatatataatatttaaaattgttaactaattaagaggtgacacattaatattgtattgtgcactgtcaaatgctaaattgcaaactctaattgtattgaaaaaaaagagtaatatgaatcttgtagctttctagaccattaaataatgagtagtaaggagattaatacgttaatcatcccttatattgtatgaagtcaaaattaattatatatagtgaggaaatttgaatggttacatcaaatttgtattatgattagccattagattacttgaatgatttcgatatatttataaatttactaaatataaataataaataacttgtgacttaataataatttgatactttattttcttataaaattttaattaaaattaattatattttaaaattaaattaattacaattattaattaa

SEQ ID NO: 401675 - DNA, 784 bp, Cannabis indica
atcggtcatgtgatttaaatgtggaaagtttattaagaaactataataagaggttaaaattaattaatattcccaattagaataaatggatttggtattaattttttattagaatcttaatgaaaaaatagatcataatggtctagttaatgtgtttttctttcatctatgtataattgatgaaacccagttttattttgcaaaacaaaaagaaaaaaaaaaaaaccttagtagcggttttatagtgcttattattacattataaatagttggtagaattagtgttgagagaccttagtaattaatttcatcacaagtaaacaaacacagtgccgccataatagaccatttggatcatttggagggttatgatgtatcttcagagaataaaagattacatgctcacatacaggaagtctgatcatttggaggtcatagggtactttgattctgattttgctggatgccaagatagcagaaggtctacatcaggctatatttttctattagttggtggagctatatcttcaaaaagtgttaaacaaagtcgacacttatagcttcttccactatggcagcagaattcgtatcatgttatgaggcatcaaatcagggaatatggctgagaaactttgtcactaggctgcttattttggagaatgtagaaagatcactcaatatattttgtgacaataaatcagcagtgctatattccaataataataggagctgatccaagtcaaagtatattgagataaagttccttgttgtgaaagaaagagtg

SEQ ID NO: 401676 - DNA, 1639 bp, Cannabis indica
atagttgatttatagttatcgtaatattaatttctcgttattttatttgtttttcttacttttactgagtaaaatgtatttttataattttaaaactttacaagcatatttcataaaattgtaaataaaatataaaataagaatatttttgaaaaattacaactaaaaaaaaaaaaaaaaataaataaacaaccatttatttgtaaaaggaaaaaaattaccacaaaattccccgaaaagattatattcatgcaaaaaaaaattcaaccttaaaaattggcggtgatagtccacaaggtcatagttcttgtaagtttgttactccttatttaatagatttgtttacttacttaaaaaaaatgccatgtgttgaaatctcattggtccaagtcatgtttaataaaaatattttaaaaaccaaaataaattatttaaaatcataaaaaaaaatatttattttttatttttattttttttttccttgttcatcttcttcatgtagccataccccgacaccccaccctacctctacccacaccccaactcccacgacaaagtctctttacaatcattaaaggtggactggcccacatcgtcgtttaccaagataacatgatgcctgattcctggcgacatgtcgcctggtgtaatttcaataacaccattttttgagttttgtaactcccaattcgaccaaactaaaaccaaatattttttaactcatttctcacatacaaatgagtattagtccaatttttaatagtcatacaaacataaatttgaattccaacaattcatttgtgtaataactcttttattacacttaaattgtgatcaaccaaaaaagagttaagaaaataccagtctagtactttcaacaacaacttttaaatgttgttgaataaccgtgttgttataagtctagtactttaaacaacaactttttcagtgtcatgtccaatgttaccatttcaattttttttacaatattaatacaatgatattgttttactattttggttagatacgttaaaaaatattatatttttatcacatagaatacattaaaaatatatatattatattattaattatatataattattaaatattatattatattatattaatcatttatatattgtattatttgataatataagatatctagataaatatattattataagaataatatactattaagtgtttaaataaataaattgtacaactatttaatttatttaacttacattttgtaacctacacattgtaacttagagataagttacaatttgttatcacttgtaactcttctttggttgatcacaatttaagtgtaataagagagttattacacaaatgagttgttggaattcaaatctacatttacatgactattatgaattggattaataatcatttagatgagagaaatgagttggaaaagatttacatttaatttatttaacttacattttgtaacctacacattgtaacttagagataagttacaatttgttatcacttgtaactcttctttggttgatcacaatttaagtataataagagagttattacacaaatgagttgctagaattcaaatctacatttatatgactgttatgaattggaataa

SEQ ID NO: 401677 - DNA, 634 bp, Cannabis indica
cgtacctactttttagttttttttttttttttttttggctttttgctaatgtagtgtgaaatgttgtataaaaattaaaggatggttagagtggagaataagtgccacaaatgtatcggagacccttaaatggataggttgagcaaaggtttcaaagacaaggaagatgattatgggtgctgccattatagatagatggtgtacaagttatagctaaatcgaaatgatgtttttgttgaatactaaatgtcttacaattgatacaattgtgaaaaataatcaaatatgatgtaaagactagacaacttatttttgctaagtcaaagatatagattggattgagaaattgtaaatagattccaagctttgttacaaagtgttgtttaggggtaaaacatgttttgtagaaacaatacttattattgtcaccaaattgaatttaaaaatttaataagttagtaagtaactgtaatttttgtagaaacagtactttacttatcattatattattcaagtaagtttgcgtaataaattttccataacagatgcacttatggtttccaatgctttacaagttcccttcaattcaaactcagtattttcagatttaataattgatgttgttagtctttta

SEQ ID NO: 401678 - DNA, 397 bp, Cannabis indica
tccatatcaaagttataaaagcgaaagcagaattttgataaaataatttctatccaatatgaaccataagcccaaggatctcaacataatatatatagattaaatctaactactaaaagaaaattcaattacctcttgatgcttatcagggtatccttgattcttttcgtataacaatggaacatccaatccaagaacttgattgaagaaccacatcttgatctttcaagttggcctttaacactctggaatagagtgggttattagatattaaatgatgaacaaatttaggtattacagtgtgtactcaactcatgagacactgtaatgagattagggttttaatctcacacacacttttgaaatagtgtatagacatgagagagagagagagaga

SEQ ID NO: 401679 - DNA, 542 bp, Cannabis indica
taaaaaacttaaaatatttttttaattctaaatatttgataaatgatcaagaagctccagccggagctattggatcccgtgggagccgattgaacccaagatggagccagggtcattatggatccttctccttgccattgactttgaccatggaccttggaagtccggtcgatcacccctcacgagccacaggaccaaaaaaagtcccttcagtgacttatcgcatgtaacccaaactcgagtttgagtcttttcccttctcacgtgcatggtcattcatggccttgcatggatcgtatgcacctgtgaaaaacacgtgcttcgaaccttttgaacctcatggcttgcagccgcatgccttcgggtttcgtggcttgtcattcgagatccaaaactcgtcatcttgatgaggtgggggttaaactcaagctcgctcatcaatggaagatttatagatttttgatgttgcaattttttaataaaatttacaaataaattgaaaataaaaattacatcaaaacctataccacaaatatagtgta

SEQ ID NO: 401680 - DNA, 514 bp, Cannabis indica
gtaaccgatactacatgtttctacctagaccaaatgatttagaatctaggccttatatgtgcttgtttaagacattaatactggcacaattagagaaaaattataattttacaaacattgagtacttatgccgctaaaaataaacattgagtttatgctacttaaaaacttgaaactttgagtccttatgctattatttagggttgttcattaaactgctcaaaccgtctgcactgcaaaaaaaatgtgatttaaaattttttacagttcggttgcaatttaaatttttcctaaaccgcgcggtgcggtgcaatttacggttttaaattgttaatatgcagtttaaaccgcaccgcactatatattataaaaataccaatttttatattatttttaggtctatatatataaaggctcaatttaaagcccactaaatactaattattgtcttgttgaaatttgaaactttttttttatatatttattttcaagtcttatggtatttttgataagt

SEQ ID NO: 401681 - DNA, 535 bp, Cannabis indica
ttttttttaaaaaaataaaaaaattagaattatgtagtaacattagataataaatatttataaactacaaataaaaaaaaattaaagagacaataaaatgagataaataaaatattttagactgctattaccgtttcattacatttttttttttatatttatatatagatacattaattacaccatattaataattttactaaatttgtgaaaagtttaattatgtataactaaatatggctaattaggattttttccctggactttgacatatatcaaatcatgtcttcttaaaaaagtcgttaaaaatgccccttgaactattaagattgttagatttaaggacttttatctaatttcattcaattttactatttcagtgattgtttatatactaaattatgctccctaaactttgatatctaccaaatcatgccactcgaactttgacatgtactaaattatagccccctgaactttcatgcatattagactttttactaaaattagaaaaagtccttaaatccaacaatct

SEQ ID NO: 401682 - DNA, 567 bp, Cannabis indica
cttaaatcgctaaattttgggtttaaaatacaaagaacaaaatatagaaggataaagttttattaaagagggagaacgagcgttcgttcgtagtgcttcatttatgtttatagtaacatttatattaacttatatatatatattaagtaagttacgataacttttatacatataaaataatattataataataataataataaaatttttattattaatagttatctttttatttcttagctattaagaaatttatatttttagggtatttagctaacttcaagtatcctaaaatgtcccagtatttctaaaatcaacttatcccaataattctataaatatttctaactaaaactgttgtgacatttttggcctccaatcgagtctctagggtcgccgaccatgaaaatatttttatttcataaataactcatattatatacacgtattttaattaaatcttcgtaattaaaaaattacgcttatttatccacttattagatcttcagggtcgctggacctaaaaatatttttattccacatatagctcatattgcattcacacat

SEQ ID NO: 401683 - DNA, 575 bp, Cannabis indica
atactagatttttttggtaattatatatttaatgagtgtttgcaaattatatctaagttaccataaatattaattattttaattaaaaatgaattaaaagaaaattatttcgatttgagattttatatgcataattttttattataaataaataaaatatataaatatatttatggatatttatatgcgtgttcgtaattattgttctatatgttatcaatatacggatgaaatttctattatataagctatttaaaaaaaatgatagatataatcatcacttttacgtaaaaatcacttgtacaaaaaaataaggagaaattatatttatgtgaattgatatgtaaatttttgtaaattgtaaaataaaaaataataataatttaaaatgcaaaaataaaactagagtaggaaattaaaaataatgctaactatcacaaagcaattattcttgagcgttaaatgttaagttattattcacatgtcattttttttataggtatatttaaattattttgtaaaaaaaaaaaaaaattaatgactttgaccaatcaaagagtggcatgtgaccattt

SEQ ID NO: 401684 - DNA, 376 bp, Cannabis indica
agactttacttgacttagtttgagatttttttttattattttgttaattaatttttaattggtacagtatggacttaattagattaaaaaatgaaaaaagtagagagtaattggtaaaactattagggcctgtttggtatgcaggactggattggattagacagactaatttgtccaatccagtgtttgggcatgttagaagtctggataaattatttatctcatctagcagggtgtgataaataatcccatacaggtgagttttttttatcgtttttttaattttaattttattgatatattataaatttaataagaatttaaaggaaataattattacgcattgtttatacattttttcttatcaaaaacttat

SEQ ID NO: 401685 - DNA, 994 bp, Cannabis indica
tttgtcttccatggttgctgccccttttttatacaaatcaacaatttttttatatctaaagaaaagaaacaagtaaaagaaagaagaaagaaaaatataaagggaaggtaaaagaaaatcaaacacaaaagcttgtgtccttctctctttgcactttggtccgccttctctttccttcatcttctgtactatctgcaattaattctcttcaaaaatggtagttgtcatcatcttcaaggaggcgtacttagtcttctttttagttgtggggtaaatatggtacaaaatgacaccctaaaaatagaagcccaatcatttccaatcttggcccactaggtttagtcttcttcctttcacagcagccagctggcgtactttgagtgactgatacataattgctgatgtggataagtgaaattaattttttagacttcttccacgtcactgcccaaacttcccagaatgccatagcattctggcagcatttccttctagatttcagcttttgttcctaacttttcctttgcatcatttccttttttctagcaagttaattcttctttctcataacaaacaagcaacatttaattaaaaaacacaactaaaataatagtttttacaagacttaaaacttagcttactaaataaaaaatgaaactaaaactaatgaaaattaagcaaacaaacacattttcactactcttctcacaataatttcagtttaaaagtataacaaataactctataccatagagttatcacaccccaaggctggccagcctctttaagacacaacccatggcaagccagctttctacaacagcctctatggtcagtcatcttgcaataacacacaaaaaaagtgagcaaagttaagtgagcaacttacagaggccaactcctggagaccaatggaagatagcctctctggcttaccatcaacatgttgggttttatgccctaaataaaactctttacaatctgattagttatc

SEQ ID NO: 401686 - DNA, 738 bp, Cannabis indica
attccttggaatattgggtaaaccctatttagttctttagtgctaattgttcatttctatattataacttcaaattattttttatactatcttacttatataatataattttctagtgcgcattagatgatagagctcgttgcaccaaagaaaattatacatttagaccctatacgtgaccaccaagttctcgaacaaactactcaaatgttgggaaggtaataattcaatgactatttatgtaataaattatttaattaactaatgaattagaatgctaatattatttttcaaacagagtacacaaatatatagggacatcaaatgcgtttctttgctcgtggctaggaatttcactagcaaattgtccaagacaacctaaaaattaagagtgtggtttttatgttttgaaatacatgactgacgtcattgcatgtaaaccccaaccattacatacaagatcaaacaactgtaagttttaattattgattatagtatttattctaataacaaataatatatatatataaactaatataaatttttacttttttaatagtttggagataagcatgcaatacaatccaaaaattgaattgttaccaatacagcgacagtggatagaacggctgatggcggtgattcacggcttggacgattgatgctgaaaggcctaagaatttttcttcccaagcttatttttttaggttaacttgtagttagatttattaacttgtt

SEQ ID NO: 401687 - DNA, 676 bp, Cannabis indica
ggacgacaaaatctaaaagagaaaaaagcaaagatattattacaactgatattattgtaatataattctgtaatttccaaaaaaattatactataaatagatggactcatggactatagaaaaactaacttcaaaaaccacgtttaaaaactttgtgttgttcatttatttctataattaattttataatttcatttattacaaaaaaggttatattttttggtaataacatctgtgttaacattattattttaaattaatttagatatatatagaaatattaataatatttgttttaagttaattgaatttatactaattttttagattaatttaaaaacatataaatattaatatattatttattattattatttttaatattggtagtgtattcaattttatatttttaatcttttatgtttatgtttctcaaattttttaaattttaaatattatttttaaaaaatattaaaaattaacaagtaatttcttttaatttataaaattttaaaaatatatataacaaaaataaaaattaaaaatataattaaatatatgtatgtataatatacacgtaacaataatttaatatatctttatatattaaaagtgcctatctaacggcaattcttggtttaacagaatattcttaaaaataaaaagaatattctgt

SEQ ID NO: 401688 - DNA, 556 bp, Cannabis indica
acacattgcttcttgggaaaaaaattgctagcctaaatctcatggagcgcttggatttagggatagtgcaaattagaatagagctattctaacaaagtatctttgggctgtgatgaacaagcatgatttgctttaggataagtgggtcaatgtcatgtatttgaaggacaagaatatatgggactacacccttataatggatgtaagctggtactggaggaagttgtgccatttaagggcaaggttttctgctgctactcttatggctgcaggtaaaaatgggaaattcaatgttgctatagtgtacaaaagcactctgcaggttgggaaagtgtgctatacggaagctgtctggtgcagaagtagcctctcgaagcataggtttgtattatggtaggtggttaataatcaattgctaactaaagacaagtttttcaggtttcaaatcactctggaaaatgtcaattgtcctattcgcaatgctgagattgagagccataaacacctatactttgactatattttctctaagcaggtggttactgctatctttgat

SEQ ID NO: 401689 - DNA, 724 bp, Cannabis indica
ttttattattaataagttgagaaatacatttttttttctattcatcaattaaaaatatatttatattatattttattaaaatgtaattatttttgtgagtaggttacccaatacaatatcaccctctatttaagtctaacacataatttataaaaatttttacaaaaatactagattttagataaaattttacaattttactgtcacacggaattttttacaaaaatattattttttataaaacaacaaaatagaataattaaaacaatagtggaacaactaaaaaaataaatgtgaaacaacagtgaaaacttaacacagtacacaatataaaacttacacagtatttctaaaaaaaattatttttgaaaaaaaaatcgcccaatagtaaaaaaatagaaaagttaaaaatttcagtatgtgtaaaaatctctaatttatattactctaggagtaaatgagaacatcatctatgtggatatcttaaaaaatatataaataaaagtaaaaattaggggtgttcatcaaaccgcccgcactgcaccacaccgaaaaaaaaaagcggtttgaaattcttcacagtgcggttgcggtttgaatttttcctaaaccgcaccgcaccgcatattataaaaataccaatttttatatttatttaggtccaacatgtgaaggcccaacttaagctcactaattattgtattgttgaaacttgaattttttt

SEQ ID NO: 401690 - DNA, 633 bp, Cannabis indica
cttcagtcagcccctattgtagcctcaatcataaacctgctaatataagctcgtgaggggtttcccctggcctttgctttacttcgaccaggtcttcaaggtgcgagggaatttgacgagaggagaaaaattgtgcatggaactctgaagagaaggcattccatgagttaaaccttcctggaggcagtttgaaataccattgatgggcggcctctacgagtgtggcaggaaaaattatgcaccgtacatcacctcttacccctgcaagtctattttcatctcaaaatactttaggtgtgataaaggatcttcttttcctgtatacattttccaggttggtattttgaactttgggggcagctcaagaactttaatttcgggggagaaaggtgattcgcgtgcccggtcgagttcgagattagtgagttttgggccggtcaagccttgtaccatattttttagttgatctatttgtgcttgcccaagtggatgaacttgttcgatttgttgaccagcatgtgtcacattgggatctctttgaactggatcttgggtgcggatacctggttggacagtcagtggaacgtattgttcgtccaggccccttctacgatttaggtcagtcttgaggtc

SEQ ID NO: 401691 - DNA, 806 bp, Cannabis indica
attatatgaaaataagttattatacacacatattgtaataaagttatttgtataatgtatatattactgtaaattgctcttaaatatatctcatgaaatgagttcaggcatcaacaacactacatatacaattaaaaacaaataataaatgatccatattacaagcacaaaatagaaaaaaaaagaataaatactattttagaccttgtgttttgtaaaagttatcaattggaccctctgttttgttaaatgacaaaatagaccctgtattttctaaaattgtgcaaatagaaccataaactaattttatgccaacataaaacttaataatctgatctagagatgttatgataaaactagttacatttctgtatttgtttgtgttaaaaattatcttttagttggttatattaaaaaataaaattgttgaaaattgagctcggggtcctatttttaccattttagaaaatataaggtccattttgtcatttaacaaaatagagaatctaattggtaacttttacaaaacacggggtccaaaatagtatttaccaaaaaaaaatacaaaataagatttagcaatagcatgtgtcacttcaaaaaaaaaaaatagcataagtcacaccataattttttttaaaaaaaaaaataggtattataatttagtcaaagtattgcatactattcttttttttttctttgaagtaagggcaactccaatgaggaaaactaaatttagtgttaaatcaacactaaatggatactatttcaacgctaaatttttttcaattccaaccacaacacta

SEQ ID NO: 401692 - DNA, 524 bp, Cannabis indica
atttggaagtctcggctaccaaaccatagtatgatctaaggttaaagtaattttagcaagatgatgagctatggtattgtcattacaatgattaaaatcaattacctgaacaaaattacatatagagaaaatgtcagttaaaatcattccatactcagccattagcttatccttagatgttaaagctcttattttctttatcactcataaaatatgcaataacaatatttaattttatagataaatatattacatataattataagtatattaccattgatctaaaaaatacctttatcgattcaaagagaagaagccaaattgtggaagcgtaccttaatctatagatagtgataatcttaatctatcttgtagaaataatctttgtagtaattttgagtaacgatcttcaaagaaagcaagacatagggttttctaattttctctcttgaagggggaagatgagaatagaaattggttcttgtttcttggggaccactaccaatttattacctcatagctag

SEQ ID NO: 401693 - DNA, 879 bp, Cannabis indica
tctcaatctcgaacttttttgacaacaatcccaaactcaagattctcgttagttccgtatgtacttaatttaactgcaccatttgttgtttcaaaaaattttacgtgtaacaaaaaaataaataaattattttaaatattaattaattaacctttctctttatcttttttttctttcttttagttcactactagcacttcatctctagctttggtgtgttctaaaactcttcaatttctattagcaagaggggtctctctaaaaaaaatctaaatatagtttgaaccatagaagctaagataaaagaaacgaccactaaaacgcaccacccaccgaagatggggactagtgcaatagattcagggagatagtcacagcaatgcatgtgtagctatttagagttttttggattttttttgttttttgttttttttgctttgttatatttttttgggttttcagcatgggaacgtgggatgggacaaggaaaaaagtggagatgaatcactacaaatttttttacttttagtcacaactaattataaattttcattcttatgttgtgattacaaggtccatggctaaacgtattagtcagaaaaattatatttttttgtgactaaatgtgtttttgtcacaatacttgttgttactaaaactaacttagtgacaacttgtatctaaatactactttttagtcacaagtatgtttttgttgtgactaaaaaattatcactaaaagtagtaattttaattttgtagtgatagatgacctttatgggcggcaagcctccactatcaagaatggtaggtggcgaatcataaaattttatatatatatatatatataaaattgtttaattttttaataaaaaaaaa

SEQ ID NO: 401694 - DNA, 1015 bp, Cannabis indica
atcgaattaaaaatagttactcacccgtaacacttagagacaacatgccgccacttattttacgaggggatgaatggcttgcagcttatcttttggactgtggagagaataatcagagaactacattacgtgtggagcttataaaaaaaagacagaggtgaaaaggatattgaaagttgcacaaaagaaattgagcaacccttagtagacaactactttgatcgtgaattctactttgaagaaaatgtttatgatattgcttctgcactaggtgaaagtggtgttaatctcgattgtgaattttcagatcatcttaacaaaagcacaacaggatcatctccaactccaaaccattcacaggaagaattgatgactgaaaatcacattgacccatttgactatccgttggagcacttagaccaataaaatcaactcataagtgaagatacatttagtttcgcagatgggtcgaatttggcgattggtcaagaattcaagaataaagatgaggtgattcctccaaatgtcccaatcaagcgtggtagaagaaaaatgaatagaatcccatcaattggaaatgacaaaaaatggattcaaaggtgtggattatgtggaaagtctggtctctccaagaagacatgccccctaagagccacaacttctaaattttaatttttttatggatatgcttatttcaaattactacggttaattaatttatatcaatgtatttgaatattttagtattttcgtgtgtttgctttaattagaactcgattggtttgagttaacctcaccatatgtcgttgagatttttatatatttatcagactttgaacaaagggctctactgacaatagttgagctcgacaatttatggttgagaatttataattataaaatataatttcaggcaatggctcaactgacgttagttgtagctctactataaagtgattgatattagtaaaagataaaaagtataaggcgtgactgaaaaacatggagctcgact

SEQ ID NO: 401695 - DNA, 811 bp, Cannabis indica
attttctaagatatcattcataattataatttatgttatttctttttgataaaacacataacattattattcaattactaaaaccttgtgaataaaagtttgatagctactaagtgtaatataaacactataaattacatttaaagaatatttttcacttcatgaattaagtgtaagtgtaatttataggaatttttacaaaaatactagattttagacaaaagtttataattttattgccacatggaattttttataaaaaatatgtcatttttataaaacaaccgtaaataacaaaacagaacaattaaaacaacagtggaacaactaaaaaacaaccgtagaactataataaaaacttaacgcagtacacaatacaaaaaatacgtaatatttttgaaaaaaaatttgccccacagtataaaagaaaaaaaattagaaattttaatagtagtgtaaaaatccctattgtcttaaacaatacttcttcaatttatgaatcgtgaatttaaaaagtgatcataaatacattctaatatggaaaaattttatggttgtctccctaagaaagatattagtcactacaaaaaattttatttttagtcacaataaaatttatgattaaaagtgaaaaaattgtgactaattataaattgttattcctatgttgtgactaaaaggtccgtgactaaatgtattagtcacaaaaattataatttgttgtaactaaacgtatttttagttacaatacttgttgtgacttaaactaaattagtgacaacttgtaactaaatattatgttttagtcaca

SEQ ID NO: 401696 - DNA, 498 bp, Cannabis indica
agaggagtgtttgtaccaaactagaaaggtccgtaccaagttagaaagataataaataaagttgcgtacaagtttgacaggtataatgagaacatggaattagttctcctaccaaggtattggaatggagagaatctcataaagtactacgagtgaccaacttggataaacactactcttcaataacggtacctgtacaactcaccgtacaagaattagtacaaaagagctaacttttcaccactcttcagtggtggcccctgctcagtatgctacgcaggagtagccaaaataatgaatgaaagcatattttataattgtaagcttttattataaaaaacatgtatgttgcacaacaacaacaacaaaacatatgtaagactaataaatagataaaagagtttctttttctaaattgtgtcaaacaacttgacaagataactttttaaagttaatctttattttttattcaacatgcgtacaaacatgtccctctaa

SEQ ID NO: 401697 - DNA, 629 bp, Cannabis indica
aatgaatacttgtgtgtcttgcaataacaaaaaaaaaacatagagagagagcacgtttggggactgcggctgagattcttgttcccattaattgtactgaatatgtaaattagaaaaattagtaatttattagaaatgtcatgttaatcaaatacaattaattggattctttttagatttgtatataaatggataacagcctgtcttgtaattaacattaataatacattagttgtaggtatataacatcaacccaaaacatacaaaactccattccattttttattttttttccccatttaaatcattgtttaattgaaaattattgtgactttatcaaaaatgtcttattattttccattctctaataataagggtagttagttgtagtcttatttttaaagcttgtaagctggatttacattatcaaattcatatcgaagtttttctatcagcatcccctcaccaagtgtcaataatataatcataacataatatatacgtctaaacccacccaggagagccagccccatttcattcatatttaaggaacattctatttacaccctataaaagaataaatatactacaatatttaaaaattttaaatttaaaatattttttagaaa

SEQ ID NO: 401698 - DNA, 529 bp, Cannabis indica
tctcgtctcctgcaacatgaagaatcaattggtgctttacaaggtctaaagatttcaaggaatgccccttcggtttcacacttgttttttgctgatgacagtgttctattctgtcgtgctaatcgacaatcagctcgatctatacataggtgtcttcaaacctatagtaaggcttcgggacaagtaatcaaccctgataaatgtgtactctctttctcggataacactagacagcatgaacaagatttcttcacagctttgcttggtatgcctattcaaccatgtcatgaacaatacttgggattaccttcttttgctggtagagataaaaagaaactatttggaggaataacagataaaatttggaagctcttgagttcatggaaagaacatttgttttctgctggtggtaaggaagttttgcttaaagcagtggtacaagcaatacccacttatgctatgagttgctttagattacctgtcactttgtgtcaccaaattgaaagtatgatggcaaatttctggtggg

SEQ ID NO: 401699 - DNA, 460 bp, Cannabis indica
tctaaaaattcttgaaccaccctgaggtcttctagccaaacaatctcaggccgttggtatccaataccacagccagaaaccctaaacattcatcttgtaataattctctagtttttaatactaaaatcactgggattcaagatccttgaaccgatcccacaaaaacaaacggttccccaccctcttgttagaagattaccatcttccgtttacaatcaatactggttgaatacttggataagaaatccattccaagtataatattgaaatccgctaaatccatttctattaagtcagcactcaactccctatcctcaattctgatttgcaaagacctaatccaccttttggagatgactaattatccgtcaggcagtagggttctaaaccctttatcataactatcatgcgctctatccaacttactaaaaattttggctgccacataagaatgagtggc

SEQ ID NO: 401700 - DNA, 603 bp, Cannabis indica
taaaataaaatactaattgagttgaacactatattataggaccaattaagaattttacaataatctacttatcaaaatataatatttaaaaacaacttatttttactaattacttaaatataatatatacatttacacaatatgtactaggataacactacctcttcttactacaattggttcattatatataattagttatatttattaagttttgttgttctttgatagagaaactactctaagcttaagactaattaattaagctatatatgttagtgaaaggaatgggtaactttgagttattaattttttttttaatttaatatgtctattttcattggttgttgtgtttttgtatctttatgataaattatgtatctaataagtcaataattacgagtaagcaaacttatccatctaatcataataattttttttaaaggtatctaatcataataattagtgatgaaacaattatttttttaaaaaaataataataactaaatgataaccaatagatgaaatcacaccatcgatatatattcacttttgtaagatttttttcttaattaataatttataattgttgtccctgatttt

SEQ ID NO: 401701 - DNA, 795 bp, Cannabis indica
cttggcatatcattatattgtgtcctataaatctacctttgagaaaaccatcttggcagtgagatattttctcaggtaggatgtttctgattctagaactcaaaagcttggttgcaaccttataaataacattgcaaaaagcaattggcctaaaatccataatagaattagggcatttaatcttgggaaccaaagtaataattatggaattaatttctttaagaatttcacttgactctaaaaacgataaaactgcttcacatatgtcatctcctataatctcccaattatcttgaaaaaagctactggaaaatccatcagctctaggagattttttcatagggatactataaaatagcctttttcacttcttttctggtaaatccctatggaagcatgctagcctattcttgtaacgccctaaataattaggcacgctacccaagatacttaaaaaaccctaatcccctaaatgggattactaagaattagcgcagaaattaaactttaataacaaacggaatgaaaataaacttctaataatttaaactttacaaactaaaagttacaaaagttgggatcccaaaaaaaaatatttacaaaacactattacaagttcttttccatcagccgacctaagcagcaaaacagagtctcaaaacacatcactggtagaccccaacccgcttggtgtagtttggcccaaacatgtacattcttcgtccagttcctacactcatggttgatcaaaaacagctttcccgcacagtagagcacccgtgagccaagcccagc

SEQ ID NO: 401702 - DNA, 439 bp, Cannabis indica
gtcagtgaggagctgctgaagcgaattcctcttagggaggcaggggtgccttgggcgccaggtgggtaagtccttctcccaagatttcggaggcacgccttcgaactctcgaccaggacgggtacctaggcgagctggactgctacactcttgcccacgacaatcgtgccacaaatcctgataagggaatgtgcgcctggttgagagctcacgaccagcaaagggcgctgatgcccttgcacaagtacttcagggatgtggcagacttctttaatctctgcccggcccaaattactccaaagggcattaagtatttgtccactctcttcgtcctctacgcttcccaaggatgggatgctccttccccgcacgaggtcgcctggttcttcgacctgaagtctacgcccaagcaaggcaggtcgtgttgggttttatgccc

SEQ ID NO: 401703 - DNA, 1528 bp, Cannabis indica
acggtatgacccctggtttttttttttcagaattgttggccgattgttaaagatgatatcatcaatatggtcaagcaactttttcacaatgggtttcttcctatagatcttaacaaaaccattttggtcttaattcctaagaagaagtagcctatgtatatgggggatttaagaccaattgctttatgcaatgtgttgtacaagattgtgtccaaagtggttgctaatagacttaagagtgttatgctgtccatcatatccgatactcaaagtgcattttaacaaggctgcttaatctcagataacatcatgattgcctatgagattatgcatcatttaaatagaaaacgaagagggagggatggttatatggcactttaacttgatgttagtaaagcgtatgataagcttgaggggagttatctctgtgctatgatggtaaggatggggtttgatggtcgttggattaacttagttatgcaatgtgtgttttctgtttcctataccatttcacacggagggaaggagttaaggcccattgttgctcaaagaggattacttcaaggtgatcctttatcaccatatctatttattctttgtgctgaaggtttctctagtttgttgcgtagttatgaacaaagtggtttactcacgggatgtaaaattgctcgaggtgctccggtaatctctcatatgctctttgttgatgatagctatatttattgtaaggccactgaggaggaagcgtacaatgtgaaggagctgttgcgtacttatgaggtggcttcgggacaaagaattaatttcactaagtcttctgtgtttttttagcaataatactggtagtgaggtgcgagattctatctgtgctatgttggaaatttatgaggcagatgaaaatggctactacctgggtcttccttgttcggttgggaggaataagaatgctatccttggctttcttaaggataggcttcagaagagaattcaaggttgggaaagggcgtattttgtctcgtgcaggaaatgaggtattgctgaaatctattgctcacgcattgccgaattatgctatgaatgtatttctcttgcctttagacacttgtaaggagttagagcggcttatgtctaagttttggtggcatttgaattcgagcagtggttaaggtattaattggatgagttgggagcggttgtatcgtcataaacatctggaggactgggttttcgaaacttaagagactttaattttgctcttctagggaaacaatattggcgattgttggttaatgatgactctttggttagtaggctctataaggcaaaatattatgctcatggcaacttgttttctgctgaattgggagataatcctagtttcatctagcgaagtattcttgaagataaagatctagtacattcctgtgctcaaagaacagttgctaatggagaaaatgtatccattcttgtagatccttggcttccacatagttctaacaactatgtcgttacaaggcaccctgctctt

SEQ ID NO: 401704 - DNA, 566 bp, Cannabis indica
aaacggtctaccgtttttactagtggagaacccagaaaaaaggcttgttgttttcactgaaatggcatgctgtttttaggaaatttttgtaatgttgttttttttttgtgtgtttcttcgatatttagggcattttcatgctatttatcgataggaaaacttctagtttggagtttagatccccaaaaaggtcttaaaaagttatttacctattttacatgattgtgacataagatttttgtttagcgcgtaattttccatttaggtcgaccgacacacttaaattcgaaaacgaggtaaaattagtatagaatatatgaatgtatatgtgtatgtgtattatatgcatgctatttatgtgattcatatgctgccaatactagtacggtagtgatactgagtgtactggtacaatatatgatgttaaaagggtacggcctcgtattaccaatattagtacggttaagtacatagtgaatgtggtacaatacttagtagtactctgggtacggttcaactctgttggaatatgttttaccaggatctagatttattaacaagtatgt

SEQ ID NO: 401705 - DNA, 718 bp, Cannabis indica
tcactattatgcttttaaatttaggaccttatattaataatttttgtttttattgttaaattcacctttaatagtaaatatactattttggaccttatattttacaaaagttactaattggattttctatttgttaaatgacaaaatggatcctgtatttttcaaaatagtataaataggaccctgaactaattttttgttgaattaaaacttaataataatctgatatagagatgttatgacaagactgattacatttttttgtatctgtttgtgttaagaattgttttcaagttagttataataaaaatattgtcaaaaattaagctcaaggtcttatttttatcattttggaaaatacatggtccattttattatttaataaaatagaaggtctaattaataacttttataaataagacggtctaaaatagtatttatcctaaatataactagcaatttattctaagataatattcttttaattataataaaaaattacctgtcgtctatcgatactgctcatcgtattcattgaagtgcccacacgtacatcaagcaattaataattattgaatctcaatttcagcaagttgttgaaacctaactatgtgtataaaacattcaacaatagaacaaaaatatagtagaagaaattgaaagaatgactaagagagtataaatatttgaatgaagaaaaaaagataaaaatatatat

SEQ ID NO: 401706 - DNA, 925 bp, Cannabis indica
tgaaaattttatgagttaggtgtgtttgaagctcaagtttatgagcttgagtattgcttagttaagcttgaattttgtgatttttatgtaatctgaattgagggtttattgttggattttgatgcataattatgtgttttaaatccctagtgtttgctagcaactctggtttatgatttggaagttttggttatgaatttgaatgattttggttgagatttatgctgaaaattcgtgttcttggtggttggtttctgggttttgaacccaggtgtcgcggcatcggttgggcatgccgcggcccacccttaagtttttgggcatttttgagtttgaactttgaaaattcataacttttgattccgaactctgatttgagagttctttatatcgttggaaagctcgttccaagctctatgtgattatctcaattttaaatgtcataaaaaaattttatgagtttgaaatcaggggttaaccctagttgtgaaaatctcagatttgtgtgactaggattaccggcacctgatcaggagtacctggggattcggaatctatgcttttgcgggacaacaggtaagacagtggttagcacgcagagtatgtgcagtggagcttatatcgaaagtgatatgtatgattgtttagtaaccgggattagggttattaccctaataggaactgtttaatagcctagggttattaccctagttatatatgtgtgtaaatatcatgtcatgttaaatgtaatgagattcaaggattacgcacttaaggcatattcaagtttgactcggtaaccataaccgagatgaaccattctaaggccttattgtatttagacatgtgagagcaacacgtaggtctacgccacgtagatataaatagatgtgtgagcgcaacacataggtctacaccacgtaga

SEQ ID NO: 401707 - DNA, 556 bp, Cannabis indica
tgtcttcctaaagcttatggtggcctcgggtttaaggatggtacaaaatggaataaggcttctcttgctagattcatttgggacttaatgaataaaaagacttgttgtgggttaagtggatcaattcggtctatcttaaagggagagatttatggtcttataacttgaagatggactcgagttggtattggggaaagctttgtcggttgcgtactgtctacaatcaagctgatttgattgctgctggtaatggaggagagtttaaagtcgttaaactttacaatgcttcgctacagtatattgtcgatcctgctgatggtgcaatctggtgtagcttaaacattccgaagcatgcttttctgctttggcaaactgctcattcaaggttactcacacgggacatgtgttgtgataaatccaacacgcaagtatacgtatcgttttaacaagtaatactcaggtaagtgagatcgttcccacgaggactgcagttaagtaccaatcaattaaattcttgtttctatttggcaatcgaataaataaactttgaacaaaa

SEQ ID NO: 401708 - DNA, 1123 bp, Cannabis indica
aggattgtaggcctcgctaacgccaactggatgaagcttattggaagtcttcctatagcgagacgggcacctcgcttaattgtttttgagccgagacgaccgttgcacttcgtttgtactctaagggctttcccaattgatatatgtccctttcactttccaatgtgttctgtccttgatgtctcgctattcgcattcagtgacataaggtttctcgctaatatactaagtgtcagtttgtacattgattcctcgcctaagaccttacattcagcaggttacaaatatactctgatacttatgtaattaatgagttattccataaaaagcatttgcattgattcacgttctctttatcttggcatgtctccttcattgagatagcagctgaattttgggtatagcaataaggtaactaattaagcaaaatatcaaattttattcatttttcaagttcaaaaactactaatatcaaaaattaattaattttattctgataattagatttaaaatttgaaaaataaaaatctagatacaaaattacacaaaaaattcgaattaattccatgaaaaatcaatcaaaaatgaaaaaaaaaacaattttttttttgtcattgcgtgcggatggtatgaagtgcttaccatccgcgcgcacaagcatagggggctggccgagaaacctccgccaatgaggctgcttgcagcctgttacgcgcgatgacagggcttcagacacgactctgaccgtgttcctttggtcaaggtgctgtgcaaatgcacgtgctgactgagtgacactcggttctgcgctcgcacgtgggtgtcaccaccccttagatatttttcgatttttcaaaaaatcataactatttcaaataaaatcgaaattaagttctacaaaaaagtgaattgcttagttctttccattatatccaaaaaaataattctataataaaattctaattattttacgtaaaaaatttacaaacctcaagcaatcatcaataaacacatagatcaacatgaatcacatccaaattatacatacatcattttaagttcaaatttcatgaaagtaaattaattaccatggctttgaggccagttgatggaatatattttt

SEQ ID NO: 401709 - DNA, 701 bp, Cannabis indica
taaaataatttccaacagtttttcctttagttccttttatattatactaaataaatttaaaaatttataaaaaagaaaagaaaagaaaagaaggtagaaatttgttctctttctttctcttttcctgttatctctatttgggttctacttgcgcagcgccagagtatagaccggcgtcgaagtactaacaggtcttgcaaaagtgcatctgaagaaatttcgagaaggaatggtctaatgggttttatgggtaaagcttgaagattcttcaagccatggcttgagcgaagagagtggctacttttcccaactttcctccctcaagctcgtggttcaatcctagtttacatttacaatgcattcaattgccacggtactcgccccacccatagagagagttcaccatgcctactatcagtgtaggaagggattgtctatttttagctctagtgtaatgccctaatatttaggcacactataatgattttctaattacagtgcacgtctttgctaatcacataattttcttgaaaatcgtgacaaatttaaacttttgatctaccgttactttataaatatatacatatccaaacaaaaagttaggatcccgcttttaaatcttatatttttttttcaaaataaactttgcaacatgtcgcacagcaagaacaaaatgaagtccaagtcgtcccgagactgaa

SEQ ID NO: 401710 - DNA, 690 bp, Cannabis indica
atatacctctcaaaagggtacatccacctcataaaaactggcccgcccaatatggcttcctcgggtaaatggatcaccaaatgtatcatgatatcaaaaaacgctggaggataaattctctccattttgcacaaaatgtgaataaggtctccctgggccttctccatgtcttttacgttcaatgtccttgaacataaaattctgaaaaaattgcacaattctataatggtgcttgatacttccttcgacaaaaacttgccaatacaaactggaagtaacctttgcattatgacatgacaatcatgggatttcaatccaacaatattgtcattagttactttcttcttcaagttcgaacaaaatccatctggcaatttaacgtccttcaaaaatttacaaaacaattgcttatcattagcagttaacacataaggggcatgtggttttagcaatcttttacgagcatcttcgaaaatccataaggattgacgaattctcatatttttcaaatcttgtcttgcattagtggtgtctttagacttgtcattatccaagagagtgccaaggatactatcacaaacattcttctcaacatgcataacatcgatgttgtgtttcaactcatttgcactccaatactcaagttcataaaaaatactttttttcctccagttattttcagtgtcgcct

SEQ ID NO: 401711 - DNA, 350 bp, Cannabis indica
aaagtaaaatttttgtagtgtatgtttagttggtacactgaaatagaagaataatgttgttaaattcataagcagttccatacaaacactatcaacagtatatagagtcatcaataacagaataagtcttacagctaaaacagttacagaaaaactaactcatattacaaactaatttttacaactcagccttccgctctcctgccataacaatgttctatctctataaaaggaaaaaggacggacatcagacgaagggactgtctgatcagatcttcgtctcaatcagagagataagtagcacgacgaagggactacttgaacctgagtttgccatacctacatcatta

SEQ ID NO: 401712 - DNA, 504 bp, Cannabis indica
tggttgagggagtatgcctctgctgggattcgaaatatgccaatttcaatctcagatcatgccccaatcatccttgacacacactttatttgcctctaaaggatttattccattccgctttttcgaggcttggcctgggaggattcgtgcaagaaggaagttgccatggcttggtcctcaaatggtaatgatactgtgtcctttatcagaaatattgataagtcaaaaaatggcgatccaggcctggaagaagaaacacaagagtttgaatgaaggagaaataaaagaaatggagttcagattacaatggatccagaatcaacctatttctgatttgctcaaagaagaggaagcccgaattcaaactctgatttcagattgttggtcaaaactagagagcatgtggagacaaaaatcaagggagacttggctttccttgggagacaaaaacacaagattttttcacgctgcaacaatcataaggaaaagaagaaatagtatttg

SEQ ID NO: 401713 - DNA, 640 bp, Cannabis indica
aaatcatgataaatatgctactgtcatctagaattttggtgcacgtatcaagaaattagataccaaaatctaaaaaggaaaaaaaaaatactaaaactataataaaattaacatttaggtggctccacaagtaacatttaggtgaaagattgaatttgatcatatatatgttgatcaaattttagtccatataccaaatatataattttattttttaaacaactatttgatgagtaatatattaaagaataatcaacatattatttttttttgacgtgaatcaacatattatctattctatataaagtgtgcctatataacagaattcttgatttatgaaaaatttatgggtgcctttttatttatattaaaaataaaatagtttatgaaaaattcatggatcactttttatttaaataaaataaaataaataaaataaatcccattagatcaaaaaaaaaaaatacagtttttgttgttgtacatctatgattgaattttctttaattatttattgtattccttttcctattacaatttagacattccatgagatcacatataatattccaatccgcacttctctttttttttcttcacaacttaataacaaaatgtataagtaataataaaaaaaaaa

SEQ ID NO: 401714 - DNA, 543 bp, Cannabis indica
tcaaagttgccgaagtgcttttagtcgaccgctggttggcttgacgttgctcgaacacagacactcgaatctttgagtaagtctctgattccctttatgcttttctttgcatgtttacacttttgaatgcaactatgctgtagaaaaaaaaaacacttaggaaaccctagggttagaaacttttgcgactcttctttatcatgtcttcatgagggtttacagccatagagcttgtctctgaaccgcattgtgtctgtcttccatcttgcttattctaagctttatgaactcttttttcctaactcaaggaaactttctgacttcttgagttcttgacttttctttagacatagctgttctttaatctattgagtactcctggacggcatatttacttgtttatcgtttgatatttcgtccaacactcatcttgtgtgttttcttttgtagatgaactcaagtgagtcttgggaactcgagcatcaaatcgaccaggatgtgcttcaacttctgcacgaagaccatcctcgtctttgtgctagt

SEQ ID NO: 401715 - DNA, 513 bp, Cannabis indica
aaacatatacaaaataacaaagaatatgtaatggcatatatatatatatatatattattggtttctgtccatgtatcactttgctgagttttaggagatgagctttgtttgtgtggtagtgttgaaactactaagatttgggtaatgaaaaatgaatgtagtaagaaaaaatcttaggttaagttatttagtactattggtactattgattggccttgttttggtttattgtcaaacctttgaatctctttaaaactagagctcttttgatgttttgtaactgtatacatggttttttttattataacaaaaaatactttagaaacatatgttgggattcatggccttaaatcatgatatggggctatagttcattagacagtgacacaagtaatatcaatgtttttggtgttttcatgaagattgcattttatatttgagaatttaaatgaatctgctctaatacattatgcatcgttagtagttattctaatgggttaatttcacaaatgc

SEQ ID NO: 401716 - DNA, 1034 bp, Cannabis indica
tgtcgtgattacaatctactaattttattaatcggggtctataagccaagtaatttgaaatgagtaataaacttaattaaataaataacttgcaataaacatacatgttttactttaaaccaaaagaatttaaggttacatattcgggatcccgttaaaattatttgcaaaatattacaagttattttatataggccaacctaaatgataaaatggaatttctatacaattccctgttagacccaaccctcatgatctagcttggctggaacatgtacaagtcattctcaaagcccttgatctcatggctgactcgacattgctttacccttgcctacacaatagagcacccatgataattaaaataatacagtacgataattaaaataataattacacttcatacagtatgtcactatgtatatatactgtgccaccgcactttatattacattatttcatatataataatgtcactttatattacatagacctatgtgttacgttcacacatctcttttatatttaaggccttactaaagtatttctaggcatcacaaacactaaaatacatgctcaaacactttaaacaaataagattcaattacaccaaatcatgcttttgaaaactcaagaacacaaagctagaatcatcatgctcatctcatcaaactaccaaaacaacaacaacatacaaagagtggcccaaaattccaatctcatattcaaaacttacccagatcataacacaaacataatcaagaaccaatccaaatttacatttaagaattcatggcatacacacaagaaaatcctagtcatccatgttagaaatttattagggtcacaattggatatataaaatgtgtgttggatcatcaaataaataagtcaaatttatgtaatctattttggaataaagtttatgacttaaaggcatgattgtcatgattttaatatgtagataccataaggacaatttctattttgatgaggggcgaaatagaaatagtcaataaatattactaacagtt

SEQ ID NO: 401717 - DNA, 761 bp, Cannabis indica
caagggttattgatctgagtgggaggagtcatattattctgctacaatcaatgtaaggtttattaactttatatgtgttaaaattctattgttttaaaaatctatatttaagatgtaaataaatgtacttgttagtaaatctagattctggtaaaatatattccaacaactggtatcagagccatggtaatgatttactttcaagaaatatggatttaaaacgatgtatgtgtgatttgaatgtgattcatgttgatctatgtgtttatttgatgattgcttgatgcttacataaattttatgtaaaataattggattcatgatctggatttattttatttggatatattgaaaaaaaaataagaaattcactttttttatagaactgaatttgattttatttgaattagtattgattttttttttttttagaaatttaaaaaatcaggaaggggcatcaccaatgggcgcgcgaggacacccgggtgtcacccgggtgcacgagcatttggacacaattttgactgaaggaggtcacctagctcctatctgaagcccacatccgcgtgcaaaaatgctgtgtgcaacatggatgtgcagcaattctcagctagttcccccatcacgctcgcggatggtatgcactacataccattcgacctaaatccaaacttttttcatttttcatttttcatacattttcatgaaatcaatttcgaattttttgtgtagttttgcatgtagatttttatttttcaaat

SEQ ID NO: 401718 - DNA, 863 bp, Cannabis indica
gatttagtgggggatttagtctctcgggcagtcttgggagttcttaatgaaggagctgacccaactcccttaaaccgcaccattatcaccttaatcccaaaaaataagaagcctcagaacatgaaggattaccgcccaattagcctctgcaatgtgatttctaaactcattactaaggttcttgttgcaagatttaaagttgtgctcccacatgtcatttcagaaacacaaagtgctttcttgcctaatcgcctcatcacagataatattctagtggccttcgaacttgttcatgccatcaagaacagaactgcgggaaggaagggtattgtctctcttaaattggatatgagtaaggcgttcgaccgagttgagtggagctttattcaagcagttatgaggaaaatgggcttcgctgaacaatggatccaacttatcatgatttgtctttcaacaaacactttctcctttaatgtcaatggtgaggtatctggatctttgattccaactcgtggattgcgccaaggttgccccttgtctccatacttatttcttatctgttctgagggcctttcgagattgctacaatttgaagaacaagaagggcgattgactgggttcaaactcactcgaaatgctgcaccgatttctcacttgctattcgccgatgacagtctccttttttgtcatgccaatgatagctcatgccttgctattaagaaagtcttggacatttatcatcgtgcctcaggccagcttctaaaccatgataagtcggtcatgtctttctctccgaacaccactttggcatcacaagtttttttccacagacatctctccatgcccatctgtgaatgccatga

SEQ ID NO: 401719 - DNA, 789 bp, Cannabis indica
aagtaggttctgtgatatataatgatgcggtcagatgggtagaataatatgcatgttagatgaattcaaatatcttatatattcatctgtagtgaagtaagttttgcgaatacatatactgcagtcggatgggtggtaaatttttgtattgctaaatgttgttgtgattgttttatattgttttagattgtattttgttgttattaataactttaaatttttggagaaccttctattatagtcgttattatgcagttgaaatttcggtaggactagttactagttagtaatttagtattctatacttagttactagttatttatttcgtaaatctcgaggcatttgatgcgtaagtctcacaaattatgttgaaataatattttagaatacctaaggacgaataaaatatcgcataaattttgaacataccaaagatgtatcatcaaacttaaactaaagtaaagataattatgtttctagaactagaaccctataattctattatcctagaacacacttgactcggaaaacccaaataaaaatattaatgggaaatgcaatgatgattagaaatcatctaagttatcatcacttgttttatcttgttttagattattttttgttgttattaataactttatattttttgggaatgttcaattatagccgttatgttgccaaaatttcagtaaaattagattaaaatgatttgatataagtttctcttaaacttggttgttaggatttttgttaatttttgttatggataaatcatggatgcgtgagga

SEQ ID NO: 401720 - DNA, 635 bp, Cannabis indica
tgacccacattgtaggatactaataccgaacctttagagtctaattgtcatgtcactaaaagtctaaattgtagtagtgcctccagagtaatcaatatctcatcagtagactttctagcattcatgcaagtctagaaacctgatttggtgtagtctaagagtattaaataccagccttatcaacaaacatatagttcctcttattaaacttaagatttatttgattgtcttccaatgttcctttcctattttaatatgatacttactcattactccaactcaatagaaggtgtctgatatatgcatacaagggcatacatgaaacctctcattattgatcctaaggaatttgttttgagctattatcttttttggaatagttgaaattttttcttagataaatgaaatctatgtgtaggagccaaaagacttcctatagaaaaaagccaatatagaaaaagccataggtctagataatctcaaacctttattactaggatcgagaagtttgttaagtccattgattagactcattgtcaaaatttcccttcttgttgttgtaatagaaagctttttggttactcaatgtgaatggttttaaccatagttctcttagctttgcttcttagttcctt

SEQ ID NO: 401721 - DNA, 1005 bp, Cannabis indica
ctgaggagagcaaacgtcatgaaagctcaatcgtacaaaactctccacaaattaagcaactatcccttgtgaaatctcctcagtccaaagaggagaacttgaaggtatctaaccaaaaacgaaccttcaagtatatccctaaaagtcaacgaggagtagggcaaaaagctttgacaccgatcgaagattcgatgacagccctgatgacaagctttactttaccactaaggaaaatcgatcagtcactacccaagggtaaaatgcaaatttcagtttcctttggtaaagatagcaagaaaaataaaagagtcattactctcaataaaacgtcctccacttctgtaactccgaaaaccttcaaaacagcgaagaaaaaggttcatttcaagaagcaaaaaggagtcacaatccatcaaaatagtgattgtttaaaagcttcttttgaaccagacgagttaacagaggaggaacaaaaaatgtttcacagcgacgatgttcctacaccttccccgcgggtgtcggtatttgatagacttgaagcaagcacatccaccccacgagtgtcagcattcgaaaggcttgttttcccaagtgctccacagtcaaagggaaccaaaaagcaaaaacagtgggtgccaaaacagaagaaatctttgagaattactattcaggggcatgaaacacaagaagatggagaaaattttgctcaagtcaattacctctcttttgaagaaagcttgaccgtagaagatgaaggctcaagctcaaacccttcagaagattttatagacatctttcaactagaacctcaggaattcgaagatggaggacaagcaactgtggatgacttaatagagatcaacctcgggactgaggatgatccaaagcctgtgtttgtcagtgctttattatctgaagaagagttaccacagtacgtacaagtccttcgcgagaacaaagatgtatttgcttggttataccaagacatgccggggttgaatcgaa

SEQ ID NO: 401722 - DNA, 867 bp, Cannabis indica
aagaaaccatacaacattggatgtgcaaggcgagatatcaacctcattacgcatgaagaggcgtaggcaagatataatgaatgttaagacacttagcgtataatacacattatacaaactaagtataacaatcgggtaaacccaaacaactaatagcgaggcgtccatctcgctataggaaggcacgctcaaggtacattcactaatcagctccagacatctttcaatgagattcacagctccgtcgaagtcagttatctcagatagaagctaacattcaaatgatgttgactgctaaagttcactttgtcactaagaactgcgattttcagatggagtgttatgtcttgaagcgcagaagcgacaagatttacattatcaacctcggaaagatgttggaaaagctctaactcgctgtaagggttattgttgctatgttcccagcgagacgtcccagaagatacgatttgcaatgtatttaatacacatttacattgacccagtaaaagcggaccaattacaactatgtgaattttaaatattaactgtatttattttacgtgggatgtaatcaaatcccataattttaggagataatggttgtaaaatatcagtcaaatctgtaatcaactgccctcctatataattataaataggagcagtttacactgaaaaaagaacgaaaaatttattagagaaaaatgccttaaaattgtatcagaaatctaataagattgatttgtgaactatgcagaattttaattgtaaaaccacgtaaaaacctttgtgttcttattttgtttttttactgctttagtttttgttgcccctgaattcgcccaaaatacgtggaccagtcgaaaaggg

SEQ ID NO: 401723 - DNA, 641 bp, Cannabis indica
tatatatatatattattatgctcaggaaccttttaacttgttacaaacagtctttaaactagttattcataatattgtaaatttttcttttatcaaattttatcaatcaaagaaaattaatgataaacaacgccacgtgtatcatttaatattagaaatataaaagtgttgcatttttaaaaaattattaaattaaaaatcaattaataattaaaaaattatagaacactaaattaaaaaatttataaattatttttttttcaaattaataacacatgtgttgttgacatagtaccggcgtgtcagttatatcatcattttgtttgctacgtgtaactaaacttgatagaaaagccaatttataatattgtgaatagttagaaattatttttgatgagctgaaaagtttaaaaagacaataatacatatattatagttcggggcaaaaatctgattaaatagttttttttttaagaatttattttccgtgtattttatatgtttaggaatattgtgagttgtttttatctatatatttaggattactaagtaataaatatcatagtttggagctcattaggagtcaataagatccaatttttgtgtttccatcatttccaaatcaagaacaagcaattaat

SEQ ID NO: 401724 - DNA, 654 bp, Cannabis indica
tttcctacgagtttctccaatgagagatattaagtgctttggaaagaggggcaagttaagccctaggtttatagggctacttgagatactcaagaaggtcgggcaggtagcgtattggctagccttatcaccagcgttattagctgttcataatgtatttcatattttgatgctgaggaatatgtttcagacccaaatcatgtcttgagttacgaagccctagagctatagccggacttatcttatgaggaacaaccaatttaaatcttcgataggaaagaaaaggttcttcaaaacaagaacatagctttggtcaaggtactctagaagaacaataaggtggaagaagtcacctgggagctacagtctatgagggctcaaaatctaaagttattcaggttagatttcgaggatgaaatcttttaacggggagataattgtaatgatcgcatgttaaattatggattagtaaaggcaattagcgttaattattggtattttataattatatatgattttatcattattgtgggctccatttttagaaatggacattagagttataatttatcgattctagagattttattaaactctaagagtattatttaagctaaatatgaaatatgtatttttttttttttatgatttttg

SEQ ID NO: 401725 - DNA, 892 bp, Cannabis indica
tgaactgacacaaggagggctaaagactagtattgataatatcaaatggaactcaaaaaataaactcagtaaatataattttatatttactaagagttcaactccatatttacagtggagtaatcatggaattaataaatatgattatttggttgaagattcaataaatatcttaattattagagcttggtattatgtgttgggattttatgctctaaataaaactcctttcaatgtaattttgtttgctatcgatagaagattagaagtcatttaagttaacatattatttttatgattatggtttaattatacaatttatgataaatttagaatatatagttattcacaattacagtggtgtcatcgtagtaaaaagtaattgtgattatatacttcaaagttttgtcccatgattcatcaatgcactagatttacactgacctgataattagcgataaattttacttacatcttggatacgtgttatatcctttccaagacattagtaaatatgctagtatcagatatatggagtatacattggactgaaccgatattcaacttggacaatatatcataaacttaccgttatatctttctaagccaatatcacttagttgatcttaaatcaatagatcttaatcatgtggtggttaggttctagcttaactgtattatttatgttctttgagttgttcattaaagctgaccaattagatcggtttaatacttacatcttgagaacatggtagtacaattgagtgggagcgctaataatagatataaaatctataacttctatattgacatagaagtgaaatgatgatttccttcaatcttggtttaataaaagtggaagagctcttagttcatgtgacagtcagtagtc

SEQ ID NO: 401726 - DNA, 1078 bp, Cannabis indica
agagagagagagagataggtagacgtgaaagacagagagaatagggagtgaaaatcaatcttattttctctactttcagttgcttagtttctattttcatgcttgttaatttatgttattatatattctatatatagtgttataagtaaaccctttcaatcttttatttttaaaataaaggtaaatatctaatttgatttgaattaggatcataattcaaatataaacatcagtaataaatatcagttagatattttattttaattattatctttttaattaaataattatccaataatttaattaattaataattcaaagataattagcttaatttaatttaaattattttaactaataaaataattaaaccaaataatcccgggcctttatatctcatcctacatgtgtggattaggcctacatgtgccatattttaaggtccaaaattaatttctcaattttttcataaacaagatttattatttattcagccaaaaaataataattgattaattattattaatctctcatttcaaaaggattaaaataaatattattctctctaaaataatatatttctctctttaatattatttaataaaaatattatatttaactaattaacatagttttatcaaataaaactaaatagttaaatactattaattatacgattcataattggcataattaatcaaaacaataattttacaaattaatagttttccctcaaaattttatttaccatagaaattaattctcactcgaaattcattcttcaaaaatagagtctttccatgtacactgttgtatagaggtgactcaaggactatggacctatatttgaagctccaataaacacttaattattatcgatatcatcaatagaataatccgatttactaattccattattaccccactataaatatggaattacacactttgacaatataaattatatttacaaaattttcacttgtagtccattgatataatcaatataaatagttttccctccaattattagttcataatgagagttggtcaaaatactattttacccttctaatta

SEQ ID NO: 401727 - DNA, 951 bp, Cannabis indica
tgatcaaatttaacatactttaaggctttccatggctcttattttcctttgatattgtttaagtagttagtaatctactatgtgcgcgggcagttattatctactattactttcgagtttgcgagcagttatcagttctctacttcgcgtaaacagttataatttatttttagacaaactgaaacatactttaaataattcatctcgtgaatcactttatatatttttgattgcttgtatgaatagttaagccttctattcacaccttagattaagtattttctcaaggcatcttggtgcctcgtgttaatacattcctataaaatgcgagtcgttaaacattcagcttcacatgtagcttatcattgtttgtatgagttaaatctcatttacaactgctacttttgacttcgcatcgtccatagatgactccaatcaaccacttaaaaaactttgaattttttttttaaaaaatggggttttttttttacaacatattatgtatttccacataatttccagttgataatagacatatatatatgcccctcaagtaattttaaagaataaaactttgtaattacttggagaataattcaactttattaataattgaagttctaaatattacatcagattatagagattacttagtttactggtagtagggccgcaaatgctcaacattccagtggttctttattagcgagacgttaagctgagctaatttataaatatcggtttccactattgcttcgatcacataaaacccttcccagtttgggttaaatactcctccaaatgcatctctcgtgtttgcaaatactcgccttagcaccaagtcaccaactttaaaaagccttttcttgaatctctcgttaatatatcttgtcactcagtgttggtatgctacatttagtaatttgcgactcagtacatttttccttaagt

SEQ ID NO: 401728 - DNA, 818 bp, Cannabis indica
agaaagcacgggaaccaataaaactgtaagtcactaaacaacgaggtccatgagtaggacgaggtccatgagtaggacgaagtccatgagcaagacgaggtccgtaagtaggacatagtctgtgagtagaacgaggactgctagtaataattccaaatcggatcttaaagagcacttgaatcagaagaaacttgatcttcgttaacaactcattccaaagtaagaggagcctatccaattgcgaataggcgagttggaggataagttcagaaggtataaagtgggggagttaggaaaacaatccggatacgactcagatgaggaactcgagccgtacaatccatatatcatgaatactccttttccacagggatataaaaaccctcacatctctccatatgatgggactgttggaattattttaccaggatctagatttactaacaagtatgtttcattaacaccctaatatgaattctaaaacaatgaaataaacacataagagtttaagaaaaccttacattgggtgcagcaaaatactatgactccttccatttagatctctagcccttgattcctttctgtagcagagcatactcaagatctgaatctggatatccttctctccttctttgatgctgattttccatagtcttacatactatgattgaggtacaacttgatgtgtgtgggcactactctatcactcaagggtttaaaaattgtagagaggaaaagagagagaagtggcgtgtaggctttttctgaaagaaacaaatgtgcaaagtcataagtttcctaaagccaacactttctat

SEQ ID NO: 401729 - DNA, 1023 bp, Cannabis indica
gacagtattaattataaacaaataaaagagtatactaaggggagtgttatgaatgactatatagtatagaataggtagtatgctctaaatgataatattacaataatagcaatagtattcaatttgtagcagtagcaagtataatgatcatgtacattatacatgcatgtattcacctatatatatgtgtaactttgataaagaatatgaagcaaagtgaagagcagaaaagaatataaagttatttactcatgtttgtctaaatttatgacagtataaatatagatattattttcatatataaaatataaaaaaaataatttttttaatactaaattatttatctaaaataaaaaaataaaatatcttaagaataaatgttgatgaactcgataaatataatatagattaagtaaataaatttaaatctataaataataatatattagtttttttttttagaaaaaataatatattagttgaactataaaaatttataactaatcaagttaaatattaattaaccatccgtataaataaaaataaaataaaattaatattggatcacatgaaagaatgggcaacctaaaatattttgtaagaaatgtccgttttactacattagaaaaaattgataactttttttagtgaaaatttgaagctccaataacttgtaaaaacaagttaaaaaaatatgaaatgtcaccttattactttgaaaattttctataaatgtataatttaggtgtttaatatttttaagtttatttttaattactgtacatgcatttatgtacctttaactatacattatcagcgagtttaaaggtcattacacattttgtcaaaaagaaaaaaataaaaagaacaaatagtggcataagtacccaaagttttatgtttgtaagcagcataaaccaaatgtttatttttagcgacataagtacccaatatttgcaaaactgtaatttttctctaattttattagtacagaatctgatattgtcttaaacaggacacata

SEQ ID NO: 401730 - DNA, 525 bp, Cannabis indica
atatttatgaaataatccctattaaaaatacatggtagcaaacttatatttagataaaatactgggtaccaaatgtgtatacattcatttcagaattaaaacaacaacacaattcgaatattacacattatattccaaatattaattattgaatcaacagacattggtgattggcagtggcaacacatcctctaaatcttgatatgacattctcccactttaattcatacatagtcacttgactaatctgcattcatacatagtaataccaatacagaaaatgcatgagtaaataagtactaagtacatatatattcacttccactcattattaagggttgcattttattgataattgaaaatttcaattacacaagaataaataagaggataaaataaataaaattagttgtgtaaaaatagattcaaaatcattcataaaaactataaatttcatagctaaaaaataataacatgattagacattacacatgtcaaattatggttgtttatatataatttaat

SEQ ID NO: 401731 - DNA, 854 bp, Cannabis indica
taacagacatagaatagagatggtagagagatagagaggtttaggcttaatttgtcttattaggatgaatatggtattctttgtactatttgctatatatataggaccctaacaaaactaacctctccattcgactaacacatcatctctctctattcttttctccaataacacaaataatatgtcacctatatatactttatactataaataataaatacaaatatatatatatttatacttggaaattgattttttattttgaatacatattggtatcctaagttttataatgcttatgtcattttatgctactttttgtatattaaatctttttataaaactatctttataataattcataagattttaaaatttaaaattttattatatttaattacttataattttgaatataatttggtcaaactgataaaaaggaattctataaaataccaaaatatatacaatttcaaaatatgaaattgttacctaaaattttgtcatttagcgaagtgatgtggtatgtaagagaagatacatcatcatgaataccctacaaaaagttagaagtcggtatcttcatagtaaaatttagggccagttatacaaggaatgagatcatagaagagggatttctcttctttaataggaaaccagtcataatgatcaaagaagatgtttattcgattctgacttagatacaattacatgggcttaataatttgaagtattgggggaagagattattgttgaagataattgggcaattggaaaatcttattatgattgattctgtcatcactaagaataaatcgagagatttagtgcatgtttaacattataactaaaaa

SEQ ID NO: 401732 - DNA, 1295 bp, Cannabis indica
gattggtgtgtgagttccttgacatctttcttgaagatgtaccaggattgccaccttcccgagagattgaatttgtgattgagttagtttagggagtggaaccagtatcaaaagcactgtatcaaatggctttagcagaattgaaagaattaaggatccaactccaggagttactgaatttggggttcattagaccgagttactctccttggagtgctccggtactgtttgtaaagaagaaagatgtgtcactgctgatgtgtattgattaaagagagttgaacaagcatacaatcaaaaacaagtatcctctaccttgaattgatgacctatttgatcaactgaaggggaagacagtctattctaagatcgttcttcgctcaggctaccatcaactgagaattcgagaggaagatatcatgaaaacagcgtcccatactcggtatgggcattatgaatttctggtgatgtcttttggactcactagtgctctagcgacattgatggaccttatgaattgggtattcaaggattacctggacagatttgtgatcgtgtttattgatgacattttgtttattctgaatcagaagaggaacatgagctacatctcagatcagtactacaacgattacgagatcacaagttgtacgccaagttcaaaaagtgtgagttctggttatctcgtgtctctttcttagggcacatagtggataaagatgcaattatggttgatccgaccaaaatcgaagctgttcgggattggccaacaccaaaattggctactgaagttagaagctttttgggtttagctgggtattatcgtcggttcgttaagggtttctcaaagattgttagacccttaacggagctgacccgaaagaatttggagtttgtttgaactgatcgtgtgagaaaagttttctggaattaaagcagcgcttaattaatgctctagtgttaactcttccttcagataaggaaaagtttgttgtttattatggtgcctcgagacagggtctggtctatgttcttatgcaagctggaaaggcaataacttatgctttttacagtcaaaggagtacgagcagaagtacccttctcacgacttagaactcgcgaaagttttggcggcattacttatatggcaagaaatgtgagatatacactgattataagagtctgaaatacttcttcacccagaaagacctgaacatgagataaaagcgttggctagaattagtgaaggattacgtctgtgagattctttatcaccctgggaaggccaacgttgt

SEQ ID NO: 401733 - DNA, 1200 bp, Cannabis indica
gtacatagggctccctcggtagaagagtttagctacttctacgatataaaaagcgtaggccttcacaatggtttctactgcttcagcaaatgggcgacttctgaaattaacggggtagaaggcatggtatctaatatgggagattggaaatcaaagtggttctacatattcaaagtcccagggattagaactgactttaaccgtcgacctagtacgtcgcatgtttcctgacttagacatttttctgagttactttgaggttttaatctgactcgctcctttttgttttcgcagatagaccgtctcgtcccacactcgacgcgactcgcagagaaacagctgaagttcttgggagccttcctgtacaagatcgcgactggcgattgttatgtacaactgctaaactgcgcgaacataaactgattcctgagaacgcgagtctttggagagagccggtgtacaaggaaccttctgaaaagcagcaagagcgaattgataaacgcctttccaagcaaactcctcgaccatcatcaggtattttatcgcatacgcaaacttagggtgttagaattttatccttattaatattaacccttattttttccttttgtaatcgcagaaatgactttcctaaagtccgctcctatgctcaaccgcaaactgaaacccgggacagcagcaacctctcctattacctcccagaagaggaaaagcgatgtggttgttactcctgtcgcagactcctccaagaggcctgctaagggtgttcaagagaaagggaagaaggttgtgatcgacccagcggctcgagctcgtcatgtgctgtaccttcaggagaggtttgtcagcgatgagttcttgtcgaagattgacaaggcatcttcagaggagctgcttcctcgcgctgcggagttagcttcgcagttcatggccacgtttgcgaaggcttttgctgcagggcccaaagaggttgaactcgcgaagaaacatattgctcagcttcaagaagacattaagaagctgaagcaagatgcgtcttctaaggccaaagaactagaggaacttcgcaaggccaaggagcaagtcgagcttgaagccaaggcaaagatcgaagagatgtctcgcgacttggaaaactgagaaggagaacgactaaaaacagtacgaccaggcggtctcggactacatctatactactct

SEQ ID NO: 401734 - DNA, 677 bp, Cannabis indica
tttcaactggttgagcgacaatccgccaccaaaaaggtagccatcaccgtgaaatgttgaggtcactcccaaactgtgagggctaactctattgtcccctgtgaacccatatatcagtgaggcataggatttcaaatccttaagccctagtcccatcttctttagggctatgaagtagaggatatccactaaactcctattatcaatcaacattaagtgcaccatggtgttagccctctgaactataagcaccagtgggtcattgtgcgagaagtgcactcctcttgcatcttccttcgtaaaggtgactgagttatttctcccttgaaattctttagaggactttattctatgctccagacttgagtttcctgcctggcctcttgagcatatttttctctcccattacgagtgtcccctcctatgcaaggtcctcctatgacagttttaatgtctcttaacacttcggggacttagccgggtactttttgttggtgtcctccatctagcctctgattttcttttcgacattccctcgatttatggtgcgaggctctagggtcttttggcgttggtgatggagaatgccttacgggcgatggaactttttgcccttgtgccccaccgtcccttttggtcgtgatggaggaaattgctccactacattactcgtccac

SEQ ID NO: 401735 - DNA, 812 bp, Cannabis indica
aggagcccaacaaataggagttttgtcgaagtatgatttctaactcttaaaaataaaattgataatgttcttttgacagcaatggttattaattgtggctttttatcaggtacctagaagaaatattgttggacatgggtgggctgaattgagtatatgaatttttgaatccgggtgtgattgccaccgatgtaggagctgatagtaatcgttgccaagcactagtcactggaatgaatagggtgactaattcagacaaatggcatattgccccatataataataggtatatgtagatgtaaaatatatcatttcggtatttataactcttcataaaatttattatttatgttaacagttttacacatacttgtccgagcaggaagatgtttcactggatgcttgtagtcatccagccaagtacacagacggtggcgtacttagtttcaggcaacgacgacatctcgcatgatctaaacttcatcatatccacgtaagttctatattaaacatcccaatatgcaagcgtgttctttatttataaattcatatatgctaattaaatttactttttgtgtagatcgtttaccatgtataacccaatcataggacgagctgatcgacctaccaagtagatgactccaatctgtcctcaacaactcgacgacaaacaatgtggatactacgtcatgagattaattgaaagtttcatgatcgtagaagatccaatacaactgttgactcgcatgataggttctccacttcgtacactaataatgagataaatgttgggaattattttaccaggatct

SEQ ID NO: 401736 - DNA, 580 bp, Cannabis indica
cgacaaatatgtgccaatttacaccgtttacaccgaatttaatgaaactcgagaaaacatctttctcgcaaatgagcgcagggttgcattctgcaaacctgagccaatgagacacgcgagacacaaacgcgacccatcaatttcataaagacataacgcatacaactgaagagtgttggaaactaaaggacgagatacagagcctgatttctcgtggatattttggataatatgtgaagcgtcaaggaaacgaacaaaactgacttgttcagcccaacaacccaaataaccaaagattacaacctccccctattgagggcgaggatatattggttatctcgggagggccgcatctcgctggagaaagtagtaacgcccagaagagatatattaatgaaattaagaatgagcaatcgatgtttgctccgaaaccacaaaagaaagctaaaataaaagaacctcctattgtattcccagaggaagatataaaacacgtgaagtacccgttagttttatgccctaaataaaactccatttcaatgtaatctcttttattcaacatcaataaagaaacagaagt

SEQ ID NO: 401737 - DNA, 580 bp, Cannabis indica
tttcttttttgtgatttttttttatgagaaatttgttgaaaatagaaattttgaatattatttttcttaagaaattatgaatttaattattttaccaaacaatagtacattcttttttgtactaagaatttgtgatgtatatgctgtagatcgaatatatgatcaagtgcatatgtgtcaaaaaagattaatagaaactaacattatattgcaaaattccattatttttaattagtttttttatacggtaatccatgatttttaattagagttaatccattatttttaattagttactatttttaatttatttacatgtattatatgtttatatgattttagtcacaataaaaagttacttgtgaccaaaatataatatttagatataaattgtcactaatttacttttagtctcaacaagtattgtaattaaaaacaaatttaatcacaacaaattataatttttgggacaaaatacttttaaccacgaatttttattattcacaacatagaaatgatgatttataattaatcacaatttttttcattttttgttacaaattttgttgtaactaaaact

SEQ ID NO: 401738 - DNA, 743 bp, Cannabis indica
ttctaagcccatctagggttaaaactttttatcccattagagaagaagagtcctttaatattgtaaaagatatagcttcaaaagttggctcacctatcaatcttagtgaaatgaccagaagattgtcttataacatcatatctagggctgcctttggcaacaaaagcaatgatcatgatgaattcatatcaattatggaggaaattgttaaattgtctggagggtttgcatttggagatgtgtttccatctttgagttgtcttgattggtatactttaagtaaatttaattattataaactaagggcatcaagaatagtggaaagaatcatcaagttacatacagatcaagacaaggagatcaagtcatcaacaaagaaaagtggagaagaggaagacttggttgatgttcttttgaagtttcataagagtgaagatcatcataagttcacattaactagggacaatcttaaagccatcattttcgtaagctctatatacatcgtcaacttgttgtatatatagatattattatcaatttttgtgaaaattaattaacattcttaattggtgacaaaattttcagaacatatttggagcggggagtgacacatcagcaacaactatagactgggctatggcagaaatgatgagaaatccaagagtgatgaaaaaagctcaagatgaggttagacaagtctttgacgaaaaaggattagtcgatgaatcttcaatcaatgagat

SEQ ID NO: 401739 - DNA, 735 bp, Cannabis indica
aaaaaaaaaaagtacagaagcagattgctttattgtgtaagtcagcttttcattcttgagggaattaaaattgttgaggttgctatctttacattacttttaaattgatgcaaataatcaatatttggtccaaattacaatgcataaacaattaacatgtcctattttataattcttacttgcttgacattataagtccattgcccactaatgtattaccttttgatctcacagatacaagttgaatctattatcatttcataaattgggagattatataatgttaatggaccaatgtcaattacttttaagaaattacattattattattattttggctggaaaatgaccctaaaaattaagttaataattatctattttttaaaaaaaaattacgaaaattgtcaaatataataaattagttaataaacattataaaatatatttactacatattattgttttttaaaacatatataataattaatttaagttatataatttttctagtattgtatattattatattataacaaaaatgaaaaaaatatattaaatcattaaatatatgcaacaatatttgatatatcgtatcactaaaaattaaggggttttttcatttttacacttcaaaacagtttttttttgtatttttacgaaattctacataaaaacccatattacaactagcactgcaaccactttagaaacccaaaccgtaaatttaaagaaaaa

SEQ ID NO: 401740 - DNA, 533 bp, Cannabis indica
gaagagaaagaaataaagaaaccataaccatagaatcttattttgtgctactgccatttctgtttgagaaagaaaacagtgtttgaaaaggttgaattttgaaaagaaagagtggttgacgtgtgtgtagtaaattagggtttgatacattaccttatatatattatggtttggcttattagggtttgtcttcttgttgagctacctgtgattgtgtgggccaaaccactattgtgaagaagagagtcatagtttgactcttgttttgactgaaccatatattaagatagaaaaggaattgaccttcgattggagagagaaacttggtttctcttgggctgattctcttttgggccaaacctttgcagttcaattggtgtgacttggcttcttgtgatgctgaaggttgttgggctgaaaaaggttgcaattgttatttttttaataataccaattttgttgtggacgcacaacaaagtaaaaaaaattgaaaaataccacttttgtatattgtatttgttggaatttatttt

SEQ ID NO: 401741 - DNA, 866 bp, Cannabis indica
agagagagagagagtatatggtgctgttctaatttgtctgtgtgtgttgtgttgggtgtaatgtttattagggttaggataaaggtaagtattactgtattagaagcagcccaatattaaggcccatactaatttttttttttgatgttacagggtcggcccgggttgggtttattgggttgtaatttgcccaggccaattccgacccataactcacaggttgtagtttttttaaaccaaataaacttcggcccataattatatgggttgatcgacccattttcggtttgggttggccgggttagtcggcccaacgggttaaatgatcaaccctactatgaacgaccttgaatttacactatgtaacttgaattttctctgaacaaccataaacgaccactaaggtcgcacacggtcgcacaggtcgcataaggtcgcacatggtcgcactatatattcataccacgtgtgaccttattcatttagttaaatttgtaattctttttatactttttatatttatgttcttatcgtttatatattttttattcatttcacacattattattgtagatgcccaaaactatattaacaacagagcttccatgtatacctcgtgccattactactaatacagctgcaaaatctaaagttaccatcaaatccccgctaagtgtaataggccaaataaagaattggctcacaaagtatgacccggatgtttttaaacattactcccaattgggtcgtctcttgagatattgttggcaaagcaacgatatattgatagtgaggtaagctttatcattcaaatagatcataataattatatcatattatcatcataactaacaatgagaaaataa

SEQ ID NO: 401742 - DNA, 513 bp, Cannabis indica
aaaaaaaaaataatgaaaaatgaaaaataaactctagcatttctcggctaaacatataattaaatgcatgctggcacctacagctagtgatcaatttttgggccgagcctatacttgttttaagttgatttggatttttattcatagattcttttaagatttcaaacttgcaattttgacaaaacaaaaatgcatattcaactatagtttgacaatctaaaataaagggtcaagatgcaaaatgatcctaaatttaacaattaagttaataaatgtctcattttgtaaaaaaaattaacaaaatgtccattatgttaaaagtttgatgataaaattacaattataaccttgaataattaagtgtttggtatagttattttggacaatagtatatcgttttttatgtgcaattgtatattaaaaaaactgaaaggtaatatattagtttaagattgtagtatattattttaatgtgctatggtatataatgaacgaaagacggaaatttaaaaa

SEQ ID NO: 401743 - DNA, 617 bp, Cannabis indica
ttcgacaaggcaatgtaaaatgaatccaaaaaaatataggagagtttcattgcctgagagaaatggttgaagaaactagttggaaaaaaaatggatgagagactaattttgttgttgtttgggtttactttattttttaataaaatggacattaaccttcatcggtgtgagatttaaggccatttgttacaattttccttaaacctttttccattattatccctcacagagttcttgctcatatgttgagacaaaaataagaactcaatatacaaattatattattagcccacactaatccttgtgtgtgatggaagatttggaagatcactgtgtgagtccttcatcaccattttaagggatccttgaggtgtaaataattcctttcgtctttcatttcagatttaatatgtatacatgtggtgatcttgagaatgtggtacgataataattagattttttttttctagcgcgtaccagatttagtaccacaaaaccaacacaaaaatttaatacatctcacatctaatagaactaattaattttttcatttagtttgtatgagtaattagattttatgttgttatacataaaaaatatatgtatatatgaaaaat

SEQ ID NO: 401744 - DNA, 546 bp, Cannabis indica
tgtcccttttgttggcgtctttcgtcatgggctcaggtttcttgtacggggccagcgactgagttgtcatgtatacactttctatatcttcagtcagaatagtgaatgcagtgtacgtggcatgattctctcgggaagtctattcggactggtgaactttcctttcttcgcgttcccttgcttgtggttgttgctggaacgcttgccacttgagcttgaactatttgggtagttgggaagttgggcggaagttccagtggaaggagcctttgacttgcccggtttttgttcaccttccactcgttgaatggcttcttcgagcttgatgaagccttcgactcggtcaaggaaatcactcattgagtctaccggcccgttcttccttatatcgttccaaagttcaccgaggacttcgatgccccccagtatcgcggataactttccatccacggtttcccgtgaaactttgggtgcatccgtcatgaatctgctgatgtatgcctggagtggctcgcctggtcgttgcttaagtttgaccaagtctcc

SEQ ID NO: 401745 - DNA, 943 bp, Cannabis indica
gtctcaatatttaaagatttttttttataatttatatataattgtgtgtgttgtagttgtacttaaaactacgtataaaatttcaaaaaatcgtaaataatttaaactacaaaaaataagatttaaacaattatttactatacatattagagaaaatagttacacttgtaataattacttaaatcatatttttgcattgtaaatttagaattataaaaatttataagtgattttaaataattatagcatactagaaaacaaaaaaaaggctaaaaaactcttagatactaaatatcaaaacaacctttttaaaaggtgtacttgacacttaccgaaacatattatgaaatcacaattttcttcatttatatttaaacttttatttatattatgcacaataatatattgttgggtttttatttttttttttatttttacattttaaagtaggtgttttttcttttttttttttttttttttttttgttattttattagaatctacatagaatacacataacaaccaatgaagcaacataaatcgcaaccaaaattcacatatcaacttacatttaaatcaccggagtaactcaaactgtaaatttaaaaataatgtaaaaaatagtatatgaagtaatttttaaatattattttgtaaaaatatttatcttaaatgtgttgaaaggtggtgtatttaatgatttcaaattaattatatattgagatgtttatatcaatttacaataggaaaatagtatatggcaatagatttcttttaaaataaaatttacatttcagtatctataagtacaattttaagtaaacatttcataatgttattgtgcatatgtataatattgagtttgttttgctttagcatacatataactaacaaaggtggcgtttggtaacatttttttaatcagttttctatttttaaaagt

SEQ ID NO: 401746 - DNA, 687 bp, Cannabis indica
aataaataactaaaataataaaataaaaaatatttaaataatataaaattatttatgttaaacactaatttaatcattaatttaatacaaatattaattttctaaaatattaatataaattttctactaatttaaaaagaagaataattagtaaatttcactcctaaattttcgacaatactgatttatctctataaaatattcagcttgttaagaatttccttaaacttttacatctatagaaatttagtcattctgttaagttctgtcccattattcagtttaaatgacgacgtctttttgtaaattaacaactttgcctcctaaattttgacaactattaaattgtaccccctcaaaataaacatgaaaaacatttaacactttttttttaataaatcttaaaaaagtaatttagattttaagaaaaaaattattttgaatgattaaaaaaattaacaaaaaaaattaaaattttaaaattaattaagcgaattaaaaaattatttatttttttattaaaaaattcatttagatattaaaataatatattaaaaatttaattttataaaaatttaattttacgggaacaaactagagtatattttgtttttctcaaaaaaatgtaaatttgtttaagtaaacataaaaaaatttagtttactttataactttttttttaaaaaa

SEQ ID NO: 401747 - DNA, 645 bp, Cannabis indica
aaacggaattcctccactccgattaggttagttaaagaggttgataatagtagatttctagggttctattctagtagggttgttcatttgatcacatccaatatttttagacacatcagatccaatccaattttagattggatgttggatttctccaaccgatccaatccactactgtaggctcaaccaaaccaattcaataaatcattggattagatcggttccatccaatagatgaatcgctgcattggatcggatctatccaatacttttgatctaatatttttttagaccggattggatctatccaatattaattggattgattggatccatcaaatacaatccaagagtaaaacctgatttttcacctaaacggctaatatattagttcaaaatattataacccaatataaatccaaattaattgttacataaatccaacctaaattttaacataagtacaacacaaaaactaattagaatagaaaggaatatgataaaaaaaaaaagtgattatcatataattaaagaaacccacttagaagctaattagaatagaaaggcatatgatacatttacatatatttataatacaaaaaactaaagaaaaaactttgacactaattcattccaatttaatgt

SEQ ID NO: 401748 - DNA, 520 bp, Cannabis indica
tagctaaataaagttatatataacgagatttatagaatatgtatcacactagttagattaatatcttaattagtttggatcattaaggtcatactttattcgcttgtattgagatttgttctttttctaactttcgaaataattatttaaataacatgttgtgcatattttttcatgtgtaaataatatgatacctttctatgcttgctttcataatgagaaaaatagtttgcctaatcctcgtgaggacaaaaaaaaaatgggaattgagtgttattttttagactaaatcaatttacaaatcttattagtatatattagagaacattgtcccacatggattaaatataaaagtattgagccatatataagaacatgggctactccactcatcaccaattggttttgtgatggaactccatgattctcagcatggtatcagtagccatatctactagcgggtctttcgattccacaactccagatggttagccaaccgcacgagatccagatggtgcaa

SEQ ID NO: 401749 - DNA, 602 bp, Cannabis indica
caattgtcttcctaaaattgtccataagcatgccatctctaggaggacccccaattttatcatcatttgacaacaactcattaaagtcaccaagaaccaaccaaggagtattagaatcatttgacacaagactactaagaagattccaagtaatgattcgtaaatgagttttcggagctccgtaaaaaccagtgaaatgaaattgatgacaattatccaacgagactaaaacatcaaagtgattcattgaatatgaattgagagttacatcaatattagccatccataaaagcaacaaactgtttgaattattttaccaggatcttagatctactcacaagtatgttgatttaacaacctaaatataaacttctaaaacgatggaaaattaaacacataaaagtaagagaaaacttacattgggtgcagcggaatatatgtctcctcccactcagatctctaacccttgattcctttctgtcgcagagtataatcaagatctgagaccgaatgtccttctttgttgtctctgaattctacacagccttcaaacaaagaaagtagagagagagagagagggtggcggcttgaagagagttttt

SEQ ID NO: 401750 - DNA, 524 bp, Cannabis indica
tggtgggtggaggtagggtggggagtcaggatatggccaaatgaagaagaacgaaaaaaaattaaaaagaaaacgaataaaaaagaaaatacattgtttttttttttatgattttcaaataatttattttgtttttcaaaattattttaattaaaatataacttggaccaatgagatttcaacacgtggcattatttttaataagacggacccgttgaaataaggactaacagacttataagaagtctgatcttggtgactattattgctgtttttcgaggttaggacttatttgcatcaaaataaacttttttgaagacttttgttgcaattttccttaaaaataataaatagtatttttttcgtataatttatagtgttgtggttagaattataaaaaattaatattaaaataataccatcttagtgttgatttaacactaaatttaaattgaggctttttcatttttacactagtagtttttttttgatttttacagaattctacatagaaacttcaattg

SEQ ID NO: 401751 - DNA, 1293 bp, Cannabis indica
tttgttacacgtaagaccaactaagacttgttaacaaagaaaacttcttaaagttattctttttcagttctacatgcgtacacctggtagcacccccaagaatattcccaggcaaggtctatgaaacttagtgaattgtaagtgactaagagactgcaagtctgtgtgctcccttgggggtacctacaacgtacaatgcatcgaactagcatgaaaaacttatgcagagaaattttaacgctttgaataagctactaaacctgcctctaagtcaagtgcaggcatacttcagcttagcatgaaaaaagtaaatccagatccttacatgtcaaggacataagaagatagcgaggataatcatatgtccataataaaaggctttaaggctaaacaataatagtgttcaaaaaaagagtgcctatatgccaaaagcaagaacatgaaagccttgaggttgaatatgaataaaaaattgattcaaatgcataaggctaaggccccacaagagtcgtacagccagagaagaaccgggcagagttcctataggaaccacttaaggcagagttcctcgcaagttccaagccaaaaagtagagtttcttgcaggttccaagtcatagacaaaactctgggcaactgtacccaaggttactcgccagataatgtcattgtacaaggttgggtatcagcaaagtacaagtctcaagtgtaacaacttggacaaatgttgagtcttaagttgaacatttgactataatagactcactattaagtttcatatagagtttttaagcaaaccacccatgagactaaggttgtatatgcctataaggccatagcaagattcttgctgaggtcgaaagaggacagaaagctggccacccacttggaaccaaggcctaagccgaccaagtttcccaagctttgagagggtaggatagggtcccatgactcaaccaagaaccgtccaaggtcaccaaacccaagcatgaattggctagtttcttagggtgaaaccctaaagctggccaactcccctgattgaatcctagggtgggctaggtctcatacaagacctccaaggccggccaaggatagttttgaatcaaaatgtgtgttttttttaaaaaaaaaattcgaatgtgttcttcgtaatcttcatgactcaaagagtcaagaatcacaacaaaggccaaaatcaaaaattttctattaggaaatcacacattctagattctaaaactatcatgcggattaaaataccaaaaagattacaatctaacgtgagaatcaa

SEQ ID NO: 401752 - DNA, 563 bp, Cannabis indica
ttgaacataaagtcaaaattgtagaacaatctcatgcaacatggcctatgcgaccactgccacatgaagatggcggtgctctccaattttttgaagagcactgccacaagaagatggcagcgctcgccactcactaaataccaaagggaatttgtcaaaatatttttcttcaacacccaggagtgcaacacaagtgaaagagactatttctcaccaaggaacaagcctagccgaccactgccactctttaagccacatcaaatggggatgagattttttttaccaaaagtactttttcatcaccaacatgtcaaaaccatgtgagaaaatccaccaagtggtacagaaaccacttggccgaccactgccacctttttggcacaaatggtagtagtggtcggccacaacatagtatgaggagtttgtttggccaaagtgtagtgtatttccaacatccatagatcaaatacaagtgagaagagtcgcccaagggtccataaccctcagaagtgaccattgccatctttttagctaaaaagatggcagtgctctcttaaccaatt

SEQ ID NO: 401753 - DNA, 614 bp, Cannabis indica
agctcggatgaagtctacacacagcttcagacatcccgtacaaacttcgagggcaaatgttatcccaattttggcactctaatgtggcatcacacgctggtgactcgtggaaccgattctccatatctgcccaaaaaaggtgttccgagcagagcaccacatatacctgcacgaacaaggtcctcctaactgaacagtggacagtccgaacagcatatcaacacttagcatcttcagcatttacatcgtgaaggataagaacaatccctataagtctgggattgcatcatagagatatggcaagctatccaaatccctcaatcagtgtattctatacatttaatgtgtaatcttaccatttatagacattgtaaacaaatgggaaacaatccctcaagcataaagccctataaatagtgatctattctcactcggcaaagggtggaaaaaagttatctaagaaagcatattcagagatattattgtaaaagctctaagagaagaataactatgttctttgttcttaagtcaatcgcagtatattggtcggtggtgagttggacgattccctcggatactaccgtcggagtgacaggtggaaagtgccccattgt

SEQ ID NO: 401754 - DNA, 687 bp, Cannabis indica
ggttagtggctaagggttttactaaggtggaatgtatagactacactgaaatcttctcacctgtggtaaagtagaagacgataaggttgatgttatccttggcaacacatctggagtttgaagttgaatagcttaatgttaagactgcttttttaaatgggttcttagatgaagagatcatatgaagaaccattagatttcaggtggaagggaaagagttgaattagtttacaagcttaatagatctttgtatggtttgaaatagtcctaagacaatagattaaaagattcgatacgtatatacatcaaattgggttcaaacgatcagcatacaatcattgcctttactttaagaatctggagcaatctacatatgtgttcttattgcactatgtggatgataatctcatcatgagaaaagacaaatcagtaatcaaaagtattaaagccaagctcaaaagagaatttaagatgaaagagtttgggccaattcaaaagatacttggtaccaaagtctctcgaaactgagaggaaaggactattagtttgaagcagtccgagtacatcaagaagattatttagaagttcaacatggaagatgcaaagagtacatctgttcctttaggggttagtttattctatcaaaggaacaatgccctaacaatatgaaagagaaagaagagatga

SEQ ID NO: 401755 - DNA, 441 bp, Cannabis indica
atggctgtatatcagccttcttctgtgaagcctatgaccttggtggccttggccatgaaccgtagaatatagtccttcaagggttcatcttgtctttgctttatttcgacaagatcctccaatcaagaaggtatttatcttgaagtagagaattgaagatagaactctcaggagagttcttccccaagaattaaatcttcctagggccaacttgaaataccattgttgggctatttcagctagagttgctgaaaaaaaaaattggtattgcacatctctaaatacttgtaggagatttgtttggatctcaaagtatttcaggtgtattagagggtcttcttttcttgtgtacataatccaagctggcatcttgaatttgggcaagggcaaggcattgatgtatgtcgagaatggtgatcccatatgttgggttttatgccc

SEQ ID NO: 401756 - DNA, 715 bp, Cannabis indica
ttatattattttataacatgattctaatagttaacataagaattctattagtttattttaagtgaaatagaaaaataaaacaacaaaaaattaggtgaaagggggtgtataacatgattttagtatacaaaatagaattttttggacaaaatagttggccaaactgtcgtagtctgtttgggatgcgtagaacgcaaaataatacccaatttttttaaaaaaaatcgcctttaacggacaaccgaatcaaaagttattgacgtttaaagtttttgagaaactttatgcatagctttaatctttctcttattttatccattcattctgtacattcacttattctttcattgtatttgtctcaaaaaattatataaaaatgagtggtcacattgcataattgattaagaaataaaaaaaaattaatgtcatttcaaacttactaactgccctctacttaacttagttttctgcaccccataattttgctccttctcttattttttttcctattctttttctcatcatttcattacatataacttgttttttttattctattaaaatttcagtacaaagttcatttatgatgtcttgtacacacatcatcatttggtatgaagtatgtacctttataagatttcttttttatatttagattaccattaaataattaaagtaattttagtaataatattagtgtaatacatttgcttag

SEQ ID NO: 401757 - DNA, 920 bp, Cannabis indica
ttagtaacctattaaaattgattagaatatttacttttgttgattttaaaatttgattaattaaataggaaaagaaaaagaaactaacaaagtaatttttatttcggtcaccttcattggtgatggcgaaaaaatatattttttgcatattaaaataattatctttaaaagtagattacaattagtataatttttgaagtcaaataattattaatgaagtcagaaaaactttataaagttttgaaaaaattaaattaaattaaaattaagaaaagagggacatataaatgttatttcactatgaaaaaaataaaaagcaaataaaaaagcaagtcaaatagtgttagtaaagaattgagtaagagggtttgaaaaaaaaatagaagaagaagagagtcagtcggtggttaggaaaaaaaaaaagaaatgatctcggtatacgcatacaatattattaattaaaattttttatactttgcatttaaatattgatgtatatttctataaataatttagaaaatgcgtatgctgaggtaatattcttatgattatatatatcatttggcattatttaagcataattttcgttgttaacgtcttgggccaaagtgataaattaagcccttgctgattgatgacagtgttatttcctcaagtggaaattaccttcagtatggcttttttaaatgttttatgataaatatggcatagtttagtttggacattttttatggcttttttaaactctgggcatgttttatgggttttaaagcccatacatttggaatgtatgtttaaagagcccatactttattgtttgtagtttctgtaggttattttagtcattttatgttttcaaatttttgtatcaattttttttttttacataaccgttttttttttttttggattttgcatgt

SEQ ID NO: 401758 - DNA, 901 bp, Cannabis indica
atagtcggtggaggtggcaccagatcaaccacgtgaatgtgaaaacacgctcttccaaaagggctgaggaggagacttcaatttgtcctttttttgaatattcgcattattgaaggtgaaccaccattgcttattacacttatacttacttactcactgtactatcatactacgtcgttttgtatcctctaagtctaccaccacaacaactaccacgatctataatctactactacacttatctataattttcattacgtaatttcttttctttttttcaactgtacgtacggtccattcccatctgctacacttcatatctatttcacatctaattttttttccacttttctagtagtagttatttagagcattctcatcagatttctgttatattttttaaaatatattataaaaattttaatttagttttaattgagattatattttttttttaaagtaaatatcattttaaatcttgtattttataaaaataattgattgaaccatatattttattaattgacaaaataaatcttatattttttaaatagtacaaagaatcttaaaataatattttgttaaaataaaacttaataataattcaatacgataaaattagttatattttctacatttgttcgtgccaatagcaatcccaataaatgagctaaaatagctcaatctttaaattataaaaaaaatttacaaatttgagcttttaagtaaacgttaactattttacatattttttagttcaataaatagtgcttaaatgtagagataactattcattgagctaaatatattttaatatcattttctttaatttttctatatatgtgtaatattatatgaattattaatataaaatgaataaaatatattaaaaatataatat

SEQ ID NO: 401759 - DNA, 829 bp, Cannabis indica
aatttactttttaagattataatgttatacatatttaaaaattttagatatagaattaattatttactttaattatttttataaactattacatttgaatgataaattaatgtcttatcgcatatcttattttattgtccacaacaattgtaaaatttgagaaaaaatattttatatatgaattatctcatattaacaagatcaattaatagactatcatagagatttacatttttttaattaattaaaataaatctcaaattaaaaataaattataaagaccaagtttgtggaacctgaactaatttagtgggcctggattgagcatgtcattgtcggggttgtgggaactaaagaaacaactgcccgttgaaccatttaccttgttaaaatatatataccggtaaagcatatatcaatcattcaatataagtatccaacaaatttctctatcaggttgttgtctcctaccaaccagacaacaactcacccttaggttgagatcaaatgtggataagatcaacggtaatcgagatcattcagattttttctagtgtaaaactttctatctatttattatgcatatttttttttgtctaaagagcaataaatttttatttagatattatttattaatgcatgtattattttattgttcactattatactttatataatacaaccatcaatatatgtataaacaatgaacaatgtaagacttccactacgataatttcctactttaaatttttatagtataagaaatgttccatatagtattattaatttttttttaaaaaaaaaacaaatttattaatttaaaagttaa

SEQ ID NO: 401760 - DNA, 805 bp, Cannabis indica
cctattttccaaccttttgtgacagctagagtaagaacaactctaattgtttctggtttaacaaccgggctaaaggtttcattgaaatcaaatccactttgttgatggaaacctttagcaacaagccttgccttgtattgaaccgtgctgccatcagcattctcttttattctgaaaatccatttacatggaattgcatgtcaaccaggtggtaataaaacaagatcccatgttttatttttctttaaagctgtgttttcagtgttcatagcagcattccacttaggatcctcaagagctttcttaacagtggttggaaaaagagatgctaggaacactttaggttgtgaatacccgatttggctctagtttacataggatgttggttggtggcaggtgggatatctgtgttggtatgtgagatagagagagatggtgaggagacgagataatgaaggagtcacagtattgggagaagatgattgagactcagatgtagagttggacgacaggtgagtttgagtttgaggaagactcatatgtatgtgaaggtgctggtgtggtgtgatttggaatcacaagaggtgatgcagtggtgaagttaggtacattagatgtggttgtaggttcagctgcagaatgggacttgtaagggaatgcattctcattaaaaataacatccctagacatataaactcttccatctagtgataaacacttataacctttttgaatgaggctatatcctaaaaagtgaaagggatagacctataactcattttatttttgttgtaaggtctaaggt

SEQ ID NO: 401761 - DNA, 830 bp, Cannabis indica
agttttaagattattttgagttagggtttttgagattttgtggctgtgggattaaactggttagggattgtgttttaaacctaattttgaatgtgttgaagtttgagttgattgatattcatggctgtttgattttgaagttagaattttgttgatttaagagcttagacttggttctaatatggaaaaatgaattggagattgaattgatacgttttagtgctttggttatgttgtgtttatgatattacattgatctggagtagttggacaggtttggtttagttttggttcgagtttggaggagaaaacacttggttgcattcctgccagaaccggtcgaccggttggttctggtgtagcagaaccggtcgaccggtttgcttacaggggaaaattttcagtttttgttagggccgattttagagctcggggtaatttccgtgtctggtatagattgtttggaagttaatcttcactggttatggaaagtagggttattcccgaatttatggattaaggtatttattgaatgttattgtcgtgacataggacccgggatcgtcaagctttgtttattcacttaggctggcatgcacgcttaatctctggactgaggtaagaaaagtattaaatactgtataaggttaatgttttgattgttacagattcgattaagatcgaaatcttgttaaacgttgttgtgacttaatcctaatcgaggttaacgatatgtactggatgtgactcgattatgatcgagggaagtaataggaaacgattattatcgtttgactcgattatgatcgagggaaatattatgaaacgat

SEQ ID NO: 401762 - DNA, 757 bp, Cannabis indica
ctgaacggaggagtcattatattccgctgacacccaatgtaaggtttcttaaactttatatgtgtttaaatttcatacgttttgaaaagttcatatttagggtgtcaataaacatacttgtgagtagatctaagatcctagtaaaataaatttccaacaaccatcactgcctctattatgtatattaaataatatcttactacaccatgaacacatactatcaccaatacattatgtttacatttctataaacccaatgaaatatcggtccacgatcatttatgaaataaaccgttatcttattttcaccactaaattttcatatccttgggtggagcactaacatttctattaattatttaattattacttagcttaaacaatgcccataataatcgaaaaaaattacttcttaactcgtatcaagtttgaaatggactataactaaaggccaaagtaattatgaaagtttaatttataaacatgtcataattctcttaacttaacaaaataacatattctaagtaatcaattattttcacatggagtttactaatgataataaatgaatatatacatataacgtagtaaaaaataatatcaaaatatttttggttattagataaaattctttaaacagttccttaaatcataccttgaacacaatcagtcacggttattactatttaaactttaatcctcttaaataataccaaattcacttaaatttttggggaatttttataaatatgggaat

SEQ ID NO: 401763 - DNA, 680 bp, Cannabis indica
agagagtgaagctgtccagggggtgcaaaagagtgggttggtcctaagttggaaggccctgctccctgatccccaagtgggggatttcccaggttttggctagagctcagaaacagtcctgcggcatcagcatagttagttgggttgttgtggaaagagaagtcctgattcaggacttgtccacgtgggtgattgattggtataagattggttggttgataggttgttggggcacttggaagggacactatggctggtgagttataggataaaaggattgggaagtattccgaaggggccatggtttgggcgagttgtgcctctcaagacgttttcataaggaaggggtggtggttaggtagactcatccgaggctctcatatactcagtgcaggagggataagagtgtcctagacggccacaatagtagcaatgatcagggatatcctcgtatttcaattcgagccaggttggggaggctaaaccagggaaaactattgggataccccgaggtaaaggcttggttacatcaaacatgatacgtacccgcatataggagccccaagtttcaagcaaggagggctgatgaatttcaaggagggtgccagtgatttggcccagcaatttggcaagagagatagacctccgtgaaaaaggaatgttgtggacttgtacccaaa

SEQ ID NO: 401764 - DNA, 623 bp, Cannabis indica
tcttttcttagattgtatatatggggaccatttttctggtgaaaccgaacctttaagtcattccatatagcagaagcacactcatcatagagaatgcttgaagaaatttcctttgataccgagtttagaatccatgaaataacaatattattgtttctataccaagcattgtaaagattttgatcagagatagagggtttaggaatagaaccgtcaagaaatccgatcttgttctttacggatatcgcgagttgcatagctcggcaccaagagacataattgtcttgtcccgtgagaggttgagaaaccagagagtttcctgggttatcaccgtgatgaaggtagtatggacttgctggatcttcaagaggattcttgattggagcaacatggagaattcgatcagactgtccaggatcacttccaacatctgtaatggtggtttgaacttcggtttgatccccatctgtagccatcgcaagaagacaaagagcagaggaaacaatagagaaaagaaatcgaagtagagaatggaaaacacagcttcgccggagaagaaaacacagcttgctggaggaagacggatcggacgggaaaacttaaatttcccgctctgataccat

SEQ ID NO: 401765 - DNA, 801 bp, Cannabis indica
ccaaacaaggtagcaaatcagttcactactataaaaaccatctttaaagacagtttttaagacgcgttggttttgacaaaatttgttagctacactgtaaggttgaaaacaaccgacgccatatatacccctatggcgtcaactattatctagttactaacgccataggagtatatatgacgtcagtttctatctaataaccgacaccatatatacccgtaggaatcgaagccaattatatatttaaaaggtaaattaaatattatttaaattaattttaggattggccaaaatacctaatttcatttcatagaagtaattaaatattacacaaatattgtaaaattagtcaaagtattaacaagttaataaatctaactacaagctaacctaaaaaaataagctagggaagaaaaatttttaggcctttcaacatcaatcttccaagtcttcgtgaatcaccgccatcaaccgttttatctactgtcgttgtactggtaatataatcggtttgtggattgtattgctgctagtctccaaactgaaaaaaaagtaaaagtttatattagtttttatatatatattatttgttattatgataaatactataatcaataattaaaatttactgctttttgatcttgtatatgactgttggggtttgcacgtgcgatgatgtcagccatgtatttcgaaacataaaaactacattcttgatttttaggttgtcttggacaatttgcttgtgaaatttctggccacgacccaagatacgcatttgatgtccctatatattggtat

SEQ ID NO: 401766 - DNA, 537 bp, Cannabis indica
ccgtacgggatctcgccgcggcctagttgtggctcttggccgccagatagacgtctaaaaatacgtctctgtaatttctatatggccgcggcaagggtgtatctcgccgcggcgactggagcttcaaatgcaggggcttctgccttcatgatctagccgcgaccacactaatctagccgcagccagaattgcatcacgcctcaaattggtgtttttcttggctcggctcgtcttttactagacttttgcatcccgagacctctattattcctaagaacctgaaaacataaaaaacaagcgtaattccgtccaaaaatagtgaaaagcgaacataaaatcgatccaaaatataagcctaacaaattcccccaaactgaatctttactcgccctgagtaaagctaagactcaaactaaaaaaaacacaatgcagtcgataactaaactttccaacgattgaactgctaccaccacctgaacaaactcaagcaatcaataaccagaatttcaactcgataactctaagaactaacttgga

SEQ ID NO: 401767 - DNA, 570 bp, Cannabis indica
ccaacaatgtacatattgacccaaccggcttgtgtgtcgagttgctaagagttgttttggactggttgtatctgctgtgtattttcattttgtgtttaaatacgttaacgcagattttcgttaactatatttgagcataaattatgataaacttgcacagaaaacaaaagcagtaaaggaaaaataagaacacaaaaggtttttacgtggttttgcagttaaaattatgcatagtccacgagtcaatcttattagatttctgatacagttctagggctttttctcttatgaatttttcgtccctttttcagtgtaaactgccccaatttttaactacataggagggcagttaattacagatttgattgatattttacaacaataatcccctgaaattgtgggattttattacatcccacgtaaaataaatacgattaaatatttgaaattcacacagttgtgattggtccgcttttactaggtcaatgtaaacgtgtattaaatacgttgtaaatcgtattgttctgggacgtctcgctgggaacaaagcaacaataactctagtagcga

SEQ ID NO: 401768 - DNA, 802 bp, Cannabis indica
tctcagactctaactcccaagtatcctcgtcttctctgtgatttttccataaaaccttgactactaaaatttctctattccttaacacttttagctctcttgccaagattttgactggttgttctttataagtcacatcttcctgaagagggatagcctcatactcaataacatgtgacggatctagagtatacttcctaaacataggcacatggaacacataatgagcatgtcccaactgtcctggtaagtttaatcggtaagcgacctccccaatcctctcgataacctcaaagggtcctgttatcccaattttttcactttgacgtggcatcgcataatggtgacacgtggaatccacttggagtatctgctcagaggggatagtccaagcaggatgcctcgctggcatacccagagcaaggcaatcaacaatccgcgcagggcaaccaacacttagcgaattcagctttcgcattatgagtcatcaacgaaatccctataacttggggataagattacagggatatggcatacacacgatccccgatcagtgtattctgtatcaatcccacgatctttgtactcagcattaatcccacgatctttctgtttatatccattgtaatgagcggggaaagacttcctctccaaggatatagccctataaatagtgatgcatattcactgggcaaaaggtcacaaacagatcagtcgagactataccctaaagaaattatctaagaatacatgttcagagatactgttgtaagagctataaaaaaaggaatctttctccttg

SEQ ID NO: 401769 - DNA, 638 bp, Cannabis indica
gtacttggattgttgttagtttaccagctcatcaacatgctattggttgtaagtgggtttacaaaatcaaatataatgctgatgggtctgtggaaagatgcaaagctaggttggttgctaagggttacaaccaacaagaaggcattgattactctgagacttttgctcctgtcaccaagttggtcacagtcaagctaatattagctttagctgctgtttttggatggcacttacaccaacttgatgtgaataatgcttttctccatggagatttgcatgaggatgtgtatatgactctccctcaagggtatagtcctaagggggagctacctaccaatgctgtttgcaagcttcaaaagtctctttatggcttgaagcaagcatctaggcaatggtttgaaaagttttccaatgcccttgaagaggaaggctttacacattctgctacggatcattcctttttcatcaaacactcacaagttggtttcatagccttacttgtgtatgttgatgatgtgatcttagcaagtaacaacttgaaagaacttgaagccctcaagattagattagacagcaagttcaagctaaaggatatgggaaaattgaaatatttccttggtttagaagtagctagatct

SEQ ID NO: 401770 - DNA, 355 bp, Cannabis indica
tatctttcatacataacaaagatcgtaggttatagctagccaacaccaccagccacatacggtatgcaatactcatgttgccaaataaattaaatccatcagcaactaaccccaatcaaatgtttcttggatcgcttgcaaactcaggatgctttgcatcaaagtctttccaagaaagatcatcaaccgggtgtcacatcaccccataatcttttgatttaccaatatgatgtcatatcatgctctttgctctaatcctcgaactatataatcttttaagtcgacgtgtcaacggaaagtattgcatcactttgcgaggaatttttttccctttactgttctcagaactaaccca

SEQ ID NO: 401771 - DNA, 522 bp, Cannabis indica
tgtagcttgtagtactgtaccaaagaaaaataatatactgaagcttcttaaccattgtgctgtgattgttgtctactttatttctaacatttattactgtaggcaagtacttgtgctattttgaatcgatctcgctggcttcgcttttttttttttcaatcaacaactaaactttggtcacttttttcacactccgaactcatatctccaaatccatgtttggcttctcagaaaataactttcttaaattttcttttctgggttggggtcttttgagcttgttctcaaataaccattttctcttctcattttctttctacccaaacactattttttgaatttttcgttttgttagatctgggtaaacatgaaggaatcgacagtgggtactaagccgattgacaacatcagggctagagtggaggtggctagggctggggtcggttgtgaatgctgttactctagatgtggttggggtcgactgggtacacaggcaatcagaggaggtttagaagaagaaga

SEQ ID NO: 401772 - DNA, 1189 bp, Cannabis indica
gatctgaatagtcctctcagattacccattcgtttaaggttgaaatattgtgctgaactttaattgagtacccatagctcgatgtagactctcccagaatcttgatgtaaatttcggatctctatccgaaacaatggactttgggacaccatgaagatgaataatttctctgacatataactcagcatatcgatcaatggagaagttcgtccaaacaggtaggaagtgcgctaactttgtaaacctattcactgtgacccacatagagtcaaattgtcccgtggttctaggcaaacctaccacgaagtccatagcaatatcttcccatttccactttggtatgttcaatggctgcagcaaccctacaggcgtctgatgttcagcctttgcttgctgacaggtaagacacttagcaatatactcagcaatgtcattgttcatgcctggcccccagaacatggcctttagatcttgatacatcttcgttgacctttgatgaacttagtaaggagtcgtatgagactcatccattatatctcttttaataccatcatccataggcacacaaacacgattctcgaattacaacattcctgtttcatatactaaaaagtcacgagccttcccagtcgaaaccctatctcgagttttcaccaactctggatcttgcatttgcgcttctttgattcgctaaaaaagagtagatttcagggtaatattagccaactgccccacaaccaactcaattttagatcgggtcatctcatttgctagatgctgggagattcgtttcacagtatttatctgactctgtccctttctgctgaaggcatcagcaaccacgttggctttacgagggtgataaaggatctcacagtcataatccttcaccaactctagccaacgtctctgttctttacccaccgctgtcacaggtgctggtggtaacacttgatcagcagggccagccagtgccggttgccttaatcgtcgcaactcttcttcttgacgaagtataatacctcgcatttcttgaaacatctgctgccaatcagcaggagttagcatggcaaacccccttattatcccttagattctgcgaaggtggaggcggtgccgatggattggtttggtcaaccctaggctctacttgctccccctatggtctagatgattgcggagggtccat

SEQ ID NO: 401773 - DNA, 629 bp, Cannabis indica
ttaggttagttttgtgcggcattatcctctgtcaccctagctgcggctgcctcccgttccaacttagcgttttgttggtttgcctcctctagacatcgctggagttgacaattttcagactcgaccaacggtatgtatctcatagggtcataagcaccatcacccatgggtgtagaaccgccaacattcgtgctgggttccacattcccagtttttgggttttggtctccatcatgctgactcctccttgagcatgtggattgtgtcgaacgtgttgttcgtgaattgggtggcctccgtgagcccatcggctcttttccaagatggtgagtagtcccttcaggatgagtattatcgttttccccattatcagccataaagaaaaaatttcttcttttgttaggagggattttttttgagcttttatcacgtaggctctcaatgaaagcaccaaactgttaacgcagattttcgtttacgattatgagcctatttttgtaatagatttttgcacagaaagtataaatgatctaagaaaaaataattgatacaaaaagaacaccaggtttttacgtgattttgcagttaattctgcatagtccacgagtgtaatatcccaaaaattttat

SEQ ID NO: 401774 - DNA, 717 bp, Cannabis indica
ctcaacaccatttgtgtctccttttattacctgcataatctattatacaacccaaattccatattgttatcagttaacttatatatatgctttcacataaatataaaaaacatgtattgatgaactttatatttgtttagttatagttaagatttttttagtactgaatgaatatttcataaatttttaataattttgagaagggaaaatatagcaaatggccccaaaatcataggactatatgtcctcatttcaaaaaattatagcaaatggccctaaatcataggactatgttagtaaatgtcctcatttcaaaacttgtagagaaatgacccttttaaactatttattatttatatttccttttgtcacataaaataaatcattaattttttttttttcatttttttagaattagaagcaaattatttaaagattatggtatatctatattagttttgttaaaatcttttttatttaaaagttatgtcgatttttttaattttttataagttgttgtgggttgttggtatatagattttgttatacggtatatttctattttgttgtatggtatattattattctttagattgatattcatttttttattttgatatgtataatagtggtatataattttattaacataataaaaatatttaatttatgtatataatttattgacatgctacatatattttaattattagtttt

SEQ ID NO: 401775 - DNA, 1482 bp, Cannabis indica
tttaatttttacctctattttcaaattctactaagatatacttacttttatagataatatccccattaaaccccttaagttaatacaaattatatgctagacttaaatagagagtaatgctatattgagcaacctactcaaaaaaaagtgggtataatttaaaaaaaatataatatgagggtataagaggtatttttcaacttatctcttcaattataataaggaaaattttatttacacccccaaaaatttctaaagactaccccaatttaataatttttattttatataaaatttatatctttaattattacaaagttttttttttaacttttttcttttactaattcatattcttaaaaaatatatctatcaaataaaattaaattatattttaaataaacaataggaaaaaaaaattaaaataaaaaattatatagaaattttcttaaaaaaaaaaataaaaaaaatatatgagttagaaaaaattatgaaaataaaataaaaataagtattgaaattaacataaaataatgtgaagaaaaaaatttaaaaaaatattaagagtactttttaaaaattatttaagtttatatttttttttaataatggggtgtatttataaatttatagggtgtaaatagaactccccttataataatgttttagaataaggtttttagttttacccttcatactgaaattgtcaatttttttactttttttttttattgtgggacagattttttttttcaaaaataatgtgtaaattttatattgcgtactgtgttcagttacgacagttgttccacggttatttttaattgttccactattgttttaattgttctatttattgttttacggttaatttataaaaaaacagtatttttataaaaaattctgtataacagtaaaattataaacttttacctaacatttaatattttttgtaaaaaccccccttagaatatttataagtaattttttataaaatttggtgggactactcaatgtatacgtgaaatatgtaacaataattttaacaattggatcattattaaatttttataattaactaaaaaattaatacattaccaaactatatacttttcatttcttattatgttttatttcttataaaatactaattaagattactttatttaaaaaattaatttaattataatttctaattaatttttactattaattattaaataaagttctttttgtaattaatattttttttttgcattcaaattattaatatatttacaataaaaatccctaataatttaaaaaatttagacatatgattatcgaattgaagtgccaatatcatgtgaaaattattaatgagaacacgtttttttttttaaacaagtagcatttagtttctgatgttaagaatattaggttttaaaataaaataaaataaatgtaatgcatctgaacccttcacgtgtccatatttatgag

SEQ ID NO: 401776 - DNA, 674 bp, Cannabis indica
ttgtgattaatgaaaatttacttttctctagataaaaaaaacaataaaataaaattacacatgtatgtaaggaaatatttaaattatttatttggcattgtaaattttcaaaatattcttaatagtttataatgtcaataaaaataaaattccaacaatttattttacacgtatatttaaaataaataatatcatgaataagagactttcgaagtatgcatccagtacttatattgtgcgtatatttttcataatttattaaaaatatgtgtatttattcttaaataattcaattataccgacacatggaaaaaaaaaattaaaattataactattttaagtgttaaaaattcgatagtggtgcgccaatcacacttatttatttttaacttattttaactatttagtggtagccataaataactttattatatagttttgatagtggaataaatggtgtgatttataaaataaaaatacttatttatttatttatttgagaaatttcctatatttttataaaagagtatgttgtaattactaatcctagacaaaaatttagcccgaaagtatcctaaatatcattaattaattatgagtaaattacactctatatcctttttatattggcctcttttatttttaccttcttttttaaaatctatcatttgtac

SEQ ID NO: 401777 - DNA, 568 bp, Cannabis indica
cttaattctgagatggttaggttatggctaaaatgtattattcatgttcttcgacttgtttgttaaagttgaccaagtggatcttcccaatacttacatcttgggaacatggtagtacaattgagtaggaacgctaatcatagatatggaatatatagcttttataacttttaaaagtgaaacaatgattttctttaagcttggcttaacacgataaatgattgagcgctcattttagtaattatattagcttattgaatatcatttacaagtagctaaagtgttttaaggataaaatacattgaacggtagaatgataaatttgtccctactcgatgtagatcatctatagatgatgtttgactatttggattgaaacaatgggtaatttaaatcgtatttatttttttggtaatagagcgctttctgtaattaggagtacaattttgaatctatagtggagtcaggaggaattaataagttaggaaattttagatctacttattggaagcttgattacatagagtcatggtccccgcactaattgagataatattattttgtagtc

SEQ ID NO: 401778 - DNA, 506 bp, Cannabis indica
agagagagagagagagctatacactgtgtaaaaccagaaattaaattgggagagagaggaaaaagattacctagaattgttgtaactggaatctccattggtagatataaaatcattgatcttcaaaatagtggatgaacgagctgatctaaggcgagctcgaagaggaagttgttggatcaactccaaaagtagaaataagacaaccttctcaaaggtcctcatagtcgaaaactatggaggtctgaccggtatagtcaatctcatgacacctaaaagaaccagactgaggacccataataaaatagagagaagagaccacctttcgtagatagagatcgacctagggatcgacgaaggcagctcagagcatcacacagaggctcgaaggaaaaacttttacgatttcaagctcgcatcttgcacggagagaaaaagggctcactacaaaaatcttacttttagtcacaacaaaacttgtgactaaaagtgaaaaaattgtgact

SEQ ID NO: 401779 - DNA, 615 bp, Cannabis indica
tcatcacaaactgccattgttattacataaacaaaaaaaaaacaaaaatacagttaactgtagattacaaagaaaaccaaaaagaaattaataagaaaaaagaaaaccaaaaagtttaaaaaaaaaaaaaaaaaaaaaaaaaaaaactaacaagcatcaactaacaacttataatacaaagtggcattcattcaaacatccagtctttacaaaaaaaatacaactactttaactaagtaacaagtctttaaaaaaaaaatactaataaactatataacatcgtctttatatatcaaatacaaaaaaaaaaaaaaaaagaaaaaaaaaccagtttcctgtaaacatagaaacataaataaaaaaaaaatgtaattattataaacatctatcaattcatctgaaatcatttctctttgccctttccctttgcaatatccttccctttgacctttgccttatcacttgcattatcctttgatttcttcacctttttcaacacttcatcatcagttatataaccaccaatttgtttcctcctagcatgaataaacaaactgacagcaagatcatctctatatactgctaccaaatctgacatcttagatggaatgtcat

SEQ ID NO: 401780 - DNA, 895 bp, Cannabis indica
gttagcttgggattgcaagtcaaggtttggtgattcaaactttaaacgtattttccgatcaccttcggcgtccgtttgacgagacgttttcaccactaaactcagctcgtcgaggagaacaacctacactaaaccattttgcctggttcgctactttttctagtgacatttttgtagctccacccctttccggcgacattgtgtatcgttttgacaaacggttggcatgggtgtgatctactcgtcgaggtggtcgttttgatatacactactcctattttcggtgacgtttccggtacaacaatttttaccgccaccaattgttaatgtgcaccgcttaggtgaggtttcggaactccaaattttaaatatagtcatattatatgttgttggactcggttttgattgtagaatgcgataatgataattatttaaccatttggtggtatagatgagcgtaatatgaaagattggactaaacaattagagctcgggacttaagagcttaagatcgtcttttggaaaaaatttaacgactcgggagaggtagggactcaacttgattattggacttgatttttatatgtgttgtataacattggacatattccaatttttatgatttacaaattgtttgaaaaattgaaaacttaatctgtatatttttctggactgttctggggcactgagtggcaaatatatttttgtacaaatatttatgcagattatgatttatgggtttattcaaaatacagttgttacgttgccgaattttttttagaaaataaaaaggaatatgttcttttgttattcttattacttacctgctttggttatactgatgagagccatgttggtcatgttcggtgcatattgttgtttcacgacctagtct

SEQ ID NO: 401781 - DNA, 587 bp, Cannabis indica
aagctaagcggtctttacaggttaaccttagttgtgtaaaatcccagtattgtgactaggattaccagcacctggtcaggagcacccggggattcagaatctctgctattgcgggacaactaggtaagatagtaattaacacgtagagttatgcacggtggcgcttatattggaagtggtatatgtgagtaaatagtaaccgggattagggttattaccctaacatgagcagtttaatagcctagggttattacctagtgatatatgttgtgtaaatgctatgccatgttgaatatatgaatatattgagagtaagggttatgtgttcaaggcataaccaagttggactcggtaatcagaatcgagattaaccgttctaaggccttactgtatttagacgtgtgagcgccacgtgtaggtctacgccacgtagacataaatagtcatgtgagcgtaacatgcaggtctgtgtcacacagacgtatgagaatggtattactattgatatagtatgataagtatattattgatattttatactgtcatgctaggcttggcttacgggtgctctactgtgcaggaaaggg

SEQ ID NO: 401782 - DNA, 900 bp, Cannabis indica
gctgtacatatatctagcaatttctgaacacgctctaactgccgccctcgtaagaggggaagggaagcaacaatagcctatgtactacatcagtaagctcttcgtggatgccaaaacacgctacccagaaattgagaagttggttacgctcttatttagcatcgcaaaaattgaagccatactttcatgcaaatttgattgtggtgttgaccaaccaccctttgagacaagtggtacacaagcccgaaaccttgagattcctgcttaaatggtctatagagttaagtcaatttgacatatcctacaccctgagagtgtctatcaacaagcaagttattgcagattttgtagtagaattcacctatcccgtagacggggaggaccaatggcaagaagtcggcgaagagtcaaagagtgaagctaaagacgagtccattcgggaattgcatgtcgacggagcctagaacgacagtggggcaggtgctggggttataatgataacacctaggggaatccgaatgcattgtccaataaggtttggttttaaggcctccaacaacaaggccaagtatgaagcgatgctagatggattatgacacgccaaggaactgaagtgttggaaatattttaccaggatctaaatttactaacaagtatggttcattatcatcctaatatgaatttctaaaatactgaaataaacacatagggtttaagaaaaccttacattgattgcaatggaaatcatgactcctttctttcagatctctagctcttgattcctttctgtagtagagcattatcaagatctgaacctggatctctttctcttcttcttgagtccgattctccttcttgttgattggattctaaacagtcttccacactatgattgagata

SEQ ID NO: 401783 - DNA, 1263 bp, Cannabis indica
ggttcaggtatgttgatcgacttgcttggagtatgatcgatgatctcgggccctatgtcataacaatgataaaccaataagtgtttatcccaaaacgttgcttaacaattacaaaggacaacctaaggttttctaccaaatcccgtagttcaaatacattaaaaaaacttatatctaaaacatataccatatggtatagctcgtcgtaagcttcaaaatggtatataaaacatccaaaacagacacctgagtgaaaagttatggcaaaaatacaattcttgagttctcgaggatgccccagacggtaaaccggttggccagaaccagttgatcggtttccaaccgattgactggttggtcaggggcaaaaaatgtgactttccaagtttacccactcaccgaaatgctactggaacctgtccaaactacccaaaacttcatagggcacacatataccatacatactaccatatttacataataaaaattaaaatcgaacccttaattggcaaactccactagtgttcaaatttaatctataaaaagttccaaacttattttctaacccaaaattacctcaagttcagcaaggaaatatcagaattagtcctattactaccagagaacaatcctatagggtcagaacctccataattattctaattcacaaaactattatataaaaccaattttattcgacttaaaacgaaatcaattcttaccttaagctctccctcttcaatgattcgctatcttgctactaccgaagcttgaatcgctaggtttcatgttgaaaatcggaaaaaaaaaaaggttggatatagaaaggtaagggtttcatcaaaaaagagaggacaagggtttcgtttgtaagttttctgtttataaacgtataacatataatatataatataaacttattagtaaattgataagttttataaaaagaaaaagtaatattattataataatataaaatttattatttataattatcttattatttttagccactaagaaatttatacttttagggcgctaagtcaaattatacatactcataattacctcagtacctatattatcaacttatcataatattctcgtcaaatttactaattaaacctgttatgacatttctggctcccgatcgagtttctaaggtcgccaaatctaaaaatatttttattctacatatagctcatattacattcacacatgctgtataaatctccgtaatttataaattacgtttatttactc

SEQ ID NO: 401784 - DNA, 594 bp, Cannabis indica
gttgagtgtctatttgtttttttttttagtttgattttgagctgtcttttaaatgatgttttgcattgctttgagttccttgtgacattggctttatttatttaattttttttttgtggaatattcttttttattcaattttaagtcttaaactttttttttccatttgtaatattagctgttatttctatgtaaaatttgtgcaattttatttcggtctaacttttactgagttttgtcccttagtaatcacattaataaaaatttcatctttcattaaaaaaaaaaaaaaaaaatgactaaagggtaccagtggtgcctagtaccctcctatgtgtcaatatcgctattggtccaactaagtatcgggtcccatataatttaatataataatttttagggagtatcgctagtcaatcgcaacgcaacatgtcgagaaagtgctagacaccaccactagtgcctaatctaaaaaaaaaagtagagaatacaagattcgaatagataattaatagggaaatttgaatttccatacttacaaaatcccattactttttttcctaaatacatacttactaaaattggtaatatatg

SEQ ID NO: 401785 - DNA, 609 bp, Cannabis indica
acatataggaataccaaggtatcgaaatgggagggtactccttgtgaagtttgaagcctcaatgattctattcacttctaattcttgcattcctgcacagtatattgctgatttttgctcatttggttgcaaaccagatgtggctgaaaataacttcagccctttaagaagcagcagaatagagatgaaatctccatggcaaaaaactaacaaatcatcggcaaagcacaagtgattcaatcgtaaagatgtacacctgtcatgatatttaaaccctggccaatctcctacccttgtgaagattctggataagtattccattcctaacacaaagagaaggggagacatcgggtcaccttgtcttaaccctctttttgcattaaagaaaccacacatagagccattcaatagtagagagaatttgggagtgcaaatacattccataatgagcttaatgaactggctagggaatcccaatgcagtcatcatttcttccaagaattcccattcaatagtgtcataggccttccttaaatcaatttttatcatacaacttggtctacaatttttcctcccatagaacctcaccaagtcttgacaaaccaacac

SEQ ID NO: 401786 - DNA, 730 bp, Cannabis indica
aacctatatacgtataagttttgagaaagcctaaaaaagttaatgagattaaacctttttcattatcatcatatcactcatagaattcttgctcatgtattgagacaaaaataagaactcaatgtacaatttatcttattagcccacactaattcttgtgtgtggtagaaggttcagaagatcacagtgtgtgttattcatcaccatcccgaggatacaacttacaaaaagaaataatgataccctgatttgcttcgagagataaattattctttttgactatttatttcagatttaatatacatacatgtagtaactatttatttcagatttaatatacatacatgtggtgatcttgaggatgtggtacgatgatatcataaattattttttgctgcgtacctgatttggtaccacaaaaccaacagattagaagaaggagaagaaagaattgctttaccaacttcttaccattgcctactgccacaaattcttgactagaataagtcacagctaaatcaagactttccatattaaaaacaatatgattggtagcaccagtgtcggcataccaccctccatcatctccaaagtttgaaatggattgagtaacataagcttgaggatcataatcaaggacttgttcagggatgttaaaattagacctcactgtaacctttattattacagttttacagatgaagagaaaaaatacaaataaatacaacca

SEQ ID NO: 401787 - DNA, 664 bp, Cannabis indica
cccaaatgatgagaaggatgaattggcgagagttctttttaatagctctctttagtacataactcgggaaaaagttagaaagatcatgtttattcactttgatctaatgcaatttgcaggacaatttatatttcctttgacattcagtagtatacaaattataatcttttagatctggtgtaatgtgttatgctcataattttacaaacaattgttttgagcataaatatgggtattggacatgaatacttatattttttgtagtgaaattttatatatggacaatgtttgatcttattaattaaaaaattataatgtttagtttaaaattttcatgtgattatatagtttttcttttttataatatatattttttaaataaatagtaattctttttaatacatatcaattttttaaaaaaatatatgtataagttgaatatatttaatttaatttattaatcatgttttaaaaataatagtatttttgttcaaaattaatttattccattccatttcattatatagtcaaccaaacataagaatatgtattcaattattcattccataaatctaaccaaacaacctaatcctattcctattcttatttcattccattaccattcatattcctattccattgttttcattacctccaaccaaac

SEQ ID NO: 401788 - DNA, 1151 bp, Cannabis indica
aaaatagagaaaattgtgtaaaacaataaagttgaaacttcagactatgttttgattaaattttggaaaaagtcaaaacataaaagttctatatctctcctttatctttttggaacatcttcaatcgttcaattctgagcaatatcgaaagagttatggccaaaatacgatcagtcgacaaagtagaaaactcactgcccaaataaacgggggtcatgcctaggcatgaaaatctcatgccgcggccggccccttctaatcctaagcagaataggttttttcagcattttttatctttttttttatcattttttggctataaaataagtgaacttcaatagttttcaagaagcaattaaagaagacgaaaattggagataaaaatcaatcgcgaaggttttttcaacggggtattcaacattcttttcttctttattctcttatcttttctaaaattaatatgtgtgaatttgctacaatgaataagaatagctaaacagttattcagggtttaaatggagattgcttgatattgatttgtggttttaatatgatttaatttccaattttgatgtattttatttcattcatacttaattacttttaattgtctgatcaccaattaactgtttatgattttgatgcgagatcttagaagtgagtatcaattatgctatagtgaaatagaactaaatttcgatataggacgagagtacctacatggtttatatagcttataggatttctgtgtttaatgcctattaaatgtttaatttatcacaagagtagaaaatttgtatgtaattgtgatttatatatctgagaagactataaattactttagtaaacctgctattgcatagaaattggtaataggaagataatcatattaaaccataatcaatagatgcaattggaattaaaagccctaacttttattcattgctaattcctttgttaatttacatgcttcttactttcactgttttaattgtttcctagttttaattttctctcaaattttatttagccaagtagaagttaaaatttaattttaacgtatttaacaacaatcctcgtgggatcaacctcactaacgtttttcatctgaatcggtgttgttgaataaagctagacgctgtacgacattt

SEQ ID NO: 401789 - DNA, 734 bp, Cannabis indica
aaaaaaaaagctaataagttgcatttaattttatcattttctttgaaaaatatatgttttacatataaaaattattattttgaaaagttagacaccacggtttaagttttaatctcaaacaattattaatatagttagaatttttttaaaaaaaaaaaattgtaaaaaagagataaagataaaaaaagaaaattaattaaaataaagcaaatagaagattaagagaaggtattgactcctattttataccgtgttatagatttgaaattcttgcacgttatatttgtaaagtgaaaagagcaacggtaattctgtaaattagataaaaatattgtttgtaaatgtaattttcccaatgtttttttcttggccacaatttaatatgactactcagatttcctgtaaaccaatgcaggatggatagcgttcgaagagaagatctaaagctttggcggtctaggagcgtataattctgaacattttttgcatggctgctccggtgggggagagagtagctttggttgctctacggtcagttatggtccgagttcggcaagcagcggagaggtctggtcgaacggcggaagaggttcgggttgtggctgtttccaaaaccaagcccctttctctcatccgtcaggtgtatgactccggccatagatgctttggtgaaaactacgttcaggagattctcgagaaagctcctcaggtctccctctacaaatatatatata

SEQ ID NO: 401790 - DNA, 718 bp, Cannabis indica
ttttttttatgtataaatagatttaattaattcttcttatatgaactataattatattttattaagtgataattaagttataaaattatattaaatttaaaattttgacgtatataatgtgagtagctattaatttttttattttttaattcttaataataaaagaaaaataaattaatatttattttgaactcaataaataataattattaattaatttaatatacatatatttatataaagtcagttttaaatatatattttttgcaaaaattaaattagattatagaattttagtaattggataaattttatttttgtgtgattaaatttatatataaaaaatagaattaggggaaaaacatataacaattgataaatctataggaaactcatcaaatgtaaaattattgtcatctatgcatctcaattgtcactatatttaaagttatcatcaccgtatctcacttgtaatcgttactatcttgaaaaaaatataactattgatatgttgagattttatgccctaaataaaatctatttcaatataatatgatttgttatcaatagaagattaaaagtcatttatgtttacatgtagttttcatgtttatggtttaatgtatacaatttttgttaagtccagaacatatagttatttacaattacagtgatgtcaacacaatggaaggtacttgtgattatatgcttcaaaaga

SEQ ID NO: 401791 - DNA, 1225 bp, Cannabis indica
aatactacgtaggcttaatgagtacagtcgaagttttttattttggcattgtagcaaataaaatatgaatgatcacctatttattcaaacgtaggctagctggagggtaatcaagagcacacaatattatgtattaagtaggcaattggcaacatcaagtggttttctgattcacttatttatttaattgctattatttcactctttatattttgacgagataacctcatcctatgacttccttattatctaaagaatacaaaatcatcgttttcaaaaaaaaaaaaaaaacggatacaaaatacattatatacatataaataaattattaggtaggccatcactttttgtagacatttcttattttttgtcggtatatgaaaaaaatacataaactaatttttgttatatgacgttgtacattataattttatacatatgatatcctgcgaaaatatgatttgaacttttttttttttatcataataaatttgaaaattctcaaaaataactaaaaatgattactaaaactataatataccgtcatatacacaaattaggataaaattttattagatattaaaaataaaaaatgctcctacagtaataggaaatgtgatgcgctaagcagctccgtgtaaatatatacaaaaattaatatataaaaacttgggttcttcgtcatattatatatatggtgtttctataatggatttgtttaaaaagtgtctatcctctatttatttcgatatttaatagtttttttaatttttttaatcgtgtacgttatagttatttaaaatatattttataaaattttaaaaatttaaaaataatttacaatataaaaaaaatattcaaataatttatttgagtaactccaataactttttaaaacctgttattggagtgttgaattgaatttgaattttttaaaattttgtaaatatcttaaataattatgaaaaattctacaatgcacccctttaaaatagatatattgatgcacccttatttattttagcacccgaaataattttttagtcaaattttttctcatggtcatgtacgttatagttatttaagacatcctgcaaaattttaagaaatttggaaaagtttaacacgccgaaaaatacgttcaaacagtgtgttacacgcgtgactattttattttatacgcgtgtaaaataaactgtttgaatattattttctatattgtaaa

SEQ ID NO: 401792 - DNA, 425 bp, Cannabis indica
cttcattcttgcatcaatttgaattcagagaggaacatatatatgagttgagcatctacaatcttcaatataatttaggggaattactccatatactatttttttaatttttttttttcaaatttacggtttgtatttctgaaatggttgcagcgctagttgcaatagagatttctatacgattttttgttgcaatttaggttgcagccagtggcgaaaccagacaaagacccgaggaggggccaaataggaaggtcaagcgaattgtatttttacttatttttttttagaaaacaataacaaaattaggctatttaaaaattttataaccttgaactattacaatgatcgtatcgtacctgttgaccgaggttttcggcaaccaataaaatattataagattagagagctgtaagaaaattaga

SEQ ID NO: 401793 - DNA, 973 bp, Cannabis indica
atttgatgaacataccactacaataacataatgtagaattatttatagggaaaaaaatgtgttattaaaaagttggaacaaagaaaaatgaatcactcggcctggtttataactgtttaggcctttaggaacatcaataaattagaatggtataaaataataattcaattgggatatcacttttgtccctcttggtaggacatttttattttcgatatgtacaaacttaaaaaaaattatattatcctataataattggaccaagttgattagatattagtttatacattgtaggattttactactttaaccctacaccaacaaaagacaacaatatcagtatcaaggtcaaaaatgacctttcctagtctaagtaaactcttagactaaacggcaccgttcaaaaccccacgacaccaaactcagtgtcgttttgaaccttaggtttaaagactctgttcgaagagtctagaaaccctagcctctcaaacacaacactcggcctcccaaaactcgaaaccctagcagagcaagttctctctgagaacttgctcgattctaagcctgaaacccagatccacactcacacacaaacacaaactagattagatgagtgaaaaatgaaaaataaggagagaaaacaccagaatttgtttcagagttcacccaaatctgggctacgtctctgtcaagctcttctcagagatagaagcttgatatccactattagaaggttgatttacaaactttggagcttcctgtcacagaaatcgaccaggtaaactcgatttctttctttacactttatgtttttgttgttttctttctgtttgttctcgatctaactctctgctttgttttctttgtgcatgaacttcctccttcgagcttctcaccatgagatctgggttctcatgttttggatcttggagcagaagactaaatctagggtttatctcttctctctctctct

SEQ ID NO: 401794 - DNA, 654 bp, Cannabis indica
ctccaccattggcagttcctcctgctgctgcatcagaccctgccaccactccaaccggaccttctaatcgaactcgagcccaacaagcctctgctgagaaggttcttcgagcttctcgaagtcgttataaggcagtccctccagccaagaagaaacttaagtccaatcctccctcggtttcttcaagttcagaagaagaagatccaatggaagtctcctcagacaaattagtttctctccattcagagaaggaaaatccagaggacatgggagattcgtctgacagtgaggacacagaactcgagccagagcctcaattgacaaaatctgcttctgcagcaaaggcttctgctgctgccaaaggcaagcagcctatggaagagccttcttctggtaatgttccttcaactctttctcactgccctagattttattatcgtgacaatgaacgtgactggaatttatatgcaacccgtaagtttgaatgtgtgaggaactatgatttgcatgcacatcgggtttatgggattgtaaagtttattcaatttcatcaatgggaaaacactctcactggtttcaatggattcattgcaaacattgttaaggatttctatgctaatctcactgatgattttcttgatgagaattctagac

SEQ ID NO: 401795 - DNA, 635 bp, Cannabis indica
taaaagtaaattagtgacaacttgtatttgaaaattatattttagtcacaactagcaaatcactattgtccttactaattataggaaatgtcttaatttttttttctgattttgaattttttttaaatatttatattattaatattaaatggactaataaaattctaccacatgtacacttatgtacactactgtggcactccactttagtacttaacatactaaagtggacaaaaagactatagagcaaaatgattgttgggtagcaggaagtatagccataatttttcgagtaaaggggtttaaccataacaaacataaaagtataagaaattaatttagccgcaaattcccctttttaatataaccacacgtttatcttttgccataaaatattttgttgtagaaataccattttgaacaaagtttgcagtctctctttattatcttggggtcttttcataaatatggaatactttaatagagttttcttttatattgtataaataaataatgtaaaaagatatgagattaaaaaatagagtaaattgcagcgaaatttttgttagcatttagccatttccatcaaaatttttgttagcatttagccatttccatcaaattttagcttaaat

SEQ ID NO: 401796 - DNA, 505 bp, Cannabis indica
acctcatatattaatacatattaattcaatattatttaattaatagaaatacttccagtagaattaaaaaaactacttatatatttaatattactgatttggatggagtactgttccatgacttgaatgattcacaaacacatctaaattatacacacttttagattttactgacaataataataataataataataataataataataataataataataataataatgactaattttaacataacgtacgtggagtaattagtcgacacatgcataattaaatacaaattaataaaagaaaaagagactaagagatctcttgtgctaagaggatttgggcaacggcttataagaccacctcgaccataacttatatatcatataaatttatacattaacatctttttcagtgtcatattgtaacgtccccgcttcaagcttccattggacccttacacccacggactaatgactcttatacacgagtacgtcactctggctgc

SEQ ID NO: 401797 - DNA, 699 bp, Cannabis indica
tgattattgatgcatattttggtattgttcgagagtgaattaggtataataattatttgatttatgctaggtgaaagtttattatgattgtgggctagtttagcatgaaaaatggtgtttttggatgcattttcgtagctacaaactgggttcgtgggtttttaaacccggtagccgcgaccattttatgacagcttattgtatttttttttcggtttttgttttggccaaaacttttgactcgagactccgtttgggacgttctttatatctttagaaagctcgtttcgagctctatgtggatatctataatttaaatgccaattttatatattttggaaatggatttgggaattaaccctatacttgtgtatcaagggattgtgactaggattactgatacttggtcaggagcacccggagatttggaatctccatatttgcgggacatcaggtaagacagtagttagcacgtagagttattcgtggtggcgcttatatggttattaccctagtgaattgttaataagtattgatatgccatgatatatgtatgtatattgagattatgaattgtgcgtttaaggcataaataagctagactcggtaaactagtaccttgagtttaattaaatgcggtctagggttattaccctagaatattatgaaggtaagaaagcaatgatgtatggtaatatt

SEQ ID NO: 401798 - DNA, 776 bp, Cannabis indica
gttatgacagttagtagttaagctttgttttgttaaatctgatattaaatgttttccaactggttttgtactctgttcattatgaattaagaggtacaaggtacccagattggttaagctttgggggcattttgtctattcatgtgtgtgctttatgttcttagttctcacggattgtaccaactcgtttgtaccactttttggttatgggagttagtagttaagtgttgttttgtgaattgttttattaaaacctttaccaacttgaagagcatttgtgcaattgaaatgaacaggtacaaggtaacgagattggtttgtttcaagtgttgtgttattttgttttgttcattgttttggctgtgcaagtgttgtcgtataatttttaagtattggaaatcatttagttgaaaagagtttcacatcattttgatgtactttaatgtgtaacatgcaagaagcatgaaatgtgtgtttgaaatctgaattttttcaatgccgaatggttaagttgatttgatgtgattttaggtgattacaatgcacgattttcattgtgttttggtcaattattttttttatatagtgtatttgctgaaatatgtagtccttatcgtttaaatttgtttatcttcaatttggttaggttcatcatacatggctgggaaacgcaaaaggaaaggggcaaatgaacccgtaaagaaggatgttacctccgagccgaacgataatgcggttactcgtgtgaatgatgtttaacatttattttattatat

SEQ ID NO: 401799 - DNA, 1165 bp, Cannabis indica
caatgcaaactcccaaagttttttgaaggagtcaaaacgacatgagtttagggccttggtgaaaataatagccaactgtttttcagtatcaatgtattctaactgtaataatgtcaacaagttctctaataaatgatgccttatatcaatgtgttttgttcgagaatattgaatatgatttttagaaatatttatggcactagtattatcacaaaaaattgttaaaatactcaatttaaatccataatcaatcaacatttgtttcaaccataacaattgagtataataggtaccaacagctatgtactcagcctcagcagtatataacgaaatagaattttatttcttactatgccaagaaaccaaattgtttccaagaaagaaacaacctccattagtactcttatgatcatctacattacctgtccaatctgcatcactaaagcaagcgagactagaattagtgtctttagaataccagattccaaagtcatgagtactattaacatatctaataacttccaatcatactaagataaagtgtagtgtctacctttactccattctcatcttttgtcaatttaatgtttctccttccatttgtctcacttgaagccccaaaaagaatgtaagttcacaaaccacactcatttttcatttgattaacaaacacctggacttcatggttagatgtagatacaaatactatatcaccaacatatgtttgagcaatgataaaatctaattttatgtgtttgatgaaaagagacttgtctacactacctctttgataatcatgagaaattaaaattgagttaaacctttcataccaggcacgaggagccttatttcagaccatacaaatttttttttaaaatttgtatacgtggtctggaaaatgagaatcttcaattttggtttctcaacatataattcctcactcaaaatcccatttaaaaaggctgacttcacatccatttggtacaatttgatatcaagtacacaagcaatacacaatatcaaacaaatggactctattatttctatgaagcaaaggtttcatcaaagtcaataccatctacctgtgtatagccttgtgccaccaatcgagccttgttcctcacaattgtacaaaattcattacttttatttttaaaaatctact

SEQ ID NO: 401800 - DNA, 547 bp, Cannabis indica
aaagattttctcgagcaatatcaaacgactataagacagtgcttcagcaaagatatctttcgatttgaatcttgcgtagtgagtacgatttagattctactagagtgactcgaagtcttgaactctatctctagcatcgtaccacgcaccaatctttcaagggtgtattcaattaagcctgtgcgttaatgggcatgcatgtctatcccagtatagtgaacgctctagaaattttgccccaaattccataggaagcggccccactcccacattcacataagtgagtctatcaagagtactcatgtagctcggtactccactccacatagagtatagatctcattaagagtttctattaactcatcctcttatcgcttcaggacttcatgcttttcatataataatagcatgatcaacacatatcacctcataacttgttattacccgttgaacctaattcttgggatctctagtcattaggttgggttaccattatgagtgactcatctttctaaaggcaatagtcccattcctttcgaagttttat

SEQ ID NO: 401801 - DNA, 769 bp, Cannabis indica
aattattatttaacaaaacaaaggctcccattagtaatttttacaaaacacatggtccaaaataatatttatcataaacaaaatattttttatttttttttcttcaaaaaaaaacaattattaaaataaaaattttgatagtgccaaaataggttgtagagtaaaaaaaattataattatatttttaattaatcaattataattatttctaaaaatttactataattgcattaaataatgtctacatagaaaaaaaaataatcataatgtggaaaaattatgactaaatgtacaaaattaaattaatgaaactataaacaataaaccaagatatatactggttcaaattcgatagattgatttgttctatggctctactccagttaatacttctttattaattaagcaagaatatgtacaatacagtcgagacgagattctctgttgagttctcacaaagtgtttcaactctcacacttacagccaagaatcttcttcatctacaaagattctttttacgaaaaacccccacacttaatctctctctttctctgcacctctctctacctctcaatctattctctctcaaactctcattctaatctctttgagttctcaaactcttgtcaatttcacactccttaaaatacctagacaaggtggtatttataggcttaggattaagatcctaaagtcagcgactgtaagaaacgagattgttaagttagttagaaataactaacttaaccaactcctctttgagcgaagt

SEQ ID NO: 401802 - DNA, 613 bp, Cannabis indica
gatatttacaaaagaccaaagtgcccttgattctagatattattcagccattttattggacttttggggctcaattcgttgcccaccttagatgtccacatgtagagttattcatggagtcctgccaggtcaatcctggctgccgataaacctagagggaagtctatctagccatggtcctgctaggtcaatcctggccggcaatggtcccgccaggacctagcaggtcactatagctccaccatgaggaggccaacctttgagtgtggaggccagcctttggcaagttggggacaactttgtatattgtttccttgaagaggtcaggttcccttggtcgaacggagtctccttgggttcgaaagtcacttcttggctagccagcttgtgcacatatcttggccggcctataggcttctcttggctgaccaaggatgttcgtacaactcctagaggccttgtttcactccattcggttgttgcttgacgattttgctatatcttgcatggaggccctgttctactattggcagggctgtactccacctgtactctgtctttggcttacgtaacatgccacgtcaggtggaaaaaatttgggataacatttgcc

SEQ ID NO: 401803 - DNA, 521 bp, Cannabis indica
aaataaaaatgtaaaaaagatgttaaatttggcatctagtgtaaaataggacaaaattaacaaaaatacggttacaccctaaatacaacttatatacggtaagtttaaactaaattacatcaagtgcggttttagcttcttcaacaccttaacattctcgtccgactgaaaaaaaaaatagagcagccattaatgctcgacaaagcttgctgaaacaaacatttaacaacatttcaatgaaaaattaacaaagaatttacccactctaataatcagcatcacagaaataaaaaagaaacatcaacagaggtgaattcatcaacaacaacttatcattgatcaaatatgcttacacagaggtatcaacgattctatattctaatctcataaagaactgaggtatcatcactcattcttcaaaaattgtaatttgaatgttgcagatcattcaataaatagacgagacattgttgatcggagctctataaaaaattcaatttcaaattgaaacaggtattaaa

SEQ ID NO: 401804 - DNA, 935 bp, Cannabis indica
actagccaatcttaagtaaccaaaccaatccacacttttgcgaattggatttgagctatggtgtagattggattggatccaaaaaataagatccgcatttagtacggatcagatgcactatgaaaaaaatagtaccgattggattggatgaatacccctagttgagcgtgtttagatttgactggtgatgcgtattgtaagtcacaacaaatttactaattatttttatttttatattactttagcataagatatgtacaagtcgatttcatgaggattattatgaatttattatttaaaaattagtaacaagaattagaaaatgggagttttgattatgagaataaaataacataaattataaaaaaaattaaaggagatactacgatatgaaatacataattaaagattattcttcaccctcaacaattattcttaattattattaatgaatgtaatttatgttttccagtcaaactattaatctcgtaaaaaatgctgaagcagtcaaattatcccaatatccatattacatgtaatcaagatcaagccctcaataattaacacttttacctaagcagtaaatccacgaagcatgttgttatcccaattttcgcactctgacgtggtatcacatgatggtgacacatggaattgactctgagtatctgctcgcaagatatagtccgagcaggatactgcatatgcatactcgaagcaaagcgatcaacaatccgcacagagcgaccaacacttagcgaatttagctttcgcatcgtgagtcatcaaataaatccctataacttggggatcagattgcaaagatatggcaagctgttcaaatcccacgatcagtgtattctgtatttactatgcaatctttcggtttatatccattgtaacaagaagagggaaatacttcctctccaagctca

SEQ ID NO: 401805 - DNA, 607 bp, Cannabis indica
tatttaaattttgcatcaacgatagtaaatttttataggttcgtcacgaaacataagttaaaaataaattttaaaatataatttacttttgtagtttataaaaaaaataatattattatttaggtttgctgcgaaacataagttaaaaataaattttacaatataaattacttttctagtttataaaaataatattttgacgacttttcgacgccggcagtaactccggtgacttttccgatactgacatctacttcggtaacttttttggcactgcaaactccggaagagtcgtcgtaattggcattgtcgccggtaaaattactggaaaaatccccaagaaactggtttcttcatcaagaaaagaaatcggttttttcatctcttggtgatttttcctgtgatttttttgatgacaatgctaattcagataatttttttagcaccgacgacaactccaatgacttttccagcaccggcagctactccgacgatttttctggtgccgatagcaaactccagtgactttttcagtatgagtgacaactccggcgatcactataattttatttttttattttttttaaaaaataaatatgaaaagaat

SEQ ID NO: 401806 - DNA, 681 bp, Cannabis indica
agaagagggtaggaggctgccaactagggttagaaaattagaaatggggttagaaaaaggtttggaatggttttatggagagaaaaaacgagtttggaaagaccaaaaggcccatacccaagtttcctgtagaaaacggtagtctattttctcagcacagtgggcaaaaatgggtcataacacgggttttaaaaatccgtttgatctaaaatcttttctaatacctcaaatatgataaaataaaaatgctcaaacaagaaaaactcaaaaatgatgaaaaatgacgattcacggtaagtttttcaaaaattgtcaagaaaagtataaccttaccgaaaatgagttttatgcaacgaaattaaaaaattctttttccaacagtttgatgaagtaaaatgtgaggtgtaagaacttacggaatcgaaaactgttgaaaaatgggaaagttttgcaaaaaacactcttttaggcctaaaaaactataaattcaacaagtggggcgccaaaaatttgtttcatgcgtatttcagtcaagacaaacctataggcgcacaaaatacattcaatttcacatgttcaaacatatagacacacaagaaaatcaaatatgcaagaattcacatgttcacttgtttaaattaaatccaaagttcacctaaaattcacataatgacctataat

SEQ ID NO: 401807 - DNA, 602 bp, Cannabis indica
tcaccaaataacactgctccaccaaacctaccaccatttccacccgtcaccatggttgaacaacttgcaacaccacttcccaggcctatttccacttcaaccgaggctctagtggccaccactggggctcctcaacatgtggtgccggtctcccaagctttttctaccatattagcggacctgcacccatctcagccacttcgtttcgctgtgggccttctgcaaaccctgccccaagctcctcaaggattcggaagttcaaacctcagcgtcccgattgcctgaacgctgctgaatttagaagaatcctcaaacgcacacgcaatttagccaagtcccttgaagaagagactgttgaagaggcgggtgacgctcagcgtacccgcctagagccatgagcatcatcagctggaatgctcgtggattagggagtaaacgagcattccgttctctctccctgttggtgaagcaaaaccgcccaacacttttgtatataatggagtctaaactccctgttggagctttaaataagtttgcttcgagtcttaaatttcctaacggtttagaggtcccacgtgtcgggcttagtggtggtcttttgt

SEQ ID NO: 401808 - DNA, 852 bp, Cannabis indica
aagcgcctgtagcgactagaaatgtcttccttttgggttctcactatgtgttccctaaccctagcatcgtttaagtctaatctataggttggttttgaagggttggatttatatggaatggctgattctgtcgggaactcaaactctaaaacttatggacgataaattcttgaaccaaagtgggacattgctacaagcaaaaagcagtcccaatccctgaagagaattttatcaaacaagaagataatgagttggagatcttaaaacaacctacatagtgcttgaccaatagtgtgaagagtttaaaccctaaaaatctaccaaaacaagatgagatgataatgatacaaacaaatcaagtaactaatcctcacaatgaaacaaacttaagaaagaagaaagcaacttactgtttcaagttagggattggggcaatgcctggtaattctgtctccaaatctttgaacgaagcaaggatcactttgagaggatgaagtcaaaggaaactcgcaggaaaaaggttaaggacaaggatggcatgcaagtcttcggacgaatttaatggcgatccttgacgaagaagtttaagggtttttctaaaactttctgaaatggagaaaatggtgcaaaggtggttccttttttcttactttatacccatgatagttgcttctttagattaaagaaagatttgatcctaaggacataattcaaagtggaagtggaaaagatggtcatttaattctgatgtacctcaaaactagacaaccgccaaaataagaggatatctgtctttccaaaaaagagtaacatgacgaaaataccctttgtaatcattaaaaaactcttttt

SEQ ID NO: 401809 - DNA, 533 bp, Cannabis indica
atggagaataaggttcctcacaatagatctgtcgccaccatgaattatgctattcctttctttccacattgtttcaactatacataagccaactattaatatatcctcaaaagagacatttggaggccgattatgtatagttttgaaccaagtgcaccaatgttgccaatcaagaacaacaattctgtccaccctcattcccagacccgaattaaaccaaagagctttggcaagagagcattcccataaaagatgaaaagcggtctccattccctcaccacagattggacaactaacattagataattcaataaaattggctagtttacctctagttgggaagacatctctttccagttgccaccaaataagctttagtcttgggtgaattcgagatttccatattaacttccaagtagcaagcgttggatcattttggcaccaccccacgattaacttacacgctgatttgattgagaactccccattcgattctcccaaccaaagccacccatccggagtatcttcttgtg

SEQ ID NO: 401810 - DNA, 647 bp, Cannabis indica
atatccaccactagaattaaaatcaaagttcaccacaattaaccctagagcatttagatattcatttttctaaacattgtaaattctcaaattacaatctcccaacactagaattatcaccattattcaaaaatgggcagcaatgacaagtgtattttcaaaacatttgagacagagatttaccccaaaaacatcacaaaccaaaccttgaatagaaatctcaccacaaatggccaatggcagctccaattaagaaccataatcaagatagcatagcatattccagaataattttcagatttagaatgtatctaatcaagctcattatattgcaagaaaatttctcaaaacttacagaaatttcaacgagcaatggccctgataattacttgatggagctacatagagattaatggaccacctacggaatatcaatggcgattgaatgggcgattgtcaaaggtatgagcctcactacaaaaaacctcctcaagttgtgggacaggtgaggaaacactttgttgacccatgctcatatttttgatcatatttcacgtagaagcgacttgggcagataaagcagtaatggcgtcaacttcaataacaccaacaactttcttccccaaaggtactctagttgagctctt

SEQ ID NO: 401811 - DNA, 710 bp, Cannabis indica
tgctgaattctaagaatcaaagacatacgtgatataagcacaattccggtgccccgaggatttatagcattgtgtatccaaatcacgttatttggagaggatttgcagcacgtggcatcgtgtgacttcattggcaactaggtaatgctatttggaatgatgtatactcttctttaatctaattagctttatacatcaaattctagtgaaattatctgggagagcctaaaatatttgagaaaaattatcaagttttacgacccagagcttctcgcagttaatggtatcaacgataaagaaaagagttcgtcttttgagaatgtggcaaaataattagctgcttggttacactactacaaaaatgggttttcccaacgtttttaaacagtcgtttaaagtattcccgtcagtttctataatcgtcgctaatgtgggtttcccgacggtttaaaaccgtcgcctatagtatagggcacggtcataaaccgttgcctatacccagttataggcgacagttttaagccgtcgggactgtaaaaaaaaaaagagaaaaattacagatttttctatcattagtgatagaaaaatctgtattttcccccattttttcctgtattagttttataattttacctaaattaaaataaaataactaataaatttcgttacaataacaactaactttataacacattaaatttgtacaataa

SEQ ID NO: 401812 - DNA, 508 bp, Cannabis indica
tgaataccaagaacataggcaacttctcccaaatctttcatttcgaattgagtgtcaagccattccttaatgtcagttattgtcttgatattgttgccaataatcaaaatgtggtcaacctaaaggaccagtaagactaccacttggttttcctttagttagtaaacacaaggttgatcttcattctgaagaaacttgtaggtcttgatgatttaatcaaaccttttgctctaggagtgagaagcttgcttaagaccataaatggacctattgagtttgcaaactttcttttcctgccctcgaagaacatagctttctggttgctccatatagatggtttcttcaagaattttgtttaggaaggctgtcttgacatccacttgccagatttcataatcgaaagtagctgctatagagagatgaactgggatggatttgagcatggcgaccggactaaaagtttcctcatagtccatgcctgctcttttggtgtaacccttggctacaa

SEQ ID NO: 401813 - DNA, 1051 bp, Cannabis indica
ctctctctctctctttctgttgttgaattgactgttatatatagcagtaggatataacagaaataactaccaaccgaaataactgccaactgtcaggacagttaaaacggttggttaagtgttctaaaccccacaatttccacctggtttagtacacttaaacaacatagtaatcaatgccataaaagtaacgaatagaactgtatctaaaatccaatgaatgtgaatctcaatgtgagactctagtttgagttgatgttgagcaagtcaagacaaagtctaaacttgtctctagtcaaactctttgtgaaggcatcagcagggttctcatgagtgtcaatcttccttactaagactattttagattgaatcacatctctaataaagtgcatcttaatgtcaatgtgtttagttctctcatgaaacatgggatttttcatgagatgcaatgcactttgattgtcacagtgcactgttacatcctctgaattgatgccaagttcacttgacaatcccttgagccaaattgcctctttaatagcctctgttgcagccatatattctgcttctgtagaagatagagcaacaaccttttgtaggtttgatttccaactaacacagcccccatagacagtaaaaacaaaccctgttaatgactttctagtgtctaaacaccctgcataatctgaatccacataaccagttaccaactccttgtatctgctagtgccatcataggttaaccctgtgttcagtgttccttttatatatctcattacccacttcaaagcagtccagtgggcactccctgggttggcaacaaatctgctggtcatgctcattgcatgagctaaatcaggccttgtacacaccattgagtacatcaaacttcctacacaactagcatagggaattttgatcatcttctccttttctgcatctgtaactgagactgtgagttagacagtttaaagtgttgagccaagggagttgaaacaattttggagctgtccattccaaacttatccaacactttctgtagataactctt

SEQ ID NO: 401814 - DNA, 925 bp, Cannabis indica
cttttatttgattaagtggttaagtggttaattggttaattttgtgttaaaagtttcaatttaccaaaattactttaaatttccaattcaccccccctcctagaaatatatcttgggccaacaattggtatcagagcaagggctcaaattatttgattagatttcacaatctagagcatggcgtttccaagtaattcacaaaataacatgttagaaggttttagcacaaatagagcaccatacttcaatggagtagattttccttattggaaaattagaatggaaacttaccttcaatctattgactatgatttgtggcatattgtgtctagtggtccttatgttgctaaacatgtcataaatggtgttgaagtaattaagacttatgaagcatatgatgaaaatgataagaaaatgctttctaaaaatgctaaagctaaatatgctcttatatgtggtttggatagagatatttttaaaaatattgaacaagcctctaccgcttatgatatgtggaaaatgcttgaagttactcatcaaggaactagtgctatgaaggaaactaaaattcaaatttattccactcaatatgagaactttaagatgaaatcggatgaaaccattgctaatatgtatactcgcttcactacaattactaatggtttgaactctcttggcaaggtacttactcaaaaggatatggtgaccaagattttgagaagtctcaccaaggcttatcaaggaaaggtggttgccattcaagaagccaaggatctctcaacacttcccttggaagaactaattggctcactcatgaaccatgaaattttcatgagtgctcaagaagaagaggaagttgagaagaaaaagaagactattgcattcaagtcttcctcctcccatgccattagtgaagaagatgagg

SEQ ID NO: 401815 - DNA, 665 bp, Cannabis indica
atattttgaaatataatgtaattgcttttttgtataataattacaatacctaattattacacttgcatctaaatacactcaccctagtaaattttgctcgacattccttcataaatacagacccatctataatggaactaaatgttgtggaaatatctttctcaatacaaacagaagcaatcatttaaaaaattattttttaattttgtttcaaacactcttcataattttcatgattgagaatgcacatttgtggacataggaagagttcgaacaagcttaagtaacctgtcaataataaaataatacataattactttttttttttttgttttcaccaagcgttgactctaaaattagaaagaaaaaaaagtctagaaaagatttatttgtttgggcaagtgagtagtgtaatattgttagtgcgatgagaattataagattcatgggcttagaaagaaagtgaatacatttaggaataagttgaaaaatacatattttttgtatttattaatcaaaaatacttttatattatattttattaacaaagtacttacttttgtgagtgattttcttaatataccttcactttttacttaaatcttaatttagcacataatttacatcaacctaaggggcataataagaacattatctataaaagt

SEQ ID NO: 401816 - DNA, 713 bp, Cannabis indica
gtcttggttctgggtcccaagtttgtgtctgggtctacgtctgcgtctcggtctaggtcccgtgtttcaatgcctgtctaggtttgggtttgtatttgggtctgggtatgggttcgtgtccatatctaggtccgaattccactttaggttaggggcttggtctgtgtctgggatcgagtcccgagttcgtgttcaggttctggttcgagtcttagtcctagtctaggtctaggactaggtttgagcccgagttccggttctaggttcggtctagttttggatccaggtcgtggtccaagtcacactccggtcatgttccagggtcctgatcacgttcttgttcaagtttcggttttgggtcccacgtttgggcctaggtctaggtccttgtccaacttcgggtccttctccgagtccctgatcaagacatcgactatgggtcttgtccaagccccggttctctgatcacgggacaagatttgcatcccaatcacaggtcccagtttatttcaattcatgtcccaggtcacggtctaggtttaggtcaaggtccaggatcaagacttgggtccagttctcggtctcgatccctgttttgggtcccatgtcatgttcaatgttctggtctgaattcaagtctgggttctggtactgagtaccgatttgtgtttggatttagattttggaccgaatcccagggtgggtctttgacc

SEQ ID NO: 401817 - DNA, 826 bp, Cannabis indica
attagtgactgttttaaattttaatgtttgatatatatgttgttatgtaatatttatgtttggattgttgtctcatgaataatgatgttttctgtaattgacaagagctcatgtgcagagtgttatcttttgtttttgtgttcttctgttgatgtttttgatacacactaggacaggtacaagaatggtgtagaaagaattgaagttttattgaattccaataagcttacaatggtgccaggcaattcgagactctgttacaacttgattctttttcctccccttcaattacaaacctcactaatatttatagacacactaacaaaaccaataactaattattttgacagctcatgcataagactgccacctcagctaaaaaaactaataatcttactgctattatttacagcttatttcttaggtctcctataataagtaaacctaattggtggtgtatcataaatttggagctactgaacatgcaggcctttaattgacaagagactgaactttggagccataaataatgatctccatagaatttccttacaaaatttgacaaaccctttagttttatttagtgatttccatagaatttgattaccttgagaagttgtgagaacaaagccaaagtgttgagccaacacaactttggatccttttggagcaggattatcaccatttcgagatccacccggtcaaaaagccaaaataaattattttagcccttctaaaaaaaaaaactgattattaaacccctttcacacttatgtcacgttgaggtactgcagaagaaaaaactgcaaaatccgatccaatttat

SEQ ID NO: 401818 - DNA, 640 bp, Cannabis indica
ttggttagattatattgtgtatggttgttttagatactttagaaggtttggtggcatttggataagttttgagaagggtatggattatttggggaaaactggtgcaaaccggttaactggtttgccaatatctgtaaaacaagttaacccgttttggcagattccccaaacaacccattttctcaattcttgcccatttcagtgccttatttgggtgtttctctatttcctaggatattgtagtccctattagtaatagcagaaccttaagttataggttcgggtttcccgaattagggttttaacatgttatttaccctgttatgttatgtgattagggcatccatccagcacgagactttccgttcaggtcggccaactcacttgaatctggaaaggaggtaagaactgtgtataatatgtaatatgaatatgcgaatgtatgtgtatgttaagtgtatatgcatgcttatatgtttgttacactaccaacacttgtacggatatggtatagagtgcattggtatagtgtatattgttaagagtacattacggtgttaccaacacaagtacgggaaagtacatggtgtgtgtggtatatcacttagtggtactcagggtacgaaacaaaccctaccaa

SEQ ID NO: 401819 - DNA, 732 bp, Cannabis indica
catcctatagctggacggatactggggtgaatgccgagctaccgtaacaataggaacagtaatgggaataccaaagttccctgaacttggacggccaacaggcaaagtgtcagcaacacctggccggacaacgtatgtccaggtggacggcagatagcgcctccaacatttcttcaactcccaaatgaagcggccgtatccctcttcaacgatctgctcggagtagtagtggtgttgtacttcaggttttggagtaaaagagtgttcactactcacctcccaatcttcaaagcttgaattggagagtccgtcacttgaagaggacaaactggcatgaagtcgaggatgatcatcgtacagaagttgaagcaggtcctggtctattcggtgttcgctttcccaaaactcaccaggattcatctacaaaagacaacacacaagatgagtgtttggtcgggatatcgaacaataaacaagcaaatatgccgaccaggagtactcaacagattaaaagaatgaaaatattcaaaaataagtcaaaacacagaagtttgaaatttttgggtttagggcaaaacttcacgaagctttgaataagcaaggggaaagacagacaatatgtgatcaaaaggccaacgtcatgaaccacgaagtgttacagattattacaaagaaaatcgtgaagttttaaacctagattttctacctatcttctacagcaaggtcaagaac

SEQ ID NO: 401820 - DNA, 1197 bp, Cannabis indica
ttattgtgtgaattagattgaatactaaaatatagaaaattcgtacttagtgcagatcaaatatataatgagcaaatttgtacagattatattcaatgaacatttttaaatattattatgtaaataagtatatattataggtttgggtaaataaattatgtattttataatttatcttaaactcctaatattagtattttcaaaaaaaatattgtaacatggaaaagaagttataactagttactgatttgtaactctttttagttgatcagatttcaagtgtaattaagttgagctagttacacaaattgattatggaattaaaagctatcatcatatagttgttaaagggtgttataagaatcatttaagtgataaaaatgagttagaaacattattgaaaaattgaaaaaagggtagaaaggagttacaaaactccatttttgatgagtattttgaaatagtgtcaggcgatatatgcctgaagtgtttttcatcgtaaaacgctcaaaactttagctttgtgacatgaagttttctatgaacaaaactcttcatcttcattttttacatttttgtatttttaacatgtattaaatcatatcttttgaatattttttggtcgaaaaaaattttcttttaattattgaggttgttagatttaagacttttgtctaatttcattcaattttactattttagtgattgtttatgtactaaaccatatgcttcccagtaatatctaccaaatcatgccgcacaaatttttacatgtactaaatcatgttctcagaactttcatttatgttaaatttatgttctcaaagtatttttaacgaccttaaaagtttaggaaacatgatttggtacatgtaaaaagtaaggataaaaattttaattaacctaaatacaatatttgtaattttgtatagtgtatatatattgtatttatttaatcaaacattactccttttattttatattgcaatgtattatcttgatttttttttttttttagatataataaaaatctctaacagacccctctaaacttcttagcttttcctccattgttattagttttttgaattatttaaatggtggtttgggtacgaatgaaatgaaatgaaatagaacaatatttatttcattctaatagattagttttttgaaatttttacatgaaaaatccttttt

SEQ ID NO: 401821 - DNA, 676 bp, Cannabis indica
accataaaagatattaaaattccttttcgtatatttatttttgaaaaaataaaacaaatgaaactaaagtgatcgccgtagttgtcaccggtgccggaaaaggcactgaagtttgctgtcggtgctgggaaagtcgtcagagttgctgtcggcgccgaaaaagtcatcgaaattggcattatcgccggaaaaattaccgaaaaaatcactaagaaactgaactagtttcttggtgagaaaccagtttcttgtaggggtgttcatcaaaccgctcaaaccgctcaaactgcccgcaccgcaccacatcgcaaaaaaaatgcggtttgaaattctttgcggtgcggtcgcggtttgaatttttcctaaaccgcgcggtgtggtgcagtttgcggttttgaatttttaatatgcggttcaaaccgcaccgcaccacatattataaaaataccgatttttatatttatttaggtccaataagtgaaggcccaacctaagcccactaattattgtatttttgaaacttgaaacttttttttcatattgattttcaagtcttatggtatttttaacaagtgctgctcaaactttgttatatttgtgatagtttaattatttaatgataatccaaaccgtaaaaagcgcataaaccgcactgcaccgcaccattttttgcggt

SEQ ID NO: 401822 - DNA, 553 bp, Cannabis indica
ataaaatattgtttccgattattgtatatttaacccgattcatttcttctattgattattttaattccaattacagtttaataaacgtgccataaattcttattttataagtaattaattatccgtttttgcatctttaatctaattaattaaaataaaataaaaaatctttttggtggccaaaccacttcctaatttttaaataaagtccattggacttaatttaaatgtcgtatatttttatctcaattttcaaattaattaagattgtcacaaattatcaattaatcaaaataaaacgataaaatcttttatatagccatacccttatgatatgtttgggcttaaaaagttttttaatttttccaatagacaagttaaaatatatattttttaattttattctttttaattaagaaaaatttgactaattgtgcatttattgggccaaaattattttttgaaacctaagctattcaatattggtagaataggtcattttttcctaaaacctcattctactcctctcatttgaacaaccctctctctctct

SEQ ID NO: 401823 - DNA, 905 bp, Cannabis indica
tgaatagaagccgaatccctgcctcatttggtgctcttaatccggttcttacactgggctatacggcttttgaagctcccagtaatgtcacggccccatctctccaaaacctccccacactcatgaatttttctttgaatactagtatgtcccgaacccacccagcacccttccacaagttgtttacacaaaggctcacggagccaagcattttcgaaccgaaaagaatgaaaggaagtagctggaaacacacctttaaacaccaactgtatgggacaatgatcagacgtagagaattcgaggttgtaaagaaccggcctagcaaacatagccaaccattcgggattcaccaaagctttgtcaagcctttcctctatccattctccactatttcttcccttctcccatgtaaacgggtagccaacaatgggaaggtcgaccaagttgcaatcactcaacgcccccacaaaaccagttatgagactatccggatacgcccttccacctttcttctcaagttgagagcccaaattgtttaaatcccccataatacaccaaggaagcgtactatcgtttttaagagaacgaaggagagtccaagtcttgaaccgcaagtcccgttttggctcgccatagatacccgtaaaccgccacggcaaggagttttgaagatggatattggcgtcgatatggttaaaagagaagccttgaatcaccacttcatgcgataccttccacaacaaagccaagcctccactgtgaccccgattttcaaccacaaagcaacaatcaaaacccaactgggctctaattttctccatactaactttactacaaattgtttcacacaagaataacaagatgggcttcttttggaacacaaggtccgctaagaattgtctggc

SEQ ID NO: 401824 - DNA, 1030 bp, Cannabis indica
agggtatagatcttgtgagaaatatcaaagatcctccttaggttgatgaagaattccaaaggaagattggcatggtttcaggttgatctggaaaggaagttggtgtggtttctatcacagaattcagccaacccaagatcccaacttgtgccaggagatctttgcgtcagcctctcttcagtgttgagaaatttcctgaggctgggaaatagatctcggcttcaggaaatgggatcttcagatgatgaggggaatgaggcctgtgcagagatcaaggctctctacgtgtagccggtctttctcaagctatgtgtagtcagtctttctccaagctacgtgtagacggtctttctcgagttcatcggcttcccctctcatcctttgtttaggagaatgacttaatggtttgcccctagaggcattttcgtaaagacaagtttgtaaccagtcttaggtttttcttatcttaaatcccttgtactattttcattcaaacttaatacaattgtatttgcttgcgtttttattcacaatgtaaacaactatattttgatcaaatatacatcacttttgggtttctccattgctcgtaatcttcttgtttaagtagttagtaatctaccaaactttatgattttcaagcgattgtcaattctgcatcgcaattgcagttataatatgccttaagcaaacagaaatatactttaaggattttatcactttgtaatttttaattttctcgtatgaatagttatattatctatcaatttctagaattaagtactttttatcaaggcgtcgtgatgccttgtatagtactttcctagctcgtgagaaccgttagtattcagttttatacgcgagttataacttttgattttctcctctcccctcagataggttttgaatcaaaaattatagttgtttgatcccttcttcgtcaaaaatgttgatcaaggtgttataacgatttggctccactttcgtcaaagaggtttagtcgagaacctttgaatttcaattttttttt

SEQ ID NO: 401825 - DNA, 579 bp, Cannabis indica
tttattttaatcacatttaatttgtgatcaaatatagtcaatgagaatatcaatattatcttcatacgtttttgtacacatatagaaaatattctaatattctcccatttggtcaatatttaggtctaccacttaaactcaatgttcctcatcattatataataaacacattaatcatagcgataagttctcattatatggtgattattatcttcaatgtattatgatatagttattgcataacaatgtactttatgtggcaatatttttaatcgaataaatctaaaaacttatgtttatttttgtcctctaaaattttctcaaataaaaaattaagattcacataaatattagaacacatcaaaataagagtttcattaataataactttatttatacaagttctataaggcactataagaaatgtcacttttgccagcacatttatgcgctgataaaagtttaattagtatggcgttggcaaagaagaatatacatttgatgtgttggcaaaagagatttgcaaatcaacgttggtattagaatttttatcggggcaaaatgaaaagtgctagcaaa

SEQ ID NO: 401826 - DNA, 627 bp, Cannabis indica
atgttcactttatcagaaatcagttaacataaaattttggagatcattaagatttcttattctgatcttatcaagttttttgttgtgagattttcttgtcacatatggctgcaaaattaggaatggtattaaaagttattaaagatatatgttgtgacaataaattatcaggttccattttagtaacaatatcaactctataaggtcaaaaggcacattgactttgagctaattgttgttaaaatgaagttcagagtaataaggtgtttaaagaacatactaagaacaaactccatataattttgtgtgatccagatcattaagaatatattacttaaggcttttcaagagcttattgctcatatatggatgtggttaggcatggcaaaaagatccattcattcggatcggatcagtgatccgatccgacggatcattactgatccgaaacattcggatagttattggatcttggatcagatccgacccgccccgcttaatttttttacggatcggatctgacccgatccgttttaaatatatatatattttttttttaaaaaaaaaaattctactttttaatatatttttttaaagtgtaaggccaatgaaataccaccattagac

SEQ ID NO: 401827 - DNA, 816 bp, Cannabis indica
gctactactactactactacttcaactactgtctattgtcctgagaatgtaccaagtctgttttcttggcaaacataagacgcccaagtattttgtgatttagttatttgtgttctaagctaagccttgaaacttaaaatttaagccaaagcagaaatgtacttctatacacaaatgtggattctaaacttctttccctttttctttcttagctttttaataccacttagctattttctttttatccagaatatatatagtatttttgacccttgaataatagtccttattctttctttggtaattgtaatgttttggtatgtttactaataagcaataggaattaatggtaagtgagtttttctcttacatttgtttatttaatttattaaatttaagaaagagagaacttgatttaataaaaatgaagaaaaaaaaaaagaagaaattttcttttcaaaagaatgccaagggtaattgttgtgaaaattatattgctttataattgcgcaagtgtacacaatcacaaacaagtaatacaatgataagtaatcaaagttcgtctccacagggactttttactaaataatgctaaatcaactaagagcaattccaagaatttcaaataaaaataaaataaagtcacacattaattcacgagaaaaatttatagccttgattctaaacttgagaactaattttttaaactaaataaactaaaaataagaagctaaaagtgattaaagtggtggtaatttcagatttggaaaatagacttgggtgattgatttccacttgtatgtcccagttgataca

SEQ ID NO: 401828 - DNA, 1564 bp, Cannabis indica
agagagagagagattgggcttgggatttgagatttgtacgaaaaatcttctgtacatgaagaagattcttgagtaagagtgtaagagataaagactttgagagatttcaatagagaatcaatctcgactgtaatgtaccatgttcttgctcaatcaataaagaaaatttggatggtgtttcaaaactagagtaaagctatagatcacattaatctataggacttgaaccagtatatatcttggtgttgattttatttttttattgctttattgtttctggttttattgctctactcatccatgtttgtatctccgattattgtttgtgaattattaatcatgtcatttttaattgttggttgattaagttttaattgatttgattctgcacattagttgttatttttccacatattttttttaaaaaaaattagtggcacacccatataaactaaagaggcatttgaataacttgttatttttttttttggcacatggatatgttgcaatcaaattttacttttatatgatgacgtatattataataattcatacattctatttttttgagaaatttcaaacaatttactttgctaaaaaaatttattttgtatatacatgcatgaaattagagctcgtttggtagaccgtataagggtggtattgcattaaatgacaagtaatactacatttggataaaatattgtgttgtattaattattacaaccataaattttaatacaatgtgaattgtattatttaatacataaaaaataattttgtattagcttgtattataatatttacaaaggctttgcggttggagacctcgaccccaaactctattgaaccccaaacctcgacatcggacccagcctcgaaacttgaccccagcccaagactaagaccaagccccagcctcaaccctaaccccgtatccgaaccccaaactagtcctcgaatcctaaacaagaaccctagactaggaccccagcaccggactatggactctggacccatgacattaaacccaaacccaagacctcaaattcgaaccccgaactttgaacccagacctcaaaccctagcccaaacatggccctagccccaaacttgacctcagcccctgccgcagccccaggcccggactcagaccccagacctgtccttaaactcggactgaacattaggcaggttgactgggttttgcgttcgcagattttgggttcaaaaattgtacctgaacacgacccgtgaaatggtttaggctcgcgggttcgggttgacccggttaagtcgttaatttttttgtaaaaaaaatcaaattctatatagttttttctatatgataaattaatcatataagttataaacttataacaccatattctatattcgttagattaaaataaaataaaaatgcattaatttcaaatttaaaatacaaaagtcaaggttcaaactatatataatatattatattttgttatttttaatatcatctatataataaaaatataatgattagattttagggtttttttatttttaatatattatatat

SEQ ID NO: 401829 - DNA, 642 bp, Cannabis indica
gttagcagatcgtttaacatgacgaaacattatgtaaagaagaaagaatcaattgacactcctgaacaaacaaaccaaaaactgatggaagagcaaccgagctattaagagcttgaacaacagcaatacaatctgtctcaactagcacattggacaaattcttcgacttcaaccaactaagggcctccttgacgctcaatacttcagccacagccggctgacaagccccagaatgcaaagaggaactagcttcgattaacttcccatgacaatccctaatgaccatgcccgtaccatattgagttgttgcctcaaaaatcgccccatccgtgttgatcttcagcttcccagcaggcggctttacccaacaaacactgctaccaacaacagtagcatcaaacaacagcggttcaaacctgttctcttgagccaacagccaactagaatgacacgaccttgccactcgaaccacatccgcagcctgagaagaacgaccctgccaaagaagctcatttcgagctttccaaataccccatgctaccatcaagagctcatccaccaaagccactctaccccctgacagaaatgccttaaaccaatcggcgaaggtagattctgcagaaaaatgtaaccccacacccg

SEQ ID NO: 401830 - DNA, 834 bp, Cannabis indica
cttggattatgttgtttgaggtcattataggtgttctagaatgtttgggcacattttgagcaagattcaaattgtttggggaaacctagtgcaaaccggttaaccggtttgagaggtcctataaaaaactagttgaccgaaacagattgtttgattcatcaattcgtgttagtttcagggccttggttgagtgattccttgataagtagggtattgttgtattagttatcaataccagaacttttagttggaggtttgagttttccaaattagggttttggcgtgttgtttacccgtttatgtgatagtggttagggcatccatccagcacaaggttttccgttcaggccgtctaactcacttgaattcgaaaacaaggtaagtatagcataaaacatattgtatatatgtgaatgtatgtatgtgtgatatatatgcatgcttgttatgattcgtacattaccaacactagtacggtagcgatacagagtgcattggcatagtgtataatgtttaaaaagtgtgttacggtgttactagcacaagtacggataggtacgaggtgtgtgtggtacaacacttagtgttactcgtggtacaaaataaactctacaacactcgtaaagtagtggtacgtagtgtatgtggtacagtggttgtaccctagtaaagaatgttcttacatatctgttaaggcttgtggtaggtgtatgggagccaagatacaagtcggtattatattatttgttatatgcttttcttactaagtctgttgactcacagttgctacttctatgcgtaggtaaaggaaaggcgaaggctgaacaggagtga

SEQ ID NO: 401831 - DNA, 563 bp, Cannabis indica
gagagttgtatgttctaatggattaaatacaaatataagatttttcttcattaatatcgacataatcgattcattttctcaatgtatttctcacattatatttaagtgaaacaactttcctctcgtgtaacaagtgtataatgggagagaataacattagatcgaagattaaagaagtaattcgtacgagatccctctcaatgaaaaaagaaaacttcttaagtggagagttgtatgttctaatggatcaaatacaaatacggcttaaaaaaaaatagacgaacaattgtttgcaatgaaagaggtggttactcgtcattcgtttgtccacattggaagcatccatctccagagactctaaaagtttgtgatcttcaacaaaaatatggtaaaaaatacattgaagcgactgagaaggaacagagttattggatgagaaaagaagtggagaattcacgagaacttatttatcatgaatacttgttgtactcgttcctaggatatgtgctgtaatctattttatgatctaatgaatttattatcccttctggctaagcttctaa

SEQ ID NO: 401832 - DNA, 396 bp, Cannabis indica
gagttcaaatattccaaatataattgagcgttctatatagtgggagcgctaaacgtagatatggaatctatagcttcatctggacatagaagtgaaatgatgatttcctttgagcttgacttaatagagataaatggaagagctcttatttcagtgattatattagtttactgaaatatcagttacaggaagctaagtgctttaaggataaaatacattgaggggtgaaacggtaaatttgtccctactcggtgtaaatcatttatagaagatctttgattattgggattagaacgatggctaaaagcgtatctatatcgtgcaacatatagagcgttctatataattgagagttcaattccaaatctatagaggtacaaggaggaattaataagt

SEQ ID NO: 401833 - DNA, 828 bp, Cannabis indica
gcaagaggatcctatccaattgtaaatcatcgagttagaggacaaattctagagataccaagatggggagtatgggaaactacctagttatgacttggatgaagagcccgagcctttctatccagagattatgagcgctgaattcccctagggatttaaaaaccctcacgtcttctcatacgatgggactacggatctggtcgctcacctaaataattttaataccatcatgtgagttagcaatgttacgaataacttacgctgtattttattcctcacatcactagttgggcagcaagcagctggttcaacaaattcacccacactcgatgacctcttgggaacagctgtctaaagacttcaagagacagttccaggcagcaagagacaggcgacttgaagcgtcttcccttaataacataaagcagcattcgagagtgacgcttaaggcctacttaagtcctttcaatacagatgctgcgagggttagaaacttgaacaacaacatccagcttactactcttcaagcagggatcacaactgatctctcgacggttggaggcgaactatgggatgatttgcaggctcatacagtgaaaaacatcaacaagttcaataaaagagctcaggtgtttgttcgaaaaaaagaagcaagtaaagagatgaaattgttaaagactagcttgggaagtaaacccagtactatctcgacaagcaccgtctcgaaaaaggctaacaatctaggaggctatagtacaaagaggaaagacgactctaaggaatcaaccaaagataagaaaaaatagaagaagcacgacaagtatgtgc

SEQ ID NO: 401834 - DNA, 549 bp, Cannabis indica
aaataatatatataaccaggatcttgtgtttaaaatattacaactgaattacaaaatactcaatacaaaagtcgttgcctagcgattatacaaaatacagcctgctgtctcaaagatcgtacgctccaagcttagccgtctcgacatgtacaattttcacgactgctcagtcttagctttgcccttacctacacatgcaaacaataattgtgagtcgacaaactcagtaagaaaagcataatcataatcataaatataacccgaattacaattaggtacccataaacccaaccataaccatatccccgcatcctcggcggtactgagtttagaacgttcatacgataatagtatcgaccataatatcagcctatacttagtactctagtcatactctaatgtaccgatgtaataacgtcgattagtatttgagccaaacatctatatcggtatccaacacaactctacgtatattaataccgctatcaatgtaatctaactggcttaacaaacatgtacgctaaacatgtaaatacatatgcatatcat

SEQ ID NO: 401835 - DNA, 493 bp, Cannabis indica
aatatttgtaggatatgacaacttttatgatatcgctaaaatacctcctatttacataaaaaaaaatagcatcaggtgaccatcggaccagatctgctaccaattttttttattattattatgtttttgtacataaaaaagtagcatcaggtgaccatcggactataattgaaccaccattagaccatatctgacttaccaatttttttttttttatgtttttgtacataaaaaaaaatagcatcaggtgaccatcagaccactatcggaccaccatcagaccatatctgctaccaatttatttttttatgtttttgtacataaaaaaagttgcatcaggtgactatcgaaccattatcggaccaccatcggaccatatctacatttaaagatgttaaactccattcattaagctcccgaggaaggcatcgagccaccattagaccccatcgaaccatatcattgggctaccatcggaccttcgtctttaacc

SEQ ID NO: 401836 - DNA, 694 bp, Cannabis indica
aaatgagatttttgactttcagcacctctgctatctttaagttggcaattaaggcctcatattcagcctcattattagatgcgtcaaagtagaatctcagagcatagtgaaacttaaagccttctggtgatattaatattaccctgacacccgaaccttgttcgtgggttgcgccatccacatataatttgtaggttttcgcgtcttgctgatcaggtggaatttcttctggagttataccttctatcaagaagtcagccaaagcttggcccttgatagatgttcgaggatggtatgttatgtcgaactgccccagttcaatcgaccactttgtcaatcctccagaagcatctggttttgataaaacttgtctcaagggctaatcggttaacacttttatggggtgagcctggaagtatggttgtagcttacgagacgcatggactaggcacaacacgagtttttctagagggggatatctgaattctgccactaataaccttttacttacgtagtaaataggtagttggtgcttgccctcttctcgcactatagttgcactaatcgcatcttctgagatggctaaatagagaaacaacgtctctcccgttattagtttcgccaaaatgggaggcgttgcgagatgcctttttatgttctgaaaggccgtttcgcactcttttgtccactcgaa

SEQ ID NO: 401837 - DNA, 725 bp, Cannabis indica
taaatttaacacagatatatatataggaaaattaattaataaatttaaaatggagcgtgtactaacgaaaatagagcaaaattacagttttacaaacattgggtacttatgctactaaaaaaaatcattgggaaactttatgtacttatgccactatttacccaaaatctaacaaatctcctaaatatctaaaattcaaagatgaaaatcaaatatccaactaattttcaaaattttcagtttatttaaataatttaaattagttaaatatctaataatataatataatataatatcttaatttcaaaattgagatatttctgatattatatttctaatcttataatttaataaaataaatttaacaaaataaacaaaattgaaaataaaatatcctaagtttaaaaattttatggttggaaaaccctaaaatatctattcaaacaaaattaacaatttttcaaaatttcatgtcattttcacaaaaaatataaatttttaattaaaataaatatccaataaaaaaaatgtcaaaactaacatttttctaatcttataatttaatttaataaaaaaatattttaaaaataacaaattttaaataatctgatatggttagcaaatttaaaattctaattaggattatttctaagttttattagtattttaatatcaaaataagatcattacaaattttaataataaaataagtaatatctgatctt

SEQ ID NO: 401838 - DNA, 701 bp, Cannabis indica
tgaaagaggaaaaaagaaatgcaattatgcatgagaggggcggtcgtggcataaatagaaggttgaaattcgtgggttagggcttaagaggtgatgatcgtgggttatgcacaaagaaaaaaaaaactaacagaacagagtggaaaaattcaaaaaaagaaggaaagagaagaagatggcagggatggcgtgtaatatgggagaaaacccatgacatcaccatgtgttgacctcgtttttagccaacgacagtgagtcttatttagtaagcgataagtaatttatagcaattgatatatagtaaagcaatgtaaagacacaagaattttatagaggttcagtcccgagcagtttggtaatagcctaatcctcgttatttgtattgactcaagaacaaggagaaaggttccttttcttatagctcttacaacaatatctctgaatatgaattcttagataatatctcttaggtaaaatcttttgaccctctgcccagtgagtatgtatcactatttatagggctatgaacttggagaggaagtatttcccttctcgttacaatggatataagcagaaagattacatgataaatacagaatacactgatcgtgggatttggacagcttgccacatctctgcaatctgatccccaagttatagggatttctttgatgactcacgatgcaaaaactgaattcatt

SEQ ID NO: 401839 - DNA, 641 bp, Cannabis indica
aacatatcttgggctaacatggataagaataaacacttgtgattgtgttgctcaatgacaagtctttttccaatacccaaaattttaccaatacaatgatatatttaaaataatattgtctccagctaagagctaacgaccatttttattttattttttattggtattttaattttcttgttgtgtttaaagtaaaacaaagtactgatatttagtactatcggtgaagactacacatttattctgtgttggattaaaaattctatgtgggcacatatgtataatgtatatgctattataaagtgtgatacaaaattaagtgaccaattatgttatgggtatcaaaagggtattaaattgtcatggaattaatgtgtagataccataagttaatttataatttgttgaggggccaaattataaatacccaaaactcattctaagatgagtctataaataggtaatggtccccaagaaacactaaaggtttctgtattctcgtattcttggaagatcaaaaccttctctgcaatctccaacaatggcttcaagttagtgcttccgctcatattttatcatcttcttctttaatttagcaaaggctttatagatttatgatttagggttttctatattaaagc

SEQ ID NO: 401840 - DNA, 558 bp, Cannabis indica
tattagtttttaatatcattgttcgaggttatttcatttttttatcttattttattttgtagatgttctgtgaatcattcttgatatgttaatgagttggcgtgtagtttttcagtgttacaagctgaatctctagctcttttagtgtgttatttgaggacgtgataactttattgtctaaatttctaggagtagttttgtcttatgttgctcgcttattttagtattttatggtttgacaaagcatgcctttcggttgacaaaacatagaccttttccacctttgaattagtttggattagactttggacccctaaggtattactctttttgatcttacccttgttcttattaggaactttagaagttgcatttgctttgaaagtctcttcattagacccctccacaagcttatccctacatatcgattcctcctcgattcgaatgtgtttttggatttcttccaaagagtaatccactttttatgaaagattatcttcccatgattcttccaagaaggtggtaatttttccactattgcaccaacttggaatgcct

SEQ ID NO: 401841 - DNA, 552 bp, Cannabis indica
atgagaggagagagagagggagagagtaaggcgtgagaagagagagaatgggagtgaaaatcaattcctattttctctcaacttgttaatgtatttcttaagtttttttcatctgtcaatttatgatactatatatcctatatatagtgttataaataaaccctttcaatcatttattcaaataaaagaaaatatttaatttgatttgaatttaaaattcaaatataaatatctaataattgcttaacatatcagttaaaccttttattttattattatctttttaattaaataaattatcaaataatatatttaattcaataattaaaaaataattatttaatttaatttaaattatttttaccaataaataattaaacaaaattaagatgtgtctttatatgtcaccctgcacgtgtggaccaggtctacacgtgtgggccatattttaaggtccgaaattgattcctcaattttgccatatataagacttattgtaatgcccgtattttaaaataataaactcgaaaattaatttttaataatttatat

SEQ ID NO: 401842 - DNA, 642 bp, Cannabis indica
ggcagtctaacatgagcttgcggtcgctagtataacgccctatgataatagaagcctctcgcaatgttctttctcgtgggaacgactttgacagagtaaaagcaggcaatctttagaggattagggcactcccagcctaaaatgtggtatagaaccttaaggcccgcgcggatccagtatgagatggggttcagctggaatggaacaaccccgaggtagttgcagtattcctcgaaggtaacattggggtcctgaggggtctttgatttgcgaggttaagagacatgatttcaaactcaaggtcacctggttcaaatcaacattggtcttgcaagtgaaatagaattttatatcgtgggttctggccaggccgcgtctcgtaagatacgacgtttgcccttggaaatttcttgtaggaatcgcctataaggactggcagtctcttcttggttcgacttaatcaaatggtctctaatcctggcatcttttatttccaatctggactgaggttcgaaatttttgggtttgtatggggaggctatatgtctgggatattccggtcctacgaattctggaggataaatttctgaaccagattgggacatctctacaaaagaaagacaatcccaatttctggatgaa

SEQ ID NO: 401843 - DNA, 658 bp, Cannabis indica
ttgatgcctaagcaatattttgatatcactagctagtttttgtattctggtgaagcctttcaccagttctcggagatgatgttgtttcacagaattgggagactcgaaactacccaatttacgagtaagtcgctttgccaaaaaagtgaaaatatgaagttgtaaatttagcttgtacgacttaatagctctcagttactataaaaaactagatgaatgctcaagataatatcagaatcagataagcaaaacctagcacactaggtcacttgtcaacttgggctctaggtgctctttctggagcttttgggccgttttgacacttccaaagttcttgaaatcgaggatgaggtctcctaccccattttttaccatgccataaagaattattagagaataatttgcatttgagtgcaccaggttgattgtcaacttgggcacttggcccagcaccaagtcagcttgggcgattggctcagctttcatgcccctagaattcttattttctcccctattttacttgtattttttgttatttttgatgaagaaaaaaattcctggaacacttttttgaaaacatgattggaaacagcccaagttgacaaaatgtcaacctaggcactaggcccagcaccaggtgtctgttggaaattatttt

SEQ ID NO: 401844 - DNA, 1198 bp, Cannabis indica
tacaatcatatatgcttatttttattgcaatttgttttataactattatatgcatcgttaattaaacaacacgtgataatatatatatttatataatattaaagtattataagataataatccattggaatattttgttcagagtaatatattcctttattatttttatgatcatcacctttaattaatataactaattgatttatatatattatatataatctcctttaattataggttagcacatgtcaattatactcgacattattatcgatatactatagcttttttatatatatatgaaaaatatatacttttaaatataatagaatttaaaaaatattatattttttctcaaaagttattttgtaatctaataaattagtgacatatataactacacacactcaaaataaaatgaaaatgccattgccatactatatattgattaataattattagccacaacatatatatttatatataaatatatcttacacacaaattataagagtttgaaaccggttaaacattaccaaaataatgaaacttataagtaaaagctttaaattggtcaattttaatttagttggctctaatataatataataaatccaaactttgggctaaatatatttaaattaaatagcttgtcatcgatctaaaatgaaaataagcatatatgattgtattttatttttaattttaaaaaaatatgattaataatgttggaaaccacatgtttgtttggccttggcctttaaaatgagaatcatagaagagcataagtctgcatataaaaataattaattattgagttttatatattttaatttaaattaaaatatataagaatccatatttatttgtatcgacatagatattaattttagagttttttttaataattttgaagaaaaaaattttaagaattattttgttaagatttataaaacacttagaaaaatataaatgacacatatttaattatatttcaggaagttttctgatatagaaaactctaaatcatatttttatagaactacatttgctaaattaaaaaagaaaaaaaaatgataacgagatgatagcagaaacactaactcaaagctattatttaagattgcataaaaggttataatctttcaagaatctactatatctttatgtatttttctccgatggaaaagagagaata

SEQ ID NO: 401845 - DNA, 580 bp, Cannabis indica
cgaaagaacttaccaatgcgaacaggaacaggaacaggacagctgagagagaggaaaggcgaggaggtagctccggcgaaccagtgaccaagagagagaggaaaggcgaggaggtgagccaaccacgcttcaatggatttcagtttcaggcttcagagaaagagagagagagagagagagttaattaggtttgggggaattttataaatatgggaattgagggagttaattaggttttttattctatatttttgtaaaaaaaaaatagaaatctcgtatttataaaataacaataaatttttactggaaaagttgccggaaaagtcgttagtatggaaaaatcgccggaaagttagtgttgttggaatagtcactggcaaaatcaatgtcggcagaaaagttatcgtcgtcgggaaagttactaaaaatgtcaccagaagtaaatgtctcagatttaactaaaaatataaccgatattccaaacaaacaagtagttagctattgttaataaagatatagatattgtaacattatcaaaatacagatatttgttcatcttgccttacaaggtagtaagatt

SEQ ID NO: 401846 - DNA, 630 bp, Cannabis indica
ccactataaaactttggatggcaattatataccaaaataatcggtacacaaaaatgaagaaggctaaaggacctcaatataaaaataattacataaacaaaataattcttaagtaattataataataaatttagttaaattttaacagttattagaaagcactgttattgtcttctggtgataatttattattatcgacgaacatgtgatctgccactaataatcactaataaaaactatttttagcaacggattcctctgcctcaaaaagtcttaaatttacaagtcttaataataaagtgttatatatttttttttccataaaatatcatgtgaaaagcatgacaaatggatctatcaaaaatttgatattgaaatgtatataacaccaaaatggttgttagtttccaaatatggtaggtgaagataatgtttgtccaaataagataagtatactttataatacgcatttaataattaaatattgttttaagtaatttgcggcataaatatttaagtttaattttcgcttataaataaatatttaagtttaatttttagtggtaataatacctaagttatatttttaaaacttcgtaggtatctggccgttaaatgtcaagtcattat

SEQ ID NO: 401847 - DNA, 705 bp, Cannabis indica
taatggaatgggaggattaatttgaaccaagtgtattcaagacctttcacgaaaggcaaaaggcaagaaactgaacaaattgcattcacaaaaataagacggtatgaaatgaaaatcaatgacgaaagtatgatcaaagaacaagtggcttccacagagtaagacgacacaagaataaagattcacgaatatctagaaatttcacaacaatacctaataaaatcaaaaaataaggacgaaaacataaaaatccattgaaaagataacagtcaattacattatcaaaatatcacctccccttacaatatattcgaagttttttgaacaaagtataaactctattcaaaaaactaggggagtggtagcgggataaacaccatgcctatacaaaagggaaatttgaaagtctatgcttaaaatacatttaatttttcccctaaatgaatagttattaaaattggtcctatatgacaactttcctaattttcctaaactacccctcacatttcaaacaatcatcctctctcttcctcttgctcagccgaaccctcccccacgaaacccatctctcacagccaaaaaaatttcaaccgaggctcaacccatccctctcacagccacccagctccgtcgacgctcaaccccgaagcctcaacccacccagccccctctctctctcttttgtctctctcaaactgaaaaaaa

SEQ ID NO: 401848 - DNA, 350 bp, Cannabis indica
gcactcactctatcactcaagctttcgaaaaactgaagaagaaaagagggagaagaggtttcggctatagaaggataggaggctcaattttctgaaggcaaaaattttctgatcttcaatctctttaagtgtgagccatcactatctatttataggtaaccactaggtttaggttaggaattacttggcattaaaataatgaaaataataattggaaaaaccacatcaagtggctggccgtagtgttaatgggacccactttggtattttgcaattttgacaattttcttttctattttctcaaaaatgccaattttcaaattcaaataatttaaatgccaaaactaatt

SEQ ID NO: 401849 - DNA, 601 bp, Cannabis indica
  modified_base (9)..(9): a, c, t, g, unknown or other
  modified_base (30)..(30): a, c, t, g, unknown or other
caaaaaaanaaaaaaaaaaaaaaaaaaacngaatatatgtatcataatcaactctgccccacttgctggattggatcatatccgacccggcttatttggattgggtctgatttaatacggcaaaaataattttatatctaaacttataatttttttcttaaattcatttttttttaaagaactaataatgcatacaaccaattcgaagtacttttctcatgttatcttattatggaagtattaatttatatctaattgtaagatgttattagaaagagttgtgtgatgtttctattatatttattaggcggtttgtaagtagcgttacatactttctagcttgtgcattttttttgtcatggatcgcattcttaggagtaagaatgtttttcttgtaaatttcttcatgtaatcttaaatgattgcaattaataaaattaattgataaattttcaaaaaaaataaaataaaataatgcatcagaaatgacaaatagcaaattgttaattttgtattctttttttttttttttttgttactaaagtgattaaaatcactcatgaatttacgtacacccacgtccgccaccggcgctggaacc

SEQ ID NO: 401850 - DNA, 985 bp, Cannabis indica
acataagttattgactagtagatgaaggttcaatttcacacattcagttactgtctattgcagctgaacacattgatagtactcagcagccatatgtgcatttcaataatatttggctaggagcattaatataatttttcactttagattgttctaatgatgaagacagtacattatatcgagcagagttcttgttacctggtatttgttgtataggggaattcgctagtccattgtcatgaaaaaataaccacttcgaataatattactccactgctctttctcaaaacaaagacacaaacatcacctactttcaagttattgtcttgaacaaatgccttccaaccactctcgattgtggcttttgaagatactcctagcggtctgacatggtactttacacaccaagtccccccatcctgaaccttaaggatcacatcttgaggactactactgattaggtacgtttttgcaaaaaaagatggtacaccctacacataagatgaacacaagagtaaaatcaatatgagaaacatgtttgaaaaaaaaaacatgtaagtaagaagcgtatcaattaccatacagtacttggatttggatccaacaaatgatggttgcatggcaacaatgaaaaaggggtcttcagatttaaaatcttttgctctctggaaagcttcagccttttcctttctactaaactcctgatttcttataaattttctaggtacaggagattctccacatactttatctgacttgttaactgaagtttcaactatttctttctttacaattaggtcctctgaaatcatgctggcttaatcataatcactagtaaatgaaggttcaactttcacacaaggggttatctttggcttggatggtgtagctgaaaacaacaatagtataagttaactctgtggccatatttgcattcaattatattgtctaggaacattattataattctcacctagattgttat

SEQ ID NO: 401851 - DNA, 527 bp, Cannabis indica
ctttgaaggagaaggctcctacgactttggcattattgcctgagactcctcaggcctcttattggatgctattgcagtatgtaacagaggctcattcgctgctgaagttgtcgaagcaataggtgttaaggaagcccttagttggatcaaaactaaaggttgggataaagtggagattgaaactgacagtatgctcaccgtttaggcaatttgtacctctcatcgtatgtcctccgtttttgggttggttgttaacgattgtaaactttcactttctcatcttccacatgtttccttgaattttattaaacaattagctaattgagttgcccactatgtggctaggcactctcaatttttttctggttgcagtcttcatgttcagaatttaccacctgatctttaggaccttttgtactctgaatgctaaatttcaatgaagtttctatttcattttcaaaaaaaaaaagcccacaacaactcataaaaaactaaaaaaaaaaataaacataactttcaaataaaaa

SEQ ID NO: 401852 - DNA, 685 bp, Cannabis indica
aaattgtcctcctgtgttgcttaggtcgaagctatccaaaagatgaaactcaccttcacaatttccactcatgaatctttttatacatcgtcgaataatgcaaaaccgttttttgtgcttccctttcttctttttgatagctacttcttcttgacaatcctttacaacttccactctacattaagtaagaattttagttgtagcaaagacattgaaagtcatttcctcattttgagctcataaccttaactcccccttttgaacatcaattaaagctctacccgtggccaggaattgtattcccaaaatgatgggaatgttttcatcttcctccatgtcaagaattaagacatcagcaagaagaatgaatttaccaaccttcaccaagacatcttcaattataacccgagggtgagcaatggattagtctgccatttgtaaagatactatcgtaggatgagcttctcccaattttagcctttgaaaaattgatagaggcattagatttatacttgcccccaggtcacatagggccaatgtctcgactgaaccccctattgagcaaggaatattgaaactacccagatctttaagcttggcggtagtttcttctacaaaattgcactgtactcctcagtaagtgccattgtctcatagtcctcctgttggaattatattttaccag

SEQ ID NO: 401853 - DNA, 707 bp, Cannabis indica
aataaatcatgtgaaccatgacaggagtgacctacgaggacatctgaacttgagagaacctgaacgtcatcaacaactcggtccaaaataaaaggatttactgcatttgcgaatggaaaagttggagaataagttcagagagcatcaagtcgagaaactcggaagacaacagagatatgattctgttgaagagttcaagtcaaaagcctcaggatcaagaagaaaagatgattccaaaaggctacccatggataagaaatagaagaaacccaacaaatatatccccctttatgctgcatataccgagctgaatgaaaatcgggaaaatatctacctcggacatgcataggaaatcgtttttggcgagccaaagcctatgaaacatgcgaggcgtaaaagggacccaactaaacggtgtgtgttggaaaatcagctttcctaaattattattattattcagtatagctgtataataataatgctgtttttattgtaccatatttttagggaattagtttagggattcattgtatctttattatttgatatgtttctctttatagacttattgtacatgttatatatactgctttatatcagaaataatataacacagaaaaaacatttttccctaaatctgtcaacttggtatcagagccagaaaaagaaaaaaaaaaccctaatcgcacccctaaccctaatcacct

SEQ ID NO: 401854 - DNA, 1267 bp, Cannabis indica
tcagtcaggatagagaaagcagtatttggaaggattctctctagggatctgtttggctttgcctgcgaactttcccttttcccccttgccttgtctaccgttgttattaaatcttttaccgcccgaatttgaactactagggtactgggggtttcggacggatgttccagctgaaggagcctgcggttagcccggtctaggctcaacattggcctgttcaatggcatcttcaggcttgatgaaaccatctgcttggttgaggaaatcactcatagagtctacgcgaccactcttcttgatgtctttccacagctctccaagaatttcgatgcccgccagtatggcggctaacttcccttcttcagttaaacatgcaacttttgtgacctctgtcatgaatctgcttatgtaagctcggagacgctctcctggtctttgcttcactttgaccaggtcttataaatcactacaaaagtacgtgtaagtcgccggcaaacctttgccggtgctaattgtcgccggtaaaagctgccggcaatggctcgtcggcgaatgaccttttgccggtaaaagtatttacaccggcgcatttgtttgccagtataacgtaatcgctgacaataagtctgccggctgctgtgtctctgacgacgttttgccggcgatgtactgcgccggcaaagattttggcgcaaacctgggcatttggcgcctgattttcgccggcgagtttagtcgccggcaaaacgttaatttaaaaaataaaattaatttgaaatttatctatgccgacgacaaatgcaccggcaaaattttttttatttttttaaataatacttttgccggcgcatgttacgcgccgacaaaagttttcttttaaaaaaaatttaatgtataaattaatttttaaattaaatttatattaaaaatcgaaataatactaaatataatatccaatatattataaaaccgaaatttataatgttattacaaaactatatatattaaacgtcataaactaagtaaaagtattctgaattcataaacagtaatatctacagtgtaaagtaaaaaaaacctacaaatcaacagcatcatcttcgtcatcagcgggaggggcagcctgtgaagaggaaccagctgcatggccaggaggctgaaatggtggaatcggtggaatcagaggcagatccggcatggtaaaccctggaacagcgctggccaattggatcatttgttgttgaaacacactcataatctgattttg

SEQ ID NO: 401855 - DNA, 894 bp, Cannabis indica
ggtgttcttcgctggaccgcaagcctaaggaaaaaaaagtctgtacctcgacttggctgagcgaaagcttggaacccagagcaaccttcgactctgtgctctatcgattgattaagatggtgagattttaatcaggagtgcagctcttcataaagttgttgccgttccagctcattgtcgaagaaggaagccgtacgatctgagtcgaggaacttgacaactcggttacagatttgtggatattaagttaaactattgggccagtaccttccatggtgtctcacgattagttagtttattaggaaagagtgatctcttctcatttttgcacttaatattttttttttttttaataagaagcgtgttatcataaaacgaaaaaattagacctcccggtcattacaaaataagttctccgttaaggagaaaatcaaaatagagtcgttcaaatagtgagtaaaaacccacttagccacgttgtgggcaacaaaattataggacctactaacattgataaaattacaactaatgaaagagggagaagacttagaacaaaatgagacatagttctcaagagcccaatggaactccttctcattgagcgcattgattagtagtctcgagtcactctctactattacaaatttagatcccatttctaacgccacagagacggctaaacaacaagctgcagcctctgtacagagtgcattcgagaagtccaactgagccaagtggattcggatcacctcacccaggtgattctttgcgacaactgcagtacacatactctccaagcccactctaacgtcacaattacgtttaatccagtcctgaggaggggagcccaagactcccgccgtatcggaacatgatcatgttgggttttatgcc

SEQ ID NO: 401856 - DNA, 822 bp, Cannabis indica
cctggccaatcaaaagaacaatgaaatcgagttggaccaggaacgtggatcccctttctccctagagattaatgtcctagagttgcctcacaagttcaagatgccaacttggaagatgtatactgggaagcaagatcccttatcccatctcaagtattttaaaatgcaaatggacctgcaagtagcacgaggagatgtatgttgcagagtttttcctgccaccctctcagaggccgccaagcaatggtatttcaagttgacatccaaaaggttcaactcatggaaggctttctccttggaattccatgcacaattctccttttcttgccaactctcgttgcacttagaagacctggtcaaagtgaagcaaagactaggagaacctctccgagcttacatcagtagattcatgacggaggcaactaaggttgcacggttgaccgaagatgggaaattgtctgcaatactagggggcatcgaagttcttggagaacgttggaaagatatcaggaaaaatggactaatagattgtatgagtgacttccttgatcgtgcagatggtttcattaagcttgaagaagccatttagcgagcagaagttgagcaaaaacctggccagccaaaagttccctctactgggacatccgtccagctaccccagtacccaagcagttcaagatcgggtggtaaacggtccaacaataacaataggcaaggcaatgggaaaaagggaaagtttgctggaaaaaccgaacagactcccagggagaatcctaccaagtttactgctttctctatcctgacagaagatttagaaactat

SEQ ID NO: 401857 - DNA, 627 bp, Cannabis indica
aggggttattagtgcatttttttgttttaatacatatatggtatagtcttaagtaaataatcagtataagaatgtatgtttaagagatttggaagttttagaggtacaattaagaagttaagatatgtttaggcgaattaaagaggactgcaagatacatggcatgaatatggctggaataatcaatggtatgataagtatgaagttatgtgatacctcagatagttagtattacagaagaagtgatcattgagcataactacaaatttatcaagattacagatttgaccactatcgtaaagtatcacaaaagtagacaaaagttattgtgtaaaactagctaatctcataattaagtcgacttgattgacagagtattggaggaccaggaactagaggagagattagcatataagatacaatgaagtggtaaaagaatcaagagactacaataggaattaaagtctatgctatccaggaaataaagacaagtgcaacgagcatactcctaaatgagttatatccaataccgattggtggcttaatggatcattaaaattatataaaaggaattttaaagggcacaagtgattattttcctgcgtcatgggactattatttatcatt

SEQ ID NO: 401858 - DNA, 636 bp, Cannabis indica
gtggcctattctttgttcataatatgagtgtacaaatagctttatttgtaggagaatttctttttgtagtgattttgactttatatgatactaggcaattaaagtgtgcttcgtgtgatattactcaatttttgtaatatttataaattttgattttttgtgtactgattgttttatgtaatcaaaaatataagcaaagtaacaatctgaaagttaatgttaacacagatttttattaactaaaatattaatttttttataataaatatagaatttattatatacaaattaagtactaaataaataataaataacataaaaattttaaccaagttttgaaattaaattttcatagtccataagtttatatctttttaaggataaatatgtttgaatacagaatacaatgatacaatttagcaacaatatctcttttttctatctaaaattggtcgttccttttaccctgggttcagtccctatttatagatgtacgaggtgacagttattcctttaggatctactcattcataatcgttcataaaacgtggacattcctcacgtttcattctttatgtacataggataatattaaataacaatttaactactttttttatccattgacggttatgc

SEQ ID NO: 401859 - DNA, 1381 bp, Cannabis indica
gggtgtcgtcgaaagtgaaggcccacacccctataaagatgaataaatgaagaaggtaaatgcacatggtctggaagttctcacagtacccatgcatatttggaaaagctcaaatttggtcaaccaactctctaaggaaatggctaaccaccagtatcctcgaacctggatcccccgctgttcactaagacatgaccatgcagaaacgacaaggtatgagagatgttggggtcaagtggagaagctgagactagttatgtcgatgatgaataacttacgaaaggctaccagatataatttccttatccagctcacaactccaatcccttaaccttcgatcctagcgtcggtcctgacgctagtgctagatccatcaccaacgactacttccactgccttttgccgagctatgatgttgattagaagctgacattgcaggaccccgctgtggcaacgactgggagttttcctccagtgtcatggacaccagttaggtttctggtcaggcctggttatggtacagttggtaaaaggtgcatggtcaaagaaaatcacttctagtgaaggttgctaatgggaatttttgtcattacgatataactataactcttgaggttcatcgaagaaagtaactcgagacataataaaccaatcaagaaaatatctaccagagtaaacgcttcacctgatagaagtctaagcctttgccttgacaactaccgggtgcctcaaagtgttggattattgttttaccaggatctagatttactaccatgtatgttatttaacatcctaaatatgaatttctaaaataatggaatttaaacacatataaagtttaagaaaccttacattggttgcagcggaattaaatgactcattccgctcagatctctaacccttgtatcctttctgtagcagagtatcaccaagatctgagccggattctccttcacttgaattggattcttcatagtcttacacactatgattgagtaccaacttgttatgtgtgggcatgtactctatcactatagggatcgaaaatagaagagagaaagagagagagaaggagagagaagagaaagctcaaaatttgacttaaggcaagtgaattattaaaattccaattttgagtccatcactatcgtttcacttctaaatacctatagaagctgtagattccatatctatgattagcgccccactcaattgcactattatgttcccaaaatgtacgtatcaccctgaccaaaagtaggcttaactaacaaattaaagaacacaaataacactcttgagatcgaacctaatcatgtcaagattaagatcatttgatctaggatcaactaggtgatattgaattgaatagatattacgg

SEQ ID NO: 401860 - DNA, 500 bp, Cannabis indica
gggtgctgtttgaggatgttatgactttattgtctaaatttcctgtagcagttttgttccatgtggctcatgataagaaattatgcagctcatgatttggtaaagcatgcccttcggttagactatgagctatcctagttcgaggaggtaccaccgccgattgtagattgctccattgttaatcatgtgtggttttctaaatttgacacaaaaaatgagtttgtgatatatttaatctactgtttacaattatgatccaatgcacaaaaaaaattgattatattgatggtcatatgatatttaatgaggatacacataaagtattaattttttttagttttttattatttaaataccagtaacatagtaaataaagaatgtaaagtttagtgaaactcaatgaatcataataattagttacattatagtaaataaaaaggaataattacataagacaccattttttgtaaaatatttacatttttacgttcaaagaatat

SEQ ID NO: 401861 - DNA, 776 bp, Cannabis indica
tcgctacaaggaaacttcctataattttatccaactaacggaagcgagactcataaccttggcaagttagaagatttatgtatacccacgatcgatgtaagacatatcttgttgacctcagaacgaagaatggttccagctcgccattgagatcactacaatcaagtttctgtcgagacatctctagatttaacaattaaagacgtgtttaatacacgatatttttgacccagtgaaagtgggaaaatcaaagctatatgaatttcaaaatcatacaccgcataaacattttgtaatatgtaatcagatcccacgattttagggataatgactgtaatcatattttggccagctttgtaattaactaccactatgcaactgtaaatagtgacaaacaatctcaaaaatgggacgaaaaatttcttatgcaagacgccctaaaaaaatactcagaaatctgaataagatatgcagaattttaaatgcaaaaccacgtaaaaacactcggtgttcatattttatttttctatagcttttagtatttgtgtgttgaattataactgtgaggctcaaattttgttaacaaaaaatctgtgttaacaattccattttcaaatataattgtaattgcatttgttgaatcgtatttttcccagtttgacacgtgtcatcctttgaagtgctacccaaatttttggtataacaattgcctcttaaaaggttctttttaataaaaagtgctttttaatgattataaagggtatatttgtcataat

SEQ ID NO: 401862 - DNA, 658 bp, Cannabis indica
aattaaagaaaagaaaataaaaaaaatagatcaagacaatataataaatttaataaagaataaataactaataaaaaataaatataattatcctacttaatttgtttattcttttgaagagtaaatattagagacaacaaaaattgtacattatttttaaattacacatgtcatatgcatttaatctttatcatatataattatatagctaatgatcgaatgaaatatatatatatatatatatatatttatatatgtggacattaatttggtcaatgtcaattaattaataatcatgtgtttatctatctagtttgggattaatattttatcacgtgatggaaggaaaaagtaaaaggccaatatacatatatccatgaactaaaaaaaaaaattcatttaatcacaataaaatatttgataaaaataaaaaattgtgactaattattagcatttctattttttaactaaaagttcaataattaaaagtattaatcacaaattataatttattgtaattaaatgtgtctttagtatatataacaatatttattatgaacaaaactaaattaataacaaatgtaatctaaaaattatgtctttaatgatgagttaattttttttttttgtactaaaaattacatttaattataaaaaa

SEQ ID NO: 401863 - DNA, 1105 bp, Cannabis indica
tggtttttcgcgagaatccaaattagtcttccaaggagatcttgaatattttatgcgggtgaggtcacttatattgttttcgcacattcaccacactgaaaagatcttctatctttcagatgaacgatttttcggacagccagatgcttggctctagaggcaatgctttcgacggcgaccaggaccaggaggacagctttatcccaaccttgatttcagaagaaaagaccccaattgccggagatgtggagctgggtccgttgtcctctgcagatatcgagaggatggttcaagagctcgctgaatcaggaactatcgagattcttgatagcgaatctacggtataagctcgcgaacatcttgttcactctaggcatccccctgacaccgaagtcgaagagatgggcgaggattgggaggttcctgatcgtgaatcagatgaggatggagatgccaaagggagagagactgattcagttgacaacacgcaactgaatgagtcgttctcctgcgaggacttagtttcacgagtcactaaatctgacttgtccaccttttcgaggttaaacttattgcgactcggcaccatgcgtcctcgcgccactcaaagactgcaccttcccttcaccaaccccgtgatcatacccttagaggacgtcgtagtttccattcccattcttcgatgtggagtatcaatccctttccatccattcatctccgctattctcaagcggtatgatgtgtccccttttcaactgaccctaaatagctatcgcatagctttaggtttttatgcgatgtatatggagtacgcgcatagggagccttcgatggaggagttcagttacttttatgacataaagaacgtgggtctccacaatggcttctaccatttcagcaagtgggccacttctgaaatcaacggtgtggaaggcatggtttccaatatgggggattagaaatctaaatggttttacgtgtttaaagtcccaggaattagggctgatttaatcgtcgacctagtacgtcgcacatttccttacttagtttttatgttaccttgtgattttgagctaatctgctatttccttaatttccgctagat

SEQ ID NO: 401864 - DNA, 521 bp, Cannabis indica
aaaaaaaaaaaaagaatttacattatcatcatcacctctctttcttccttccattgcatctcagcaccttcttctagcatgaatttgccaccacttatttcgctcccgatccaaccatgtgtcgcgattgttattcccacctcgtcttttacttcgaatctcagtgtctcgtagaagtttattagagctgccttcgccgcctacacattagtgtctcgtaaatatcaagttatgatatgttttattggcttaagcaacacatgttttaatcaattactcacagcatataagctcattctaggcagaggtaaccagttctctactgaggcattaactatgactcgaccattgctttggtataagtaaggaagagccacaaatgttggataaacatttccccaaaagttaatgtcctgaaaacccaaaaaataaattacaaaaattaggagtctttagtctggattttcaattttttcaaactaaaccactattacggtttttaaaaatttaaaaccaaacca

SEQ ID NO: 401865 - DNA, 673 bp, Cannabis indica
gagtactcaactgggaatgagaaataattaacagaaaactggaaaataataatgagacaaagaattatagtggttcagtcagatcacggtctgcttagtccactgtagcaagagtttcgtaggtgccatttcacggtggatcacccctttatatacaaagcaggtgtccaattagttatacagggattgcattcattgtcaatccgtttttacacattgaattacaataattaactaaacaacgttaacattaataaatgaacgacagttactaagtttatcaacgtatgcgtcttctatatctgcgagttggctgtccatattctggtgataaactcgcgggttcatcgattatgctcgggatgtctgcgtccttaggtagtcgcctcttgtggacatcgcatgacgggctgatagggcctagttatgcaagcctatattacattataaaggctgcagggttcttaagaccaactcgtatttatagagaatcgttctcctggttgatacaaggacacggggaggatgctcgcatatatttgatatatgcgagctactctcttgtctcggatgcgattagacttcggtcatgctcgccacctctcgctgattctatcttaagcgaggtttaaaacttcgaggagtccctcagggacatctcagctttctttgg

SEQ ID NO: 401866 - DNA, 539 bp, Cannabis indica
ttgagttttaaaactcaaacttttgtctttaatgccaatttttgattgtgagcattttgggtaatttgttgcttgaaatatgttatttggggtatattaaacaggcctggaaggtttggtatggtttggatacgaattggacaaggtttcaaaattttttggttacctggtgtaaactggttaaccggttttacaggccatataaaaccgattaaccacatcagaaactcttttcccaaatttttcgtgttagttttagagatttggttggttgattccttgattatttagggtatttccatgttgtttatcgaaaggaaaaacttttagtctcaagtttaagtccccgaaaaagtgattgagtgtgtcactcaccagtgttacgaataatgtgctataggggcttgtaattagtcgagcagctgttccactcaggttggccggcacgcctgaattcagaaacgaggtaagattagtataatgacatgcttgtgtgattacatgtttagctacatgttatttatgttggaaatatttta

SEQ ID NO: 401867 - DNA, 1318 bp, Cannabis indica
caataaaagttacataatgacaagtagaaaccaatttcttcaataaaaaactacatatgttattatgtagatttcaatttcattgatttatggaactggtttctatgtcttattatgtcatttttatttgtatatgactttcattatatttgttagttattttcatccatataataacaaccagaaaccagttcataaatcaataaaatttacataatgatacatagatataagtttctttaagaaaaaattacatatgttattatatagaattcagtttcattgatttatgtaacttgtttctatgttacattatgttatttttttgtatataacttttattgtatttgtttcttaacttatttttaattgtagttgatgatttgagattttaacatttaatttttgttatggttttgtatgagttcacaagttttattatggtttcacaggttttattatgacttttcatagggtcaaaactagtttcacatgtgttaacgtagatttttgttaaccaaatttgagccttacaatgataattcaatacaaaaataataaaagctatagaaaaataaaatatgaacaccaggtttttttatgtggttttggtcaatcttattcagatttctgagtattttttagggcctcttgcctaagagctttttcgtccgcttttttgagattgtttgccactatttataattgtacagtggcagttaattacaaagctaaccaaaatatgtttacagccattatccttaaaattatgggatctgattacaaatcaagccaaataaatgcagtttttacatagctgtgaatatcccacttttattgggctgagatgaacgcgtaatcaaagatatacggtaagccttatctcattgggatgcctcgccaagaagggagccaagatcactttgatagcgagtagttgcttgtcattttggcttctcgagaataatattgtctttactctgataactatactctctggtgtcgagaggatcttcctcgcatgcataccatcttctagcaagacaaacggctcgttgtctgctatcttggctcgtcaaactatctatacttagtttgtatatcgtataatatacgctaagtatttttagtgttgtcactttctctttcacgcagcgaggttgaggcctcgtcatgaacatgtgcacccacatggtttctcgtcaatacataagttagtagttcgtacgttttgtctcgcagagggctattcagccagccgagttataaacataccctgcgaattatatttccaacgagttgttccatgctaagcata

SEQ ID NO: 401868 - DNA, 603 bp, Cannabis indica
cttcaagatcgctcacaagatctctgctcttagggatcatttgtgaggatcgcccatggtaggctacagggttccctgatttggattggtcgaagctccttagccttggaatccatcatttccagctccaattgaggcttgaagtctttgagaacaagtggaaattagttggtgcatttgggcaagatgatttgggaaggatgaacttccgaactcagaaaggacattctagtagaaaagaggtgatccattctgagaatggatttcaccaaaaagccagaagttgtgaaaaatgacaagcttgagctgcccttttatacacaaagttcagtgacaagaaagctaaagattgggaaatctaacggttggaagatgggcagaatatgaagagacgattcataatgatccttgaaatcatacaactgcgagaatcaaaggatgcctttttttccaagaaaggattttgggggaaatgccctcttcaattattaaaaatctctctttaataaaaaagaactttttaaggagcaattgttatgcccaaaattcggttgccgcttcaatgaaggacatgtgtcaggacgaagggaatgtgaatcgatg

SEQ ID NO: 401869 - DNA, 602 bp, Cannabis indica
ctctgaaatccgaagaaaatatccaaacacagtttttgaaaaaatttctagttcgctttcagttagaattcttttgatgtctccaattacagagtaataacgagatgtgaccactctagaatggtagaattgagatcgggtgtacttgcattcccgatcctaaaaacagaacaataaaaaacactgctaaaacacatataaaacactacaaaaacaacaataaaaacaaaaaacaaggaaaaaaaacagagaacagaatgcataacatcacacacctcaacaatcttattggcagtaatttcctcagccacacctatggatggcaacaccttgataggggatttacccttgtcctcaaattaaacgaaacaacaccagcaaaacaacaaacaaatatcaacaaaaaacatatatataataaaacaataaatgaaaaacataacaaaacaaagacaaacccaaacaattacccagatatatgaacttcaaaaatcgaatttaaaaaaaaaaaaattacaaaaacaatagaagataaataataaaataccttcacagagacaggccacctcacaaattcagattccaactcaaaatctgagtct

SEQ ID NO: 401870 - DNA, 585 bp, Cannabis indica
tttttttatttatttttattcttggataaagtaaagacaacgatcctataggtgtttctaaaagtcagaagaaatcgacttctcacattatcatagtgtcacaattttaactaattttattaattacattatcatatataaataataactacaaaaaatgtcacttttttcaatatatttttgtgctggtaaaagttagtattacactggtaaaatagaatttacttgtgatgtgttggcaaaaggagttggcaaatcaatgttggtattagaacttttgccagcataaaataaaaagcgctgacaataatgacttttcccagcgcgtaaatgtgctggtaaaagttagattttagccactgcaaatatacgcaggtaaaactttgacctctttactagtgcagtttgcgaaatgcgctggtaaaaataacttttaccagcacagtagcgaactgtgctggtaaaagtgatattcttatagtgaatgcaatataattaatcataattatatatacgtagctcatgttttcaatatttgaaagaaagcgttacataagttatttgtaacgtaatggtattttacaa

SEQ ID NO: 401871 - DNA, 1481 bp, Cannabis indica
ccagtttatgatgatagcgttgtatagagatgtcaacaaaagaacattgcactagaaagtaaaaaaaagttatattgaatcaaatgatgagaaaagttaagcttgagtagaaaaatagaaacccaatttagcaacaattgaaaattattttttgattacctttttggataagctccatgagagagtgaacatcattagtgtaaagctcaactgagaaacttgtaacaacaagatggagatcttgggttaatgggtttgactcttttttaccaatggaaaacatttgagacctaatatcttatatatggcgcttagatatttttgtattaattgagtgaataatggatatgattatggtttcttcttcttgcttgatatctctcaaaacttatattttttttgtttttggtatgataattaacttttgcatcatgataagaataagaaaccaatacaatttttattcttagtctctctcgatgtcactattaaccatctaattatgtccctagatttgttatgtgtcatgctttttattcttagtctctctgtctatgttactattaaccccctatttatacatgtattttctttacatttggaatataactttcaattcttaattaaagtaaaattagttaaattaaataattttttcaaagcataaaaacgaaattactaaattactaatttaccaaaatttcgaaaacataacgactttaattaaaaatttccaaaaaatttaatgctattaatagcatcaaaaacaatccaaaataagacaaaataagagacgatgacttagatgatttttaatcattattacatttgatattaatattttaattcgagttttataagttaagtgtgttctaggataatcgaatttacgattctagttctagaaacataattatttttactttaatttatgttttatgagagatcttttggtatgttttaatattatgtgacatttcatggtatgttatttttatgagatattttatggtatttttaaagcttatgtgatattttattcatctttaagtgttctaaaatattatttcaaaataatttgtgaggattacctctcaaactcctcaaggcttatgaaattacaaactagtaactaattatagtatactaaattactaattagtaacttattatattatattaaattactaactagtaactagttctaatgctactgaatttttggcatcataacaactataactgaatgttcccatacaatttaaagttgttaataacaacaaaacacaataaaataattacaacaaaatttagcaatataaaaatttgtcactcatccgaccacagtacatgtattcgaagagcctacttcactacggatgaatatttaagatattcaaactcatcaaccatgtatattattccactcatttgactgcagtacaatatattgtagaacctacttcactacggatgaatat

SEQ ID NO: 401872 - DNA, 1250 bp, Cannabis indica
aaaatatgtggacctggataaggctgacgcgtggagctgtggggatcaacgcataaaaaatcggctaagtcctaggcgaaagggaagtatctcagggaggtgtctcccggaggagagcacaagaagtattttttactctccaggaggccgaaggtatgataaggcagtttcgggaggtgcagagatctcttgacagtcacctcgcatttaatgccgcatgggggaagacgtattaaaatctccataagtgacatgacagatggcgtaacccctttctttcggctattacgatataatcaataaggctagtgacgactactttatgaggaatcgcatcaatcaagaggggataaaagattatatccacctaacccctaagatacctatggtataggtcatgtatttcctattttgcatcagctgggaatgtgtgcccctatgaagctaacacagaaagacaagtgatccatttctagggatcaccccagaaaaatactataaataccccacaaataggctgaaaaagagtcgaacattctggggttaaaggaatcaaagagagaaaataggagagaaatttaccaagaacattctctgtaataaatactctcattaataacaaagactcgtagactaaggctcattaatgccccaaccacataaaaatctcaggcattaaacttcctacagctcttcttacatattatttaactagttgccgaaaacctcggtcaacattttggtgctttcattgagagctgaaggaagcgtcttcaaacagacagtaaccttagaagttgaaacaacaatggtggaaactcgcaacaacacacgtcaaccctgtcctcctcaggttgctcaaaatctagagaacgaggaagtggcctcaagagtgaacgtggactctaaggaacgagatagggccaacgacgacgagtagaagggaaactttgatgagtatgacgcctacgacgagggcagttatacagagttgttgctattaaggcaaaaggtcgctgatcatgaagttgaaatcgcggcccaaaaagagcagaatagaaagatgcaagaggtgatggtcaccatgcaaaaagccatggagacagcggggattcgtatacaccctaaggccgtccaggcaggactcgaagatacgctggaagaatcctctccaagcactcaaagacacaagagtagggaaccaagtcctatacggtacccttccaaagaaaaccaaagaaaaaacccta

SEQ ID NO: 401873 - DNA, 1081 bp, Cannabis indica
ttataatttccatatatttgaaaaacaaaaactatactcatgttttactcaaatttttgacaagagtgatgtggcaagtatggagacatatatgacacgagattacaagagatggaaactatgaggaacgcataaggcacccaatacaatagacaaccacgatcgaaaaaggacgaaccgttaccatgagaagcctttggatatggacgagaccacatgcaccctatagagggtctgctgagaccgagggtcctcttgcgttggccaggccgaaggttccctttagggtggcctaaactagcttttccctcaacgatggggtgttgagcttcctatccacgtacaaccgcagtactaccacccaagatcccgaggtttgtcctgtgtactcaacacttgtccgtggtcgtgattcaatgtctatacaactacaagtatgaagacaagacaagaccaagattgatgtacaatcatgattgaggatgttcctagcttgggatcaatatagaacgcaaatgggttcgtcccgagaatatgacaccaaaacaagtgcccttaggggttggcctaggccgagtattgctaaagtcagccaagttgagtgtaccgtaaaggtcagccaagccgagtatagccctagagtcatcccaggtcgagggtcaccctatggacactcacccaagaaccccgtaatacataataagcatcaaccaatctcgctcaaagctcaaaggtagttataaacccaccaaaaaagtgagatatctacacaaaactcggttcttaaccaatatcccaaaaattaagtctgacagccagtagtcccgtgatccgtaagcggaaataccgggcaagctgtgcaatcccacatcgcctggggaaggtcaagtgggatgattttgaggttgtgtaggtatcactacaaaaaatcttacttttagtcacaacaaaatttgtggctaaaagtaaaaaagttgtgactaattataaattactattcctatgttgtagctaaaaagtccatggctaaatgtattagtcacaaaaattacaatttgttgtgactaaaatgtatttttag

SEQ ID NO: 401874 - DNA, 506 bp, Cannabis indica
ttccttgtttttggattcttcaccgtctcacagactatgattgaggaccaacttgatgtgtgtgggcacttactcaatcgctgatggctgaatttattttgtgaagaaaggctatggtatttcgaaattgaagaggaagaagaaggaagagatctcgtcaaaaagctaggtttttagctttggaggcattagttggataatgagaccatagccttcctttaatactattcttcaatagggttagggttgaactattaggaataaaaaattgataaaattagagtaaaattgacccctaatggccagccacatagtgggtcctacattagtttgggctttgtcatttttctcaactattttatctatttttcacaaataccactttatgcactttcaaccctataaatgccaaaactatttatttaataattaaattaactatcaaataaaattgtcattttataatatttattaattagactccataaagtgtcttaattaacaaa

SEQ ID NO: 401875 - DNA, 743 bp, Cannabis indica
ttgctaagtgttggcgtgctgtgtggcttgcttactgtccggctaaaaggactttgtccgagaaaatatatgtggtcttctatccggaatatttcttacgatcaggtacatagagttgatcccacgtgtcaccatcgtgtgatgccacgtcaaagtacaaaaattgggataacactcattttattgtgaaaatagttctattttaatatatatctcaatggtttggaacttatgtctcaagaaataagaaataataaacaataaatagacagatatttacatagttcaggcattaaagatccttatgttatacctgaaattcggctgctacttcagaaggtgacacgtgacactctcagtgaatatgaaccagcaaatataatggcaataactcattaaatgcaaaattaatagagtatatttataacttacagactgcacagtctttagcgagacaaagatgtacaaactattgattcgtgtattgacaagtgtagaaaatagtgaatcaaattatgtgtgtatttcatagaatagtacatatttatatacaaagctaggagactaggaaataggaaactaccaacaaaataggaaactactaaatacaagttaccctaattcttttacacctaatatacagctaatactctaacactccccctcaagctggagcatagatgttaatcatgcccagcttgttacaaagatagtctatccgcaccccattcaaagcttttgta

SEQ ID NO: 401876 - DNA, 690 bp, Cannabis indica
ttccttccattatctgtccaacgcaagctgcttttgtcccaggtagaaacatccatgataacaatgtcattgtccaagaaatcatccactcgtttaatagaaagaagggtaaggagggtttctttgctataaaaattgaccttgttaaagcatacgataggttgagctggaaatttattgatcatgtcctggagtgttatggtatcccgctaaaattccgtcattggatatcgcaatgtatttctactacaaccctaaatatttgtctcaatgggggtcctgtaggcaaaatcaatccctcttgtgggcttcgtcagggagactcgctttccccttatcttttcatctgggctgctgatgttctttcaagattaattcacgatgcccttgaccagggatccatcaaaggtattaaactcagtaggggtggtcctgtgctatcccacattttctttgcggatgacttaatattggtgggcagagccaatttagttgaggcaaatggtttctggagctgcttagaaaaattctgctcttggtctggccaacaggtgaataagctcaagacgacaattttcttcagtaaaaacacgccggtgaacatgcgtagggatatcaaggaaggtctgggaattgattatcctgaggggtgcttaaaatatttgggtcttccccttttccgatctaggc

SEQ ID NO: 401877 - DNA, 946 bp, Cannabis indica
tgctggattttaatgcatgaaatgctatttttaactccttgattgatgattaaaaatatgtttgttgatttgggagttttggttaagttttggattggtttgaatgtgtttaaaagctaaaatttgaaggtttgcttgctggtttctgggtttgaaacccaggtgccacggcatggcttatagcatgccgcggcccgcccctgttggtgagacctgggagtttgtcccaggtgccacgacatggcttttgcatgccacggtcggccctcgagtttttgggcaaattcatgtgttgactttgaaaatgcataactttgtgatccgaactccgttttgggagttctatataccattggaaagctcattccgagctctatatgattatctatatttttaatgccatgtatgtattttatgaatgtggaatcaggggctaaccctatttgtgtaaatcccaatattgtgactaggattaccggcacctgattaggagcacccggagatttggaatttttactattgcaagacatcaggtaagacaatagttagcacgtagagttatgtgcagtggtgcttatattggaaaggatatatgtgagtaattagtagttgggattagggttattaccctagtgatatatgttgtgtaaatgctatgccatattgaatatatgaatatattgagatttagggttatgtgttcaaggcataaccaggttggactcagtaattagaactgagaggaaccattctaaggccttattgtatttagacatgtgagcgcaacacgtaggtctacgttacgtagacataaataggcatgtgagcgtaacatgtaggtctgtgtcatacaggcatatgagaatggcattactatttatatagtgtgataaacatgttattgatattttatactatcttgctgggcttggctcacgggtgctct

SEQ ID NO: 401878 - DNA, 575 bp, Cannabis indica
gctactcattgtttagaccaaacttccatttctccaacctctagctctaacaaagatacaatgattgggggcaatacccaaaaaggcttttaactctaaatactttcagaaggataggtagattttccgaatttcattatatgctgcgacaccttcatctcactacaaataccactaaaaactgaacagttcaagctcatctcactacaaacaatcttgtggtgttttccattactaccaatccaactctcctagcccaattccagctgaaattcattctaaatgaaaataaaattagggatccaccaccaaaatttaaaatgattcaaaccatgtgtatatatagcactgcatggacaagtcttatagcacacatggctactcattgtttaggccaaacttccaattctccaaagtctagctctcacaaagatacaattgggagaaatacccgagggctttcaactctaaggtggcatttggttgggaggaacgaaaacatagaaataggaatgggaatgagaataggaataagaatggaataaaatttaaaatgtataaaaaaaaaataataa

SEQ ID NO: 401879 - DNA, 542 bp, Cannabis indica
tcccccctcaaacttagggtggtgagagacactatcctaagtttgtcacgaaggaaaagaaaccgagtgttggagagagccttggtaaggatgtcggcagtttggtcataggctggagtgtgcttgactaccaaggttttggcaagaactttttctctgacaaagtacaagtcgagttcgatgtgttttgttcttgcatgtaggatggggtttgcagacatcaaaactgtgctaagattgtcgcaccaaagagtaggtggtctgggaatgtgaactttcagttcactgagaagagcttgtatccatgttatctcagcagctaggcttgcaaggctgcggtattcggcttcagtgctggagcgagacacggtatgctgttttttcgaggaccaacaaattagattagagccaagataaacacagagcccagaggtggagcgtctgtcatcaatgtcagatgcccaatctgcatcactgaagccgactaagtcaagggatgtggatcgagtcatgtcaaggccatagtctaaagtaccctttag

SEQ ID NO: 401880 - DNA, 521 bp, Cannabis indica
ttgacgctcggggtgacaacgcatgtggccgaacagagccttccatgaccagaatttcttcccgcattcgctacatggcatggtgattttgggtgccgaagggtctgggccgcctctcctcctctcctgcccctgttttgggcctgggcctgggcctgggccgccttcgattcgggccgttttggaccgtttctttttaggattgagggtgttggtggtggtcatacggtgtcgttctggtggttgtgggagaggaggaggaggaggaggaggagggaagaaagcaacagaggctgtggttgtggttgtggctgtggaaacgacgtcgttgggtggtggtggtggtggagttgggactgagagttgagaatggaagtgggagtagttgttgttgttgttgttgttgttgttgttggtggtggccatagttagtgagaatggagattatttgaagagagggaattacgaaagccaaaaaaaggttggagtgtgggtgggagtgtgggttttgtagagagaat

SEQ ID NO: 401881 - DNA, 654 bp, Cannabis indica
gcaaaatacatgatctgctcgcacaatttaaaagctatggtcttagagaaaattccaagggaagaaaacacaactgcagacgcgttagctcgattgggaagcagtaatgtaagtgacaaggcaaacttagttcctatccagttcctcgaagagcctatcatcactggcattgaagaaatcgaaatgattgatacttccccaaactagatgacaccaatagcagcctacctcaacactggaaaactcccagataattggaaggaagctcaaaaaatgagaaggaaggctacacggtatatcatagtagagggaattatgtacaggagaggattctcaatgccattgctcagatgtgttactcaacaagaagccgcacgactcctatctgaggtgcacgatgaattctgtggaaatcatgcccccagacaaagtttatctaagaaaattctaaggcaaggttacttctggccaacgatgattgaagattcaaaagcctatgttaagaaatgtgacaaatgccagagatttagaattcgaactaacgagttaactaagatgcagagtccgtggccctttgccatttggggaattgacatgatcagacaattacccaaaggcaaaggaggagtgcagtatgcagtggtagaggttgat

SEQ ID NO: 401882 - DNA, 994 bp, Cannabis indica
cgccatatatattaaccagcaacattatttttgctggcacacaacaatatcatttttatagtgtttgaggttaatattaagttttgttatctaatttcttaaataatcaatccaaatcatagccttctttttgctacaaatatattgaataagtggttagagatttgactttaaactaaccattattttaatagaatatttaataactgcctaaaaaaaaaagcgtgaatatatatatattttttttggaaaatcaaaatatataatttttttttaacccaatatttatatatttgatcctaaattaataatacaatccgtacctgttacaaaactaaataaacaaaatacgtacctaattttttgttttatcttttattttataatgggagtattttcttaatgttaattgtttttcttatttggatttttttcagattaatttaaagcaagatcttggctagatattggaataataaaaaagaaattataaggaaaaagatcaagagaaaaaaataataataagattttgtttttttcctctcaatgattaattgtataagcctacaattaccttactacaccacgtgaattaaatagtctgctagtgttacgattattaatgtttatatatgatcacttatttaaataatctgataggacaatattagacagtattattatatgttaattattggtagatattcaactacgactatattaatagtgcttaattactaagtcataatttaattaattttccaaaaagtgacaactacaacagccagtttataaggtaccaacgttctttataaattaatataatatttttataatatgttaacactattttcaacttgaattttgtaaaagtcatcgaatagattttttgacaaaaataaattatgtatattttaaaatagtacaaatagatttttttttttgaatggaaaatgtaaaacttcattaaccaacaaactccgtcaccaaacaa

SEQ ID NO: 401883 - DNA, 782 bp, Cannabis indica
tccttagaacttgctgttgttcacttccatattttttataggaacctgatcctttgtgtttagaaacctgccaagtatctttgtgagtactcacttctcttttttcccccaaacgagcatttccagcagcagtagcagctggtttttccacagcactacctgcagcaacaataccagcagcggcagtacctgctgctatagcatcaggtttttctacaccagcaacctgttctcttgtcccctcttcctgaccctcactatttttattcccagcaacatctttctccttaactatccccttattaccttaagatttctgcccaaatttctcttcaaatgacttatcttttttcctacaatcagccataatatggccataccccttacaatgactacatttaacaggtagccattcatattcaatgccttgttccatcaattgaccatattcattcaagaaccataacgatcgatcaggattatcagtaatctccatttccacaagtattcgagcaaactggaccctagtttgatccttagtgtgcttatcaaccataataggttttccaattgtactaatcaaagcacttaaagttttatttccccaatattgaaggccaagatcatgaagtctaatccatagaggaacagatttaactaacctgactgcattcaaatcagtcgaccacggtcggactattgggttttatgccctaaataaaactcatttcaatataatcagacttacttattaataaagatcagaaataacattttatgtt

SEQ ID NO: 401884 - DNA, 877 bp, Cannabis indica
taaaaatatatattaaaaaagtttatcatgtaaaagttttaaatagcgtaatttgtgtaaattttgggctaagtatatgtgttgaaggcccggctgatagggcttcaccgcccctttgcccccacccattaagtctcgctagtacaatagatgagacctcgtggttagagaaatacaatgttacatcagctggagtattaagtggagcggggatcaccctcatttacatgcttatgggcaattattagaactaatccaatgatgggtcgagttgggccgaggcccccaattttaatcaaacttctctttaaaactgtgggattatttcagaaatacctaaaaacaactaacaatacattttacaaaattttgagttttttttaatatatagtttcacagtattttttttttctttatttaaagttattttcatgctgcgaaaatatagtataacatttcaataacataaaaacaatacaaaaccgtaaaaatgtaaattaaaaaaaattacaaaaatttctttgtgcaaatttccctaaaaattaagaatttaatttaatttttataaatactatatttatatttttttaccacaatttaataataaaaaaatgaaattattttcttccaatttttttttttattggaaatgctatttcttttgacaaagtgcttaaatattttttttccaaaaataaagtattttttttaaaaaaaaaattaaattttcttggccaaagccctcagcaggctcgagtcgatcctcctcgtcagggccggcccaagcattgggcagcttgggccattgcacaaggcccccatttttttaaggcccaatttttttatttttattattaaagaaaatgcctattttttt

SEQ ID NO: 401885 - DNA, 683 bp, Cannabis indica
atatatcgagtgagaaaaaaaaagggacggttttcatttttacactttaaaatagtttttttttccgcattttttacagaattctacataaaaattcttattgcaactagcgctgcaacttaaattgcaacaaaaaatcgtatagcgttgcgcaactcacatagaaaccaccggagaaaccacttaagaaacccaaaccgtaaatttaaaaaaaaaagttaaaaaaacagtatatggagtaagtatatggagtaattccaaaaaaaaaatagagcaatagtaatattagtgcggaaactgtgaagatttacatgagagttaactaaaaaaaataataataatttaaattaaaaattaataaatttttaattattaatattattttattttttaaaataaatatataattaaatattattataatatgtataaagttttaattgtatacaagcagtcctatcgtaagagtatacaccttacatcataataaccacatgatctaaaatcaatggtcaaaaaaagttccctaccggtagggaacttttgctaggtcctaccatagtcttgccctatatatatatttatattaatatgatcaattttatacgtatacatataaatttaatttattttttaaataatatatttttttcttcacggtctctatttatatatatatatat

SEQ ID NO: 401886 - DNA, 670 bp, Cannabis indica
cctttttatttaaaggaactattccagtacaagtttttaatgccaaatttggtgtagtataacaccaaatttagtgtataggttggagatgctgttaggatttgactattgtgtttgtgagcaattactagatagcaatttatagtcaccacaaaaaataattaaatatctttagtagcaacctttaagtcgcaatataaattttttgtgactagatgtgacttttagtcataacaaaaatttacttgtgactaaaacatagtatttagatacaagttgttactaattgttagaatttgggataagatgaatgaggttctatctcaaaactaattggcaataggaggagtagcccatttatcttatatattacaatttatttccacactttagcaatgtgagaccaactctagtacacccttcttgcgtttttgggcctggaaagtgtgggtataacgaacgacctttaagaaaccacaaggccgaacatgacatttgaaagaatcctacaaggccaaatatcgggaaatttgtgggtgtatacgttggaaatttgtggaatttgaaataggtcaaagaccccaacattgaaaattggcacacattggccaaaaggtcccaaatgaaggttaaaggggagacagcaaaagtatctttttggaccggcaac

SEQ ID NO: 401887 - DNA, 1069 bp, Cannabis indica
tccccgggtgctcctgattaggtgccggtaatcctagtcacacaaatttgggattttcacaaatagggttaacccctgatttcactttcataaaatattcacatggcatttaaaattcaaatattcagatagagctcgaaaagagctttccaacggtatatagaactcccaaatcggagtccagatcacaaagttatggctatttgaagtttgcaaaaaggatctgcccagaaagaaatgggcgcgccgcggcatgctaaataccatgtcgcggcacctgggttcaaaacccagaaaaccagcagcagaactcgaattttcagcctccaatcaacaccaaatcatcccaaatcacaaccaaacttccaaaccatcaaatagggttgctagcaaacaatagatgctcaaataaacatatttcatgcatcaattccaataataaatcttcaatttcagcttgtaaaaatcaacttaaaacatgcttaaaactcacaacttcaagctctcaaacttgagcttcaacccacatatcaacaataaaaacccagcagcataacactattaaaatatgaaattccaacctagaaaacatcataaaatctctgcccaaactcatcaaagaagcatacaacaacaacaagctcaattaaccaagatcaagcatcaaatctaacaacatgcataatcaagaacaccacatctatttcatgctcctctttattaaaaattcaattaataaataaagattaaccaaggaaagttacctcaaatctcaattcaaggctaaactccaacaattcccaagtatcaagctccaattcatgcaataatcacaccaatttctcaagaaatcaaagattgagaaatgagagggtttgagtgagagagagaggtcgggtgagagggatacacaaccagaaaattcttttttgttttcctcaaaattcaatttgtcaaacatagaaattagaggtcaaatgaccaaaatgccccaagggccaattaacatgcatgcatgcacacttccaaggacaatattgtcatttcatacccatttaatatccaaact

SEQ ID NO: 401888 - DNA, 645 bp, Cannabis indica
ttttacaatccactctttcttcccttcactcttcttcctacactcctctgtagaatgacccaagccagcacaatttttacatgttattggcttccattcatattgaactcccacatgtgtattggacccattttcatcttcaaaatcgatcatatctggtagtggttgattcattttgacttcaataagtattctaggataactcaatctctctctttacttggtcacattgtcaaccatgacaagtcttccaacttgatcaatgatcttgaagagagaccgttgcccccaatacttcagctccagatcttctaaatgcacccatataggtactgtatggatatcctcttttttgaagttagtatttggatcccaaggtttcatgattacatgtcttttattgaaaaatatatatcccccattaagaacatcatcacgaaactcacaggtctagaatctgatgatgaatatgccatgtgataggagtttaaccatgtcaattttcccattccatatcctgtttgcaaagctttccagtatctgcagaggtagatttgaaccaagcacataacacacaatcgagggtttccaaaattcgacttcatcttcaatatcttccatggttatttttgttggaaattattt

SEQ ID NO: 401889 - DNA, 1068 bp, Cannabis indica
tgcagaatggaacattgcagctatgacaaaattagtgtggggaattacgaataaggaagacaatatgtggattagatggattcactgtgtatacattaatgtcatgtttactaaaggggaatggaaatcaattgtatgggattgattctcattcatttgtttactaaattttggaatgagagaaactagtgggacccacacaaattaataaaaaaaataaagggaaaggttctcccgccatttttataaggaatacctttcccttttctttacttactttatattaattatatttttattaattaaaaataaaaaaagacaaatatacccttcaaaaatatataaataaaaaataattacatgttctaacaatgtcaatttagtcaaattaagtcatttcgattacctatcctcattatgtaaacaaaataaaatgattctaatttcctttccagtcaatttagtaaacaacaaaataaaatattatttccgattattttatattttaacccgattgatttcttccattgattattcttattccaattacaatttagtaaacgtgccataaaggtgaggaatggttgaactaccaagctccaccccaagcaagctggtattggaggaaattggttgctatcaaaaatcaagttaaagctgctatggacattcagcaatttgctttggttcactacaagatatctaatggctacaaggctctttgtcccccccaaaacaaagtgaattggagccatgaggtatggaatagacttaatatacctagacacagtttttgcttatggattgttatccaagataggcttagaactagggaaaggctccataaattcaatatcattggagaagacacttctgcttgttctgcaaagaccaaactgaatctttagtgcatctattcttctcttgctccttctctaacctttgtctatctcaagtcaaaacttggctcggctggggggttgaaacaacagctttgaataggctgttaagatggttagaacgtgcaaaaattagcaggttttgcaaggcagtattggctgctgctgt

SEQ ID NO: 401890 - DNA, 427 bp, Cannabis indica
tgtccacggcgtcgagtagttatcagtgaatgggggcagcggagaaacagggatttttatgccgaaatggcaggtgcaacctgaaatatatgattttgttggcataaaagaagctttaagctagattgaccgtcatttgtggggacaattgactttgtaaactgatagtttaatttgtgttcaagctgtgcaaagccaaattactttgtcatcctcttttggtcttttagttcatgatattcgcactcctctcttatctttaaataatgttgagttgtgttttttcaaacgatctgcaaacaagctggcccatgttttagcgagaattcatgtttctctccagttcgtgtgtttcaattggagaattattccaacgaagtgcgttctattgttataaacgattgttagttaataaagttgctaagtt

SEQ ID NO: 401891 - DNA, 611 bp, Cannabis indica
tgaattttggttaaggcacccttttttattattattaactgcatgatagtagatcatgtgtgtgttatattctcactccaaagggaagcttataatgaccagttgactctacaatatttctaattgcattgctcatataacttgatcaagttttaattttttgaattttcagtctcctttctaagaaaataataatattttcatctaaattttgaatgattctaactttaaggcatggaaacgagatgatttactttagacataatggatttggacttgtgcctacaaagaagaaaaattttctcatgttatggacacaagtacagctgcccagagaactcttcatgcataatggaaaaggccaagtcatcttagtctccttgttataaaagatccattcatgaacatctattgagtagtttgttggacattacaaatggcaaggaattttctaaagttgtagaaaaattatatgatattggtgaaaacgctgaagttgtacatcttatggatgcaatgacaaccgttcaatttgataaatcaaaggattgcgagattttattttgaaaattatgaatattcagtccaagttgaaagatcattatatatat

SEQ ID NO: 401892 - DNA, 871 bp, Cannabis indica
cttcttgctttatctcatcagggtgttgaggttgtcagaatgtacaaaactttattggggagtcatgggttccaaaaagtaagatttaaaatgtgtttgccttaattaatacttgtattcatgacaatatatttgcttcatagggaaattaagaagatgcatttttttaacttaaaaattataattcaatttaaatcattttgcaacaaaattttagtggcaaaattaatatacttaactttagtaaaattaatttttttaactatatatttgctactaattcaataactatatacatattttatttaaaaaatataatttatattaatcatatttttttaaggattaaatttgtagttgatatattcaatatagtaataattaatcttatgttttaaggtaactaaatgattacttggtacatataagttattaatacttgtaaaaataaattattttaagactaatatattagttgtaaaagatcattagcttttactgactaactatttcgtcacaaatttcaaaatttttagtgactaaataattttagtcaccaaaaattattagtctcgctactattataatttggcgccaaagttttagtgactaaatactattttagtcactaaaaataacaaacagtgactaaaaaattggtcattgatttttttggttctaattaaacattgtctcatgactaaaaatatttacgactaaatattagtcgcaaaatctaactattagtgactaagttggtttagtcacaaaaaatctagtcgctgaaaacttattttcttgtagtgttggtaaattctggttcagcttattggaagttcagaaatataggtccatggtctccattctgttg

SEQ ID NO: 401893 - DNA, 554 bp, Cannabis indica
taatgaataaaaaaatgaagatagcaaaacatatcaatgccggtgcaataatgaatatgcactagtaaaagtaagaaaatgaagcgctaaaaggcgcgagaagtttgcagcatttcatttcaattttgtcggtgcatgtgaacttttaccgacgcatatatgagtcggcaaaagtctcaaaaaaaaaaagggagggaaaaatttctgcgtgaattttctgtggtaggcgggaatacttttgcgggcgcacaattgcgccgacaaaagtattaaactaaacgtgcgttttgacctaggtcaaaatattttttttaaagatttttaccggcgtaattggatgcgccggtaaaagtatatatacgtatcagggagcacgaagccccctttcttccccattttcatttttttctaaaaaaatttctcaccctctctcgttctctctctgattccctctcagtctctctttatctctttcaatctctcttaatttctctcaatctctctttatccctctcaatccctctttgtttctctctttttttcccaaataaaaa

SEQ ID NO: 401894 - DNA, 1445 bp, Cannabis indica
atggcacaggtcacccatggcttatagaaagccatgggtggtgtctctcacttttatttcgtaaccgacttgtgccactttactatggcagtggtctctaattttggagagcactaccattttcttatggcagaggtcacctaaggcgacttctaagccagaaatgacttttctcacttgtttcttactcaatgatgtcgagggaacccgttcgagaaaatttccttccacggtttgcgaggagtgacctgtgccattctcttatggtagacgtcacctaaggcgactcctaggccggaaatgacttttctcacttgtccattgctccttgatgtcaagggaacccattcgagaaaatttcctttcatggtttgcgaggagtgacctgtgccattctcttatggcagtggtctccaaaactggagagcactgccattttcttatggcagtggtcacttattcctcttttcttgtggttttagtgctattttgactttatacataaacccaagtcattttcatgcctaaataagtcaagtccttattggtttccttggcggattgagttctctagggtgaaaaggcttgcgagggcccatgaaccctagttttggcacacttgggtgtgtgactccaaacgccaaatagttggatgacatttttgagccctccagaagtgccatggggccctcaagaaggatgtcttgatttatttgacatttatgagtcgtggtcaaagttgcaacattgactttaatgtctttaaggtactcttggcatgtggaaccttgtgcaagagtagctattttattttttttacgaaaactgggtataacatttgccccccccccccaaaagtatgtgcttgtaagccttcaagtaatgcttttgcacttttcccaaggcttgtgcaaaaaaaatgcttctttgtagagtgcatgaatataacttctcttctgaagatgtgtgcatgggcacgaccaatgtccttgattgttgtgaagatgtgtgtatgggcacgactaatgtccgtaattattgtgaagaggtgtgcatgggcacgaccaatgtccgtaattattgtgaagaggtgtgcatgggcacgaccaatgtccgtaattattgtgaagaattgtgcatgggcacgaccaagtttcttggacttgtatgtgtggagtttttaaagcacgtggcttctccttagaatgtgaggtgagttatatctcatatatcatgtggtagtcgagtagagttatttctcttgcttaattttgggacttttgcaaggtttaaaactttctgctcaagttttataattcagagtagagttatatatcttgcttgaatttaaaacttttatagagttttgaaatctcttgcttatgttttgagcattgagtagagttgtatccctttctcaaactcatccttaagtagagttaaat

SEQ ID NO: 401895 - DNA, 841 bp, Cannabis indica
ttagaatctaaacggaggtgtcctttactaagaaaaaggattttggcgaaaatgccctccgtaattttaaaaagctctttttactaaaaaagaactttttaaggggcaattctcatactcaaaatttggctggaggacacgtgtcaagataaagggaatgtgaatcggtgccatatctttttatgaaataactcattaattgcgtaagtactagagtatatctgcaacccactgactgtaaagtcttaggcgaggaatcaatgtacgaactggtacttagagtattaacgggaaaccatatgtggccaaaagagaattgcgaggcacaagagaagaataacacatacctcagcttacaataagctgactaagtataaaattcgaactggctccgagtacaagaatgcgagacgaccatctcgctacgaggaaacttcttatagtttcatccgactaacggaagcgagactcacaaccttggcaagtcagcagatttcatccacgatcgatgcaagacacatcttgtcgacctcaaaaagaagaacagttccagctcgccattgggatcacagcagtctagtttctgtcgagacatctccagaatcaacaattaaagacgtgtttaatatatgatatttctgactcagtaaaagcgggaaaatcacagctaaatgattttcaaaatcatgcaccgtattaacatttcattatatgtaatcagatcccacgatttaagggatagtgactgtaattatatttttaccaaccttgtaattaactgccactatgcaattataaatagtggcaaacaatctcaaaagagggatgaaaaaactcttat

SEQ ID NO: 401896 - DNA, 742 bp, Cannabis indica
agtgaccacagcgacatgcgtctttcggcatggccctgaagtgacgaggagacacccaccatttcaaggagtctaactaaaatcacaacctgcgaagatgtcatgcatctttagctaagcgatattcctccaaaaacggctgggagaaactcagtgactcaagggacatgctttctcaggcatgaccctgaagttactaaggtactcccaccgttttgaggatatctaccagccaaagaatacgcttattagaacattagcacatgtcgcaaatggctgggtgtatctcagtatctcaaggaacatataaccaactgcatatatgaacattagaatactgtgatacacccaccatttgaaagaccagaccaatgttaccacaacaaaaatttacagaaatgcgaaaatcctaaagttcagagtaagtctctttgaagctaggaagaacagacatgcgagtattcgaggtgttcgtccgaataccccggtgtattcaaaatatgaagtaacgtctgttcaagcattttttctacaatacacggttatgccaattttaggtcattttttcttaaattacctagtttcttgcctaaaaaacgtagcctcatacgtattccctacaaacatatattcctaaaccccctcataaatgttaaaacccataaattagtgttttttctcaaacagaaaacaaaatgcagtgagctttaaaaactaacctttagttctgataatctgttcc

SEQ ID NO: 401897 - DNA, 701 bp, Cannabis indica
ttcaatgtgttaaacttagccacgggtgcaaaggtatcgagataatccacaccaggttgttgggagtaccctttggcaaccaagcgggctttgcatcgtataaccccatcagccccatatttgtgtttgtaaacccatttattgccaattgcatgttggccggggggtagggggacaacaacccaagtgttttgttgttctagagcagttagctcattgtccatggcatcgagccattttttgaatgcacatgcttctttataattggttggctcagggagaatgtgagcaaccaaaattgcagctcgaaaagcatccgttaatctgtcataggacaaaaactggtttatggaatgggtggtggagcatgtgtaatcagccaagtaatcaggtttggtgattttgcgaccaaacttggatattttttgctcagttgaagctggcaatgtgggtgagtttgtgttgttgttgctggtggaatggccagcatcgtgttggatgttgttgcgtgtgtcatcattgttgatagtatgaggtgtttcagatggggggatggtgtgatgaattggggaattagaagcaggggcagggaggcatgatgatggtgtatttggaagaagagaatcaacaaatgggttgtgtatgtcgttgctggtttttaaaggaaaaattttttcgtgaaacacgacatctcgggagtg

SEQ ID NO: 401898 - DNA, 520 bp, Cannabis indica
tttcagacatcatacactttacctatccactctgtgctgcaaccgtacaagtgttggtagtgtatgaatcacaacatataagcatccatatacactaaacatatacatacattcgcatatccatatcacgcattatatacagttcttaccttctttccagattcagatgaattggtcgacgtaaatagaaagtcccgcgctgaatggataccctaatcacatattgaaaccgggtaaatcacatgttcaaaacccgaatctagaaaacatgaacccacaactctaggctctgctaaatcattagggattactctaactcaggaaataggaaaacacctaactaaggcactaaaatggacgagaattgagaaaatgggacattcggggaaccctgccaaaaccggtttaccgattttactaaaatcagtaaaccggtttatatcaatttccacaaaaaatcccatttcttgctcaaaactctaccaaatgcaaccaaaccttccagagtacctaattagtg

SEQ ID NO: 401899 - DNA, 628 bp, Cannabis indica
aaaaagactaaaaaaaaaaattatcttttctagggcccatatttgagggcctgctgagaaagaatctaaaattattatgttttaatttttttctaaaatctattcatggtcaaattcaagtttaaaattttagctttatttttcttagggaaatttgtggcaaaagttttcaaaaagttcagtttgatacagataagtccccaacctcgaagaatagcggtgatattcctcaagctcatgatttttatttgtccgttagtcctaatgttaactgctccgtttattttttttaaaattgccacgtgtcaaaatattattggtccaaattattattttaattttaaaaaataaaaataaataaataaatttctctttttctttttctttcttttattcttcttcgtcttcttcttctcactggcagaagtcgtcgacccccaaccccaaaccaccaccaccaccacgcatagccacgacctaaacttgggttgcaatcacaacccaaataccatcaaacaaaaaaaaaagtcaagctcgaaatacccaaatacccaaacttggttgttttcttggccccaaattctcgacaggatttcagaggaccaaagctccatttgatgatttgttt

SEQ ID NO: 401900 - DNA, 721 bp, Cannabis indica
gtcactaaaagtaactatttttgataataagagtaccactaaatataaataactaatatttatcacatcattgtttgagataagtttgtatgtaataagtatgtatctttcatcactctttttttttaaacaaatttaaatatttttgagttggcacatttgatttaaaatgcacacttatatttatcacatattaactgtaatatattgttcccaacaataacctacctaattataaattaacatcatctaaattaaataaaaattaaaatttcttgttcttaaagttataggagaggttgacttttttcacttagctcgccggccttccctaagcataggtgcgggttggctcgagttgtgttttgttattgtgattcgatttttgctattgcaattagttttatctttgtgacatagttttgagtgttttagtcttatctctatgacatgagtttgagtgttttagtattatttgtgtgacatggtgttattttattttgttttgttattaattcttctttgttcttggatgacttatcattagatcgatattagtggttgggaataacaagttctttgcaactgaagtggttattagtggtgcagttacgtatcttgcacaatagttcaatgtagaggtattcatccaatccaatccgcactattttgctcatattgcatctgattcgcactaagtacgaatttcatattttggatc

SEQ ID NO: 401901 - DNA, 577 bp, Cannabis indica
aataataataataataatgtttaaagaaaaaatagaaaataaattaaagttaataaaataaaaaaaaaaaagttgatttccaacaaattaataaagttattttttaatatacttttataattcaattaattgaaaacacgagaagttaaagatgttaatgtttttaaatttataatgaactaaaatcaataaatgtttcttatttttaaatttagatttgatttccgtaaaaaaaaaaaattaaacttaatattttaattcctcacttttttttctactgacaaattatttgatgattttatcctgtatatatgtttatattctttcttgttggcgactttttttttttaatattgcaattgagtaattagagaggttgctgatggatcaaattagtttgttataacgttttttttttaataaatataatttaaataaattaaattaagttaaataaactgaaaaaaaatccttaggtctttgccgtcggttcctaaggctgtatatggcgtcggttatttgctaggaaccaacaccatatacacccctatggcatcggttcctagcaaataaacga

SEQ ID NO: 401902 - DNA, 637 bp, Cannabis indica
tagccaccatggtttgaagctccgaccagtcttcacgctttccactcgcctcctatctctcttgaaccctaatctcaccagccccacaccatcacatcaccccgaaatccacgtctttgtcctaaggttctctcggcctttcccttcaacccagtgtcgcccctgtttgtccaatgccctgtcgtctccatgcttgatttagggtttacccgacctagtgtatcaccttggggagctctagttttattcgtgaaaaagaaaaatggattccttcgaatgtgtattgactaccgggagttgaataagttgataataaagaacaagtatctattacccagaatcgatgacttgttcggtcagcttcagggtaagactgtcttctccaagattaacttacgttcgggttatcatcaattgagaatgtgggaggaagacatttcgaagactacattttggactagatatggccattatgagttcttggtaatgtcatttggtttgacaaatgctctggagacctttatggaccttatgaatagggtgttcaaggatttcctcaataactatgtcatagtatttatcgatgatatccttgtatactctcaatcaaaagcagagcacgagcaacatctctaaa

SEQ ID NO: 401903 - DNA, 1156 bp, Cannabis indica
tcccgtttcactctactcttgctgcgagcttaaccggacctcctcaaagctcccggagcaagaggtcctcaaaaggcagcacctagacggaggacaagcgccaaaaaaagggggtatactccccaatataaccagtacacagagttgacggacacgcaagagcgagtatatttttccacaaggaaaaataggcactaccggaagcctcctcctctgtacagacacagtacgcgaaaggatcccagcaagagatgtgtataccacaacgacattggacacagtaccaatgagtgcaagaatctaaaagatgagatcaaaaacttaatctgattgggtcacctatatgattggatcaagaacgggctgccccatctcaacccggttccagcagggggcccattgcctcaagggacactaggaggtacgcccggagcgttggcaccagctgtaccctccgggggagcgatccctcagcacacccctgacttgcaaccaagacccaacggaagagtagccatgatctcttgtgggccccatattggggggaccaccagaaaagaattaaagcgctatgctggggccatcaaacatgacgaagtatgggaagtcaccaagcttctagctcaaaggccccgactcatggatcagccaattactttcacagaggaagacacaaaactggtgtgtttccctcatcatgaccccatggtcatagagactcccattgcgaacaagattgtggctagaatattgatcgacaatgggagttccgtgaacttgttatttaaagaagccttcacagcaataggcctcacggactggggatttatcaccgagcggttcccaactcacgagattcaatggaaccacgcttatcccaatgggaaaagtgaggttgccagtcaccttgtgccaggatacaccccagagtactttcaagtactgcacctttgtggtggtagactacccaactacatacaacgcaatccttggctgaccggccttggtggattttggtgcaattacatccatctgacacttgtgtctgaaattccctacctaggaagctggggtggggactgttggaaattattttaccaggatcttagaaattgagttctgtaaaaggctaacttgcttaattttttccatacta

SEQ ID NO: 401904 - DNA, 745 bp, Cannabis indica
gtctagtagagtagtagctcaccaatttttgctttctttttcatactcttcttgcttgcttctcaaaatctaatattttctttttaattttcataatttctattgagatgccaataaatgaatttttcattccttcaaattagtaaaattttgattagctttgtgtgattcacccaattagtctctaattacattgttattcttcttaatgttaaaaatttattattattattattattattattattgatccctctagcatcactaggaccactagcatcattggtccctctagcatcactaggacctctatcgttagtgctccctctagcattactagttctatctggacgactactactagtatcaggtgtttgacaattctctctacgagacatttttttttgtgtcggttgcctggatggtatttggtatgatagtggagtcaagttcaaagttacaacaatagggacctctgtatcttggtcgtctctgacatcatcatttccctcaacataccattcggggtctggaccatcaccaaaaccatcaataaagggcatttgtgctacaatgtcagatgtcgacatcatagtgtttaattcaggtaacacatcggctgccaacaccttcgaatttgtttatggaacaaaactcctaacctcgctacaagtatccttaacagtacttggtgtgggactaggatcgatacaaacattctttttaccaaagtcacaaacaagag

SEQ ID NO: 401905 - DNA, 598 bp, Cannabis indica
tgataatggggaaaacgacaacaaatcatcctgaagagactaattgtcatcttggaaaagagccaataggctcacgcaggccacccacttcaagaactacgtgttcaacacgattaacacgttcaagaagaagccaacatgataatgatcagaacccaaaaactaagaatgaagaaaccaacacttatgtgggtggttctactcctatgagtgagggtgcctatgatcccaccaggtacgtaccgttggttgagttggaaaattgtcaacttcggtaacatctggctgaggcaaaccaacaaaaccctgagttggaaagggaggcagccgcacccagggcgacacaagaaaataacacacagaaccaactttatcctggagtgagaaggctacgagatagacctcggggctcaagaaccaagaggcaggagacggctcagaaaaacccccagaatgctcaggaggagcaacctggggaaactggagatgttcctgaagatgaacaaccaaatgaccaggtacctcgtcaagaagtgcctcggagaccccagggattcataacctaagggaatgaaaacaatgatttaccagagtcttc

SEQ ID NO: 401906 - DNA, 709 bp, Cannabis indica
agtataacctctattactctatatatacacaacaaatccttcatgcaaagggttagaaattcttaactgacaagcttgagaagagaatagagcaaatatattgattgtaatccccttggcttttctagcctagcagataataaaactgactcgtgaactaaggctctttaacgctccaaccacataaaaactctgagtgttctcttttgattgttattccttagttcttacattaaataatttgttttctgaaaatctcaaaaaaatattttggtgctatcattaagggctaaagaaagaagtgataccatctcagattacgttcaataattatggtactcacccgaaacaattcttgtcgtcactatactaatcctattgctaacgcaggagatataatagatccaactaaggtaaccagtcgccacgaggatcaacatagtaaggaccaaaatcctaatgatcctatagtcgaagacaatgaattaggagagaatagttcagatgatcttgaagatgatcaccaagatacactgaaagatgattaccaagacatgcctactgatggtggcgaaaagaaggacgacccagacaagtcagatcctgtggtcatcatggagacagatctaaacagattcctaaaagtgctttaatatagaaaaccataaatcataaatctatagaacctttgctaaattaaaggagaaga

SEQ ID NO: 401907 - DNA, 1014 bp, Cannabis indica
tatttaaaatactattattaatatttattgaaaatatttaaaataattaattttatttatattattttaatatcttataaatataaaaaaaaaaattgttaataagtaacaaagagataattaaaaaaatgtggtatttattatgagttaaaatttggcttcatgttatcttttggtgttaaatttggtacatatttttacattggagttaagtattagcaaaatgtcctaaaacatagcaatacattattacattttaagaaaaatataaaaaaaaaaataaataaataaaaaggatagattatcgatagaagcaaaatagcaaaaaaaaaaaaaaaaaaaacaacagcataatcgaagtcctttttattatagtcagagtcggaattttttttattttattaaattttgctttccaattatagttctcgattgtagatgctctaagattattgatagaagcaaaatttaagattgtttggtaggatagaataaagaagataaaaaaaatatatattaaatttcctaagaatttgtgagtgagttaagatggagactctagtatacaaaagggttcaatctcacaatttatatctaggaatttccagttattgttacgctacttgaagtcaagcatttcgccccccatagaaccaagccttctaacatttatcttcgagaaagccctgagtgaataccctgacattttggtctaacaaggcacgccctcaaattttgcatcttcccattgactagagggtcggcccaagcatatggcagttatggccattacacaaggcttgctatattaaaagacttatttttttatcatccttttatatataatataataaggaggaggtttaaatggttacattaaatatgtaactatcatgattatctattttggataataatgaatattaattaatatctaattatattaattaatattcattattaggtgactattagtctataagttctttattatttattttattgaaagtggac

SEQ ID NO: 401908 - DNA, 628 bp, Cannabis indica
gacccatgtcacattaaaaaaaaatagtataaagaaaatcaaaacagtaacctacgcatccttgaatattacaagaccaattcttagtttgatctaatttttaagagtttatacattcagcacactccagcaaattagctaaactacatacccttttggcagttttaatcagtgtgaggtctaagtttcatatatttgtagaaaattgcatcaaatatagaaataaatatatcatatcaactcattcaaaagcaaatatatataaatatatattgtatatagacaaataaatcccattcctatacaaatatattagtactaaactacctataaagtagatacaatctaaaaatcactaacctagcaattagcaaagagatcaaacatctacctataaacatcatctaatatgttcaatagtctttcaaagatgccccttccgcgccccttctgctatagataaggtctttaatgatggacagactgacaacagaacatctctcaaatcggattcccttgccagtttacatttagtaaaaactctaagatgctcacaattaatcaaaggaggacaatgtaacctcttcaagtcttttggcaagatgagagccttcatgttaaatatgta

SEQ ID NO: 401909 - DNA, 996 bp, Cannabis indica
taagtcagaaaatttattcataaatttcgaatactgtttattgggagcttggttacataggcccatggtatccacattttctgggataatatcatcttgtagactcaactaattaatttaataagtcaatcagaattcaaaaatagactatgtcctattagagaattgttaccaagtttgggctattttgagaaagagagaaatagggatttattttttaattaacacactttatgggtctaattaataatatatttttattgtattgtattggtaattatttataattattaaattaaaattagtatttaaataattagataagataagtggaaaaattagaaaagaagcattatttcacgaagttgaaataaactgaaaaaaaaaaatcttactctatggcccataagtgtatttcgatcatggaaagattttagtgcccaattgtctttattttagcccatctcagaaccctaagtaaatatctatacaaagaaagacaagaatatagaaaatccaaatatctcatcctcctcttctttttcattcagaaattttgaaatagccatacaccatggatttcgaattctcactcccaaaatgtgttctaaaggtaaattaagtatcagctcacactattcaatgtgatactcaaacctttgtagaagactatgaagaattgtcgctttaccaggttaaggaaggagatcaaggttcaatacttgttattactttgcaacagaaagaaataactgtcgctttaccaggttaaggaaggtgatccaaatattatttttactgtaactaatgtaagatttattatacttttacatgtttatttatcattttatgattattcatatttagaatgttagattatacactataatcaacatatacatgtttagtatctaatcttagtaaaataagttctaacaactagcctcaaagtcatggtaatgatttattttcatgaaaatatagatttaaaatgat

SEQ ID NO: 401910 - DNA, 713 bp, Cannabis indica
ttttttttttttcttttctaattggttagtttatagacattttaataaaaaacaaaaagtggggtcaccaacataggtagaaggtagttggcgttggacttaacatgggctggtagtcccatgaatgaaaatagtatatcataatgcatgatgcaccaaaattaaagtgttgaattgattcatcagtaaggaaagttaatacaaagaaacccattccttctgtattataattatactttacacaggacacttgtaaaaacataaatgttgttttgcagagatagtgataccaaaatattctgaacttttccagaagaaagtttttggtattatatcagctttcactgtctattaaatataatacattactcgtcaaccgaaatttcgtcttcactgtaagacagtatataagaggctggtaataaagataatgcttctagaagtgaattaaggttcattttattcacaactactttaattagtttataatttctatataaagaatagagtcaattgccgtttattttgtttgtacttaatcccaaaatttaaattttggcagtaaaattctcaaaattagaaaattgttatcaatttacagtttctatccattttaagtattaagtgtcatgttagattgtctatgtatatatctatatagacacggtgtacacaagacacaattttattaatccacgtaataaatttttttt

SEQ ID NO: 401911 - DNA, 1051 bp, Cannabis indica
cggttacgctttagaaactttttttatttatgttaatgaaaaatatatatttttatattttgaattataattaaaagaaaaaaaaatattagttagattaatatagttaatattttaataaaaaaataaagtcacattatttaatgaattatatatcataatatataattaaaaacataacacaaatattaaattttaagaattaaattgtaattaattaattatttttattaagcaaataatataaaaaaaatagaatagaataaataaataaattcaaaataataagagaatagagaacataaaatattacatgacacatatatttgcttttctttatatatagataggtatataaaagattatattattattattattattattattattattattattattattagattaataggttttttagtatgttttattattagttttaattgtgttaaattatattaaataacaaatagaaagtaaatgattaaaatagattaagaaattgaaaaatactgaaaaaatgagaatgtaaagaaattgaaagaaaactcatatacactgtaaactgccacatcaccatctaggcaactaatgtgcgttgcgcgtttatttagatttttttaaatatatataaaacaaatataaaatatcacactatacatcattttctatagatgcgtctttaaattatattttaagttatattgctaggatttaatcccataattcctcactcacacatactctaatactgtcttatatataaaaagctacaatattgttttttgcatttgtaaatattatttgtaagtaattaactaataataataataataataataacaataataataattaagaatatgaaagagtgtcgacaatgggaaaaaattagaaataattgcataataacacgttcatctcaaattatttaagaatttcttgtcagtttttttattaatgttaataccggaatggcatactgagactattgttcattaatattttgtgttttctctctctctcctctctctctctttctctc

SEQ ID NO: 401912 - DNA, 600 bp, Cannabis indica
tattgttgctttaagccaagataggtggttattttaatgtttgagtcaaaatggagcttaagagctcaagatggagctctaatggtgatttcatggtttaagttttttcttatattttgatgcttgaaatgagtttgttggacatgaataggtatcctggaaagttttggaaggtttcgggtcaaattgagttaaggggctcgacttttgggttcccagcacagaaccgatcgaccggttcagggggaccatttgtaaccggtcgaccggttggtagcccaaaatcgggcttctagttgggaaccagtctgccgattggggctttttcccgaaccttagttttccctatttttgcgtaatttagggtgtttgaatcctatttatcaatagggttatccttagtttcaattttaaatccttgataagtgttttagcgtgtctctcattgagttttgaacgttatggtttagggccctgtaaagcgtcgagctatgtttcccctcaagctgaccggcacactcgagcacagaacgagataagataacataataacgtatatatgaatgtatgcttgttttaactatttacactactaacact

SEQ ID NO: 401913 - DNA, 688 bp, Cannabis indica
gaattatatattagttgatgtcaagtgaacaatgctgttttaatctctttcctttgttttctaatcttattgttaacttgttttcagctgtaaacgtttttttttaataaaagtttgctaattaattccactgttgggactgtatctccacaaattatctgttgttttatttataccatattgcttcaaagacagtgtaacgaagttttcatttgagtctcttatgtttgtactctcattccagtaaggtttctacttggttactacttttgaaccaattgatgctcttatcatgcaagaggatgcttggaatgcataccttgaataactaataactaataatattttttcatcaataattaattatattacttttaaataaagtaaaaaatacctaacataaaatttaatgtacgtgtctcgcacgtaattttttactagtatatatatatgcaactatattgaataaaaaaaaaacaataaaacatgtttttacatatattgagtaaaatttagttttattaatcaattaaactcaatcattcacatataaatgataatttagtcaaaaaaaaaaaaaaacaattaatcaccacatattttgtatatgattaacctcaacataataaatttaatatgtggaagcccaaaacaaaattgtcacctttatagtagttattaataaaaa

SEQ ID NO: 401914 - DNA, 580 bp, Cannabis indica
ttaagttattgctggaaattagtttttcaagcatgaattttaattccttgttgattgctagcaacaatacttggtaatttgagtgtttggttgagaatttggggtgaaaagattggaaactcttgcggaaaatcgtgttcatgcttgctggtatctgggtttggaacccaggtgccgcggcccgccactgttagtggaacttgggttttgtcccaggtgtcgcggcatggtttgggcatgtcgtggcccgccctcgtgtttttgggcagtttcgagttgaattttgaaaaatgcataacttttgattcccaactccgatttgggagttctttatatcgttagaaagctcgttccaagctctttatgattatctgaatttgaaatgccatgatagaattttatgagtatggaatcaggggttaaccctaagtgtgaaaaatcctggatttgtgtgactaggattaccggcacctgatcaggagcacctagggattcagaatctctatctattgctggacaacaggtaagacagtgattagcacttagagtatgcgcagtggcgcttatattgagaatgata

SEQ ID NO: 401915 - DNA, 842 bp, Cannabis indica
cccccaagattattttgtggtgtttttattataaaaaaaattaatatgaatttcaaaaggggaaacatggcttcacaaatgaacattatgatcatcaaaagatttaaacaaaaaaaatatatatttttacttattatatgttttgtaaagccctagcattgtgtccatccactccaaaaaaaaaaaaataaataaataaatgaaaagagtattattattaccggattcaactccgttgaatgagggggttaaacattgtttcaaagatttcacctactatactatgtaccatctttatatatgttcattatctctacttaatagtaattacactttataatttggttttggttttcaacaagatataattgtaactaagcacataagtggtataagtattatatatagttggtggtattgaagtatgagagatcaagaaattaagaaagaaaaagagagtcaagctaccttggcatgtggcagtgttagatacctatattgataatatataaaaacttaatactatatataagatgtatgaattactctttttattgtcaattaattttgatatgtatacatttatttattcctactttctcaaccatacactttcacattttgacacgaaagtttgtataagaaaattcttgaagtagaacatgttggattaaaaatccttttgtgggcacatatgtataatgtatatgctattataaagtgtgatacaaaattaagtgaccaattatgttatgggtatcaaaagggtattaaagtgtcatggaattaatgtgtagataccataagttaatttataatttgttgaggggccaaattataaa

SEQ ID NO: 401916 - DNA, 579 bp, Cannabis indica
tttatgcaattgtaatgtaactaatatctgttaaccaccaaaaataggagaagtgaaaggtttccataaatagcaagcaggcggatgaatgacactgggtattccatacaaacagaaaaggacaaaaggcggcccccacgtcctttgcttgtaagtatcctttagtcaaatcgcgtcatgcatttctaagatgaatccacatttaagagcgctgcaagccacgacccgcgcccgtggacagcctgcccacacgcccagcctgcccgcgcgcccatctagcccgcacacccaaccagccccccacccgtgtacacagcctcaggactccgtccatctacctttcctccccaacatcagcagaattactgagaaggtgtcagaggggacaacagcggatcaatctgcttatataacaggaacaaattttggtctatccgagttacaaaatgaaaggagtcttttttttagtgtaatttaggattctagacatggcatgttgcttaggggaaagtgtaatgatagatgaaagcgactggtcatagggtgcatgggggaagctgaaggtgtaaggagaagggg

SEQ ID NO: 401917 - DNA, 531 bp, Cannabis indica
ttcctctattctagagccacttggagaagaaactttcaatctactctctagattgggaaaaagcctacctgattctacaattggagaaattttccagctagtcttaaagacctttgaaaaaatgtgctcccaaaagaaatttctctaggaaattatgaagtgatccaaaaaactaggcaaagtttgtagcagacgagatttactcatcaaatgtccttctgaatcttcgtgttcttgcaaaaacccaaagaatagaaataagttcaagacgttcaagttctcaaagcacaaagggcgcaaaataaattttttgcaaaggaagcgcgacttttggaaaaaatcttatcgatgctatgtatgtgcaaaaaagggtcattatgcaaaatgattccttaaaggaaaaacagtcaagcttctctcagatatccaacaaacgactgtgatgtctcttgaggaaaatgacatagagtcaatattctccatagatgatgaatttaactcaaaatctctttgtgcattcgaacaatggag

SEQ ID NO: 401918 - DNA, 615 bp, Cannabis indica
atccatggaaaagatgttcctgcggattttgacattgaagattatcgtactcgacttgctgcccttttcttctcatacgggcaaaggaaaattgatgaaaatattgataacgaggatgagaagcaaagcaagtcttctaaggcttctaaattgaaaaagtatggtcttttaatttagtgacaaatttttgttattggttgactttattatcagacaattgttagttattttatgtttctaggtattatatttggttttatattctacatttggttttaaacttttaggatatttgacattaatcattataatatgttatttttgtatgtttgtatcagcatcagttttatgtttttcaaattttttgaagttttttttataaagtcatacaactatataaaaactattatacaactatatacacacaatttgcaatgttcagcatacttgtaatttttattgtgtaacaatgtattactcactgttttgcaatttttttattatccatattgattatgttttataaattcctatttgactttttaaaaattttaataatgaaattcttttcgttgttaaactttaacaagtatcaaaactgtcataaataaattt

SEQ ID NO: 401919 - DNA, 572 bp, Cannabis indica
ggttgccgaggaggtgcccaaacagcagcggagagcagatactccggcccccgcacttgattccgggatctctcccgaggtggaggaacacactgcgcctctcaacatagtgctgactccggttcctggagatgaggcaagacaggaactccggatagctaaacacaactacgccatggaccagtactcccgggggcatgctgacgtggaggccttgaggagggttttgcgagttgaaatgcaaaatacccttaacgatccgacctaccagaatctgtgggatctaaacttgtaccccatgtcggattggttcggtcatttcctcaagcccactctagctccctttgccgcggagatgaccggcgagtttgcgtctcagcttaaccggtgtgcacccaagcggttcgctgcttgtgcatccttgaactccatctttcatgtccaggatctcagtcactccatgactgtggtaagtatttcgtagtttacttttctcctcattattttctcttaaggacttttactcatacttgtatccttttccagcaggctgccgaggccggccgcctttc

SEQ ID NO: 401920 - DNA, 730 bp, Cannabis indica
atgtttagctgcaactcctgtggcagcttctttacgttggatgaaagcctttactttgctccatggtctcttgctttgtattcgcatgggccatttattttagactgttttcgccttgttcaaagtatgaatttgcctaattatttggagtgatgagttttatttgtatgacttgtggttatctttgatttagtgcctttaatattgatgaaatttctttaaaagaaaaataagaaagaaattaagaacatttaccctctcactacttttccaagacaaatgttgattagtttactttttgatttattgaatgttctttctttgtagacttatttatagattttactttattttttgatttattgaatgtcctttgtggacttattcattgatatttggagggaaaactcctcaaatttcaaactaagaaagcaacctcacaaagcacaaaaaaaaaaaatacaaaatttataatttagcccataaaaaaaataataaataaataaaaaacaactttccaaagagagcgcaaaaggagtgggaattttcttttcaaataaataaataataaatattaaataaataataaaaaaaaaagaaagtctctcttcttcttcatcttcttcttctctctctagtcccactgtacttcttcaacgacacaataacaaccaccaccaccttaatttaaacctaatttatttgtatatattatttttatatatatata

SEQ ID NO: 401921 - DNA, 646 bp, Cannabis indica
aataaaagtagttctaaagggccaagttgaagcaaatctgggaagaaaggaagaactcaagaaccaagatattttaagtataccaacttagtagatactcgtgagaatgtttaaaaagctacttgtaatatagttcattatgaaagacctccatctatgcacaaaggcagaaaacaaaaaaaaaggacccaaataaaatgtgtgaacaccatgttgacattggggcataccacaaatgattgtaactacttgaaagatgatcgaagggttagtccgaaatggccatttatccaattgggagaggatactagttaactatcacgaataagacgtagcacaaggacaactttttattcctagaaaacctggaaccataaatccttctcatggagtaggtcttcagtaaaatcctagaatacaagctctgactacaccaaatgcccccgcaataagaccttttgttacttctggacctggaaacccatacctacctagagttgctccaccaacattagatggccatgtggaaacaatatctgaaggcccacatattgttgaaagcaccagaaatgcacaaaagaggcacctgaatgagctggaaaaggatgaagcatgtaatttttacgaaaattattaattactacgc

SEQ ID NO: 401922 - DNA, 652 bp, Cannabis indica
aagccccactcgaaccacactaaccagcgacttccccacctgcaaactacccaccttcaccatctcccatcaccacgtcccacctccgttcaccaaaattgccaccagcaagctgacccgaagccctcatcacccaaaccaaacccagcagcaagaatcgcactacccaataacctccattcacccgaagccattacgtgaatctcccaccaccaagcgaaccacctagtcgaccccactccagctctgactctattcggtttgggggatgatggctcccgtacgtgatggttctcgcaggtgagaggcgactttagtttcggaggcgcatctaggaccggagatcagataaggcggtgagcaatgcacggctaagattttgctaactgcagtggcggtttgttcatcgaggatgggaggtagttttggtggagtggtgatggtcttgcgagttggagaagtggggaagaggaagttttggaggaggaaattggagatggaattgagagcttggttggctgtgggtggagctggaatggggagtcggctggggtttgatggggctgattttgggggctagggtttcaaagatgaagaagttagagagagaagaagaaggaggcgtgaagaaagaaagagaaagaaaagaaaa

SEQ ID NO: 401923 - DNA, 573 bp, Cannabis indica
atgaaaccattgaaatgcctgctttttaaacaactttcagagttccagagaaacctcctcaaggagaatctgctaagaaaaaggctcagttttctttccttggtgctactcgtgaacctgctcctgcatctgcttccatttctgcttctataaatggctgaattcaacttgcgtttgggaagaatggagaccggtcaagcctttcttctcaggaggatggacaacatcatgaaattcttccaatccaatggtgatgaataatgttatacccgaaattgagtaagcacatcagaggaagacacgtgtcgagctgggaagaacgaagaactcaaacacgcaaacgaaagtacacttagcatggaacaactcattggaaacataattcacagagtatttttatacctcggatggctgaatagccttctgcgagacaaaaatttacaaactgctaacttatgtattgacgagaaaccatgtgggtgcacgtgtgcatgacgaggcctcaacctcattgcgtggaagagaaacgataacaataaaaatacttagcgtatattacacgatatacaaact

SEQ ID NO: 401924 - DNA, 808 bp, Cannabis indica
ggaaatggcaagttagatcaactatgagtttgatggtcttcttcggcaaatgtacatatcagtttattcagttagtagggtcgagtgtcgggacatgattttatgtcgcttttgagatctcaaagttgtattttgaatgtaatgccaagtgggcaacttttgtaaaattttaaaaggggatccccgaagcttaaaaatttgtaatgttatgttcttattcactttatttaaatggtaaaattttaattaaaccacatattttaaataaattgtagtttattattataaactaaattgtaaaagtacacacatgacgcctctatgagttaaggcattatagtagtggtttcccgatagttttagagaaaaaaagagagaaatgggctgcaatttttattatttattttttgaaaaaaaatattttaacattttaaaataattttaatatattcaaataattaatattatgtagactattagaaatttatcacgtgtacacttgtgatgtccaccttgacacttaacaacattagtttaacaaaagtgtaaaaactaaaacagaagtgcagtctggtagttttgccacaaaaaaattgattattaggttaagtgtcacattatagggttggacatccgatccaatccaatatttttttcctcatccgatccaatccaattagtacttggatttagaaaatcatcatccaatatgatctaattagacctcaaaatctaatccaattactaattggattgtatcggttttttaatttggttattccatttactacatctatttttaattatt

SEQ ID NO: 401925 - DNA, 623 bp, Cannabis indica
aatacttttgccttaaaaacttttgatatattatgaaatccttctccttaaaaaggatagctcgttaaatattttttccaaaacataacaattacataataagcatatcttttttttcttcttcttaagtttatctttctttaagtaattaaccctttgtcccccaaactttgactattaccaatttttcccaatttttgtttttaaaaaaattaatttaaaagaaattataatttatattaatccttaacaaatcttaaaatattaaagaaaaattataaaaaatatggtgaaattcttaaaatagaaaaacctatgattaaaaaaaagcagttgcaaactaaattatatttataaactcatatcataaaaattaaaagataaaaaagtatttgaaaattaaaatttaataaaaaatttacaaaaataaacttaaatttagaagaaaaccacattgaagcttgttcccatcaaattatttttttgcaaaaaattaatttttaaaatttttagttttttttttttttttttttttttattttttttttttacttgtaagactgggaatgacccagtcgcgacttctgtagcattggccttctttttgccattttttttttttt

SEQ ID NO: 401926 - DNA, 2471 bp, Cannabis indica
agagagagagagagaagttggaaacttaacttctaatggtgatggccaatgtttggtgcctggtgggtcccgttgcgggttacctggagcttatttttgtaactcccttgggggtgaatttcgacaacaatagcctcacaattgggactaggtgtgagatatgacatgatagagagtttacatagcttcaaaaatcaagttgaatagcatcaatcagataaaaattaagtgagttatggtcgttttactgaaggctgttcaagtcccagcgcccaggttgacatctgacattaaccaagatgatgggtaagtgtagaaacgtccaagggatgtcctttaagatgattaagtgatagtttgacactacttagtccatgtatatttttagcgaagttggtctccaattctcgaagatgttgctgttttgcaaaattaggagactcaaaactctttatttctaggtatgctggaaataagaaatggaaagttgtaaatttgatttctatgacttcatagatcattgtaactgtgaaaaactagatggacggtcaaaatgacatcaaattcggataagccaacccagcgcaccaggccatttgttgacctgggcgttgggccctttcttctaagctctcaagattttgtttttgatacttccaaggcttctaaacttgaggaaaaggtctccaaccccattttgaccatggtggattcaatggtcgtattggatttggcatttgagcaattgaaggcagcatcccaggttgattctcaacctgcacgctgggcccagcacacctagatgctaggccttatttctagagactcgggttgtggttttgtcactaagtttacatatcttcgttattttttatgacagaataaatgctcagaacttgttgaattggatcaaaaatagcccatgttgacagcatatcaacctgggcgctaagtcctagttttggcccttcaaaaattctgtttgatccttgaaaaataggttaatctcgatattttctattttcacagaagattctcaaaaaactctatttaaaatgacccaggttgacaaaatgtcaacttgggcacaaggccaacccaggtgttaacttgggcgttgggccctgttatttgcacccatgacttgttttttttcctccaggagaacctatctccctatttttgatgaagatggattcgatgaaaaattcaaatctttaatcaaacacttggaaggtgcccccattgacaaattatcaacctgggctctgggtgatcgaggccttggggccccgagtgctcaaaaatcaacttgcttcgattctaattttgatgcctcagatgcaagttttgaccactttgcactaagacagtcccgaaaactaaaaccctagttgaggatgtgaacctgaacacttactgaaaccctaggtgcccaggttggcttctgggttataggttcgtgtaagtttttctcccaaggcttagattaggtttctccatgtcttcatggtacagaagactgaaagatagtaggttttcaacgtattgaagtctaaacttccatttcagagtttttgatgtcaacctgggcgcagggctagggacccctcccaggtcgacctgctatgactcagaactactcaactctgagacgtcatctttcttgacacgtgtcaaacattaatgtctacatcatcaggtttactcttgttgtaaacatttccctcaagtcaactttacacttgtgtgaggttgactaaatgacatgaactaagcatgtttctctcgaaactacccgatgggcatcaattttgacaatcttagacaattgtctctattcttcaagcattcccactgagtgtagagtttgaatccccattccttattgaataatggattttgagattttcagttgatgactctttgagtgttttcatttgaggtgagatactgtgaaatcatcctgacattggaacatcaacatttaatatattctttggttattgtattagcattgaatctcatgtttaaatatgtaattattttgttaatgaagtaagattatgatcttacttaggttaattagtgtggatttagtaaatgattaaagcgtaatttattaattacggagattttattagattatgtgggtatcgtggataccatttagaagtaaaatattttcgagcctggcaattgtgggagctcgacacagtggtcagaaatgtcacgataattaagtatggattgaattggaaattataccgagctagttcaaagtgttatgttgtcggtttggcagattggttagaattaccaaaatacccttagattttacatagtttaagttttgttttccctaggttatagtcttgttcatctcctcggtttgatagtagaggaagtgttcgttaactccttagctttacagcataggagaccttaaacatccccttagctttgcagta

SEQ ID NO: 401927 - DNA, 1328 bp, Cannabis indica
aaaatgataaaataaaataaaatttcgctgaagaaaaaactattctccttaagattagaaaacctattctgcttaggattagaagagaatgtgagttttctactgcgttgactgatagtattttggtcataactctctcgatattgttcggaattagacgattcaagattttctggaaagataaaagaaagatctataacttttatattttgactttttccaaaatctaatcagaacatagttgaattcaggtttgaagtttcaactttattttcttacatatttttctctattttatatatcatctttttgtgagatttttttatcttttttttccttcttattcttttgatattttttaatcttcttctattttaaatctgcaagaataaaagataaaaagcgtaaaaattgctccaaacaagagtagaactaaattaaaaacacactaaaaattaacctaaaaataaatgctaaaaacaacctaacagcagtgggctcctgttttgtcttgagtttgtcatactttgtaggtatgctccatttatctttttgttgctttatgggctttatattattattttatctcttcgtgtgtcgtttcgtatttttcaatctgttgggtcttctcttgttttttttttttttggggattaagatatctaattgggctttcatgcctttctcatttttctccccaaaacacctactaccttaggggttaagttgaaaaatactacttttattaatcaattgatcaaatttacctctaattttatatttaattgaaacatacctctttttatatgtattgtacctaaaatactctgacataagagagtcacatggagagtattttgaagtgacagaggcaaaattagtacaatatttaaaaaaagaggtaaaaatgatagacttaaaaaaaaaagataaaaataaaagaggacaatataaaaaaggtatagagtgtaattttcttctacttctagctaagctagagtacagataccgactccacttcaattaacacgtatttaatttcacttttcacttcatattaaatggtagaatattgttagtttctacacctcgttataatgttacagaaagtaattttgacaatttaaagtgttcaatatcacaacgagatggtaacaatttatagcattaaatatgcaaacaatttttaaattatatttataagctgaggtgtagtactattttttttctttaacataagaacttgaaattccgtattttaatatttccagtttgattatttaattaaatgattaattaaatgcggaataataaaactgatactgaaa

SEQ ID NO: 401928 - DNA, 679 bp, Cannabis indica
acctaataataatataggtactacaaagataataatttagctttttttttttttgctaaataataatttagatattttgatgttggaaaaaaaaacttacttaaccactacaaacatataatattgggtgtgtttggtagtacttttttaattaatttttttgttcttttaattagaaaagtgtaagtatattccaaaaatgtgttctataaaattatttttacttttttcaattttttaatttagaatcaaaatttaaaaaaattcactttcaattttttttttaaacaatttttttttcttaatcaattagactctgatactaacttggaccttgggactcgaaccccgaacctaaaccccaacccaggcccagacctaaaggtgaaccccatccccggacctggaccctagaccctggaccttggacccaaacccaacctaaacccaaagacttgaaccctaggcccaaacctcagacccagaccttgacccagatctggacccgaactcggtccttgacctcaatcccaaacccagacccgaccccagaccctggccccaaactcgaccccgacccctaacctagacccgaactcgacttaaataaaatttacaaaacacactttgtcttctgtttttaaaattgaaaaataaaattagttatagaatatttttt

SEQ ID NO: 401929 - DNA, 575 bp, Cannabis indica
tttttttagaaatgaataatttcatttaaaggtacaaagccaagaaaaaatttagagataaaaaatagtcattaattcttaaagtaagttgggaggaagacccgagctaaactcgataatgagcaatagcattactagctcaattacaattagatatatagatatatgagaaaaagattttcaaacatataaaatatcacaaataacaatatcatacttagtgtagacatccatcttgttgaagagggacttactaggagttgacaataaaaaatatagtgatacaagtattgttggaaatacttataaatgatcatactattttacatgtaaattattatttaacataattacttatatcgtgtatcaaactttagaattatatatgtgagtttgagaatacttaccgtagttcttgcataaaagaatttgactcttctcgtttaatgatctaacttttgattcctcttaaagagagtattatcaatcattgaatcgcaatttccatagtaactaaatcttttttttttttttaattaattaagaaactttatttcaaccaaaaaaatcttaaa

SEQ ID NO: 401930 - DNA, 581 bp, Cannabis indica
ttttcttttcttttttaaattaataaacttggactgtgttgtaccctccctcacgtcattctatactaaacaatgcattttcttttacttaaatttattggatcatttatatagggtcaaggataaatttttttatttgattttgattggctgttaaaatgttaggaaagagatggcaatatttttttcattgtgtgggaggtttgttaaaaaaataatcgaccatgcaacaactagtataacaacctaggtggttaaatgattttattttaattttttatctaaaaaaaataaaccactcaatttgaaaaatggagttgttaaaaacaattcaaaatatcttcaaattttaaatttcaagtaaccatcacattttaatattttttttgaaaaatattttaataatactaataaaataaaatagtaaatacagtagaactacattcaagaataccttattcaagaataacctcaaatttattcaattcccaatttgggcctattataaataagaatagaggaaattacacttagtatgggattttaaaagttcttatgataaatatggcacatttaagttt

SEQ ID NO: 401931 - DNA, 661 bp, Cannabis indica
aaaatgaaaagaagtaaccctcatctcttcacccatttctctcgagcaaaaccaaacaaccacactgttggaaattattttacgacgatcttaaatctactcacaagtatattatttaacatcctaaatatgaactttctaaaaccttgtatcctttctgttgcagactattatcaagatttgagtccgaatgtccttctctttgatttggattcttcacgatcttccagactatgattgaagtaccacttgctgtgtgtgggtactattctttcactagggtaattcaaaattataaagaggaaaagagaaagaggagggtcggctatggagagaaggtataaggctcagttttctgaaaaaaaagcattttcctaaattactgaataactgcttattttggtgtaagccatcactttccatttataggcaactactaagtttaggttagtaattaattggcattaaaataatgaaaataataataggaaaaagctattcaagtggccgaccatggtgttaatgggcctcacttggaattttgcagttttcacaattttcatttctattttctcaaaaacgccaattttccaattctaaccatttaaatgtcaaaactaattatttaataattaaaatagattattaaataatattttca

SEQ ID NO: 401932 - DNA, 936 bp, Cannabis indica
atctatttttcaaaatttcaaaacatctgcatttaaaaaattaaatgacatttcaaaattattatgggtcaatgactaataaaataaaataaaatataattttgaaaattattctaatttaagttgtactgaaattaaaatttctaactgaaatataattttctatctaattaaatatcttgaaaaagactaaaattaaagtgtctagaataaaatcaatatttaattttttatttaattaaatgtatctaaatattagaaacaaatatttaagtaccttgaataaaatcaacttaattataattctaatttaatatctaagaatgaatattctaatttaagttggcctacaattaattaaaattaattttcaacttaaatatatttttctaattaattaaatattagaaaatataattagttactagaaataactatctagaatatatctcattaaatttgttttaaaattagttatgttgccaatttaattttaattatgttaaactaatataattatttaaataagttaaatgggtcttcacaattgaggtagtttgtgtgtgggagggctgggttcagtatatcgtacccactactatgaccccctaactctcacacaaggcctaaaggagagaaatttaaccattaattaaataactcattgaataagtccaatactaattgggcttaaataaaactattaatgtgatattttattttaacaacctagtctatttaattaagtaaacttaaataggcttcctatatgcatctaagcccaagagcaaacatataggctcacacaagtcaaataatttggatgaacattatcatgttactaggtttttcacaaatgaaataaattactaaatttacctgttacaaattatttacaagatctatagataattggactatgattaaaatcagatc

SEQ ID NO: 401933 - DNA, 847 bp, Cannabis indica
agaacagccatcaacttttggcactagacactcgacaaactagagacaagatctctttccattgaaggctcctcagcctttccttcatcagctcctgaaaagttaactactgctggttttccagcatttccttttgcatcacgattaggaaattttccatggtacttatgtccaggaggatatccattcagcttgtaacatctctcaatcgagtgaccattcattccacaatgagtaccattgtacttagatctgaaaggttgaacagctccagcaaactgtccattacttcctgatgctcctttatctgaatcagtggaattgttgaatccactagtcaaatttctctatctttcttcttgtataacagcagcatacgccttgttaacgcttggaagaggatcacgcattagaatctgtgatctaaccagattgtatgaatcatttaatccaaccagaaattcaagtaacctgtcctcttcttgatactcttgtatcaccttcattgcgccacaagaacaaacaggtggtggacgaaactctcttatctgatcccaaagagatttcaagcgagtataatacgtcgtaacagtattggatccttgagtaagactttgcatcgtcttcttggcttcaaagatgggaggagcgttcttctcattgaatcgttcgtgcagctcggcccaaatttcggctgcattatcatgatacatgatactgtcagcgatctcatcagaaatcgtgtgcaagatccatgaaatcacggtgctattgcatcgacaccagctatcgcagtcatcatgatcttcatcaggctgtggtaaccttccattgacgaacttaactt

SEQ ID NO: 401934 - DNA, 783 bp, Cannabis indica
attacaaaagggagagcgctattaaaaagcataaaccaaagctacacaatcaaactctacacaacaaagaagaagaataacgtgtgagaccaatctagtattaccattaagacttaaccaaatattataactttattttgatactataaattattttaaaaaaattaataaatttataaaagatagtaaataactacagacatatatataatcagaaatgatttatcaaaacatcttttaagtggagtctaatatagacttattaatcaagaagtcaattctttgttttgatgagcatgtcaaaatcaatcgaatctaattaattaatttaatagggagcagtacttatatatgtagaaactgatacttatgtatatctaatattacgcttattcaatactaattattaaaagatgctttcttcgaaaaataaataaatactgaattttcttttcgcaaagtaagaaaatactgatttaaatatagctaatattattatttttttaaatgcatgcatttataacagttttagttacacagcatcgtcagtatctttataagaattaacgagagatagtacttaatatttttcatttaaaatgtgtaaatatatgtgtgatagtcagtagtcccgtgatccgtaaggagaaatactgttgtgcaatctcacaccgcctggggaaggtcaaatgtgatgattctgagattgtgtaagtatgggactacacagttgaagaggggattgattggtactacctatatcaacaaggtgcatcttgtttt

SEQ ID NO: 401935 - DNA, 2049 bp, Cannabis indica
aaaaaaaatagatttagtgacacgctgtggttgtggctgttgtctttagagtctgacaatgtgagattctaaaagtctatagtgacacgcggtgagcgtatctaaaaggttttagtgacccgtactaaagggtcactaaatattacttttactgacacctacattagtgacacgcaatgaagtgtcactaaaaatctttagagtctctcaaaatgggtcactgaaccccatttttctagtagtggagggtggcaggaaaaactctgcaacatacatctcttcgtgctccttggaggtccatttgcattttgaaatacttgagctgggataagggatcttccttcccaatgtacatcttccaggttggcatcttaaacttgtgaggcaattctaagacattaatctctggggagaaaggggatccacgtgctcggtccaacatgaggtcattgttcctctgatcggtcatgccttggaacatattttttagttcatccaactgtgctcgcacatctggactaacttgttcggtctcttggccaaccagagtcgcgtcagtatctctttgagtgggattttgagcgcgggtttcgggctgaacgactagtgcatcatgctagtcgtccaatcctctcctcctgttcaaatcatttcggagatcatgaattgtccccgatctatcaaatatagaaacacctggttgtctcagtgactggttggtttggccaattagctggtcggcaccattaagttggttggaattattaggtataacttctcgtgatgaattgctagataaggtctgcccgcctaccacttggcccataggcggaaactgtgaacagggattggaggctgaccatttatagtctgagaggtgttcaccactggatctttgtctgtctcgcccagggggatgacggttgcaggctgtgttccggtagcctaataggattttcatatcaacccggtggcctaccgggttcgatcgttaatggctgcatgttgagcccttaacgtttccatctccttgtccctccattcagctaacatgcgcctctgctattcaaatgcaagatttatcgcggcacggagctactcctgatcgttatgcagggtgttggtatgaccttgcatgactctaagagcagcacggaggttctagatttcattatcatcttcgatggctgttcgaacattggttacgagcggaacgacagtgttgaggatgccctgattagctgctgaactggtattcccagtctcttgcacaccaggcgtgattccactcacatgagtcgccacaccgtgacctacgatcgagggttgtttgggatttatggttggcgaaaccgtcatgttccctgggtttctgcagtgcaggatccactgcctgtggatttcccagatcaaccacgcctctacgagtttgtaccaccattgtatttgtgatcagatttgagaacgttcttgagttcagctatcaatgaaagcacagaaatattgacatcacttttagccaacgacagtgagtctaaattgtaagcgacaagtagtataatgtgtatgtaatgtattaaatcaaataaagacacaagaatttcatagagattcagccctgagcagttcggtaatagcctaatcctcttgatttgtattgacttaagaacaaggaaaataatctattttcttagagctcttacaatggtatctctgaatatgaattcttagataagtttttcgaccctttgcccagtgagtatgaatcactatttataggcttaactgaggaagaatttcccttctgattacagttgatataagtggaaagattgcataataaatacagaatacactaatcaaaggattcgaaaagcttgccatatctctgtgatctgatcccaaaatcatagggatttgtttggtgactcacgatgcaaaagctgaaattgctaagtgttagcatgctgttcggactgcttactgcccggttaagaaggcttcgtccgagcgaatatatgtggttccctgttcagcatatctcttgcg

SEQ ID NO: 401936 - DNA, 539 bp, Cannabis indica
taaaaaaaataataaaacataaaatattaatacatacttcgttttgagatcatcaccgcccattataggtgtgtgtataaagtcatccaatccaatcccaaccgaccgatccaatctcaaccgatccaatagaatcagatattcaatcataattggatcggatcggatgcaaattttaaaaatccaattggatcaaatcagatgttggatgagacatctgatccattggataaccgaaccgatccaatccaatatatccaatcataattaatatttataattttatatatatttattttatttaatattttatatattattttattatgagttatttgcggcataacctccttaagttgttacgtttttacaactaacccccaattctaaaattttagtggtaaaacctcctaaacccaagttctgttagcacttagccccttccatccatttttggctgttaactgccatggtggaatgtctacgtgtacatagtgtacatgtggtacaattttaatggtccacgtaaataaatattt

SEQ ID NO: 401937 - DNA, 792 bp, Cannabis indica
attagatgacaacaatagcaaaaagtaatgtgaaaatatcacaaccatttgttgttgtgcaacaaaacaaaccatatatggttccttatatatggtggtaatttaatacatttcatttgaggaggctggtgttaataacgatttggattatgaattcaaaatttaacaaaaactaattgaaaaaaagtcaaagtgataagttcctacactccaaaaagcaaccaaaaaagaaaaaagaaaacatcgattggaatagctatcaaagacttccaacacagccattgttctaggctgcagcttctacttctttttcttctgatgtagttgttgttgttggccttggataatgtttagcaggcctaaacatgtccaaatcaactttgggacccatttttaagacctgaacttcataatactttccatccgtacattccagcgtaagataataataatcgaatcctctaattatgacatttataatctccctaatctccaaattaacaccctacatatatatataaaaaatcaatacaaacaaatatcaataaataataaactcattatattaacattatatattaatgaagcaagacaaatgtacctgaagtttgttatattcagcaacggctaaattagctgcttcaatagtatatttataggaagtacagcccatgatgattttctgacaccagtttcttttgtgtttattaggaagataatcaacatgaaaaccctaaatatacattagaagaattaatattagatctaataatgaatgtagaattggagaaa

SEQ ID NO: 401938 - DNA, 577 bp, Cannabis indica
taatcacctaacctagcccaagccagcaataaacatcacaatcaaacatcagaatacacattataatcatccttaaaccaacaacccctacatcataatttcacaaactcaacctaaagaaaacgcttgaaaacatgaaaccaatggtctagggtttacctttgcttcaagaatgctcaattccttaacttcaatccagaaaaacacaaaactttgagggtaaatccctctggtttttgccccatccgaaagagagaaagagagagggtgagttctatttggtttttcttacaattcctttattttctaaaaatgagacttaagaaaaattcaattaatctttgctgaaaatgaataggtcatgtgtcacctcctaatgcagccaccaagcatttcccttagtaatttactaaaatgccccttatacttaaaattagggtatttctaatgctaggggtaaaattgtcaaattccataaccccgcttaatcccgacattttattttctctaaaatatttcccactaagaaataaagttctaaacttacccatatgatcaaactagccatccatcgcat

SEQ ID NO: 401939 - DNA, 978 bp, Cannabis indica
gaaatttgtgagtgtacatgtcaataaatttgtagatttttgaaagaggtcaaagacccaatattagaaactggcacacattggccgaaaagtctcaaatggaagggagacagcaaaagtatctttttgggctggcagcactttggctcacaacagatcacaaacgatttttttggaccggtggcatttgggctcacaacggatcacaagtggctttgataccatgttagaatttggaataaggtgaatgaagttctatcttaaaactaattagcaatgggaagactagccaattcatcttatacatgacaatttatatccacacataagtaatgtgggactaactttaatacaccctcacgttttggcctgaaaagtgtgggtataacaaacgacctttaagaggccacaaggccgaacgtgacatttgaaagaatcccacaaggccaaatatcgagaaatttatgggtgtacatgttagaaaatttgtggattttgaaacaggtcaaagacctcaacactgaaactggcacacattggccgaaaggtcccaaatggaggataaaggggagacatcggaagtatactttttggatggcactgggctcacaacgaatcacaagtggctctgataccatgttagaatttgggataagatgaatgaggttccatctcaaaatcaatcggcaatggaaggagtagcccattgatcttatatatgacaatttatttccacatattagcaatgtgagaccaactctaatagtatttgttgttattgttattaccacaattgaatttgagtttatatgtatttcatagagaggaaatatttagtagatcatcatatatttttaaagcatttggatatgtggttcccagctctgagaataaagcttgaaactagaattttagaaattgtttccagtatatagatcaaatggtcgtttaaaataatgaatacaaaacaaagattat

SEQ ID NO: 401940 - DNA, 539 bp, Cannabis indica
aggatgtcaacagtgaacctccaagggttcgaagcaatagcaatctttccacctctatgccaagcaatattagaagaaaaacaacaattttgaaaaacattcaagtacaaggtaccaagctttggagccttgactctagtctcaaggagcccaacaaaatcaaccttttgggaattaataaattgctttattaattgttgtttttgttgattgttggctcctctcacattccaacatagaagtctatccattggagagagagggagctcccccctcctgtttcaaccaaatctgcataaatctccccaatttcagcagcctcctctagttcctcaagaacctaaaaaccattttgcacggctttcattgatgaacctgctgatacaaaggcattgctaacattcttttttctagtgtcagcaacctttgtaaagccttcattatcaacttgcttctcttgactcatgttgtctttttttattacccactgatgtacaccagcagatttcttcttgtagtcagcagcaaggtgtccaaca

SEQ ID NO: 401941 - DNA, 759 bp, Cannabis indica
ctaccacctaatatatatatatatatatatgtatatttttcaaacatatcaaaggttattcacattgtttcaaatttataattttttgatttttgtttcatttaaattcccttgtagatgtcatgttaggtagttatatcatctccaatgctgcaagatacaaattttgtgttaaatttagacaacaaaaaaaaaaatgttatatttgacacaacctttacaatacataataacataacatatattagtctaaaaagtaaaatatcattaatgattacaataaactatatattttaaaaattattaatgataatattgtaattaaaatatatgtattaaagcatgttataaatgattagtagcaaaagcataattaaaaaagtaatatttatgtgtgttaaatttgatacaatgttatatcttatgctaaatttgacctaatttttagtgtgttaaatttgtcacaacttatagcacactattggagaaatcttttcttaaaaaatgctaaaaaaataaaaaatacaccacctatatagcacctcatattatctccaatgtaaaatgtaaaatttgtgctaaatttgacacaaaaattaagtttgtgttataattagcccactatttataaatttataattgtgctccaatgtaaagatataaaaaaaatataattatattgatcatcattaatattgtattaaaaatatacaaacatcattattttttatttttttattgcttaaataatggtaatat

SEQ ID NO: 401942 - DNA, 1091 bp, Cannabis indica
tagggaaagggtaaatcccctgtcaagattttgccatcaacaggtctggctgaggaaattattggcaataggactgtagaggtgtgtgatgttatgcattctgttcttttttttccttgttttttgtttttattgttgtttttcgtgttgttttatgtttgttttagcagtgtttttgttgttttgttttaggattgggaatccaagtacacccaatctcaatactaccatctagagtagtgacatctggttattactctgtaattggagatatcaaaaaagttctaactaaaacccaactagaacttttctcaaaaactgtgtttggatattttctccgaattccagagtacattatccattaccaacttcttcatggtttgctgttgagggaggttcacagcctaatgaattggagttttgggtatgtgtccaaggcaaatataggcaaatatcttaggtttagtattgaggagttttcgctaattattgggttagattgtccgattgattctgatttttatcagttaaagaaagatgataatacattggttaaacattgcttaaagggttacaaaaaaattaccaagggtcatattcaaactacctttattgctaacaatctcaagagtaatgacgatcttccagtcaagttggctgtgttatattttgtgcagtgttacttgttgggtggtcccccgggtaaagctatttcaatagaggaaatagatgtagttgatagtggtcggtacaatgaatttggttggggtaagcactgttttgatatgactattcaatctttaaagggtaagattgactctggtcttagaaaggttgttcgtagtgatgaggatggtgggtactataggttattgggttttccattggcgattcaattctggtttttcgagtgttgtccttacgttattgggaaactttctttgtactcaaatgttggcattccaaggcttctgaattggcctaaactacctaaggataaggagggtcaggtgaaaatggatgtcatgaacaccatcgtgttcaatcggtctttgaaagaggtacttttgttgttttttacactatttcta

SEQ ID NO: 401943 - DNA, 773 bp, Cannabis indica
agagagatatgtggctaagattgatttttttaatttaaaaagagattattaatatttaaaagatggttatttaaagattgtttaattttgagtttaattattaggtttatttttaacgggagatcaaacctaatcgttaaatttaacagaatattcttttattttaagtatattctgttaaacaagaaatgccgttagataggcacttttaatatataaagatataatagggtgtattcttaatgggtattacctatgaatgagtaatattaaaaaaaattgagtttttatgcttaatttttctatttaattagaaaaatctctcatttttttattatatgggctgagattgttccatcggctgaaaataaaataataataataaaaatttggcaaaaaaatgataaaaaaatattgaggtttacttaaatatttttcatataaacttatttttaatatagtgtaaaaagatacatttttcaatattttctccaattaagtagctaatttaagcatagaaattcaaatttctattttattattcgccatcgaatcaaaatctaatgacttaatattttaaaaattaatatttatagttaaatttattcagtacccatcattaaataatacccattaagaagtgttctatatataatattagttaaaaaaaaatgtgtaatacaaatctactaaatagtgatatgattaattgaagtaaaaaaacattaatttctttagtgctacaattacattttaataggcaattaagaaat

SEQ ID NO: 401944 - DNA, 653 bp, Cannabis indica
tggcataacaatgatcttgatttatatataaatttattaaatttaagaaagaaagaaataatggggcctgaaaaaaataaataaaaaggttatttctatgattatgaaaaatatttttctttttcttaacttatattttttttaattttaattttatcaattaagatgaaaaaagtatttatgtcctttaaaaatccttaaacaaaaaataattacatgctctaacaattgtagtttgtcaaattaaaacattctcattatctttcccagttatgtaaataaaataatataattctgtatttctttccagataatttagtaaacagcattacaaaatatttttttttgattattttttattttaaaccaatttatttctatcattaattatataaatttcatatgtaatctaatttaaatattacactaaagttaatattatatttataaatattattttttattacaaatatatatcgtgattaactaaatttcataccattactctatcttgcctctatgtgggtccgtcgttaagaatgatggctaaaaaagaaaaggaatagaaagggaaatttgattttctatacttacatatacctaatattttattcctaaactaatacatatcaccattgaaaatatatgaccac

SEQ ID NO: 401945 - DNA, 1055 bp, Cannabis indica
ttttttgaattgatagtcaactacattttgccatattcatcattttatttttatttttccatcccaaaacgttatcataaatgtgatgatgatgtagtggaatttttttaggaacaaatagaagttataattatagtgtagcaattctcattttgtggagagatagataggtagatgaccaaggcaagaaaggtataaagaacgcttcccactaacatctactatattccaaattttgatgccactttgagttggaagagaattaaaagtggtggtagtgcatgaggttgaagattaagaggatcttatgacttcaattttagctgtgaaagtatggttttaatttgatgccgaccaaaatatctcttatgtttattattgaaaagaacttaacatacacatactactagtggacaattccaccatgggtgtttactttttagtttttcctaagcctactatttagttacattattattgaaatgcaacatatttgctctctgttaaaatattatccaatacgagttattgtcattaaggcatatttgtccattactttattttttaaaatttttaaaagtaaaaatattactaaaaaaatataatagtatacaatctaaagttaaaatatatatatatatatgggtgactattcaatggttacatttttattgtaaccatatggttacatttttctttaacctgtaatagcaggttactaataggtagactttccttttttagatttaattaattataattaactattttcttaaaataattaattaaatagacattccttttttagaattatttaattataattaactattttcttaaaataattaattaaatatttaacaagacctcttttagcaattaatatttatatttaaatccttacttgaattattttaataattaagccatttaattataatatttacaataaaatttattttttttacaaaaattaaacttcttttgacacaaattaaaattctcttcttataataaattttcaaataattaattatttttaaatgatatttaat

SEQ ID NO: 401946 - DNA, 834 bp, Cannabis indica
aaaaaaaaaaaattaccaaaataatttagctcaaattgattaagatttagaaatagggatggaaagttcgcttcacgttctcttatacatttctttacagaatatagtggaaattcacatgggccaaaaatatttaatttggtagtaaattatcgaagtagctacgttacttcattccatagtatagttggtggataagatatgagaacactatatatatattttattaagttgttttattttatttgtgaacatattttaattattaattactaagtggtactggtagtaacatgaattagattcacacctgacatacattccatatccatctaattatatagcaatacaaaaacatatccaatttaactaaaaatcaatacttatctccttccgcctctttatttttacattatttttaaataaataaacaaatgttggaatacatatccattaccatttttatttttattaattaatatacaataatcaaatatgcatatccattaaatcatgtgatacgatattaccattttgaatcacaagttagatcatctttaatacaaaattttagatattttattaaatttgacattaaaaataaataaatattatatttaatataatatttataattgtactccaatacataataataatttaagatgtaaattaatctgaaaataaaaaatattaatattattaacaaattaaatatttaaaaaaattaattagaatttttattctcaaactaataatataattatatcacatgagtctaaactaaaataatgtaccatataataaaatttatatatcatataactaaaaaat

SEQ ID NO: 401947 - DNA, 696 bp, Cannabis indica
cacattgagtttaagagcgcctgcagttggtggagaccacggtgttggtgatgtagcagttgttcgttgctggtgtgaagttgctagtgcagatatagcagcagcagtagacttacgttgagcaactcgaaaattatgaataaagacagtggcaaaaatggctaggtccttggcggctcttgctttgctaccatgtaccacttagttacgtttactccaaatagtccaaagtgtacaaaaaaatgtgttccctctccaatttggtgtagattgttgaaagatgtaacaggtagtctccattacgcatcgatgtacatgcgtgccaatcgaaccttaagttttgagctctccaaacagccttagcatatttacagctaaatagagcatgtcccgttgtttcccaagcttgtctacaaatggagcatgtggaatcaataatgatcttccttcgaacaagggaagtagccacaggcagagcatcatgaatgacacgctaagcaaaaatcttgactttttgaggaatttgtagggagcaaaagaatttccaccatgataaagatgaggaggagctggagttaaggtcttcttcttctaggaaagttgctagatgatagccactttttttttttttttgaaggaaaaccgatataggttaaaataacaaaagtaacatgatgatagccactttgaaccgta

SEQ ID NO: 401948 - DNA, 1027 bp, Cannabis indica
aaatttccctcgtactcgtcgtcactagcctcatctcgttcctcggagtccacgttcactcttgaggccacttcctcgtcctctagattttgagcatcctgaggaggatggggctgacgtgtattgttgcgagtttccaccactgttgattcaacttctcagatcgttgtctgtttgaagatgcttccttcagctctcaatgaaagcaccaaaatattgaccgaggttttcggcaaccaatcaaataatgtataagaagagttgtagaaagtttaatgcatgagatttttacgtggttggggcattaatgagccttagtccacaagtcttttttatttatgagagtatttattacagagaatgttcttggtggatttctctcctattttctctctttgattccttaaaaccgaaaaatgtccgacccattttcagtctgtttgtggggtatttatagtatttttctggggtgatccctaggaatggatcacttgtctttctgtgttagtttcataggggcacatattcccagcagatacaaaataggaaatacatgacgtatatcttatgagctaggtggatataatcttttattcccttttgactgatgtgattcctcataaagtagctgtcactaaacttactaatcatagtgtaatagccgttacgccatatgtcatgtcgtttatggagatttcaatatgtcttcccccatgcagcattaaatgcgaagtgactgttcaagagatctctatacctcccggaactgccttagcatgcctctggcctcccggagagtaaagatactttttatgtctcttccgagagacaacttccctgagagactcctctttcgtctaagacttatctgattttcataagtgatggttcttacagatccacgtgtcacccttatccgcgtccacgtattttgggcaaaatccaggacaacaattttaaaatataaaatatttgaccttaaatttaaaaaaaaaaataataataataagataagataatcaaaatt

SEQ ID NO: 401949 - DNA, 744 bp, Cannabis indica
tacaataaaaaacttgtatatatatattttatataactaattataataacctggtgatgatgatgaggaagagtgacgagcattgcatgcatgcaaagaagcattaagacaaagaagagtgaaaataattagggcaacacaagaagacatattgatattcattattacgatcgagattatcgaacaaatacaagtatatattatatatagccttagtacagttatagaatatgtatttatagttatataagttgagtttaagagtatatatagttgtgtatgtaataggagagaggatgcgtttttgggatatatatatagtaaatgtaggagatgagatgagatgagaattaatgtatatatgcattaaatgcaggagggggtttgtgttgtgtatggggaaattaaagaatagagtagagaggttcattaagagaagaacatgcttgtgtttttatttttcaacattttcacaaccaaattcaacatctttgcccttctcctttgtcccccccttctctcctatatcctatacctatacctagcctacatatctactctctctctctctctcttgtattttttggtcaagttgagtgggcccacctctagctaataagaagggacaaattaagctacaatacaacattactattcgaccctttaatacttctttttttttataggtagtactttataattggtttacgatattttttttaaaattattttattaagttatat

SEQ ID NO: 401950 - DNA, 668 bp, Cannabis indica
aggtagctctctttcattgaatttaattgaaattcttgctggtttttagttgttgaagaacatgaaaagtggtgttgttcttggatttgcatgataagaggaattggtgcttgacttggttgtttttggttgtgaaatttcaagatatagttgtgaggttattgttgattattggttgagtttattaagtattttctaggtcagaaattatgtgtttattggttgagtttgcagctggaaattataggttggaatagattgaggttcatgtttatgagcttgatgagttgtgaattgaagcatgattttgagatgattatgcaatctgaatttttagggtaaattgtgggtgttgatggatgttgcatgaattttaataccctatctttgagcttgttaaagtgtggaattgttttgagagtttggatgtgaattgggtgtgttgttttgttgaaatttgaaggtttgcatgctggtttctgggttctgcacccagatgtcgcggcatgctctggagcatgccgctgcccgccccttttggtggaacctgggttttgtcccaggtgccgcggcatgacttgggcatgccacgaccctccctcgtgattttgggcagttttgtgtcgaactttgaaaattcataacttttgattccgaactccgatttg

SEQ ID NO: 401951 - DNA, 900 bp, Cannabis indica
gattatagggaggctcaacacctacattctcaagatatttcacactcaacctctcatcaacatcttctattatctttccctgaaatcatccaggaggacactccggccttgtatgttgatgctgctcttgatcaagaccgatgtattacaagacttggctttgtttttaaggttggctctcatcgcattattgactcggcaaaaatccaaaagccaggagcctcctcccccatctttacagaggcccaagccttgtaccatggcctctcttggtgtctttcgtcccaacaaatgccgcgatttatcttttcggattgcctaaatttaatctcaaaggttaatggcacttggaaggataattgagccctttcaagccttgttgctcagatcaggctctccttctccaacttccatggtgtttcctttcttcacttaccgcgccaactcaacacaagcgctcattcacttgcaaaggaggccatcaggatgagagaggatgaccatgaggattcgttttagtctcctctgtttgctgcatgctttgatttgttttgtttcttctgcagcttgttttatcctaaaaaaaaagaaagaaacaatgaccaaggacagaacatagagaaactgttctaagaaccaagaagaagtagaaacatattgaaattacaaacttaaaagttgctactgtatatttatatatggtgggccatagtcctattaaacacaattctaaaagaggtttgactccaatatatacaccaaatggcatcttctttcatttaagggtgtgtttggaagtaactatataattactaggtagaaatgcaaggtgtgtttggatataaggtggtaattacatatgaattcctaatatcttgtttggcaaaatagttagtaatt

SEQ ID NO: 401952 - DNA, 559 bp, Cannabis indica
cttaccttttttttaaggaataaagattattatcttaacttgtgagattcgatgcttaattgtaccagtagcgatatgataccgaaaagagtgctaaacactagtggtgtcttttagcattttctaatattaaaatagtgaatgttaaaagacaccttaaagtaccaaatatcataagatgtgagatgttattattagtgtattttaatattgagtgctataaattttaattgagaaatgctaaagggcaccagtggtgactagcaccttcctatgtgtcaatatcgctattggtctaactaagaattgggtcccgtataatttaatataatagcttttagggagtatcgctaactaatcgtaacgcgacatgtcgcaaaggtactaggcactactggtgcctaatagcaatgctcattttaatttaataaataatataaaaaaaatgggtagctaattttacatatgacattgttgttggccacctaataacagtatgcagtagaacctctatccaagaatacacttgggactaaaaaataatattctaattgagagg

SEQ ID NO: 401953 - DNA, 1280 bp, Cannabis indica
aaaatccagtgttcatatttttattttcctgtagtttttctgcgttggatcatattcgtgaggctcgaatttggttaacaaaaatctgtgttaatagtttggtactttcattgagagcctctatgaaaaagcttagaaaaaagactcctgacataaaagtgatggatgacaccatcggtaatagtcctcaagaaggaatcaatcatcatcccggaaaagaaccattgagtcctcagggatctattgaatcattgcttgaacagaatgcaagccctaggaagacccagaattgaggcccttggcttgacggaccttggaagagcaaaaatcggtcactccctaatcaagttgatgaggatggcacttacaacccaaccagataaataccgattgtggaattagaaaatcgccatcttaggcgtcgattggaagaagcaaaccagtgtaatgccgagttggagcgtgaaatagctatcgtaaaggcaattctgggagattgtatccaaaaaaaacatgaccttgagaaaagagatttacgaggcaaaccttgtggctcacaagtcaagatgcagaagatgacccagggatatgctcagagctctcaagagatgcaacctgaggaaactgaggaaagactaggggtacaacctgggatacgtggaacatcagacgaaaattgccaacccactattcagtctcataagaatgaaactcgcacaaacccttctagggagaaaaaagtgagtcaaaccttgagaggaagggcagggtccagccacaatcatgatgggagtgatctacgaaagcatctgaacctgaaaaagcctgacctccgtcaacgactcgattcaagataaaaggatccattccatttgcgaatgagcgggttgaagaataagtctagagtacatcaaatctcgaaaaccaggagagaactggggcacgatactgttggaaaacttgatttagaagcctcgggatcgatgaaaaaagatgattccaaaaggttgcctaatagcaagaaacccaacaagtatatcactctttacaccgaatataccgagctcaatgaaactcgagaaaagatctaccacacacacgtgcaagaagccatttttggcaaggcaagacctatgaaacatgcgtggtggaagagggatctaagtaagcagtgtgaataccatggtgatattggtcacacaacagaagagtgtcatctgttgaaagatgagataaaagtctcatatcgcaaggacaccttcatcgatatataaaggggc

SEQ ID NO: 401954 - DNA, 691 bp, Cannabis indica
ttgggcgcactaagctcccgactccgtcaggtgctaagatgcaaccgtcaggtgctaaggtgcaaagagctcctcagctgtcaaattatctcaaagacctgatgagcacgaaccgacccaattagctcccctcaggtaccatgaccatccgggtccgctaaatacgagggacgcgtgctgttagagctgctccgaaaatatagtcaaaaaatgataagtgaagagatatttattttttaaataattattttattattattttgtatcttgaacctaacctaactatagttacgggagggcatacctatgtttaagggattttaaatcctagatgaatatctatataagggaggtgaaatcacttgtaaagggaccctgaaattgatactcacgagatcatactcttgagctccctctctcaaattctaaaaactcacttgaggagtgaactcttggagaacataactctggagaactctcctcaagcattgagatcaataacactccaagtggactagcctattaccgctgaaagggggtgaaccactataaaattcttgtgtttgtttttggtgaatttctttttgcaaaccggtttactttgattaactattgcttgtgttcatcttgctcgttttacaatcttcttaaatccgttgacgaaaaaccgcgtcaacagtaacgataagaa

SEQ ID NO: 401955 - DNA, 631 bp, Cannabis indica
atcttcatcttatttttgagtttcaagtttagatttcaatattctggccaaaaagttagttgacaagttcttactgtcaacaataattatttttcctcttttccttaactcaagaagtttgaattcctcatccttaagggggatggaatttgaaatcctaatcatgttaggaatgcttgaagagcagaaataattgttcaagatttccaaaattcatcctaagtttcgagagaaacgggcttagttcacgtcatcaagtaaacctcacacaggtatgaagttgacttaggggaaaatgttaacccaaaaactaactacagtgatgtggacatcaatgtttgacacgtggcaagaaataaaacatccttaagatgagtagttctgagtcatagcaatcgacctaggaggggtccttagccctacacttaggttgactttgagaactctaaaatgggtgttcggatagtgccaagttatttccaatgcactatctttcagtattttgtaccatgaagacataaaagaatccaagaccaaggctcgggagctaaaatacacgatacagcaaccctaaaagtcaacctgggcgcttagggtttcacccagcacccaagttgacattccaactagg

SEQ ID NO: 401956 - DNA, 772 bp, Cannabis indica
aaattccaacacgtcggtgcttagggtatccagttaatagggttgatgacaccaagaaaattgaaagaaagtcggaggaaacacgggtagtcgctgagttccttgatgtgtttccagaggagttacctgggttaccaccacacagagaaattgagtttgtgatagaattagtgcacgggacagcaccagtttcccgcgcaccatatagaatgggaccatatgaattgaaagaactcaaaatacagttggaagaatttcttaagttagggtttatcagacctagctactctctgtggagcgcaccaattctttttgttaaaaagaaagacagtactatgagaatgtgcatagactgccgagaactgaacaaggtgactataaagaatcggtacccattaccaaggattgacgacctatttgactagcttcaaaggaaaaaggtattttccaagattgatcttcgttcaggatgtcatcagctaagaatcaaaaatgaagacatatcaacaaccttcagaacgagatagggacattatgtgttcatggtgatgtcatttggacttacaaatgccccaacagcttttatggacctcatgaaccgagtctacaacgaatatttggatcggtttgtcattgtgttcatagatgatatattgatttattctaatgcagaggaggaacatgaggaaaacctacgcctaaccttgcagcgactgagggaacatcagttgtatgccaagtacaaaaaatgtgagttctggttgtctgaggt

SEQ ID NO: 401957 - DNA, 681 bp, Cannabis indica
atgactttaagtgtcagttaataaaccggcagtaaaagtataactgagaccaaaagaagttaagaaaaattatacaaatacagattgagtattagtgtcggtttataaccgagactaaaggatcctctagtctcggttataaaccgacacttaagggtataacaaaaaaatttgtattttttttgctcaataaaaaatttgtatttaataaaagaaaatactaaaaaaattagatttttttttcttaataaaagaagtttgtgtttataaaaaaaaatataaaaaaaaagtttcatgtttaaaaaaagattttttttttcttaataaaagaaattacaaaaaaaaagttcatgtttaaaaaaaaagaatttttttttcttaataaaagaaatttgtgtttaataaaagaaaatacaaaagaaaaaagtttatgttttaaaaaaaaaattcttaataaaaaaaattctatttaataaaagaaaatacctaaaaaaagtttcaaatttaaaaaataattttttttgcttaatagatttataatttgataatttataaaattgagaaattaggaattaatatattttgaattagagaataattttagaaattagtcgtatttgaaaatttattgtgaaagttattaaaaaaattattgtgaaagaaaaaaattattggagacta

SEQ ID NO: 401958 - DNA, 595 bp, Cannabis indica
ttttttttttttttttatatcttcttttttattactttatactattcacatgttcaggacaaatgcttgaccatcattaaaataacaattaggaatgtgtccaaacaagaacgaaccaacccccacaaaaaaatggttggttattatagatattaatgttccctttataaataaaaaattccaacaacctaattagaccaccactattttgggtcttattattagtaatgcaaacagagaatataatatacagccattagaatccaaatcttaggaaagatttctcttcacatgattgaaacattcttatattttatttttattaatttatcttttcatcttttgaaacattaatcaatgttctatattatgataattggttcccatatgaaaatttaatccaagctatcctaatagctcatctccccaaaagtaatattaagaaaataaatgacattaaaataggaaggtatatgtaatatcaaattattatttgtcggaatacaatcctctatttttggccgcatataatatactcttaagggtattactcctgaatggataaaattagaaaattttgagtttttatgcttaa

SEQ ID NO: 401959 - DNA, 595 bp, Cannabis indica
aaaaaaaaaaaaagataagagaacgagagagagtgaatgaatgaactgttccattaaaatctctcatctgggctcatatatttgtatccctatatataatttgacctaaataattattttagtaagtaagaattatacatgacaaaattacaaaaatttacttttttatgacataaataaataatactaagggctataggtttttttatttttttacatctatataagtttttttatgccatatttttgtaaaaaaaaaagatgtaaatcaaatatttgtaaacaataataagttttgccggaaaagctgccggaagacgttggcgccagaaaagtcgtcaagaaagtcaacggtgtcgaaaaagtcgccgaaaaagttagaccatctccaatgggagatgtaaaaattgtgttatatttggcacaaaaagtagttttgtggtaaatttacaccaaattttaactttttgctccaatacacaattaaaaaattttgatataaaaatttaatatctaattaatgttttattaaaaaaaaaatctaataactttataattaattttattattattttaatatgtaagacaataaaaa

SEQ ID NO: 401960 - DNA, 955 bp, Cannabis indica
gcatgcacctaatgcacacacacatgcatgcaagacttcacctacttacatccttgctttttgttgttctctcgtttgtaaattaccatagggttagtcatgaatcacttggatgtatcctgagaactgtgagtatcgacgacgactttataaaatacataatgggtaggtaagcttgttgaatgcactttcgttagtcccttggtcattagttaactaatttcaaaagttagcaacgctaatttttggggttaacacatatcattgtaaatgctccttccaaaaaaggctcattaaatttacataatagactaaaattaattagaaaaatccatctacagggaaaaaaattcatttctactccttaaaatttcttaattataaaaatatctcttcagtaaaaataataaactgtttttttattattttatagtttatttatagttgttgtaaggttgattctcgttgttttttagttttttttttaacattttactgagcaaagtatatttttgtaattttaaaacattacaagtttatttttataattaaaaattttagactataaaattacaaataaaatataaaataataatatttttgaaaattccttttctttttttctagaaagatgtaattttctaaaaaaaaacaaaaaaaaaaaaaagaataattacataaggtaccatttttttttcttaaaaaaatacattttacgtttaaagatttttttttttactattttacggtttttctataaaacaacaagaaaactacagaaaagtaacatgaaaataacatctaaataacatcaaaacaacaacaaaaataatatacaaataacaaaaaatcaacaacaaattaacaagagtacaacataaaaagactgtattttccgtaaataaaataaaaaaaatcgtaaaaaatatttaaaattccgtaaaacattattttt

SEQ ID NO: 401961 - DNA, 1695 bp, Cannabis indica
ctgaccaggtttacgcctggctgttgtgcttagcagaccagacctacattgggtaggggctggccgcccagttctccttcatggtcggctatacctgtaaagggcaaagtttggccgcccacttatgcctccatgatcggctagacctgccttggccagggtctggctgcccgcgactcctcgattgactgttgttggttgtgtattgatcaaagatacatcacaccaatggttagagtttggtggatctaaatgcctgaagtggtcaatttcacttcttgaatcaccatttaaggtgtttccacccagtctcggtcctcgtgagtcgaagatcgacctctgtgcacctcgatctgcttagggaggaaatgatgtaccctggccaaccatgggttctcctgctactggctggccggttagtggtattacaatggggattgctgttgagccagagatccctggccagcccccaagccactagttgccgggatttggctgttctcgccgtttgacctttgagcaaaggtctctcctccctctggtaggggaagattcgtcctagttcctaaggaacttgacgacaatctttcttgaagtgggtccctaaagagatcttggcctcttttgcggttctctaattgaaccgtcttattagatcactggcctcccgagttgtggcgatctagttctgcctggtgagatcaaaggatgtacttctggtcatccatccatctcaggaattcgcgtctctgctgagcaaatacatcacaatctgtagcgcgtggttcttcattcagccctgcacggcctacaacttccctgagtctagccaactcaaggtcttctcctaagtccagatgaggctcgcccactttcgggcctgtttctccagcgtataaacggatttgaggtctagttgttgttccaagaggctgtcgcccctgggtccttccttcaatgtgaggtgccaatggtggatctactgctgaaggcatgggcctgccacttggatccaccgagatgctcacgtcaggctggccagctgtggtggccaaacttattgtgcttgctgtggtgacaggattcaccacatctacagttttcacggggatcctagttgtgactagaacccaagtgtttggatgtgcaatttgtgggtcttgggggagacctggagatgcagatggtgcgacaggagttcttcttgtgttcaccatggcatttgatcagatcacaatatccatcctctcaatgaaagcaccaaactgttgaccctaaaaagtgattaaccgatagcggagtcgacaaatctgatgtttgccacatgtgtgtacaaataagaataagccacaataaacaacgagatttgttatagaggtttggcccccttgtgatagcgggtaatgacctactctccttttagttatattgataccaaggaaaacactatgtagatcgctataggtaggatctgctatggtgccctttggattacaatgtatggatcaatgtctggcagactcaagtgttggatagcctagagtgttgtacaacctatgcttggccatgtgagagagtgaggaagagagagagagagagagagtttgacacctagagaatatgagatttctaacttagaggaggcttaggcaacttaaagaacttaggtttcagctagaggttaagacctttata

SEQ ID NO: 401962 - DNA, 679 bp, Cannabis indica
aaaaaaaaaaaaacctaacttaagatttttacccctgaactttgacatgtactaaatcacgcttcttgaacttttctgatcgttaaaaattattgagattgttgaatttaaagacttttgtctaatttcttttaattttactaatttggtgattatactcatcaaactttgatatctaccaaaatgcccctaaaatttgacatataccaaattatgttccctaaactttgattgatgttaaatttttcttaataaaattggacaaaatcccttaaattcaacaatctcaagttcagggggcataatttgatacatatcaaagttttgaacgaaaatcctaaatagcttaaaaaaatacctaatttattttttaaaatattacattagatattttattaaaaaaaaaagtccaccttaagctatgagtataatataaagagtaatttgcgacgtaaatacctaagttttatgccgagtagcagataaatacctaagtcgtatttttgacggtaaaaataccttctgttagggtcttggaacttccgtaggtacctggacgttaagtgccaggtcagtacctacatggcacgttgtgattggtccaggtagaatttatttttattttttttattttaaataatcatttaatcttttaaaatttaattttgaattataaaaa

SEQ ID NO: 401963 - DNA, 644 bp, Cannabis indica
ttgaataaactttaacaataccatagacccgatgagcatgcaaatcatagttcctctcacattcaaaacttacgggttgcatataaattctagtcacgttcattatcacgataataaaatcgagggcagtgagaaatagttgaaggaacattaccagaagaaggctcttccattggctgcttgcctttggcagtagcagaagcctttgctgcaggcgcagattttgtcaaatgaggctctagctcagtgtcctcactgtcagacgaaacacccatgtcctctggattctccttctcggaatggagagaaactaatttgtcaacggaaacttccattggatcttcttcttctgagcttgaagaaactgaaggaggattgtacttaagcttcttcttggatggaggaactggcttatcacgactttgagaagctcgaagttccttctcagcagaggcttgctgggctcgagttcgcgtagaaggactggttggagtggtggcaggaactgatgcagcaggaggaggaattgctaacggtggaggagattccttcgaagattcagacgaagaagtccaggttcgataaggtctcactgatttgcgagccacttgcttggggatgcgttttggcttctcgggttgaga

SEQ ID NO: 401964 - DNA, 530 bp, Cannabis indica
catgaattgtataaataatttaaagttaattaagatttttatttttcaaactttaatatgtaatcatgctgaacttttaaaatcgttaaaaatttcttttaaactattgagattgttggatttaaagattttttgtccaattttagtaagactagtctaacataaataaaaattcaagagacataatttgatacatgtcaaaattcgagagatatgatttgatagatatcaaagtttagggagcataatttagtaatgacttttttttagttttaaccaaaaaaggaacaatattacaaagatactttcagctggcaaaaaaacaaatatacatgccaaataaaagaaattacaaataccacttacacacacaccttcaaaccaagatatatgtttcctaggcaactatcacgcaattattgtgcaaccacgcagcaacccaacgcaatcgaaacaaaaatttaacctaaaagagaactaccattaattccagcgacttcacttgagaagatgatcagaatcaatcaaaa

SEQ ID NO: 401965 - DNA, 643 bp, Cannabis indica
tctagtcaactatagtgaatccagtagtagtcatgtcaggatgattagggatgaataacggattgcacatgccttcttaaaatgtccccagtcattatggaaacggacttgcaatgatgattgatacccgacagtgatgatttgtaaccaacgagtaactttgaccaagatcgattatagtcaaatatagtgaatccactagtagtcacaacgagatgatcgaggctcatcaaactatctatcaaactcagtgttgatgaattctagaccattatcgattctaagtgtcttaacctctaaatttgttttattttctacctgagctttccatatcttaaattgttctagacactcatctttggtcttaagtaagtacgtccaaacacatctattgaaatcatcaatgatagataggaagtagagtttaccagaatgtgttgggattttacttggcccccaaaggtcagcatgcacatactctaggactgccttcgtgttgtgaatcactacagtaaacttgatcttgtgttgcttgccataaacacaagtctcacagaatggtaatgcacatgtctaaagcttttcaatgactcctttcttgtgcaatttcctcatgcctcgttcactcatatgtccgagcctt

SEQ ID NO: 401966 - DNA, 620 bp, Cannabis indica
ttttttttagctatttatacattagtgtgtcattcgaatttaattatatatatatacgtattttttaaattttttaattttttttaattaggtaacatatctaataatgcatctagtgtaatttactatattaaatttaagggtaaataacgacataagtacccaaagttttaagtttgtaagcggcataaacccaatgtttatttttagcagcataagtactcaatgtttgtaaaactgtaatttttcttcagttttatcagtagagactctgttttaaatttattaaaggaacatttagaagtaactgatactgcatgtttctgtctagacccaatgatcaagaatctagaccttatatgtggcctgtttaagaaaataacaggatttgtacggacgaaattagagaaaattcacagttttacaaacatggggtacttatgccgctaaaaataaacattgagattatgccacttacaaacttaaaacttaagtacttatgccgctgtttaccctaaatttaatacacttgatcacaaaaccccaatacacttgatcatgtactatatactttaaattaaagagaaatttgcggcaaaagtcctcaaaacttaagattg

SEQ ID NO: 401967 - DNA, 663 bp, Cannabis indica
gttaacagtttggtgttttcattcagagcctatgtagtgaccgcttagcttaaatttggaaattagcagataattaggatttaattatgaaaattatttatttatgtttaattattaaattatgatgatttatttgaattcagaatgcatattatatgttatgtttagaatttcataattttgcatgttcagttgccgacaacattggaacgcggtgtatggctcagtagaatcacatcctagtattttagtatagcggagcggtacatttagacattggaaaaatcgggattggtcgggaattataatttccctaaataccctttagtgcaattttatagcttttagtgtggatgggcaaaatggtgattttgccccatatgctttttgtcctttagtggacttagtttagttagtaaatggatttattggctgaaagtaattttaaacaaaatcatttatgttctcttaaattaactcattttacaaaattagaaaagttaggaagaaaatcacatttttcctctctcaagctctctttctctctctcgaaaatcctaggggatgctagggtttgattttgttcttcaattcagcaagttttcagcaattctaagtgtaattcaagctaagataacatttaagcaacctcctctttaattt

SEQ ID NO: 401968 - DNA, 504 bp, Cannabis indica
aaaaaaaaaaaaaaactcacctgatgtgggtgcagcaaaatcaaaatcaaggcagtttgaggagagagtttggtggacaatgatttgggcttcctcttctcagaggtcgatcgtcagaggtgagaaataaggaatttctcaacaataacaatagagaaataaagtaaaaaaaaataaaaaaggaaaatagtttaaaacaaaggaaaaaaagcaacaaaaagaggcaaagtgaaaaattaggcgccaaaaattgagtcacccccttttgtcttagtttatatactaaaatataaataattaattattattattattattattattattattattattattatgtaatttctaaaaaaaaagtatatatataactatttaatgaattccaccccaaatggacacatccctcttttaggaaattatttttatttttttttatttttaacttattatgtctaaacacatttttttagtccattaatattagacataatatgttttttt

SEQ ID NO: 401969 - DNA, 837 bp, Cannabis indica
ctatgatcccacgagatatgtgctgattgtcgagttagaaaatcgtcatctcaggcgccgcttggaggaggcaaactgacgaaatgctaagttggaacgggagatagccgcagccagggcggcacaagaaaacaacgcacaaacccaacctgatcttggagtgaggagaccacgaggcaaacctcacaactcacgaaccaggaggcaggagatggctcaggatgaccctcaaaacgcgcttgaggcccatggacacgctctaaaacgtctttggtcagcccattgggccaagataattaattctctcacattgggcatgtaggcccaattggcttataattccttataaaagggttgtgctccttattttgcgattaaggcatgagagtggtgtggctatggtgttgagagtggtatcaaaagtagtgttcattacacccaagtttttttagtctttcttcatgtgtgtagatcaaaaagatttatgaaatcgacaatggttcatagctcttgaagatataacatcaaagcttaaatgagatatgtttgctaattataaagttttactctaaagctaaatgtttgatcttggctaatatgagcatgaatttattgttgattgttattgttaatagcatgctcaatgtgcagtgacgaagccagaaatttggctgggtgagggcttgaataaatattaagtcaactaataaaaataattgataaatgtatcctttcaaattttcatcttcaacaaaataaaataaaacattgtcataaaaaataaaataaaaattacaatctgcctcgatgactgttcatgttttgaaatcgctgcat

SEQ ID NO: 401970 - DNA, 601 bp, Cannabis indica
aattattttttttatttaatgcactcatacatttttcacaagaaaaattcacctaattaattataattatatataatagtgtttgaatattctcatcatgtaaatagttaattcacatgtgcagttagatcaaatgtcattccccatttgtctaatttattttaggcatatcatatcatgtattaattattaattcatgaatctttcaaaaatacaaattaattaatgcaatatattttagacatttgtggtatataccaaaccacatttatgatatatatgtataagattaatctatttatgaatgaccatttcaaaaaaaaaaaaaaatctatttatgaatgaattatatgatgttatgtattatgcaagccagctctagatctcaaatcaaaaaccaaccaataaaataatcaatatgtaattaaatcacaaaataattaaaattaattaacacacacaaataaggcttctgttaatttaggtgtctatgtcagttacgtgtttgaaaggaaaagtgttaacaatggccagtggaaaaataacgggatcacgtggtgtagatcaggagtggctatccgattcattttaatattttttt

SEQ ID NO: 401971 - DNA, 668 bp, Cannabis indica
ctgcaatttgagatgtgttcaaacagtaacaaaaaatgatatttatattttgttaaatgaaatccgaaatggatagttttatccaatcggacaactataataattcgaaatatcttttttgacatgtacacaacttattgtgctcaaataaaataacgaacaactaaaatgcaactgagaaaaattaatattgattaatttgttatatgttacacacgctatacgcaattttggaacataattttctacgtacaaaaataatgacggttaaaaaaacaaaaatatgtatgtatgtgtaacgtccacggaatatattaaaaaacatattaaaaaaatatgtgtaacgtcttcggaattatagctcttatacacgagtttgttactctggctgcttcatggactgacgactggccagggtcgcgagcgatcatggaaagtggtggtcgcgactactgaagcaaaatttgacagcttcaacatctttcagtaaaatgtgcataactttcacatacgaattccaaatgagttgattcaagatgcgttggaaagaagaaaacgaaatctaaaacttatatgttttaactttttccaaaatctaaccagaacatagttaaatttaagcttgaagtttcagctttattttcttgcagaattttctctattctata

SEQ ID NO: 401972 - DNA, 1022 bp, Cannabis indica
cgttaaaaaaagttcctagcacaagagaaatcctggctcattaattcagggaaggtactttgaggctatactttattgaactcagattataaaacaaaaatcaccaagaatgctcaaacaaaagagtattattattaggtactatagtgtttggtaccattacaagataatttattaaaataaaataagtaaaatttgatattaaattactaaagacatgagatttgatgaaagtaataggatttctcttctccaaaacaaaatggtctcacatgcagttagacacgtgcataattctgcacatccctcattacctcacactgttttcatctaaattctcaactggatcgtcacctagagagataactaactgtcataaagactgaccgttaagttagttaggattatctttatacacattttcgtttttctactctataaatacttacacacacatatatccatttccatataaaaaaggaaaaaacccacagtgagagagagataagcttaagttagctaagtctacgttaatatttctcatctcaagaaagaaatcatggaaagaaaccgcggggaaagtagtagtaggagggcaagattcgaagaagaagaatcagaagaaagaaacaataacagtaatgagtttgatgatcagagggagaacaacgtactctcttcggtggaggaggctttcacgaacacagaggttccctcatggaacaaccagatcacgtacagagctatggccacagccttcatactcagcgtcctctttaactttgtcgtctgtaaactcaaccttaccaccggagtcattccctctctcaacatcaccgccggattgttgggtttcgtcgtcgttaaggcctacaccactctccttcaaaaattccgtctcttgaaacaacccttcactcgccaagaaaatactgttatccaaacttgcgttgttgcctcctctggaatcgcttttagtagtaagcaatcttctatacatgtctatatatatatgatctttt

SEQ ID NO: 401973 - DNA, 565 bp, Cannabis indica
tcaaggtcaatgctaaaccgtggctaatcacaggggactttaactctttatttgagttggaagataggaagggtcgcaaggatgtcaatctaaatgatataagggactcaaccaattggcttgcacaaagtcacttggatagacctcttaaaactggttcgggatttacttggatgaacaaccaagaaggggataagaggatttattccaaaattgatcacacttttgtgaatgaagattggaatgatagctttcccttgaccaaagcgcactatagttgggagactacctcagatcactgtttgtgtgtggtttcaatggcaaccaatgtggatattggtttcaaaccgttccggtattataatttttgggctgatcacccagattttaaaagagaggttcttgacaattggcacaaaccgataggaagagagggcatgatgggattatacttgaagcttatgagactgaagcacacaatcaagaagtttaatagagagcgaattggggatgtagggaggaactttcaactagctaaggacctatatattcaagctagaaatca

SEQ ID NO: 401974 - DNA, 709 bp, Cannabis indica
gtcgagcagcagtttctactcagattgaccgggcctaaatttgaagtcaaggtaagattagtataataatatgcatatataattacatgtttagcatgcgcgtttatgaatgcctgttagttaacatatcagtaatagcgatattagtgtacataaagttgtactaaatatcgacagatagatgtttggcaaagaactgattgatgttatcacatcgatacaaatagagtacgaagtataggctgattatggtcaatagtattgttgtacgaacgttctatactcagtacgcgtgagatgcgggataaggttgtaattagatttatgggtgcctagttataatccagcttatgttttgtttatgattatgctttttttacttagtctgttgactaacagttattgtttacatatatagggcaaagttaaggttgagcagcagtgagtgcgagtagatgaaaattgtacatatcgggaaagttagacttgaagtgtttgatcttcacggcagaaggctttattttggtaatcactaggtgacaacttttgtaactaaatattttgtaaaacaattgtaaattttaaaggcgggatcctggattatgtaaagtgtttaattaattaagtttaaagtttaattaaagaaattttaaattatccacgttttcacaaaaatttttgattagcaaaggagtgcacaacattaaga

SEQ ID NO: 401975 - DNA, 529 bp, Cannabis indica
atttgaggaaaaacgaactgagttccaaatcatcaacggtgcatacaaacatcgagtcataagatacatcaacaaaagagtcaagaaaagactatttaatgttggagacttggtgttaagatgagtctttgcaaataagagagatgcatcagcaggagtgttcaacccgaaatgggagggtccatatgtcatcgaagcagtagttcgagtcgaagtctataaattagctcgacctgatggctcgctaataaaaaactactggaatgtagaacatttgcgaccctactatcaataaataaattgtatcactctaactaatacaggcgtgttagcctgatttttaacgtactgtgcagcacgttgctaatcaatgaggttgttgaaaatggtgaataattaaaatttgcttatttaataaaaaacataaagtaatacattatgaaatctcgggataccgtttgcaaaataaatttataaaagtttgctattcatacacaaaagttttttcgccaagcgactatacagcaaa

SEQ ID NO: 401976 - DNA, 581 bp, Cannabis indica
tttttattacaatttaagttgcatcctaattgctatagaatttctatgtaaaattccgtacaaatagaaaaaaaaaaaaaaattgaaatgtaaaaataaaaaaaaaaaatttcgagttttatgataattaacaacatgaggaaaagtaaaaatatttttcaaaaacatgttctataaaattgtttttacttttaattttttaattgagaatcaaaaaaaaaaatcttttcaaaaaaaaaaaatcactttcaatattttttaaacagtttttttttcttaatcaatatcttggacttcgatcagacccgtacccaaatcccccacgaccctgacgctgaacccgacctctgacttgaacccaaatccaaatccaactccggacctagacccgacgtaaataaaatcaaaaaatgaaaatgaaaatgaactttacagaacacacttttattttttgttttcaaaattgaaaaataaaagtggttacaaaacgcatttttatttttcaaaagcaaaatttttaaaaacaaaaattttactttcattttgtgattaaaaaatttagaaaacaaagtgttaccaaa

SEQ ID NO: 401977 - DNA, 554 bp, Cannabis indica
agagaatctgtgaataacaacatatatagtgtcttcaaccaaaggcttcatttagcatggaagagtattttttttgcatatcatcaattttgtatctttaaatagttttagattagttagttaagttatgagtattgtgactatgaacttttttaatgcaagaccaatatttatgtctatttctataaattatgagagtagttttatattagttgcaaaataagggtaacttcaattattaaaatggtcaaaatggaaattccaacattgtttgatttttaataagatattattgaaattcatgtgattgaaataataatttgtttaaactaagtgcaattttttttttctaaaattattattcagcataaaaatttagacagggaattcctgtggatactcgctccctaattgggcgggaattttctgtctaaatgggaaacggagcggagacaaggattaagtaatttgcggcataaatatttaagtttaattttcagttctagataaatatttaagtttaatttttgacggtaatattacttaagttatat

SEQ ID NO: 401978 - DNA, 1348 bp, Cannabis indica
ctctaacacataattaagttgtttatcatcacattatggttattagcaacattaggcacatagttaatgattgtgtattatggaattaaacctatgattgtattagtccattataataatttcaacatgtatcacacccgcataacctttcaacatcatatctttcttgtaccagtcatgaatgtaatcccaaacttcatgtcctacctcacatattccacttagttggtaccttctgcaacaacaagtcttctcagctaggttgactgcatagctgatagtgcctgggcagtccacttgaaaaatcacttctgttgcccttgtcaccaaacaatttgtagcagacttcttgttctgctatatgatcttcatgatgttttttcctactagttcattccacctagtgacactcttccttttcttttgaaacctacacatgagccaataccttaacttttccaacaaagttatgattgacttgtctctggcatcagtaatggcattattgaaagactcacacaggttgttcaaaagaacatcacacttcacaccttcagaaaaattaagcctttgtccattctgtaggtggctttgcaaccaaccaattatatgcagcgacattgacttccttgatttctatcattcttctatcaaattcagcaatagtcgttgctcttgcaacaacccacaacatttgtttcatcaacaaactggaaaaatccctcttgaaattagagtaaagatgcctaacacaatgtctaatatctgaacctgtgaaaactcttccaactgcattgtccaagcctttttgcttgtcactcatgaatgtgtatacatttggtctttcactttccagatctgtcttcagtagatcacaaaacgacgaccaagaatctgttgtctccttctcacaaacagcataagcaataaggaaaatggcattctcagcatctatcccaacatccaccaataatatccccttgcaataaccttttaggaaagtaccatccaaacaaatcagcggtctacaaccatttctgaatccatctttgcaggctttcaaacaaatatatactctctcgaacacttttttttctccaaccattttagtcttgatcttagtagtactacctacattattaaacaacaacataagcagttgaacgtaacaaacacaaaaagaaacatggtatcttgagcaattaaaaaaaatagtacataaatgtataacataaattgaaccatagaagagcattgaaatgttacaagatgaatggtttaaaaaaggataccagccagcacgctttcaatacatttgaaatgtttacttttatcgttttgcttttct

SEQ ID NO: 401979 - DNA, 1221 bp, Cannabis indica
gttagcagccttaggataataaatcaattagtgagccaatttaatagcgaatgaatgcaggatcagtcacgcatgcgtgacttcatcggggtccttttcatatatatatatatgggaaaatataagagagtttatttttatatgacataaataaataatataaaagaatatgaaattaaaaaataattaaagtttaaaatatgagaaaaaataataaaaaaaatttaataaaaacttgtaataataagttttgccagaaaagttgttggtgccgaaaatgtcgtcggaaacgttagtattatcggaaaaatcaccaaaaaagtgattgtcgccggaaaagttaccagaagtagatgtctcggagataactaaaaattggaaccggttctatgacataatgaataaaaaaataactcaaaccggttataattgatatataaccggttctgtaacataatgaataaaaacaaataacataaaataactcaaaacaattataattaaaatataaccggttttataaaggtgttataatgaataaaaataaataacacaaaataactcaaactaattataactaaaatagaactgtttatatagcataatgagtaacacacaataacttaaatcgattatgattaaaaaaaaaacaaagagaaaatcaattcctaaaacacaaaaacataaattagaaacaaaactagtttcaattcctaaaacacagaaacataaattaaattttattttgacaaaaaattagtttagggtcttatttgtactattttgaaaaaaatacatgattcattttattatttaacaaaatagaggatccaattaatacattttgcaaaacacaaagtccaaaatagtatttaccttaaaatataactctgctttattttttaaccaaattcatctcaaattttataacattaggccaactccaatgggcctttaaaaacctaataatagaatgatttcacacaaaaaaaaaatactccaatcgcacggtaaaagtaacatcaatattaggtttgtctacactgtcccactatattttaggtggacactgtagacgacactaattttttttttttactttttaattaattatataatactaaaaattaaataattataaataaatattaatcaaaacttttataaatgtatttgtttgtatttttatatttttaagtgtgctaaaaaaatattaggggt

SEQ ID NO: 401980 - DNA, 1384 bp, Cannabis indica
ttggtttgaaatggtagagatctagtagatatggttttctgttaaaatttgggttttgcagatattatcgacagtttattgatagaatatcgatgctatgtcgatattctacgaagaaaggtcagggatgaccattatcgacatgatttcgatagtttgtcgatatcatgtcgataacaaagtaaattaacatacataatttatttaacaatttgtcgatattttggtgatagcatgtcgaaattaagtcgagcaatattgtcgagcaatattgttgacaatatatcgatggaatgtcgatatactgtcgactttgagataaaaaaaaacgtttaacataacaaacatgaaaaattctgaaacaaacataacaaacataacattaaaaacattaaatcataacataacataataaccattaaaagttcataactatcataacaaacattaaaatattaaaaagttcactaaaaaaataaacattaaaactcaccactaaacagccatagcataacaaattaaaattgtttaccttgtgggtgagacttgtaatacttgtataaagatccaggcttcaccggtttaccattaaatatgcctaatttgcaacgacgacatccttcggggaatcctggtggtggagccggccatataccagttttgtgaacttttctttcaagttctaagaacctccactcgttcctaagccgttcttttttcaaaacgtttatagtcgtctagaactttttgcatttgaggagtaactttgccaacatcagactcctgtttgagatcttcatgagttagaattggatatttgcccttgttctttctagtagaaatttagaacttaagagaattataagaggaatttccctttaatttttaagtataagagaagtataagagaataacacttatgaattagaaagggatttgcttttatagagcagtatatttgttgagaatgtaggaaaaattaattaacattaaatgtataattgtataagtgcaacacatgcaatgtgcatttatcgatagaatatcgatacaatgtcgatagtttgttgataaaactttaacaaaaagaaatttggtatacgtaatatcgattgttgggattttatgccctaaataaaacccattacaatctaatctgatttgttatcaataagagattagaagtgatttatgttaacatgtagttttcatgtttatggtttaatatatgtacaaaatctgttaagtccagaacatatagtcattcacaattacagtgatgtcaacacagtggaatgtgattgtgattatatgattcgaaagactaagtccctgtttcatcagtgctttggatttacactgatgtgataatcagcgatgaagt

SEQ ID NO: 401981 - DNA, 915 bp, Cannabis indica
tgcaaagtcaaattttgtaccattaaactattaaaacatattgaatcaaaaaagaatgtaatgtagtattacaaagttcttttactaattaatatataatttcttttcagatttttttttcagggtaagagcgatctgtattcaaatggcgagatgaatattctgtgtgatcagtggattgaatacgtccaagtacaggcaatgcgacaagggctattacactgatcagtttatgtttttgtttatactttattctaactaattagtgacaatatatatataaattagtaaaaattaattaatgttaaggaaaactttattatatataaatcagtttctttttcagttttagtagtgataatatgtattttatcctaactattttttcctttgcaattcaatgacaggaaaaattgtcgctgaaaaatatcaaatttataattaaattgaaaattttattataggctatcgtttaaaattatgcctaaaatattataggtcacagttttaaactgtggcctatagtatagactacggtttaaaaccatggtctatactataggccacagtttaaaactgtgcctaaaacactataggcgtcagttttaaaccgtggcctatagtataggccacagttttaaattgtagcctatactataggcaacggtttaaaactgtcgcctatagtgtaactataggtgatgattttaaaccgtggcccataccattttcccgacagtttttgaccatcgtctattctacccagtatccgcgacgctcgtataggcaacagttttatggattgtcgggaattctttggtcgacagtgtaaaaccgacgggaatttagatttttttagtagtgattgtactatcatgttcccaaaatgtacgtatcaccctgtccaaaaagtag

SEQ ID NO: 401982 - DNA, 1045 bp, Cannabis indica
aggagtggctacatatatgggcattaggaagtcttatctcacaatttcggtaatcttttgagtttaaagaagaaaaaaaagagctatgttatagaacattaattttcctatgtatatataatattatttatgtttattgttaatttgttatttgtatcattaatttattaaatataaattgtgataaaaaataattaaatttactatacatggacttattatatattacagatttaagttttattggagaatgaattgtagtagcgatttggatggaaaaacaagaatagagttgattcattctaaaattttagatgaaataataccaaaagtgggtatggagtttgaaactgaggaagcatatgatttttataatagttatgcttataaggttggatttagtattcgtaaaagtaaaggacaaaaagataataagaatggtagaatgatagatagaatcttttgttgttcaagccaaggttaccgcgagaaagataagcgagatgtggaagtaatacgtcatagagcagaaacaagatttggttgtttagcaatgatgaaaatttgctctcgacaaactaatcgatatcatgttgttgaatttattgctgagcaaactcatgttacaactacccctagtaagagccatttacatagatcacatcgacgagtgattgcagttcaagcagctgaaatagatatggctgaccgctcaggaatttcccctaaagaaagttgtgaattaatggcaaggagagtcggtggtcgagaaaatattggtatgattccaattgattataagaattatcttcaaacaaaaacaatgacgcaaatgaaaattagagatacaagcagtgttttagagtatcttcaacgtatgcaaatacaagatccaaacttcttttatgatatacaagtggatgtggatgatttgatcacaaatattttttgggcagatgcaaagatgatacaatcatactcttattttggtgacgttgtaagctttgatactacaaataaaaaaaccaagatgggagaccttttg

SEQ ID NO: 401983 - DNA, 1569 bp, Cannabis indica
gtttgacatgtggcatgaaggataaagtcacagagttgagtagacccaagtcacaacagtcgacttaggaggcgaccctagctctatgcctaggttgactttaggatcttcgggatggaagttcaaacttcaataaattgaatataacccattatctttcgttattttgtaccatgaagacttgaagcaacctaatccaagccttcaaagatgaaattacacaaacctacaacccgaaagccaacctgggcacctagggttccacccagagcccaagttgacatcctcaactagggttttagtttccaaaatcattttagtgtaaaagggtaaaacatgcattgggacatcaaaaagacataccaccaacatatttaaggcatcggagtaagatttgaagcaagttgatttttgatcacccgggccccaaggccccgagcacccagcgcctaggttgacaatcagtcaatctaggagccttcaaagtatcagatcgcagatccaacttttacatgttctttctcttcattaaaaattgggaaataggtcatcttggaggaaaaacaacaattcttgggtactaaaaataggacccagcgcccaagttaatacgtagggttggctctgcgcccaggctgacattttatcaacctgggccatttcaaatggagcttttcaggaattcttttaagcatcttctccattttcagaaaatactaaaattcaactatttttgaggaccaaatggaatttatggaggggtaaaagggggatccagcgcccaggttgacaccaggggctgggcccagaaagttcaacaaaataacaattctaaggtataaacaacagggcccagtgaccatgttaacacctggggctggccctaggccgtttcaaatggatttttttaggaattcttttgagcatcttctctgttttcaaaaaatattaaaattcaactattttcagggaccaaatggaatttacagagtggtaaaagggggacctagcgcctaggttgacagctggggctgggcccagtaagttcaataaaaagtgtcacgggcattttttcgtcatcagaaataataaagattcaagaaaaatcagggaaagacaataatcctaagtccctggaaatagggcccagcccccaaatttaccaagggttgggcccaacgcccagggtgataatcaacctaggatgctgcctttaattgttcaaatgtaaaattcgatgggaccattgaatctagaatggtcaaaaatagggtagaagaccttttcctcaagtttagaagccttggatatatcaaaaaccaaatcccggaagctcgagagtaagtacccaacactcaggttgacagaaggcttggtgcgctgggttttgcttatctgaatctgatgccaatttgaccgtccatatattttttcacaatggaaatgatgtatgaagtcaggggaataaaattctcaagttttcatttctcatttctagctcacttggaaatgaagaggttcgagtctttcatttttgcaaaatagcaacatcttcgagaactgatgacc

SEQ ID NO: 401984 - DNA, 1295 bp, Cannabis indica
ggatttttccaattgtgcccatgtgttatccttctatcctctgttactttgcccttcattacatggtcgtgaaactaatcttggctagttaggtggttaggattaatttaattttattttattttttaattattgacgcttttcataggttacacttattttggttaggtagttagtaacaattccttggcaacatctgacaaagcataagcattttggtggtctgggatttagagacttaagagattttaatctctccatgctgggtaagcaagcttggcgattgattgttaatgagtcttctcttgtcagtcgtttatacaaggctaggtactttccccgaggctctttctttactgctgaacttggtcacaatccaagtttcatttggaagagcatctttgatacccagaagcttgtcttatcgggggtgcgttgtaatattgggcctggaacttccattaatattcaacgggatccctggcttcctgacgcaaccaatccctttgtaacaacccaactggtggggttagatgactgtcaagtggctagcctaatggataatcatgatagaagctgggacttggaagtgctgaatgatttgtttaatatccgtgatcgggatttgatatgtaagacccctatttcttcggctccttctgatttctggtattggtctcttaatccttctggtgtgtataaagtgaaagatgcctataacttgttacacaaggaagatggtttactcctctcagctgatgaaaggagactttggaagatagcttggaacatcaatgtcccaccaaaggtacttcattttttgtggcgctccctttctgaaactcttcccacgaaggttcagctggtctcaagacatgttcccttggatctgcaatgtcccatgtgtaattttgaggatgaatctattgtgcacctgttgatacaatgctcctttgcccaaagctgttggcatagatcatctttaaatgcggcggccttattggatggaaagttctcaacctggtttgaatcgtttgtcatgccctctagttctgatgtaagagaggaagctgtcatgatttgttgggccatctggaatgcccgtaatgcgttcacttggaaaggtaagagcacctcagcatcagatgtaattttgtctgctagagtcaaccttaatcaatggaaaaatgctcaattgaaaaagaagggtcctttatttttggcttcgggtgaaaatgaaggaagtgagcattggtctaaaccggttactaatacgattaaggtcaacgtagacg

SEQ ID NO: 401985 - DNA, 836 bp, Cannabis indica
gcaagatttactccacatcgtgcccgtaggcttgatctataacgatcgagtaagtttgaaagtatagtgtcatagagaattatagttatttgagcgatccaccgagaagctagttctgctacctgatcggatcgtacgatcattctgaaataccctctaattaggataggcgtataagatttactccacattgtgccggtaggtcttgatctataacgatcgagtaagtttgaaagcatatcgtcatagagaattataattatttgagcgatccaccaagtagctagtttcttctacctgatcggaccgtacgatcattccgaaatacctcctaattaagataggcttttaagatttactccacattatgccggcaggtcttgatctataacgattaagtttgaaagcatatcgtcatagagaattacagttatttgagtgatccaccgagtagctagtttttggtacctgatcggaccacacgatcgttccgaaataccccctaattaggaaaggcatctaaaatttactccatattatggcggcagatcgagtaagtttgaaagtatagcgtcatagagaattacagttatttgagcgatcaactgagtagctggtttctactacctgatgggatcgtacgatcgttccgaaataccctctaattaggacaggcgtctaagatttactccaggtcctgatctataacgatcgagtaagttcgaaagcatagtgtcgtagagaattacagttattaattggagtgatccaccgagtagctagtttttgctacctgatcggaccgtacgatcattttgaaatatcccctaattagg

SEQ ID NO: 401986 - DNA, 970 bp, Cannabis indica
tttccctaaacatcaatagtaagagatctatgtatgctctttgatgtattagatcagcatctgttgttgagaggagcttgagtaagtattaaatcaaatccagaaaaggaactttggaaagataatcaaacatatcttagaatagatgaggggaactatatgttagttgataagggttgtattttaaaacccttaggctatacgaaattaggtttttagacttgcgttaatgctcgaaaatctaattaagagatgatgattactctgggggtggagtagtgaatttaagagaaaagtaaaaaccactttaaaaccactaactctaccagtatgactgaataataaggttaccctaaaggaaattagggaattgttctgactcgggaaagttcgatacaaatttttggcataattctagacatggaataattgctagtgtgactttgtgataacacaaatgcaattgccaaatagtaaagaatcttgtaccctaagaggagtaaaacatatagatacggaattcacaaaatcatgacttttgtgactaaggaaaatgtgatagtggagaaggttgatattgcatacgacctctcagatcctattacatagtttatgctaaatactatatttgatcaatacattaagtatatggaattaaaatgaaatgtgcttttatttttatattagtgcaagtgggagtttgttggaattttatgccctaaataaaatccaattttattgtaatcttatttactttcaataaagatcagaaacatatcttgactttgtcatatgctttgttcacatgttttatacatgattatagatttaatatataagttttattaaatcccaaacatatagttactcacaattatagtgatatcatcatagtgaaaagtaattatgattatatgcttcaaattatttagtcctacgatttatcagtgcacttgatttacattgatgt

SEQ ID NO: 401987 - DNA, 849 bp, Cannabis indica
caatacagtttgacactttcacaagtggtcgaggacttttcgaggaaactatccaaactactccactggctatggcagatttcctcagtactctactggttatggtaatttctatccacctccctatccttcttttcctaacactcctcgtggctcttgaggtagatttcatggtggtttctaaggttctagaagaggatcttcaaatcctaaagtgcagtaccaattgtgtcacaaacaaggacacacattaaaacaatgtttctatcgatttgacaaatccttaacaggacctgaatccttttaatcctttagtggatctgctgctacagctgagatgcaagtcatggttgctacacctaaaattgtcaatgaccaaagctggtatccagattcaggtgcaacaaatcacttgactccaaatctccacaatctgatggctccacaagagtttccaggttcagaccgaattcacatgggaaatggctcaagtttggacattcatcacaatggtcacaactctttcatttcccctttcacatctcagtcccttaattcgcataatcttcttcatgtgcctaacattaccaaatacgtgatgagtgtctcacaatttccaaaagataattctatctattttgagtttcaccctcatttttgctttgtgaaagatcaggctactatgaagactttattggttgggaaggttgacaaagggctctataaatttgaccagcctctcaaatccagtcttcactccaattgtagctcctctactacagctgttgtttcctcaccaaagtctgcacttcaatgtcaaacactcagttctaatgtacctttttcaaa

SEQ ID NO: 401988 - DNA, 995 bp, Cannabis indica
gaaagagaaatcaattcagtgaacgacaaccctttgattgacgtttcaaggaacaaggctatccatggtggcaacttccaagggactccaattggagtttccatggacaatacccgtttggctgtagcagccatcggtaagctcatgtttgcccaattttccgagcttgtgaatgacttttacaataatggtctcccttcaaatttatctggtggccgcaacccaagtttggattacggttttaagggagctgaaattgccatggcctcatattgttctgagctccaatatcttgctaatccggtgactagccatgtccaaagtgcagaacaacacaaccaagatgtgaactctctaggattgatatcttcaaggaaaactgctgaggctattgatattctcaaactcatgtctacaacattcttggtagctctttgccaagccattgacttgagacatttggaggagaatctaaggcatacagttaaaaaagttgtgagtcaagtggctaagagagttttgacgactggcgcaagtggtgagctccacccatcaagattttgtgagaaggagttgcttaaagttgtggatagggaatacgtcttcacatacattgatgatccctgcagtgctacctatcctttaatgcaaaaactgaggcaagtactagtagaacaagctttggttaacggtgaaagtgagaagaatcccaacacttcaatcttccaaaagattggagcttttgaagaagaattgaaaacccttttgcctaaagaggttgaaagtgcaaggaatgctatcgaaagtgggaatgcagacatatcaaacaagatcaaggagtgcaggtcttatccattgtacaagtttgtgagagaggagttggggactggtttgcttactggagagaatgttagatcaccaggagaggagtttgacaaggtattcactgcaatgtgccagggaaaaattattgatccaatgcttgaatgtctcac

SEQ ID NO: 401989 - DNA, 519 bp, Cannabis indica
agtttaattttttatattcatgtacgttattgttgtttaggacatctgatagaattttgagaaattcagaataatttaaaatataaaaaatagtgttcaaacagtctattccacacgcatataaaataaaataatcacgtgtgtaaccgactgtttgaattatgctttcgcggtgttaaattttttcgaattttttaaaattttacaggacgtcttaaatgactacaacatatacgaccatgagaaaaattagactaatttttttcgaacgtataaaagtgtatcagtgcaccattttaaggagtgaattgtagaattttttaaaactatatattatagttgaatatcacatgaataaatataggtataattatctatacaaaaaaaaataaacaataaattagtacgtaaatgtaatgttgttacaatgtagatgttgggttttatgccctaaataaaactcatttcaatataatcagttttacttattaatatagatcagaaataacatttaatgtt

SEQ ID NO: 401990 - DNA, 640 bp, Cannabis indica
atatttggttgtaaagggtttgaggagtaatttgttgaagaaatattcaagtagctaatttacaaaagaaaaaaaaaaaagactagtagtcttggtaattggtacttcggccggtgctcttttctcaaaccagaacaactcatcttttccttgttataaatacaaggatgtcattattaatacattatagactgatttaagttaatttagctatattgtagcaaaataatttagaacaaaaaaaaaaaaaaaaaaaaaaaaaaaaaaaaaaaaaattaaattctatttatgttaatttagctatattgtagcaaaataatttagctatatggtcttgtcttgtgacatggtttgagagggttttggaagtctgagttggtgttgtttttctgtttgcgttcaactgtttctcattggctactgtttcattggctactggtgcattggagggattttctggtgtgtttttttctggtttttctggtgtaatttttctggtgttctatcgatggcagcaggaagatcttcagatatggagatggtggacagatacgtgaatgataggggggataatagatgatgaagacatgctcctacttgacgatgatgaaggggatttatcgggaatagacgatcggtg

SEQ ID NO: 401991 - DNA, 669 bp, Cannabis indica
gttaatttaattttttttttttacgttaatttaacagaatatctcaattattattttataatattattataatatttaaaataaaaattatatataaatatttatataaaaaaattattttttgagtggaaaaattaattttattatatatatttaaaaattaaaattatatctatttataaaatatatatacttaaactttaatttcacaataacttaaaatgattaatagtataaagatatgtttttaataatttgtacactttattataaacacactttcctacccacaaattaaaaatgcatctatctcattcattattttttaaaaaaatatatgtttggacataatatataaaatgtattttaaaagtaaactcaaattttgtcaaaatattttctaatataatctttatatatagaaaaatcaatataaaatacgtataacaatgaaatccattcttttattgtacatataaaatacataaatataatcacatctaaagagcacaccactgtagtcgcaatagccaaaaaaaattctcaaagatcgaaatctcaatcttatttaaaaaattaaaaataaaaatatattacctaattaaaattaattgaacatacatgtattatacttaacatcatttaattaaatctaattaaaaaaattaa

SEQ ID NO: 401992 - DNA, 595 bp, Cannabis indica
agactattctaggacatgatcttgtcctagtactgtaggcacgccaacctaattcagcggattgcctcgggcgtcataattgcccaaaggacagttagggaggataaaacatgtcctatatctcctccccatcactgtagcgacctccttcaacttgaactctgcatcagagctcctagtctccgagtccacctctgactcagctttgataggaggccgagcaggctcctcctcctctataatctgaccccttgtagccaccatggccacatgaggatcatatttggggtgccttgcgcaaagttttttttatccttgccataaatacgaggtgaacagaagacctacacaactatcacctcttgagttcaacaccaagcactacctgcatggaagaaataaagggaggtgagcaacatgacaaagctacaaatatattcaagtcaacaacactcaacgacatcttccaggtaaaactaagggtacgaggttgaccaacgaccaagtatcgtcttagactcaatgactaagacaattcgtaagtctaatgttgtacaattaaccataatggacttattatctagccttatacaga

SEQ ID NO: 401993 - DNA, 1008 bp, Cannabis indica
atcacctcctctagggtggccagtcgttttcctcttttctgtgaagacttggaaccggatgcaaacattttggttctgaaaaagatttgaaattccagcagtcaggccccaaacaaaaccctaagtcaaaaaagggaatgggggtcccttaaccgctggaaagaggccccctccagacggatgtcaaccagaaagccttagaaggttttctttgacaaaagtcgggtgcaagaatcccacaggtggcgacattacgaataagcaaagaaaaggaaaaaagggtaaaattgagaaagacaaagtcttctctgaacccttgaaggccattacgttaagaaaagatggatcttttttataaaaatacgttgaataaaagcaactcgaacaccagattagaggaatctaatgtattacacagaaactcaaaacgaaaaattcccaaaaaattcaaacatcaaacccaattaagcagataaacagtaaagcatgcaatgagtacaaacaataaagtacgagacacgaagaacttacataaagcttgagaactgggcgttgttgttgatcgacggtaaaaagttgactgacaatggcgaagaagggtcagtaagaaatctatggtgtttgagggttttctggttcggaggttctttctctctggaaaacttggaaaaatttggtgaaagtttgaaagtaaccaaatgaagtgagaatggtggcttttataggccagagtgcatgtggaacaggcgcgatcatctaccaatcgtgcggttgggaaagcacatgattcaaattcccaagatccaacggctgaattggtttgtcatcgaggcagtggaaacgcttgagtgtccgtctgacacccattaatgcgccgtatcaattgatggacaagaaacaaatcgacgcctacaaaaagtgaaccgctgcagtaataatgatcattaaatacaccttcgtgcgcctgaggcacgtgccaagaaaccgaggagccaaccggaggcatct

SEQ ID NO: 401994 - DNA, 504 bp, Cannabis indica
taattactaacatcaaagtatatcgtctactacgtgtcttgctggctttgttcatattttaaaaaattcataataatatagatcgtgttgtgctagctcataaaaagatatgggtcgcgttttatcgtgccattattttaaagggtaagcccatacagtttgtaaactcacattttcgtgtcatgcttggactcgtgtcgtcctttacttgggtccgctcgtataaatttatatgcaattactacttgatatccaaacatatattgtattcactattgtatttaatttgtatccatttatcaactattatttactacatcaccatagaaaatttaaagcaaaaatactaattattcatattgagtaatttgtggcggaaatatttaaatttaactcttggttatagataaatacttgagtttaacttttaacggtaataattatatttctgaaacttctgtaagtacctaactgttaagtgtaagtcaatagtaacgtgacatt

SEQ ID NO: 401995 - DNA, 640 bp, Cannabis indica
tggagtattgttaacttgtgacctctttaaattttaaaaagatctttattattatactaaagtagtgtttggtttacatgaatgagtgtaggaatggaattgctaaccttattattatttaacatgcgtagcttcacccatgacagtgatgtacttttgaaaacatgtttttaaagttataaatgatgctattgacatgcttgcatgaaatcttgatttttgaagctaaaacaatgctcttatgaagcttacatgaaaaattgatttttgaagtcaaaacgatagcctgatcatggtatatcaaaaacttatatttgaagtgaaaaaaaagcccatgcgatactttcatcaaaatttatttgtgccaaaatgacgcaacaatgattctttgaaaacttgatgtttgagatcaaaacaaaaggctatgcatccaaatgatgcatttacaatgctataacaattgtctttgaaaacttaatttttgagaacgacattcttgtgatgtttttatgaaatttatcgtagatgcatcgttttacttaaaattctttcagatttgaaaaagaaaaaaaaaaacccacggacaaaactaaaaatgtatctattctatacaaagtgtgcctatataattgaaattctt

SEQ ID NO: 401996 - DNA, 761 bp, Cannabis indica
tgtctggattggatttttgccaagcgttccctttgcacctttttcaattcctacaatgccaaaaaaaatacattagatacatgtacttgtatttaaaaatttatcttggtacaaatataattagcatacttgaaattcaggggttagtccactctcaacaaatttgcaccaatcagcacggtcgatttcgggatgcttttcagggacttgtgccagtcgtcccacatccttctcttccacagcgggcattatgatgtcttttgtcatcctattcttgaagtctttcattaacttcccagctaggatgagacaatcatgtttgaaggaatccggcacaatgaaccccgtctagtttgaaggaaaacaaacacggttagagtgaacatttgaattaataaaaaaacaaatcaaaattctaacaaataactgcttacttgtatatctttccaaactttatttttcagagttgggttgacttctttctaatttttataggacaaccctatcgtctgccggcatctgactcctaaagttgatacgagcttggcatagcttttgccgcagtattgtcctttatcattaacctcgagggccaatcgtttgccttgatccattagcttggatatttcattcatttgcgtaggccctcgtgtaggtattactgttggacactctgcctctaggtctgaatcagatcctgaacccgagttggccatatctacaccattaacaaacaaaatttatcctaattctaccgaaat

SEQ ID NO: 401997 - DNA, 746 bp, Cannabis indica
cttcctcattcgagtcatagccaagtaatttccctgattccccatcttagtatttcctaaacttatcctccaactcaatgattcgcaatttgatgggatccacttgttgttgattagcattaagttgatggcgtaagttaggtgcattttgatttaatcgctcatgaagatcgggttgtcttcgattcaaatgctcacgaagattaggctgtctttgttcataattggtcataaatttcgtatctgagtgactctcagatggataatttctcgtattgctcatgctttcttgattagcataacgctgaggtctacttccttctcgcatttgccttcttgaatgactttgccctcgagacctcgagtgtcttgagctagaacttgcctcatcttgcataggccttctccttcgaaaaaggttaaatacacaccctctatttaggtatgtgtatgcccttccctctccgattgagaaggacgttggaggtgtctcagttgaaacccacttgttctaggttgagtcccaggatttctctcgttattacaagggtttttctgttccctactttggggttgcctcaggttcttattcctacgagaagcctctaacacttcattacgctcattcccctaattcgtaaatccttgggatccttgaggtacttctcaatgatgttcttggttattttgttgttcatccattggaacatccctagttcccccaggttgctcctcctgggtgtttt

SEQ ID NO: 401998 - DNA, 1517 bp, Cannabis indica
ccctcatggtgttggacaaagccactttccgggaagcagtagacttagctcgggagtatgtgtaagccaacttcagaccatcctacacagaggaaaaactttaaggtctgaaccaaataaagaagaatcaaggaaactatcaacaaaggcttaccctggtaaattccttcaagactccccccatcagcaactctagggaagactcgttatcaacactggccacctgctcacttacctcaggaaccaaccggttcatgtaatgagcaagcatctctctgcctttcttggcctctggaagcaccggcaaaggtagagtaggagcccacacctgctcaggtccactcttagctagctcggatccgccctttgattgctcaggcctgtccgagcttcctcctcgagaatccttggacttcgcaacttttgaagtagaagggtccgcaacaatcagctcctcggaaaggtcaataacctctccagctggtgccttttctttggaaggggtcgcctcaccgcctttagatttcttggccggtggagacgagcttgagcttcctccagctctcttctttagggcatcaagcatcttctgagacatatctgcacaaaataaaaacaacatggttagaggaaaaaggcttcaaaagcataaagcatgatagtcaaagagtttaaaaataagacgaaatatcctagaaagtaattgtccgaacaagactcgacagtgcaccatcacctgacaagtctttcgcctccgccagggcagctttcccttttcccaacacgggaggagatggccgagcaggtgaaatgggctccctaatgcaaattgcatgttcaacaggcctagactgggtcggaagtttcttcctccttttgggcggagccacgtgctcttcctcagcttcatcttcaggattcaagggctcatgagcgtactgtttggcccttgcacctcccttcaacttagcttcacgcttcagttgaatcagctcattctccttatgagctccctcagcccgaccagcaccagatttcctcttgctccccttcactggcttaggaatgaaattcttcgagtagagcccgtacttcacaaagttgtcctcggaggtcaactgaatgatattctggtcgtcccccggcagctgagcaagctcttgagctctatctctaagagcaagagtgaggggagggcggtgatatgtggggatctgctggaaccgagtgtggctggtgcccatgccatccaccatgaagtactcatcaacaaaacacccaattttgctgatggccgaatccccggtgcttgtcaaccacttgaagtctggttgagagaaatagaagtaccctgacctgccttgcttaggggtggatttcaaatcaaaaaaccagctaacttcgtggggagaaagcatatcccacttccgggaggaagaaagaacgaagagggctgacagatatttaatgcccttgggagtaaattgggtcggtcagaggcagaagaagtttgccac

SEQ ID NO: 401999 - DNA, 565 bp, Cannabis indica
cacaggaatcgcccttgtcacactcgggaggcagcacctgcacgacgcagtcaaattgaatttaaggcatccagcaatgtagctgaatatgaagcccttattgccggcctaaaactcgttcgggaatcgcatgtcgaacacgttgagatctgcagtgactcacagttagtggtaaattatgtatctgggtagtacgaagctcgggggaaaagaggatagcatatctaagcaaaatacatggcctgctcacacaattcaaaagctatgctctcaagcaaattccaagagaagaaaacacaactactgatgcactagcccgacttgcgaggagcaacataaatgataaagaaaatctgatcctgatccaatttctagaaaaacccagtatcacaagcacgaaggagattgaaatgattgatacatctccaaactggatgacgctaatagcagcctatctcaacactggggacctccgagataacaagaatgaagctcggaaaatgaggagaaaggctgaacagtacatcattgttgagggagttatgtatagaagaggtttctccat

SEQ ID NO: 402000 - DNA, 993 bp, Cannabis indica
aatttcaggtataattgtgtcggtatcgagtttcgtaaacccaaaaatgtttaaatatagtacccgaactcggacatgattacaatcaggtgacacctgaacccaaatttttacagtgtaggttttgggcttttttgggttatctgggtttgggctaggcaagttagccaggtgagtcaaattttcggacctaaatgtgcatccctaatactataataatattataggcatatcattacaaaaggttaaatatatatataaaggtattcattggaccacatccaatatttttaggcctatccagatcaaatctaattatatattagatgttagattttaccatccgattcgatccaattaatttcagtcatccaattgatccagcatccattgaatgttggattagatcagttctatctattagatgtattatatatatttattggtttagtttgagcttatccaatatttcaggcctatttttttggatcgaatcggatccatccaatattttaggtcgagtatgtattagattggactgaatccatctaataaaaaaaaataaaattttaatattatttttcataaatacatatagaatttacgtataaaagtataaaatctaattacttattcaaattaaatagaaatactaaataatttaattggatgttggatgtattagatttttggatactctatccaccatccgatttgatccaattagttatttaaaaataacatccaatctgatttgattataattggatatccaatatatagcggtcagttataattagatatagagaaatttacatggtatactaacttttgtcattttttttacaatgtatttttataagtttcatactgcagtatactgtgttaagttttcactgtagttctactggtgttttttagttgttctattgttgttttgagtttgttttttgtgttctactggtatttaataaaaataaagtatttttgaaa

SEQ ID NO: 402001 - DNA, 1246 bp, Cannabis indica
catttccataatgtactcccttctgttttccttgcccttaaacctcatggaaataagtttccttaaaagagtacttatttcccttatcgctttttacaaagtgtttcttaatttcagcaaggaaagttgtggcattggtgacatcctgggacaccgcacccctaaaagcctcaagtatggcgcgcttgatgatcataagactcatgcagtttgaacggtcccactggacttgtaccgaattaaggttagcagatatactagcatcagctgaaaagaacaatacaactacataaataacatgctcatattataatccaaataaaacaataaattcaaataatggttaatcccatctcaagataccaaacacatcattaatattaagtctttggacaacaatattaattgtaagtggtactcttattgtagttatcaaacaatgacaataaattatgtcaaacaatatgcaatctttggactaacatattattcacacaaaatattttataattgtcacacatttatcactacagatatgcatgaaactcaaccaaatattaactcacctttgagttaggtaataaatttacgaatcacatacacaattattttaatatttttattaaactaatctacataaaaaaaatcactttgttgataatttatttcaattaatttaattaaatattagatatccttaattattattataattaaaactattatatattttaataaaataataacaataatacctgaactattacgcaaaaaaccttctatatacccaaccaatataagaaaaatgtttatatcactttagtttgtgaaagatatccggaagatacctatagctaaaatcattattatttatttatttatttttaggcacacgaaatcatttgaggaaaccaatgtcaatcgtcaatcacattgggtgaaactgtatctaaaataaatcaatatatatgtccaatatatatagggaatatctacagtaagacaccctattttgtccgtatagtatagtatgtaaagggaaatttacatatatactgtttttggaccaaaactttacaaaaatactggaacacggcaaaaacaacttttttactgccccagcccattttctttacttttgtactgcccaagcccaacaacttaacatttatactgtgaacagtaaaacacacgggaaaacgacctgcttcgtgtgtggggagtcgccggagtcggacatcaccaa

SEQ ID NO: 402002 - DNA, 603 bp, Cannabis indica
gagttttcgccatggccccagctatcgcagctgtacggacaaagaaacagagagaaaatcaaaacttgaaactctaattttgatatcgagtctcacataatttaatataataatttttatagaacattgtcaaaacaattgtaatgagccacttttgggtgatcctaacaatacttttatttaattgggtgaattataattaaatatttacaaaccacgtctatattgttgtttttagggtaaatactatgttggaccttgtgttttgcaaaagttactaattggaccttttgttctgttaaatgacaaagtagaccccgtattttttaaaatggtacaaataggaccttgaattgattttttgtgaaaataaaatttaattataattcgatctaaaagtgttatgacaaaactgtttacataatctgtatcagttcgtattaagaattatcttcaagttggttatattaaaaaaaaagttgtcaaaaattaagctcagggtcctatttttactattttgtaaaaatacaggtctattttgtcatttacaaaatagaaggtccaatcgataactttgtaaaacataaagtccaaaatactatt

SEQ ID NO: 402003 - DNA, 981 bp, Cannabis indica
ctctctctctctctctcatacacgcccattagggctctttctctcttctcttcatctctttcacacgccaatcctaagttggccaacaccctagctagccagcaccctaggctgtccaacaccctaggctatccaacacttgagatctgcctattgattcatactttgtaatcctaagggtgctatagcagatcccacccatattgatctggatagtatttccctcagtataaatacaaccaaaaggggagtacggagtagatcattaccctctatcacaaggggtccgaacctctataacaaatctttgtgtttattaatctttcattttgtttgtgtaacacgtggcaagcatcagatctatacgacccagctgtcagttgatcactttttgaggtcaacactttgtgacaaaaaggaacaagtgttagagaattgaatggtaggagtcaataatttctgctgcaaccactataaagatttcttaatccctttatgtgttatattattattttaggaaattcatatttaggatgttagattagacataatgaatacatgaatataaataagatcttggtaaaataaattttgaacactaatctctcatggttatcaaagaggtagtgtggataaaactcttttgataaaactcttttcaacaagcacataaaagttgacttaatcattgctcaaatatatgttgatgatatagtgtttggttctacatctaatcatgaagtataggttttcgttgatcaaatgaaaaatgagtttgaaatgagtatggttggtgagctctcattctttttgggtcttcaagttagacaaatggaatgaggaataattgtttcttaaagcatgtatgccaagaatcttttcaagaagttcggtcttgaattggctaaataggtaagtactctgatgagctcaaccttgaaattgagaaaagatgaacatggagtaaaggtagactctaca

SEQ ID NO: 402004 - DNA, 853 bp, Cannabis indica
acgttgcatgtcaaacacgtgtcttgtcgataagatatcgacataacgttgacataacatcgacaaataagtatgccgtgtcattaaattggcatgttgtcgacataatatcgacatagtatcgatattctatcgacaaatacaccatttcatgcatttcacctgtacagttacacatttaatggccattaaattttcctacattcccaacatgtatactgctctataaaagcaaatccctttcttattcataagtgctcttgtcttctacttctctcttacagttaaaaattaaagggaaaattctcttattcttaagttccaaatatggcgcctagaaagaacaagggcaaattcctaatcctaactcctgaagagctcaagtaggagcctgatattggcataattactcctcaaatgcagaaagtttttgacgccgatagagctttcaaaaaagaaagaaatcggaatgagttaaggttgatacaacttgaagctcaatttagcaaaactggtgtatggccggctccaccaccagggttccccgaaggatgccgtcgttgcaaattaggcatctttaacagtaaaccggtgaagcctggaacattatgcaagtattgcaagtctcacccacaagccaaacaattttaataatttgttattttatggcttgtggtgagttttatttaatgtttgtttgttttttttaatgaacttttttttatgttatttttatgaactctatgttatgtttgtttgttttattttatggattatgatatttaatgttattttatgttttatttatggcttttttttcaattgcatcgatatattgtcgacatactatcga

SEQ ID NO: 402005 - DNA, 1398 bp, Cannabis indica
aaaaattaataactatttcacacattgtttattaattttaaaatgaaacctcatacatttctcaccttttttttttaactacacttctacatcgcacttgacatgcccaccacccaccgttgaattaatacaaataagttagttgatatttaaagtttgaggtgcacaagaaattaaaaaggttaattgtgttgttgtgcatgttattattatatctttggtaaagagtaaataaacaaaagctatataacaccataatattttaactttgtaattgcattacacatattgggtgagtcatgcatatgcattgattatgtatgcatacacatgtatacttcatctttgtacaaatttaactatacgtccaaggtgcaacatatagtatctctaataatatttaagtcaaagcactttgatataatcaagatacaagaaatttatactatacttttcatttattttaagatggactaggtaagctaatagggaagtgcattattccctgcccaggcctttcaagattcaaactcaaggacttagctttactagtgtacaactttttcacattggatccttggtcttgaagcaacctagccaagcttcgcttagcatttgatctaaaaggacaattggaggccaaaaaaccatccactaaatgcaagtaagcctctaaatcatgacaacaagccatgtcagcattaggtttaagataaggtgacatttttgtgtccaccctaagttctgtcccaacatgtgagtatgctaagggcgatgttgtcctccaaccatatcaagcataccaccaacaacacccgtcttctttgctttctctttttcgggtttttacactttcgcctaaaaacgcgcctggaactctagtgatcacgtcttgtgagttcacaattcttaagaccttaacatttttctcgttaattctgttagcaaaactgcggtttcccacccgagggcctccgaaagagaagaccgcaacaggtggtactccctctgcgcacgagctaagctcatcgcccactagtaaggccagagcagctcctaggctgtggccagtgacagttatgcttagctcttcacctttatataagtccatgagtcttttgacttcttcaacaactgactcagccaaactcggcacgtgagcaccacgtgttttgaacaaactcataaacccgcactcaacttttgcttggtgttcttgttcaccttctcgtctggcatttggatcagctgagctctcacattttcggcccactcgagcacgtggcggttccacgaagcgagattacaatatcccttcttcccatccgttggatttccctcttgtcatcgcaaaccgcgcgtaacccgcccagctcgatctcgtcgggtcatccaacc

SEQ ID NO: 402006 - DNA, 562 bp, Cannabis indica
ctccttatgatcgacctcttcttcaccagatggctccttgtccttcttttgatcttttggttcagaagaaccaaactcattcacaaacggagatctacaatgcactccaggttttgcttgcctcttgacagcaaccctagattgtaagggtactacatccaatacttcaacatcatcaacaggaggggatgcagattcaggaattggaaaataactcccatcgatcattttttatcccatcaggggacgcatatgcccgagtgaggttgtcaaccaaatccaaaatgaattggtcgacatcaacacgatcataagtaaacacaaagccctcatcattcccttcaacaaaaccaaaatgaacctgaaaaaaaaaacaatgaataagaaaaacataaaaagctaaaaataaccagttataataatgacatcactaataacaacgaataaacaaaccaccttatcttcccgtacaatcgacaattgcagtccaccagagtcatcatcataatcaggaacattagatttcaaaaatacctaaaaaatagaaaaacatagccataac

SEQ ID NO: 402007 - DNA, 855 bp, Cannabis indica
agacttcgaatttcactcttgattacatagacattctatattttctaatataaatacactataatttatcaattatgttgacctgaacaatcaatgatcatctatagattggcaacatcgagtgggaaaccccttcatgcattttatcatttaaacaattagcttcttgtaaatgatatttcagtaaactaatataattactgaaatgagtactccaccatttaactcgtttaccaagctcaaaataaaccatcattttacttattttaaataatcatggaaactataaatgtttatatctatgattaacactcccaccaaattaaactatcgaactcccaatatgtaagtatgacctagaccgagaagtaaattggtaacgaataaatcaaagaactcatgtaacacaattagctcaaagcttaaccatctcaaaattgatatcaaatcgatctaatttcaactaagtgatattgacttagaaaagatatataacagtaagtttatgatatattttccactgtcaatatcagtctagtctgatgtaaactctatacatccaatacaagtttagtttgctaatgccttggaaaaaatatttcacttagtgtaagtaaactatatcgttggttatcacgtcactataaatcaagtgcactgacaaatcttgggacttaaatagcttgaagcacataatcacaattattttctactgtagtgataatactataattgtgaatatttatatgattagaatttagcagaagttatatattaaataattaatcatgaaataaacatgtgaagaaagcaatagacgatagtaaaaaatgatctctgatcttttattgataa

SEQ ID NO: 402008 - DNA, 501 bp, Cannabis indica
aaaaaaaaaaaaaactcaaatcattttatctatattgaaaatatatattattttaatttcaattaataaatatatcaaatgaggataatggtatattgcataaataaacaaataagtttatttaacaactaaagatttccaattaaatatttaataataataaataaaaaattttataaaaaaactgcttataaataaaagaaatgcgtgaaaaataaaatatttataaataaaaaaattgtttaagaaaaaaactctatcgataaagaaaattgttttataaataaagaaaatagtgtttaaaaaaaacctctttgtaaatacacaaaaatatttataaataacaaattataattttttttgtgacgattaaacaataatgtttattattatcaaataaacatatatctcaattttttttttttgacaaagtgattagaatcacttatgaatttacgacgtccacgtctgccaccggcgctggaacctcctcgaactagg

SEQ ID NO: 402009 - DNA, 820 bp, Cannabis indica
tgttatacccaaaatttggcttccgtttaaatggaggaaacatgttaatataaaggaaatatggatcgatgaaattcctttttatggaataactcattaattgcgtaagtatcagagtatatttgtaacttactgactgtaaggtcttatgcgaggaattaatatacaaaccgttgcttagtatattagcgaaaaaccatatgtcgctaagtgcgaatagcgaggcatcaagtacactatatctaggaagacaaaagtgacacatatcaactgccgaagcacttaatgtataatgaataaactaagtgcaacagtggggttggctcgagacctagtaagcgaggtgcctatctcgctatgggaaggcttcctgtaatttcacccttgtaacttcaaaaattttctcggtgaggcttacagtcctgacgagtcagaagccaacattcaaatgagcctcgaagaactctttgtaaataagaatcgcgatcgtcacaagacgtgtatcgttaacctcggaagaaaaaatggccccagctcgctattgtgatcattggaaccaagcttccgttaggacatccacagatacaacaattaaagacgtgtttaaatacacgatagttttgacctagtaaaagcgaaaaaatcacagctatataattttcagataataaccgcatttacactacttgatatgtaatcaaccccatgattttaggggatgattgttgtaaagagattacactcaacttagtaattaacttcccactatgattaacttgttaacagatcctatgatctgattttaatcatagtccaattg

SEQ ID NO: 402010 - DNA, 505 bp, Cannabis indica
ttattacaccaagttgtaattaacgttgcgatcaaaatattatagataacaaacgcgagtacccatgtactgcgaaaatactgtaaatagatatccccacgaggatataaagtcgttcaaaataaacataaatataaatttgtctaagtacaaggtgcaagtacccttgtaccgcataaacaaaaaaaaagagagatagagtttacacaagcaaatatcaaaggaaaagtcaagcattcggagcagtaggagcagatccatccgcgactttgctgacggcttcattcccgacttcttcagcatccgcagcctcaacctcctcgacaagattccctccaccacctcgagtttgtgtgggcgacatggcgcgaaaagcctcagccatttcagcggcttctgctccaaggattgaaaagtcaaaatctgggattttggagagagtggtgtatatgtagtccgagactgcctggtcgtactgcttcttcccattctccttctcggcctc

SEQ ID NO: 402011 - DNA, 563 bp, Cannabis indica
tgtcacggggctttgatgggttgagtttctaaaagaatttgatttttcatgcttacatattcttgaaatttttcccttaaactcataatatttgatatttgtgggatatgacacattttataatattcctaaaatacccccatttacattacccactctcttttcttctctctttcactacactgtagaccatcgggccccatcgggcccactatcgggccaaccatcgggcccactatcgggcccaccatcgggcccatcgtgcccatcggacccatcgggccatattaaattctatttttttacacatacaatcgggctccatcgggcccaccatcgggccaaccatcgagcccatcaaacccatcgagccatacacatgcatcgggcccaccatcgggcccactatcgggcctttgtcttcctcaattttttgtgttaccatcggaccggcatcgggcctgcatcgggcctgacgaaatcaaaccccaaatccagattttgcccaaatcacatccgaaaaaaaaaaaaaaaaagaagggttggtgagggtgagatggtga

SEQ ID NO: 402012 - DNA, 971 bp, Cannabis indica
agaattcaattagaggcaagtacccatgacataggctcgcaacaaatcttttaatatctgaattgttctttctgattggccatctgtctgagagtgaaaagttgtgctaaacttcagctttgtacccatggctttctgaagactcacccaaaacttagatgtaaactttggatccctgtctgaaacaatggatttaggagctccatggagacgaactatctcctttacgtacagttcagcatactgatccactgaatatgtaacttttactggcagaaagtgagctgattttgtaaatccttctactatgacccatactgaatcatacattcccgtcgttctaggcaaaccggttacaaaattcatcgcaatgtcctcccacttccagtcaggaaaggctaaaggttgaataaccctgccggcctttgatgttcaactttgatttgctggtaggttaagcatttgaacacgtagtctaccacatctcttttcttcccataccaccagaagtagggttttaaatcctgatacattttcgttgttttcggatgcagtgaataagatgtgctgtgatcttcatcaaggctttctttcttaagctcatcaatactaggaacacacactcaagctttatacaataacattttattattcgagattgaaaagtctttaggccgaccagccatcacctcatctcgaatcttgactagctcgggatcttctaattgtgcctttctgattctttctagcaagtcaaactggagtgtcaagttgtgcaattttccaactacaaactcaatccctgtactaaccatctcagaagctagttgaggggctatcaaaactgtggtgaaaacctgccccagacctcttctacttagtgcatcagccataacattggcttttccggggtgatacaaaatctcacagtcgtagtctttaaccaattctagccaccttctctgcctcat

SEQ ID NO: 402013 - DNA, 699 bp, Cannabis indica
gctgtaggacttaaactaggttttgggtgtgtttgtgttaggtttttgagcatgttgggaatggttttaagtggtctccatggctgcctgaattagttttggtttgttgaaaccaaagttgagtttttcttcactttgaagtgtgattttgagcaaattgatacattgcaatgaattggttgttgggttatgtcatgcttactatattatactgtttcggaaggtttgagcaggtttgttagaggttggattggtttttggggtcaaaaaccaaaaatcaccatggctgccaggaaaaaacggcagaccgtttttcaggcacccagaaaaacgttcgaccctttttgccagtaaagtgggatttagggtttttctcctcaagtccgatctgattcagggtgtcttttggagtggaattcagggtgttttagagatggttaagctagtttgatccgtgggaaaatagggtgtgttcgattgtgagaattagagtcaattatcagaaatttgattaaggtttttattcagttttggttgttgtgacatagcaccgggatcgtctaacttgttttccactcaagtcggcccgtacgcttgagttcagaactaaggtaagaaaattggtaagcaccgtatgtggttaaatattaatggttaaatggttatggccttgattattatcaagactttgattagata

SEQ ID NO: 402014 - DNA, 724 bp, Cannabis indica
aacaacaattatgggttcgaccaaggaagtaaccgacagagcagtgggttctatcagcagagaaatcagccccaacaaaaccaacaacagctgcaacaacaaagtcctagtggaggctccaatatccaagctgatttattgctccaattcatgatggagactagagcctctattaaaactctagaaactcagatggaacaattggctactcaagtggcaaaacaagctcaaggaaattcacctagcactagtgaggcaaaaggaaaagagcaatgtaaagcaatttccttgaggagtggaaagagttatgagggacctagtggcaagcaaccagttgaagatggggttcaggatcaacaggcacagacacaggcaccaaaggaaaagaacactactgagggtcttgcaccaaaagaagcttcacttccgatcagcatagatcaccatattaaaattccttaccctcaaagactccgcaagaacaacctcggcaagtagttttcaaaatttcttgaaatatttaggaagttgcacattaacattccatttgcgaaggccttggagcaaatgccaacttacctgaagttcatgaaagaaattttggctaagaaaaggaagttggaagaattctagacagtggcactcattgacgaatgcagtgcaattttgcaaaagaaactaccgcccaagcttaaagatccgggtagtttcaatattccatgct

SEQ ID NO: 402015 - DNA, 733 bp, Cannabis indica
tatagtatattactgaaaattttccatgaatattgtaatatatattatcaaggtacgacgtatatataatatatgtacatgcgcgtgcgaatgtgggtcatgttatttaagcatgctttttcctaatttgatttgttcttggctacaaatgtaagcatgctaagtacacagtttgtctatagattctttgattaggacattattataggtccaataattagaacaatctttagtagaagattatactaaaaacacacatgccgaaagacataaaatggatcccacatctatcatctattcaccacatatctatttaataagtgttaactgtacctatcaaatcttcttttctttttttgtttttttagattttcaagtcacgaatgaataatagtgttttctcattttctaatttatcaaattcattcattttgagatgcttattgtagattcaaagttcaataattacattagaataaaggaggacagaaatgcaaaatggccttaaatttaaaaataaagttaacaaatgtctctttttataaacatttagcaaaatagccatttagataaaaatttaatgataaaattacaattataaccttagataattaatcctagccttttaccctcttctcattctctcgtgttcatctagccacctataattagtaaatgtctcttgtttttttttttttttttgtaattaaataagctataaattatcaggttg

SEQ ID NO: 402016 - DNA, 581 bp, Cannabis indica
tattgtcagtggatagtggcggcttaggatttaaagtgagggaatatttttttttggtatgtcagagggagttaaagtaaacttaaaagaaaaaaaatagttttagtggaattaggatccttgttctcttccaattagtttaactattatacaaagttaatattatgtttatttattattttttttcttgtatttttttttttctagaaggcaacttccccaccggtccgtactgcatatatatatatatatgagagagtcatctttctcctacgaatcaaattaaaaaaaatggaaaaaaataaactaaatagtgatgttaaccaacttcacatagcagtattcccatggctagcacaaggccatttactcccatttttccaagtctccatgttcttagttcaaaagggtcaccgtgtttccttcatcaccaccccaaaaaaccatactaggctcccaaaaaatctaattccctcaaatctatcccatctcataacattcgttaacctgcctttgccaaccgtggacggcttaccggatggagctgagtcaactgccgacttacccattcacaaagtccc

SEQ ID NO: 402017 - DNA, 665 bp, Cannabis indica
gtagtataacaagagaaaaaagacttttttcacatgggccaatgggccgagtagtataacaagagaaaaaagagaagttgaagaactttttttttaatgtatattaactaaatttagatccaaataaaatttaatttaaatatatatgtttttatgagtattgtacttaaattatcttcacacacttatatatttaatttgtaagtatacacgtccgaaatttatggattttgaaacaggtcaaagaccccaacattaaaaattggcacacattagccaaaagatcccaaatagatgttaaagagaagacaacagaagtatctgtttggactagtagcactttgactcacagcggatcacaaacggctttttagaccggtagtactttgggctcacaacgaatcacaagtggctccaataccatattagaatttggggataagataaataaagttttatctcaaaaccaattgacaattggaggaatagcatattcatcttatatatgacaatttttatcattttaaatataataaatttgtgtttaaatataatttcaaattatcttcaaatataatttcaaaaaatagacatatattagaaaacaaaaaatcagttactattatgcgctcaaaaatattaagaaattgattggttgaaagaaa

SEQ ID NO: 402018 - DNA, 540 bp, Cannabis indica
aataataaataaataatactatttgaagtgatttaaaattgacatgtgagcaccttatatctttccttcctatataaatatatattgatataggtggaaagaatcactagttaattaaagagtataattattatttattatacatagagacgattacaattataatgtgtaactgccgttaggtgttgactataagattttagcagctttcttgaattcgtgtagctgttttacatttccagtatgtatatatagttgacttttgtgaaatcacaaaaatcggacatcattttatacccaaattaattattaatatccattttctccttcctctaaatatctttgagaaataaatgtatctattctttttcatttctaaattaattaattgcaaatatactctaattcaaatttttggccacttatctctatttaaaaaattaagagaaaaactaaaaaataagtcaaaatggtaattgacccagggccggcccaagcattttggaggccttgcgcgaaattttaaaattgagcccttta

SEQ ID NO: 402019 - DNA, 782 bp, Cannabis indica
tttcccgtcttttgacaagaaacggctctcccaattaagatttttctttttcattcttttcttagtaaaaaacccaggatagctttcttattacgacccaagatgcatggtaagccgaggtaaaagctattgtccccagcctccaacattcccataagaccacacagcctagtacgtgtatcaaccaagcaattcttgctgaaaaagattgaggacttggagtaattcacttgttggcccgatgcttgttcataaatatggagaagatgcatcacatgtgaagcttcaccctcattagctttgcaatacacatagctatcatcagcaaatagcatgtgagagactctaggcgcactccgagccactttacacccagtcaaccatctccgttgctcgtacaaagataagagagaagagaggccttcagcacaaaccaagaacaaatacggagatataggatccccttggcggattccacaaccaggaacaatcggacctagcttccttcctccataagtaacatggtaagacaccgtagacacacagaacataatcagagccacaaatctaggactaaatcccatccgaataagcacagcttcaagaaacgcccaaccaactcgatcgtaggccttgctcatatcaagcttgattgccatatacccatctttacccgttcgcttccgtttcatatagtgcataacctcataagaaaccataatattatcagaaattaaccgtcctggcaagaatgcactctgattggaagatatgacattcgg

SEQ ID NO: 402020 - DNA, 764 bp, Cannabis indica
ataacttccaagtgtccgcgtcttgctgaaaaagtggattctcttctggagttattcttctattatgaaatcagccaaagctttgtccttaatggatgttcgagggtgataatttatgtcaaactgccccagttcaattgacccttttatcaatctttctagtaagcgtctggttttgatcaaacttgtctcaatggttgatcagttaacactttaattgggtgtgcctggaagtaaggccataacttgcgagatgcatggattaggcataaggcaagtatttcaagagggggatacctcgattctgcctccagtaaccttttactgacatagtaaacaggttgctggtgctttccttcttctcacactatttttgcactaatagtgtcttctgagaaagctaaatagaggagtaatgtttctccaattaatagtttttccaaaactggaggtgtcgccaaatgccttttaatgcttggaaaggcctccttgcattcctctgtacattcaaattacttgttgcctcgcaatacattgaaaaatggcaaacacttatcagttgaatttgaaatgaatctgttaattgcatccattcttcctgttagggctcggacttccttaggctaggttggtgatggcatatctatcaaagccttgattttctcatgatgtgcttcaatgcccctcgcgttgactatgaatcactaaaactttcctgaggaaactccaaaggaacacttttttaggttaagcttcatattgta

SEQ ID NO: 402021 - DNA, 980 bp, Cannabis indica
cgggtccaggtctgggtgtaggtcagggtctcgttccaaatctaggttccgagtttcgatcctggtctggatccgagttttggtccaggtctcagtcttggtctgggtacacgatgtgtcagggcccaacttcaggtcacggtttgggtctggggatatgtccgagttcggttctagggtgggtccacgtcctactcacggtcctagtcttgtttgagggtctcggtgttgcggttcttgttcaggttctagttttgggtcaggggtctgatttgggtcctggtttgagtcccaaatctagtttgggaccgagattggggttcggttctaggtctcggccccaattgtgtgtcccgattctgcttccatgtttgggtctgagttcgggtccaggttcggcatccagtctatgtctgggttgggatccaggtccgggttttggttcgggtctaggtctgggttggagttcgggtcctagtctggttacggttccaagtctaggtccaggtctgattacgtttccatgtccaggtccacgtccaagtcctggtttctaaccttgttccgggtcccggtctacttccagtttcagttctaatttcggctcacaaggtacgtgttcgggtcttggttgcgatttgggactgggttcaagtcagggtttagtttcgggtcctggtctaggttcgagttcggggctgggccccagatccaaacaccgactacgggttctgtccaagccctaagtccagatctggatccggatctcgggtctcggtctggttccatttcgtatgtcaagtcacgagttgggtcctagaattaagtccgggtttgggttcgggtcttgggtcccggtcctagttccgtttcccaagtgcgtatctcgattctgggtccaggtcccgatttgggttccattctatgttctggtttgggtcctagtcgatgttcaggcttaagtctcggtcgggtttggg

SEQ ID NO: 402022 - DNA, 670 bp, Cannabis indica
tgatgatggactttcgagtcttgatcagacaatcgtcttgcaggctactccgccttgtttttaaacttcttgactatcatgctttatgcttctgatgtctttttcctctacccatgttgtttttgttccgtgtagacatgtctcagaagatgctcgatgctctgaagaagagagttggaggaagctcaactcatctcctccggccaagaaatctaggggcggtgaggcgaccccttccaaggaaaaggcaccagtcggggaggttattgacctttccaaggagctaactactacgaacccttctactccaaaagttgctaagtacaaagattctcgaggaggaagctcggataggcctcagcaatcaaagggtggatccgagctggcgaagagcggatctgagcaaatgcaggttcctactccaccttttccagtgcatcccgaggcgaagaaaggcaaggacatgctttcccattacatgaaccagttgtttcttaaggtaagtgagcagctggccggcactgactacgaatcttctcttgagatgctgataggaggagtcttgagggaattcacaagggtaagtctttcttgacagtttcctttaatcctttttacttggctcagattctaaagttttttctctttgtaggctggtctaaagttggct

SEQ ID NO: 402023 - DNA, 988 bp, Cannabis indica
caatgaaaaaagatagcatagactacatccaaaaatgtgatcgtgccaaaggttcgcgaacataccgagaggtcctcccaatgagattaccctgatgactagtccctggcccttcgcgatctgggggatagatcttattgggtccctgccaacaggaaagggaagagtaaagtatgcaatagtagcagtagactacttcaccaaatggacggaggctgagccaatgaagaccataactgctaaaagagcactagagtttgttattaaaaacatagtgtgtcgatatggcttgcctcacaaaatagtctctgacaatggaaatgaatttgattgggaagagttcacttacttctacaaccaacacggagtcgttaaaagcttctccgcagtggctagaccacaaacaaacggacaagcagaagccgtcaaaaaaatcctaaatgtcactttaaataaaaagctgctggcctgcagaaacaactggcctcaagaattgcaaagagttttatgggcctaccggatgacaccaagaacaacgaccggccactcgccattctcaatggcgtacggttgtgaagcaatggtcccgctagaaacgttattcccatcccacaggagaacgacttatgatccagctacaaaccaggctttattacaggaagcgctggatcaggttgaagagctccgggacgagtctccaatacgaatgacagcttatcaaaagaaggtgactagatattttaactctaaagttaaaaacagaaaattcactattggggatatggtcttaagaagagtcttcccagctacccatgaacccagagtgggggtactccttgcagatccatttgctcctcgaaatacttgaggttggacaaaggatattcctttccagtatacatcttccaggttggcatcttaaacttgtgtggcaactccaagatattgatctctggggagaaaggggttccacgtgctcgatccaact

SEQ ID NO: 402024 - DNA, 1168 bp, Cannabis indica
attataatcacttgaagcagagaaaagtaataatatatggagttggtttcttttacggttaccttcttagttgttttgagtctcttttcctccgtatagaacaacttttgttgtggttgataccattagaaaatctgatattatgagagataataacaacacagctttattggtatccaaagaaggaatgtttggattgggattctttactccatcagctagttcatcaaagaatcgttacctgggaatttggtacaacaacattactggtaaccaaactgttgtttgggttgcaaaccgatgtgaaccgatcaaggattcatctggctcgttgagtataaacgacaaaggagatcttgtgcttttttctggacagagtaataacagagtgcttgtttggtctacaaactcgtcgaaacaagctcaggaaccactagttcagctcttggataatggtaacttggttttgagagatgagaaagatgcaaacacaacaaattttttatgggaaagctttgattatcctactgatacaatgttaccaggaatgaaattgggatgggacttgaggagacgtttaaataggcgattatcgtcgtggaagagctctgatgatccttgtcatggagatttcacttataggattgagcttgatgaaccaaaccatacattgttaaactttctacagattatgagctaacaaaaatacattaaatgctaatctttattactcataatcatcaaccaagatcaatatttatttagagcatcaaattcataaatacacatacctcccaatccatccacatgagtcattttgcttgaatgcctccaacaagaatcaccaacaagttttcaagattgaacccaaacccttagagccacaatgtggagcaatcccctattttcttattaccatacaccttaaaaccactctaccatcaatgacatatatatacatactctcatacccttataaccctaaggggttactcactaatagggcttaagtggtccttttatggtatactataatttaatgggccaattataatataaagggtgctctcatgtgcctctaatacataattaatttatcaaccatcccattatggttatgaacaaatattgggcacatagttaatgattgtgtttatggtattaagct

SEQ ID NO: 402025 - DNA, 802 bp, Cannabis indica
aggaaaatccatgaatatactcaggtaagcttctcgccaatgataacacaattttcattaagtactctcatttggttttgagatagaaacttttaatgattgtgtacacatcatgaaatcggtaggagtaagaatataatcctagtattataaattggtgaaaaattacttgccattaatgatatacccattttgtattaaggattcaaattatgttgagattgctcttgagatattcttgaattataataaaagagatatatcaataaagtattcaagactgttggcatgaaagatactataccacgtgatagacttgtagctaaagaaaataagttgtctaagttattgccctaaaagcaaccttacaatttaagaaatataggagattttttatttatataatctattatatgctcaagcatgtatacaaatttttatttaacatacatatcaagaatgttggataaatatttaagtaatcttataaataacttttggtatgcagtcaaatgagttataaggaatttatggagaacaaaagactacatgttcactaatcaaaacttaaaaaattttggagatcattaagatttttgattccgatcttatgattttagtagtgagatttttgtcacatatggctgcaaaattagaaatggtattgaaaactattaacaatatatgttgtgacaataaatcgatcaagttgcattttagtaacaacataagctctacaaggtcaaagacacattgactttgaactaattgttattaaaagagttttttgcggtaaaatctt

SEQ ID NO: 402026 - DNA, 565 bp, Cannabis indica
aatagtattcacattaaatgaagcgacacgtttcatcaggattttggcttttgccggcaaaagctgtgagattttttggcggtcaatttctcgcccaattgaaacgtgttcgaaaaattacgtggaaacttttttcggcgcactaatatgctacggaaaaagtattaaacctaatgaaacgttgtgtttcattaaatattttggggttcgacttttgtcggcgaccctaagtgcactgaaaaaattccaagctaaataaaacttcagcctgaacctcctgcccccatttctcatccattttttctttttttttctaaaaaataattagaaaaaaatcttcgccgaaatccgacgacgacatgctaccgcacctctggaaaccactgccctgagcctccgattatactcccgcatttcatcatatcagtcaaggtaatctatattttatttattttaagtcttatttgtgtaaaaatttgggttaaattttgtatatataactttaggtttaattttatgtatagtaattttagtttaattttgtgtatagttagaatatatatat

SEQ ID NO: 402027 - DNA, 559 bp, Cannabis indica
ttccaacacagagaagagtcacaaggagcaatgaggcttgtggtcgtttcaacacaccaaagcacagttttattgagtggttggctgtgcagaatcgcctccgaaccaaggatagattgcaacagtttcagatgtcaattgacccgagttgcagcttgtgcacattgctgctacccgagacacatgatcacctttttttcaggtgtccattctcagcaggcagtctaaaacatgtcaaagagtggctgtcgtggggcgctcgctccagcgacttacagcagcttctcaagtggatacacaaggcaaaaatcagcaagtttagaaagaaggttcttgcagcagctgctgcccacttagtttattccatttggcattcccgagattggtttcgttcattgtaaaaagatagagattgatcaagaggtctttaacataaagatgctcttttctttataaatgtttgtacaaaagtattgtggatcaataataaacttgctgatttatcaaaaaaaaaaaaatacaactaaagaatcatcaaaaatgattattattgatacaa

SEQ ID NO: 402028 - DNA, 623 bp, Cannabis indica
aaaaaagagagttcttaccaagagtgtcacccactgaaaatgtcttatcagcagcccaagtaacatagtcaccgccgttggtccagccggagctgccaccaacaacgtaatttgctgcataggcagccggagcggccatcaagagaactaggagagctgctgccatggctgccatattttttgtgtttgaaagaaatagtaatagaaagaaagaaaagagagaaaataatattgatgttgatgaataagagtattggtttctaagcttgtaatgtgttatatagacagctcaaaaagcttataataataaaaataatatcaattatgtatgtgtgtaaggaagatgtcaattcaaatcatgcttcaataaaatatagatatggaaaagttagtcagtcacctaccaaaaccccttagttaggctttatccttttatttattgtttttattccaagtttgcatttttgtactactccgacggctatattttatatattattattgtaagtaattttttttcatgattgattatagggaaattatttggggtaagttgaaaaatgcctcttttattaatcaattaatcaaatttgcctctaattttatatttatttgaaacatac

SEQ ID NO: 402029 - DNA, 599 bp, Cannabis indica
ggctattttgatatatgttgatggtatcattgttgctagtaacaatgcatccaacatagccatatttaccgaatccttggacaagaaatttaaactcaagaaccttggcattcttcggttcttccttggtcttgaaattggtagaactagtcaaggcatatcaatctcccaaagaccctttacactacaattactaaatgacacgggttacttgggtgctaaacctgtttccacaccgatggaaacaaacctaaagctaagcaaagacaaaggtgagttgctcaaagatcccactacttgccgcagcctcattggcaaattaatatatctcaccatcactaggcctgatatttcctatgcggttaaccacttaagtcaatttctctcgtctccacgagtacctcatctccatgccacacaacgcatactacaatgtctcagaaaagacccccggtcaaggcctttttttttcctgcaagaaccagtccaaaactcacagcttatgctgaaaccaacctctcgtcagccaatgttcagctgtctttttttgctgatgctgattggggcagctgccaagacacaagacgatctgtctctgg

SEQ ID NO: 402030 - DNA, 691 bp, Cannabis indica
ttttttttttttagtattaatggtcttcttttaaggggagtttatttttgtgatattactaactttgttttgcaagtacttaaaaattaaaaaaagttattttgattatctaaaatgtcaaagaaaaagagattgttaggtcattattttttagaaattttagctgtcaaaatttatttaattattatatttaatgtaaattaaatattattttcttgtgtgtttctcgttttatagtgatgtcgcctaattaattacactgcgatcgcggtagtaaacgggctacgccgtatccacaggaaggtaaattaccactaaagattagtttagtagaatatgatagaaatgtcaatgaattaaaaataataaaatggtgagtgaaagggaatgattagataaagatcttggtaaggtagacatgtagttatgcgaatcctattctaatactgatattaattcagaacgcagttgtaattctacaccattaattacaaccggaagatatatatgttatgagcacaaattaaataatcttgcataaattaaatctcacctctaacttaacaacatatcatattatatatcataaatcgataaaataccactattggcagaatgcagtaaacgatatataatataataaaacaccaaaataattaatagcctaatttacatacgaaaagcatgactg

SEQ ID NO: 402031 - DNA, 719 bp, Cannabis indica
atctctcttatttgtgtccttgctatttttctttattgcttttctggagttgtctttttcttcgagataacgcttttaaggcatagagcgattcttgtttccaccctcggcgttttctcctttctcttttttctctttttttttttatttttctttcctcttttgtcgttgtctttgggatttttgcacttgatgcttgttaaggaaagtccttggggtttccttttttagcaaacatccggagggggcctctctctagcggttaggggacccccattcccttctttaacattaggatttggtttggggcctaactgctgatttttatttttttagaaaaaatgtctggccccacaatcttctgaaaagggggaggccaccttggccactctagaggaagttatgaagggccttgtcgcccaggagaactatacttctcgcgccaacggatgggaagcggatgagcttcgttccaccttggtttgtgctcatcagctcgagaagattgtgactgcggcaggtatcaagccatctgcgtccggggtctttcaccacttgcctcgaaacgaagagacgcccaaccacaactatggggggttcagagcttggagccaaacccaccttatgtccggggcaatgctccctcttcaagactactttgttaattttcttatttttgcggcctcgcgccttaccaattgatttcgcaagcttaccgc

SEQ ID NO: 402032 - DNA, 539 bp, Cannabis indica
gatactgcaaggtagatgtaaagcgtctgtccttctttaggctttgccattagcggtggtgatgaaagatacgccttgagaaccggcttagtgcgactatccttccatttaggcgttttatgtctttgatgttcttcggtggttgaatattctgaatcgatcttatttgttcacggtttgcttctattcctcgcttagttaccatgtagccttaagaattttcctgaagatacagcaaaggaacattttgcagggtttaatttcatattatatttttcaagtacctccaaagcttgttgcagatgatcaagctggtcttgggcaaccaaggatttgactagaatatcatctatgtagacctccattgtattacccaacatatctacgaaaatctggttgactatcctttggtacgtcgctcctgcattcttgagcgcaaagggcatgagtttgtaacaaaaggttcctcgttcggtgatgaatgttgtcttctcctggtcatctgggtgcatgagtatctggttgtatcctgagaaggc

SEQ ID NO: 402033 - DNA, 1385 bp, Cannabis indica
tgtgagtcgatatgttcacttcatcaggtagcattgcttccgaacaaaatactagcgagaaaggagtgtgtctcgttatcattttcttagtagttctgtgagcccagagtacttgaggtaactcgtcgacccacttgcctttggaagcatctaccttattcttgatagtatcctttaaggttttattaacagcctccacttgtccattcacctgaggcctagatactgacgagaagctcttgattatttgttcctctcgcagaactcagtgaacaagtcgccatcaaattgggtttcattatcggattctatcttcatgggaattccaaacctacaaacaatgttcttgaccacaaagtcgaggacttttttgctggttatggaaacaaggggctcggcctcagtccatttagtgaagaagtcaacttctactaccgcgtacttggctcctcctcgccccgtgggtagtgccccaattaggtcaatcccccatatgcaaatgggtagggcgaggtcatcatccttagttatgttggtggcacgcgaggtgtatgtgaaaacctctaacacttatcacatttcttgacaaactcatgggtgtccttattgatcgttggccagtaatatccgtgtctagtgatcttttcagctagactttgccaacctgcatgatccccacaaaagccttcatgaatttctctaatgattttgtttgcttctgtagggagaacaccctcttctatatagtttaccttcaattatggtgtagcgaggcactgaatacaatagttttcgtacctcattttcgtcatttggaagttgtccgtcgattaaataattgataatcgaagtcatccatgtaagagagttgtctatcatctctacgtctttcgtttcacatatacctggctcgcttagcacctccaccggaactaagttcaatttatccaagtcgttttgcgaggccagttttcccaaggcagtgttggagttttgttctcttagaattcgctcgattttaaagtaatcgaatctttccaaattctttcgaaccttctctaaatactttgccattttcaagcctttggcctagtattccccgaggacctagttcacaatcagctgtgaatcactatggcagatgaggtttttgactttcaacgcttcgactatttttaagccagcaatcaaggcttcatattcaacctcattgttggatgcgtcaaattgaaatctcaaagcataatgaaacttgaagccttctggtacaattaatattacccctacactcgagccttgctcgttcgatgctccatctacatataacttctaagtgtctgcatctcggtgaacagtcagaacatcttctgaagttataccttcta

SEQ ID NO: 402034 - DNA, 715 bp, Cannabis indica
agagagagagagagaactataggtgtgtagcttaggattcgtggtcctttttcatttgatctaatacattttatatattgtagggcttacaaaatatcctaattcaaataggtaaagatatccctttaaaatagggaaaataacatcttttttatcttaaatttgaattacaaaaaaggataattaaatccttagaatctaggataatacctttgagggaatatgtaacgccctaactattaggcacgttacccatggtgattaagaaaccctaatcccctacatgagattactagaaagataaacacgagtaatttaaactttaatcgaaaacagattgaaaataaaacttgtaataaccataactttacaatcaaaagttacatgtttcgggatcccaaaaaaatattttacaaaatattataagcctttttcactgccgacctaggcggcaaaatcagagttttaaaaatacatcactagtagaccccaacccgcttggtctagtgtggcccgaacatgtacatacatcacccagctctctcactcatggctaatcagagacagatttactctttcctgcacagtagagcacccatgagccaagctcaggaagattaatgcgattttacatttgtctgtatgacacagacccgcgtgttacactcacacgcctaattatgtctatgtggcatagacctacgtgttacgctca

SEQ ID NO: 402035 - DNA, 515 bp, Cannabis indica
ggaaccatttgtctttgttggtttagttcaaggttcaatttcaacgttaaaagctagggatttattacgcagtgggtgtgtaggattcctagcggtggtagttgattccggtaaacctgtgttacttggacctgaagaggttaaaatggttaaggaattcctggacgtatttcctgaggaattaccagggttgccacctcaatgtgagatagattttattattgacttaatacctggggcagaacctgtttcaaaagcaccttaccgaatggcacctgcagaattaaaagaactgaagatacaactccaagggatgttggatctagggttcacctggcctagtgtgtcaccttcgggagctccggttctattcgtaaagaagaaggatgggactcttcagatgtgcatcgactatcgggagctgaataagttaaccattaaaaataaataccctttgcctagaattgacgatttgttcgatcaacttcagggcaagacagtattttctaagattg

SEQ ID NO: 402036 - DNA, 816 bp, Cannabis indica
ttttttttttttggttaattaactaattcgatcagataaatatttaaatttaaaaagtagttaaagatattttaaagttattgagatattctctcatattctctcaagtagttgagagatttcttcataaatatcaataaccaaattcagttatagatatttatttaaataattaaatataatttaattaaaagagttttaactactataaatacaagtttgatttgaaaaatcaaaaatactttttaacatagctatttttgaaataggcagagaaaaagaaaatagttttctctcttaattgttcttgctcatgtgttgagaactcaacaagaacaacactatacactttatcctactagaccacactattccttgtgtgcgttggatcaattcagaagatactgctgtgagttcaattgcatcatcctaatcatctggattaagggatacaacatacgagaagtttcgaggtatcctgatagtcttcaacatattctaaacttattattttatgctttgatttaatgtacacacatccggagatcctttgagctatggtgcaatgttaatcggcaatacaaaatgtatctaatttagtaccataaaaccaatagacacgactcgattaatacgaatttgacacgtttgacacgattttttcaaaataaaataaaataaataattattaataataaaataactatataaaaatgtatatttagtgattcaatgttgagttaaaatttaaaattttattttatttaaaaataaattaaaaattaaaaaatatattttttattatatatataaata

SEQ ID NO: 402037 - DNA, 714 bp, Cannabis indica
aagtttacacggcgaaaaatacgttcaaattgcacgcgtgactattttattttatacgtagtaaaaaaaaactttttgaacattattgtctatattataaattattcggaaatttctctaaaattttgtagttgaatcttaaatagctataacgtacatgaatatgaaaaaaattaggctaatttttttttcttgatgccgaaacaagtgaagagtgtatcagtacattccttttatgggtgtaggttattttgctgatttttttcaaaaaatctattgatgtagccacaaaatacgcatatagttactatatgagcagacctgactttgagcataggcgggctaggtctatgcttaggaccgaagaaattatactctataccagtgacggacccagaaattttactttgtgggggcttatttatcattaaaaaaattttatacttatattataatcattcttactaaatttatttaattttgtgggggcttttttattattttggcgtataattatcaaattaaaaaaattacattcaattttttaaaaagcaatatttttgttaatgggggctatagcccccacattgagatgagtgggtccgtcactgctctatactctttttatattgtcttcttttatttttaccttctttttttaaagtctatcatttttacctctttttttttaaaagattgtaccaattttacccc

SEQ ID NO: 402038 - DNA, 840 bp, Cannabis indica
gcgggatcccgccgctaatgcactctgtcagatgcattctccttataaagtaagcaataattatataaacaaacatggatagactcataacccaagcctaatttcttcaatctatttttcgcctcatagtacgttgctggaatattattttccttcagaaataaaaactttaacaactttaacaattcatcaaagatgttgttagggatttttcttctaacctttaaatgcaatagctttgctaaaaagttgaaagacaaattccaatcacaactgggatacaattcagcttcaatttcctcaaataagtcatcaaaatattggcttgtagtggttggttgttctactactccttgtacatcctctattgttgaaggaaagaaatcttttagaatagggatcattaattttatcatcaaatttattatcgccaaccgctacatcatcaacaacatcctctggctccgtgtgataggtccacttctcatatcctttcataaaacctcgatcaaatatgtgtgctctaaccctatctattttaaacctattatttaaacatctcacacaaggacagctaattcttccatcagaatcattatattctgatgccattgctaaaaaggcttgtaggccattctgaaattcatgacaaccacgatttttaattttgatccaagacttatcgattatcggcatctacaatgtaggcgacaaatgtagtattaaaagtttgaatgatttgtaaagtattaagaaagttttatgaaattttttattagcatgtatatccaacgctcttgtatattacaaataaagtgcagaacaattttgttctagact

SEQ ID NO: 402039 - DNA, 561 bp, Cannabis indica
atatcatatcgataggatatgtaaactacacataatttggcttgggagatattcaaatataataaccaccattaaaccaagatgtatgcagtacaacaattaagaccatgtatcagtcttattgtgtacttgtcactttgaaaaataatgtatgatatcatatcgataagatatgtatactatacataatttagcctgggagacattcaaatacaataacaaccattaaatcaagatacatgtagtacaacaattaagaccatatattagccttattgtgtacttgtcactttgaaaaacaatacacataaaaagtgactgcatattgttatgtatgcatagattaatctctttaggtgttttccactttaaatctttctaaaacataaaagctttcaaactttgatgagtcaaaactttgagagactatgtttaagatattctgagagagatcttaacaaaggagtaatgaatactcgatatctctcaaaattttatacttggtactgtagatcatgaaaaccttatggacaaacaacttacatgatcagcatgtgcttt

SEQ ID NO: 402040 - DNA, 728 bp, Cannabis indica
taaaatattcatttatcagaatcaataatattattttatttccttaattagaaatattctaatatcctttgcatatatttattagtgaaagataatagcatatataagatttatgtattatttagttaattggttttaaaatagaactatatgcatattaattcttataattctaacatagtattagagaaaaacccaaaaatctctaacgaatatagactaaaaatagaggaaaaaataatccaaaaataaaaaagctgataaaaaaatagagaaaaaaaaaaagagctacaaataatccaaaaaccaatttaaaaaataaagccaaaaaaaatcatttgtaatttgaggatatagtgagctaaaaagagtttcaaaacatccaaaattccatccaaaaaatagagttaaaagaattatttgtgattcgggaatagtaagtaaaaaaaaaacagttttgtgatcgagttatctaaattggataagcaaaaatagtcactatcgttaggatagatgttagagaatcttatattgttaatgtataaaaaaaaataatcgcatatatatatatttatataatccatgaactatttttttcgttgccaattaattttgagatgaaactcctctctagggctattcattcgatccaatccgcatttttttggtcaaacaacatccaatccgcactaagtgcggattttgttttttggatccaatccaatccg

SEQ ID NO: 402041 - DNA, 760 bp, Cannabis indica
catatagcaaatgggtaaggtgatgtcatcacccttagttccaggaatatccttccctaatgatcttttaatataggctcagccaacctgcatgatccccacaaaagccttcattaatttctctgatgatctcatttgcttctaaagggaagacacaccgaagtagaggcatcgaataatctcttctgtatagtctgccttcaattattgtgtatcgaggcactgagtacaagagtttttacgtgtaaagaccgcttagtttaaattggagaattagcagataattagggtttaattatgaaaaatatttattgatattaaaataattatttatggtgatttatttgaattcagaatgtattttatatgtcatatatagaaatttcatatttttgcatgttcgatgcccggcaacattcgaacgctgtatggctcagtagaatcacatcttagtattttagtatagcggagcagtttagttagacattgtgaatgcgggattggttgggaatttagaatttcctaaatacccttcagagccatttcataattcatagtgtgggaggggcaaaatggtcattttgccccataagcttttgtccttttgtggatttaattaaagaaatttaatcagtttttttttatattgctttggcttaaagtaatgtagtaaaaccaatgtttatttcctttattcagaaaataggaaaattagaaaagtttggaaaaattctctctctttcaagctctctctctctct

SEQ ID NO: 402042 - DNA, 1114 bp, Cannabis indica
ttttttttcgaatcaaatctgatccaatctgatttcagtatattaaaaaaaacttaaatcaagagtcagaccccgaacccgaacccagaacccttaggacccgaacccaaattggacttgcctgggatccaaaccccaactcgggatccgggaccgaaccctgacccaaacttaatccctaacccaaacccgagactgaacccgcacctgggttccaagacccagacccgaacccggacctagacccgaacacacgaactcaaacccaaacctgtgacccagacctggacccaagaccagattgggggctgtgacccgagacttggcctgggacccgaactcagattctgggacccgggacccagacccaggaccgaatctaggacgcagatacaaacaggattggaccctaacccagatccaaacccgagactggaccctgacccagatccaaacttgggaccagactcggacctggacccgatttcaggactccaacctgaactcaatacgggacccgaactcgagaccggactctgacccaaacctaggaccaaacccgagactcgaacccagtgttggaacttattttactacgatctaaatttactaatatgtatatttgattaacaccctaaatatgaattccctaaaacaataaaattaaacacataagagtttagaaaactttacattgatggtagtggaatattatgactctttctgctgagatctctaacccttgttcctttttgtcgcagagtaataacaagatctgagcctggatctccttctctccttcggttcggttaccatctttagcactatatatgattgagtacttgacttgctatgtgtgggcatgatactctatcactaagggtcgaaaatgatgaagaacaacaagaaggttcaaaatctttatgaaaggagtctctcatttactagttgacagagaatgaaaactaggttgagattggttgaagtaggttggatgagaatgagagcatcatgttccttttatagtatttcaactagcatttatgatttaattatatggattaaaaaagataaaatatagaaaaaatcaagtctagtggccggtcacttaatg

SEQ ID NO: 402043 - DNA, 538 bp, Cannabis indica
aaacctcaaaaaaattggaggagatgtgatccaaccactagctatcaaactgaaaaggcgtggggccccatttaggaaaattggggtccaggattattgggctgtgatcagagattaatctcaccatcatttcttgtctgacaaaaggaaacatgatcttccaattattactgaataagaatcgatccaatctgctccaaatgggtaccgatctgaagttcgaccaagtgaacctttggttgattatttttggatccataagcctcaactcttgaactaactcatccatacttccgtgtccattccattgttccatataaccaagttgttgcatcaatggttatggtgatctcgtagccgatcaatctagtactttcgcatattgtgatcaatcatccatgctttgttaaggtgagcatgaacaccttatgttgcgctcaacaactatcaacacctaaacgatttttatatccaaaaccagtgggtgttaaggataggtttcttccactagctagtagggccagcgaattcttagaga

SEQ ID NO: 402044 - DNA, 1054 bp, Cannabis indica
cacaacatttgactctaaatgttaggtgtttattacgcatgatgtgtatcactaaaaatatggagtgtcattaaatactaaaatccaaaatttacaattttataaaaatagaaaaaactatggcctatagtgacacgccacgagtgtgagcaaacgtgtttacccacacgttgtgcgcgtcactaaagccatattttagtgacgcgcacaacgtgtgggtaaacactagggatgcacaatttccccatggggatggggccccgcggggacctgcccctaatggggcggggattccccgtctaaatggggaacggggcagggacggggatcaaattttgtccccgaatattaaacggggcggggacccgtttaatttattaattattttttattaatattttatattttatatatgcctttgtattttttttagtatattaatattacttttacaattttgaagttatatttttgtataataattactattttgaatagtaaataatatgtaatagtctattttttatgtaatttaataattttatacaattaaatttttaaaataaacttatttttacaataggggattccctgccccgtccccgccccattaggggattccccgccccgtccccaatggggaataagcggggatggggcggggatggggattaaaatccttaacggggacggggacggggagagcactccccgctaattccccgccccgtgtgcatccctagtaaacacgtttgctcacacgcgtggcgtgtcaccatatatatacccttttattttaataaaaaaaataaaatatataattataaaattcataaaaataaatataaataaataattatatgaaaaaattaataattaataaaaaaagaaattagatgagtataaattcatctctttctaaccaaaccctaaaaattctaacctaactctctctcactctcttcttcgtccgatcagagaaccccaagccgccctctccaattgcgaacccctagccccctccagtgcgaaccagaacccccaagcccctcca

SEQ ID NO: 402045 - DNA, 1471 bp, Cannabis indica
cagacttgatgataaaataagaatgtgggtcaattatggagtagagctaactggagagcctttgttaaggagaagcaatgatgtaataaatctgttgaatgatatgacagattttgattacgactggcattaggatccatcacttcaggattggagtcaatgataccttccttattgcccaaattcaccccaaccatttgaggaagaggtgaatacactatcacttgcagaagaaattatcacttggcagacatggttagatcgttgtgtgataatttaagagtgtataattcggagtgttctaaggacaataactcaaataaagaaagttatgagagttatttgaataatatagaagcacaattagttgaatacatagaagaaattgagcctatagttaaagagcaagatcctattgatgttattaaatttgggtacattggatgcttgctcgacaagtgatgattttgatttggtgattgaagcagcaccaatcctcagtgatgaagttattaaagatcaaatcacagtcaaggttgtggattctcatgagaaaatttggaaaagggtgttattggaggttgaatcacttgtagttgttgatttgagtttgtcaacgctattatattatcaaccgccaatggatccttattttcctttaatgccaccttcaccatattacattctctacgagctgccgaaggtttctccccaaggatatcatccaaagtctagtattgtttgtgctactgttggaataaactcatgtcatgccaagcttgagggtatttacaatgacaactttcaagttgtcctgtatgatgcttattatgggaatcaaccacttgttgatgtggataatgaatcctgaggtgcttgaccatttttcggtcccaccacaatggtctccgtatcaaccaccacctccccccacaatcatactaatgtggcaccccaggtaagttttcttctcttatttttttgtgtcacattagggacaatatgatatttaagtttggggggtgaattgaactttttcttgcttagtatttttttttctttaatagttttatgttattttttttcttgattaagtaagctttagtgaattgaaacaccatctgtcgtttcttatttgatttaacttgttagtaccatgtgcttgatttgattattttttgtgcttaactttggctctttgtgggaaaagttgaatataatttgtaaatgtgactagttggattttgctatacatgtttgattggttagagaattgataagttggattgggtggaagttgaattacttagcttttgaggaaaaatccttaatgttgagttctttgaaaaaagatttaagcaatttttttcggaatgtttgtgtcattcaagccacccttgtagcctttatcctagtttacccttttcagctttgacttgttattctttatttctacacatattttgagcta

SEQ ID NO: 402046 - DNA, 614 bp, Cannabis indica
ccattcaagatcaaaagtgaaaccccagggaagaggagaggctcgttgctgaggacccaaagcagctcaaagtaatgacacacggaacaccgaatgaaccatggaatctggggtaactgaagccgataggctgctagaccgatgcaagctaaaactggaaatgggccaaagaaatagggggacagcttctcgttaggccgtttggccacggttcgttggtggtaaggacggagctttacacaaacttggtcaccaatctcaaaactgacatcgcgatgtttacagtgagctcgagtcttcattctcttctgtgcgcaaagaagatttcattttagcaaggccaatatgtcttctcggtctaagaggacttgttccacagtagaaactcgggtacgaaaagcctcgaagcgaagtaatggtggaggatcaccgtggtataaagcccaaaagggagtcataccaatggtggtgtggtaagacatgttataccaacactcagctcatgaaaaccatttgacccactagttgggttttgtagaaaatagtgaatcgaattatgtgtatatttcatagaatagtacatatttatatacaaagctaggagactaggaaat

SEQ ID NO: 402047 - DNA, 510 bp, Cannabis indica
tgtattcataggcttacttcctagatagcaaaggtctttttaacacttgtagtgcataaggtctttgagaaacaaaattcctttatctgattttgcaacttccaaccccaagaaataccttaattttcccaaatcctttagctaaaattgagcatgcattctgacttttaatgcttcaagttcatccaagttattgttggctaggatgacatcatccacataaactagtaggaaaatgaatttgccatcaaaatagttgatgaataaggagtggtctatggctgaatgatgaaatctttcttcagttaaggcacttgagaatttggcaaactattgtcttgaagcttgcttcaagccatacaataatttttgcaatttgcatactgcatatggaggtaactcccccttaggtctacccttgaggtagagacatatacacattttcatggagatcaccatgtaggaaagcattgttgacatctaattgatgtagatgccaacctttgattg

SEQ ID NO: 402048 - DNA, 841 bp, Cannabis indica
tttgaagttttcaaaacacaattgccggagtgagaagtcaatttcagagggccaatcaacagatgacttcaatttatccaaggttctctgccccaacattcacaaccctgagttcgacaaggcgctccgggaagatatcattgcttccacggaggacaggtacaagaagtacctcttgaagagggaacaagagtcatcctacatcaaggcccaagctgcctcagggagggttcttcaaataaaagctagaaaagaacaggcgacctcccggctcaagtttccgttcccatttcctaatgttggggctcccgatgccagcacctctgtagatagtaagttcccactgattattcatcatgttccttctgttcaggattactctacttgtaggcctgtggaatttgattaccatcttcttaagtttaaaattccccctcttcgatggggtgatcacgccaagagtttttatttttccaaccttagtcatttcataggccggtcccagatgggtttcggtcctcccgtacccatccccttggatcactccacctgtatatcctccagttggttcctcccctcgaacatctttctaggggacaacgacaccagccttttagtacatacttttgttagggcagaattagatcaccagggtaggattagtttcattacattactcttgcatgcatgattttgtgataatgttctaacatatttatttgtttatttctttaagcaaggaagctgatgggtgacctcttggatgttctcgtccaaacctacagtccagagtctggcatgcctcaataacgcgacccggtggtgactcccgggagatctt

SEQ ID NO: 402049 - DNA, 286 bp, Cannabis indica
agcctatatgtttgcttttgggattagatgcatataggaagcccatttatttctagatagataaatggactaggttgctaaattaaaatatcaccttatgatatttaggcccaattggtattgggcttatttaatgaataacaattatatgatgaaaggttaaattactctcctttgggtcttgtgtgagagttaggaggtcattagtagtgggtacgacatactgaacccagccttccctcacatgaacaaccccaattgtgaaggcccatttgccttatttaaa

SEQ ID NO: 402050 - DNA, 521 bp, Cannabis indica
tttacatagtatgagttattgtgtaaaattaatatagttgattaaattatgtgaggtatgataattgattacaccaatagcgatatgacatatttaagtgatattaagtactattggtatcatttagcatttctttttgcaaagagtattgccattattggtgtctagtagtatcagatggtagcttgtaaatagttaatattattctacaatagctatcagacacaaaattttacttaactacattaagcaatacgagacgtttaggtagtaattaggggtgttcatcaaatcgcttaaaatatccacaccataccgcataaaatgtggtttgaaattctttgtgatgtggtcgcgatttgaatttttcctaaaccgtgcggtgcagtgtagtttgtgattttgaattgtaaatatgtggttcaaacagcactgcaccgtatattataaaaataccaatttttatatttatttaggtctaatatgtgaaggcccaacccaagcccactaattattgtatt

SEQ ID NO: 402051 - DNA, 1076 bp, Cannabis indica
caactctctcaaatcttgattgttatgcgtgttttttcagatttttgatttgtataagctcgggtctttagaacacagtgatgaattgctagctttagcagctggctctgatctcgttgtgtattcatatccggcatgtatagtgaatggagttcgatttgttgtacacagtcgagataaagaccgtaatactcaaaatagtggggtgtccgttgcagggacagaaggttttgactattttggggaacttcaagaaatattgcatttgtcctttagtggtgcatattcagttgtattatttcggtgtaagtggttcaacacagatccgagaaagaaaaaaatcattatcgaaaataatatcactagcataaatgttagtggtgtatggtacaaagatgatccgtacattcttgccagtcaagctaagcaagttttctttgtggatgatctagttagaggtcgtaattggagagttgttcataatgtccatcaccgccaagtttgggaaaatattttggatgcttctaatgagacagatgatgttgatgttgtacatgacacaaactcatcaaattttacactatcagtggatttgggggagttgaatgtccaacgaactaatgattctccaagaattgtagatgtccctcaaagttctgagatggttgcaaatgttgatgatagtagggatgatgaagatgaaattcaagatgtgcccgcgacaaatttgtatttcattagtgatgatggttgtgaataatggattttagtactgtttgtattgatgactagttatatttttttgcattttgtcttaaggaattattgtataacaacaaatttaagagttaatgagttgttcgtattctcttaagtaaggactcatatgattttattattctatttttagcataaaatgtcagcagatgttgctagctatcatggtggagatggtggcggggatgacccattagatcctactagggtattggttgcatgcgagtcttctggtatttttgttatttttctatctaagtgtttaatttttttaattcaaatattcatacatatacatt

SEQ ID NO: 402052 - DNA, 824 bp, Cannabis indica
tatgtgccgatcgctagcgcatctagggccccgacgcccaactcagctccagaggcctagctgatctgagaagtgctaattcggttcggatagagttcattcaagaacaccgctgcccctggaatcaataagaaaacaagtgctaatcagatcagtgcaagcagccattgcttcgttcccttggcgggcattcgattcgaaccattctcttgatggttcgagtgaatgccttattggaaggacgattggaattagcaaaccaataacttcccagatgaggttgatagaggattaaaggggaaagaaacaatggtgatagtgtccaagtttgaactagatcaagctcaattagttgtgttgaacaataatgcaaaggtttagccatacataaagtaagttataggtagcgtttcctttgattaaaatttaattagttaccatgaaaaattacttgattaaccttacatgttttacggtgaccatatggagatattacaatcaatagttctaagaaatcataaaaataaacaaaaataggttgcagaccaacatcgttaagcttttgttgggtggttaaggaataccattcttgaaaagttgaacgaacagaatcattgagtattttatttgttgagtcgtatttccattggaccaaattttgtgatagcaaagcatgaagcgtacattgtaaggggtaaatattttcatacaaagtcaagagatgatgctcgagaggttcaaaatagtggcatacgtatcgttgcaaaaaccatgcattttgcaagtacaaaagatcgaaatcctgtttaggtaccatgacatat

SEQ ID NO: 402053 - DNA, 1014 bp, Cannabis indica
gaccaagaacatacaagttccgaataaatatggatctatattgttacaaagtcatgccatttggtctcaaaaacgctggagccacataccaaagattggtaaacaagatgtttaaagacaagattggacgaaacacggaagtatatgtggatgccatgctcgtcaaatccaagaaggctggcgggaacatagatgacattgacgaatgcttcaaagtccttacgaagtataacatgaaactaaatcccttaaagtgctcctttggagtaagctcgagaaagtttctaggcttcattgtcaatgcccgaggaattgaagccaatacggagaagattcaagccctccttgatatgaagttgccaacaagaaccaaggaagtccaaagtttgactggtcggattgccacactctgcagatttgtgtcaaagtgaacagacaagtgtgtcatttttcaacatcctgcgaggaaataagcaattcaagtggacgtaagaatgtgaaaaagcttttcaagtgctaaaaatgcaactcgcaaagcctcccgtactctcgaaacctctggacaaagaagaacttgggatatacttagctgttacagagcatgctgtgagtgccgtgctgatcagtgaaaaaaacagcatacaacaccctgtctattacattagtaaaagactcattgaggccgaaggccgatacccattgatagagaaactcgcttactgcctgattctagcaacaagaaagttaagaccttattttcaagcgcatcctgttcgggtgtacactgaccaaccattaaccccaaatattgcaaaaaccagacacttctggatggttactcaagtaggcagtggaactaggtcagtacgagattactttccaatcccaaacaataataaaaggccaggccctagcagactttgtggtagaatgcacaggcaaagaagaaagtgcaccggaaggtaaccctgagcaagtacaaataactcagccaagtaacagtgaagaaaagtt

SEQ ID NO: 402054 - DNA, 779 bp, Cannabis indica
tatgtaattattcttattttttaacatatattcacttttatatgatgtgttgtaccctttaagttaatataaattatgtgctaaatttaatagagagggtgagaatatattaagcaatatcctcttataaaaataatgagtatattttaataaaatgtaatataaaagtatttttaattaatggataaaaaatattcttcaacttatcctacttatattaagcatttatttctctattgcgatttggcgtctcacctttagagatcttcccctttagctaggagttacgcctgttgtggaatctagggcccgtatgtgggactgggttaccttttttggaaccttaggaccagaggagtggatacagatggcttatttctttatgcttctatcgtggttgacacgatttggagggctcgaaatgacaaggttcataaaaacaatatgggtagcttgaaacattatattgactctatatattattgttacgcagattatggatccagtttgctcaagtcttgacaggttgatgatactctgggttggtccccctcgcctgaggattgagtcaagatcaacagcgatgtcagagtcagggtggaaaccatgtgtgtggtggcaattgccagagattatacggaatcgattttgtgggtggcaactaacaagcttcacttcactaaccctcttatcggggaagcggcggcttgtatgttagctttggagacggcagccacaatgcatcacccttttgttatggtggagagtgattctaagat

SEQ ID NO: 402055 - DNA, 1408 bp, Cannabis indica
ggttaagtcacctacgtacattttgatgtaccggttatgtcttaaatgatcgagatcacctcggaaaatttgaccataggagtgatgaaggaatactcctaggatactcgaccaatagcaaagcctaccgtgtattcaataagagaagtgggacggttatggaatccatcaatgttcgctttgatgatttagaagtatccgagggagcttctactgaggaagagcctcttgatcccacacttcccatggctgttccagtcaacatccctcctgctgtatccgagagctcaattaacttagcatcagaagcttcacctgatgcatctgagtcatctggaatctctccagaattagctacagacacggaagtgactagtggtaccccttccagttcatctccttcgaggttgtacaaaaagggaccaccatcctggatacagaaggcacatcctcccacaattgtaattggtgatcctaatgcaaccatggtcaccaggagaaaaatcttaaatgctattgcatttgcttgttatgtgtctgtagttgaacccaaaaatgtgactgaggcacttctcgatgagttttggaacaatgcaatgcaagatgaaatgggtcagttcaggagaaacagagtttggatcatggttcctagaccagatggtgttaatatcatcggcactaaatggcttttcaagaacaagaccgatgagtttggtactgttgttcgcaacaaggctcgactagttgctcagggctacaatcaggttgaaggaatagattttgaagaaacttttgcaccagtggccagattggaatccattcgcatactactcacggtggcttgctatttaaaaatcaagctacatcagatggatgttaagagcgcctttcttaatggtgttctacaagaggaggtgtatgtgaagcaaccccaaggatttgttgacccccaacatcctgaccatgtatacaagctccaaaaagccctatatggtctcaaacaggctccgagagcatggtatgacagattaacttcctttctcgtttcacacaaattcactcgaggtaatgctgacaatactctattcattaaacatttacaccctggtatttttgttgctcaaatatatgtagatgacattatttttggatctaccagtgatgaggaagtgtcaaaatttgttaatctcatgactagtgagtttgaaatgagtctaataggggatcttagcttctttctagggttacagatcaaacaaactgatcaaggtattttcatttcacaatcaaaatatataaagaaaatgcttgacaaatatgggttagacaaaactaagcatgcccctactcccttgagtctgtcaactaagctgagtaaagatgagtctggtgaaaatgtcgatcccac

SEQ ID NO: 402056 - DNA, 922 bp, Cannabis indica
cggaactcaagcctaaacacggtcgtgtacctggactaagatcgagacccagacccgaacccggacccagacctacacttgggacccgatcccagacccaaacgcggacctagatagggattctgatactaacttggactcgaacccaaacccagaccaagactaggatcaaaactcgggacctagatccggaccgagaccttaacccagaccaatacctggacctatactcgagacccaaactcagacctggacccgaacccagacctagaccgggatctggatctagacctgacccagacccggaccaagactcggactaggactcacagcccaacccagacccaaacccgaacccagacactgaattgaaatcgaaagtgggactaggacccaaaccctaacatggatccagattgggacctaggacccggaccttgatgggggacctggagctcgacctcggaacccaatcccagattggaactcgaggctcagacccgaacctagacctagactcgaacccaaatttggagccaatccaagatcagaacccaaactcagactcggaccaagacttgaacaccaacgtggtcctggactcggactgggacctaggactcggacgtggatgggggacctagacctaggacacgggcatcagaactgggactgagacacaggatccgaccccggacctggacccgaacgtaggaccgggaccgggacctaggacccgaagtggaactagactgggaccctagatcgtgattcagatctggaccgggacctagtacccaacccagacccgaacatgaacctaggacacagctcctgacccagtaccagaaatgaaaccagactgggactcgagtttgggatctagatctggacacagggcttggacaaaacccgtagtcgg

SEQ ID NO: 402057 - DNA, 528 bp, Cannabis indica
ggcgatcaaaacgaaggccaccactatcccgcctctttccgtcgaagctcagcttgagaagaaggagagattaagcgaacccggcccagatccgactgaccccagtctagatctgaccggactcaacccagatcttcccatatccaacagccacctgcaagaagaagaagaaaaaatacagttagacgggctgggcgagaagaagaagaagaacagaaaaagagatgaagaagaagaaaaatagaaaaaaatgaagaagatgaagaagatgaagtggtggtttcggaggatgttggtggtggtggatgccgattatatgaagaagatgaagaagaagaaaaatagaaaatggtggtggtggtttcgaaattgctggtcttcgtgggtttgattaaggaggaagaaggggaagaagtggtggtggtttcgaaatggtggtggtggtcagtttcagtaaaaccaaagggtttgattaaggaagaagaaggggaagaagaaccagcgttttaggagaagaagaagaagaac

SEQ ID NO: 402058 - DNA, 614 bp, Cannabis indica
atattacagggcaggagcatatccgtacacgttgtacttcgcttctggttgagtaacctttttctccttcttgtgtttcttcttggtcttatcgttcttactcgacaccttatccatgtagttttgcctaagttgttgcatattcttaattgtggaagacaacaacttctgataagacagaagaccccaaggatactcgaagaagttgtcttcattttctaccaactttagcatatctgtctagatatacacaccctcggcccgtgacagcagaacaccttcgacaaatgcacacaaccccagcttgtatacatcgtctgcaacatcgcatgcctcaaatgctagccaaagggttttaaaggtcaccctttttgaattgttgagatagtctcgcaaaatccgatcagaatcacattgtgcagtcaattcttctgacgaaggaccaccgctcatctttaggcctgtgatcaaaccgaactcagaccgcccaaatctagcttcggttttacccacgtaaaaccacacttcatcatttttggcctcactcactttcttcttccttagtaacaactgatggacaataaccccactgaatttcaattcactggcattcc

SEQ ID NO: 402059 - DNA, 1107 bp, Cannabis indica
gagagccttgatctctgcacagatctcattcccctcatcaccaaataatctcatttcctgaagctgagatctttttcccaagcctcaggaaattcctcagtactagaaagagtttggcgcaaaagtcttcgcgtaggtttgtttcttgggttggttggattctctgatagaaaccacgccaacttccttcccagattcatctgcatccatgccaaccttcctctggaattctttatcagcctgaggtggaccttttaaatcgcccacaagatctatgcagatcctttgtggggatcgcccatggcaggctatagggttcccatagtttggattggtcggaagctcctcagccttggaatccatcgtttccggctccgattgaggcttgaagtctgtaggaacaaatggaaactgattggtgcatctgggtattatgaatttggaaggatgaacttctaaactcagaatggacattttggtagaaaagaaatgaaccattctgaaaatggatctcactaaagagccagaggtttgtgaaatatgataagcttgagccgcccttttatacacgaagtccagtgacaagaaagccaaagattgaaaaatctaacagttgggagttgtgcaaaatatgaagagacgattcataatgactctcgaaaccgtacaaccgccaaattaaaggatgagtttttcccagaaaagatcttgacaaaaatgccctctgtaattattaaaaagctctttttactaaaaaggaactttttaaggggtaattgttatacccgaaattcggctggaggacacgtgtcaagataatgtgaatcggtccaatagctttttatggaataactcattaattacataagagtttaaatatattgtaacccgctgactgtaaagccttaggcgagaaatcaatgtacaaattggcacttagtgtattaacgagaaaccatacatcgctaaatgcaaatagcgaagcaccggagaaagtgacacatatcaactataaaagtccttagcttgcaataagcaaactaagtgaaaacaaaaagccgaaaaagaacaaataagtgaggtaaccatctcgctatgagaagactt

SEQ ID NO: 402060 - DNA, 641 bp, Cannabis indica
tttgacaggggcaaaataatcatccatcggggatttattccgtggtcgagccccaccgaagctgatttggcagcaagcttgattgtttgttttctccatggagagatagaaatggagatccaagtgactagattgattgttgtacagaaaagattggcagccgctaggaacagtagagtgatgtcaaatttggcaaactcaaatgccttttgtgttttgaattggggatccagagccaatttgaaattttttgttcttgctgccacatttatgcagtcactagttcagcctaccaaaggagggaatacaactttgctcagctggtttttcgagcgaggccggcttgttgattggagtcttctctttcgcagggggaacaacatgcacatgctcacttggttctttgacagaggacgagccaaaattgttgtggaagcttgtgttcttcaccttgaggacaaggtgaattttcgggcggccggtattgttaggccttagggtataaataaagagggtaattgggtaattgtaatgggagggattgatgctatatatatgagtgagtaaggagagtaataggggagagaattattttgctaaagtgagcattagctcttgggagagagctgggtctctcgaat

SEQ ID NO: 402061 - DNA, 641 bp, Cannabis indica
aataagtaaaaaaatttctcgcaattaataatttatatttcaattattcaaagttgtcaattattatatctcactcattgttattaccgtatccacctgtagtcttgatatataataatacatataaataatataatgaaatgctgcagagatgaaaagatcaaaagataaaataaaaaattaaacactacaatattatatcaatagaagtaagattaataagagatagtgttaaaactttatagaaaagaaaagattaaaattgaaaaatttataaagaaaaaagcacctaagattaagagttctaaacaaaggaacaaacaaaaaattgagaaatatgtaaactcaccatacaataccaatttcaaatagaagaaatatggtaaggaaaaaaaattaagaattgacaaatttatagtgatattaagaaatttaaaaaaatgcaataaaaaacctaagaaatttagagaaaaataataaatatatgagatatgtatttaattaaatattatatgtatggaaagattaaaaaattaaaaaataaatttgtaaagaaatcaatatatatatatgtatggaacacttctcaataggtattacttattgatgggtactaaataaatttaggggcttttttattt

SEQ ID NO: 402062 - DNA, 686 bp, Cannabis indica
aatagtatatgaagtaatttcttaaaaaataaaaattacactatgcacttaaaaataaatttcttttttacattgacttttttattcatatttttacaaattatgttttatacagtttttgcttgttttttttttcagaaaaaaatgttacttttacgctaattttagtagtaacgtgttaagaaaatgttgttatgaaactacaaaaaaaacaacactctatattattgttaaaaaaatcatattacttttcgtagtagtaacatcaaaataatattatttctaaaacagctaaaaaaaataacactatatttttgttaaaaaaattaaacaattgtagattgataaaaatgtaaaagttgttatttatataaaataattccaaaaaaatctatactaatttcaatttttgtaaatcaatatgaccattactaaatcatacttaatcgattaatatactttgatattccgtaaataatttgactcattagctaattaattttttaatcttatagaaagcaaataatgccccaatacatccgttacatacatagtttcatatgctagtaatttctcaaattacaggtattaatttgaaacatatatatatatggaacaggtttcaatggttacatttttattgtaaccatcatggttacatttttttaagccattggattactatt

SEQ ID NO: 402063 - DNA, 905 bp, Cannabis indica
gcaggatctatgttgcccgaagtttcactttcaatgaacaagagtttccctattctcatctattttccaatccctcaccccaatctcactctctgcctgttgtcattgactctgcaacctatactttgccttcttttccttctaatcccccacataacaacattcaagaacatagtgttcagcaaactcccacccccagccccacagttacacctcctacccctcatattaccaattctgacacttctgtgtcttttatcaaccccataccagcatctcccaacacaaattctgatgctgacagtcacacttcacaaaccaatatccatcctatgttcactagatctaagcatggaatctttaagccaaaaacatatcttgcaagcacaaatgttgagactgaaccaaaatccctcaaggctgccttagctagtcctatttggaatgcagccatgtcgactaaagtaacagccttgaaaagaaagaaaacatgggtacttgttcctcccacatctgatatgactattgttcacaacaaatgggtgtatagggtcaaatataataaagatggctcggttgatagacacaaagccagattagttgcaaaaggttttcaacaactcccgggtattgacttctttgaaacctacagccctgtgaataaaccttgcaccattcagattatttttactcttgcagccacattcggatgggacattcaacaagtggacatcaacaatgcattcttgaatggtgatcttaaagaggatgtctacatgtatcaaccacaagggttcattgattcggaatacccaaatcatgtttgcaagttgaacaaagcaatctatggtgttagcaagcccctcggtgtaataccctaactagcataggcgtattacgtgatt

SEQ ID NO: 402064 - DNA, 733 bp, Cannabis indica
aatggttcaagagctcgctgaactagtgacaatcgagattcgtgatagtgaatccacagtgtccgctcgtgaacactttgttcattctaggcatgctcctgacgccgaagtcgaggagatggggatgattgggagattcctgaccacgagtcagaggaagaggaagacgctgaaggaagtgggactgatttagtggataacacgcaactgagcgaacccttctcatgcgaggacctggtctcgcgagtcaccaaatccgacctcaccacttttacgaggttgaatttgttacgacttggcaccatgtgtcctcgctctacccagagaccgcatcttcccttcactaaacccgcaataatccccacagaggatgtggttatttctatacccatacttcgatgtggggtatcgattcccttccatccatttattgttgctatccttaagcggtatgatgtttccccattccagctaaccccaaacagctatcgcatagcttttgggttttatgcgatgtacatggagtacgcgcacagggagccttcgatggaggatttcagttatttttatgatattaagaatgtgggcctccataatggcttctattgtttcagcaagtgggccacttttgaaattaatggggtagaggcatggtttccaatatgggagattggaaatctaagtggttttacgtgttcaaagtaccagggattaggactgactttaatcgccg

SEQ ID NO: 402065 - DNA, 702 bp, Cannabis indica
tcaacaagactagtaacatgaaccaccacagggtcatactcaggccctaatccatttagtaaatgcatgattaaatcgctttcatcaatcggatgaccagctgtggaaagggaatcagccaacaattttactttatcatagtagtcagagatggagagattacccttttgaattgttgagagctgggattttatttgaagaagtcgagccttggattgactggagaaacgttgagctagagcgcgccaagcttcgaacgaggattcgtagtgagccaaagaatcaagaactgtttcggacattgatgagcgtaaccaactgaggagaagctggtcttttcgtttccaggccgtgaattcggggttgagagcaccattgaggaggcgctcaacaggagcaactccggtgagaagaatgtcatcgagcccgtgaccgatgactgtgggaatcacctgtgatttccacgcaagataattgttgcgatctaatcgaacagtaagggaggagttaagagagttctgaaatgggttccattggtgtggaagagtagcaggagcggaaggattggatgaggtatgttctgggtgtcgaggatccataatcgacgcaagtcaatggcaatctgataccatgaaggagtagcttatcaatacaattcctatctggaacaattttaaactggacacaaagaattgtaaaagc

SEQ ID NO: 402066 - DNA, 623 bp, Cannabis indica
tgtgtcttttcatacttaaaatctattggttctacttcttagagaatttgttcccctgatagtggcaaaggagtcatatctccctctttagtatcatcgaatgttttcttcttctatctatcaggatgatctttaggcaagtaccgtctatgacccatataacacatcttgtgtccatttggcaagcaacaagctcatgtgtcagtgtaataaatcggacaaccttggtaacctattgtgtttaagcttgataaattactctaagcttaaaaattgctaacagtccacaataacactaccttcaaattaaagaattctttcttaagaccatcgtaggcttgaacaccattctcatacaattctgttaaatcgtcaattaatagttctaaatatatcgatattatgtccaagttgttgtgggcctgatataattaaagaaagcatattgaatttccttttcatcaataaccatggaggaagattgtacataacaagaaagataaaccacgaactacgagactacttagagatatatatgaatttactccatccgcaaatagactgagatgaagatgtcttgttttagatttgaattctagatttatgtagtttacttttttttt

SEQ ID NO: 402067 - DNA, 344 bp, Cannabis indica
tctgtcttgagtttctgtgtatacgttagattcctcttttgtgatgttggagttacttctattctacgtatatatatatatatatatatattttctttttaaggacccatcttttcttcacgtgatgaccttcaagggttcagagaggactttgtcttctcaatttttacccttttttccttttctttgtttgttcgtaatgtcaccatctgtgggattcttgcacccgacttttgtcaaggaaaaccttctagggcttccttgatgacaactgtccggagggggcctctttccagcggttaggggacccccattcccttttttgacttagggtatggtttggg

SEQ ID NO: 402068 - DNA, 719 bp, Cannabis indica
acgcttaaataaaaaaatatatactatagtattaccattttgcatcacatattgaagacataccctctgaaagatagataataaagacctaataaatctaagagcattgttattaggcaccagtggtgtataacaccttctcgacatgccgcgttgcgattggttagcgatactccttaaaagctattatattaaattatatgggacccgatacttagttgaaccaatagcgatattgatacataggagaacgctaggcaccactggtgccctttaacatttctctaaatctaataatacaactccattgagaaaaacacactctaaaaaaaattaacaacaatttcagcatcactctccacaaagaaaacattcttatggcatctctcatatagtaacattcaagtgctaaatatctctattttggtacttttttatatacttatataagttttttttgtttgtcatttatttgttttcttaatgagatagtgtaatacataatatatatataggacaagattatggtatttttttttgaagaaaacgtacttatattagattaggaaaagttagacctcccggtcattacaacatataatttcaggcaaagaggaaatcggcacagagccaaacctctgattggaaaaagcccagttagccacattatgggccataaaattacactgtctacgaacgaaatgaaaattacaaccaat

SEQ ID NO: 402069 - DNA, 517 bp, Cannabis indica
aatatgcatggattagattagattgattattttggcatgtgaatcaacatcaaatccgtataagtgttgattttaaaatttttaattcaatccaattcgcataaatgcggatgtccgcactttacagattaactagattaaattgaatggtgcagattgcattagattatatatactctcctaaataattttattcattttatattgtaatttggactgaattgatattcttaatgaagttacattttttttcactataaaatgaagttaaatattagtttttttttttcaaacatatataaatgggccaagatgcaaaatggccataaatctaacaattaagttaataaatgtcctttttataaaaaaaattaacaaaattttcaatctgttaaaagtttgataatgaaattactattataaccttgaataattaagtgtttagtatagttattttacacaatagtatatcgtttttatgtgcaatagtatattaaaaaaaactgaaaggtagtat

SEQ ID NO: 402070 - DNA, 796 bp, Cannabis indica
tgcatacaagttcagtaaaagtccagagaaatagggaccgattctatgcttcttttattccctataattcttatattaaaatattatagaaaagtaacaaaaacaaatgatcatcatccttttataataaaatgataaatgttttatattcttaaaccccttataagttttgaattgactcgagttatagactatatttcctaaatttatattcgatttgttataattgacttattatattggaggataagagattcaaattttggaataccgattatgtttatagctataaaatcacatgttattaatcttgcaagaagttatgcctagctcctttctgaattagaatgttaaaaataattaaaaggataatattttactcatcaactctaatcactacaaagaaaaaattacttttagtaataatattttattcatgatataattttttggtaattaaatatgacttttaatcacaacaaatagttatttgtgactaaaatatagtatttggatacaaattgtcacttataatttagtttttaagtattgtgactaaaaacgtatttagtcataatatattgtgatttttgtgactaatacctttagtcatggactttttaattaatcacaatataagaataatgatttataattagtcacaattttatcattatacaagtaaaaaaaaattataatgaattatgtagtattagtgtgacagtcagtagtcccgtgatccgtaaggggaaataccgggtaagctgtgcaatcccacaccgcctggggaaggtca

SEQ ID NO: 402071 - DNA, 778 bp, Cannabis indica
taccatcttttgagtttacctgatacagtttcttttgttctcaatggtttcacgagaaacatttagagcaaagttaacgtttttattacatacgtggatttactcttatttaatccaaggaatggcttttgacagatacgtagccacgcacagaagtactttgagaaagttctgaaaagtgggaaaaaagagcttgtacctccccctagaccaaagaagaagtctgctcatccatacccacataaatcccccaaagatggtgtgtatgttttacctttattttggttctttcttcctttttaatacccttttgctcataatcttgtcttgcagctccaaatgttgctcaggtcaatggggctacaaatgttatacagtccactggggcttcaaattttactcatgccaatgggtttccaactgttactcatttgactgggcctccaactgttactcatttcactagggctccaacttttacaaatgtcaatggggatccagctaagtctcattgtaaatggattccaactgttacacatgttgttcggtattctaatgttactcatgataccgggccatttcgttcttctgctgctttttatgaacctgcatataggccacattcatcatcagtggttgtaaatcccattaccggtgcttcatttcctccttggagatcaagttctgcaccaccagtcagtttaccacaactggaaacaggtttcaagcacttcttgctaaactttggaaactaaatttggcttttagtctatttgca

SEQ ID NO: 402072 - DNA, 650 bp, Cannabis indica
cgacatgtacaatcatcatcatcgatcaactcgactcacggttcagtaagcctttattactttagtagcttatattaacaatgtgttttaagaaaagtctgataggaagcatgttagtagcatgatagttgaataggcccatgttttaatttccaaaataagcggtaatcaggaagttattcttgatcgtagtctgaccagactagctcttcgtttcgcaggctattctaatagaatggacgtcaggaaaaacactaggagccagggtaacttggtctgatctagtggcggttaggagctcagattcccctgaatgtacgtgaccgatgcagaggccctagaggcagggcacgcggtcggggagatgttaacctaccacaagctggccacgaatgggaaaatatgtttgtagcaatgcaagccaagatcaacaaataagacgaagaaatcagacgtatgaggcagcagggtgctcatacaatgcctactccagaaatacaggtggctccagtgaactggatgaaaccactatatgaaaggttccgcgagcatgcacctctagtctttctgggaggttccgatgtgatgaaagttgaggaatggctaacagttattacaagaattctgaattttatgggcgtcaccggtaa

SEQ ID NO: 402073 - DNA, 974 bp, Cannabis indica
aaaaaatatttttttttaggtttaaaataaagaatgtagctatgtatattttacatatatattttaaaaaatacgtataatggtatcgtttggttatttttttttgtttttttaatttttttaatcacaaaaataaaaataaaaaatttgtttttgaaaaataaaaatgcgttctataactgcttttgttttttaattttaaaaatagaaaacaaaagtgtgttttgtaaagttcattttcatattttttttattttatttaagtcagctctaggtcagggtcgagtctgggtccaaatcaggggccgggtttggattcgatccaggtctaatcgaagtttaaaaatattggattaaaagaaactaatttaaaaaaaatattgagattaacttttttttttgttttcaaaatttttatgggcttttttcataaatgtacaacaaaaataaaataattacaaaaaatgtgcaaaaaaaaattatttgaaaatttattacataaaaccatacattttaattattaaataatataaatcattaataattaagctaattatcataaatagaaaactgtaattaatgtttctaagattattttgtaatattttatccttatgttaattatattaatgttttaaaaattattaataataaaacatatttattaaaattcaaaacaaagaaattctgtaaaattaattaaataaataataaacagttttataaaaataaacaaattaaatattttttttattaaagaaaaaatatttattatctattttagtatgaattattataatttaataagtttttttcaataaaatacaatatcaaaattataaacattaatgtatataaatataaatcaatgcttaaaattactaaaaataaacatgacacacatagtgatataataaacatatgtgaatattattattttgtttattaaattagtaggtttaataaatagaaaa

SEQ ID NO: 402074 - DNA, 489 bp, Cannabis indica
aaaaaaatacggtgcgatgagatttggagagacgaaaggaggctgcaccaagaacaaatttgagacttggcgagggccacaacctccagttgaaccagcggtggcaagatgtggcccgtcgcaacctgcaggttgggaacactacaaaaaatagctacttttaatgacaattttttagtcactacataaattttttgtggttaaatgtgacttttagtcacaacaaaatattacttgtgactaaacactacaagaaaaggtgtttttgccggcgcatttcgtgacatgcgccggtaaaaactgtcgagagtaccaaatttgtggaattccaaatttattttgggtttacttttgccggcgcatttgtgcgtcggtaaaacatagcaatgccggcgtagtcaagttaaatgcgccgataaaacgtaacaccattaggcgcgagaatttgccgcctttgatttcatttttggggcgcttttttaattttac

SEQ ID NO: 402075 - DNA, 674 bp, Cannabis indica
caaacgagcagttttgatgaaggaactttagcaaacttgaagccataaacctctcttttcgctgttaacttgcttagcaaagaaggatggtgaaaatgagtttgtgtacaaatgctcacttgcatttataggcaaacaaagaaaaaggttaatcatttcaaaagaacctcaaacgcctcggttccccctcaaaagtgaatatcagaaagcaaatataatcaagtgcagccgtcaaccgtggagagataaaatcggattttgaaatatctattgttagagcatttattagccgaaaaccgaagggacgcccagtcagcctcacatcgagtcgcgaacagatgcacttgaaacgtgtcatccatccaaatgcaaaagcagctcggatgaagtctacacgcaactttcaaagtcccgtacagacttgggggccaaatgttatcccaatttttacactctgatgtggcatcacatggtggtgacacgcagaatcgactcaaagtatctactcacagaatatagtccgaacaggatgccttgtatgtatgctcaaagcaaatcgatcagcaatccgtgcagagcgaccaacacttagcgaattcatctttcgcatcgtgagccatcaaagaaatccctataacttggggatcagattgcagagatatggcaagctgtcc

SEQ ID NO: 402076 - DNA, 721 bp, Cannabis indica
agatcatctctatatactgctactaaatctgacatcttagatgaaatgtcatcaaatttttcacaaatgaataagtgagcaaacttaatgacaaatactccacagtcactgcaagaaacaaaaaaaatgaattaatatcaaaaactggtttctatgcaaacaaaacaaaaactgacaaaaattataaacagaataaaaaataaaactagtttcaattaaaaaatataagatcaaaagaggcaaaattacctattgacctaacttggaagcccatcaataaacttgaaattcaatggttctctttttccaacaaaatatggaccttcaaccaaattaagatcaggtctagaagaataaacatcaagatactccaaataaaatggcagcatagtagaataagctttgacatgatccaaggcgtgtttcttattgatagcaccagacattgagttatatacgtttaacatcctctcattgatatcaaaattgaccaatatccaatgtttttgcttttgaatattgacatatataagaacatggtcagtaagcacctaatgagtattgcaaaacaaatactcaccaacaatgtatctaggaatgacattatcaaaatcaatcttagaagggtcagaaccctatttcaagaactgattgtatgaattccatatgacttgatcaaacaaacaatcagtagtaatcctttggtttaaagtatcatctt

SEQ ID NO: 402077 - DNA, 1347 bp, Cannabis indica
tttttgagggtaaataccattttggaccttctgttttacaaaagttaccaattggaccctgtattttgttaaatgataaaatagatcctgtattttctaaaatagtacatataggaccctgaattgtattttttgtcaaaataaagtttaattataatccgatctaaaagtgctatgacaaaactgtttacatttattgtatctgttcgtattaagcattgtcttcaagttggttgtattaaagaaaaagttgtacaaaaattaagcttagggtccttgtttttactattttagaaaatacagggtccattttatcatttaaacaaaatacagggtccaatctgtaatttttgcaaaacacaaggtccaaaatagtatttaccctattttttgaacggattattcaaataatatattctacacccattaaattaaataaaaaccaggacaagggctatgtgtgtggtaattaagctcatttttaaattggaattatttggtaaaatataaatatttattttaatgttatataaatattacttttgtaaaattaatatattatttttataaatttttataagtcataaacactaaatatatcagttttcataaacactaaatttttataaatttcatataaacaaaagtttggatatatcagtttttaaataatttaaacaaaattactttataactaaaagcatctccaaataggagtaatgtcaaaaaacacatcattttaaaattatttttttaatttaatttctttatcattcacggttaaaatttagaataagatgaataagtttccatctcaaaatcaattggaagtaggatgaaaggttcattcatcttatatatgacaatttatttccacacataaacaatgtggggactaattctaatatctacatgatttaataatttttcatacagaaatcactttagttgacagctccaaaagttatctactgttgagaatcatgaggttccatctcaaaactaattggcaatgagtggagtagtccatgttcttggctcaattctctaccatttattttatgtgggataatgtccacaagttatctaccatgtaccacatactatactatttaaatgattgaattttattaaatactatagaataataccataaagtaatttttttttatataataaaaaaataaagtaatacaacgtggttgttgccaaatatagacaataatattgttgtgatatgaagcaagagagaaaactatggaatgaagagaattgaagtaaatgaatgaagctctgccttgaaatgcaggcttggaaaccttttatatatgaaagactaagtcggtt

SEQ ID NO: 402078 - DNA, 815 bp, Cannabis indica
gagagagagacgttgggagcgagttggaggttaggttagattgttaggtttatattatatagttagggtttttttaaatgggcgaaagcccgtataattattcttcttcttctttttaatgggttgttacgtcggttttgaactgacgcaaatagttttaaaactgacgctaaccctgcactgtcacaaaattcacaagctctttaattgcataggttttgaaatcttgtcgacgttaaaaccgatacaaaaacgtgattttgtagtagtacaactcgctacccttctttcgaacaaacccattgatacaaccaaagattactgtctctactcatgtcatctcttcgaatgctaaagcctttccacttagaataagtcgtataaaagatctcccattggtctattgtccaactttttccctaaaatttcggccatacatatttcatcaatgcacttttgtatagatagcttctttagaattttttcccacccaagattggagactatgtcaatagcagtcatggctagcagtatacagtataaaaaaaaatcatactaggaatagtttaaatccaatagtaatgtgttgaatgagatggaaaacatacctttataatttatatagtgcctagcgatatgcctagtgacacgaggaatcaagatcagtgttaaaaattggtgttctatattgtgttaaacttatgaaagtttgacacatcaattaatctaatttatattaaatgtgttgactaattttgttgactttattagaggtttaattttttataataaaaattaattgacgtgtcaaactt

SEQ ID NO: 402079 - DNA, 896 bp, Cannabis indica
tgacgaggatggtgggtattacaggttactgggttttcctttggctattcaattctggtttttcgagtgttgcccgtacgttattgggaaactttcgttgtactcaaatgttggcattccaaggattttgaattggcctaaactacccaaggacaaggagggtcaggtgaaaatggatgtcatgaacaccctcattttcgatcggtctttgaaagaggtaattctgttgttttttacactatttctactgttgttttaatgttgtttttgtatacatttgttatactttatgtttcgattgttgttgttattttataatttcagtttcatgtgcatatttttttttggttgttgttgtttcagttaaaattacgaaacatcactccaacttctgttgagagattgagtttgagccttactgattttttctctggtgagactactcccgatgctgtcaaattcaaaattaaaggtggttccaagtctgttggtcaacctggcttgatgggtgcttcttcatcatctgctcatgagaatgtctcccgagttgagtttgaggaattaaaaaagagtctatctgttgttgtcagccagcaagggatacttatgaaatctgttgctgagatgaacaagaagttggacattcttattgaggtgttttttttattgtcattatttgttttttttgttaattttttagtagtgtttttatgttgttttatacagttaattaatttttaagtttttttttctcagtcatcccaaggtggtcatactcacaatggatctcagtctgaagatgctcttcgttcttcagaaaatgaggatgatgaagattccacttcagaggaagatgaggatgataaaatcgaggatgacaaaggagatgaacatca

SEQ ID NO: 402080 - DNA, 1228 bp, Cannabis indica
tgttggatgctttccgctaatggagccattctttccaagtcttacaatgaagctttttgagattttggaaaggatagctagcaacaactatcaatggtcaactaatagagctcctacaagtcgaaaagtagcgggtgttcttgaagtagatgctttgaccgctctaaccgctcaaatggcctcaatgaccaacatttttaagaatatgaatatgggaggaagtgtacaaccagccgctgccattcaaagggcagaaatctcttgtgtgtattgtggtgatgggcatacttttgaaaattgcccttcaaatccagcttcggtttgctatgtgggtaatcaaaacttcaaccgcaacaacaatccatactcaaactcctacaatccggcatggaagcatcatccgaacttttcatggggaggtcaaggggcaagttcaagtggagcacaacaagcacaaggaaagcaatcatttccaccgggtttttctcaacaaccaagacctcaacaacctcaccaacctcaaggctctcaaactagttctttggagagcttaatgagagattatatggccaagaatgacgctgtaattcaaagccaagcagcatctcttcggaatcttgaagttcaattggggcaattggccaatgatttgaagaatagaccacaaggcactttgcctagtgacaccgaaaacccaagaagagatggcaaagaacattgcaaagcggtaaccttgagaagtggaaaaataattgagtcaaatgtggctgcaacaggcagtaaagagccctcttcaatccaaaaagagggggaaatgaagaaaaaaccagcaacttcagctgctgaaattcccccagtagttacagcatccagtcagcattctgctgcagaaaagtctttgcaaaagccacctctaccatttcctcaacggttcaagaagcaacaagacgatggtcaattccggagatttcttgatgttctaaagcagctccacatcaatataccattagtggaagctttagagcaaatgccaacttatgtgaagtttttgaaggatattttgacaaagaaaaggaggcttggggagtttgaaacggtcgctttgacggagggatgtagtgctatgttgaaaagtaaaatcccacccaaattgaaagatccgggcagctttacaattccaatttctatagggggtagagatgttggaagagctctttgtgacttggga

SEQ ID NO: 402081 - DNA, 634 bp, Cannabis indica
aatggaatcaaaaagcctaaagcctttcttgtcactcaacttcctacatccctcaaacaggctttgcagcaattacaatggaataaagctatggcagatgaagtgcttgcacttaaaaggaataaaacttacacccttgtcaagctactacctggtagaactgcaataggttgcaaatgggtgtatcgaatcaaagaaaatcctgatggaagtgttgataaactcaaagctcgattagttgccaagggatttcaccaacaaccggggtttgattttacagaaacctttagcccggttgtcaaaccagttacaataagagttgttctcactcttgctctttccaaagattgggaaatacgccaacttgatgtcaataacgcttttctaaatggtgaactacaagaggaagtctatatggttcaacctactggttttgaggatcccgagtctcctgatcttgtttgtaagctacataaagccttgtatggtctcaaacaagctcctcgagcttggtttgagaaacttcactagtctgttgaaccttggctttgtttcctcaaaatccgaccatagtctattcattagacatacaccattatctgtcacactcatccttgtttatgtggatgatatc

SEQ ID NO: 402082 - DNA, 624 bp, Cannabis indica
cacacatgtagcaactgaagcattccatctctgtccccatctgaaccatctcggttatcaactctcgacctctgtcgtgactaacaagaatctgacggtccctgcactacttccacactcctgccagcaagcttccttttcaacaaaagcgcctcctgcggcttacaatgtcactcaggcaaacttggcctagtgtaccaagcatacaacatggactatcccctcaaccttgtcctatgccaacgagtttcaaacattttgttgcgcccctctacagttgcatgtggtagttgtctttctagcatccctgaacttgactcgaagcaaccatccatgtctcctctttaggatgtccagtattcccatgaagaggcaaccaagtcttaactccatctcagcctactgatcctctttaaaagactaactggctcaacgacgtcttgttcgaacattcggaccatctcgatccgtccacacgcctacatcctctctaggataggctaacaaggttcacctcccacttagatgaacttggctctgataccaactgtcacaggctcaccttttcaggcagcggaatacccgtgcggcaccttgacttctctaagccaaggtcagccttcc

SEQ ID NO: 402083 - DNA, 706 bp, Cannabis indica
atttatactgaggagtttgtttcaatcaatcagccgcctgtcctgtaccatttcgatgaccagagagcccttaatcaacaagtatacctctgctctgacaatatcgacaatattgtggcccgagcgtatctgtacgagcatgagggtctaataaaatttcactataaagactacgatgattcacatgcacaggttctgattttggaaatgctgcaagaggatgctgaaatctcaatctcaattgaagggtatagatatgttaaggaagtagaaaacatgttccttccttggcctaaatacgtaattgcgacacccgaggtaacttttgttataaattaattattaatgattagtggagtttgaatatcttcaatattcaaccttagtgaagtaggatctacgaatatatgtgttgtcgtgggatggatgaataaacaactgttatatctgtgttatttgtcattatatgtgcatgtttaaaatttttgggggcattcaattacagttgttatgctgccaaaattttagtagaatttggatcaaatttcatatattatggtgtgtttttttgtagggtccactcgctcaaccgccttcaatatgtgatgtgtcgaaggggaaaggtcccatgccttctccacaaggcggtcatgatgaagaagatgaattattctcgcgaaaggtcatggatttgatccctaaattg

SEQ ID NO: 402084 - DNA, 691 bp, Cannabis indica
ccttaaattaatatagtattcactctcatatgggttcattcagaatagtttgaaaacaaagaaaaaaagaaagatagtgcatgaaataaaaaatgtagaaaaataagaaaaagaaaagatgggaatcaaatctaatgattcaacatctcttaaaacaagacataaaggattctccaatctactaaggaaagcacatattctcaaatgcattatagtacttaaacatttccaaagccatcatcataacaccataatcatatttattattctctctttaatttcctttcatgatatatataaattctttctcacaattgagatttaattatcttcaaacttaagctcttgatgaccttcatattactttatttttttttttatttatttcttacttttctccacaaagaagattattacagaggacatgacaacatgttttaaacattgcctcataatcttcatttggttaataatccacctacatcgtatcaatgctacaaactccataaatatcattatggatacaaaattatttgcttattctaatgatcatcaaagaaatgaagatacagaagtgacaacgaatctcagatcatggagaggtcaagccaagcatcatcctcatttaagaaacgtaagatcaattgaaatttttatacattactatattagttcgagagaatttttaacc

SEQ ID NO: 402085 - DNA, 1365 bp, Cannabis indica
ggaaaatatgacattattgaaagcaaggatagatggtgaaataaagtagcaaaattgtaacttatgaggcccacattaagtggccagccactagagtgtattttcgcccattattttattcttctttaatctatataattaaatcctaaaccctagttgaaatattataaaaagaacatgatgctctcattctcatccaactcacttcaaccaaattaaactagttttcattctttgacaactagtagatgagagactcctttctatagtgatttcgcacctcttgatgttcttcaccaattctagcctatagtgatagagtaccatgcccacgtatagcaagtcaagtactcaatcacaatgcggaagatagtggttaaccaacctaaagagagaaggagatccaggctcaaatcttgttattactctgcgagagaaaggaataagggttagagatctaagcggaaggagtcatattattccgctaccatcaatgtaagattttctaaactcatatgtatttaatattattattttagagaattcatatttagggtgttaattacacatacatgttagtaaatctagatcctggtaaaataattcccaacagatagggccaagttataacagtgatgggtagactgctagtgtcccctcacaaatgtcaccccatgcctcattagaaatttaaggcataaatggtagattgatgttacctccttcaagtcgttgagggccggtcggctaatcatggcattgaaagctgagggaacgtcaattacgacaaatcgcatcatcagtgttttggtaattggattttctccgactgtgaggggtaatctgatatacccgacaggtgcgatgccttggccaaagaaaccatacatcacttggttacaaggagctagatcgttgagttggagccccatcttttcatatgttgatttgaaaagaatgttggagtaggctccatcatacaccatacatattgctacggtcatgttcccaattcttacagtaatgaccaggggttattatgcgcgaagttgatcggagcttcatcttcttcggtaaaagagatcgtgggctctatgggcttttgttgcttagagctcctgtctttgacaattaggatatcgcctttgggctcatgacagagtgttcgagcatagcgctccctagctttgttggttttgcctgtaatgtggggtccaccaatgatgagccctaggtgtcctgccacatgtggtggcattggatctctattttgggcaccttgtgcctgagtttagtcctcttgcacataacgacgcaggtggggattgttatgccttatcacgtactcaatctccctcttcaaat

SEQ ID NO: 402086 - DNA, 562 bp, Cannabis indica
tttattaacatccaaaatatgaatttgtaaaataatagaatttaaacacatataaagtttgagtaaccttacattgattgcaacgggatataatgaatccttccacttagatcgctaacccttgttcctttctatcgcagagtattattaagatctgagcccaattctccttcaggtgtttggattcttcagtcttacacactatgattgagtactagacttgttatgggtgggcatgcactcactcactaatggctccaaaatttatgaagaacaccatgagatttcaaaaatagaagaagaagaagaaagaagaaagacgtcttgaaactctagttgtctaacagagtgtaaactagggtgaaagcattagttggataatgagaccatcctattctttttataatagccaaaataaaaaattatatggaataaaaaattgataaaataatagccaaaataagacttagtggctggccacgtgtatgggccccactaattatatttttgccattttttcaaccatttatctttcatttcataaataccatattttctaatt

SEQ ID NO: 402087 - DNA, 967 bp, Cannabis indica
tttggctaccatctcagtggaggtaaagggaatatgaatgatgaaatcattcttaatggaataactcattaattgcataattagtagagcatactagcaactcgctgactataaggtcttatgcgaggaaaagatatgcaaacttttgtttggtatattaacgagaaaccgtatgtcattgaatgcataaggtgaggcatcaattccattatacttgggaagacgaaagcaacgcatatcgactgtgaaaacacttagcaaataatgtacaaactaagtataacaatcgggttggcttgagacctaacagacgaggtgcatatctcattataggaagactcattcctataccttccccctagttaacttcagatatcttctcagcgagactgacaatctcgacaagtcagaagataatattcaaatgagcctcgagaaactctttgttaataaaaaaccgcaattgtttcaaatgaagcattaggctatcaaacaaagaagcgacaaggcatacatcgtcgacctcggaaggataagattaaaggctccagctcggtatcacggacactgaaaccgagcttctgttgagacatatcaaaatgctacaattatatatatgtttaaatacacgatcattttgacctagtttaagcgggagaatcatagttgtgcgatttttaagtaataacaacaagttatactacatgatttgtaatcaaaccccataatttcagggggaagaacgttctaaagattatagtcaacgttgtaattaactacccctatatgattataaatagtggcaagaaagatcaataagggaacgaaaaaatgatacaagagaggtcctgaaaaactatcagaaatctgaataagattgaatcatggactatggagaattttaactgcaaaaccacgtaaaaaaatcctgtgtgttcatactttttattttacagcttttattttt

SEQ ID NO: 402088 - DNA, 933 bp, Cannabis indica
actcattgaggtcgagggctgataccctttaatagagaaactcgtttactgtcttattctagtaatcagaaagttaaggcctttattttaaagctcatcctgttcgggtatacactgaccagccattacgccaaatattgcaaaagccacatgcttctggacggctactcaagtgggaagtagagttgggccaatacgaaattactttccaaccccaaacagcaatcaagggccaagccttagtagacttttgttgtagaatgcacaggcaagaaagaaagcataccagaaagcaaccccgagccggtacaaacacctcagccaagtaagaacgaagataagccgacctggaaactacatgtagatgggtcagctacagatcatctatctagtgcaggaattgcccttgtcatgcctgggggggcaacacttgcacgctgcagtcaagtttggattcaaagcatctaacaacgaaggcgagtatgaagctctaattgctgggctaaagctagcctaggggatgaaggccgaacacattgaaatctgtagtgattcacagctggtggtaaactgtgtatccagagaatatgaggctcgggaagaaaagatgatagcatatctgagcaaaatacatgatctgctcgcacaattgaaaagctacggtctcagacaaatcccaagggaagaaaacacaactgcagacgcgttagcttgatttgcaagcaacaatgtaagtgacaaggcgaacttggttcctatccagttcctcgaagagcctagcatcactggcacggaagaaatcgaaatgattgatatttccccacactggatgacaccaatagcagcctaccttgactatgggaaactcctagataatcgaaataaagctcaaaaaatgagaaggaaagttgacggtatatcatagtagaggga

SEQ ID NO: 402089 - DNA, 569 bp, Cannabis indica
agagagagagagataaagagaataaagggtgggcaacagttgggtcctattacaccatctcgggaaattcgtcagggtgatcctttatccccttatcttttcattatttgtgttgagggtctttcttctctcattcgaaattatgaaaataaagggtggattaaaggctgtcaagttgctcgaggagctcccaacatcactcatatgttttttgccgatgatagctacctttattgtccggcgcttgaaagtgaagctcaaaggatcatgacacttcttcagagttatgaacttgcttctggtcagaaagttaatcgtcaaaagtcgtccatcttcttcagcaagaatacaatcttagctacgcgggacagtatttgttctatcatggggatgcctgaagccggggatgatggcttttatctggggttgcctaacattatgaaacacaataaaaatgcggtgttgggtttccttaaagataagatgaggaaaagagttgaaagttgggatagcaagtttttgtctcgagcaggaaaagaagtgcttatcaaatcggttgcccaatctct

SEQ ID NO: 402090 - DNA, 1313 bp, Cannabis indica
agagcaatcgataaataaacacatgaatttctcagattgataatatttttgtgatattaatgggatttgttttatttttgttttttattatatataaataaaaagtcattcatgaatttctcataaatcaagaattcagttttatagacacatttcatgtagaatagatatattattgctaagcagaaaacataatgtaaattagaaaaccatatgaaccaaaacgtcataattaatcaagctccaataatgatcagacactttttctatcttcagtgtctttttcttaatttaaagaaactaaaagcacctaaaggaacaaagtgaaaccatgtaaacaaagaaaaacttctaactattactattatatatttaattaaagaggtcaacctatataaaattataaaaatcagtaacgaaatttggagcacaactatttgttggttattctcaagtcaattttcattcatatatttatgtaaggaattattggaaaaagttgactttgtaaactaattttgtttgaatgaaaagttagtggattttaatcccacatcaattttgaagtaaaattagcaaaattaaacgctataaataatgtcctttagctttgattttaattacacaaaataaatccttaaaatgaagttaatcccccaaataaaatttcatttcttacaatgctttataaaatcctttttataggtagatagaaattaaatggattgtatattatgtacatcaacaaatcaaatcaagcactaataacaggtgccaaaaatttgaccctgattagttgagtacaaatttcgactaaaagttggaaatttcagctgtaaagaacccgtctcatctagttgttgtcatcactcccataattttgacacaaagactgcaatacgctgtcactgtaccagttgggtttcttcttctccggttttgacttctttactataattgttgaagacttggtaacaagtctaattggagcctccgattttgacttcttcactataattgttgaagacttggtaacaagtaaaaattggcaaaattaaacgctataaataatgtcctttaggttttgattttaattacacaaaataaatccttaaaataaagttaatcccccaattaaaattccatttcttacaatgctgtataaaatcctttttataggtagatagaaattaaaggggttgtatattatgtacatgacattggtatttaacaaatcaaatcaagcaataataacaggtgccaaaaatttgaccctgattacttgactacaaatttcgactaaaagttggaaa

SEQ ID NO: 402091 - DNA, 523 bp, Cannabis indica
aacttctttcatgattacatcactaatattagaagtaaatttatcactcctaatgacacaatcagcgatttattttaaatttttttatttcgtcttaatagataattaatgagtccctcataaccgatagatattctcctactcgaatctactgtctattagattgagatggaatggggatgaaagtataaataagttgtatttgggagtgaagattgcatttttttatacattaaccgcgtaatttctatctctaagtaggaaagtgttgggtaaagttaggggtggcaaaacatatcatcgtgtcgtgttcgtgtcatattttatgtaacccgcttttatatttcgtgtcaagcgtgtcgacccgtttttgacttgtgtctaattatctcaaccctaacccgatccgtaaaaaatcgtgtcgtgttcgtgtcgacccactatgacccgttttgctattattgtagctagaactgtagagaaaaataataaatttaagctccattagaaaatttatgtacat

SEQ ID NO: 402092 - DNA, 612 bp, Cannabis indica
atcttcgttatttctgatgatggtgaaaatacccgaaacactttttgctaaattgaattggaaatagcccatgttaacaaaatgtcaacttgggcgatcggctcagccccaggtgtcaacttgagcactgcgacccaatttttccccttcgaaagttctgtttggtccccaaaaataggtggatctcaatatttcctgaagacggagatgatgctcgaaagaattcttgaaaaactctactttttgtggcccaggttggtaaattctcaactgagcgtaaggtcagccccaggtgtcaacctaggcattgggccctattttttatgcccatgaagatgtttttcctctagaagtacctatcacctcatttttgatgaagacagattcaatgaaaaagtcaaatctttgatcggacacttggaaggcgcccagatttagattgtcaacctcgacactaggtgctcgacgcctcgagtgctcaaaaatcaacttgctctgaatctgattctggtgcctcaaatatgttcgtggtatgtctagttgatgttccaataaaagctttggccacttttcactaagacggtcccgcaaactgaaaccctagttgaggaa

SEQ ID NO: 402093 - DNA, 1449 bp, Cannabis indica
gggtcaagtcagggaaatttttgagattcatcgtcacccaaaggggaatagaggcaaatcctgaaaaaattcaagccttattgaacatgccttttcctaagaagcacaaagacgagcaaagcttgacgggaaaggttgccgtcttaagccgattcatttctcgatcaatcgacaagtgcatccctttctttaacattttaaagaagtgccaaaaatttgaatggactgaagaatgcaaggaggcattcagaaaactgaaagagcacatgaccaaaccaccgattctatcaaagccagttcatggagaagacttactattatacttggccatcttcgagaacgctgtcagtgcagccctagtccgggaagaagaaaaattccaacttcctgtgtgctacgtcagcaagcgtgtgatagggaccgagatacggtatccattgattgagaagttagttttctgcctcctgatggcttcaagaaagttaagaccctacttccaagctcaccccatcaaggttctaacaaaccatccgcttggcaagtcctacaaatgtcggaagcatcagagagactcctcaaatgggccatggaattaattcaattcgacatacactacgtaccacgcatttccataaagggacaagccctaactgacttcataacagagtgcaatgaagcagaggctagtgcaagcatgcccataccaccaaccccgacatggaaaatatttgttgacgaagcgtcgaacgaaaacagattcggagtcgggatagctatggtatctccgaacgggcttcgactctaggtggccctgtgtttcaaatttctagcttctaacaatgaagctgaatatgaagtcctgattgcaggatttaaattagcaaataccatgggagcagcaagagtagaagtcttcagcgattcacaattggtggtaaaccaagtctccggagggtatcaaacgcgtggagaaaaaatggctgcgtatgtagctattttctgggagctactacaggagttcacggattacaaagtagaaagaatccccagagaaaagaatgctcacgcagactgtttggccaaattggcattagacagcgaggttgagagactgggggtggtgcccgtcgagcacctcacggaaccaagcattaaagttgaaaatacggtggctacaatcgaggcagagccaaaatggatggaccccatcgtcaaatacataacctaaggtgagttgcctcaagaaacgaccctgtatagaaagatacagttcaagcgcatcgatatgtgatgatggatgatattctctaccgaagaggactcagcatgccgtacttaaggtgtgtatcgaaccttaaagttagaaagattatgctagaggtccatgaagggctctgcggagatcatacctgtaatacccagaattaagaaaaggattagcaaaaccct

SEQ ID NO: 402094 - DNA, 638 bp, Cannabis indica
gacctattatattttttgtttttagaaagaacaagtttcagtaaagtaatgatatctctcttgatattgatctgtttttagagatttttgtatcgttggaaagcttatttgatgatctacaatttttatgaagaaactatttaccaattcggtgttcttctatgtcaaaaattatcatctttctgctgttattgtaatttgttttcttcatatttatagaaaaaagtactttcacttaaaatataataactctctcaattctaatccatttttaatgatctatatatggttttaaagcttattcgatttcccataagttttatgaagaaacgttttgtgaattcgaagtcatactatatcaaaaagttagttttcttcaatatcatgtgattcatttcttaaatcttgttcttgcgaatctatttttggtaaaattacaatatctctttgaatataattccaatttcaaatattttggtatcattggaaagggaatttaatttcctaaaactttgatgaagatgttatcttctagttctaaacctttcaatgtcaaaagtttatatttttgctaagtcgtgtaattcgttactccatattcctgctcagaaatagtttcagtaaaacaatcataactc

SEQ ID NO: 402095 - DNA, 577 bp, Cannabis indica
ggcccccaaactgggagcaaaacctgggcctcaaaacctaaatcgagaatcgagactagaccccagacaaaaacctggacctaggacccacctcaggacctgggatccgggactcgatgcttagacccgatccgtagtcggtgtcaggatttaggacatagactagaacccgaacccaaactcgaaatcaaaccaggactcggacacatacccagtccatgacccatactcgccaaccaaaaccaaaacttgaattggaaccagactaggatcttagaatgggactgggaccttgaccgagacctgaacctggaaacagaccaaacctcggaccctcaccgagactgaaacccacctccctcgaaacccaaatcaagacctgaacccaaactcggactgaaactagaatcgaaaccagaagcggatcgggactcaggagcaggaccaggttaaggaccaggacctggacccagacccaaaattgtaaccggactagtacccggactcggacacagaccgacccacggattgggtcccaaaattgaataaaaacctgaactaggactcgagacacgaa

SEQ ID NO: 402096 - DNA, 737 bp, Cannabis indica
atgttcctttagagtttcctcggaaaagtttttgggattaatagttaacacgaggggtattgaggcaaatcctagaaaaattaaggcattaatagacatggcatcaccgacaaagcctaaggaagtacaagccctgacaggaagaatggctgcacttaacaggttcatttcaaagtcaactgataagtgtgtgccgttcttcaacatattgcgagacaacaaaaagtttgagtggacaaaagagtgcgaaaaagcctttcagagcataaaaaggcatctagcaacgccttcagttttggcaaaaccaataattggagaaacactatttctctatttagccatctcggaagatgcgattagtgcagccatagtgcgagaagagggcaagtgccagcaacctatttactatgtaagtaaaaggttactaggggcagaatccagatatccccctctagaaaaacttgcattgtgcttagtccatgtgtctcgtaaactacagccatacttccacgctcaccccataaaagtgttaaccgatcagtccttaagaaaagttttatcgaaaccagatacttctaaaagattgataaaatagtcgattaaactggggcagttagacataacataccatcctcaaacatccatcaagggccaagctttggctgacttcttgatagaaggtataactccagaagaaattccacctaatcagtaagacgcgaaaacctggaagttat

SEQ ID NO: 402097 - DNA, 2061 bp, Cannabis indica
aattaaaataataatacccaccaataatatttcgacacgtggtatttgaattgggtttaacagatctgttaacttggagaccaacagacaaataaaaagtgtgaccttgaggactattgccgctattttcggaccttggggactaatcagcatcaacgtgaactttttggggacttttgccgcaaatttccctatttcttattgtgcggatgcaaaatatattatttcgcccatgaaatattattattttatgtcagcatcttttataagtgacccttcatgatagattaggaatattttctaaaagatattgttttaagtgatataagactcaatacaccaaatagaatactaagtaccaataatactttttagcaattctaaaatattggactgtagtgaaaaaagtacagtcagactaaaaaaaatataattatacgattataccaatggtagaacctcatttataatgtaattatatggttagactagtggtagtcagttttcttatccagtttgattttttttgcttttaaatgttaatattaacattggatattttcgtaatttacatatcttttattggattgagtgaactttgattgtaatttagtacattgctatgtgtggcgtgctgccccatgacacacccataaagaggtcattttgtaacatgagcatgctttagtgcttgattattagtcaagtcttgcaccaaacacttcattgggatggggagacttttgtcattagcttttctttttgtaattccattcacatatgtatggagagctaagattatatatgttcttagaaatcccttgaaatcccattacactctttagggggtgacttggtgacttatgaagcaccttatcactagcatgataggggcctagttgtatactcctttgccctatcaaagtcatataataataaaatgatatttatccatactttttgtgtatacttctatgttgcctaaatgatgactatttgttgtctttgttaggccattatgtgtcgtttgcctatatgtctacttgtaggttgtgtgagattggtccttggggatgaattatgtttgcttgctcatgcttcttatttgcactatacatgtgtgagacatgtatcatgcctaactattgaacttgtttgcatgcagatacgtttaggttgacttgctcgcttggtgtgccaccaagtgccacacgttcctcctacttaggagtgtccaaatagtcagcccgtgacattggtaccagagccaagagaagggaaagcttggtatcacatttatgatggtgagcaatgcatttctaatgtcgtttcgatcatctgtctagtttttcacaataacaaagaacgatgaagtcagagaagttaaattcccaactttttatttctcattttttactcactcgaaaataaagagttttaagtctctcatttatgtagaatagcaacatctccgaaaaccggtgaccagcttcgccgaaatacaaaaactaactaagtgatgtcaaaatatcacttagaaaccttaaagtaccgttagacgtttttacagttacccaatatttagtttgacgtcatatgtcaacttggatgctaggatgtcaacctgggcgatggaatgtcaacctgggcgctgaatgtcaaactggcgttgggtcatgaattgcctttagtaaaatagtcatatctcactcaattttgatcgatttgcgcgattaaacttgcgttttgaatctacttaaatgctctatcaagtcatgtttcacactccagacgtaattctgaagctatcatcgtcgaaattaaccctcaagagagttacaaaagtaagctttgggttacccgtagcgagacctatcgggctttgaaaatggccatcatcactaagagctaattttcaccgttagatcataatcaacgatcaaaatcatattaatttttctcctactttggtgggccttcttcacctacaaaaggagagctccataaactcatttttcatattccaaaaactacccacaaggttagagcatctctctctag

SEQ ID NO: 402098 - DNA, 690 bp, Cannabis indica
aaggtcataccaacaccctgcatgacaatcaggaggaactccgtactacgataaatctcgcgtttgaagagcagaggcgcatgttcgctgaatggagggacaaagagatggaaatgttaagggctcagcaagcagccattgatgattgaactcggcagaccaccgtgttgatatgaaaagcctatcaggctaccggacaacaacctgcaatcgtcattcccttgggcgagacagacgaagatccaacagtgaacacctctcaaactataaatggtcagtcgtccaatccccggtcacaggtcccacctttgggccaagtggtaggcgggcagaccttgtctaacaattcatcaggagaggttacacctaatacttacactcaagttaatggtgtcggctagcatattggccaaaccaaccagtcacagagacaaccgggtgtttctatatttaatcgattagggacagttcatgatctctaagatgatctgaacagaaggagagggttggacgaccagcatgacgctccagtcgttcagcccggagctcgcgctcaaagagatgctgacgtgattctggttggccaagaggccgaacaagttaatccagcggtgcaggcacaactagatgagctaaaatgtatgttccaaggcctggtcggtcagaggaataatgacctcgagttggacc

SEQ ID NO: 402099 - DNA, 583 bp, Cannabis indica
attcaaaaataataataaataaaaatcgatggagtcacctattagacttaagataaatttaataaattttatcatggtgataaacaaacatattattaagaaattaattaagacatttaattttttttttttttattcttttgaatattaacaacatgaatagatgagctgcctctcaattaaggtgatacaaaaaagttaaagaaaaatagtaaaaaagtaccatacgttctaatatcatttaaaaaaaactccataactacttgtaattaagatactatcattctgcaatagtggtaccacatttattctaataataataattatttactattttaaatagaaaattacattaatatgaaaaattaattgttacaggagaatttatatacaaaaaataataattgtttttagctacacatcagcatccaccaccgataagaaatatgcagagatagagtgagaataaagataaaaaattcataagagaaacatgaacggaagagaattcataccaatttccagtcctatgtgcatcctaccttctcaatttttttttatttttagtttgttataataaacg

SEQ ID NO: 402100 - DNA, 1381 bp, Cannabis indica
agttgttgactaatgactttataagagaggcaatctatccctcatggatatctaatcttgtccttgtcccaaaacaaaacgaaacttggagaacttgtatcgacttctcaaattttaacaaagcatgtctaaaggattgctttccactgccaaggatcgaccagttgaaggatacgactgctagacacgagctaatgacgttcatgggtgcatattctggatataaccatattaagatgcatgtccctgatcaagagcatacaagtttcgtaacagatatgggactttattgttataaagtaaagccttttggtttgaagaatgttggggcaacgtatcaatgactagtaaatgaaatgtttgaaaagtaaataggaaggaacatggaggtctgcatcgatgatatgatggtgaagtcggtaaaaagtgaagatcatacaaaagctttcacagagtgttttgagatactgaaaaagtacaaaatgaaactcaacccgaagaagtgttcctttggagtctcctcaggaatgtttctgggattcatagtcaacgtgaggggcattgaagtaaatcctgagaaaattaaggcattgatagaaatgccatcgcttatagaactgaaggaagtccaggtcttaacaggaagaatggcagctctaaaaaaattcatcttaaaatcaactgacaagtgtctaccattcttcagtgtgttgcaaggcaacaaaaagtttgaatggatagccgagtgcgaggaagccttcacaaacataaagaaacatctatcaacacctccagtattggccaaaccaataacttgagagacttaactcctctacttggctatctcgaagaatgcgattagtggagcattagtgcgagaagagagaaactactagcaaccagtttactatgttagtaagaggttactaggggcagaatcgagatatctccctcttaaaaaacttaccctatgcctaatccatgcatctcacaaattaaggccttacttctaggcacatccaataaaggtcttaactgaccaaccactaggacaagttttgtcaaaactagacgcttctagaaggttgataaaagggtctattgaactggggcagttcgacataaactatcactcaagaatatccatcaagggtcaggctttggtagatttccttataaaagggatagttccatatgaaaatccactcgaccagcgagacccagaaacttggaagttgtacgtggatggagtatctaatgaaaatggctcgggtgcaggggtgatactgatctcgccagaaaactttaagtttcactatgccctgagattccaatttgacacttcaaacaatgaggctgagtatgaagccttaatagctgg

SEQ ID NO: 402101 - DNA, 735 bp, Cannabis indica
attagttgagtctacaagatgattttattccaaacaatgtgggaccatgggcctatgtaaccaagctcctaataagtagattcaaaatttatcaatcgagtatattttccatcttattaattcctcctgattccactatagattctatttagcgagattttcagaaaacaaaatataagaaattagaactaaagaaataaataattcaaagagagaaattgaacaacacttagaattttttacgtagttggggcattagtgagtgttagtccacgagtcgatgttattatgtattttagctagaaaagcctttgggaatacaagcagtacatgttctttattttttcctgagtaaatattgcaagagaatttaacccttaatccgaagaaattattttgtatatatagtgtttacaagaattatacttggttttttgttcaaaaaaaaaaattatacttggtttcccttttccatctaatggggagtttacatgaaaaatatacaagttagggttgtattcgtgaggcccaacccatgaggtgataggtgtgctgactaggaaaattaaacatgatcaggctatcattactatgtcttataattgtgggtaattaattgtgaattaattacttgatctttattttgggtagtttccttttttaacttaatatgatcttttggctaagaaataaggaaatttaattctattatgaaatattagtattatgtaatat

SEQ ID NO: 402102 - DNA, 713 bp, Cannabis indica
attctcaaaatatatataccaaattaaaagtctcgaaatctaatgaatatatgattctgttcaaccacagtcgcatcaactctattccgatttcggtgtactgacatcgattcttccagttgacgaccacagagcccaaatcagtcgatgaaagctatggaatgttcagaaacaattttttcagcaccgagtacgtgtcatcgagtcgagtcgcacctttccaaccttcttggtagtctcccactattatctttggtagtctttgattccttattgcatcgccattaattcttatcagataagtcttttgcttttttttttaacgaatatttttgtgaatttttttatttaagtttagtaatatttttctctgtacgacttgtttattatagtttttattaacatttctggtattcttttttttttttttcaattggtgttcattgacagaaattgatacccaaggcctttttttgaatggataaagattttatttaacaagaacgttcatccattacaatagataataaatctgaaggagcattgagctcactaaagatacaacctgacaaaaaacaagactttctcgcaacacagtgcgcggccttgtttgcagatcgcttaacaaaagaaattaaaacattgtttaaagtagagatcatcagacgacaatcttgtactatcattccgaattgggagggcatttgaacctc

SEQ ID NO: 402103 - DNA, 621 bp, Cannabis indica
agagggtgaaccactataaatttcttatgttcatcttgtgttcagcttgctcgttttacgattttcttagatccgttgatgaaaaactgcgtcaacacagtatttaactcttgaatctaggtttctctcgtgtgtcctctcagaataaaattcgtgtcccactttttatagggatattttacatcaattggtttcccaaaactaataagcaataaaatgggaaaaatatttactttctataattacaatgagcaaaataaaaaactcggcatgttccctattcttccttaataatgtgtatccatcccatgaaatcaggaatgttatcgtatcttgcaagcatgaagatatatatgatatatctctgaaattgttcaactcgcatcctctacttggcttatgcgagttgcctacatgatagtgctggtcaggtgttctcgtacaccttactcaaatgtttagctctacttacctcgttcatccgatttctttgcacgattcgttgcgagtggagtcttccgtttaagtcacacaatctattccacgtgttacccagatagatgtcacgtcaccttgtgtaaaaatttggataacaactataaaaaaaataatcaaaaataa

SEQ ID NO: 402104 - DNA, 894 bp, Cannabis indica
ttttactaatgtaatagaccggacgttgtatattattttcctctttgatcagcacggcacttagagcatgctccgtgacagccaagcatatgacaagttcttcttcgtccagaggtttcgagagtacatgaggttttgcgatttgcatttttagctcttgaaaagctttttcacattcctctgtccattcaaattgcttgtttcctcgtaggacgttgaagaacggagcacacttgtctattgactttgaaacaaatctatttagtgcggcgatccgaccagtcaaactttgtacttccttggtttcaattcctcgagcgttgacaataaagcccagaaacttagctgagcttacttcaaaggagcactttaagggattgcgtttcatgttgtatttccttaggactttggagcattcgtcaatgtcatttatgtgccccccagccctcctggatttaaggagcatgtcatccacatatactgccatgtttcgtccgatctggtctttaaccatcttgtttaccaatctttggtatgtggctctagagtttttgacaccaaagggcatgacattataacaatataggcccaaatctgctcggaaatttgtatgttcttggtccggtggatgcatttttatttggttgtacctttattaagcatccatgaagctcaatatttcgttccttgctgttgcgtccaaaagctgattgattcttggaagtagaaagcagtctttggggcacgccttattgaggtctgtaaaatcaatacacactcgccattttttgttcggcttgggtacaagtacgggattggcaacccaagtcgggtagaaagattcaattatgaagttgttattttgtagcttctctacctcttccttcagggcta

SEQ ID NO: 402105 - DNA, 993 bp, Cannabis indica
cgaatctcacattcatggttccaatcccgggcaccagctgggaggctctgaatactgttaagcttttgctcaagctcttttatggccacctccaactttccgaactgggagcgattccagttaattagagccactctggtagcaccaaccttttgaaaacacgagcaggggcccaaccatgattaaccgatttccaggcatggtctactacaagcttacttcgaacatcacgggtccaaccttcttcaaatttaaaacatctcttgaatttgggttccaaaccccctgaaaggagacaaagcggcctatggtccgagttgctggtttggtcagagcagagaatagcctgtggaaatagattaatccaagccccattaactatgcctttatccagggcagatttcacatggtgcctccccggcctatggttatcccaagtcagtttgtccccttgtataggcatattgagaagtcctctactctcaataagattagaaatgatcggaatgaaaggatcccggcccgaagagccctctctttcagagtcactaagaacaaaattggtgtctcccaaaataagccagggcccgccaaacctatctcctatcttcataaactcagaccagaactttttctttgcgtgcaagtaggggggccataaacacacgagaggagccacggataagaggggggatccgaataaacaattcccgaaatatgattacacgaggaagaaatacattcaaaactaaaacccgatttccaagccaaaataatacctcccgcagtgccaatagaaggaacacaaatgttaaagtaaaagtgtaaggattttaggatacgtaccagaggattagcatccactttgatctcggaaaggaagacaaaatccggagaacgagagtggatcagggacttcagctcccaaactgtagaggtctgccctaaccctctacagttccaggcaatacctctcatgactcctgtggagga

SEQ ID NO: 402106 - DNA, 621 bp, Cannabis indica
ttttttggttagaaaggaacaaccgaattttttatgacaaagtgataggctgtaagatttggctaatatcaaattcgcattgtgggtacataatgtcaaacaccttagtgttacatacgtatttgggtatgagataactaagctctttctgttatgtattctcaatttacatacttgaagcctcgtggtaataaaatattaatggatcaagattcatgtttttttggaaagtaataaggctaagaatgtgatgatattggtatgcctatccaatttcaagtgtgcgtttacctgcaaagtctagttggacttggtgataggtgttagagagtcccacattgttaatgtgtggagagataatagactatataagaggaatgagctacttctctcattgccaattggttttaagatggaataccattcaccttatcccaaattctaacatggtatcagagcaaaaataaacaaaaaaaaatacccagaaattaaaaccgatcatcgttcccaaaagtagagcaaaaagagccacttgtgatcagtgatagtgagccaaaaagagccgcttgaattatctcttatcactttatattttctccataataacttaatcatctattt

SEQ ID NO: 402107 - DNA, 598 bp, Cannabis indica
ggataaaggtttcgtaaagacgtttgctagttgatgtgaactccagataggaacgaggcgaatggtggaattcttgattttgtctcgtacaaaatggcaatccaattcgatgtgtttcgttctttcgtgaaatgttgggttgttggcaatatgaattgttgactggttgtcacaatagaggaaagcaggatgtggttgtgggatttgaaagtcgtgaagtagatactgaagccaagtgacttcactggtagcagcggctaaagcacgatactctgcttcagcggagctcttcgatatagtgggctgcttctttgttttccaagatatgaggctgtcaccaaggaaaatacaatatcccgttgtggaacttcgagtaatggggcaagaagcccagtcaaaatctgagaaaccacgaagtgtgagagcagatgttgatgaataaagaacaccttgcccggattgcctttgagatatctgaggagatgatggacagcttgtaaatggggtgtccttggtgttgccatgaattgactgaggcagttcacagcaaaagtaatgtcgggtcttgagagtgtgagatagagcagttttcctatta

SEQ ID NO: 402108 - DNA, 499 bp, Cannabis indica
cctaagatagctagtgtttcactattggatttggagatccagtttttaatttttattttttaggattaatttatttagtgttcaaattaagaagattatttttgcaaaaataaaaaataaaaaataaataaagtatactaaagattatataaatacaactcgttcatgagaattgagaaacacaaaacaagacagcacaaaagtagtctagcttaaataataaatactacaaaatatattttttttttgcctagataaataattttggtacttacgacattaataaaacaaaggtttttttttaaaatagaaattctcgttaaccaacattaaaactccatcatttagatattaatttacaaaattttgctacttacaaacttaataatttagacattttcatcattaaaaaaaataatttagatattaagtttgtcaatcataataatttaaatattttcgatgctaaaaaaaaaatttaaatatatttaataaatgt

SEQ ID NO: 402109 - DNA, 627 bp, Cannabis indica
gtcacaaatttttgttgttgtgactaaaatattatcactattttgtagtgaaaaattatgcaacatatattattaaggggttttttttatttttacacttcaaaatagttttttttaatttgcatttttacagaattctatataaaaatccctagcgctgcaacctaaatcgtaacaaaaaatcgtatagcgacctacatagaaactaccggagaaataactttagaaacccaaaccgtaaatttgaaaaaaaaaaaagttaaaaaaacaagtaattcccctattattaatatggatgaaatacttagatcaaatgaatctaatttggaatatatatatatatatataaatttattaaaaattaatattattacacatatatggttttcaatttatatttatataaattaatatgaaatcatattatatatattttatgcaaaattataaaattctaataatacacctaattcattacaaaaaactgctatttttagtgataattttttagttcactaacgtaatttttttagttgtactaaatgtgatttttattcacaacaaaatgttacttgtgtctaaaacatagtatttagttacaagttctaatttagttttagtcacaac

SEQ ID NO: 402110 - DNA, 1196 bp, Cannabis indica
gtcctagaggcagggcacgcagctggggtgatgtttacctgccaaaggcttcccaagattgggaaaataggtttgctgaaatgcaagccagaattaatgaacaagatgaagagatccgatgcatgagacagcagggtgcacccgcaatccctattctagaaatgcaggttgctcctgcccctgctgtgcaggcaggaccagtcattgcagtaaatcgaatggaaccattgtatgaaaggttccgtaagcaggcacctccagtgtttctgggaggtccgaatgttatgaaagccaagcagtggctaacagtgactacaagaattctgaattatatgggcatcaccggtaatgacagagtggcctgtgccacattccagttcgaagaagacgctctagtgtggtgggacatggtgtcactgactcatgatgttactacaatgacctgggaaaagttccaagaactgtttagtacgaaatactataatgaggcagtcagaagcgcgaaaaggaaaaaattcacttagctgactcagaaataaaatatgagtgttattgaatacacaactcagtttgaccgcttggcaagattggctttgggaattgtgccaactgattttagcaagaaagagaaatacctaaatgggttgaactcgaagataagacatgacctaatgattactactgatgacaacaccacctatgatgatatggtgggtaaggcactgcgagctgagggcgcagtggagtgcactcaggagtctcaagggactcaggttgttggtggggcttgtactcctcctacatcaggctttagtaggggaggtagtggctcaaccactgactagaaaagaaagccacctgctgcatctggtggatcaggtcagaacaagaggttccgagggaaccagggtcgaggcaattgttagggtagctccgaaacccaatatacttacctagaatgccctagttgtaaaaggcatcatctgggagagtgtagaaggtaggggtgcttccagtgtggtatgctaggacattataaaagggatagcccccaactcaagaaggaagaacagaagactggagcgacacccgcaccagcaagggtgttcgtattaactcaggctgatgcaaaagctagcccctcaaaggtaacaggtcagttctcggtcaacaactcatacttctttatgttattt

SEQ ID NO: 402111 - DNA, 521 bp, Cannabis indica
aagaagcttaaaaagctgaagaaaattttgaagatgatggagatgaaagtaataggtttagaaaaatgtttttttacaaaaaaaaaaaactgactcaaaaaaagtcaaaacaaccataaaaatactaaaaaatatacatattataaaaaaataaaaatacaaaatacaccacagcaacaacaacaataaataattaaaatgagcagaagacttataatagagaaaaaaaaaacccaaaatatctatagcaaaaaaggtaaaaaaaaactaaaaaatgaaaaataacataaataccttcgacactttgggtatctcaaaatattcatcatcaagttcaaaatcaaagtctgaatcttcaatgatcggttcaaaagttttaattttctcttttttagagaataaacaactgatttccttttcgaagctattaaagatgtagggctatgggatttttttgaaatatttcttacccattgctaatttactaacaaaaacaagagaaacaagaagaagaagaagaa

SEQ ID NO: 402112 - DNA, 739 bp, Cannabis indica
tataaaagtggaagcagaatttgaaaaaaaaaaagtttttatctaataagaaccataaactcaaggagctcaacataaaatatatagatttaaaatctagactattaaagaaagatcatacctcttgaagcctaccatggtacccttatttcttttagtacaattaacgatcatccaatctaagaacttccaatgaagaatccacaccttgatctttcaagccagtctcaacactcaagaatagagtgagctattagatcttatttggatgaattaatttaagtattacagtatgtactcaactcatgagacactgcaattgagttagaattaataatctcacacacacataaattggtatatgcgtgtacatatatatatatagagagaggatttttgtcaacttagttgccttctaattgtctgttaatttatgataatatatatcatatatatagtgctataaataaagtattatatttactctaaaataattctattatgatataatactaatgattgtttattattattattattattacattgatattttttgatattttaattttttcctactataactttatttagttataatctctcaattaggatataattttcttggtcccaactctcaagtgtattcttggatagaagttctactatagtagatttaaagagatcttcaaaaatatactctgtaacaccctaactaacataggcgtattacgtgatt

SEQ ID NO: 402113 - DNA, 905 bp, Cannabis indica
gaaggaaagactaatgtattttcgaaattggtaactctcacgtacatcaagagtcaatcagtgtaagttttttaaaaattaattaatttaaaatacaaaaaaccaaccggttacaattcccccccccctaactacccctactttaaccccagcccttagatcatgccccaattcaatccaacggctacagtacaatcagggattatattccatattttggcataacgggacaaaatccactccctatatatatgtttttatatagtttacatttacttgtatctttgagttttgagttgtaactcttttcctttatttgtattttgtgctttgggattggaactctttatttaatgtattgtccttctaatattttgtttagagttgtaattgtcttagtcttttattcatcttattttattcttccattgtaatctctctattatttctaacaatcaagaagattattttttgttttcaatggaaggagaaactatcaagatgatgaaccaagacttggtgagattggaccgctttgatggcaccaatttcactaggtggcaagacaaggtgaggttcctcctaaccacactcaagattgcctatattcttgagtccaccttggagcccttatccgcacctaccaacaaggataccgatgaggtcaaggaacaaaagaagaagaaagaagatggcaatcttctatgtagaggacacatcttcaactcactctcggataggctttatgacctatacaacgacactaaggatgccaaagaaatttgggatcaccttgaaaagaaattcaaggccgaggaggaaggtaccaagaaaatttttaatttactcaatattttgtatttaaaaatttcttgatggtaaaacctcttgtacctcaaaattca

SEQ ID NO: 402114 - DNA, 844 bp, Cannabis indica
ttattagtaataacttaataaggtaaacggtcaaactacggcccgcttaactgttttcacacaatttctttcttcattttattttctttgctttttctacggagcttacacgttatttaattattttattggtaaaatatgataaaacttccatacaattacaatcatggaagtaaatttatcaaacaaaaaaatcatggaagtaatttaatttattacaattaatctaaaacacgcaaatgaaaaaaatattggcaaattattatgtgcaaattcaaagattgaatagtaatctctgacaaaaatagattaaataatattctaaaaaattaatgagtatattttctattttggatcattaaattctaatattttctattttttattttggtcttgttcttacattttttttaaaaaaaaaatatatgtcataactagactttttattttgtcaaattataattaaaataatcaattaaatctaagctaatcaaaatttattaaaaaaaatatgacttaatgatcaaaagaatttcaaatataataaaacagtcttattttgataaattcattaattaaacaaaaattaaaatcctaaccaatacataaataaatatttatatgtatattgctagaaaataaatatttttaattgaaaatgatttgaaacaaatttcaaacaaaaatttcttaacccctgtatttttattataattaaaacctaaaaatttcttcttcttctaataagctatacctttaattttgcaaaaatggaaatttaaagacaaaaataaataaataatttattcattatttcgttgctaatataattatttgaattaat

SEQ ID NO: 402115 - DNA, 755 bp, Cannabis indica
atatatacatagttaacgtagtttttcattactttttcttataatttttttaaaggatattcttattattaattatttgaaaaattgtagcaaaaattttcaaaaagtttactttgatgacagataaatctaccaactttaaaaaatagcggtaatagttttcaagtttcgaaatttttgtaagttctgttaggctatttttagcctaagtttcgggtcgcaagaataagtttttctctcaaatattatcgtcttttggagcggttttacgctttgatttttttttatttcaggttcccggtgcatttgagtttaaattcagtcaattaacggaaagacgggacaaactggtggaaaatcggctgaagctgttaaaattggatcagtagtcgcgaccagcgtatggcctagttgcgacccttttatctggtcgcgactatggtcgcaactagaagattttggcagaaactctgattttcgagttgtgcctgtggtcgcgaccagcctttaagtgggtcgcgaccaggcacggaaaatgagattttttgacctaattttgatctttttccaattggaggcataaccctaattcctatataagggactcgactcagattgccaaaggcatcagaaatcggcccgtaaagtgaatgaaggaggagaggaaagcgagtcttaaagatccgaagcgaaatcaccagtctagtatctttctttcacttctcattttttctttatgtcctattttgtttcag

SEQ ID NO: 402116 - DNA, 649 bp, Cannabis indica
tgctttgagccaccatatgaaagtattaaaaaaaaacattattgacatttgaaggaggctctaacccattggaggggaaggaacgacaaagtattgtagatcccatattggatatatgaaactcaataatagacaactgacaaatgacttgatagagctagaaatgaaggatcatgacatcgcacacgatatggattggctatccattcatcaattgctaaaagtatttagtcgcttttggcaacaaaggccagagacaagtatacattcataggagttaagatagccttatgaacttctttaatctcatccttaaagactacctagataagaaaggcatggtgtcaagcattgttggccaatctaatgaaccaagtagtggagacacggttaacaaacatccacgcagtctgataatcccaaaggtctttctaaaagatctaccagggataccctcagacagtgatgtggagttcataatcaagttagctctaagagtgcttaaattttgaaggctccatacaaaatggcaatttacgagctgtagaaactcaaagtatagctacaagatctcctagacaaggggatcattagaccaagttactcaccttggggtgctccagtattcttcatcaagaagaaagatgga

SEQ ID NO: 402117 - DNA, 575 bp, Cannabis indica
ctcaatcatagattggaagactgtgaaggatcaaaacttgaagaagaaggacattcgggctcagatcttgattatactctgctacagaaaggaatcaagggttagagatctgagtggaaggagacattaattccgctgcatcaatgtaaggttctcttaactttatatgtgtttaatttatcgttttagaaagttcatatttagggtgtttaaacaacatacttgtgagtagatctaagatcctggtaaaataatttccaacagagacctctacagaaataaaaataaaaaaattataaatttacaaatgtatattatagcaaagaaaaattagaaattgaagaattattatacaaaatagaaatttaaaaaaaaataataaatctatataaaaaaaaaaaaacaaccttatcatattaaaaatacatactatactatgaagtactatataagtaaattaaaataaaaaaaataattgaatccaactcctactattatacaactaaattaaactggtatatattatatatatatataattttttataggaatttttacacaaaatgactattttg

SEQ ID NO: 402118 - DNA, 507 bp, Cannabis indica
aaaaaaagcgttcttagattaataaatatcagttagacctcatgatcattatattacaagtaagaaggaatggaatcaattggaataacttcaaacctctggtggaacaagttctattttaatttatgtcttagttgattttttatttaagtcatttcagaaaatggttcttgaaatatttatttcaaaatcaatttttgatttaattgattcaatgagctggtttttaatttagtaattttgggaactaatttttatttggttaaattaaggaactatttttttttttaattataaccggtttatagttattgtgtgttattttatttatttttgaagaaaagtgttagattaataaatatcaattagacctcatggtcattatataacaagtaagaaggaatagaattaactggaataaccccaaacctctggtggaacaagttctattttaattgggaattttgattttatatacttaaaaaattaaaaaattttattattaaa

SEQ ID NO: 402119 - DNA, 548 bp, Cannabis indica
gtttcctccattttcgaaaaccgaaaaactgaaaaaaacagagtaatttcactttaaaaacacaactacagatcagcaataacaacaacaacaaaatcattcaagtcaaaaaagggtttctacttaaaactctcccaaaaaaacaaaattaaaaaaaaacaacaacaaaccaaaccaaaccaaacaatcataatcacattctaatgaaatagaacaaaaacaatgtagtgagaaaaaaaaaaaccaattacttattaaaccccaaataagataaacaatcaaaatatacaaaaaacaatgtattgatcaacaatgtagaacaagaaaaatcatccaaacagcattatgaaatcattaatcagtacccaaatcaaaaacacataaaaaattcaccatgatcatcatcatcatcatcatcatcatcatcatcattatcatcatcaaaaacaaagaaaacatattattttcaataaataaatacatgaaacaaaccctttatcaaaaggatcatcgaaagcccaattcaaataaaggatcattcatacata

SEQ ID NO: 402120 - DNA, 1092 bp, Cannabis indica
tttacttttaatctcttacgaaacaagaaacccatgattaaattaatcttttttttctattgtccaattcaaagttttattcattgacgcattctatcgaatacctgacaggcgcacacacgttcggacgagctcaatgccgaaccttcgtgaaccgtctatacaacttcaacggaacagggaatccagacccatcattgaactcaacctacttggctactctgcagcaaacatgtccccaaaacggcagcggaaccactctgacggacctcgatccaagcagtgccgataacttcgacaacaactacttcaacaatttgcagaataacagggggcttcttcagtcggaccaggagcttttttcgacatcgggagcctccacggtctccattgtcaacaacttcatcaccaaccagactgccttctttgtgagcttcgctcagtcaatgattaatatggggaacattagtcccttgacgggaagcaatggcgaagttagactcgactgtaaaaaagttaacggaagttaaaaataaataatgataagagttgtaagcctttgttcgtcaaattttataaaagataatgataatcgtgctttaattaataattctcttaaacaaaaaagtaacctgtttaatttaattatatcttatgctaaaatttaatatgtattaaatttaatacccttttttaaaatgtaagactatctttaatgggagatgtaaaaattaatctatatttgacatgaaatatagttttgtgatagagcattgctattgggcactagtagtgcctataccacccttaagacgtgtcagcttgcgattagctagcgatactccctaaaagctattatattaaactatatgtgactcgatactaaattagaccaataacgatattgacacgtaggagggtgcttggtaccactggtgccttttagcatttctctttgtgagcattgctattgggcactagtggtacctaacacccttaagacgtgtcagctttcgattggctagcgatactccctaaaagctattatattaaactatatgggacccgatactaaattagaccaataacgat

SEQ ID NO: 402121 - DNA, 578 bp, Cannabis indica
ttttttattatttatgtatttataaaaaattcatttattttagttatatatatatatttatatttatacgttgaaacttcaaacacattttacccatggaagaggatagtgtgtccaattctctctctaacatatagtattaagacatgtgtcaatataattaatgtgctataaaatattgtttgatggaaataaatttaaataactttgaaaggataaaaaaaccttaaatgcatcaaaatatttagagtaaatattattttggaccctgtgttctacaaaatttatcaattagattctttattttgttaaatgataaaatagaccctatattttccaaaatagtaaaaatagaaccctgagctcaatttttaatataatcaactttaagaaaatttctaatacgaacagatacataaaatataatcagttttattgtattgtattgtattgaattgtattttatgcaatatttttatgtaaaactatatgtggtattaacttttatggacacttaaatatataatattttagtataaattaatgtttaacatagtattatataaaaatatgatata

SEQ ID NO: 402122 - DNA, 933 bp, Cannabis indica
gtactatggcatttagtttggcatagctgtactgtgggaaaaagcaacttttgctgtgctgtgaaaaaaaacaagctgtagcaaaactgtgtaaaaaaatcttagttgagtgtttggtaaattataaattttaaagtactgtgagctgttaagatctattataataataatgataatgttataatctaatttattgtaatcacaaatatgtaaaaactttttttatataatattttatctcctatatattgtttatttttttaaaatataaatttatatgcatttgataaaaataatctatagtactttttaattatgttttatcaaatgtaaaaaaaaaaaattagaaactcaagtatataaaaaaaaatttaggttaatgttgtttgttaatatttttttaatatataataaatgagtaaatatggttttagtacaaaaaaaatttattatagtctttttaattaaaacaagttttttttaaaaagttgggttagttttaacttttagctgtggattctacctaaaaaaatttttaaaaaattatttttttaattgcttaccaaacacaattttatcgtagctttttaaactttttaaaaaaattatgccaaacagaccgtaagtaccttaattgacaagtagtaagtaagaaatatcatttactaaaaagtaaaaacaattatatatattattaaaaaataaaataattatatataaaaataataaaaaaaacaataaaaaaaaaaaacaaaaacaaaaaaagtcttttatttttgtttttatacaacaatcatttttcaataatgttatatgataaaaaacggtacgtagatacagcaatcatcatcaaaagattttcacgacatacaaatcaaaatcattaatctatattatttatatatataaaacactcggtttggtctccaattt

SEQ ID NO: 402123 - DNA, 657 bp, Cannabis indica
aattaaaaaataaaaaggagaaagaaatctacattacacacagtgatgtagagcacaacaaacaagacaacactattaacttatatggccgtatatgcgaaaaccaaaataaaaattaaatgattcatatatatattaataatttgtccgaccataatttcgtaaatagtttaaatcttacgtatataaatgtaaaaactttgaaattattcatgtatgttatattacctgattgtattttattttttattttgggaagatgattcaattttttttagatgtaaagtgagaaattcgttaagaaaatgctaaaaactatccaaggaattaaaacatgataaaagccactcgcaagatcaagacgcatacatagtggtagactaggccactacactttggcactatcaatgaatatagctagtttagcaagggaatgagctatggtattagctgatgttgtaatttcacaacatagaactcaaccaagaatcaatacataacaagttaaaatcaatccatacacaatcaactaatgaataatcaaaccaaaaatcaaaaacagagattaaatgcagaaaaatatagtaaaagagacaaaatatgtttatacagatttggccaaacaaaggacctacttgaggttactcccctgagttt

SEQ ID NO: 402124 - DNA, 1057 bp, Cannabis indica
ttcatgccttgtgtttctgatgccgttttctaccatgctgattttgttctgtgcagacatgtctcggcagatgatcgatgctctgaggaagagaataggcggaagctctagcgcctctcctccggccaagaagtcgtaagggcggtgaggggtcctcggaaaagagaccctttggggaggtaattgacctttccgaggagctgactgctgcaaacccttctacccccaagtctgccaagtccaaggaatctagacctccaacggttgggtctaaactggtcaagagtactcctgagtgggtgcaggcaccaactccacctttgtccgtgcttccagaggccaaaaagggcaaggagatgctggcccactatatgaaccggctggttcccgaggtcagtgagcaactggctggtgctgatagtgactcatctctggatgtgttggtgggcggagtcctgaaggagttcaccagggtaagtcttttttgatacttccctttaactttccacacttagctccatatgctgaattttttcctttgtgcaggctggtctgaagttggcctacacttactcccgggctaagtctgttgcttccaagagcgcggctctgtccgacaccttgaaggcggaggcggacttggccaaaaaggaagctgaggaggccagggcggaagttggagctgttcggttggagttgggtgaggccaacaagaagctgttcgctgccgagaagaagatctccgtgctgacaaaggatctcgaagctgctgatcgctttgaggagaccatcgagatcttatctgctgaagtaaacagtcttcaggatgagaggacttctctgcgagcagttcttcttcggatgaaggaggagaaggacgccaaggtgggggagcttacggccgaggtggacaggttgaaggagaaggtcaatgccttggagacagccggtctggagctcttctttgatttttggaaggctaatccccgggccaaatttactacttgggtgaggctaaggatatgtaccttgagtactgcgcgacccaagtagctta

SEQ ID NO: 402125 - DNA, 528 bp, Cannabis indica
  modified_base (215)..(215): a, c, t, g, unknown or other
cttattttttttttttttgttttgttgtttacagtataaagaaaaaaaaataagaaacaaaatagtataaagttaatttctgtctcgtgtgatagtatttttattaaagaattgaaccaaaagtacaatacttttattaagttaccccactttataattaggttggacaaaagaaaattaaagaacatttatgagattgaagaattgtaaaaaanaaaaaaaaaaaaaaaatctgatcaacgaataaatataaagtaaaaaaaaactcgatgtataatttatttaaaaaaaatcgatgtataatttattaaaaaaaaaatcattattaaaataacataaaaatgaacgtgatgactgatgattagccgtagcagagctacaatatttttatcaaagtaagtttcaataatattatagaacattaatttttaagaaaataaataaaaagatgtgaattgaacccgacgtgaatcgaacacgcaaccttctgatctggagtcagacgcgctaccattgcgccacggatcc

SEQ ID NO: 402126 - DNA, 833 bp, Cannabis indica
gtttagcttgaatgtacaattttgagttgtaggggttgttagggtttgaatgagttaaagtttgatttttatgttccatttgagtttggtttgagttcttgctgctggtttggggatttggtgtgctggatgcacaagtttgagtttgaaaactcaagcttggttcacccatggcatgttctaattctgtgtgaatttttgaattctgttgcttggaatatgttgtgggaggtcaatatatgtgttctggaatttttggtgaggtttgaacacggtttatgcaggttttggattgtttggggaaaacctagtgcaaaccagttaaccaatttgccaggtcctataaaaccagttaaccggttctaggataggtttcccgaacaatccatttcgtcgattcgtgtccattttagagccttagttgggtgattccttgttacatatggtattgtagtttcagttgtctatggcagaagaacatgtagttgaaggttgggtttcccagattagggtttggggcgtgtcgtttacccgtttttgttatgtgatgaaggcatccatcgagcgtaaagttttcccttcaggtcggcccactcacttgaattcggaaacgaggtaagaatagcgtagaacatatgatatatatatctgcgaatgtatgcatgtgtgaaatatatatatatatatgcatgcttgttatgctctatacactaccaacacttgtgcggaagtgatacagagtgcattggtatagtgtacaatatttaagagtacgttatggtgttaccagcacaagtacgggaaagtacaatgtgtgtggtatagcacttagt

SEQ ID NO: 402127 - DNA, 942 bp, Cannabis indica
tgcccatcgaggctgggagtgtttgctcggagcattcttcgtagtacgctacgacctattggtgtcaccttcgatccttcctacccaaggactgggatttgatcaataatggaaacttgaacgacatgctcgagaggagtgtcgcctttggcctctcagtaaatttctttatccttctcggtttgcttttccctttaacaaccctcaaaaacactcatgcatttttgtttatttaattttagcaaaccttcatctcctttgtcacccaatccttgggtctagacaggatcaagcaacaggagggcaagatctaaaaggtgattggtcagcgcgaggtcgtgtctagggaatggaatggggctcagtcggagatctctcacctaaacaaagaggacaaggaggtaaagagggccaacaaagcttaacttgaagcagctcagaaagaggccaaggacaagtccgagctgtgccagaaactccaggaagaactcaacggagtcactgcaaagctcgagggggtcgaggccaacactaaggagcgatgcaacgccattgccaaatgctccatctaccgagcctggatggcgaatgaagaaatgcatttgagtttcctgggaaagggcctggaggaagtccttgcctactgcgagcaagctaaaaaggcaaaagtggaagccgatgcagcgagagaagaggaagaggaaccatccaagtctcctactgtgtaggcttggtttttaattatatttactcttttttttaggaaaatggccatatggccgagacaatggttttctctttgtggctctttttgtaaagaaaaatttgcgtcgttggatggccaacttccctttttatctcaactttctaattattacctcgtattatgcgttggaactcaatatatttgcctgcttgcatttttattcacaatttaaacaa

SEQ ID NO: 402128 - DNA, 681 bp, Cannabis indica
atacgccaacatcgctaatcatcactaaattttatccataacttcagatttggtctatcattgtaaatatattgctaaatatcgcaaaaagagaaaatgcaaataatttaaaatctaatttttgggtaataaattaaggaaatacaaacaccaatgtatagatctgttaaaaataaactacatacgtatagtttggaagttacccaaacttagatcaagaaaatgagatgtgcgcgatggtgagtggagcgcaatggtgagtgtcacgggctcaccttttcaggcagcggaacacccgtgcggcaccttgaaaaggtgagcccgtgacagttggtatcagagccaagttcatctcagtgggaggtgaacctggttggcctatcctagagaggatgtaggcgtgtggacggatcgagatggtcctaatgttggaacaagacgtcgttgagccagttagccttttaaagaggatcagtaggctgagatggagttaagacttggttgcttctcttcatgggaatactggacatcctaaagaggagacatggatggttgcttcgagtcaagttcagggatgctagaaagacaactaccacgtgaaactgtagagaggcgcaacagaatgtttgaaactcgttggcataggacaaggttgaggggatagtccatgttgtatgcttg

SEQ ID NO: 402129 - DNA, 1050 bp, Cannabis indica
gagcgacggaatcctcacagccgaccatacgagagacaatgacgcagaatctgactcttcatcttcgcatcggtcgtacaccaaacagatacacaaggtccggctcttagagacgcagcagggaggacactatcaagtacatcgaggtgatctacgtgatcacctcaacgcaattttcaaagcgcgctctcgcgaccccccataacgaggaaacaccccgtgatccccttgtgggcgatcaaggtgtaaatactcacactaacccgcctagcacaccgatagcgactactggggtcactatcccagcaaacctcgccgcagtagtcgcgactcctgcagtcgcaacagtcccgactcctgtggctggaggaatcgatcaaagcatgcttctgcaagctttgaaaatgctcgagcagcagagaaagcccatatataagctgcatgggacctctcctttcactacggaagtgcgacaagctcaacttcccaagggatttcgactatccaaatccctaaaatataaaggtacctctaatcccatagattaccttgaaaaatttaatactataatggaagtggatcaggtaccacagcttgcaaaatgccgcattctcgcggcaacgctcgaggaaaacgcccacgattggtttacccaattgcctgaggcctcgatatcgacatgggaaacctttgtcgacttattcctcacgcactttcaggccacgatgacctataggcctccttatacaactcttgccaacatcaaacaagagcccggtgagtccttacaagactattttaaacggtttaatgcagaagtaacaaaagtcgagaaggctcctgagtcttcgcttgtttgtatgttgataaaaggtattttgccgaggaccaatttctggaaggagttacaagctcgaaggccagaatcgctagtcgaattcttcgctatggccgaaccccataaaagaattgagaattctctggcagagttggagaagggcaaggataagcgtaaatcaccagtaccgtgatcaagatctcgcagtcccc

SEQ ID NO: 402130 - DNA, 500 bp, Cannabis indica
ttttttggcaatttaggtgtcaactttttttatttatggtttgatttccttgtgcaattaaaccaattttatcaccttaatattgtgtatttattgctcttttctatcaaaggaaagaatcagttttcagctgtccattttcttgttctggaaacttcttgtaagagaagaaattctcttatgaaaagttagttttatatggaaactttgaccattgctatttctctttaatgtggttgattgtgtcttgataaaattagatcaagcacattgtttttggtatctatcaagtccatgttcttgatcagacaacgttttggcaagttttcttttatggtctggtttgctgctgtagaacctgatactgatgctgcaaaataagattttcttttaggaaagtatgtacagctgtggaatcaaattctgtggttgtttctatggttcctatgttctataaatagaacctacagagcagccaatcggttaactcttctagcttt

SEQ ID NO: 402131 - DNA, 568 bp, Cannabis indica
gcctactgcgaggaggccaagaaggtagacagggaagttaaggcagcagcaactgcagaagaagaagaagaagaagaagaagaagaaccatccaagtctcctaccatttaggcttggtttttatgtattcgtttttttatctaggaaagtggccctaaggccgagacaatagtttgccccttgtggcacttttgtaaagataaatttgcaaggttagatggcaaacttttcttttgaatgcttcttacttttatattttaacttaatctatctgcttgtttgtattttcattcacaactcaaacaattatattttgatcaaaaatactttaagcatttccattgctcgtattttcctatgatattatttaagtagttagtgatctactatgtgcgctagtagttattatctgctatgcttttgatttgtgagcagttatcgattctgcttcgcataaacagttgtaatctattttaagcaaacttaaatacacttttaatgattcatcactttgtatatttttgattgctcatatgaatagttaggccttctattcatatattaggtt

SEQ ID NO: 402132 - DNA, 423 bp, Cannabis indica
atttaattaaaatgtatgaaacctgattataaattagaccaataatagaacattattttttgcagtagttgtgttggttatgtgagttgagttggaatgagtagaattaaaaggaatataaaatccttaacattatcactattttaatgtaaaaaataaaaccacttaaaacacgcaaactacttaataattaaaatttattttatcaaacatataaatcctaaaccaaacgtttccatccttagagcatctccaaaaaaaatattaaatttggtgttacactatcactaaatttagcgtcaaaaagtatttctactccaaccacaacatcaaaaattacactaaaaaaatattctttattattatattaattttttattaaaataaaaaattaaaattaatatcatattaattaataaaaat

SEQ ID NO: 402133 - DNA, 1073 bp, Cannabis indica
aaaccaaacagggaggaaaataatgaaacaggacagataatggattagagttctgctctgatgagttcactaggttttgtcaacttgaaggaattgatagacacaagactgttgtgaagaatccacaacagaatggacttccagaaaggatgaataggactctattagaaagagtgagatgcatgctcaagggtgctggacttgacaagaagttctggggtgaagcattgaagactgctttctatttgataaatagatgtccttcaacagccctcaaattcaaaacatcacaagaagtttggactggacatgtcccaactgttgatcacgtcaaggtgtttggttgcacaacctttgcacacaccagacaagataaactagagccaagggctctcaagtgtttgttccttggttaccctaaaggggtaaaaggatacaaattttggtgcttagaagagagtcatagaaagtgtataattagtagagatgttgtgttcaaggagcatgagatggctatgaaaacaaatgcaactaacaacaaagaaactgacaaagagatgactggtctagaaatgctaaatagtagagaagaagcaagtggttcagatcaggtggatattcaagggcactcacattcagagattgatgaacaagtaactgaagaagaaaacttaccaactgattcacaagactacctactggttagagacacagaaagaaggcagattaagccacctgaaaggtttggctttgctgattgcacaacttttgctcttgcatcagcagaagagattgacaccacagtatctagtacatatcaggaagcaatcaactcaagaaacaagaagaaatggcttactgcaattaatgaagaaatttgtgacaagaccaacagggcagaaattgataggctgcaaatggatttttagggaaaaggaaggattgccaggcgaagaaatcaggtttaaagctaggctagttgcaaagggattcaatcaaagagaaggtgttgatttcaatgacattttctcttctgtggttagaaaaacatctatatgttggaaatattttac

SEQ ID NO: 402134 - DNA, 657 bp, Cannabis indica
ttataggaatgtaggttggcagtatttacatttaaatttgaattacataattgttttcacgaaatgtggactttaatcacgttccatttaaacacgtgtagataacacttgaaaaccgcataatcgtcatcactcctaacttctaggcgattgatgctgacgtggatagaaacatcttgctagaggcatcctgctttatacatagatgaccaataatgacgtggtttattcatataccttccagctatggcatgagcactagtgtactgaacaaatttaagaactgctctttgaccacaaggcctcgtagactggaaaatcatgtcctacatgctcccaagttgttgcacttagttattataacgtggattatacactaagtgtttcaacagctggttcatctcgtcaatacttccgtatatgtagcaaggtaggtgtctcgctatgtattattcgtagttccctcgagattatgccttctgaggcaagatggtctctcgttaatatatgaattgatagtttgtgtatccttatctcgcctaagactataacagtcagcgagttatgaatatactctattaattctatatttaatgagttattctattttttatttaatgatttaattattattattatatctggtgcttcatattc

SEQ ID NO: 402135 - DNA, 938 bp, Cannabis indica
gggggtctgagtctagtacgaaatactaaaatattagaaaattaaaaaaaatttaaaaaaaaaataataaaagtgtacttttttttagttttaaaaaaaaagtgaaaaagtgaaaatagttttatagaatatatttttgaaaaatactttcactttttttttttttaaaattaaactcttattaataagaactagcgtttaatacatatacaaaaagaaaagatggataatcatcaatcataactaattcaccatccaccctaagtgcatacacaactaattcataagaaactgacatgaactagggatgccttaggaaaactggaaagcaaactagcaaaaaaaactagctcattacaaaagggagagcgctattgaaaaacataaaccaaagctacacaatcagactccacagaacaaagaggaagaacaacgtgtgagaccaatccagaactaccaataacgctaattcttttgcttcaatgacttggagtaaccaataagtttacatcttctccaaatatctgtacacttaaaaatataaatacacaactaaacacataacgcatcaaaaatacactaacaaactgaggaattgtgagaatacttaatcactctcctttatttacaaaacaataaaatatgatgaaaatgatagttttgaaaaaaaaaaaatcatctaaagtaagggtgtacgtcgatcaatttggtcggtttacgttacattttatttaactcaatgtaaagatcgggttataaaaaatctaagtgcgactcgctcaaattaagaaaaaaaaaaattaacctggccaatgaattggtcaggttaacccgtccaaacaggcccgacccttggcattaggcgggctaggcctgtgcctagggcccacccagcccaggggcccaaatttttttttttacctcttttaaaattatac

SEQ ID NO: 402136 - DNA, 908 bp, Cannabis indica
atatatttttggaattttattttggtattatataaatagttgagaaatctgaaatttatttaagttatgtgtgtggtgaaatgacaagtttgccctagttgtatgcttatgtgatttattggccctaggggtatttcgatcatttgaccaaaattactattattagcaatattgaatatgtgtaaaatgaaaaacacaattcctgatttttctagcccataaccgaacctctctctctcactctccatttctcactttcttgatcttcctcaagttggattttggtggtttaagcttggattttgggtttgttgatgctagttatgttggtgagcttgaggtagttattccactttcttaattttattttcaaaaataatgaatacataaacaaaaatatttttaaaaataccacaaatattagttttgtctattttattaaatatgtcaataaaagattttacagaagggtagaatagtaaatttatccctactcgaagtaaatcatctatagaggatctttaattatttggattgcaataatagataattcatattgtatctatatttggaacaattagagcattctatgtaatcatgagtacaattccgaatctatagtggagttaggagaaattaataagttaaaaaatttacttggtaaatttcagatctacttctgaggagcttggttacaatggcccatagtctccacattgtctgggataatattgtcttgtagactcaattattggttttaattaatcaaatagaattctaaataagactatgtcttgttcatgaattttcactgttgtgaaaattatattgctttataattgcgcaagtgtacacaatcacaaacaagtaatacaatgataagtaaatcaaagttcgtctccacaggg

SEQ ID NO: 402137 - DNA, 628 bp, Cannabis indica
agttacctccataaccaccatggccagaaactgatgaataatcaggagctccgatgagagggcttgaacgatggagcttcgtggacgtcatgtctccttcgcctattgatgagttttgtgtttttattgatttgatctctatactggtttttttttttttgggtttttatttcaggttagaggagaaaacctagaatctaaggaccctaatcctaactgtgactaagagaagaagaagagaatttgaaacccattagaaccctagccttgtttttagcagcaagaagaagaagaaaatagaaaatccatagaaccctaaccctatttttggtgcagctattagaagagaagaagtatttttgggaaattttgaatttcttgagagagagaagtgaggctgtcgtatattgaagaaaagaattagagttaattagagtttggtgttgtggagggttaattagggtttgtatattgaagaaaagaatttgggttttgggttggctttttaggttgaccgtggtcgacgctttgggtcagacggtggtcgaagggggtcttagggagagagagagagtggttatggtggtggtggtgctggtttggggttgggggttggtggtgggtttct

SEQ ID NO: 402138 - DNA, 1128 bp, Cannabis indica
acatctcagaagctctgaataagcacctaatgcctaagttgacaaatggcctgatgcattgggttctgcttatctgattcagattctgtgtcgaccgtccatctcacttaggcatcaaaaaatacattcccatgacattctcccactcacccagtgtccaggttgacgtcatatgtcaacctgggcgttaagcccagaataactttcagtacaatggtcataactcactcaatattaatctaattcacacgattcaacttgtgttttaaagctatttcaatgctctattaagccatggctcacacttcaatcacaattctaaagttatcaactccaaattttaccccaagggagttatgaaaataagccacagcttacctggagcaggtcccgccgtcgcgacctgggctccaaaaattgaatatcaacctcagaagttaattttaaccaatagatcatcatatacggtcaaaaatagacaattattagttttttcatatttttggattatttattcctatttttaggacctccttcacctataaacgaagagcttctctagctcatttttcacattcagaaaagtagccataaggttagagcatctctctctagacattcaagctttaatacttagccattttttttgaataccatctcataagaataaaaacccaaagtaaatgtagttctattactgtcgcgatatagggagtgaagtactataaattgtcatgtctctctatttatacttaacaaatattttattctcgccaatctagcgagagagtatggcttggaaatctttatccagattttgagtcaatattttggtactttcaatgagagccacaactcaagaaagttactttcaaagatggttgcaacacactcttcatgtgttgacaaaggagccccaacatctggccaaacaacttggggcacgccagttgctaaggttgggactgggactacttttatgccctaggttccaggaggaggccttggaactagctccacaactcgtcctccaaggccacacacttttgggactgacactgacgaatagatccacctggggagtcacgcgtggacataaaagaccctaaggagactgatcctcaagtt

SEQ ID NO: 402139 - DNA, 515 bp, Cannabis indica
aaaaaaagaaagaaaaacaaaatatggagaaagatcacacatgggtttttgggaaggggattttcattttcatttttattatttatttattttttcctaaaataaataaggtaaagagggtttagatttcatgacaaaaaataataaatgaaaaaggaattattagtgaatatgttatttttcttttaattgtttatggtggtgtaaatttcagaaaattgttatcagtctttttttcttcttcttcagattaatatttcatatcaattacaatttttttttaattattatatgctgttgatgttagttactatttacacaataaatgcataaaaatgaattacaatatgatatgaatgattaaaaattgtatatcctaaaactctccaaaatcatacgacaaaagaagtaaaaaaaaaaaagaaagaaatggtaggaaatttcagatctagaatatatataaaaataataataataataataatatagtacagctatagtagctagttatagaa

SEQ ID NO: 402140 - DNA, 702 bp, Cannabis indica
aaaaatgggagttaaatctcgctctcaccgatacatctattccactctctgtttatgtttatgggccttaaaaggcccatttccaccatcatttctatgggctactttcttcaaaacataggaagaaattacaacaacaaacaaacacgagcaaatttctttctatatactttttatattttcctttttttatttttaccctcttttttaaaatctatcatttttacttcttttttaaaatattataccagttttacctctatcactttaagatactctccatgtaactctcttatgtcaggtattttgagtacaatacatctaaaaagagttatttttcaattaaatataaaattagaggtaaatttgattaatagattaataaaagtggtatttttcaacttaacccttttatttttaccttttttttgaagatcatttttacctctttttaaaatattataccaattttgcccctgtcactttaagatactctccatgtaactctcttatgtcagggtattttgggtacaatacatctaaaaaagaggtatttttcaattaaatataaaattagagataaatttgattaatagattaataaaagtggtattttttaacttaccccaaattacattgtacctattttacatgttttaattttgggattatttcacaaaaacataaaaaacaataaaaaaa

SEQ ID NO: 402141 - DNA, 503 bp, Cannabis indica
gaatggaatactaatagtgctaatgctattctcatacctttggccttccaaccatcctaaataactttttgaaaattctaccacctttgctcatgaattagtttggtccaaatttttaatttctttttcaaatcaaaccagtgttattgtttttcaaaaattcaaaatcaaatcaaactaattaattaaatattcaaatcaaaccaaatcaatccacttaagaataaattgatttagtttaaaactatagtttgttctataatttttttaagtaattgtttatttttcggtaattttttttttatttttaataaattaataatacataaataaaaaataaataaatattctcaaaataatattaaaagttatgttagaatgcggaagcatatgattgagaaaataggaatatgtgagtatatgataatgtgcatgaactttcatctcaaaatcaattgacagtgagaggagtaacacatgcattttatatatgatatttaatt

SEQ ID NO: 402142 - DNA, 552 bp, Cannabis indica
tttattactaaatcccgcaatataaggactttattctcaagatcatgtaggagaatcatatcttccgaatatagaaataaagtaactatcaattaaacatgtatgtgtatttaaaaagtaggacacattttagatagctatcaacatgacatggcatccacgtcagtagaaaatcaagcctcatgggtcgggcttcaccaaatgagctcgaagtcaatgtattatcggtatttaccccatcagtaagaaaagttgacttatgaaaatcctagtctataaatatataaaaaaaaaaccatttgtgcaaagggttataatctgattctgggagtgctcacaaaaattctagggtttaagtacttgacaaaatacttgtgtacatatatcaaatatattgactcgtggactagaggttattaatccttgaatcacgtaaaaactcttatgtcattctttatttttaatctatttctttagttttaatatattttatattagttttcgaaaatctcggtaaatattttggtacttttaatgagagctgaagaaaga

SEQ ID NO: 402143 - DNA, 563 bp, Cannabis indica
cactaaactacagccactttggttacgaaggaaatgtagctccaaatcaagtagattttcacctactacacttagacttgaaaatctacttgattttaaaagtagctctaagtcttgtatcttgagcttatgaaggaaatgttatatgtatttgagaggcactttagcccttatatatctattctatgcagttctatatatattctcagaaaattcccatgaatataatgtatttcagtttattcttcttgatgaaatacattcattactctgtttttttacacaacattcattacttggatatattggatttcggaagtttgtctattttattttattggggatgctaataaccactatataagaccaaaatcacttataagtttatatttagggattttagcggttaaactacccgaattttaatttttttaatacttaaccacaaaaatcaatttttttggggcaaaactacttaaactcccattccgtttcgctcagtacccccgtccaaaaatcacagttaagtgccacagtagactgtccatgtgtacacacttgta

SEQ ID NO: 402144 - DNA, 1087 bp, Cannabis indica
ttttttttttgaataaacacttagtatattaataattatttacatttaagaaacttatgaggttcttttttttttattttgtattgttcttcttcctccattggaaagatacaacatatatggggggtagatcaacaaatacaagaacttaaattttttgtgacctcaaaacatttgaaaacaaaaatagattcaaaatttaatattgtggttgagatcaaaaattttgaaagaaaaacaactttgaaaaatgatgaatgctagaaatagagggtgaaatgctttattaaacacaaaatattgaagaaaaacattttggaagtaattgaagatttaaaaagaaaaaaggaaataaaattctattacttaaggataggaagtaaacattggactgtcaaaaaatataacaaaaaaaaataattaaaattaaatttcctaaagtcacgtcgtaacttctgacacatgcatagtatagtttttattacttttagtttttatccatttaaatctttcaataaagtaaaataatataataataaaaaagagaattgctaaaagatgttggtgtttagtatcattctcggtgttatactgctattgataataatttaagtatatcgaatctcatataacttaagaaataactttgacgatatcgttaaccaatcgcaacatctatataaggtgcttggcaccactcatgtccaatagcaataactttaaaaaaaaatacaagtcatttttatgaatgagatgacataagctgcaaatgacatgtggatagttaaaaattccatccacatggctcgggattaatagcatttttctttttggaggttattcgatctttaatcgggttggaacgacccaacccgacctgaaccaactgctggaagctgaaataaaatagggaaagactatcttgttctctgcctccattttgcgaccaacgatctctgtcctcgacatacctgtaacttttattgtgaaatttcttacctttttcttattcaaacgcaactaaccaaacaccatcgcacatcaaaaccatccgcctctgtaacgccctaatgctaaggcacgctac

SEQ ID NO: 402145 - DNA, 742 bp, Cannabis indica
taaaattttaaacaaagttggtcaacacttgttttacagtattctaaagtgattaaattttcttaacttataaaaataaataattaattgaatttacaaataaaattttataaaatagcataagattttaattagtttattcacgctgctaaaactcataaaacttttaaactcttttagatgacgattgataagtcttggacttcttgaagaaaacatggtaaagaatattgggagtgtctacaagcctttttggcgatggcttcagattataaaaattctgatagaaaaattagatgtccttgtgttagatgcttaaatacttgatttgagcctttgcacattgtggaaacgcatatatttgattggggttttgataatggttatcaaaagttgatttaccacggggagtcagaaatagaagttgttgcacgaacgaaagtggttgagcaaattttagatgatgaagatgatgagatgattcccattgttgaagatttcattcgaccaacaattgaagatgttcaaaacaactccgactcttcaatattacgacgagttatttgaagagattgaagctgaattgtatcatggatgccattggatttcttcacttaactttctagcaaagttattgcatttgaaagttcgtggaaaaattcctatcagcgtatttgatgaattattgaaattgttgaatcttgctttttcgaaaggaaataaaattctatcaacgtactac

SEQ ID NO: 402146 - DNA, 719 bp, Cannabis indica
aagagtgttaaccctaactcatggttttactggattaatactattacattaaattaacgctttctgaccttcataatattctagggtaataaccctagacctcattaaaatcaaacttagggtaccagcttaccaagtttagctttattatgccttagacgcataactctttattccaacatatttaacatggcataacattcaacatcttttaactactagggtaataaccctagatcaaataaccgctcattttaggataataaccctaattctagttcttaattaatcacaaacacaacatacaatatgagcgccactgcgcttaactctatgtgcatactactgtcttacctgatgtctcgcaaacatggagattccaaattcccgggtgctcctgaccaagtgctggtaatcctagtcacaaattccaggattcacacatatagggttaatccctaattccacatttataaattatatacttggcattcaaaatataaatattccaataaagcttgaaacgagctttcccacgatatatagaactcccaaatcggagtccgaatcacaaagttatggccatttgaagtttgcattaggatctgtcctgaaagaaaagggcgcgccgcggcatgctaaataccatgccgcggcacctgggttcaaaacccaaaaaaccagcagcaagaacacgaaaattagctccaaaacacaat

SEQ ID NO: 402147 - DNA, 995 bp, Cannabis indica
aggtggaagccctgaagaaagtcttgcaggaagctcaacaaaatctttacacgaggaggccttcaaaaacgcctgggacctgaacatggatcccctgatggactggttcaaccgcttcgtcgaccctgctcttgctcccttcgcctctgaactgacgagccagtttgtttcccatctgacccaactctcggccaaaagatacgcagcctgcgcctccacgaatgctatttatcaggttcaggatatcagcactgccatgatcgcggtgagtttttgttattcgtttttctctttttgcctgtgctttatcctatggaatttgatctctcatacttaacttgctttcttttccagatcgctgcagagattggtcgcctctcaaagaccctgatacatcgtgggtacgtcatgttcgaatttggggcatggacgaggccataaagagtctgagagacttggcagccgagaggaaagcattccgggaggaggcccaacagagggaggcacaggcggaggagaggcaccgggaggagccgaaggttcaaggcgaggctgtggccaaggccaagcgcgagctgagagaagccaaggaggctgtggaggagctgactgccaggctaaagtcaatgaaggagctgcatccggcagacttgcagtcgacggtcaatttgaccgttgaggtgaaggagctcagggacttcaaagatcaagccttgaagaaggctaaaagagatgaactcctagcccctgtcctctgcaagcattgcaccaagcgcttcgacgatggcattttcatggcttggcaaacaaatgatcagaacatcaagctcgatttttaccccaagcctgaagaagtcctcgttcgcttctaggagaagaagaagagacttgacgccttgctcgaggagcgtagggggcctcatcttccaccccgcattgattaagcgaacccgctactactatcactatctcttttttctttttacatttacagt

SEQ ID NO: 402148 - DNA, 733 bp, Cannabis indica
aacgatttgtttgtgttttagatagtatcatgttgttttatgtgttatttgatgattgattgatgtttgtgaaattctgtgaaaaataattgattttctatttctggaattattttattggatagtttggaaaaagttaatcaatttacttttttacagaactcaatttcgattttatttgaattagttatgaatttttgaaaatcgggaaaaaatcaaggtggtgatcacccttcccacgcccgcgaaaatcatgccagggagggcatgcaccgagatccctcggtagatctccttcatctgcgtgcgcgggcagtatgctttgcatactttccgtaccacctgcaatttttttcgttttcttcaatttttatgctattccatggaataaacttcctattttttgtgtagttttgtattttgattttttatttttcatatttcaaatctaattatcagaaataaattaatttttttaaaattaattttaggtattaatgtaatttgaatttgaaaacaggtaaaaatctattttttacttatttttttatcttattttaaaatttgattattttatcttaattttaaatctaaggtcagatatttaatttttttttattaaatattctattttaagtaatttgaccttatttagatttaaaataagattactataatcatggtattttaaatagaaataagatatttttgctaacttttaaattttgttatt

SEQ ID NO: 402149 - DNA, 601 bp, Cannabis indica
gtgttgtcttataaaaaaaggtaagggttgtgtttacttgggtagggaggttcatgggaaaatagtgaaatatgagttccagttatacttatttgttggcagtcctttgatggatatgtactccatagcgggtttgatataggatgcaaatcccaaagtattagtgaattgtctctcctcttccttgtggttgcttgagtcattagtaattagtactcatcaatgcattatttctccaacatagtaaggttttttttaggaaggtaatgcaggaagtgtcatgtgcagtgaattgttccttatttaagataaaaatttttaggtacctaagtagaataagatgatgatgatgctttcatcatagttattatgtgctttttgtgttggattagtctttagctttataactcattattatatttttatttttattttttgataaaatttattattttaattaattagatggagaagaaaaaatattgtactaaaagtgatgtagcagtaccacgaggtaaagcaatatggaattctgagagtgtgaatttttcttggaattctgtatcaaagaggttgatgatgggcatcgtcctactactta

SEQ ID NO: 402150 - DNA, 505 bp, Cannabis indica
gtcttaagtcttggcaattggcccagtcctctcaagtggtgtgaccgctcacccaacacttttgtcataacatgcatatcttcaagaaattgggtggggtcgataatgtactggcgcgggacattagctagcgttggttgagtgtcatgaatctcaaccattttagcatgcaaaaaaagtttgttaaattgttatagtgaaagaaatttaaaatataaaactaatttattaaaagggatattggcggaaaaaccacgcgaactttacattttgtaacacttaactataaaaaccaaaattttggtggcaaaactacccaaagctcttttctgtaagctatttactccttccgtctaaaagacaatgttaagtgccacggtggacatacttcaatgtacacatagttaatttttttggtccatgtaatattaattatttaaatgttaaaaaatttataaaaatattataatttaaaaataattttaaaaataaaataaattacaaa

SEQ ID NO: 402151 - DNA, 1367 bp, Cannabis indica
aaatagttattttttttcgtatctcacgcaatttctatgggttcgatctcgttcttcacaaactctacactacaataaagagttagtgaacttgcgagttgatgaatgtaaaatgtaccacttttggtaccaaaaacttttaggtcaccattagccagaaaactacaagaaaaaaactactttaatccaaattggtataattcttctactagttattatattatacatattatacttcgtttagtagtgaaacaaactattatatataaagttatatattattattattattattgacaacgttgtttaacgtaaactaatatatatatatttaatttattatattattatttatatataatattaatatagtattacatctattatttaagtatagaatattattattataattatatataataaaatctatatattattaattataattaatattaatattttgttaaatatatacatattatttattttttgactatattttaaattcagtctttatttacgcacgtatatggtagcagtgtctcctaatttttgttattattttaattttatgatacttggtgtatgatttgctgggaacaaaattctaaaaatcatttggtaaaaagaaaattgtcgcgggttgaaaaaaattgaaaattctgacatcatggaaccaaattaaataaatgtagaagaaaaaaattctcatttatcattttttcccatttttgctaatcctccatcatgcattatctttcctgacacaaatactaaacattttgagttgaaaccttccataattcaacttttgtcatctttttatgggttagatggagaggattcatacatgcatgtaaatttttttagaaatttattctacttttagattttcatttttttttatgaatatgttaggcttagacttttttcattctcattaaaagataagtctaaagcctaattaaattcactcccagcccgatccatttctacttgggatgaataagttaagaaatttttatctaagaattcagtatccctaaaggagtagacatataggaaggaatttaaaaatatcaaaaaattttgaattaaagacactacaagaaaaagggtttattgcgacaacaattttcgttgcaacaggattgaaatttgttgcaatagagtcattgcaacaatatattgtcgcaataacctcgtgcctgtagctaggggtgggcatcatccaatccaatccaattgacccgaaccgatccaatccaatccaattacaaaaagttagatatccaattacaattggattggattggatgttaaaagttggattctaattggattggatcggttattggatgtca

SEQ ID NO: 402152 - DNA, 723 bp, Cannabis indica
agggcagtgatcagacgtggtgaacagaagattaatcaaccgagaatttggaaataaatcaatccatttcaaactggcaagagctctatccaaccggacctcaataaaattatcagaatccctacccttctcccaagtgaacggatgaccaaataactccaagtccactaaatcacaatcggcaactgcttgttgaaaaccttcaagaagcgaattaggatacggattcccaccacgcttatcaacttgactcagaacattattcagatcaccaataatacaccaaggaagagtcgattctgctttcaaagttcgcataagattccaagtgttccttctaagagcccggtttggttccccataaatacccgtaagccgccaatcaaacaaatcattgtgatgaacaatcaaatcaatatggttttgagagaaaccactaacctcagcttcagattgctctttccacaacatagctaaaccaccactcctaccttgcgcatccaccgagaacataccttcatacccaagttgagaagaaagtaactccaaccgaggtttcaaacttaaagtttcacaaagaaaaataaaagtgggttcttttgataaatcatatctttaaggaattgaaacgtccctgggttcccaagcccatgcaattccagctcaatatactcatgatgattggcgaacccgatcgaacgagcccgccaataaatcgttttt

SEQ ID NO: 402153 - DNA, 1512 bp, Cannabis indica
ctcgaaatttattcaaataactcacgatatagctttcgcaactacgaatttaactctcaaatcgcctttcaatcttgttgttctctcacagtactataactatcgatatggtctttactccgcaacactttctcttttctactcagaaaatctataccgatcgttcctcatgacaagtttgtttaaaattcaatattttcataactccatatatgaattgcttctaccacatacttcgaaaacattgaagtagatattggaaactctagataaagcagggagtatggttaggtgattagctacccaacctaccctttccagaaattcaaacggaccgattaacctgggacttaacttttctttcttcccaatttctgcatttcccttcattgggaccacctaaagaagaataaaattccctacttgaaatttaatatctttacacttggatcagtatagctttttcatccattatataaagcaagatacgaacttgaatctgtaaaccgcatcagtgccacattaacagtactctaataactgtcattatatgaagactcattcagcagatggtgtttaattcgagaattctcaaaatctatcacacatgctagtcgcagactttctcagcatttagatgtaaactttaaatctcaatctgagataattacctttgaagcatcacagggttaagctatttcctcaacaaataacttagcaccctaatctgttttaatcgtatcctgctcagataaagaaaactatactgactttgtatatatgttcctatgtacccagatagaatcatagaaacctactgttccttgacttattgacaagttgttcatctaattcgtacttcataatatcatctttcatgcttagcaaaagggttttaacatcgtgatatattttagttactcccatatgtaaagagtatgacatgatataagattcattcaaaaccttctattcaatatccttatctcactggtacacaaaccctatcttcatatcatgaaattcctttagacaaaatcaaaaagtcctctgccgaactagttctcgaatctttctttatacccatgtaattcaaagtcaccctgttgggcttttattaattcttcctaataaatcaaaccacaatgtgatattaacaagttccctaaccacgaactcaatccccgttctggttagatcttcaacaacctttggtgagatcttttctctttacaaactcgtcctagacctctttgatttacaatacctactaccaatttacttctcagagtggtaaggaatcacaccgttataatcttcagtcaactctaactatcgttactgcctcctaattaaatctttccaaaagaagaagtgtttaagacttttgtgatccgtatagacttttcattcttcaccatacagatgatggtgcctgtaacgtccccgcttcaagcctccattgggaccttacacccacagaatgaatggctcttatacacgagtacgtca

SEQ ID NO: 402154 - DNA, 520 bp, Cannabis indica
tactgaaatgtttagcactatggtagaaatattctcaactattcgtgacacatttgggagtactttgacgcctaaacaacgtgctaatttatataacccacagtttgagaattttattcaaatgtatagtcaatcgcagtcgctcctccacaacatcaacaacaacctctttcgcagcaacaattttggccttcttcgcagcatcaattccaaaattttttgcagcaacaacaccagtcttttcctcaacaacaacaacagtctggtctgcaattgggaaataagttcttatattgaactccatcagagtctcctccgcttagctcaaattttgttgattttagattatttgggagttcatcgcaggagcaacaattttttcgactcctattctcaaccagggtcagctagggaatccaacaattggtttatcgtcagatcaaccatatgttccttctctgccacaaccgtcgggaactcgtaatgacaataatacggatcaagactttataacccgaga

SEQ ID NO: 402155 - DNA, 740 bp, Cannabis indica
tttgggtctgggtcttggtcgggtcccaaatctcgatttaagttctggtcccagtttgggggcccaattcctgggtctgggtcccccatcaatgttcgggtcctaggtcccgatccatgtctaagttatgttccagtttaggttcaggtctcaggtcccgattcgagtccaggtctcgaattgggttcaagttcgagtttgggtcccagtactagtctgagtttgggttttgggtcccaggtccgagtttggttcttcggtcctgggtttgatctcgatttttgagtctgggtttggggttaggtcccggtcttggtctaggttgcagtcgtggtttatgtcccaggtcagagatcccagtacaggtccaagtcctagtatggattttggtttgagtttgggtcctcttacagtcccaggtctgggttcctatcccaatgctaaatagattctttgtctggaatcaggtctagatcccagtttttgtccgggtctgggtgcggatctgggttcgggtcctggattcaaacactgactatgggtatggtcgcagcctcaggtccatattaggatctcggtcttggatccctatcttgttctagttatggtcccgggtccagggccgagtcctaagtttgggtttgggtttgggtttgggtttggggtttggtcgtcccggtacgttacgtcctagattctgggtccaagggcaggttatgtgtcatgagtctagggtcaag

SEQ ID NO: 402156 - DNA, 738 bp, Cannabis indica
aaatcgatttgagctttgtaaagtatatggtgacggattggtcaccttgttgcaaatgggtgagttgtgtttgcaactgaaagattcgaggtccattaccctcattgaatatttcttgaagatcatgccacatatctgtagcaagatcaaaatacatgatactctgtgcaatttcagaggagacagagtttatgagccaagacattaccatgttcttacaacgattccaagagttaaggagaggattaccaattgtaggttgaggaaatgccatctatgaaggtaggtttttttttttttttttttttttttttttcttatcaacgccattcttatgtctctcttccaggactgataatttgcaccattgagaacggtggagacatggatgagacctgggtgatcggctgagcaaagaaagaaatgactggaaatgtcttcgtgagccagtcaatcaagaagagaacgtcgagtgggttgagatgagttgttaggtgggggaataggagatggatgaactggttcggtgttgtcttcctcattgtgagatcgagatctggaacttggaacacgtcgtggagccatggaattgttggctactagtgcagaagtcgcatctggattagaatccgatgggttgtgctcaattgcaggtggaggaacaccatcctgggagcgtgtggagggcctcgccattgaagagttggcaagattttctgttgataccatatgagaaac

SEQ ID NO: 402157 - DNA, 627 bp, Cannabis indica
tataggtagttggattttgcattggggtattatgaagtattatgtgtgatgaagtattttattatgaaattaattttgtctttaatttatatttcagtattttaggagctgattttttctttttttttaattgtaatcggtttgagttattgcgtgttacttgtttgtattcattatgttatataaccggttctattttagttataaccagtttgagttctttcgtgttatttgtttttattcattataactgttataaaaatcggttctattttaattatatctggtttgagttatttatatttatttattatgttacagaaccggttatatttcaattataacaggtttgagttattagtttttatttatataaccggttatatttttagttatatatgagacatttaattaggtgatttttccagcgatgttgacttttccggcgacgttgacttttccattgactttccggccacgttgactttttcggcgattttttcgacgacttttctggcgaccgtgattttttcggtgactttttcggtgccgatgacttttccggtaaaacttagtattgttttataaatatgaaatttatacttttttacaaaaatatggtataaa

SEQ ID NO: 402158 - DNA, 629 bp, Cannabis indica
ctcagagactcttgttcatgccttatttcttcttcagtattgtgatctctgtgtgttgcagatgtatccacctgatctgcaacttcatcattctcctgatctgtttgaagttcaacactttgcttttcatgattggcctctgttttggtaagtttcattgccatttcatgctctttaaatatcacatctctgctaatgaaacacttcctgtgtccatcttctaggcaccaaagtttataacccttgacaccatcagggtaacccaagaacaaacattttatggctctagactccaatttatcttgtttgatatgagcaaaggcagtgcagccaaaaaccttaaggtgatcatatcttggtacttcacctgtccaaaactcttgaggagttttaaattttagagcagttgaagggcatttgttaatgagataacatgcagtttgcagtgcttctccccaaaatttcttgtctaagccagcaccctttaacatgcatcttaccctttcaagcaatgtcctgttcattctctctgcaatcccattttgttgtggtgtcttcacaactgttttgtgtctggcaataccattatcttgacaaaactttgtaaactgatctgagcaatactctaa

SEQ ID NO: 402159 - DNA, 761 bp, Cannabis indica
ggatccaactcgtcttgttctatgaccatgggctctttgtctctttgtaccatcaaaactgacagacgtactgcaattgtaacattgtctcgcctcctgaccgttcccactttggcctctcgagtagggaacttaaggcataagtgtcgaatggaggtaattgctccgaagtcgaccaaggcggtcggacaagggtggcatggtaggcggtgggacagtctaccacaacaaaggtgcggtacttaaaagtgctttgtggggtgttaggacatagggtaaccgagagccttactttttccattaggatgagtgtcatcccattgaatcctatgagctgtgagccgcttggtgacaggtccctgtcaatgagacctatggtcatgaagacttctttaaataatacattatagagctctagttatctaccaatattctagccataaccttattggcgatgggagtttctataactagagggtcatggtggaggaaacgcactggtttcatgtcttcttccgtgaaagtgatagcttggtccataagtctgggtctttgtgctgggagttgagtgacctcccacacttcatcgtgttttagggctccagcgtaacacttcaactcgttccaggtggttcctccaatatgaggcctaaaagagatcatggccactcttccatttagctgggtggtaatccgagtgcttgctgaagatgttgggttttatgccctaaataaaactctttacaatctgattagttatc

SEQ ID NO: 402160 - DNA, 748 bp, Cannabis indica
agctcgagagtaacctactatcgagggagatcgtacggtaccctgttgttttggaacaagcatatttgtacggaatacccctacccataccttcgacaaacattccatttcctgcagcattcccatcgtctctcgagtaatttttccactttgacatcctcagcccatattctctcttggataattttgaaaattttactgacttcggctcgtcttttattttctatgggtttctcaagcttcattcctagagttctgctttgaacaactcgggaagcactttccatcaagtctgcatcgcaccatacctaaagaagtaggtctgcataggtgaagacactgatgtaggatatcacttaatggtcggtatgcacggggtttcgggaatgataaccgatgaggccctcccaaaaacaaaaataagattggtactaatatcgaaggggcttcgatggactattggcaagtgtaccttccaaatacaaaattccctaggccttcgacataagcttagacaaagttcctgcccttgtcctatgctttacgtcgcgatactttctgtagctcccaataggtcgctcgtcctcaaaataatgtttcctacccttttttcacggtttttcctcttttgagcaaaaggttgccaaggctcgaaagaacgggtggcctccgacatgatctgagggtcaaccagccaaactcgtgtttttttgaagaagctcggggacactagaacctcctagacttc

SEQ ID NO: 402161 - DNA, 703 bp, Cannabis indica
gttcttcaatcttcattctcataagttttggcttcaaaattatgacgtcagcataactatcccgaataaaatgaacatgttcttttgattctattaattaacaaaaaaaaaagcttgtgatttaattttttaaaaaaaaaaaaagttaaattagagaaaaagatgtcaaacatctaaaaaaatagttttaaaaattatatgaaatttgaaatttgataaaaaaaagttataaagatatggtacttataagtttgtcactctcatatagtatttttcacatttaaagtttttttatggtatttgatttatattttgtttttagctcaattaattttattttttttattattattattattttacatttacattttagggtttttatttttttatttttttcttgaactctaatatttttagcgagtttgtgggttttgtgtttgcttgggctattatttaattatttctgggtttgtttggtacgctataatacattgtattgtattgtatagtttatattgaattgtataatttatacaatatttttatgtaaaactatatgtgttattaacttttatagatacctaaatatataatattttagtataaaataaaatttaatataatattatataaaaatataatatataatctaatacaatacactacaatacgacataatacgacgttccaaacgagtcca

SEQ ID NO: 402162 - DNA, 996 bp, Cannabis indica
gatttacctagtgttgggcaatggcattttgagaatctgcactgtttagaagaaggaatatctaaatgctttaggattaactgtggtgaaaaataattttgattctcgtgggtgatattcaattgggccgatttgttgctaaactcagtgtgtttttgttggttgttgatgttctgttgatattcctgagattgtgtagcagatattcttgcccctatcacaggattttgagcttactattgtgagattgagccatggcaaccaccaaatccaaatctcgtaagcgtaaagctccggccaacaccttgcccaaacctccaccacaacaaccaacccacccaaacccaccaacccttgccttgccttcctccaccacacactcaccaccccgtactcgtccccgtaaggcctcctcacctaaacccaaagctccacccgccaaagccgctccctcaacctccaagggccaacccaagcctaagcgcaccacttccacatctccaccacctaaacagaaccccactactcgtcctagagccaaagccgaccccgtccgtcatcaagagcggtttgagatattacgaacccgcagccagttggccgagcgcggctttctccctgccccggaagctttacctgcatatattaccaatttgattgcggagcacaagtgggagaaattttgtgcaattcctaagcccgctgtggcctcggttgcccctgcattttatgctgctcttgatccaaagtatcctgatgtcgttagagtgaggggtcagagtgtccccttttctcctgatgtgattaacgacttatatggattgagagctccgcttgaggatgagtttgctctttggaggattaacccagcttctattccatatgacgccgtgcttcgtgctgttgctcacccgggttctgaatggtctatctcgtcttccggccaccgcaccttgttacactcatctctacggcctgaagcgagtgtttggcttg

SEQ ID NO: 402163 - DNA, 773 bp, Cannabis indica
gagtaatgtctctccaattactagttttgccaaagctggaggtgtcgacaaatgcctttttatgctcttaaaggcctcctcgcactcttctctccattcaaatttcttgttgcctcgcaatacattgaaaaacggtaaacacttatcagttgacttcgaaatgaatatgttaagtgccgccaatcttcctgttaaggcctgaacttccatcggtattgttggtgatggaatatctatcaaagccttgatcttctcagggtttgcttcaatgcccctcgcgttgactatgaatcccacaaacattcctgaggaaactccaaaggaacaattttttgggttaagcttcatattgttcaaagcacttcgcgaggtctgaagtatgatctccactctttatcgaattcaccaacatatcatcgacgtagacctccatgtttcttccaatttgtctcgcaaaaatttcattcacaagtcactgatatgttgccccaatgtttttcaactcaaacgacacaactttatagcaataaagtcccatgttatttatgaagcttgtatgttcctgatctgggacatgcatttttatctagttgtatccagagtatgcatccatgaacaacataagctcgtgtccaacagttgcatccactaactagtcaatccttggtcgtggaaagcaatcttgtggacacgccttattcaaatcagaaaagtcaatacaagttctccaagttccatttggttttgggacgagaacaggattggatatccac

SEQ ID NO: 402164 - DNA, 1051 bp, Cannabis indica
tatttgtgttttttgtttaataataataaaaaaataaaaaataaataaatgtctccttgagagataaacttgtgttagacaaaacttgagattatggacaataataaatatagagatttgtttatcaaaatatatatatatatatatagatatatggatttgttactgaattggccattcaaaagtatggaactcaagaaaaaaaagatttaaacggatgtaatgttttaggcttatttgtatcgtaggtccctaaactatataagtttaggcaagttaatctctaaattttaatttttaataaactgattcccaaattatattcgttttggcaagtttatccccaaatttttattttattagcaatattaagtccccactcttagatattgatatttttattatctttatttattttaggctaattaggatatttgtcccctgaactttggcatgtatcaaatcatgcccctgaatttttagaccgttaaaaaatccccccaaactattgaaattattagatttaaggacttctgtccaattttattcaatttcactaatatgacgattgtccatgtactaaatcttaccccttgaactttgatatctactaaatcatgcccctgatctttcaaaagtacaaaattgtgcctcctaaattttcatccacataagacttttttttagtaaaattggacaaaaatccttaaatctaacaatctcaatagtttggggagaatttttagcgacctgaaaagttcagagaacatgatttggtacatgtcaaagttcagaaggcgaaaatccaaattagcctttattttacttactttaatttattttttaaaattcaaataattacattttttaaattttaatattttcatataataattaaattaatatatttcattttttctttttttgagtattcatataatatttcatttttcaccataatatttaaaatatgctttattcatatattttatatgttgattcgaaaatttggacttgacttttaagccacatctactcgctagattgatga

SEQ ID NO: 402165 - DNA, 587 bp, Cannabis indica
gccatttacttggaaaagataatacatttgtttttgatctttattgtcatatttcttttaagaaattaaaaactatgctaactactgcacccattatttgacctcctgattggaaccttccttttgaaataatattgtgtgatgcttctaattattctataagagctgtcttagggcaaagaattgataaaataccacatgttatttcctactttagcaaaactctgaatgatgctcaattaaattattccaaaactaagaaagaatttctagctgtagtctttgccttagaaaagtttaggtcttatctgctaggatctaaaataattatttattctgatcatgttgcgttaagatatctcttatcaaagaaagaggcaaaatcatgtttaatccgttggatacttctttactagagtttgatctagaaattcgtgataaaagcggtttgaaaaacgttgttgatgatcacttatctaggctagttattgaaaactagtaaagacgcctaccccctatctaccaaaagttttcctgatgaacaattgatgtatgtttcttctctgccttggtatgctgacattgtg

SEQ ID NO: 402166 - DNA, 647 bp, Cannabis indica
acaaatggaacttgaattcacacatgaagattaccctaaaatgtcatctagagctcatccaacatagcccattcatcaccaacaatttacaccaaaacttatcaagattaacacaaattctaaccacatgtattcaagagcaactcaacacctatctcatgcttttcaatcataaacttctcaacaataaattcaactaaaaaaacagcaagagaaactacctccaatctcttcaaactcaagcacaaagtcaccaactccaagcttgaatcaagcaaaaagctcaccaattcaacacttgaaacaaagagataatgagagggaaagagagaggcgtttttgaggagtataaaccagaaaatgaaattcatttttcgatcaacattcattttttgcaaataataaaattataccaagttaccaaaatgcccaaatggccacataatcactctcatgaacatttaagggcattatagtcatttaacacctccgcatactttaaataaattcagattattcacttattaataaaatgacaatgaataatcccaaaattgtatttcggccccgaacccggttcggcacgaaatactcggttgtgactataccgcgccaacttgtcagaacacacctgaaaaagacaacac

SEQ ID NO: 402167 - DNA, 856 bp, Cannabis indica
tggtcaaaacaataataataaattgaagtccatttcccagcgtgcattggaaagtatgggcccgcaggcgtagcccagagattaggggctgggctagaaagtgtcggtcattgcagcccaaactagcaactcgttatttatttctttatctatttttttgacaaattctctttattctctttagtcttttcaacacaagtggtaagatatcaaattaagttaataatgacaaaaagtttttagccaccaaattcggatatctacatacatctcaatcaacttaattcaaaaatctaaaccatcactcttacaactatattcttaaaaatgcttgcttaagcagatatttaggtatgggtcatcatttttcgcctttactgtagttataatttcttttggtactttgagaaattacaacctaattttttataatttgatgggaatgggatataatgttgttataaaaaatatcccaccaatttttttgaaaaaaataaatcaaataatttagtgttgaaattaaaggttaaatacgtgattatcttttatctattctatataaagtgtgtctatataactgaaattcttggtttatgagaaattcatgggtgaattttaatttttatttaataaaataataaaatattatttatatataataaaataatggtttatgagaaattcatgggtgaattttagtttttatttaataaaataataaaatattatttatatataataaaataataataaaataaatcctattagtatttgaactgacattaaatagctcttccccgttaaaaaaaaaaaacataccgtatcttaaattcctaatgaaatttttatatgaagt

SEQ ID NO: 402168 - DNA, 587 bp, Cannabis indica
acaagcaacccaaccgatcacactactgctacccctactactgatctcagttcacaatgccagcaactcatttcattgctcagccagcagcttagtcagtccactccttgggctgatcctgctatgaacaatgcaacatctaaccaagctggtaattttctttccaatcactcttttcattgggttcttgatagtggtgctactcaccatatgtgctctaatttctcttgttttacatctttcaaagactcttcttttccaaaacatgtcattttgcctaatgaacacaaaattggtgtatccaacattgggacagtaagtataaacaaataccttactcttgataatgttctttacataccagattttcatatcaacatattatctgttactgccttggttgatcaaacacattactgccttttcattaacaccaaaaattatgttatacaggatccttctcggagtgtggtgattgggacagctaaacgccaaggaaagctatatctcatacatcaagacactcccatagcagctactagtttagctttcaataaaaaaaatgtagaccaatggcataatcgcct

SEQ ID NO: 402169 - DNA, 1175 bp, Cannabis indica
ttgtgataaattatgcaagaaaactgtaggaaaaatatgggtttcatgctgattgatctattcatgtatttttgtgtttttgcgactttgtgcgatttatgtgcgatcttgtgcgattaagttgtagactgtctgtgttggctatgttaagcgatattatgcgatgttgtgcaattttgagcgacttatagaatgtggtttaggttttgcatttttagcgacattatgcgatttatatgcgacttattgtgcgattttactgacatcagaaatttccaactgttacactgttttttggcgatttgtatgcaattactatgcgatttttgtgcgatttatgttgacagtggctttttaatttaagttgatggcttatgcgatttttagcgatgttggtgcgatttttatgcgatgtagtctaattaatcttgtaaatgcagatggctcctgaacttattctacccttggctgagcattttccaggccgtatcacgtacagaggaaatgggtactttgcttcaataaaggctaagtttgaagccttcaacttgactgagagggtgaaggaaactccctttggagttttttggaatgccagtgatttgaaattctctggggtgattgtgcatcaactgctattgaggaaaacgaaagtgactgaggtgaaaaatgatgaagtctggttttacgtgggtaaaaccgaagccagatttgggcggtctgagtttggtttgatcaccggactaaagatgagcggtggcccctcaacagaagatttgagtacactgtgtgagtctgatcggatactgcgggactacctcaataatgccaaacgggtcactttcaaaaccctttggctagcttttgagtcctgcgatgtggcggacgatgtgtacaagttggggctgtgcgcatttgtcgagggtgttcttctatcaagggctgagggtgtttatatctggacggatatgctgaagctggtagaaaacgttgaaaacttcttcgagtatccgtggggcctcctttcttatcagaagttattgtcatccacaactaagagtatgagtgacctgaggaagaattacattgataaggtctctactaaagataagatgaagaagaaagggaagacggagaaaaaaattactcaaccggaggcaaagtacaatgtctat

SEQ ID NO: 402170 - DNA, 648 bp, Cannabis indica
cattaatccttatatataaagagagatcaatataaaatatgtataacaatgaaatttattcttttattgtatatataaatatgtatatataatcacatctaaaaagcacatcaatgtagccgcatgctaaaaaaatattttcaaagatgaaaatctcaaaccctattttaaaaattaaaaaataaaaatacattacctaattataaaaattgaacataaatgtattgcacttaatattacttaattaaatctaaattaaaaaaaaaaactaattatacgtgcattgcacgtaatcaacctagtaaatagtataaattcacaagtaattataatcacctcacatccaaacacactatcttttaaaataattagtgaattagattattattagttatttccctcttatctattgatgattttaaatgtaattagctaactaaagtaaatagagcactcacaacaaataagttataatagctaatagtcaaaagctttgttaattctatttttaacatatttaattgacaaaaatattttattatttattattattttcggctagtatgtttaatttgggtttccttatttgtgtatccaaagttggaaggaaagttgtctagctttcctatttatggaaattgaggtaaa

SEQ ID NO: 402171 - DNA, 722 bp, Cannabis indica
tgaattactagacaaggtctacttgcctaccacttgtcccacaggtagaacctatgaccgaggatttgacagttgtctgagaggtattcatcgctagatcttcgtctgttttgcccaaaggaatgacattcgcaggctgctgtctgacaatctgataggctcttcgaatcagcactgtggcctaccgaatgcgaccatcaatgatcagttattgtgtccttaacgtttccatctcctttctctcattcggcaaacatgcgcctctgctcttcaaacgcgagattcaccgcggcacggagttcctcctgatcatgatgtagggtgttggtatgaccctgcatgattccaagagcagcacggaggttctggatttcattgacatctctaatggttgtttgaacattggtagcaggcggaacaactatgttatgaatgccctggtcagctactgaactggaattcccagtctcttgcacattaagcgtgatttcatccacaggagtcgtcacaccgtgacccgcagttgatggctgtccgggatttatggctggcagaacccttgtgtttcttgggttctgcagtgcaggatccactgcctatggattcattggatcaaccatgtccctacgagtctttaccaccatcgtattgtgattaaatttggaataaagagcgatccttgattctgctctcaatgaaagcaccaaaatgttgacctcgct

SEQ ID NO: 402172 - DNA, 502 bp, Cannabis indica
ataggggcgaagacgcgataccctgtcattgaaaaactagttttttgcctcctaatggcctcaagaaagttgagaccctatttccaagctcacccaatcaaggtgttgaccaacccccactccggcaggtcctgcaaaagccagaggcgtccggaaggctcctcaaatgggcaatggagttaagtcagttcgacttacactacgtttcctgtatttccataaagggacaagcgctagcagacttcatcaccgaatgtaatgaagccgaagcaaccgcgaacataccggcaccatcggccccagcatggaaagtgtttgtggacggagcctccaacgaaaatggatccggagcgggggttgcaatgatatctctgagtggacttcgactccaggcagctctacggttcgacttctcggcttcgaacaatgaggccgaatacgaagccttgatagcagggcgtgagattagcaaagaccgtaggggctaaaagagtggaagttt

SEQ ID NO: 402173 - DNA, 711 bp, Cannabis indica
aattagagataaattaataaaatatatataaaattttatctataaaaattaacttaaaagtagaattgtcttgttagtcattcatacctcacatacacgtatatatataattagaatggagagaggcataagaatttgaaatggtgatataggaatgaaattactaaagaaaaaaaaataacagttatatttaattcattcataattaaaaaataaattttaattaatgtttgcattaaactccacaataaaaaaagaacgtttaagttcatgtataatatataataatgaggataataataaaagaaaaagaactgttacaattaatacaatttgaaaaaaaaaaattaagaaaaaataaaaaataggtattagagattataggaagattaggatgccacatcaactcccttaaacatccctttatatatatatatactagaagaaagttacgtgcaaagcacgtatacttaattttatgttaggtgttctataatttaattgagaaagattcaataaataatcatataatttaaaatggtttaaaaactaattttaattagtatgtggggttatttgaaaatcaatagtgaaaagtcaaatgtaaaatttgcagaaaaagaagaggagaatggagattagcttgaaatatatttaagaaatatgatagcttccaaataatattataacaaagcaatgctctccaaattt

SEQ ID NO: 402174 - DNA, 346 bp, Cannabis indica
gaccacaaaacatactaaattcatattttattttgctctttacactttcgtccaaaaatcttagttaagtgtcacagtggactatctacgtgtacacaagtatatacatggcacatttttagtgatccacataatattaattctttatacattataacaaataatttaaaaattataaaaaatgaaacaataataattttttttctttattttttcatttttcttcttcttatctctttctctctctaattgtgaactctctctctctctctctctctctctcccggtatggtaagaccgaaactggttgttgccagcgtcgatggtcccagttgaccctgaaacc

SEQ ID NO: 402175 - DNA, 673 bp, Cannabis indica
taatgaaagatcgaatcccatgatatagggttgtattacgaaaattatgctacgcacgtgcatatcaagtagtactcacacaagtgaagtcgaacccacataaattaaaattgattacaactaaactagatatttatgattctatttggttgaaaaataattttaaaagagaaccatataaattgacagaaatttatagaaggcaataaaagttgtttaactatggatgtgaattgaggatatgaatccagttgcttcaatagtactcaattgttaatgctacttaattagtcttcttcctttttagtgataacaaattataatataataacataactcttttcagatcataaatgttcttaattatatgccattgcatttctgagataaaataacatataattttggttggtgtttgaataaaatttatattttggttctaaaacatacatcatattgtagagctcatctcaagcttcaaaacggtatacaaaacgtccaaattggatacccgaatgaaaagttatgataaaaatacgatttctgatctcttataaatttccaaaaatggtagaacacgaaaattctaatttttgcactcactgaaacctatccaaatcactccaaacttcatagtgcacatatatatcataaatactaccatccttacgta

SEQ ID NO: 402176 - DNA, 88 bp, Cannabis indica
aaggctatgaaaatttagaagaagaaaagagaggagaagaggttcggcctaatagagagaagctcttagtaaaaattttatagaaagt

SEQ ID NO: 402177 - DNA, 725 bp, Cannabis indica
tcttacagataaaaatcatcaccacagagagcaaacaacaaccacaacaactctcaaaattcaaattacacaatcaattcaaaatcatgcatttaaaccaacaaagttctagctcaacacatgaacttcaacctaaatatatccaaattcccagctgcaaaataccaattaaaacatatttccactaagaaaaataccttatactcatattccaagatcaacaacataaattcccaccaaatcatgcaattccatgaacaattcaccaagattaaaaccaaacaccaagaacatgcaaccccacaaactcaacaatttaaaatatgctttttaccctaaaattcagcaagagaaatcactaaaaatctttatataaactcagcaagaaattacctagctccaagctcaagaatccacaattccaaagctccaattcacacccaacttcaagcaattctcaacaattaaattttgaaaatggaaagggttaaagggagagagagagttcgggtgagagagggataataccagaaaatacatttcaatttctctaaaaatccattaaattcaatgtaacccaataatggtcaaatgaccattttgcccttagggctataaaatatacatattcatttccaagggcataaatgccatttcacactcaaatattgccaaataaatttcagattatcacatatcaaataaaatgccaaataatcaattca

SEQ ID NO: 402178 - DNA, 487 bp, Cannabis indica
tcagcaaagttgacgattccgattccaactgagaggaggctgatggatggttgtcaatcgccattaatgcagaaccaccacgacacggagacgggtgggaaaaagagttttgagactcatcactattctgaaagtttgaagaggaagaagaagagatctgagttgccaacatgcttgttgagagaaggagaagacgaaggccttggtctcgcagtagagtccaatgcatataacattatctttctagaacagaggtaaaattgaaaaaaaaaataatttttaaaaatttaaaaaaaatatatataaaattaaacatatatactactaagattaaaaataataaagttacaaataatatattaatatttatatataaattaatttaaaattggtataaattaaattaattgaagataaataatattaatatttatatatatttaaataatttaaaataagtaatatttaaatttatgtatatttataa

SEQ ID NO: 402179 - DNA, 775 bp, Cannabis indica
gtgttaaaagtttatttaccgaaatttagtttaaatttctatttccacccctctcttagaaacatattatgggttaacataggatccttgctcacattggtcccttcacctcaccttacaagatgctatcaatagatgacagtggacgtctcctccaaccaacatatgtgagttcgggacccggtgctcttgttggtatcctttgtattgaaaatgcaaaggcttaaattttttttgttgagaatgtcactaaatacttttttcatgctatccaccatagtttctagactccggttctttcaacagagatcgtttatctcctcgtcatagtggcgagtttgagagcttgacctcactaagtgcactcgcttctcctttctaggtccacatctagaagtgtcggggtcttcagatggtggtggatgccactattaggatttatgccctaaaagcaagtaaagaatgaataatatattagagaatatatgaaatacatttataagataaatgatatattaattataagagtataattattaaatatctaaaaattccttattcatatggagaagataatcttgtaaggatgtacaagagaattaagattatacgatttcaataaaataagtccgtagtgtattaaagttctgggaatctgtaatatggaactgccaagtatgatttactatacactatatttttagtgtgtgtgattttgattcggatcacatatgtagatggacatgtagtgtaatgaccgctctagtaatgtgga

SEQ ID NO: 402180 - DNA, 432 bp, Cannabis indica
attagatttggataaaaaaaaaataaagaacatccattgattgtgttttattgtattctatttttgggtggatctgaatcagatcaatcactagtgtctctactgttccctcctcagttattactcccaactggttgtaaataaactatttttaatcaaataaataataataataataaaattgattgtggagagagagaggatcatgaccaccaagctaattaaggtgacgtttggtaacacttttttaatcagttttttgtttttaaaattagaaaagtgaaaatattttttaaaaacatgttctataaaattatttttgcttttcaattttttaattgagaatcaaaattttaaaaacaaaaaaaaattaactttcaatattttttaaactagtttttttcttaatcaatattttggactccgacaaga

SEQ ID NO: 402181 - DNA, 623 bp, Cannabis indica
aagatggctctcattcccatccagtccaagttaacctagttttctaactttgttagacaactagaaacttgagagccttcttctatagaattcgaatctccttctgattcccttcataaatttcgtcccttatagtgaaagagtccatacctacccatagcaagttaagtactcaatcatagtgtggaagactgagaagaatccaacacctgaaggagaatcaggctcaggtatttataacactctgtgataaaaatgaacaagggttagagatctatgtggaaggagatatattattccattcccaccaatataaagtttcctaaattttatttatgtttaattccattgttttagagaattcatatttagggcattaaataacatacatgttagtaaatctagatcctagtaatataatccccaacactttggtcttaagtaaataggtccaaacacatctatcgaaatcatcaataatagataaaaagtagggtttacctaaatgtggtgggattctacttggcccccaaaggtcagcatgcacatactttagaactgcctttgtgttgtgagttgttgctgtaaatttgatcttgggttgcttgccataaacacaagtc

SEQ ID NO: 402182 - DNA, 1075 bp, Cannabis indica
aattccagaggaaagttggcatgctttcaaataaacccaggaaggaagttggcgtggtttctatcagagaacccaaccaacccaagacccaaacctgcaccagaagacctttacgccaacctctttctggtatcgaggaatttcctgaggctgggaaagagatctcagcttcaaaaaatgggatcttctaataatgaggagaatgaggtctgtgcagatatcaaggctctctacatgtagccagtctttctcaagctatgtgtagtcggtctttctccgagctacgtgcagacagtctttcgcaggctatatgaagacggtctttctcgagtttatcggcttcccctctcatcctttgttttaggaagatgatgtaatggtttgtccctagtggcattttgtaaagacaagtttgtaacctgttttaggttttttcttatcttaaatgccttgtactactttcattcgaacttaatacaattgtgtttgcttgcgtttgtattcacaatttaatcaactatattttgatcaaatgtacagtaattttggatttttccattgcttgtactcttcctgcttaagtagttggtaatctaccaaactctttaattttcgagcagttgttaattcttcctcgctatagcagttacaatctgccttaagcaaatttaaatatactttaatgattttatcactttgtatattttaatttgctcgtatgaatagttatattatctatccattttttgggttcaagtacttttatcaaggcgtcgtgatgcctcgtttaatactttcctagctagcgagaaccgttagtatttagttttatacgcgagttataacttttgattttcctttcccgtcagataggttttaaataaaaaattatagttgtttgatccactactagaaaaatggattttagtgacacacatcgagtaactctaaaactatttagtgacacttcaacgcgcgtcactaatgaaggtgactggaaatacagtttttagtgacactccacacatgtcactgaacccttttacattcaatctctgcgcgtcactataggcgt

SEQ ID NO: 402183 - DNA, 547 bp, Cannabis indica
caatgagtttcaaatcgaaagctcctctttttatcattcgggtgactccgaacaatattttccagaatatccgcaataggccgatgatccgaatggataaaatctccattaaggactttaactgacggaaacaaattatgccaatcctggttacaaaagtagcgatccagtcgttgcgcagcaccttgccttttattaagccaagtaaagcattgtccttcaaatcccatatcaaccaaagcacaattatccaaagcttgttgaaattcagtaatagcagacaagctacgatcaacaccacccttcttttcactaattgaaaggatttcattgaaatcaccaccacatatccaaggaagatcaaacagacccttaagcctacacaataattgccatgaatcggctctagagcttgccttaggattcccataaaagcctgtgaacctccataaattcctccccggacactacacccaatgcatcaatatgtccaacccgaaaagactttacagatacctcccaatcatcattccacaacaataacaaa

SEQ ID NO: 402184 - DNA, 499 bp, Cannabis indica
caacccgccaacccacccgaacggtaccgggttgaacccaacccacccgaaactttttaaaatttttttttttgcgggttcaccagttcgggttcgggcgggttgctcgggttcgggtcaaacccactcaaaatgttcagccttatttgtaagtgtcttatattagtattgatcaccctaatggtggcgactgtatttgacttacaaaagtatgaaacaatggtgggagctcatgaaataggaatgacctcattcctacttgttatgtgctaataatttctgaatgagatttgtgttaaaccataatttgatttctatttattattttgtagtatcctgtattgccatatcgaatcccatgttatcactgttgactgaaaataagctcgaagtggatctaacttccctaaatggaaagagaactattaatattgctctcataggtgaaagtgccctgtttgtgttgactgagccgtctcctgaacagccgggtgacaat

SEQ ID NO: 402185 - DNA, 805 bp, Cannabis indica
ttaagcatggcatcatatatcacttaaatattatgctcgcatactgcctaaaatggaaaacagtaaataaatgatcacataagtagtataacatttactctcaacacttactgcaccatgagtcgagcttgtttctgacgatgattgtacatgttcggtcggtctacaagaagtttaaaaaccttggcactctgataccaaattgtaatgccctaacaattaggcacgctacccaaggtgattaagaaccctaatcccctaaacgggattactaagcagaaaagtgcgggaactttaaactttaaactgaaatagaatgaaaataaaacttgtaataattttaactttacaatcaaagttacatatttcgggattccaaaaatatttttcaaaatattacaagtctttccactagccgacccaagcggcaaaacaggattacaaaagttcatcactactagaccccaacctgcttggtctagtgtggcccgaacatgtacatacatcgcccagctctcgcactcatggctgatcaaagatagatttaccctttcctacacagtagagcacccgtgagccaaccctagcaagacagtataaaataccaataatcataaataacacatcatataaacattaatgccatttcacctttatctgtatgacatagacctgcatgttacactcacatgcctattttatgtctatgtagcatagacctacgtgttacgctcacacgtctatatacaataaggccttagaacggttcatctcggttctgttggaatttattttaccaggatct

SEQ ID NO: 402186 - DNA, 686 bp, Cannabis indica
aaaagaaaaaaaaaaaactattcctttcctttattatttgtttatgatccaaataagagaaagaaaaatctccttcaaatctaagtttgaaaaaagagggaaaagtttctatatggattaaggacttgaaactttattgttttttttctcgcagagcacatgatcctactatttaatgttatactctgtttatgtttagtatttattatccagtgaatggcaacaaggatttgtttcaaaattgccttacaagtgtttgattgagtgcttcagttaatgtaaaactctttttgactgattgtcagggagttttctgtttgcttcagtaagatttacatttcctgtttctttagtttggttcctaattaaaaggagaagtcaaaagagtccagaagatgctaaaactatgctcacaatcatgcatgattaaagaaattgtgattagttagtacttttgtgttggaacctctcaatatggtttgcctttagtgaggaattttcgtttccaaatttgcctagttaccaaacataagaaaatagtttctcatttttcccatctttttcttctagccttatctttgcctttattatttgtttttttttcggtatgaagatgttgtttgtagaaaaaagtccatcctccatttcatttttaagtaacaaaactaatcagaggtatgcggttc

SEQ ID NO: 402187 - DNA, 904 bp, Cannabis indica
ttttctcattctactttttcatttaccttttttttttttgctttcaagaatgagaatgcaaattccttgtttctgatcattacaagttgaaagttgtgtctacttgtaattatgaagtgattaggaagctcaatgagagcctttttttagaatgtgaatgccttgtttcggtctacacagtttggtaaacttttagacattccatcttttaaattttaccctcaaattgttcatagaattttgttgagagaggtccaacagtcgaatgccaaggaattttgggtaaatatttgtggtcgttgggtgcgatttagtgttgaggggtaaaataataaatttgtcccttctcggtgtaaatcatctatagatgatcttttattattgtgattagaacgatggttaaattttcatagcacatctatatcgtgaaacatatagagtgttctatataattgagagcgcaattccaaatctatagtggtgcaaggaggaattgataagttaggaaacttacttggtaaattctagatctgcttattggaagctcggttatataggcccatggtccccatactagttgagacaatattgcttgtaagactcagttaattgattttaattaatcaattataattcaaaaaaaattagactctgtcttatttatgaattttcactaagctagggcttaattgttaaggaaagagattctagggtttatttgttaattaagatactttattaagtctaattaataaatatattaaatgaaaattttatataatttagttttaattattaaataaatagttttggcatttaagtggttgaattagaaaatatggcatttgtgaaagaataggataaatagttgaaaaatggcaaaattgcaagtggtgggcccaca

SEQ ID NO: 402188 - DNA, 1058 bp, Cannabis indica
gaaatagaatacatagaaattgatggaaacttaaatcatattaaaactacaaatcaatatcaaataatctccatctagaccctaatgaactgtttagctactcatgttcatcgtagcaaattcacacatattaatttaagaaaatagagaagaaaagaatgttgaaaaccctctcaaaaatacctccagtattgaattcgacttccaaaatttgtactcattgattcctgtgatttccttctgaattgctttctaattaagagtttctgagtttttttcagctctgaaaatgtactaaaaatactaataataatgtgtttatacaggctaacaaggttacctaaaaaatactaaaatgatttaaagtttaaacttaaacaagataaaaatcgcaactctatctttttttctcgctatctttttatttttttttttagaaatttctagctgtaataactgatagtattttggccataactctctcaatattgttcggaattggatgattcaagatgttctaaaaagctgaaagagagatctagaacttttatagcttgactttttccaaaatctgaacaaatcatagtcgaatttaagcttgaagtttagctttatttttttgcacaatttttttctattttatagatcatctttttttttttttgacatttgacaaatttatacattccaagtgtcgaaacttgaaattaaagaaaacaggcatacatttattataaaaagtgacaataaagaataaaattaactttaaaaataacataaataataggctaaaaatatcctaacactttctggcctaaataaaatctatttcaatataatcagatttactaatttataaagatcagaaatcgttctatgttgcatggctcacatgatttatttcatgattatacttaatgtataaattcaattaagtccataacatatataaatatatatttattcatgattatggtgtcgtcagcacagtaaaatataatcatgattatatgctcaaaagtttaattcccatgattgtcagttactagatttagatg

SEQ ID NO: 402189 - DNA, 641 bp, Cannabis indica
atgcagtctcaagtgagcatttgcgagggtgtgtgtattctcaccgatttgtactaaatgaatagtagttcaatgctacgtcaaccaaactttaatcaaattttgtggtaactacactaaggtaaaattcagtcgaaagacattttaccaaatgcacctaagcaagatttctttgaaagtgtgtatttattcaatcaaagtgggagaatgttatattttgattgattaaataaatgttacaagtatgtcacacatctagtgggagattattatattatttaatataataatatgtaaattaaaatgttgtaatatatattattatgtgaataatatatattaagtgtttggtaaataaattgtgtaacatatgatttctttaacttaaaattgtaacctacactttgtaacatggagagaagttacaaaattaattgcttttgtaacttcttttggttgattatatgttgtgtaataaaagagatgttacacagaattgatgataagattcaaatattatgaaatatagttgttacaattacattaatactcattatatgagagaaatgagatggtgtgtttgaattctaagtgtgatcacctaaacactatataaacgagtctaatgtgctcatttggaa

SEQ ID NO: 402190 - DNA, 563 bp, Cannabis indica
gtgccccgatctcctaatcaaatgctatcatgattatcttcagagcattaaatgtgtctttaatgctcttgatcctctaaatctttattttttgttttttctttcccttctgaccacattaattactcctctaatcacttagatcctcttcagcctccattttatccctctttgctcttacagatcttcttaatctttggctatcaaatcattccatttctgaacgagcccttttacttcatatttatggcagcaaggaagaacgatggtcttcgtgaagctcaaagatctctccccatgatgagatctactcctagtgaagtggaggctatgacctgcaatcgtagaggtgctgatctgtggacttcctggttctttctatttaaggtgcatcctaggctacaactccaggtatcttcttctttattctcttttcttatctatttttttctacaccttcttctagctatggctctgattcccacctcagctcctattcccttgtctcttactcctgatgaaagtgatgtcttcactcttcctgatattcctgatgattctca

SEQ ID NO: 402191 - DNA, 405 bp, Cannabis indica
ctgtgaaacttggtgaatagcaggtgaccaagagacttgtctgaatggtcacttggggggcacacatactgtacaatgcattgaactagcgcaaaaaacttatgcagagaaattttaacgcttagtataagctattaaacccgcctttaagtcgtgcaggcatacttcagcttggcaaagtaaatctgaacccttacttattaaggccataagaagatagccaaggattaaaaacctcctggtcggtcacacaatccatgataaaaaagcaacaaggccaaatactagtaatgtttaaaaacagagggctaatggcaaaagatacgaacatgaaggccctagggctgaaaataaagtaatgttctaaaaagacctcaggctacatagtgttggaattaattttac

SEQ ID NO: 402192 - DNA, 755 bp, Cannabis indica
aactctttatcaacggacaatatttgattgtcaactccttcaaagcagagagggaagtcatcttctctggcaaccacttcaatttaggacattttctaattttcaactcactcagcttgggagcaataagtccaccatttgagaatgatacaaaactatcacaactatcaatagataaagatgttagttcctccagagatttcccatctgacactgtcatagcttcaaagtagtcgctggaaccaataacaagagttttgagattgggaaataaatccatatggagggatctaaacgatgatccacaattggacaaagtcaggtgttgaagaggagggtaatggtagagtggagtgagagtggaacaaggattcgttggctttattgcctcgtacaatgactctgaattctccaacttccaaataaacatttctgtgacacattgtagtctcgggagacttaataatggacactgcttgttacctgtaattttaatacttatcaatgaaggaaggaagcgaggcaaatctccctcgaacttaggacagccaataatctcaagtgttttgagcttcccatatgttgttgcctctttagtttgcattgaattccattgctcccatgatgacatgtggttgaagattaatgtttccaatgatgaaaatggctttctcacagaacaattcccgtaaaactcagcacccaccgtcactccgaattgcatcctgagatggaaagatgttttagcaaaggaa

SEQ ID NO: 402193 - DNA, 546 bp, Cannabis indica
ttggtattgttcaggattttgatgcttcagcaaccttttctactcaacctattcctattgagattgcagcatctgatgctaatcctaccattggtgttcctgctactattcctgcaccagatgcaattcctgccactgctgaacctgcattttctgctgcaacagagggtgttcctactactgttgcttcttcttcaaccagtaataacagcagctgtccattgaattctcatccaatgcaaactcgaagtaagtctggaatcactaagcctaaggtgtacatggtctctcgagaacctcaaactcttgctgaagcattacaaagcttgcattggaacaatgccatgtctgatgagatgctggctctaattcgaaacaagacttggactcttgttcgattacctccaggaaggacagctataggctgtaaatgggtttataaggagaagctcaatgctgatggttctgtgaatagacacaaagcgagattagttgccaaaggctttcatcaacagcctgggtttgatttcactgagacatttagcc

SEQ ID NO: 402194 - DNA, 720 bp, Cannabis indica
tgattaagacttttttttttagacatgaaatgataaagtacttaatattgttcttgtttgacaaaatcaaatacacggaaaactaaaaaatgaggaaagcacaaatatgtggaacaaacattaaattaaaaataattaatggattacaaatatgtggacgaacattaaattaagaataattaaaatcactcatcttcaaatttttagctaaaaaaatgataaaatagtgttacatcaggtgatcaactaaatcattcttcattttagctcaaacaacattcatattcatgctttacatgtagaaataattttctaaagtttttggacttcaaatatttttcctcaattttatagatttttcaattatttcaacattaattatttgtttactattatctctttcttacattttattttttttcttattttaattaataaaaatcatttaagatataatattatagagaaagtggtgtatggtttaatgtacaagtatgatttaaaatagataaaattgattgtcttgatgaagtatattgaagaatagaggtagagaggtgatgtgagtactctaagggcccgtttggtacgcaggactagattggactagacagactaatttgtccaatccagtgtttgagcatgttagaagtctgaataactaatccagctaacctcatttgtctaggattatttatcccatgcatgtgagattttttt

SEQ ID NO: 402195 - DNA, 854 bp, Cannabis indica
caccatgtcagattctgaagaagaagatataaagccttgcgtgaaaagaattatagatgcgccactgttggagcatttcagaatgcctcagatggaattgtatgaaggaaggatggaccttagggaccacctatcgaagtacaaccgcattatgcaagtcgctaaagccagtgacgacacaaagtgtttatgtttttcactaacattaagcaagtccatagaagattggtggaagaggttgtctccgagttcaacccacaattggagatatctacatgaaatgtttaaaaagcagattgtagcagcaaaggcctttaacctggaagctagttccataaccagtgttatgcaacaaatagaagaaagcctgaagaaatacatccaatgatccaatgcatgatggatgttgttgctaaaacaaaggttactgatgacataaaaattgtagctttaacatcgggactagctaaaaatctttgttgtggggagatctctagcgcaagagagcagacacttcaactgatttcttgacgagagccaaggattcataaatctagaagatgcatatgttagttttatggtactaaattaggtacacagtgaaagagttttatattatctgattatcattgtaccatatcccaatggatctccaaatgtatgtacattaaatcaaaacaataaaaataattagtttagagtatacattttgaagtctatcagggtatccttaaaacttctcgtaagttgtatccattaatctagatagagatgataatacaattggactcacaccagtgtctttcaaattattcgaccacacacaaggaatagtgtggactattaggataaaa

SEQ ID NO: 402196 - DNA, 642 bp, Cannabis indica
gccctttaaatatttatacagcctactgactaaatattacaataatacctcttcttctaagccttcaactgcgcgaagcaaaaaacttacctatgcaatcttcgatcgatcaaaccagcaagccaaccgaaacaaaacccaaccagatagagaaccaccattaattctggcgacttcacctaagaagaagattggaatcaatccaaacacatgctatattgtattgatgaaaaaagtgcagaaaaactagtttgaaactaaaattcaaccctaaatttcagtttaattcgcagaaaactaatcctcctaatgttaatttttcagattcataaaatataaatttatctgaaatagaattagagttcctgatcaattcaaattaagtataaactaaaaaaaatgtatcaatacagtagctaatatttctcccgttgcattaaagttattttctagatttccaatggtagatttattcatatcaaatcacgaataacaaaaaaaaatcgaattcatctagagccacgtacatagaaatattgttttagtttttaagtttctgtgtagtttgcattaacattttactaacactctgaaactagacatgtcaatgattataaactaataatgtgttgggttttatgc

SEQ ID NO: 402197 - DNA, 503 bp, Cannabis indica
ttccaatgttgctggacacaaaacaggcaaaattattaaatttccataaaagatatataaaatgcattctgaattcaaataaatcatcataaataattaattcaatactaataaataattttcataattaagccctaattatctgctattttccaaattaaaactaagcggtatttacatataactcataaactacatgtgaagctgaatacttacggctcgcatggtataggaaagtattaaacgagacatcaaagggccttgaaaaagtacttaaacctagtatattaataaacgatctaactattcatataagcaatcacaaatatacaaagtgataaatcattaacagtatattcaagtttgcttaaaacagattataaatatttgtgcgaagcagaatcaataattgctcgcaaaccaaaagcatggcagataataaactgctcgcgcacattgtaaagcccgcttagttaatttggaaattagcagttatttatgtt

SEQ ID NO: 402198 - DNA, 547 bp, Cannabis indica
aggggctgctattatttttgaaaacatatgaagagaggggaatgggtgacttcatgatagaaaatccaaccccattgccatctcaatcaactccatcaacactagactccgagaacttgttcttcctactgattccatccacaccaatccttcagagtggaagccccccctgagggttgggtggcttgcaattcagacgtagctattaggcagaatcaatcgtcgggggctgccgttttcctagacaacataggcaccacactgagaattgcatcctttcgagaaaataattaattataattaattgattctgaaaaaagaagttttacctattagtaacctgctattataggtaaaagaaaaatgtaaccatgatggttataataaaaatataaccattaagtagtcacccatacatatacatatatatagggcaagactatggtaggacctagcaaaagttccccaccggtagggaactttttttgaccattgattttagatcatgtggttattatgatgtaaggtgtatactcttacgatagga

SEQ ID NO: 402199 - DNA, 552 bp, Cannabis indica
cacattggccataaaaaataaaattagtcgcattggccttacaagataaaaaacaagtcacttacaatattagacatgttgtcttacaaaaccaaaagccacattagccataaaaattaattaattttggtaaaaaaataatctataataggcattatgttataaaatttaaaaattaatttaaattaaatcatagatttcatataatatttaatttaaaattattataacacgaacttgataacaagtgaaaagatttaactcaatatgaaaaataaaacatgtctatagtctgttaaaagtaaattcagaagggaaataaaatattacgttttcttgtaaaaataatttattttaagtaaataaatttgactaaaataaaagtcatcaactacatacaaatactatttttttttaatatatattgggagagagtatatttaaagttagaacctcctctttatgaggagaagtgcagaactactagactaagtctatgaccacactacatacaaatattattaaaacaaaaaaataaaagtaatcatgaat

SEQ ID NO: 402200 - DNA, 585 bp, Cannabis indica
ccatccccattcacagtcccattccaattagcattcccattcccattcctctacccattcccattcccattccctgacccattcccattcacattcccattcctatttccattcccattctgattcccaatccattcccattcccatttccattcccattcccattcccattccatttccattcccattcccattcctattcctatttccattcccattctaattccccagcccattcccattcccattgccattcccattcccatttccattcccattccccggcccatttccattcccattcccattccctggcccattcccattccccgacccattcccattttcgttcttgttcccattcccattccctggcccattaccattcctattcctattccaatccccattgccattcccattcccggacccatgcccattgccattcctattcccattccccagcccattcccataaccattcccaaaaccctaaaaccccaaacgccaaaactgcaaaaccccaaaccccaaaccccaaaacctaaaacccaaatcccataccccaaccccaaaccccaaaac

SEQ ID NO: 402201 - DNA, 830 bp, Cannabis indica
ttaaatgtgaaatgtagaaatgtgaaatgtgaaaataatgtgtaatagtatcacttatgtattatttctattttttatttttataatatgttacctgtgccttatcgaaatcctaaaataatctataactacaataaaaactataaaaatttcgtcctctaaaaatttcgtcctctaaaaataaattactaaaaaacccctcttgattagtatactatatttctctcatcatatataatattgacttctatatgtacattacacaaacattataaacattaacattattataaaaaacatataccctgtaatagtttattagtccaaattaatcttttctttaaagcaaaaaataaataaaatagctaaaaagtcttagaaagattttattctacaaaaaaataaaagattaagattttttcataccttatatagtatggtcactgattctgtacttgaattctctctaaatctaactctaaaaaaaatacaaaaatcattatataattacttttccactataatatagtaaataaataaaattatttattaattaaggaagaaatttaatattatattctctatttaagatatatagttaaagcttattatttaagtgtagcaaaatatatatataaacaaaaaggtaaaatcaccaaagtatgataacaatatatagtaagagatgtcgtcataagtatagtctaatagtttcacatttttcttcattaaggacgttcaaattctaatccatttcctataaaataaaaaaaaaaagtgaaattaatagaaaataataaatttcaacaaggaggtttcaagttcgaatc

SEQ ID NO: 402202 - DNA, 705 bp, Cannabis indica
catctggccatttaataaataaaattagatttatttgatttatcccttagcactagtataaaaaaaaatcaaaaattaagaaagaggtttatctttctctcgttctctttgctcgactcccactagaacaagaagaaaccaactcttaagtctatttttgtttttttggaaatttagcaaggtttgaagtagatcaagccaaaggtaaaccctagaattctaacttttatgtagtttaagctttaaattgggtttatcatgcaattctaagaagtagtggctgtttagattaggttttcctctagtgtgatttctaaggttgttttaagttggaattgattgtttattgctggttatgttggtttgtgagaagaatgagcaagtttaagtttaagaactcaaacttgactcattaatggtggatttggattctgtgattgtatgttgctttaagtgcttgaattctgtgattggatgttgttataggtgatctagaagatttggtgaagtttgggtacgaattgggcaatttatgaaatttttaggtataaactggttaaccggttctataggtcttgtagaaccgattaaccggatcacagcaagatcccagaaaaatttgttttgccaattcgtgttattttcagagccttagtgcatgtttggcatcataactaaaaactgtttttgttttaaaaacagaaa

SEQ ID NO: 402203 - DNA, 918 bp, Cannabis indica
agatcgagctgataatggacattcccttacccttttacgtattgttgatagtgtccttgcaatatgagaccttctatctcatctttcagctaacgacactcttccgtggtatgacaaatatccccatgctattcacactgtttagttggatcccttttacgcctcgcatgcttcatagattttggctcgctaaaaacgacttcttgtatatgtgcgaggtagatattttcccgagtttcattgagcttggtatattcagcataaagagggatatatttgttgtgtttcttatccttgggcagccttttgaaatcgtcttttctctttgatcccggggcttccgaattaaattctccaacagtatcatgccccggttgtcttctgggtttcgtgactcgatgccttctaaacttattctccaactcgtccattcgcaaatggagtgaatcctttttttttttggaccgagttgttgacgaagatcaggcttcttcaagtttaggtgctctcatagatcactcttatcgtgactgcggtcggaccttgcccttcctcttaaggtttgattcaccttattctccctataagggtttgcacaagtttcttctgatgaacctgaagagagggttggcgatttccgcctgatgttccacatatcataggctgtgtccccagatttttcctcagtttttttcaggttgcatatcctgagagttctaagtatatctctgggttgtctcctggccctgggtgtgcgagctgtgaggtttgcctcatgaatctcttctcccaaggtcaggttaattttgggtaccattctcatgcgctgcccttgttgggttttatgccctaaataaaactcatttcaacataatcagatttacttattaatatagatcagaaataacatttaatgtt

SEQ ID NO: 402204 - DNA, 522 bp, Cannabis indica
ttagaaacaatcagtttactttgcctttcaattcaaattggattggaactggttatttgaatgattgtgacgatctttatttgctagaaataaatgcatcctataatgaaaccttgcatgtggaatcacgaggtactaaacgcaaattaaataaagataattcagcgtcattatggcataaatgcttaggtcatatctcaaaaggtagaattgagcgtcttatgtctgatgacaatttagagtctcttgacttcacatatttcaatgtctgtgtagattgtatcaagggcaaacaaacataaactaagagattatgtgccaatagagcttcaaaattcttagaattgaatcacatagatatttgtgggccattccctaagacatcttggaatggtcaataatattttatatcattcatagacaattactcacgttatgggcacctatatctcattcataaaaaatctcagtatctggatgtgttcaaagcttacaaagctaaagttgagaatcaactcaaca

SEQ ID NO: 402205 - DNA, 615 bp, Cannabis indica
gtatatatgttatatgtatatgatatatacaacatatatatttatataattaatattatgtatgttacacatgagatattattgatagtaacatacataatatattaattagcataaaattattatttgggagttataattttatgtatgggagttatatattaatttatattaatatatgagttatatagtatgataataatgttgatagtagtataatattatttattactattgatgtgaagattattatcatctatattgtgaataaagagaatttggaatatcttttccagtattgattttgagaaaagaaatcgtgacttgtaagaaattacattctttgagaatttaaagtgataattatctcattttatgagataaaaaaaagagtgaactatgagagttacacttatgagaattgtcttgtcatagtaagaacaaatagattaaaagtgaatccaaacttgtgaaatgagccataaattggtagagcaattttggattcaaagtaaatgaatcaatattgattcaaaaattgtgaaaagataataaaattgaagaagcaattttgaatcttaaataatcaaagttattgaaaaatcgtgtttttgc

SEQ ID NO: 402206 - DNA, 709 bp, Cannabis indica
gcctatgaagcaccttaatatttatcgtagttaattagaatttttacacttaaactttgacatgtattaaattatgtcccctgaaacttttaagatcgttaaaaatacccctacactattgagattgttggatttaaggacttttgtctaatttcattcaattttactatttcagtgattgtttatgtactaaatcatgcttcacagactttgatatataccaaatcaattctctcaaatttcgacatgtactaaattatggcccctgaactttcatccatgttagatttttttactaaaattggaaaaaagtctttaaatccaacaatctcaatagttcagggggcatgatttggtacatgtcaaagttcagagggcaaaattcttaattagcctaatatatataataccttaaagcaataattgactttgttgtagtgataagaaacttaagagcatctctccgagtagtacactaaatttggtgttacagtattgctaaatttagtgtcaaaaactatttccactctaaccataacaccaaaaattacattaaaaatattctttattattatattaattttttaataaatttacatacaataaatttaaaagtggttttacattaatgtacccctccaaataaaaaagtcacgcttacaacagacaatttgaactttattcttagcgtgttaaatttttttgaatt

SEQ ID NO: 402207 - DNA, 779 bp, Cannabis indica
tgttagggtttagtttttgtgtatttcgaattgtaaggtttatttgtgttagatttagcttctagtagctggttttggtgtgtgggattggatttatgcgattttgagctttgaacactaagctttagtctttaatggaatattgtgattccgtgtgtttttctgagaattattggttggaatatgttgcatatacactgtttaggtactctagaatgtttggtggcaattggatgagttttgagcaagttggagcttgtttggggaaacctagtgaaaattgggtaaccagtttgccaggacctgtaaaaccggttacccggttttggcaggatccctgaacaagccattttctcaattctcgtccattccagtgtcgtagttgggtgtttccctatttctttagttagtgtgatctttagtgaatataacagaacctagagttgtaggttcgaacttcccggattagggttttgatcatgtgacttacccgttttcgttatgtgattagggcatccatctagcacgagactttccgttcaggtcggccagcacacttgaatctggaaagaaggtaagaactgtatataatgtgatatgaatataagaatgtgtgtatgtgttaatatatatgcatgcttgttgtgattcatacactaccaacacttgtacggtagtagtacagagtgcattggtaaagtgtatgatgtctgaagagtacatcacggtgttaccagcactagtacgggaaggtacaaggtgtaagtggtacaacactt

SEQ ID NO: 402208 - DNA, 557 bp, Cannabis indica
catgaaatcgctatgcttctcggcatccccgtacgtgagacgatggataagtacttgggtcttcctcaagcatttggaagatctaaaaaggatgccttcaactacattaacgatcgtgtttggtctcacttaaacaaatggaactctaagtttttttccaaaggcggtaaagaagtcctttataaatcagttgttcaagccattccttcttatgccatggcttgctttaagcttcgtgcatctttccattctaagattgaatcctttatggctcggttttgatggggcggaaatgagaacaggaaaatccattggaaaacatggtcttttctttgttattcaaaattccacggcggtcttgggtttcgttctatgaaagctttcaatcaggcgatgttggcccaacaagcttggcggctactccaatatcctcattctctagtggccacactccttaaagctcaatacttcccacaaactagcttccttcactctggcaagggtcatagaccttcccttgtttggtctagtattacttggggcaaagaacttcttca

SEQ ID NO: 402209 - DNA, 519 bp, Cannabis indica
attttctcactccttactctctcacacacaccattctctctctacgtctcacacaagattaaacaaccctgtctcaattacaatgtttaaatttgttcatccaaataagatctaatagttcactctattcttgagtgtcgtagctagcttaaaagatcaatgtgcagattcttcaacaaaagttattggattggatgatcgttgtttatccgaaaagaaagaatactctaatatgcttcaagaggtattgtattcttttcaatagtttagaattaatctacataaattatgttaagattcttagacttatggttcatattagataaaaaaatatttttattgaatttcgctgcttttataactcttatatgcaccataaaaatttattgacagagcagactgattaaacaattaacaaacgttttttattttcaaacaaatagaaaaagagatgataaaatattggttcaattaaggccacacaacataattacactatatagtttcgatttatcatta

SEQ ID NO: 402210 - DNA, 1188 bp, Cannabis indica
tataaactaagtattagtaacatctatgtttattttattagaattgttattacataatcattaatttaaataatataataataaaattaaatctaatctaatgcaattcaattatatatataaaataaataagtttaatataactaataaatttgttataatacacacaaaaaatgttacttttagtgacaattttttagtcacaacataattttgttgtgattaaatgtgacttttagtcacatcaaaatattacttgtgactaaaacatagtatttagttacaagttgtcactaatttagttttagtcacaacaaatattgtaactaaagatacatttagtttacaacaaattgtaatatttgtgactaatatacctttagccacggaccttttagtcacaacataggaataataatttataattagtcacaattttttcacttttagtcacaagtattgttatgactaaaagtaagattttttatagtgaaattataattgattaattgaataatataactaataaatttgttataaaatataattaattaattgaattaatgtctaatttaaattaagatttatataaaataataattctttaactttgttaatacttttaaattaaatttaaatatatttcaaactaattttttttcaacaaaaaaattttattgatttaacggtgttagtttaaccggttaactttaacgaaaaaaaatgttaaaccaacaatatccgttagataaccacatttaatataagagagatttaaattaagatccatatatatatatataaataattaactaattttttgatacttttaaattaaatttaagtgtttttttaaaaaaaaaaaaattaattgattgacttaacggtgttagttttaactatcaatatttttaatggaaaattttaaaaaaataaactaacaatttctcttaaatagtcatatttaatataagagatacaataatgttgcttagagttgtgtattggagttattattacctaattattaattaaaaaaataataataaaattaaattcaatacagttcaattgtattttaaacagtgtcggccctaggcataagcgggctaggctcgtgcctagggcccacattttgcgggggcccaaaataaaaaaataaaaaaaaattattagacttttatttaa

SEQ ID NO: 402211 - DNA, 864 bp, Cannabis indica
atactctcaaaataaaataccatatgaataaaacttcataatacttgtacaactgtaagattgtcggcttcaaacacgacctccttccaagattttttttttttaatattgtataatttaattgaagacattactaattttacaacttcataattagttaaattaaaatattcaactaacattctattttataatgagattcaagttttaacaactaccattctatatccaaatatatatcttttttttttaaaaaaaaaaaataatctattttaagaagatgcttcactagaataggctcaatcttatcgtgactatttttttgtttttattttttattatttattttttaaataataataataataataaagaaaaaaacgaaatacatgagtcacaaaacccaacaaaaaagcaaccaaaacaaactacttctaccattcaacacaggcactcaacccgcgacacgtgttccattcccattcgctcttttcactaacctcattccctaagcaaaatccgtaatcatccactacaacaaggtacaaaacaccgacaaatctaaaccactaaaaactcatcatttcgttgatcacataaaataaacggttcagattcattttactgataaaaccgaccgtagaggattatattcacggtaacccaacttactggatattccacctataaaaaggggtcactcacgcctaagggacccaaaaccccaaccaaccttcgtataatggcgaaacgtttctctctctcggtgattctcttctctctcctcgccgtttacgtcgcggcggaggctctttccggcgcgatgctctgatcagagaggttgttgcgatgtcggcgagattc

SEQ ID NO: 402212 - DNA, 1572 bp, Cannabis indica
aatcttggtaaaatgggttggactcaacggcctaatcaatacgcggaggaaggtgagggccccgacgtgcttcaagcatatcatcgagcttcttcttcttctcctagaatttggcaagagcctcctcaggctcgggataaaagtcgagcttaatgctttggccatttgactaccaggccatagagacgtcgttgtcgaagcgcttgacgcactgctggcaggaaacgggggtcaggagctcatctcttttagccttcttgaaggcctggtctctaaagtccttcagctccttcaactccacggccaggttggccttagactgcaagtccgcctggtgcaactcctccaaggacttcaccttgggagccatttcatccatggcctccctaacctcccgaaggtcacgcctagccttggcgacggcctcaccctccgcttcagcgcctcccgatgcgtcgcctctagctcagcctccctctgcctgacctcctcccagagcttcgcctccgcctgggcttccctctgtttagcgcctcctcgagctttgccttagcaagagcctcccttcgctcggcctcctcctggatcgcctgcctttcagcaaacaggtcccgcaggatcctcatggcctcgtctaggcccttaaattcggacatgacgtagccatgattaactatggtcttggaaaggtggctggtctccgcagtaatctgaaaaaaggagacaagactaagatcgaatgccttagacaaaatatcaaggaaaaaataaaatgtaagtacctaccacagccatcgcgttgctgatgtcttgaacctggtagacgtagttcaaggaggcacaagcagcatatcgtttgggcgggaactgagtcagatgggagacaaactcgctcgtcatctctgaggcaaagggagccaaggtgggcccaaggaaacggttgaaccagtccgtcagcgggtccatgtttaggtcccatggatttcagaagggctcctcgttgagaatgttttgctgctcctcccgtacgatcctcttcagggcctcaacctcagcatgcccccggctgtactcgtcgagggcttagttatatttgggtatccgaatattctgcctctcctcgtcaccaagaaccggagtcaacactatgccgtgaggcactgtgtattcatccgcctcggagggaatcctggagtcatggctcgggggcggactctccaccctccggggccgcttagagggttcctcctccaccatcttgcccttgcgcttgcgctgaggaggacctcccaggagtgaccaactgagaagaagcaggaggcggggaagcatcaggactgtgggctccagcaagagtggccaaaaggtcatccatgggcctggttgctgcaacaagaaaataggtcaagtgttagaacatccgtgagagcagcatacacttaacaaaaggcaattaagcgagtacgaccctgactctctaattcggccctagcaaaatctcggatcatagcactggcttcatcatcctcgagatagctgtccgatggagggaaccaactagaagataaatgg

SEQ ID NO: 402213 - DNA, 669 bp, Cannabis indica
cgtacaacctttcttctcattttttgagtttcgttcctatcatttgggagttccccagtattgaggtaggctactattggcgtcatccagtttgtagatgtgtcaatcattttgatctcctctgtgccagtgatactaggtttttcaaggtattggatggggattagattagccttatgatttatgttgctgctcgcgagtcggcctagtgcatcagcaattgtgttttcttctcttggaatttacttgaggacataacttttgaattgttcgagcatgtcctgtattatgcttagataggctatcatcttttctccccaagctttgtactccctagatacatgatttaccactaactgtgagtcactgcgaatctcaatgtgttcggcatgcaattcccgagcaagttttaggccggcaataagggcttcatattcagcttcattgttggatgctttaaacccaaatttgactgctccgtgtagacgtggcccgtagatttgacaagggcaatccctgggccagacagttgatctatggtcgacccatctacatgtaacttccaggttggctcgcctttgctgttgctcggctgaggttcttgtactggctccaggttgttttttaaagtgctctcttctttacccgtacactcaactacagaatctg

SEQ ID NO: 402214 - DNA, 516 bp, Cannabis indica
ggtcatgtgctgtgacttacactaaatgtcttgaaagaattcattccatcagaagctaacccaagcctaacatttgccacaaaatccttatgtttgtgataaaataatattcatgttggagaatctcttggatgtctcatacaaccatcatttaatctttttgatgatgccaagtcataaaatcaaatgttttttatgacataaataatctttgtaatcttggtattaatggaaagtggcgcaagacttctgcttcactcctaatttttaaaagaaaaaaagggtaatgttatattaatttaagcagtatatgtgaactaaaaaaatagaacaaaaaagtgttatatttaatagcgtaccttggtgtagagcatactttgttatataatttgttataatataatatagattaaaatatttaaatgcgacatattatatattaatatgagattatatatattgtgtgttggatgttgtattatatcatatatatataatataataatacacataaaa

SEQ ID NO: 402215 - DNA, 526 bp, Cannabis indica
gatgaagacgctgtcaaaattatatttctgcacaacggcctgttggtggtggaagtccagatagctaataaaattgtggccagaaccatgattgataatggagcctcttcgaatttcttgttcaaaactgcttatgaaaagatgggactccagataaaggatctaaccccatgtctcctacctgtctatggtttctccgattaaggagtcgcatctttaggacaaattcgtctacccctcactgttgggcaaagttctggatattagatgttccttcagctattaacgtaatgctaggtcgactggccttgtatgacttaaaggctgtcacattgatattccactcatgcctgaagtttccaacaaagaatggggtagggtgtctgagaggaaaccagcagtctgcttggaaatgttataaccttccagtggccaaggctaagaaggaagtatcctccagctagagcataagggaaaaaacatttccaagtagggaacttcccaaggcgggaatgaagatgtggat

SEQ ID NO: 402216 - DNA, 1100 bp, Cannabis indica
ttgctggaatagaagtcttaaatgcgaattctgtcaaaagctgataaattcatattacctcacacacagattgcgccatagtcctatattttgattcagcactagatctagacacaacattttgtttcttactcttccaagagatcagattgcccccaacaaatacacaatatccctaagtgtatcgtatgtctgccttggagcctgcctaatctgcatcagagaaacactcaatctgggtatgtccatgatccttataaataatacctcgtcctggtgctcctgtcaaataacataaaatttgctctagtgccgcccaatgatgaattgttggagaagacataaactgactaatgacactaactgggaatgcaatatctggacgagtcacagttagatagttcaactttccaaccaatctgcgatatttctcaggatcttcaaatggttccccgtcacgtgtaagatgcacaactggattcattggagcattacaaggttttgctcctaattttcctatgtcagttaacaaatcaagtacatacttcctttgagacagaaaaaatacataactccccctgagcaacgaacccaggaggttgctccatatagacttcttcctcaagatctctatgaagaaaagtatttttaatatcaagctgatgcaaaggctaatgatgagtagctgccatggaaaggaacagtcgaatagatgcgagtttagcaacaggagaaaaagtatcacaatggtctactcctgtaacaccctaactagcataggcgtgtttacgtgatttttaaacgtattgtgcagctcgttgttaatcaacgaggtttatggaaatcgtgattaattaaaattttgcttatttaattaaatacttataatatttcatacaaaatactttgggatcccatttacaaaatactttacaaaaagttaactgtctattacaaaatacttgtcgctcagcgactaattacagaagccctgatgtctcgaggatcgtacgctccaggcctaaccgcctcgacatgtacaatcttcatcggctcgtcctcacggttcctcagctttggcatgttgggttttatgccct

SEQ ID NO: 402217 - DNA, 566 bp, Cannabis indica
ccattgttaattttttatagtccggttatttcttctgaaatccagtaagctaaaattagctggaaagaagcattttcactttttaaatcttctatatgtaaaatttgggtgatatctgaaaactttctgcaaccagacttgttttctatgcattctcgatttttacttctgtctttttttttcttttttcgggtgcaaatacaagtgcatccatacacataccgaaatgagagccagttcttgcacctgaattttcatgaagatccatatgtagagttcaattactggcttaataatattggagttgatggacttttcactgacttcacaatttccaggagtggacatccatagaggataacaacaaaaagggtgcatctaatttattgcatgaaatcacattagtgatctctaagtacaataataatatctaagacccaaacatagacattactcccattgatattgattgtgtcatcaatgactatattgacatgtgagataactccattgatattcatttcttgtttaatttattggaaactgtgatataaatatgtacaaag

SEQ ID NO: 402218 - DNA, 616 bp, Cannabis indica
tccatgatgggtttaatttctgagatttccatggttgagaagaggataaaaaaaaattattgggtttaatatatatagggaaatttctctactagaatcgttatctgtttcggtatctaaaaaactttttagtattatttttattcatgatcacatacattacgttatttaaaatcgctaaatatatagtttatattgccaaaaataaatagtcgtgcatacaacaaaatatataaattttatttcagcattgtaaactactcaaattttttaaaaaaatttataagtgatcttaaataattataaagtatacgatcataaaaagaaaaattgactaaaaaattcttttgtatgctgaaatagatcgagatttaccgaaacatccctatacggggtgcactttggacttaacctatatgatatgtaagaaaattctacaatacacctcttgatacaccgatgtatccttatctgttacgatatctgaaaaaaagaatttagtccattttttttttatgatcgtatatgttatagttacttaagacatttggtaaaattttgagaaattcaaaaaaattattgacagtttgaacattgatttctatattgtaaatta

SEQ ID NO: 402219 - DNA, 501 bp, Cannabis indica
gttttacaaggcagagcttaatttctagttttgatgatcttaaaagcagaattgaacttggcactcaatatgaaagttttagatctcgttcttaagtttctagaacatcttgaatcgtttaattttgagcaatatcgagagagttatggccaaaatactatcagtcgtggcagcaggaaattgatgaagaaaaaaagataaaaagataacgggaaaaaaaaaagatagtttttcaagtagtgttgcaatttttttttctttttttaaaagatgagttatcttttcttttagtgagatatttcctaatactataaatagaatcctaattctaaggggattcatctatctttcctaatactataaatagaatccttattctaaggggatccatctatctttacaagcactataaataggacatcttaggctacacatttattaattctaaaaactacaaattagggagagaaactcagagagagagagcaaagaagagacaga

SEQ ID NO: 402220 - DNA, 591 bp, Cannabis indica
tcgatatttaacgacatattagcaatgttatatcgacatggtactaacaatttgaaacttgatttgttttcgatatttaacgacatattagcgatattatatcgacatgacactaaacaattagaaacttgatctgtttggatattaaacggcattttagcgacaattatcgacataaaattgtacagatttaaaaacaactatgtaactatatctgtacgattgtaattaaggagttctaaaaatacaaaaaaaaaagacaaccctctataatttttaccacgtcaagttttggtaaaacaagtctacacaccaccgatctttgaacatgctcatgttatcatcattaatcttctccaatgatcgattcatcatgaggtgttcgatgtactcaatggcatataccccgcaatcaccactgaaaaatataaaacaaatacatttagagactaatatacatttagagactaatggcaacggaaatattaatatactatattaataaaattaccttgatttactttggggaatcacctcacttggcatgcgtttagcatgcattgatctgagttggctactctcccctaactc

SEQ ID NO: 402221 - DNA, 814 bp, Cannabis indica
agagagagagagaaaggtggatgagttttttcgatttcttgattttgcttttttttttttctctaatagaataaagattaatgaattaatcttttgatgaaaatagtaacggctaagtgttcacaccctaggctgccacctaattcctcacttgcctaattactaaaataccccttttgcataactttggcaatttaaagttaaagggcaaaatggttaaaaccataaccccctcaaaccttgtattctacttgtttccaatatcccactaagtaaaaggttctagactcaatcatgtgattaaaatagttatccatcgtattttccgttgtcgccgagcaaaaattacaaaaatataataatttaaatatagctcaaataatacacctagaatttaataaaatctctggaatagagaaattataactctaatgcccacttttaataatgggacccacaatcaaataaattcacaaataactataaaaatacccataatcaatgctaattgcctttactaatccatattctaaaatgcggtcattacaattatccccccgttaaaaaggatttcattctcaaagtctaacctcaatagctctggatattgagtcctcatgtcagactctaattcccatttggcttcctccaccttgttgttcctccaaagcactttgactaaggctatggtcttgtttcgaagaactttttcctttctatcaagaatctgaactggctgttcttcgtaggacaaggcttactgtagttcaagggcttcgtacttcaagacatgagtcgagtctgaaacatattt

SEQ ID NO: 402222 - DNA, 808 bp, Cannabis indica
atatacgtggaccaaccggatagagacacgtggattaaaagagtttaacattcgagttaattgctaagtcttcattaagaagggtagcatccgggagctgcctcccggagaaggcatacgaagccccctgtgctcccagaggcctaagcaacatcaaagcatgtccgtgaggtgtcaggcttcccccgagcagtcacctcgcatttaatgccgcatgggaggaaacgtgttgagactgccacacgcaataaagtctgacgacacgaaccccgatctgcacctacgaagtcacgatcacttaagtctattgacggctacactgcgaagagtcacgtcaatcaaaagacaataaggacattccacataaaagccctacagcacctagggattggaccatgcattacccatggtatattcattgggaatacccaactttatggatttttacagaaatacatgtactataatcctgggaatcaccccaccaaaaacactataaatacccccccaaagactcattaaatgcggtcgagaattttgggttgcataagtgcaagaagagtaaatactcaccaagaacattctctgtatttaatacactcataaatacacagactcgtggactaaggctcattaacgccccaaccacgtaaaaatccttctcttaatttcttacagctctttaattttctattattttattggttgccaaaaacctcggtcaacattttggtgctttcattgaacccataaggccaatgactctggatattgagccctcatatctgactctagctccccaggtggc

SEQ ID NO: 402223 - DNA, 657 bp, Cannabis indica
aaacctatttttgtagtagtgttgtggccaggttcgtggtgcctacctaggtgaggggtggccacatatgtcgagtttgtggagattccagttgtgactgaaacacgaacattaggatcaatcaccataggatcttgaggaagacccgaggaggcagacgtcgtaaccagagttctccttgcattaaccatgacgtttgatataataagttaactactcatctcaatgaaagcaccaaactgttgatctcagatttggtcaaccaatagcggagccatatttattactgatgcttgccacgtgttacacaataagaacagaaaagtaaataatacacgagattttatagaactttgcccccttaattagcgggtaatgacctactctccttttggttgtattgatactagagataatactactcagatcataaatttgttggaatatcttttaccaggatctagatttactaaaagtatgtttttaacaacctaaatatgaatttctaaaatgatgaaaataaacacataaaaggtatgagataccttacattggttgcagcagaattaaatgactccttccgctgagatctctaacccttgtatcctttctgtcgtagagtatcaccaagatctgagcccgaaactccttcagttg

SEQ ID NO: 402224 - DNA, 922 bp, Cannabis indica
aaggttgtggagagtggagtagagttatactatttgcattactttaaatattttaagggctcgtttgtaacgccgtattaggtcgtattgtatttgtatttgtgtttatatttgaatttgtattttatgctaatatttttatgtaaaactatatgtggtattaactttatggacactaaatatataatatttagtataaattaaatgttaacatagtattatataaaaatatgatatgtaatcaaattcaatataatacaatataatacaatatgacctaatacggcttttcaaacgagccctaagaagattaaatagagtgaataaaaattttggttcggaattgtgaaatttgtagagttttgttttttaaatctttacttttgaaaaaatcttccaaattacagtaattattgtaaatatggctatttgattacatttcgtttatttcataaaataatttgctaacgtagctacaagccatatatagagttagatgataaagcgcctttggaaagttatggtgcaattgaatttatgtataattgaagataattataccgtttgatatatttatttgaccaataattatgcaattagaggtaattgagggattttaatttctaattacactctcaaattctcatagcccttataagaattgagtaattacattgtgtaattactataaattttcttttttaaaaataactactaaaaatattattttcttgtataattactatctattttatcaaacaagatattaggaattcatatgtaattaccacctccttgtattttaaaaggataaattgcagcacaaatatctaatgtttcaaattttatacacttaaatacctaatgtttatttttggaggcaaaaatatctattgttacaattctcttacacctttactac

SEQ ID NO: 402225 - DNA, 691 bp, Cannabis indica
taataagtgtgttgctttttgtcttatttgtcgtctcttggagtacccgattgagactttggtcatcacgagtcaatttacgccttcgagtgacttctctcgaaatttgtgaaatttaaatttaactatatgaaaagaaatttaattttcttaaggataataaattttcattctttcacacaattaaatgaataaatggtgcgtgtcgtaataaatttactaatatttatttctaatacctccaattattttagtataattgtaagtaaggatcgatcccacgaggactatgtttatttaattactcaaaaattggtgacaaaatttagaaaagggggtttttatatttagaagaaaatagcataaataaaaataaaaacaaattaaaatatagactacgatatgagaaactagttaaaggttattcgccaccctcaacattcatttctaattcctattaatgaatgtaatctcagtttttaatcaaactattaatcccgcaaacaaagctaaagcagtcaattatcccaatctccctattacatgtaatcaaggcgaagcactcaataattaactcttttacctaagtagtaaatctacgaatcatgcaatttatttaacttagataaagctttgagattcatggagattgagtgatctaggcaaaaaaataaatgaagaatataattca

SEQ ID NO: 402226 - DNA, 734 bp, Cannabis indica
aaaatggagtggctgaacgtaaacataggcacctcattgaaaccagtcttacccttctagctcatgcctctctcccacttcaattttgggatgaagctgttagagcttctgcctatctcattaataggttgccctccccagtccttggaaacttgtctccattccaagttctttacaatttaaaaccagattactctaagcttagagtctttggttgttcatgctacccgaacatttggccttacaataagaacaagcttcaatttcgatctgaaaaatgcacgttcttagggtatagcatcaagcataagggctataagtgtttagctcaatcgggtagaatatacatctctcgagatgtacttttcaatgagtatgattttccatatagtcaccattccaccacatccatttccacacctctcattacatccagtactcaagttcccattcccactgcctcatccttaccaactccacctgttttatcaggttcatcttccagtgacactccccttccaccatctgaccctgctccccttcctacgtcttcacaatctttgtcctccacctcagcttccgctcactcgttacctactacttcagcacccatatcagggtctgtcaccactgctactacccctgctgtcaccaacaaccataatatggtcactatatctaaagctggtgtctataaacccaaagtatacatggcatctaaagaacctttaagc

SEQ ID NO: 402227 - DNA, 697 bp, Cannabis indica
gcaactagaaggttataagcttcaagggcaggaagagacagtttaaaaacttaataggtctatttatggacttaagcaagcttctcactcttggaacaaaaggtttgatgaagtaatcaaaacctacggctttcaccagaacgaagatgaaccttgtgtttaccaactcaaggatcatcaagtggtagtattcatggtcctttaagttgatgacattttgattattggtaacaatatcaagaaaattactaacatcaaggaatggcttgacacttaactcaaaatgaaagatttgggtgaagttgcttatgttcttggtattcagatcatcgaaaactggacgaacagatcccttgctctctctcaaacaacttacattgataaggtgctagagagattctcaatgacaaataccaaaggggcagtcatgcattctagacctcgtatccgtctatctaaggaacagtgtcccactgatcctcaagagatagaggacacgagaagggttccttatgttttagcagttggaagactaatgtatgcaatgttatgcactagaccaaacatttgctatgcaataggaattttgagcaggtatcaaacaaacccaggagaggaacattggactgcagttaagcataatttgaaatatttgaaaagtactaaggattatgtgttagtctacaagggtggtgct

SEQ ID NO: 402228 - DNA, 1399 bp, Cannabis indica
gaggttttgcctctcctcatccgtgggaatcgggctcagtacgattccatgcgacacgatgtattcctccgcctcgaaaggaatcccggagtcgttgttcaccgccggagtatctcccctctgagtccgcctagaagactcagtcacaaccatctggcccttccacttgcgctcaagggcggccgcacctctacctcgccttcctcaacttccccctcctcgtctatcaagacgatcgtgcctaaagaggcactgaatgaggacctcccaggagtctccaactaggatggagccggaggcagagaggcgtcggggctgtatgcctcggcaagagtggctaggagatcttccataggcctggctgctgcaacaaagaaatgagctaagtgttaaaataatcatgaaaaaggcgtgcgcacaacaagaaagcaataaaactagtctcaccctgattccctaattcagcactagcgaagtcttggactacaatgctggcttcatcatccccaagaaaagctgtccgaggggaggaaccagctggaagaaaaatgggccgaatggtccaggggaataggcgtcagaggtcgagagcccatccaggatcgacccaagaaatgacccaagtgggaaaaatatattcctggcgtgacttcccccaccgagtggaaggcattctaaacctataaagatgctcatcgaaccctataggcctacgttgggtatactcttggacaggaggaacatacttaattattaaaggagacttaccagaacctgaagtgctggcgtcgggagcaccagagttgggaactgggaccacaggcttgggtctgagaggcctccgctccagaggagcttccagacgaagggttctcccggcagccgcctgggccttgatgtaagccagctcctgttccctcttaaagaggtacttctggtaccggtcctccgccgaggcgataatgtctacccagagtgccctttccgctgtcggagtcttcacgttcgggcagatcaccttggaaagattgaagtcatccaccggctgattctcgaaaatcatcttggccttctgacagctctccgtcgtaaccaagtccccaacgttgatggccttcctgtcatacgtggagaaagtcttggcccgctagaggaatactagggtaggctcagtccgcatgtaaggagggatcctaacccactccgtgagaagctccggacagtccatggcctggaaaccggaggaaaagaagaagcgatggcggtactccttcacatgtttttaatggttgaaagggactgggccctcgttcaaaggatgggcccggaggccatagaattcgtctttaaatttgtcccccttcttggggacaaaaacaagttcgtaaaaatacaaaat

SEQ ID NO: 402229 - DNA, 748 bp, Cannabis indica
aatcgttgattttgtttatttttgtcattgttaattattttaaaaaagtatagtaaataatttatcatagaaatatatatttatattagatgagtttgactgtttggcatagagtattaaaaatatactttattgtttcttcttttcccttttttttctttttttgagatactttcttcaatagataactagtattattttttgtaggaatgaataaggattatagaggaaggtggctacaagaataaagaaagtcaatttatttgcacaattattagttttccttaaaatacggaaaaaataagttattattttccggaacagtcatatgtatccatatcattgcaaaagatggctcgaaaagaatatccaaaccaaaacaccatagagtaccacaacaaatacactcagtcatttatacgtattaagttgtattgtattgtattatattgaattagattagttaaattataatttatattaaaatattatatatttagatacttataaaattcaatatcacatatacagtaaaaactctatttaagaagtattcaagaataacttctaatttgttataaaaaatttaagtcttctgagtattgtattaacaaagtatacctctatataagaataattacgtcttaataaaatatatatagattttataaatttatttatgtagaattaataattttattctaaattgtaatacttgtataaatattatatttacttaaaaataatt

SEQ ID NO: 402230 - DNA, 515 bp, Cannabis indica
ctaaggagccttgggccaatgcctagttattgggtcgtgtctgcttaatccatacatacaacaacatgaacacatctcaagcttatttattttattttattatatgtacttattcagctgaaatgagaacttttgtaagacccctcattggttcgagtttgttgtccaaaataatgcataatgaacactggcgaccaggatcgaacgtgacatttgaaagaatctcacaaggttaaatattggaaaagttgtgggtatacacgtccggaaatttgtggattttgaaacaggtcaaaaacttcaacactagaaattggcacatattggccgaaaggtcccaaatagaggttaaaggggagacagcgaaagtatctgtttggaccggcgacatcttggctcacaacggatcacaaacagctttttggaccggtggcaatttgggctcataacggatcacaagtggctcaaaaccaattagctatgggaggagtagctcattcatcttatatatcaca

SEQ ID NO: 402231 - DNA, 745 bp, Cannabis indica
aatttttagtcacatttttggggaaaaataagagtgattttttaattctgattttctagaattgagcttgcaaaataacatctattgcatctggtgttgaggctgtgtagaaggttagttttttttaatcattttttattcttttgtttttttgtttttaatttattttagtgttgttttacggttattttccataatttatttttttacgtcgatttcactgttcttgctttcatctcactggaattaatgattgttttcagtgtgttctcgtagtgctgtggtagttctatcaatgagtgtgaaagttggaggctataaatacattttttcttcattctctatggttattttgtgattttttttttattctagttatcctataaatacatttgacgagctcactagaatttttttttttgaggtgtgtggttcttttatgtttttctaagtagttatatctgtttattgttttacatttgttttgtgttgttttagttagtttttttattctgctttttaaagattgggcttgcaaatataactgctattgcatctggtattgaggttgtgcagaacattgttagttttttaaaatctaatttttcttttcttttgtttaatttgttttagttgttattttgtccatgtatatttgtcttgacgtcgatttcactgtttttctctaatctaaccagaattaatggttgttttcgtattgttctggtgttcctgtggtggttct

SEQ ID NO: 402232 - DNA, 706 bp, Cannabis indica
tctctctctctctcactctcctagtatcagtagctcaacttcctccctcctcctttctacctccgctactttaaagtcccgatcccattctctaccacagcccagtcccccactctgcccgcgcaaagaatgaagaagctttttgtcgcgtcccagccacatgaagcccgaacgaaggagtcatctgttctgtcctagccgcatcccagctgtgcgaaggacccatcccagtcatccgagcttgttcccctgccgtccgtccagtccgatccactacccgtcgcccgtctaagccagttgttaattaaatttttaattttttttgctgtggttgatttataatgattgtttaatatttgtgttgaaatacacttagttatgatcaacttttctaaatttttggtcgattttgaatggtagttatggtgttttcatatttggttgagaaaaataaaaatgctgtattttatcgacagcttctcgataggctatcaataagttttggtgagggtcataagtttatctattatcgataggttctcgatagttgaaacattgaaaaaaattgtaatttcctttttcttttcttgattctcatttgaatattgattatatattaacggattcttgataggtaatcgatatattttagcttttggtcattaagtttagctgtaatcaacaagttattgatatgttatcgaca

SEQ ID NO: 402233 - DNA, 751 bp, Cannabis indica
attctttagtgggcctattgggtatcaattttgccattttatctaaaacttatcttttctcttttcaaatgccatcttttaattctaactctataactatcaattctatctatttaatattttaattaattatcaaataaagtatcatttaacttatttattaattagacattttaaagtttcttaattaataaaaaaaatccaaaaatctctctctctttttttttttttaaataagtcattgcttagtgaaaactcataaataagacatagtcttattcaaaattctaattgattaaataaaatcaattaattgagtctagaagacaatattatctcaactagtgtggggaccatgagcttacataatcaagctcccaataagtagttctagaatttattaagtaaattctctatcttattaattcctcttgactccactatagatttgaaattgcactctataccaagtatagatgcgctataaattatcctttgtctcaatccaaataatcaacgatcctctattgatgatttatatcgagtagggataaatttataattctacccttcaatgtattttatccttaaaatacttagctacttgtaaatgatatttcagtaaactaatataattactgaaatgagtactccaccatttaaactcgtttagccaatctcaaaggaaatcaccatttcacttctataaatgtttatagaaggtatagattctgtatctataattagtgct

SEQ ID NO: 402234 - DNA, 1180 bp, Cannabis indica
aactagaatatgactaggacccacaactagaggcggacgagatgctgactcgaattacaacttgaatcaggattcgggacacgaacccacgacatggggcttggacccaacccctagtgggggtctagatattggaatcgtacgaagacccgaacctggaaacctttctagactaggacccaaacccaaactcggatcccagacccgaaatcagaataagaaatggaataaggtccgtggaacaggaattggacatgggcccaaaaccatatctaggcgcagaaccgaataatgactcgaacccaagaccagacttgcgccaggacctgcgacccagatcccgtaatccaggacccattacacgggaccaggtggagaacccagacctatacaagaacccggacccagacccaaacccagaccaagacccggacccagacacggactgaaaattggacccagactcagacccaaacccagactcgtactcgtactagaacacggactcgaacccgggactcggacctagaccaatatcaggtatgggacctagacccggactaggacaaagacctgaaccaggactaggactagaacctggactaggaataggatcaagactcaagagctgggaccgagattgagacctgggaccgggaccgagaccaggaccgggctgggaccgagaccgggaccgggagccgggacccgatacttagaccttagacctgagaaacgaaatgtgacccaaaactagaccaagccaagacccaagacaaggaccagtaccgaacacggactgggaccctaacccagactgggaccttggaccctgacttgaatcggggacctggacccatgactcacgacccaagacccaaacctagacgcaaacctccacctgacactcgaaccatgaccaaagacatgagctagaactggactacgatctggattttggcccgtgacctaggacacgaggcttggacctgacacataatcggtgtgtaaatcagggaatcgaacctggaccaagatccagacccggaccagaacccaaatccgtaccagaactcaaactagactaaacatgaggtgggtgtttggatttgtgaccaagactcggacctgaacccaaacacggacctagacccagataaggactcggacccagacccac

SEQ ID NO: 402235 - DNA, 798 bp, Cannabis indica
ttgtggcttgtagctgtacatagaactaagaccacttagctatgaataaaacagttaataacatattaaagttatggaatctttaatcaatggttgctagtacggttcgttaatgcccattctcagtgcaagtaatcttggttcggattacggatgtagtgagatatcatagtgaaggtactgatataatagagattatatatgacaattatcaatatgaataaagttatctttatcaacttgtcatttactataaagacctaattcatatcataacgacgatcaataaatcaacctaaatctcgagttatcatgaactcctgttcatgttatcagtttcattgattcactcgttaaagctttttagagaagatgattcttacaacttttattttgggaatctaataacatggatggttagggacatgatgtacaattatgaaatcctgactttcctaaccgatcgaatgttggttccctttaagtgttaattctagaactgtaatgttatgcacaaattcagatgagatattgaattatacttccactagtgaattaatggaactaaaggtaaagaagtaattagaaaggtaaaacgatattttgaccaaactaattatgaaccaacacaagaagggctaatcacttgacttaattatatcaatggacactgcagttaaactcagtaaatataattttataattactaagagtacaattccataattatagtggagtaatcatggaattaataaataagggattatttggctgatgagactcaataaatagtccagt

SEQ ID NO: 402236 - DNA, 710 bp, Cannabis indica
atgggatccaagtcttccatctcacatatctcattctcttttgttatggttaccatcaattggtgggttgcccttctctttttcaattctacaccatagcattgtctcactgtcagctggttgcctttcattgccccgactctggaatgatttaggaatttcaaggacatatgttttatcgagcttacttcccctattcttgttagtgttggatgacccattagtatattatacaccaaagggatatccaccatgaggaactcctgcatttaggtcgctgataatggaggttttctataacaccctactcgtttaggcgtgttattgtgattttatattatttgtgcagttcgttactaatcaacgagtttattaaaaattgtgagtaattaaaattttgcttaaatactatcaattatgaaaataaataacttttatataatcaggatctcgagtttaaaatatttacaactgattcaaaatacttgatacaaaagttgtcgcctagagactatacaaaatacaaccaaccatcccaaagatcatacgctccaagtctaaccgccctgacatgtacaatcttcatccactcgctctcacggctactcagtcttagccttgcctttacctacacatgcaaacaatatctgtaagtcgacagacttagtaaaaaaaagtataaatcataatcataaaacataacctgagtt

SEQ ID NO: 402237 - DNA, 1008 bp, Cannabis indica
tggttgattgagtatgtgattttattaattggtggctattaggtttagaaatgtttagggtttgaattttaggttcaattgacttggtttaagcttcttgtagttgatttggtggtgttgtgttggttttatgaaagtttgagctttgagcttaaagctttgctctttaatggcatatttgtttatattgaattttttttgggaaatactggttggattaggttgtatatgcattgtataggtgttctggaaggtttggttgcatttggtgaaggattgagcaagaaatggaaaatttggggtgaactggtgcaaaccggctagccggttttaccagtacctctaaaatcggctagccggtttaggcaaggtcccaaaatgtttcattttctcaattctcgtgcattccagtgccatagttgggtgtttccctgtttcttgaattagtgtgacttatggagactatagtagaacctagggttgtgggttcgagtttcccgaattagggttttgattgtgttatttaccccgtttcattatgtatttacccagtttcattatgtgattagggcatccatctagcacgagagtttccgttcaggtcggccagcacacttgaatctggaaagaaggtaagaactttatataatgtgtgatattaatatcttagtatatgtatatgttatgtgtatatgcatgcttaaaatgttagttgcactaccaacacttgtacggttattctacagagtgcatcgatatagtgaatattgtttatgagtacagtacattgataccaacacaagtacaggaaagtactgagggtgtgtggtatatcacttagtggtacttagggtacgaaagaaaccctaccaacactcgtacagtgaggtacgtagtgtatgtggtatagtggctataccctagtatggaacactcttactcatctgttaagccttgtaaatggtgtatgggcgcctagatacaagtcagaaattatgtgatatttta

SEQ ID NO: 402238 - DNA, 528 bp, Cannabis indica
tgagataagtattagtataagatgtatatatgtatgtgttgcatgtgatatacatgttaaaatatgtattttgcaattctaagaagtatgaattggtatcatagacgtacaatcatagtgtcaagttagcagtacaagtatagtattgggtttcactgatattcaattccattaagtataaattgatgctatcatagcggtaaggtcatagtatgggtcggaagtacaagcatagtactggttaagagtggtattatggtcaattgtacttttgggtatagattgatgctatcatagtagtacaatcatagtttcgggtctgcagtacgatcatattgttggttgagactgatattatggtcaatcgtaccaaatgtaggaacattcttgattcatctattaagccttataggtagtgtatggcacctagttgcaagtcggtaatatgtttatatgttttatacttttcttactgaggctatcgactcataaatatggtttcatgtgtaggtaaaggaaagacgaagg

SEQ ID NO: 402239 - DNA, 605 bp, Cannabis indica
ttattattattattatgaataagttgaaattttttaagccaatttttaatagaacattaaaatattaaatttgatgagttaaattaaatttatttcaaccacactctaaaatttatccctcttcccacttttgtggagataaggtagaaattattttccatgaactcctagaatgtttcagggctcgatctgtatggaaacactcttctgtcaaggtctttttcacctctaatcaaaaccgagatatcaatgatttctatttccaagacttagaacaattaaataaggaggatttcattttgcttattagtatcctttagcatatttgaaataccaggaacaatactcttttcaataatcgatttactaacaatatggatgttaaagattttgtaaccaggttttttgtaggactataaggaagctcaaatttttaatgtaaaagcaaaggattctcctgcagggagacaacgtttaaaagctcacacatctacttctgctcctgccattcccaacaactgcatttgtttgaatgcaaccctagatctgtgacagtcagtagtcccgtgatccgtaagggaaaataccgagtaagctgtacaatc

SEQ ID NO: 402240 - DNA, 784 bp, Cannabis indica
cgggaccttgagactctgcatagactaccgccccctcaacaaggtgactgtgcgcaacagataccccattcccttgatcgctgatttgtttgaccagctaagtggagcaaaatacttcacgaagttggacttgagatcagggtactatcaggttcggatcgcagaaggggatgaaccaaagactacttgtgttactcagtatggggcgttcgagtttcacgtcatgccgtttgggttgacaaatgcgccagccacattctgtacactcatgaacgaagtcttccatgatgtcttaggaaagttcgtggtggtgtacctggatgatatcgtggtctacagtgccactttagaagagcatcaggaacacttggcaacggtgtttcagaagttgaggaaagaacagttgtatgtaaagcgggagaagtgctcttttgctcagaaaagtatcaagttcctgggtcatgttgtggaacacgggaaaatccgtatggatatggaaaaggtgcgggcgatccaagagtggacgaccccagccaatgtaaaacaactacgctcgtttctcggtctagccaattactatagaagatttgtggagggctattcgagaagagcggcacccttaacagagttgttgaagaagggtgttacatggacgtggtctgagaagtgcgaagaagcttttcgaagtctaaaagaagccatgattgaagatcctgttttagccttgccatatgtatgcaaatccttcgaagtacaaacggatgcgtcagattatgctttggga

SEQ ID NO: 402241 - DNA, 690 bp, Cannabis indica
ttcttgaattgtaagaaaataattttttccatgaaattatgattttagctgttgttgttgttgttgttgttgtttgatattgttttcagaagtaaagttatgtttagatatgttgatttaagcttggtttagtggctgttagtaggtttatccaagtcttgagttttagaactcaaacttggagctttaatggtgattttagattctgatcttgggtagatgttttattgcttggaaaatgtttattgggatataatatgcaggtctggaaggtttggtaaggtttggaatcgatttgattaggctttgaattttttttgggttttttggggaaaaccgggtaactggttcttgcagctgggattcttaaaaaatttgggttgtcgattcgtgctagtttcaggtttctggtttgttatttcccagctagtttagggtatttccatgttaagttacagtagatagttttttggtttaaaacctaagtcctggttgtgatttagcgtatcacttgtccatgttgttatcgatgtgatttaggagcctataattcgccgagaagttgttctgctcaggttggccgggacacctgaattcgaaattgaggtaagattagtataatgtcatgcatatgttattacatgtttagcatacatgctgtttatgcttgttaaattcattgatagcagt

SEQ ID NO: 402242 - DNA, 793 bp, Cannabis indica
attactaattgctgtaaagattgaattaaattcctaaatgtgaactggagattgtaatacaaatcttttggatttagtagatgttattaccctggttcggggaacccaagcactagtcggctgagatttgttctcagtgcagatgaagcttgtaaatcattgtgtgctttactgctttatcttcaattcgattcttgaatgcataagttgaaattaaacaatctaaccatgaacaattcggtaacttgaatcatgaaaattggataagtagttctttcatttggtatcagagcttgaaattttctaaaaatttgtgttagatcctagacttgtctgattcttgattctgaaaaagtcacttgatacgtgttcagatttgatcttgttaccactaaccctctctgagttctttctcagagaactatagtacaagagtctgcttgtttctttttcttttctgtgcagaatggaaatgtttggggaaggtggatcaacctcgagacctctgatgttggagggtgctaactacccatactggaagactaagatgcgagcattctttagagctgttgatgaaagagtctgaatgtccatagaagaagggtggtctagacccacaatgacggagaatgaaatggttacccctaatgtaacaccctaactagcataagcgtgttatcatgattttaaacatactgtccagctcgttgctaatcaacgaggttattgaaaatcgtgattaattaaaatttgcttatttaattaaaaacttaaaagtattacatatataata

SEQ ID NO: 402243 - DNA, 524 bp, Cannabis indica
taacatgaaaataatatgtaaaacaacattaaaacaacatacaataatgtacaaaaaaccaacaacaaaataataagagtacaacataaaaataacatgaaaacatcaaaagattacattttttgtaaataaaattttaaagacaatcaaactatttaaaattatgtacaactatggtattgtaattttttttttgttatttttatattttttttgaaataaatcttaaaataaataagggtaaattgtagcataaatataatgttttagattttatacactcaaatactttatttttatttttagaggtaaaaataccaaatgttacaattctcttacagccgttactaccattaactcataaatatggacacgtggagggtcaagatacattacatttatttatttttttattttaaaatttaatattcttaatatcaaaaactaaatgttacttgttaaaaaaaactagttctcataataattttcacatgatattgacacttcaattcgataactatgtt

SEQ ID NO: 402244 - DNA, 582 bp, Cannabis indica
aacttgaggctgaggttaagaactggaaattcgaggtggtgaggctcggggaaaaggtgaatgccttagagacaactggtctcgagattttgtaggacttttggaaggctaatctccagggaaactttgattatctgggtgcttccaaatacatgtttctcgactactgcgctgctcaggcagctcacaggactcccagggcgaccacttccacctctcctaccgattagagtgttccgcccagaatgatgatcctccggccccttcaaatccagttgacccgtacaaagagcatggcactcttgctgtttaatttctttccttttactatccttttttttatgtttgttcggccaaaaggccttctttcaagacaagatgaccgaccaagcggtctttaaacttggaatttatttttcatttttttttgaacatctggctgaccaggcagccattaatccaaggtttgaatgcttttgttattcataagggatttcatcccttatttataatcattgtgcaattgtgttcgttttgtttttgttttttgccaaatgccttatacaggtataggtgcccccc

SEQ ID NO: 402245 - DNA, 522 bp, Cannabis indica
gtaaatttttagcatcatttaaggatgctgccattggagatgctctaagttactcctatctgtttcgtatgcagaagaattttttagtttattttttcatgattgttgtagttatttaagatatattttgtaaaattttgaagaatttgaaaaaaaattaacatgtcgaaaataaaattcaaatattttgttgcatacgtgactcttttattttatacgcatgtgaacaaaattattgtaacactgtcttttatattgtaaattattttaaattcctcaaaattttgttgaatgtcttaagtactatagctagggtcgatctaaacattaatcagcttgggtcattgcacaaagccacttaatttaaaaggcactttattttaaatcatctttatatataataaagtattactattaggcattagtgatgcccaatacattctataagtggtatacgattggttagcaatattcccttaaagctatttttttaagttatatgaaacatgatacttaattaca

SEQ ID NO: 402246 - DNA, 532 bp, Cannabis indica
agctcttcttttatagggaaggatgccaaatgaaaataataataaaatattctaaaaaacgtgaaaaaataaatttaggctatttttaactgttgatgatgatataaaggtgaaattgattctggaggtgggtcgttaaattttggagcttgagtcgcgtccgcgggattaggggtgtttacggattggtttggtccgaattttcatagtttttgaaccaaaccagtgtagtggttttttgaatattagaaaccaaaccaaaaaatctctcaaaccaaaccattaagaacggtttggtttggttcaaaactacagtttaagtggaatttataattattaagtttttaattttattttcaaaatatatatttaacatgataagtaatagatttataacatataaataatgatataaaaacattcacaaaagtcaaacataacataaaaatttaaaattcatacaataaaaaaaaacgaaaaaaaaaaaaaagttctaaaattatacatatagtcatatataaaaatatatata

SEQ ID NO: 402247 - DNA, 637 bp, Cannabis indica
ttatttattatctttatattgttatttctatggaatttttacgcatttttacgctattgttgttaatgattgattcttcgataacagccaacagttgtggaaccttaaattcatagtaggttttaggtgaaaaattaggttttactcttggattggatggatccaatcaatccaattgatattggattaagaatattggatggatccaatctagtctaaaaaatattggatcaaaaaggttggatggatccgatccaatacagggttccatccattggatggaaccgatccaatccaatgtttcattggatcggttcggttcggttgagacaacagtattggattggatcggttggagaaatccaacatccaatgtgtaattggattggatctggatgggcccaaaaatattggatgtgatccaatgaacagccctatatatataaattgaatacaagtgtcaattataaatcgacacttaaaagtcttaaaatatatatattttatttagttatatcagattttttattaaaagaaaataaaataataacaagggtatccaaaatttcaaacctaatcataccataagtagatttttagtttgggagaatttggatgggaagtttattgtatgtgt

SEQ ID NO: 402248 - DNA, 1154 bp, Cannabis indica
aaggggggatcacaacctaaatactcgaagctctgccaatattgttctaagttttcttcttctttaagagaaaccagggacagagagttagggtttcttacaaaatattataaacacatcaaacacaccattagaggctaatagactgactcgtggactaaggctagttaataactaaaccacgtaaaaatttccatatcattatttctgtattttactattttttagctcctaaatatttattttctaaaaatctcggtaaatatttttatatatgaatatataataaatatatttttttatattttttttcctaacactttttcactctctcacaaaattttattttattattttttattatatttctttctatctttaacattttcttactattcatactcaaattatttcatactatttttctataattaatcacttttatataaaaaaaaatcttgtaccgttattgtttagcttatgtacattttttatggtgtagtttttcagaatatttttttgttcaacagttaacttttagttattttttcatttatatttttagagggtttttataacatatactgaaatttttaatttttttcttttttattgtggggtgaatttttttaaaaaaatattatattttttcaaaaatactgtgtaagttttatactgtgtactgtgttaagttttcactgttgttctacggttatcttttagttgttctacaataattttgtaaaaaattccatgtagtaataaaattgtaaatttttacctaaaatccagtatttttataaaaaaaacccctatttttatggtgtatattttttagtgtctttaagacaatatttttggttgtatgtgtgttactttgtagtttaaatacatatattgagtttatttttttgacatattttattaaatacaatgataagatttttttttatttttttctaattgacacaatgtgtattgatatattaattatagggatataattttgtcgcgttattgtactttcacagattgtaatccgtgatgtacagcagccgtcagatgagagagttatttgatctgacggttgagattgatctaggagtaattatggttaaaaagtaaaaacgtaccctgacactcatttaatgtac

SEQ ID NO: 402249 - DNA, 620 bp, Cannabis indica
ctctaggtggccgaactcacaagcattcatctcccgaggatttttgcattgtttcaacgatccaagcttcccaccatcttctccaacgaaatcttgtagtgggtaagctttctattcccactatttcacttgatttgattgatttttctgtggatgcatgaacactatttcctgctttcaacatgctttgattcttacgttagattttagtccttttggtaattcaatttgcatgatagccttaggatagataatgtgtgatttctagatgaaaaagaactaaatctgaccttcattgtgattcttggctctttaagtcataaagaacacgaagaacatgtttcaactcttaaaaaacacatggtttgattggtgcagatcctggtcgaccaaggaggctttgtttgaagcctggccagccataggtggctttcatggggtctggctgaccatagggaggctgaccagcatatgcctagaactagggctcctggacagccactagacttgatcttggggtctagccggccactaggacttcaaatcctggccagctaaggccaaggctccaagtgggcagccaattttttccctcttttgacctcagctagggtctcatg

SEQ ID NO: 402250 - DNA, 693 bp, Cannabis indica
catcaaattgttattagtggttgaaaataatattttttctgctactgaaggtgttgttagtagtgtagttacataccttacacaatagttgagtgctcaaactacgagattgaatgagcctgctgcaacagtctctactgttgtatcttctgagcggtggatgaaacaaaatataagtgttcttaaggttaattgtgatgttgtaatctttttcatcagattttattttagttttttatcaaatgatctgggagttaagcgacttattatttagttcgtttttctaattttaatcttgatcgtgtctctaacgagaagatgtcccgattgaattgcaggctatcattttaattgattgccattaataaattatattatttattttaaaaaaaacaacaacaccatcaacaacaacatcaataataattttttaatattattatatatatttttataaatagtacttaaattatttttttaataaaaataatgtagtttattgaataatataaaaaaaaattaattctacaattaaaaatatatataattaaaataaaaaataaatatatatacattattacacactaatattaaaggtaaataccattttggactctgtattttacaaaagttaccgattggactttatattttgttaattgataaactggaccctgtattttccaaaatggt

SEQ ID NO: 402251 - DNA, 922 bp, Cannabis indica
attccatataatttaaatctaactttaggtaaaatcctatataaggaataagatggctctcattcccatccaacctaatattctagttttctaactttgttagacaactagaaacttgagagcctccttttatagaattcaaatctccctctatctttttctccataaattttgagccctatagtgaaacagttcatttccactcatagcaagtcaagtactcaatcatagtgcgaaacactgtgaagaatccaacacctgaaggagaaccagactcatatcttaataatactctgtgatagaaaggaataagggttagagatctgagtggaaggagacatatcattccgctgcaaccaatgtaaggtttcttaaaatttatatgtgtttatttacattattttagagaattcatatttagggtgttaaacaacatacgtgttagtaaatatagatctcgataaaataatccctaacaattagtatcgcagccagattatgatttactttcatgaaatatggatttgaaacaatgaatttgataatttggatgtgttcatgttggtttatgtgcttatttgatgaatagttatgaattacgaattttcgacgaaatatatttttagtttcgtactggaagtattttgaaaaataaatgaatttaggcttttacagaactcaatttttttattgaatttgttatgattatttgaagtttgaaaaaaaatatcgggctagggtttccccatacgcgcggggataaccatttcagacttattgtttgaacactatgtgcacccaatttagaccctgcgtgaagcctcattgccagccttttgttgggttttgtggccttaataaaactcatttcaatataatcagatttacttattaatgaagatcagaaataacattttatgtt

SEQ ID NO: 402252 - DNA, 553 bp, Cannabis indica
tagcccaatggatctctagatatgcatacattaaatcaaaataaaataataattttagaacatatacctcttgaagactatcaatgtatcctcgaaacttcgcgtatattgtatcccttaatctagatggtgaggatgacacaattgaactcacaccagtgtcttccaaatcgatccaccacacacaaggaatagtgtgggctattaggataaattgtataatgttgttcttgttaatttctcaacatgagcaagaactattgagagagaaaataatttctttttctccattgtaaatttcaaaaatactagtgtaaaagagtgtgtctgatttctcaaataagtcttctatttatagaagtgaaaaacctttaattaaattatatttaattatttaaataaataagaatctataaccgaattcagttactaatatttatgagggaatctctcaattacttgtgagaatatctcaaccactttgaaatatctataaccactttttaaattcaaatatttatctaattgagttaattaaataattaattaaccc

SEQ ID NO: 402253 - DNA, 864 bp, Cannabis indica
cttgattgtttaatgtatagaccttgggtattctttgaaaaacatattgattacatttctgaagcaatgaacaagatcaagcttaagcaaattaaacttctcaatgttaacaatgtcaacacactactacaaaaatggtttttttttacgtttttaaacagtcctttaaagtattcctgtcggtttccataatcgtcacctatacgaccgtcgtaaaatgggtaaaataggcgacagttaaaaactgtcactaatgtggacttcccgacggttttaaaccgtcgggaatgttaaaaaaagagacaaaatacagattttcccccatttttttcttacattagttttataattttacctaaattaaaataaaacaactaattaattttattacaataacaactaacttgaaaacacattaaatttgtacaataacaaataaatatatataataaataataaagtatataaataaataaatgtatttataccgagctcagagagagagggagacagatgggaagtggtggtggtccgacgtatgagatgaagatgagagggacactgacgggaggtggtggtggtccgatgtatgcgacggagaggagagggatactgactggaggaggggtggttggagatcgatggactagagagacgagaagaaagggagattgagagagggataaagacggcgagagaggagggcgatggtgcggatgtgtgggtgggttttggagagttaagatttttcgtttagggtgtgggaaatagagaataataggtgagaaaaataggtgggcatgtgagaaatagaaaaaggtaggtggacacgtgggaaatgtggcgagaagtaggtaacgattt

SEQ ID NO: 402254 - DNA, 534 bp, Cannabis indica
gcgtgttacagtcccaacacgcttcctcccatgcggcattaaatgcgacttgattgctcaggagaggcctgacacatcccggagaggcttcatgctatgcgagcttccgggagtaccttgtactccgggtgcctcctccgggacctatgcccagggtgcttccttgtggcgtacaaagacttatcaaatatttacaagttatctgatccacgtgtccctatttgactggtccacgtattttgggcgaattcaggggcaacatatttacttatataatgctatgatttgaggttatttgctataattcatttttcacttctcatagttgtatgtggactttatatttgtattatggacttgtgaattatggatatggggaattttctaagttttattgtatgaattaggatttaagttttaataaggtttgttttataattcataagatgttgaaatgtaaatggaaaaagatacttgtcaagttctttataggaatgcatatttttcccatccgtctaaatggggaacgagacg

SEQ ID NO: 402255 - DNA, 553 bp, Cannabis indica
attaaacaccctataagaaaatatcatatccaaatcccatttctggtcatatacattgaaataggataattaggatttttattcactaagaattttcacatgtattaaatcatgctcctagaatttttttagtagttaaaaattttcatgaactattgagattgttagatttaaatttttttttctaattttagtaagaaaagtcatgataaaaattcaggggcttaatttagtatatgtcaaagttcgagaaacataatttgatagatatcaaagtctagagagcataatttagtacatggacaatcacaaaattagtaaaattgaatcaaattaaacagaagtccttaaatctaataattttaatagttcagatgaaatttttaacgattaaaaaagttcagagaacataatttgatacaagtgaaattcaggaacaaaaatcttaaacataatcaaaaattacaattttcatttttcatattttttttcagtcacgctgtatcaattggactttaataaaatgatgtcaattttttttgttttttttttt

SEQ ID NO: 402256 - DNA, 408 bp, Cannabis indica
ttagtgaacaaatcatatgcatgtcgataaaatataagtaaccttcaagtgaataataggaaaatttgaaaaaatatgcataaaataccctaaaattttatgtctaaactaatgcatttcaaaattttaaaactatgaccactttatgataaaccaaaaaatacccctctcattttcaaacctcaactctctctcttcctctatctctctcggttctatctcaacatctcaccctcaccaaaaccgaacctacccctcaccgcctacacagaccgcctaaacagacaaccaccgtgagacccgactacctccgagatgttgaaggtaagcattcggcccgtttgttatttgtgagtagatgttagatttaggatcgaaaatggccgaatacgagttttgggcaaaaaa

SEQ ID NO: 402257 - DNA, 533 bp, Cannabis indica
agcaggagaagctcctaaataacctgtgttagttaatagttgtacggtgaatggtctactgggatacaaaaattccagagggagatcgacccatttccaagacccaagaaaaaatgtaaagggccaagatccttaagttgaaacacagaattaagttagctgtttaaagaaaagaacaacaacatcactattcaaagtaaccacaatgtcatcaacatatattaaaagagcaagaaaaatgtctttgtgatttttaatgataatgtgggatctgaaagggattgagtaaatccagtggataaaagataattgttgagtttggtagaccattgtctagaggcttgtttcaagccatagagacttttgtttagtttacatacaacatttggagaaatatctcctttaggtttatatcccttggggagtatcatgtacacagttttatgtaaatcgccatgaagaaagacgttattgatatcaagtttgtacaaagaccaattgttaatggctgcaatagcaagcagtaattttaa

SEQ ID NO: 402258 - DNA, 651 bp, Cannabis indica
ttttaaccattttttagacattatgaataatatgtaatttgtttttgttatatgtgtgtggtgtttgtttgaactgttattattttacaattttttggtctgaaatgccaaatctgattttctctcgaaaattagattttttacagaatatcaataaaatgttaatattatgcaacaaaaggacaaggatgaccattattaacaagattttgataacttatcgacattttatcaataatacagtctaaagtagatgcaacatagtttgtcgataacatctggaaaatatatttaagcacaacttatcgatgatttgacgatggttttttgatattttgtcgaaggttagtaaaaatttctattttccatcgtaattgttggttatcgataggatgtcgatgaaatgacgataggatgtcaacaatatgataaaaaagtggccaaaacaagtgaaaacttttaaacataagtaaagacgaaacaatcaggataacagtcatgaacttttaaagtaacccctaaacgttaaatttaaaagtctcggtagtttgggtgattcatgctatacatgcacaaccacccaagcctgaccggttcgcctttaacataacctattttgtaacaacggcacccttcaagtctaggactcgt

SEQ ID NO: 402259 - DNA, 1132 bp, Cannabis indica
taagtcacacaaaggcatcgacaaagatgcagagttgcggaatgaatgcatcaaagaagccagtagggccgagaagatcgagcgcaagcgttaagatggcgctagagttagagtggaggccagagggctgtgccaatgagacttagtagtcatgtttacttgggaaggtcaagaagtgtgctagagtttgcatgaaggccagagggctgcatcattggaatttagtacattgtgggagccagaagggcgtgatgcaagtgtgaatcaattggatggttgagcggattttgcatgcatgtagaaatcgaaaggggtgctatatgagatagttgactcaagagtcacatcttgcgagatgcacttttagatggcatggtgtgcatgaagagttggagcggtcaggcatttgcgtgtgggcatgttgtcgaggacgccaaaaagagaaaggggggagagaccttcatggttcactcaacggactagttattcattataagcatcgagatgggtatcatggagattgattgttgtttagaatgtaaagtcaagaagactcgagacacaggcagtgcaagttatctagggtgaaagtctgcgggactcaggtactaagataacagcatggcaatgttggcctaaggtgaaagtcagcaggactaaggtactgaggcaacattgaaatgtcgaggggcgaagagtcagaatgaccgaggcattagtttaacatcttcatcaaagtgacgtgaggaatggaggaaccgtatgcaagtatgcggttagcttgcaagctatatcttgagggatattcctctaagcgagaagtttttcccaagttgaagtgggggagccgactaattcatatgtttgaagaatcagggtaattgttcagttttggtgtgtgaatccagagggaaacactacaacatatgggttgttcagtgcgaagacttgcatgattgctgcaagcagcagatagacaatatgcaagggtgtaggctgcgatcaagactgagctagtttgcggcatgttattggcatgttttgtgtttatgggcacagtggtgttgtatgggacactgtaagccgaatggttcagagagcatatgcccatgggagatagcggattgggacg

SEQ ID NO: 402260 - DNA, 668 bp, Cannabis indica
ttaaagtgtggtgcaaagcactaattcattgaacaaagaaaaccaacgagaacaaacagccccgtagggccactaaaaaaaccgtacagtcatgaaaaaactaaagcataaaagaagaaacgcctagagaaacaaaccacaaacgcaactacagaaaaggaaagaacaccacttctaaacaaaagaaaacactgaactactctaaagccaacaacttcagcagccaaaacaacctgaccaccagccacaaacacccatagaaaacgaacatagtcccttagcccggatccgggtaccattccttatgatcctcaaacacctccggctccatcgcgtttagatcaatttcaccccccacagaattgaactttgcccactttgcatcattgtgagccatgaaattttcttccctgctaatctttgtcagcttaaagctttgaaacttctcagtacaatttctgaacaccgttgcaactccatccaaattcatgttccgattttgcctaccaacttccatgaaggttgaaaccacatctgcattgtcacagaagaaactcacacaaaggaagccattacgctccgcatattgagctgtgcaaactgttaggttttatgccctaaataaaactccatttcaatgtaatctattttattcaacatcaataaag

SEQ ID NO: 402261 - DNA, 917 bp, Cannabis indica
acacgataagaaatgttaaaatgagtagtgtttaataatctcatacatggtaatatcgctattggtctaactaagtatcgagtctcatataatttaatgtaataacttttagagagtattattaatcaatcgccagacaatatttctagaaagtgctaggcaccactagtaccaaataacaatactttaataacttttatgaaatattattaactaatcgcaagatgctacctttaagtagtgctaatgaatgacactattagtgcctaataacaatactctacatatcagagatgataaaaatctccctatactatctagcaccacgagatatcattttattattagtacaatttaatataagttctcacttattttaaaaaccactaatcactaattatttctaggacattacttggtatttatagaaatgttcatccatacacacatgccaagttaattaattaattaggcttaaatagtaatatagtaggtatgtaagtaattaatatacactaaaccaaataaaatattcttcatttttttagctagcttgacacaaaatgagacaaaacccaataaacaaaaaaagaaagaaagaaaaaaaaaagctggtttcttttgctctacataaattattggtataaacatatacttcatctagtctatttgtgtaaatatgtagcttcttcaagtgtgttaatttgagatatatattagcacaagcaattaatggtaaaaattctatatcaaatgtaggtaccaataatactagccatagctcattgtttttttgttgcttaataaagaaaaaaatactagttattatagcttataattggttatttattttgcctagtttagttgggttgtgtaattgataacatatattattattaggaagaggtttcaatggt

SEQ ID NO: 402262 - DNA, 687 bp, Cannabis indica
tattcagcaataaattaaagaaaggattgtgtgaaaaaattacgactaaatgtgaaaatttaaatcaatgaaactctaaataattaaataattagcaatgacaagattaacaaattaagaacaatattcgaaagtaaagcagggcacacagagtacgtaaaataaaaaaaaatgataaatgtgtagaaaataaagaaatcaacaccaagatatatattggttcaagtttgatagatcgatgtgatctatggctctactttagttctggaacaccaccgtaatccttctttattgattgagcaagaatatgtacaatacaatcgaggcaagattctcttttgagtcctccctaagtgtttcaactctcacacttacacccaagaatcttcttcatctacagaagattcttcttacaaaacccgaatccaatctctcccttttctctacgcctctctctctacttctcaatatttcctctctcaaaatctcaatgtcatctctttgagttcttaaacttatctctcaaaataacaagtcaaggtgaaatttataggctacggatcaagatcctaaagtcggtggctgcgacaatcgaagttgttaagttaattagaaataactaacttaaccaactcctctttgagtgaagttgttaggttatttttagtattaattttgttgtttcaa

SEQ ID NO: 402263 - DNA, 1051 bp, Cannabis indica
aagcttcatcatctattacatttcattatttttttgaaataattacataaaatactaaattttgtaaaatatttacatttttagagaattttttttgaatgtatattttacagtattactataaaaacataaaaaaaaaactacatagaaaataaaaaaaaaataacaaaacaacataaaaataataaaaaatcaaaaataaaataacaaaaatacaacataaaaatacactaaaaaaccgtattttatataaataaaatctaaggaaccgtaaaaatattgaaaactccatataatcgtatttttataatttttttttattatttttgtgtatttataaaataattctgttttttttcttagacaaatacaatagtttcccattcttgctatattgtacttgaaaacaatcatgcttatacattgattaagctatatactattttggatcctgcattttcataaaaattatcgattggaccatctattttaataatgacaattcaaaccctatattttttaaaatagtacaaaatagactccaacttaattttcataacctaatctagaagtattataacaagattagttatattttttttttacatctgttcgtgctaaaaattgttttaggttagttattttaaaaaaaattgatgaaaattaagttagagtctattttatactattttgaaaaacacaaggtctaaattgttatttaacaaaacagaatgtctaattagtaatttttgcaaaacacaaagtctaaaatggtatcagaaatttccatattagactgtagatctccctaaagggtcgttctagtagaccctctatttgtttcggcatccagaaaagtttttaagtccaatttttttttcatgactgcatacattgtagctatttaagaccacttgtaaatttttagaaaattccaaatagttcacaatgctgaaaataagattcaaacaattacttgccacacgtaggggtggcaaaacgggtttcgacatggcacacgaacacgaacacgacacgaattttacgggtt

SEQ ID NO: 402264 - DNA, 541 bp, Cannabis indica
aagataggaaattttgcaatgttcattcaaatgacttagacaaaacacctaatcctcatgaaatgttttatggtatctctaataattacttaatcttaagcaagtattttacattactgttaatactagaatgctatgttgatgacctagtctagtaaaaacttattagtttcagactaagacaatatattgagtatagtattacttcttcttctccttcacgggctttggcacaaaatcctctgggaagagcttgtacttcaaaaagttggcctcagtggtcaaccaagcgatattccgagcagcctttggcagttggagaattttttgtgccttctccctgagtcctaatgtgaagggaggacgataatatgagggaatctgctggaaccgagtgtggacggtatccatgccctctatgaagtagtactcgtccacaaaataccctattttgctgacattggagtccacaatacccttcagccatttctcgtctagttgggagaagtagaagtaccccgacctactctgcttgggagtt

SEQ ID NO: 402265 - DNA, 763 bp, Cannabis indica
gttcaaacagctcacctcaaaaagtacacttattagaaatattcaaactcacccttttaaagataaggacgagctatgaataataactattgattgatgagaccagggagatgaacaacaaacaaagaaggtctatcttgggatacacaaaatacacaatataatgacaatgcttggaaatggtagataatgaattattcaaagagctcccagctcattgacccacatactcgtgagtatgttgaaagactaagaggaacattctcagcatgattcatctcaaaattatcatattatgataagcgtctcgcatttgcttcactcaacattcatagaaggacactagaagtattaattgaagttaacttaggcgctgaaaactctcttcagaataaagcatagttaagataaccgtctatagatagattcaaagagcagttatttattattatcccatatgatgtaaatatgaattgtggggattgtctacgttttacaaatagttacacggataagattcccagggaataaccatcaccctaaactcctataaatagggacagaatccagaaaacaaaggatggctaatttgagaaaaagagagatattatatcaatacttccttgtactcttgtattctttatacaatttattaaattccagaataagatggactcatggagtatgaagaattaacttcaaaaccatgctaaaaattctcttgtcatttattattattattattattatttatattattttt

SEQ ID NO: 402266 - DNA, 345 bp, Cannabis indica
ttgtaccacaagttcaacaaagcgaagacaatgaaaactaagatgtcgcacatacatgctgcccacgcaatagcgcattacatcttgaggtttgcgaattccgtgttctaagccttggtatgaagccgatcatgtcttattcatcataaatcttaggaaggaaagtcattgggtttttggtcgtcttgacttgaatgagggaattttgtttctttataattccttaaggactgccaaaatgaattctgccgctaggaatgcaatgaaggcttattctgtgttactccctttgttttttgatctccttggattttggaagaataggttgttggaaatttattttac

SEQ ID NO: 402267 - DNA, 503 bp, Cannabis indica
aaacaaaaaaaaatatgaaaaaaaaaattatacaagtaagaatgaaaaaataattgtgtatttaatttgtatggttatggtatttttcttcttctatttctgtcaataccaccaaaacaaatagcatgaaaacagaatttttcttttctattttcattcctttcaaacaaacatgacataatgtgttaggtgtgtgacaagaaatattaaccaaaattttctactttttctctataccaacaatataaataatttttctgctttaaaataaccaatataaataattttatcataaaaaaaatatatgaattattaacataaaaatgtaatagctgaggtgagataatatataaaatagaataattattgacaaaataggaaaaataagtttaaaaaaattattaactaatttatttttaatatatatatattgagtttttttatttttacactttaaaatagtttttttttgtatttttacgaaattctatatagaaactcct

SEQ ID NO: 402268 - DNA, 1336 bp, Cannabis indica
ttaacgggagatcaaacctaatcgttaaatttaacagactgttaaaccaagaatgttaaaccaagaaatgccgttagatagacacttttaatatataaagatatataaaagcctttttttttcattataaattaactaaaatttacaaaatttatacatattttaagtctttagacaaagtatatataaaaagaaaatgagaaagtgcatagaaaaaaaaaaactatgtataatgttttgtgtggaaccatataaagaattaatggggatttttttttaataaaacagtattaaaaataaattaatgatttgttaaaaaaaaaaaatagtctataataagcactttatctgtaataaactttatttccttaaactatttgcatttacgaattttattaaaaaatgttttcttattttagaaattttattgacataaattgttttcttattgggatttgttaattaataactatttttctatttatgaaatttcttttcaaagatcaatttaaaaattatttaagagcatgatgccatttaaagattgttttgtaccatgagttaggtagtttatttttaggataattgatgaagaaattctttatgtttcaatttttatttaattaggagtgtgcataaatcaatccaatctaattacaactaatcactaaacattagatatctaattgtgaacggatcgaatttgacattattttttaatattttattgaattggattagatgttggatggggtatccaaaaatctaatacatttaatatccaattgaactcagtagtattttcatttagtttgaataagtaattaaattttatgttgttatacttaatatatatatatgcatttataaaaattaagattaaaattttactttttttacttagattggatccaatctaataaatattggatctaaaattttgatgaaactgatatgatccaaaaaatattaggtctaaaatattagataaatctaaatcaatgcaataaatatacatgaaatacatccaatagatagaacgatctagtcgatccaatggatattgaatcaatcaaatgactaaaattaattggatcgaatcgaatgataaaatctaacatccaatatataatttgatcatgtccagcctaaaaatattgaatgtggttcaatgaacactgttacacttaaccaccgttagatataaactgagattgtcgctatgtacacatgttacgaaaattatgattactacgcaagtatacacaatcaagtagtatctcaggcaagtgaggtcgaaccacagggaattggattaaatactactaaactatac

SEQ ID NO: 402269 - DNA, 814 bp, Cannabis indica
tcaaagagaagttacaaagtctcttatttccagtgaatacacgcctagcactggcatgttagcagacccactaacgaaaggcttacccatatgtatattttagaacatattgcccgaatgggatttttgggagcctagcttgttaagctcagtgggagtttattatttatgtattggacatgctagtattttgtacggattgcttatggcttgtgttttgttaagaacatgcattatgataatgaagtcacttctttattgttgttacatatgtatgcttatacatatatgttgttgttcaaggaagtgacaggtacaaagcgagatgaatgcgcataatctcaattttgttgtacctcatgcatgtttggattgattgttgatgattgtttttgaattgaatgtctacaaggtcaattcatacatgatatatgtatcctctaaatatgatgttgtgtatgttttatttgattacctttatgtgagataatagacattattatggtggcgtgattgtattgtccaagtgggagaatgttagaattattataatggactaatacaatcataggtttaattccataatacacaatcattaactatgtgcctaatgttgctaataaccataatgggatggttaacaacttaattatgtgttagaggcacatgagagcacccttaatactatagttggcccattaaattatagtataccataaaagaccccaaaagcccaattagttaatccccttagggttataagggcaatagcatgtatatatatatatggttatgtgtggtaaaggggtgagat

SEQ ID NO: 402270 - DNA, 819 bp, Cannabis indica
ataacattactattattattattattatagaattttaacaattcacaccactttaaaatttataatttactaaatactcaactcaaatttttttccacattttctctaccattactatttttcacacacaactataactgcttttttccaaaacacaaatatgtcaaattaatacttaattactttaattcattttttaattataatatcacaattattttttaaataatatattgattatcactaatgataattattgtttgtgtcaatttatatcttaattttttattatgtatattagagcacaattacaaaaagtatacaaatataatgttggataatacttcagtagagatattaaaaacgactttatatagagatattttttttaaatatgtgtcattacttcatttttatgtccatatttaatgtttattttttttatttttttttataaattatttatatataaaaaaaatactaccattatttttgtcacttctctctttttctttttctccccttctctctctaaaagttcttaaaagttactccttaaacgacccaaaactgtaacaaaaaactaagagctttgatatttttttcaaaaggaaaatagaggttgagcctgagaagttctctaatggtaaagtcaaagaacaatacaaaagaacattttttttgtggatatgatctcagaagagagagagagatataaaaactttttgtgcattatttttgatttcgctattagagaatttttgaatctcaacctctatttttatttaaaagaaaatattaaaattctttttttttttt

SEQ ID NO: 402271 - DNA, 1034 bp, Cannabis indica
agagagagagagatgagaccttcggtggtggtattgggccgtcggggttgagtgttgtcaatgctagagagagagttttttcgccgacagttgtgagatctttgttgaggcggcgccctggtggtgtggttgggctaagagacacgaagaaacggagaggaaaagaagaaatagaagaaaaatacatttcatggcatggtgagccaaacaaagaaagagaagagtaagagagagtaaaaaggggtgctatatagagttgtcagggttttttctagggctcgttgagatttttgacacccttaaaagtgtcattagagatgctaatatgttacattattagtgcaatatcataaaagcaattgtttttgtatgatgttgtattgtttaaattatttacgtggaccaaaataaaaggtttaaatatttcgttgttgtacgattaatttcatttttgacgtgaatatacactataaaaaaatttatttttatttacaataaaatttatgactaattataaataataattttgatattgtgactaaaatattggtagttaaaagtattagttacaaaaatcaaaatttgttgtgcctaaatcatgcgtttttagttacaatatgactaaaaatgaattagtaacaacttgtatctaaatactatatattttaataggatgtactgatgcacccttacctatttcggcatattcaaaaaaaaaaaatagtctaatttttaaatatcgtttacgttataattatttaagatatcctgcaaaattttgacaaattcaaaataatttacaatataaaaagtactgttcaaacaatctatttcacacgcgtataaaataaaatagtcacgcgtgcaacacattttttaaactatttttccggcgtattaaattttttataatttcttacaatttttgcgggtatgtcttaaatagttataacgtacatgatcatgaaaaaaaaatttaacgaaaaaattatttcaaatgttaaaacggttaaaagttcatcaatgcatctatt

SEQ ID NO: 402272 - DNA, 444 bp, Cannabis indica
gtgttccttaggttgggccgacactagtggttttataatggagtttttacacttagtatgtatattattgacacaatttttcttttctgtccttttttctctttattctttatcttgattattttttcttcaagcatgatttcttttttgttttcttttattcttgtgacttttttttatttatttatttatttttttattttttatatatatgttaaatatctaaatataagaataatttgctgttcctgaattttcggcaatgcttgatcatgcctcttaaaataaatgacttattataattttttctaaaatataatagttacataattatatttttttttgttaatttctgttttttattgttaaaaattaatatatttatcccctaagtttttgcccaaataaaagtttaacctcttttacaaattataatgttttatt

SEQ ID NO: 402273 - DNA, 774 bp, Cannabis indica
attgaatatatatttttgttactggtttattttgttattgtttattattgttttaaggttgttttatagttgttttattttatttatttatcacatttttttaaatattattgtactgctctatttttaatagtattagaaaaataataaaatttgtatgtaagttattttcttcagtatcctatgctccaatatatgtttatttttccttcgttgttctactgttagtttttagttgttctgattcttttcatttttgatgtcttcgcttgcatgttctcttgttatgctccagctccccacatctgttgcatttgttatgttgtttcttttcccagctgttgtaaacatacaacacaaactcagatcaatctaaggttagataatcaacaagaattaaaatgacaaaaccagaattataaacaatataattagaacatgaaaaacagagagaaaacacagaaaattatcctggttcggatctcaaatattgagtcctactccagctctcccccaaggagatttctccactatgaattagccattacaaacaccaatttcagtacaagatcgacaagaacactctcagtcagtctaggctcttcaacactcaaaactagagcaatttagccaatgtcgacttgagtttcttcagcatgatctcaatctaattctctctctctttttctgtctcactctctcttctttttctcttgccttacactgattacaaacaagagtttaatatatagttgttagtggctgacatgtcca

SEQ ID NO: 402274 - DNA, 549 bp, Cannabis indica
taataaatttaattattttattaatgagatcgataataatcaagtttattggagcttcaaaatataggtccatggtccccgagtcacctctatacaacactgtacacgagaaagttttatttaatgagtaaatttcaagtgacaattaatttctatgataaataaaccttaagggaaaaatagtaatttggaaaattattattttgattaattatgataattataaattgtataattaatagtatttaactatttaattttatttgatgacactatataaattagttaaatacaatattattcttaaataataaagagaaatatattatttgaaaaataataatttattttaatctttatgaaaaaagagattaatgagaattaatcaattattatttattgacaaaattaataataagtcttattgatggtaaaattgagaaatatttttggaccttaaaatatggcgcacagatgtagagtgacgtatataggcccatattaattttatttgattattttattggttaaaataattcaaattaaatt

SEQ ID NO: 402275 - DNA, 797 bp, Cannabis indica
atctaattgggtgccatctcatccataagattaaaaaaccagataaggtgataagaacacgtggcagacactcagatgcccccccattcctctacaaactcacacactctctctcctcccccgatcttcttctctctctctcttccactctccccaacccaaagaaaaacacacaatggcctcaccaacgctcgtaactcccacctcacagcccaaacccctctcttctttcaaacccaaatctttacccatcaccgcgtcctccaccaccggtaccggaagttcaacagttccattccgccggcgggagttcttatcactcgtggctgccggaagtgtatttccggcgctgattttcccgatcagaccggctctggcgggttcggatgatgagtacgtgaaagagactgaagaggttatcagcaaggtgagaaacaccattagtatggacaagaaagatccgaatgtggcggcggcggtgacggagctgagagagacgtcgaattcttgggtggcgaagtacagaagggagaaatccttattgggccgggtctcgtttagggacatgtattcggcccttaatgctgtttctggacattacattagtttcggcccaacagccccaattccagctaagcgaaaggctaggattttggaagaggtcgaaacttgccgaaaaggcccttttaagaggcaggtgaacataaaatatttcaacgcaagcaatttttctctttttcttttttgtgcttctatttttatattatttttttttgtttgataatattttactatgt

SEQ ID NO: 402276 - DNA, 812 bp, Cannabis indica
aataaaaaattaacaattaattattagaaatttatgaagattggtaaatataggtatatatatagttgtatagttattatatatagtatataattttttaagaatgttagtataagttatgtcatcgcagattttcattaacaaaattaaagcttatttcgtgatggtcttgcacagaaataatagtagtaaaaggaaaagaaataacacaactctttttatgtggttttgtagttaaaaattttgcatagtccacgagtctatcttattagatttctgatacaacactagggctctttctctaaaggatttttcgccctttttcactgtatcctgcccctatttatagtaacataggagggcagttaattacaatcaaattatttttccacaataataattccctgaaattgtggcatttgattatgtcccacgtaaattaaatgtagttattatttgaatatcacacaattgtgatttatcctcttttatccggtcaatgtagatttaaacacgctccaaagtgtatcttgcagagttacctcgctgggataacaataattaccctaacagctagctgaagctttttccatgtcttttcgaggttgataatataaataccgtcgttttagctattgaaaacataacgctccatctgacaatcacagttcttggtgacaaggtgagcttcagcagtcaacatcattttaatgtcatcatctatctaagaaagctgactcgacggagtagtggatctcattgaaagatgtttgaagcttattagtgaaggtaccatgagtatgtcttcctat

SEQ ID NO: 402277 - DNA, 1170 bp, Cannabis indica
gaaacaatgattgtattttaggcaataataatgtgtaattaatttatcatgtcaataaattttgtttttctctatttattatgtgataaaagtctctttttgaaaaaaatgaaaactatttgatttatttgggagatgtgaagctagacaaaatataaggtgatgataaggtggaagttgctttatttttacaatgcctagttttaaatactatattttaattttttattaacctttagtaatgagattgaatttatacaaaaatatggtatttttgtcaatgtctttataatttttatttttatgatgtttttattggcttgtacatttttttcctatcctcatcccttttctagttgcatattgttagaaaattaaaaaataaaattattttaaattggaaaatttgcggcataaatacccattttattcattttgttgctaataaatactcaatttttaaaaattgcggcattaatactcaaaacattttttacactaagtcgttggtacccactaacagaagttagtttgattcttttttttttcacctaatttattaaacattacataaaactaattaataaatttaaaacataaaataaaaacaaaaaaaaattaataatcctttaatacataaaatcaaaaaaaaaaaaaaaagaaatttcaatcgcaccagacgagcgaccaagagtctcacttcacaccaccatgatgagaaaccgaatctccatttcgcaccttctcgcttcttaaaccagattccgaccaattttttttagcaatctccattattaattgcaatactcagattttgagagaacatcaatgaacgaaaacgattatcacggtatgtgattttacttttctcttaacatatgactttttatgtttttccctttcttgttaaagataaagagtatgatagtgatttttgtatgggttatctcaaaacacatgagttggagtatgattggggttttctattgtgtgcaatagtataactttcttttcttctcaaaatctgtgttaaatattaattttatttgcttgtataattactttctgtatggtaggagtacctttattttgttttattatgatagtgggtatgttttggaaatgtacatgtttactgttactgttactttgttctttttttgtctgaaa

SEQ ID NO: 402278 - DNA, 507 bp, Cannabis indica
acaaataaaacttactcatgaattaaatcattgtataatatatagcattataaaataaaaaaataaaaaaaactaagaaaatagaaactatgaaaaaaaaggtatgtgcaaaaatatatattgcattcatcaaaaaaaatattataactaattgagcaagactaaattctttagtcgcccataaaaataatgcaacactaattttgggacaaactatggaacaaatagtaaactatattatataggctataacacaatactcacaaaggtttctaaaccatgtgggatttttgttttcaataaaacttaccaatgaatcaaatcattgtatgatatatagaattaaaaattattaaaaaatataaaatttgagaaaatagaaattatgaaagaaagctcttatgtaatgccacatcaactctcaataactttcctttatatatagatatagatatagatatagatattaatatagggatatgattttgtcccgttattgtactttca

SEQ ID NO: 402279 - DNA, 696 bp, Cannabis indica
tatatatgtattctttttcatatgtatagataatttttatatatgtatttgtgtttatatacatatttgttgttttaatctttctagctatacagttgtatttattttgatttgtaaaacgttatatgtgattgtatttgttgttttttctttttaatatatataggtgaatattctgaaattgtttttttttagataatatttgtatttgtttttgttattgtgtaaatgaaataatcccttagatatatatatgtagatgcggcttgttttttttttttgtttatatattttaataattttttggtttatattgataatatgtaatatttaaatatttgtgatgtatttgaaaaaattttagattgtgtaaatcaggtttaaaatttttgggtagtttaaaatataaatgttattttgcccaaattttgttaaaattttgatataataaaaaaaaatagaagttatatttaaaaaggaaaattataagttaataattatttataaaaattaatgaaattattttaaaattaagtaatttaactaaataaaatttgtattttttgaaaaataataataaataattaaaaatttaatatataacttttattagttgaaaatagataattaataattgaataagtaatgagtttaataattaataaattcttacaataaaaaatattaataaataat

SEQ ID NO: 402280 - DNA, 590 bp, Cannabis indica
gtgttactgctcagcgtgcaacaggtactgaggatccctaaagggatgaaaaatacaagtgagcatctgaaaggactcaaacttgggagtgcagacccatgagccctccacctaatgtggaacgatcacctgttagtgaaacagtatatgagcaagcgtttgaaaggactcagactcatgaacgtagacctacaaagccaccactagccgctgataggaccaaccatgttcttgctgagagcaatccgaacaatgcaagaaatcgatctcctccataccattctcctcacaggttaaatgatttcaagcctcgggaccctgcaagggggaagagactgttggggattattttaccaggatctaaatttactatcatgtatgttatttaacatcctaaatatgaatttctaaaacaatggaatttaaacacatataaagttcaagaaatcttacattggttgcaatagaattaaatgactccttccacttagatctctaacccttgtatcttttctgtagtagagtatcaccaagatgtaagcccgattctccttcagttgattagattcttcacagtcttacacactatg

SEQ ID NO: 402281 - DNA, 501 bp, Cannabis indica
tcaatacatttcagcacatcagggggagaattatggtgaaccctttcattgtgcaccctccatatagtgtcaacaacaatcgaagcataaagaaagatgtcctcaactctaatccccctatttctaagatcccaaatgaatttcacccagtcccaaacacgaataccagtatcacacacaaggtagattccctaaggcgagtatcgccgcaagtgtaccgccacatcactagacagaaataaatgtttaatagattcatccctcaactcacagagtggtttatttattgagtcttaaattctacattttttaattattattttgccacttattaatacatttattaatcaaaaaagctttttatttttaatctcataaaaaaaaaagttaatcatcaagaaataaaataaataattgcattgtgttataaaataatataaaataatataaagtagatgagaagaaagaagaagaagatgaagagagaaagagaaagtgaat

SEQ ID NO: 402282 - DNA, 527 bp, Cannabis indica
atatactctacaagaaagaccagcttaacacatgaaattgttgtaaaggatggaggatgcttaagagcactttctttatcagaatcttatatccaagagttgcctaattcaattggaaatttaaaatatctcaggtatttggatgtaggcggcacagcaataaaagaactacctgcttcaatttgtgtgttgtacaatttggaaacattggtattgacatattgtaaaacactcacacaattacccaccaacatttcaaagttaatcaacctgcgccatttaatgatgagagacacttgtttgaaagagatgccgccaaggatttgtgatatgatgaatcttcaaacgttgagtgattttgttttgtgtgaaaatgacggatctaggatcaaagagctgagtaagttggagaatttgcatggaagcttgcagatttcaggccttgtacatgttaaggaagtgagtgatgttttggaagggaacttgaagaacaaaaagaatttgactgagcttattttaagatggaa

SEQ ID NO: 402283 - DNA, 644 bp, Cannabis indica
aaaaaaaaaaagaaaaacaacacctttctatttggaacgatactttttgcatcaattaattggtcgcctatttttaaaatgagatatatacaaatttcttggaaattatatgggatgctgacatttatatataataatatagtattatattattttctgtcaccaatcgtttcacagaagaatagagcgagtgaaaaagatgaaactttaaccatatactcttttttagaagaaaaattccaataaatcacattttagagcaacaaacccaaaaggagggaaggggtaagatcatttattgatcaacagtatcagcaataataatattttgaatacaatttgaataactagactactaaactttgttagtgacaacagataaagctagtgaaagaatgtaattccttgatgttttcattgattgaattgtaaatatatataatagggtgactatttaatagacacatttttattgtaacatgataattactctttttttagaattaaattaatcataattaacagttttgctataataattaggctaattagtaatttttcctatcgaactttgacatatactaaatcgtaccccctgaatttttttggccgttagaaattccccccgaactattgagattgtt

SEQ ID NO: 402284 - DNA, 714 bp, Cannabis indica
tttatttacaagccttcatttatgttacagatgatcaagatcaaagatcttagttgatcttagatcaaagatcttaatcttgatgattatgttatgacttaaatgtattacacgagttctttaacttgttcgttatagctgaccacttggatcgacccaatacttacatcttgggaacacgataatgcaatgtgggagcgctaatcatagatatagaagctataacttctataagtacataaaagtgaaacgatggtttccttagagcttggctaaatgcgtttaaatgattgagtaattatattagtttcttaaaatatcatttacaagtatttaagtgttttaaggataaaatatattgaagggtaaaacggttatttagtccctattcaatgtagaccatctataaaggattattgattatttagattgaaataatagataattcatagcatgtctatttttggtgaatagagcgttctatgtaatcaagagtacaattttgaatctatggtggagtcaagaggaattaataagatagagaatttactcgataatttttagaattacttatattgagagcttggtcatacataggcccacggtccccgcactaactggaataatattattttgtagtatcaattaattgatgtatttatgaattttactaagaaatgacataattgagaagaaaaaagaaaaaagagtagt

SEQ ID NO: 402285 - DNA, 2620 bp, Cannabis indica
gtctggttcttgagtcttgggttcggccccggtgtccaggttcgggtcggagtgtcgtgttccgatttgggtctgggtttgggtttaggtctgattcctggtctgagtctgggtctgagtctgggtccaggtccggatcctggtctgggtctgggtttaggtccaggttcgagttcgagtcccaggtgcggttccaggtctgggtctaggtcagggtctcgttacagatctagcttccgagtttcgatcctggtctgggtccgggttttggtccgggtgtcagtcttggtctgggtacacgacgtgtcaaggcccgactttaggtcacggtttgggtttggggctaggtctgagtttggttctaggtttgggtccacgtcctagtcacggtcctagtcttgttcgatggtcctggtcttacggttcttgtttaggctctattctcgggtcctaggtttgggtcaggggccgggtttgggtcctggtctgagtcccaaatcaagttcgggactagggtgcggttctaggtcccacccccaattttgtgtcccgagtctggttccatgtttgggtctgagttcgggtcaaggttcggcatcgagtgtaggtttgggttgggatctaggtacgggtttctgttcgggtctaggtctgggttggagtttgggtcctagttcggttacggttccaagtttaggtccaggtctgattacagttccaggtccaagtccaagtcctggttccgaacctgttcccgggtcccagtctacttccagtttcagttctaattttggctcacaaggtacgggtttgggtccaagttgcgatttggggctatgttgagggttgcgtcttgtttcgggtcccagtctaggttcgagttcgaggctgggtcccagatccaaacaccgactacgggttcggtccaagccctaggtctagatgtggatcctgatctcgggtctcagtcaggttccatttcgtgtgtcgagtcacgagttggttcctagatttaagtccgggtgtggggtcgggtcttgggtcacggtcctagttccattgcccaagtccgtatctcgattcttggtttaagtcccggtttgggtcccattctaggttcaggcatgggtcctagtcgaggttcaggtttgagtctcggtctgggtttttatttgggtttgggttcgggtctgtgtcttagtcctggtcctggtcctagtcctagtccagttccagttccaattgcgtttcggagttcgagttcgggtcggggttcgagttctagttcgagtttgtgtttgggtccagatctcggtctaggtccgaatcaggctctcggtgtgggttggggtccttggtctgggtcaaggttttggtccgagtcctatgttttgatctcaatctgagtctgaggttagttctgggtctaagtcctgtgttctgatcctggtctgggttcgagtttgggtcctggttcaggtctatgtttgggtctgattcttggtctgtgtctgagttttggtctgggttcgagttttgtcctggtatgtgttcgtgtccagtttcctgtcctagttgaggtcttgggcaggtttcatgtctgggtctggatctgacttcagattcccgggtccaggtcaggtcctggttcaggttcaagtctaaaatttacatcatggtctgggttacggggcctgggtgccccatctaagtccggttcctaggtcctagtctagttccaatttcgggttcaggtcctgagtcttggttttagttctggtcgcggtccgtgttcaggtccagggctcgatccctatctttgtctgggtttaggtttgggtccttttaagggtctagatcctggtctgggttgcgagtgtcaggatacggtgacggcttaggaccaggtcaggtccaggtcccggtcccggtactagtccaggttaaagtcttaggtctcagggcccagtcctagtcaaggtctcggtccaggtctgggtctgggtcataatttccagtttttagtctaggtctgagtttggtttagggtccgggtctgtgtccaagttggtgtcagggtctgagtcttagtttgagtccaagtacgagtttttcgaatctcggtgtgggtccagatctgagtcaaggtccaggttcaggtcttggttctgggtcccatgttcgtgtctgggtctgcgtctgcgtttgggcctaggtcctgtgtttcaatcccggtctaggtctgtgtcggtatttgtgttcgggtatgggttcgtgtccatgtcaaggtctgaattccaatttaggtcaagggcttcgtccgggtctgggatcgtgtcccgagttcgtgttcaggttctggttcgagtctcagtgctagtctaggtccaggactgggtctgaacccgagttctgggctaggttcggtctagttctgagtccgggtcaaggtccaggtcacggttctggtcctgttccatggtcctgatcacgttctttttccagtttcggttttgggtcccaggttttggtctgggtctaggtccttttccagcttcgggtccttgtccgagtccctgatcaagacatcgactatgggtcgtgtccaagccccggttct

SEQ ID NO: 402286 - DNA, 629 bp, Cannabis indica
catgctctctttaatgcagtttcaaccaatcagttgaaggttatttcaaactgtgaaattgccaaggaggcttgggaaaagttaaggataaagaatgaaggaacagaagttgtcaagaaagctagattgagagctcttgcaaaatcctttgaaaacttgtccatggatgaggaggagtcagtgacagactctcatgccaagctatgtgacatttctaatgagtcctatgctctggggaaggtatactctaacaagaaactggtgagaaaggttcttggtgccttgccaaaaaaattcatgtcgaaggtcacctcaattgaagaaagtcgtgacattgaagctcttaatcttgatgaattcattggctctttgcagaactatgagatgtctctgcaaaggtggtccaaaggtaagaaacagaaagatcttgaaaaggacaagagtgaaatgggagttgcctttgttcttaaagaggacaccaacaaactgaatgaatcagctgaatgctccatggatgagaactttgcccttcttgcaaaaaattatgccagatttttgaaaagaagaactcaggtccaggaaaagaaaactctagtggcaaaaaccagtccagtttcaacaaagctcct

SEQ ID NO: 402287 - DNA, 992 bp, Cannabis indica
ttttttttgggtttggaacccagtggccgcagcccgcctcctgttggtggcctgggattcgaacccaagtgtcgcggccccatgtagggaatgccgcgacccgcccttcgtttttgggcagattcgaacgcgttattcgaatcctcataactttgtgatccagactctattttgggagttctatatatcgttggaaagctcgtttcaagctctatgtgaatatatgtgatttaaatgccaaatgttatattatgtgaaagttgaatcaaggattaaccctatagttgtaaatctcaaagattatgactaggattaccggcacttggtcaggagcacccggggatttggaatctccacatttatgagacatcaggtaagatagtagattgtacgtagagttaagcacggtggcgctcatgatataaattgtggctgtcattaattaagaatcgagattagggttattaccctaaaatgagtggttatatgttaaaagatgttgaacgttatgccatgctaaagatgttggaataaagaattatgcattttaaggcataattaagctagactcagtaaactagtaccttgagtttaattttaatgcggtctagggttattaccctagaatattatgaaggtaaaaaagtaatgatatatggtaatattattaatcttgtgaagacatgagttagggttattgctcttaatagatgttatttgagcatgttgtaatgtgttatattagagattacttagtatgcaagttagtgttattaccctaagattttctatgttatggtatatattgaatgcacacatgtatgttaagagttatgtgtataagacataactgggttagacctggtatgtatcaccgagataaaccaccaaaagaatgtaatgtatggattacgtatatatatgaatagggttatgcgagcgaggcataaccaggttagactcgataactataaccgagataaaccctacta

SEQ ID NO: 402288 - DNA, 506 bp, Cannabis indica
atcattaactgtccacagaagagatgcgcgtagcttgaacacagtgttggttcaactatctctcgtatctactctgctaacccacaagtccttcaactcatctactaagggtcttaaaaatacatctatgtctatacccggtgatttttttccaggaataagaatggccaacataaaattattatctttcatacataaccaaggtggaagattgtagttcgccaaaactacaggccacatactgtaagcttggctcatgttgccaaatggattaaagccatcagcagctaaacctagatgaacattttgaggttcactagcaaaatcaggatgtttggcatcaaccttccacgctgcaccatccacagggtgtcgcatcaccccgtcatcttttgatttatcagtgtggtgccataccatgtatttttgccgtatgccttaaactatatagtctcttcaatcacaaaattaacggaaaataacgcatcaccttatgaggcaccttt

SEQ ID NO: 402289 - DNA, 1207 bp, Cannabis indica
ttttcctaaaaatatcaacttttatcaaatataacttagaggtcaaaatgaccattttgcccttaaggccaaaaagcacacacataaacacttaagggcattaaagtcatctcacacataaataaacccaattaatttttagatttctcacacataactttaatgtgaataattaatcccaaaattgtaaatacccggttgtaacaataccacaccaacctgtcagaacacacctgaaaaagacgacagaggcatactatataataatatagtcccataagcacattaataatttaatttcaatatttaaccttctcgggtcaaaattactaaaatgcccctagcacaacaatggggtcttaacatggcataaataatataaattctcatatattaaattatataataacataattccttaataacacatcattaactagttagggtttcgctaatccattttataatcctagggtattatagattgagtcaatgcatatggcctaaggatcgttaatcttggaaatccatgattacaagtctcggggtatatccgtgcaacttggaggtcaaccccgtaacaactcatgagtagagttagtaaaataaacttactaggttaaaatttttgtaggattttcgtagtgatatgttaagaattggatcttttcacaaacataagattcaaagatctctttcttatctttcttttgcatcttgaatcgtccaattctgatctatatcaagaaagttatggccaaaatagtaatactaccaaattgtgacagtttggtatgcgagtcggcaggctgttgggctgttcagcaccctagatattgtgcgaccccatggggcgttaggtgagcccatgggccattgggtgagctaaggggcatttttgtgagtcgtggaaccttcatgcaagtggtggagcatccgttcgacccgcaagtgaaagggggagagactatacatgtgtggataggcatcgtgtgcggggagtgtcaaagcgagtgtatgggggctcccatgtgaacccacgtgaggtgcgcatgcgagctgtgggtgagttgtgaagggtgagcttggcatggtgtaaggggtaaggggttcatgtgcgagctcatgggggcctcgcacgcgagccgtgagtgcatgtgggggagggagtgcatgtgagggggagtgtggtgtgtgcgagtggggg

SEQ ID NO: 402290 - DNA, 719 bp, Cannabis indica
tgccaaagcccaacgggacatgatgggtttgtatagactttaccaacctaaacaaagcatgcccgaaagattgtttccccttgccgaggatcgaccagatggtggacgccacctccagattgaagctattgtccttcatggacgcgtacgccggttacaaccagattaagatgcacaccgcagatcaagagtgcactagcttcaggaccgataaggggtatactcctacatagtcatgcctttcggactgaaaaatgctggtgcaacttaccaaagaatggtgaaccgaatgttcaagggccctctgggggaaatatggaagtatacgtggatgacatgctggtcaagtcaaaggcgtgcactagccacatggatgacctagaataatgcttcgaagtggtccgaagatacggaatgaaactcaactcgaagaagtgcactttcagggttaagtcggggaagattccgggcttcattgtcagtcagcggggagttgaggcaaatccagaaaaaatccaagctctcctgagcatgccttcccccaagaagcacaaagatgtccaaagtttaaccggaaaggttgctgccctgagccgttttatctcccggaccacagactaatgcattcccttcttcaacatcttgaagaaatgtcagaaattcgaatggtccgacgagtgggaggaggcattcaaaaaactgaaagagcacatggctaa

SEQ ID NO: 402291 - DNA, 883 bp, Cannabis indica
aaccaagcgctgctttaactcctgaaaactttttttcacaccgatcagtccaacaacttcagttcttttgggtcagcttcgtagggtgttgcatttttaagaaaccctcaacgaaatgacgatagtaaccagctaaacccaaaaggcttctaacttcagtagccaattttggtgttggccaatcccgaacagtttcaattttggccagatcaactatgaacccatctgtatccactatgtgccctaagaaagggacacgtgacaaccagaactcacacttcttgaacttagcgtaaagcttgtgctcccgtcatcgttgcaataatgatttgagatgcagttgatgttcttcttcttattcagaatgaaccagaatatcatcaataaacactatcacacacttgtccaggtaatccttgaatacctggttcataagatcgataaatgcagatggagcattggtgagttccaaagacatcactaaaaactcataatgtccataccaagtacggaacgcagtctttgagatattctcttcctgaattctcagttgatggtaacctaagcgaagatcaatgtttgaaaagatcgtcttaccctttaattgctcaaacatgtcgtcaatttggggtaaaggatatttattcttgatagtgagtttattcagttcccgatagttgatacatattcgaagcgacctgtctttctttttcacaaacaacactggagcaccccagggagaataacttggtcatataaatcccaagttaagtcactcctagagttggattttcagctctttcaattctgctggagccattcaataaggtgcctttgatactggttccgctcccagaaataactctattacaaactcaatttc

SEQ ID NO: 402292 - DNA, 697 bp, Cannabis indica
ggtctgaacccaagttttatttgacggggtgtgcttgaatcacaacgactggttcgtgatggtgctagaaggagaatcgggtctggtgtgtctacccctgtgcttaatgtcccttggctggtttctgatgtgaacccttgtgtcatttctagacatcctgtgttggctcatagcacggtctcgcagttgatgcacatcgatcgtaagcaatgggatcttgaggtcttgcatgatttgtttgaggcaagggatatcgagttgataatgcaggttcctctaagtgataatgttaatgttgattcttggttttggggtaaagagtcgaatgggttttactcggttaagagctcctaccgctatcttcaagaactgaaaggtgaatggggtgttcagttggagtctgacttatggaaggttctctggaaagttaaagtccccccaaggttcttcacttcgcttggaaagctatctcggggtgtctcccaactcgtacccaattgcgtacaaaacatgttcctgttgatctcgctgtgtgttttgtaattctgatgaagaaaccatttttcatgttttggttggctgccattttgctcaatcatgttggcataggtcgggtgtggggttacatttttctgcagaatctaccttcgccgattggtttaaggcatttctgtcagggggtagagtggctttggtg

SEQ ID NO: 402293 - DNA, 750 bp, Cannabis indica
gttgtcatattatctttttgtattggaagtgctctatttttcttgaagttatttcattcttttttttttttttaaagtaaatgagtgttctattgtattgttgttattgtatagttgatatgttttagatgagttggtgaaaagtataaaattgctaattaaaatgataatataaatagaatattattaatataaaaaactatggctattactataaatcttaaaacacttcattaaactaattctaaactaattctaaataaattagtggacaccttattaaactcattttatatatacaaagatatctaatttctaaatatgattacctttgacggtatttttaaaaaaatatttgtagaaaatctcattacatctataattaaaaaaaatgacaaatagaaatagtatagttttaataaaactaatcctccacttatagtttcattatacttttttcggaaaagagaattttaatttccaattggacaagatgagtaagattttaattaccattatattgataaaagaatgggagtgagcaaatatttttgatgaaataaaataatgctcatgccaacaatacacattagtcaatgttacttattacatcggatagaatttattaaaaaaattctagtaatatctaaataaccatagaaatacaattcaaaatctattgatgggttcttcccttgccatcccacttcttttaattgtgagcataaaacaaaaactctaaacaatatt

SEQ ID NO: 402294 - DNA, 840 bp, Cannabis indica
ctacacatactcaaaaaaatcatgaaatgttacagtggcgaagcaaagtttttttgaatcactttacattggacacgttgaagaaaaagattttttcaagctctaacaatcatttttaatcaaaaatagtaaaaaataatcacaattcttatagaggtaaacttttgtgaaatgtgttccggacccatccaataatacttttctctagtagtcacagtgaattcgtactactaagacatgaatatgaagatttgtttcgcgttaactttggtcaaaatggccctctaattcaaaatttaaaatattcttccttttaggttaaattttactaagttttttctttactcttacactcgttagtgttctcttaaaaatctcacccttcacatctcaaaaaattgttaaattccacagggacgaaagccaagactgttgtgcattacttttttattagacacgttgacagaaaaagtattttccaagtactaacaatcagtttaatcaaaatagtgaaaatctcacttttttttatagtggtagccctttctgaaatgtggcgcggaccaatctcagaatatttatcgccactagtcacaataaattcgtactactaagacgtgaatataaagatttatttcgtgttaaattttttcaaaatagccccaaattcaaaaattgtaaatattcttctttttcaatgtaaattttaacaagattttttcttactttcacactcctacacatctccaaagatcttgaaatttcacgggggcgctaagaccgttgtgcatcacttttctcttggacacgttgagagaaaaattagttttcttgcactaa

SEQ ID NO: 402295 - DNA, 985 bp, Cannabis indica
agacataacggcatgagtcattaattttcttatttttcctttggctatatctcacttttgaagatacgtttgtggcttagaagacctagatcaaagaggaccaagacaaataagaaatttattgggagaagaaagatgtttaattacctctcttttgtctgattttttttgtaagtcaattttttacgatatattgatatgagagtggaaaggtgagtggtgggcagttataagttactggagagaaaagtgggatatatattattaattaataatatattttttttcttttttcttcatatgaacgattctttctcttttttctttattattatattttagatatatatattaaaaatgaaaagaaaaaaaaaaaacggttaaaacagatgccccctcgagcatgcacgtggaaatttatatggacacgtgtgatgctcgagcgactttgagaattcggtacttgaactttctatctctccttctagatttcttcttttaccactctcttttgaaaagacaaatattttgcatatttatctctgagctgaaggagaccaatttgagcttttgatttggtggttgcatctgtttagattgcctacgtacccttggcgggatcaagcctttcgtagttcggagaaacactttgagccttttttttttttttgcttctttattccatgcttaagctttatacttctaaatgtattttagcttcttcctttgtgtcatggcttttgcatttagttcatgttttctgctttgaactttgagcttttgcctctttttttttttgttggacttttctttttgatttgcccaactttttcttgagcgttagctttttgctttgctcaatttttttttgagcttcagctttctgcagtgcgctattttcctaagctttagctttttgctttgcttattatttttcgagcgtttgcttttttctttgtgctcaattttcctaagctttagcttt

SEQ ID NO: 402296 - DNA, 542 bp, Cannabis indica
atttttgaaccatattaagagaacgattgaatttttttttcggaaatttaaatttagttaattaaatatatttatataaagattttaaaataaaaaattaaaaatatcagagaacatgggtaaaaatagaaataggtatttagaatgattttagagtgaattttttttttaggaatattaaatttaattaactatatatatttatatgaagattttgaaataaaaaattaaaaatattgagagaattaaggagaaaaaagaaaaatgactttcaattaattgtagagtgatatgtcaccgcctcatacttctcctttatatgaatatatagattattggacgaaattattttaaccctaatgggtaacaagtaggataaataacagattattaatatctacgaatttcataaaattataaaatatgtaaaatttattaataaggcaatattttttgttaatccattaatacgaaattttgtatgttaataagtattatcttaaattttgtccaactcacatggaattgttggaaattatttt

SEQ ID NO: 402297 - DNA, 772 bp, Cannabis indica
gggacaaattggtgaaaaatcagccaaaactgctcattgggagtcagtagtcgcgaccagaaggaagcctagtcgcgacccttttatctggtcacgactagagagatttggcagaaactctgatttttgagttttgcctgtggtcgcgaccaacccttaagttggtcgcgaccaggtacggaaatcaagatttttgacctaattcagattttttcccaattggaggcacacatttcattcctatataaggaacacgactcagaaggccaaagaaagcaagaacaggcctggaaagtgaatgaaagaggagaggaagcaatcttgaagagcgatatcaccatctagtttctttcttttaccctctgtctatcttttatgtctagttttgtttcagaattaatcatggatgtttttattattgttacgagctaaattttccatttagggaggatgatgaatgttgtttacagttttgcctagttaataaataattgtcattcctccatcttgatttgtaaaattatctatatttgtgtttaattctatgtgtaagcttgatcaccttctacatgttctatgatctcaattcaaaatctgaaaagtgagaattgagaatgctaaaattggataatcgaggttctatgtgaaacgagagtaattgcatgacttatgtgacacttaaattattacttaatgctgattacatgtccgtttaattaagagattaattattagagaacatgtggtttagaacctaaaagatctgaaaaga

SEQ ID NO: 402298 - DNA, 548 bp, Cannabis indica
aattaagtgatgaaattaagtattattggtatacccaatactaatactttaaaaggcatagtacctagcacttttctcgatattatactaatgtatcgctaattaatcgcagtgccatctataaaaagtgttgtacatcactaaagatctaatagcaaatgctatataattaattaatgagcggtatactctattattattttaattattattttaaaatacatatatttatatatataactagggatgcacatgcatgggccgaaaattggcggggagtgcgccccccgtccccatccccacttagtttccatcgaggataggacgggaaatcccttaatggggacggggttggggcaggaaatcccctaataaaaaaatagaatttacaataaagatttaaatatataaaaatattaaactacataaaaattacaatattacacattaattattattcaataaattaattattatccaaaacacaactttaaattcacaaaaagaatactaatatacttaaaaaaaaatacaaacatacattataa

SEQ ID NO: 402299 - DNA, 879 bp, Cannabis indica
agataacttagaataaaagacatggattaatttaacaaattctaatgcaaataatcacttatgaattatacgaaaaattgttgtgccaatcggggagaggtcggtcgtccaaaagaagttttccttgaaagaattttttatggaaaatccacgatgatcttgcgctcgccagagtgagtgccgagatagtaaaatcctcgtgcgacattcttcctcgctggaacggccttaatagagtaaagatactctatttccaacggagtggggcactgccaattcaggattttgataaaatcctcaaacttgcaaggcatctgtaggagacaagattcagttggaatggggcaagcccgaggtggtttacaaagaccttataataatcacaaagggggattattgctcctgccctaatgtgctcaaggctccaagcgtctatccagtcgagccacatgtactggtctcgccactggccccctcagaagtctcacgtgtaagtcgcacaggtgggtagcaactaaactcaccggctcgcctatactcaatgtctacagtctcgcctatactcaatgtcgcaagtctttagtgaatcgcctacgtaacctgcgacggttcgcacccttgactctattaactctgcctcaaaggcgacattagggtcctggggagtctttgatttatgtgtcttgggagacattatttcgaaatccaagtcacctggttcaatagcaattgtgactttaggtaaaaatagaggtttagccaaaggaatagacaacacactgggaggctcaagtcaagcaggatctcgcaagaaacggcgtttgccttcagtgatttcttgcaagaagcgtctgtggcgactagcaatgtcttcctgat

SEQ ID NO: 402300 - DNA, 620 bp, Cannabis indica
catttcaaaataggtgtaaagaattaattcttttccactcctttatttggttgaatatgaaaatattgaaatgactttttcaccattttagtccattgctcgtgggtgaaattcctcctgatacttgtccagtgatacatgcaaatgttgttgcaagttaacaacaacttccttcagtttctcaacctcggggctgagcttgttagcctctcctaggcttgaatgttgttgcaagttagcaacaatctcattcgattgctcaactaaggggttgagctcgtcagcctctcctaagcttgattgttgttgcaagttagcaacattctccttcgattgctcaacctcggggtcgagctcaagctcctcgccatactctatgtgctcctcttcgaggcccacaggctcctcgtcgaggttcacactgttggattttgtgccctaaataaaactcatttcaatataatcagatttactaattaataaagatcagaaaccattttatgttgcatggttcacatgatttatttcatgattatatttaatgtatagattctattaagtctagaacatatgtatttgtttatgattatagtgttgtcaacacagtggaatataatcat

SEQ ID NO: 402301 - DNA, 900 bp, Cannabis indica
aaaggcctgaataatactctagtcacatgtataaacaattgaaccatctctttcttctatggtattttttgtatctaataagctattgattttatgcttcacattctctttcacttggtgaacacaaacaatcatttcggttgctccagatttgataaatcaaagcagccaccactgctgtataaactttccttctgaacttgaatgttttaacccgagaagtccacctgattatgactgctagaggacggtcagatatttgccaattcaaccattctttgatctcttgcaaacacctgttactgaaatagcatttcaaaaaataaatgatctattatttcaagctcaatgccgcataaaaggcagctgccttcttgacagacattaaatttcagcaatcgattcctggtttggagtctcttttgaacagtcagccacattataaagttatgtttaggcatgttatatctattccagatttccctatgccatgaaactctgttttgatcaacatttaacagcttgtaaacttggtggtactataacttcttaccataattggctggaagtgagagagatttttatgtttttctttaagttttactatttgtttccaataccggctgccatcattggtttgatagtctcaccaatttaaacttttgatgtatatatgatgtacctattttacccataaattatcatgtttgatggcaacagcccacacatattttcctagtgcagcttcatttcataacattgtattcctcaatccaagctctcttaaatttttgggtttgcataaccgatctcataaatatatatgtattaaagattataaaaattataatattattatattaaaatatttcagtcacacttaattattattattattat

SEQ ID NO: 402302 - DNA, 982 bp, Cannabis indica
aagaacgtcaaaaaatagatttttcttaactaattaataattatattagaaaaaaaaaagaaaataaaaaataaatatcataatttggagaatataacggcacaaactttaatcttaattatgattgagattttttttaaaaaaaaagtatgaataactttttctgtagtttgtgtcgataactataagaatataaacaaataattaatttaaatcaataattagaatttaggtataccaaaaaagaaagaaattgtagaacatatttattgtaattacgctcttttctaattgatatgtggaaattttttgttatagggatgaaattaaattgtatgttttcctaatcataaataatatatgttagatatttttgctagttttaattcgttgtatcatatatatgtttgtaaagagattttatttattcataatggtcacataaaaaaggaaaaatcttaaaatatattacacataaaagaagaatatgagagaatatatattatatatgttaatggtggaagttttaataattacattaaatatattaaatatgtaaccattatggttatattttttttagtcattaaattactactgaatagttataattaatttgaaaattagatacaaataaataataattaacttataacctaatagttacttattaatttatttccttataaaacttaaatgaagattaattatattttaaaattaaagtaattataattattaattaatttttcataatttattattaaataaggatcttttagcaatttttttgcccttaaattattaaaatttttatagcaaaactctttataatttaaaattatacacatataattttataattaaaattttattatacttataactttaatttaaaattattacacttaattatttagtttttctatttaaatatttaaaaagtaaaagtggaatatgttgaatgtattttccaaaaaaa

SEQ ID NO: 402303 - DNA, 752 bp, Cannabis indica
aataataataataaaaatgtatttaaaaatatatgattcatcttatcaatcttaatcttaaatatatatataaatttttttaattatatatctaaagcaatatattaaattagatattatataataatgagaacagtaatttttttatattaaaatacaataaaattcaaagcatgaagcgatgagcttcaatagggacagaactagtgtgatgatgaaaactaaagacaaaaatgatagtgcaactcttaataaaaaattgtatattcaaataaaaaaatttgactgcacattatttcaaatatataataactaaaatcaaataaatacagaaaaccacaaaagcctcattgagtcattatttcaaacatataaattgcaaaacatgacatatcaaattgactcaatcaacataataaaatttagtatacttgttaagagtcttatttggcatggaagagaagatagaagatcaaattttctgtggttggattttaagtcgatagtgatataaattaagggggtaatttattcgtagaatgactactcagcctattaggcagaaattttttattgccattttttttattatgagggattcaaattggttaaagttaagatttgagactatatatacatattttattttatggaagaggtttcaatggttacatttttattgtaactatcatggttacatttttttaagccattggatcagtattaaatggttgtgattaatttggaaatta

SEQ ID NO: 402304 - DNA, 504 bp, Cannabis indica
tttgcccggtggcatgatttccagagaatccgtcgtgcacttctgataggagtcgtgcaacttcttcttgagtaacacatccgagcaatggcattaagaatcctcttctgtacctgatcccctctactatgattaatcgtgcaactttccttctcatttttggggcttaattccaattgtttgggagtttcccagattcgaggtaggctgttattggcgtcatccagtttggggaagtatcaatcacctcgatttcttccgtgccagtgatgctaggctcttcgaggaactggataggaaccaagttcgccttgtcacttacattgctgcttgccaatcgagctacgcgcctgcagttgtgttttcttcccttagagtttgtctgagaccgtagcttttgaattgtgcgagcaggtcatgtaattttctcaaatacgctatcatcttttctccccgagccttatattctctggatacatggtttacctgttggaaattatttta

SEQ ID NO: 402305 - DNA, 663 bp, Cannabis indica
aaatttatgtagtaactattcatgggtagtacacatttaaaagtattccatatatatttatatatatgtgagtattcaatgtttatggtaaaaatgtaacaaatcactaataggtaaaatttttatttagacttaaattaattatatactttgttgacttagaatttggccaactgacaacgaagctttattaattattgataatcatcatgtgtaaataataataataaataataaaagtaacacaaggatttatgtcctcctcaagcccgacgccctcaagcagctccattcctcgaggttttcaatttttcctaacaatccaatcattctctgagcatctacaacgatcttcctcaatgggttagtcttcaaatctcactttcttattgatttcttgaacatgccattgatgactttaagctttttcaagttttttgaaatctttgattctcacattgtagtattgcctaggcacgctgtagtaatttataatttactgcgagtttttggctaattaaaggtgaaagaacaacttagcctaattactagattcagattactgagttttctaagaaatcaactatcaattgtaactttaccattcaaaaaataagtaaatgagcaatcaataatgaaaacagtgatttacaagcttcatct

SEQ ID NO: 402306 - DNA, 950 bp, Cannabis indica
tttggagccttggaggtgatttggaagtttagagattttgtcaaatttttgatggacttttgctgcagcatttctgtgaagcacaaaaggaattttcgttcatgtggagaacttccgcctgctgcagcattttctagcaaattttagcaaagtaatacatgttcaagagcactcagcaagatttttgctgaactttgtggaaattttgctacagcaggcgtaatatcactcacattacgagatgaaaggtccatctattacatattactcctattttacttatatatatatttatattattattaaaaaaaaaacagaatttttttttctatattaatattaatattatatattaatattattttaatctatcctcataatttgaaattattacttaaaaaaaaaaaattaatttaaattttttttcctaccctacccgactccccacccagccctatcatctccttcaacctccatcaccatcaccattcttccttctgccagaaaaaccacctccgccccctccattcgacctccagaaaccgaccaccccccaccaccattcgacccccccagtccgacgaacccctcacccagacgcatctgtccaccccagaaacccgaacccacctccgtccttcattttttccaggcgaacccagctcctctccgcccccttgctccgatttcacaagacccgactgcccttcttctccagaacttcgtttgcccagacccgaaaccactttccaccatcattggaggagtttcaacaatgagaaccactcccgatttggctgatttcagacttcattctatggattttcaatcatggtgagatctttcttgatttctctttccagatttgggttgtgataaggttggagtagatttctcatcacaaatgtgttgaaattaattttgtacatgctgcccatttttagttattg

SEQ ID NO: 402307 - DNA, 1111 bp, Cannabis indica
tggttgcaccccatttgagaggggtcatgatttgtgtggaggactgcccatgctttgttgaagcaatctcctcaagtcaagataaagagaaggacgttgtgttagaatcagtgacccaatttgggaactctattaagaagaaaggcaaccaagcgtatgtggctgccttgatagagataaaaccagatcaatgggtagaggtacccgacaaagtggttggattgttggaggagtttgccgacaccatgctagacgagttgccgaaagaactccctcctaggagggcgattgatcacaagattgagcttataccgggagctgttccgccagcaaaggtgccgtacaagatgggtccttcagaattggaagaactcagaaaacaattgtacgggatggtggaatcaggatacatggtgctctctaaagctccataaggtgctccggtattgttccaaaataaatcagatggatcgttgcgaatgtgtgtggattatagggctttgaacaaagtcacagtaaagaacaagtattcggtgccaaatgcggtagacttgttagataggctgacaaaggcgtcatacttcactaagttggatctccgggcggggtactggcaggttcgaattacagtgggggatgaagcaaagacaacctatgtaacaaggtatgggtctttcaaatttttggtgatgcctttcggtttgacaaatgccccggcaacattttgcaacctgatgaacgatgtgttatacgagttttcggatagattcgttgtagtatatcttgatgatattttgatttatagcaactctttagaggaacacttgcagcatctacagaaggtgttggcaaggctgagagaggaaaagttgtacattaagaacgagagatgcgagttttttcggaaggaggtgaaattgtttggtcattgggttggtcaggggaaactgagaatggatgaaggcaaagttaaggcaatcatggattggcctatccccaccaaagtagtggagttgcagtcatttttggggctggctaattactatcggaagttcataaaagggtactcaaagagggtgagcgctcttactgatctccttaaaaaggatca

SEQ ID NO: 402308 - DNA, 898 bp, Cannabis indica
ccattagatcttaagagacaaggttcactcgaagaagaagttgataaattgttaactaatgattttatccacaaggcattttatccctcttggatctcaaattaagtccttgtcccaaaatcaaatggcacttggagaacttgtatagacttttcagatttaaacaaagcatgtcccaaagattgtttcccactactcaagattgaccagttagtggatgcaacaacaggacacgagttaatgacctttatggatgcatattttggatataaccagattaaaatgcatgtccctaatcaagagcgtacaatctttgtaacaaacatgggactttattgttataaagtcatgccatttggattaaaaaaaatgttggagcaacataccaacgattgctcaacggtatgttcgagaagcagattggacaaaatatggaagtctgtgtcgatgatatgctagtgaaattaataaaaagcgaggatcacacaaaggaccttgcagaatgttttagcattcttagaaaatacgacatgaaacttaatcctaagaaatggtcttttgggattcccttaggaaaatttctaggtttcatagttgatgcgagaggaattgaggccaatctggagaaataaaggccttgagatgccttcactaacaaagccaaaagaagttcaggctttgataggaagaatggcagcgctcaataggttcatttcaaagtcaacagattaatgccttctatttttcaatgttttacgaggcaatacgaaatttgaatggacagaagaatgcaaggaaacttttaaaggcataaagaagcatctgtcaaaccccccagttttggccaaactaataagtggagaaactttatacctttatctagctgtctcggagcatg

SEQ ID NO: 402309 - DNA, 503 bp, Cannabis indica
gatcagacattcacgaaagataataatggagatatctagtttttctctttctcaaattcaaattcaaaatctcgaagatgtgaaattggtagaagattctccctcgctcctatttatacttgaagttagagatctgcatgcgcattagtcaagggcctagatcttccaagaaaagcacaatatcaatccaatagttggggagctgaaatgcaatatttaatacgccttacagtactcaaggtgtttttccatcatcaatattctcctcagtgtttgtgctgacatcaaatagccgtcgttgcaataccccaaacatcatgcgccttcgaagggcgcgttaaattcacagactaagaaaacaaggatacgcgtgcattgtaagttgtagccccaaaagtcctcaacctttcacatttcgtgatatggaagatgaataagccactattttaaaatggttcacgtgtccaaagtgtccaaagtcatctggaagaaagactgcaagc

SEQ ID NO: 402310 - DNA, 547 bp, Cannabis indica
atccaaaggtgatttcttggttttaccctttcgttcctggagctgtaatgcttcttagcccaccactcaaactcttacttggaaaaaatcgctcgcttagagttagcccagagatggtttcctttcgtggcagagaagccttcgattttatacacatcttctgttggattatattttacaaggacctagatttaccaataagtatgttttcaacatcctaaatatgaacttctaaaacgatacaaattaaacacatataaagtatgagaaaccttacattggttgcagcagaattaaatgactcactctgctcagatctctaacccttgtatccttttggtcgcagagtataattaagatctgagcccgacactccttcagttatttggattcttcatagtcttacacactatgattgaggactaacttgctatgggtgggcatgcactaaatcactaaggctcgaatttaattgtgaagaacactataagaattttgaatagtagagagaaaagaaaagaagaagtttcaaaacactagttgtctg

SEQ ID NO: 402311 - DNA, 674 bp, Cannabis indica
ccccacatcaaacttgaccacaagtgagacgatccttgtcgatctttcgcctccaaaatagacgtgttgggaaagtacttatgcttcaaaacacggccaggcaatgagtttggcgattgtaacaagcgccaaacttgtttagcaaccatagcttgattaaagagcacaagatccttgaagcctaaggcccccttggatttcggctagcacacattctcccatttcactcaagtaattttctgcttatcattcttcgtaccccaccaaaactgaagaataattgaacgaagcttatcacacgtcgccacaggcagctggaacatactcatcaaataatttgggacagcttgtagaatagccttaattagaatctcacggccaccagcagaaaagaaactccgcttccatcctcgcactcgcttttgaaccttatcacaaatactagcaaaagtccgcttcttgttccttccaataactgttggtaaacccaaatacttatcatgagtggctactgaccctaagcctaaaatacccaatacacttgcacgatccgcatgtagaacattcggactgaatgtgatagcagatttatcgaaattgacttgttggccagaagcatactcataacactgaagaatctgacggatagattccgcctcccttccattggctct

SEQ ID NO: 402312 - DNA, 613 bp, Cannabis indica
cagccaccaccacccaccacccagcaaaactagccagaccaccacccagcacgatctcaaccggacctcaaccacactagaccacaaccacactcagccagaccaccaaaagtttcattttcctcaccccaaaatcaatgagtaagtgttttttatacaaaatattgttggtttttcattgtattgcaaagatatacacattattcgttgtattatgttgtttttgtgacttgaaatgaaagtagagttcgtacacgaacactgtttcttttttttttttttgcactacaagaattatggttaataccaacgccactattaccaacgcctaaaagtcctcattaaaaatgagggtatcaataacgacatttgcctgtcgttgggaaagctattcagttttttttttttaaaaaaatagttaattaataacgacttttttttttcaatagcgacaatatcgttattgaaaaactcttcaataacgacattgtcgttgggaatgtgtgtgtggtttttgaaaaagaaccgttgatttgggcggaaaatttcaccccaaaactgtccccaatgacatgccccaacgactatgtcgttgggggcagactgacacgtt

SEQ ID NO: 402313 - DNA, 650 bp, Cannabis indica
attaatgaggtgctagttgagtgtaataggctcaatatgtgcttcccaagaagttcaatatctcttttattttatttttagaaaaggcaaaatttttttgaatgtaataatcaactttattaaacacgaacttctactaccaaacaaggtagcaaattatttggaacagactccaaactaaaatgacgaccatgatataacatagcagcttttgcgaaattatgagccactatattagcatatcgtttaacaaaagaaacagaaacactccttaaacttgctaacaagttcttacaatcattaataacgatgccaaataaagataccatagacaaatgactatgcaaggcttgaacaacacacatgcattcaatttccaccttcacctgttgaacatttaaatccttaatccaactaagagcttccctaactccgatagcttcggccaggacgggttccacttgcccatgtgagaaaatggtattaccttcaatcaaaataccattggcatctcttgcaagcaggcccaaaccgtaactatgaccaccctcgaacaaagtcgctgtaacgtccccgcttcaagcctccattaggtcattacacccactgaatgatggctcttatacacgagtacgccactctggctgctt

SEQ ID NO: 402314 - DNA, 647 bp, Cannabis indica
ttaccatctgaataattaaaaccgaaaatatctttgctgacgtggactaacactaacagtacgaactccagacaaaacactacgagtccaggcgcaactggaatgcaactggacataatttgtcactacagaaaataatggttcttacaatctcccccttgacaaattatggtcaatgacaacaataccagtgcaaaacaaagcaaccatcaaaatataacagagtctaaacaaacagaaaagcaaacactttaaacaaccaaacaacaaatgcaccactttacacacaaaggataagtatttctcccccttcattgagcataatccatgtcaataatattgtccaaaaccaaattctccccctaagaaaataagaagtttatcaaagagctccccctgaatggcgacagaaaatgcaacatagactcctcattgcaaagaaattccaaagtatctattacaacattaaagaagaaagtcaaaccatctcacaacatgacctaaaacatatggatattagacataaacaaatgagagattgaccaagcaaaacaatcagatcaccacgatattacgaatgatgctacaaatgagatttatttttatttcaatcaaaaacatgccaaatgatatatctcaagaattaa

SEQ ID NO: 402315 - DNA, 619 bp, Cannabis indica
ttaatttcaatttttttgtgtaaatttcgatgtagacttttatttttcaaatctcaaatctaaatatctgtttaaaattaattattcttttattaattaattttggatattagtagattttgaacctgaaaaaggatcatttctacattttttttttgcttaattggttattttaattttaaaatttgatcattttatcttattttttaaatttaaggttagatattttgtaacgtcctcgcttcaagccttaattgggcccttacacacacgaaataatggttcttatacacgagtacatcactctaggtgcttcatggactgatgactggccctactgaccaacaagagtgtttccagcgtactttgtcctcactcgcacgcttcctgggaaaacttcccacgaggtcacccatcctgaaattatcctaggtcaagcacgctaaactgtggagttctttcgtgatgggctaccgaaaacaaggtgcatctagtataaaaggaatatgatgctctcattcttatccagtgcatttaatctagtttacattctgttagataactagaattttttagaagcctcttttcctttactaattttgaaatcctctctctctct

SEQ ID NO: 402316 - DNA, 562 bp, Cannabis indica
aaaataacttaaaaaaaaaaaaactcttggtgaaatttgaacattgacatctattatatacaatctaagttaatcattacaccaaaattaatattatgtcaataaatatcatcttttattacaaatatacatcataactaactaaaatgcatatacaattttttttctgattttttgtaggggccaatgccgctctcttctatgtgtctatcaccacccaataatcacatcttctaattaattcataatatttaataataattattaaattaaattagggagaattctacacttattaattgagaaatgctaaagggcaccagtggtgcctagtaccttcttatgtgtcaatatcgctattggtacaactaagtatcaggtcccttataatttaatataatagtttttagggagtatcgctagccaatcgcaacgcgacatgtcgcaaaggtgctagacaccattggtgcctaatagcattgctccttattaattacaaactattggaggatagggtgtcagcatttctcatatatttactctctctctcctgttctctctc

SEQ ID NO: 402317 - DNA, 859 bp, Cannabis indica
ctctctctctctctctcttatgctagtaaataaaacctgttaaaggatagtaccttaaacaaaattgtaccaaaaagtggagatccacagctacatgaagaatatgaaaaagataactttttgtatatgtattttgatatctcatttagaactttagaagttattggcttagcataaaacacattatgtagtcctttgccttgtgatgaacccttctagttcgcagttatgattgaaaaacagaattttcaaattaatttgtattcattatacacacatcatatactttaattagtttaccagttaatgatcagtgacatgaaaggtgagtactatcagtgccttcattttttacagcaattattgattataaatttatatttactagcaataaattgtcttagttgattctaaattattctcaaataaaggccagtgagttgtgaagttgataaagacataatagagaataagtgtaaatcaaatgagtaatttctatttactagtttctcaactggccaaaaaataacccctttcttttccaagaaaaagggtaaaagtatatgattacaaaatttgttatgtgaaaacctatgtcagtgctacatattacaattatcaattcaactgggaagtgatatcaatgaagatgtcttctctgcatggaattgtgagtccgcccatgggatgctcatatccgaattcttcttctgccatactaagcaagtcttgaaatgaaggctcatttaggtacgaaagaggtactacatgacgcttcttctgatcttctccaacatacactgcaaagtagccttttggaatggttgaacacttcaaagttgcttctttgatgcctgaa

SEQ ID NO: 402318 - DNA, 983 bp, Cannabis indica
ctgaaattggacctagatccagatccgtaacaaaaccaggttccggactccaaatctcacctagacccgaatggggagctggacccgaatcccaacccaaacttggactcgggaccaaacccgaacctgaattcaaacccaaacatagaatcagactagggacgcaaaaccagggtcgggacaaagaaccgcactgcagtctcgatcccgaacccaaactcaaacatgggacctgggacctgaaccagaaccagaccgagactcgtgacagtgatccagatcttgactagggattcgggtgacggggcctggaacaaaccagtagtaggtgtctagatcttggactcagactaggaccataacccagacgaagaaccaaacccgaacccagaccaagacctgggacccaaaattagaaactgaaaaagaatcgctgaaccaggaccctaggacaagacaaggaccgtgaccaagacccggacccagacctagaaccgagcacagacctagcctcggcccaaactgagactagaactcgggcccagacacggtcgtgtacccagaccggaactgagacgtggacctggacctaaatctgggaaccgatcccaaacacagacttggacctcgatagggatccggatacgaacctggactcgggccaagacccaaactgggatcgaaatgctggacctagatctggacgtagatcctaacccagacccaaacttggaccagcactcgtgacccgaaattggacctgcacccgaacctagacctcgatcggggtgcagacctgtacacaaacccatacacagactcggacctgaactcaaacatacacctagaatcatcatacccaaagctagacccggacctagacgcaaactcgaacccagacaaggatcagaaacaaggactaagacccagaactgcatctagacacagatcggtattggaacttgggactcggacccaaccta

SEQ ID NO: 402319 - DNA, 997 bp, Cannabis indica
ctgagtctagtcgttggtttcgatcctagtcgtcggttcgtagttcgtgtccgaggtgtaggtcgtaggtttggtctgagtttggactccgagttcggtcttaattttgggttcgggttcaggttcaggttttgtcctggtatgggttcatgtccaggttcttgtcttggttttggtccaagggaagtttccggtctggctctgggtcccacttctgattcccgggtctaggtcaggtcctggttcaggttggagtcacggattgacatctgggtctgggtgtcgggccctagctccctgatcttggtctcccatcaaagactggttcctaggtcctggtctgggtcctggttcgggttcaggtgtcgagtcatggttttagtccagctcccagtctgggtttgggtctaggtctcggtcccaatctcggtctaggttcatgttcgggtccttgtcagggtctagaaccttatctaggtcgcaggtctcaagtcccagcgagggtttaggaacaggttaggtcaaagtcccagtatgggtcccggtccaagttcgggtccttggtctcaggtctcagtcctagtcaaggtctcggtcaaggttctggtctcaggtctcaagtccaggtcttagtgaaagttccagttttgatttcgggttcgggttttgttccgggttcgggtctgggtcaaggttggggttggggtctgagtcttagtcctagtctgggtacgggttttccagatctcggtcttggtccaggtctgatttggggtccaggtttgggtcccaggttcgagtttgggtctgcgtctgggttcgggtccaagtcctgtgtttcgatcccggtctgggcctgggtctaggtcggtattcgggtctaagttagtgtcaatatctaagtccgaatcccagtttaggtcaggaccgtggtctgggtccaggatcaagtcctgagttcgggttcgagttcaggttcgagtctcagtcctagttt

SEQ ID NO: 402320 - DNA, 774 bp, Cannabis indica
aattaaataattacaagttatatattttcattttgtaaataatttaaagtataaatttctactcttatttttagtaatgctggtttagcaggactaggttatgttaattgaaaaatcatagcgtgcttaattattagggtgtcatagtttagtatcagagcgccatggtttttaaacttcttgtagaccggctgaacatgtataatcatcgccagagacaagctcgactcgtggtgcagtaagtgttgagagtaaatgattgattgcccttgtgattatttattggcctctttctgttttaggcagtatgttagcatctagaaatgaatgtaatatgaacttcatgattagtgttttaattgataaatgtttattttaataaaaggaatataatgttttagttagagtttaaggcaataagtgcgtaagtgtggtattggcgcctgactcgccgtggttgttaatttcagggctatttgtgaaaatggaccctcgacaatcatctagacagaaggcgagcatgtagagcctagtaatgaccaagctaatccaccggcaccgcctgcacctccgcagaatctgggagataatgtaggggttgataatgctaatccacctaccgactggcagcaaatgttccttaaaatgcaaggtatcatactttgtcaagaagatgaattatgtcagtttaggaaaccaatgttggaaattattttaccaagatcttagatctactcacaagtatgtttattaacatcctaaataagaactttc

SEQ ID NO: 402321 - DNA, 428 bp, Cannabis indica
atttattagtaaatataattttttttctaataaattttaatattctatttaataatagttttaataattaaataaaaataattgaaattataaaaaacacatcattttagtattatttcattaattataaaaataaaatataaaaagttaaaatatgaatttaagttcgtataaaaaaaacaagctagtttgagtatatatgatacgaatcagaacatgatacgattcattatttttttggtagcacgacatgatataattttattttatttttataacacgacacgatacgatataattcattatttttttataacacgtcacaacacggctcatatttacacccgaacaaatatttacatcactatttgtgggccccaacgagaagggagtggttcggtggatttaggtgtaggaaaatgatccag

SEQ ID NO: 402322 - DNA, 667 bp, Cannabis indica
attagttgatagttgagagcttaattaatattttaagagttaaaagtttaatattctatatatttgaatagaaccgttgacagtgttctttaaaaaaataatttagagttcgtttgatatactgtattgtattattttaatgtaatataatactatgtttagtattaaattattggtatgttatattaaattgtactatatttggttcacaataatattctattgaattttattaatattatattaaattatacggccatcgaaacgaagttttcaatttatgaagaaaaatacaagaaatagatataagttgtattaataatagaattacacttttcgtaactttggttagttttgccgcgaaaaaaaaaaattattagattaatcttgtcggttctaaacacaattttaatttaaaataattttatcttatacatattgtaattagctattttgattaattaaactttaagattgaaattttattttcaatttattaattaagtcctattatattattttgttgtttaattaactttttcaacattttttatatattaattttacatatttaagaaactaataaattacaatcaactaaatcaatttacaactaattctaagagattatttcaaaaatacaaaatatatatataataatataatt

SEQ ID NO: 402323 - DNA, 1058 bp, Cannabis indica
cgaggggcatgatttgttagatatcaaagtctgatgagcataatttagacataaacatacacaaattagtaaattaaatgaaatttggataaagtaccttaaagtcaatactcttaataggttctgggggaattttaacggtaagaaaaatttaaagagcataatttagtacgtgtacaaaatttaagggacaaaaattataattagttaataaataattatgtaagttttttttatgtaaataattatgaatataattatatatttaagtgttagtaaaaaaatatttttagtatgacgcaataaattttttgactaaagaattatcatttaaaaatttgtgactaaaaatattagataaaaattaaaacacaatttataattataaggtgaagaataattaaagaaaattattaattatatatgttaattacaaaagcaaattatattattgagaaaatgaaaattatttctacctccacaaattagaaatttggaagctaggttgacaaacatgtgagaatattaattaagcacatagaataaaattcatacatagaaaagagaaaaagaaaataaaaaagaaagtgaaaaagaaagttcaacacacatgggaaaaaggatgcatataatatcaaattctcaaggcactacccttaacttcattactaaggtacaaaaacaaacatatataattactttaaaacccaaattctaaaaagtaaagtgaaaaataattaatatttataataaactatttagaaataacataaagagaaataaaatatatgtaaagaagatcattataagtttatatgattgataaataattagctatgcatctaccactagagattattttttaatgcttaaaacatcacatggggattttgatattggtactttcacttagaaataataataataataattctcattttacaatcaaagctacaatgtaattggatttatgtgtaattagaagtaattgcacaatttgacatgtttgtctgatcatgtaattacactgtaactgtgtaattgaaagtaattgaggg

SEQ ID NO: 402324 - DNA, 581 bp, Cannabis indica
ttcctatgcagttgtattaatataaagtggtaacatgggagaattcactagacccttttttaaacttacattggagaattcagtggagcacaaatttcaaataattaaaataaaaatagtacattcaataccatcaatgaagaagcaattttggataacctgtcactaacaaaagcaatatttttggtactttgttatagatgtctcagaaatgcatcatgagcatagtaggtaaagcttctaaagtagtagtggtatgtatatatattagtaatttaaagagataaaaacagaaagccttgtgatgcacagactataggattaaacataagaatatttcaaattaattattaattgttaaattaattctccaagtgattagcttggatgccactcacacttcaaagtaaacacattccaaacttgccaatcaaatctgtcaaacgctcttctaaaagactagctacaatctaggatcgccatttagatccaagttcatcaaaagtaagataattaaaatatctgttggaactttgtatgaaatatgtaaaaatagaaaagtgaagtgtgtgagtaggagt

SEQ ID NO: 402325 - DNA, 530 bp, Cannabis indica
ggtcagccctgaggtcatggaccacaactaatctattaaatatcgaggtactaggtggtctcagtgtctgactggtttggctggtgggttggccagaactatcagtgtgaatgaagttattaggtataactctatttgaagagcggtcgggtaggatctgcccgtctaccgcttgacccacaggttggacctgtggtcggggattggacgactgaccattatgagtttgggcagtacgccaagtagcaaactcttctgtaccgcccaatggaatactggacgcagtagctggttgctgattagcaacttgataggcccttcatatcaatacggtagtctgccttgtgtggtcttcgatggttgcttgctgagccttcaatgtttccatctccctgtccctccactcaatgaactagcgtcactgctcatcgaatgcaaggtttatagcagcacagagatcctcttgatcatgatgcaaggcgttattatggccttgcatgagtccatgggcagcacggaggttttggatc

SEQ ID NO: 402326 - DNA, 842 bp, Cannabis indica
gagcgtgaaatagctgccataaaagcaacgcctgggagattgtacccaaaaataacctgaccttgagaaaagagatttatgaggcaaaccttgtggctcgcaagtcaagaggcaggagatgacccagagatatgctcaaagctcttaagggatgcaacctgaggaaacttagggaagactatgggtacagcttgggatacgtggaacatcggcgaaaatcgccaacccactatttagtctcatgagaatgaaactcatgcgaacccttgtaggaacaaaagtcctgacctccgtcaacaactcgattcaagacaaaagcttgaacctaaaaaagcctgaccttcgtcaatgactcgattcaagacaaaggactcattccatttgcaaatgagcgggttggagaataagtctagagtacatcaaatcacgaaacccaggagacaactggggcacgattctgttggaaaacttgatttggaagcctcgggatcaatgaaaaaagatgattccaaagggctgcctgatgacaagaaacccagcaagtatatccctttttataccgaatacactgagctcaatgaaactcgagaaaatatctacctcgcacacgtacaagaagttgttttcggcgagccaagacctatgaaacatgcgaggcgcaagagggatacaagtaagcgctgtgaataccatggtgatattggtcataccacagaacagtgtcgtcagttgaaagatgatagaaagtctcatatcgcaaggacaccttcattgacatataaaaggccaggaagatgcctatgatcagatcgatctgcccaataactagagcgactgaagat

SEQ ID NO: 402327 - DNA, 857 bp, Cannabis indica
ttttagttgcattaaacttgtaaagaatatatatatttatttagcattaaacttaaataaagattaatatttattttttacgtatttttttaatatttttaagttaatataaaaaattagatgtataattaattgaattagatccaattaaatttttaggtctaattgaattggatcgaataataataacaattttaaaatataattaaattaaatcgaattagaaaaaaaaatagattgcattggatgcaaccctacctaaatgaatgcataataaaatgaattgttacatatggacacaaacaagattgtatacttatctacaaacattaaatttgcaaaagaagatgaacaaaaattagaatggatattcgggcttttaagcttttacatagggctgtgtattaaatcgctcaaatcgctcacattgtaaaagaaatatagtttgaaattctttacagtgcggtcgcggtttgaattttttctaaatcgcacggtgcggtttagtttgcgattttgaattgttaatatgcagttcaaactgcaccccaccgcatattataaaaatactaatatttatatttatttaggtccatatgtgaaggacagcctaaaacccactaattattgtattgttatttttttttcatatttactttcaagtcttatgatatttttgacaagtgttgcttaaattttgttgtacttgatgatagtccaaaccgcagaaaccgcactgcaccaaaccattttttgcagtgcaatttctgtagttttttagtttcacagtgtgggtgcagtttgggaaatttaaaaaccgcatgtgcaagttagtttaaaaaaatggtcaaaaaccg

SEQ ID NO: 402328 - DNA, 1234 bp, Cannabis indica
agttctaactctcaagctttaagtttgaaactcaactctcttctctctttctctcacacgtcataggcatattctctccatcacttgagattttccatctccattctcatattgtaatcttaagagagccacttcaaattccacaatacttgtgatctgagtggtattatctctggtattaatacaaccaaaaggagagtagatcattacttattaactaagggggtgaacctttattaaatcacgtgtcttatttacttttctattcttattgtgtaacacgtgaaaagcatcagtaataaatacgactccgctgtcagttggccaaatttgaggtcaatagtttggtgctttcattgaaattgagttgtcaatttacctgatcaaacaccatggttaacataaggggaactccgacttcaacttctgcctcatcgggtctttctcaagaccctatggaagttgatcctaatgttcgtgttccagcaacaattagaatctccacgaacctgatggatgtggccaaccttgccatctcagcaggcatcacaaacctggccatcgcggctggttaggtggacactaccaacctggttggtcttaatgaccaacctttgccgcccaaggaggaccctattggaatatgttttaccaggatctagatttactaccgtgtatgttatttaacatcctaaatatgaatttctaaaataatgtaaataaacacatataaagtttaggaaaccttacagtgggtgcaacagaatattaatggctccttccactcagatctctaacccttgtatgctgtctgtagcagagtatcaccaaaatctgagcccgaatgtccttctcttgattctggatttttcacagccttacacactatgattgagataccacttgatgtgtgtgggcactcactctatcactcaaggtatgaaaataatatataaagaatgaagagaggggttggttcgaatataggtatagaatagatggctcaatttttcctaaaggcaagaaatttcatcatcttttaagtgtgagccatcactatttatttataggcaaccacctagatttaggttaggatttattaggcattaaaataatggaaatattaactggaaattaccatccaagtggccagccatagtaatgggcgccactttggaatttttccacttttgacaaattttccttattttctcaaaaataccatttttccaat

SEQ ID NO: 402329 - DNA, 829 bp, Cannabis indica
acatcaatgtttgacacgtgatatgaagataatgttacagagtagagtagacccgagtcatagcagttgacctggaaggagaccctagccttgcacccagtttgacttcgggatctccagaatggaagttcggacttcaataacttgaatccaacccattataccatgaggtagggctaagaatcagttagtttggtcagtttttttcatataaaaatctaaattttggttttcggtctggattggtacaatctgaaaactgacccaccaatccaggatcttatttaaagtcgaccaatccaaaccacggtttggtcggttcaaactgcccaaaatcgaactttgcattttttttttggtaaaataaaatctaatttattatataagtatattataagtgtaaccatacaaattaaaatatatagttaaaagtctaaagtctaaaacacaacataatacaacacaaaaaaaataaaagtacaatagtccatattaaattcatttcttttcttgaatctcctctagtttatgttctgcaaaaaaaatgaataaaatgtgtgaaagatgatgtaagaactagtattttttgtagtgataaattatgtcaagttgcgtctggaattcgtagtgtttttgtttggaattcgtaatgttagtattagtccacgtcagcaaagatattttgtgttttaattgttcagatggtaacaactgtctatttcgggttcttgatttagctgggtataaatacaacttcttggtattatgttgaggaacctttttttatcggagattagggattacatttctttcttcttgtttcgtcttt

SEQ ID NO: 402330 - DNA, 905 bp, Cannabis indica
agtccaaatttgaattaaacgacgactctagtcaatttttcagcttaacaataacagtatgcggctttaaggttcatcactgtgatagtcacctaggctatcacccatcacctatatttccccttttatgatctactttttttactcttttttatagttcgtaaaaaaattcagtttctttgataaataatctttagaagcaatttattaaatataagttttaaaaattaagagcatgtttgtttggtgtaatcaagattggaatggaatggaattacaattacaatatttggttggactttttaatttttgtaatctttttacattgtaatgagtaccacttgcatgaattctcatattacattactcaactcatgaataaagattacaattactaatacattacaaaaagatttttctacccttctctctcttacctctttatcaaatgtagttgacaataaataaaataaaaacattttggtcaatatattaattaattcaattttatttttataataaaccaaattaaaaaaaattaattaaaatgttcgttacaaaataaaccaaatatgtattactattacattccattactattcctatcaccattacaattacattccaataaatcaaacaccacataaatttacatatacataacatatcaaatgctataaaatagtttaaaaataaaaatgaattcttcttttttcattccagaagggttttttattttctttcttttttatttttttttcaaaaagtcacatttaattggggtaagttgaaaaataccacttttattaatcaattgatcaaatttacctctaattttatatttaattgaaacatacctctttttatatgtattgtacccgaaataccctgacataagagagtca

SEQ ID NO: 402331 - DNA, 1349 bp, Cannabis indica
tcaaaatagcatcaacatagatcaagcaaaacaaatttccactctgaccaataaattggctgaataaagtactccctatcacgtggatatcaatccattgcttaataccatctcatttctttgaaaaaggaaatctaccaatggaacaatcacttatcatataaaccaatagatatattagatttatttcaatttataaaatagaacttctgtacgatataaaatctgaatggcatgataacattggtcaagttaacctatcataaaattgcagtcataatcaaagaattacaattctagtaaacacaaaatcatactcgagaatgaaaacttccatttctgtttacatttcttttcatatcttcaattcttcagttgatctcagaaattatgttttcgtacaaatatctattgccacaatgaactaatgggtagagcatggtattatacgcataaaatgtatcctttaacctttcctgatgatctgagcaccatagtgccaggaaaaaaaatttaataactcattattctcataatttcattacagctaaagggaagaatatcacaacgctcttaaagcactccaaactccctactatgtttgatcagcattaaaatgtggaatttgtctacaaaaacaataaaaagtaaaaatgaagaattgaaaagtaatttttttaaaaatactctttggtattaaatatttgtaatactaaaattgaccaagtactaatcataaaaaaaatctaagaaatttgagttagacgataaattatatattgaaattcaaattttgaaaaatagaaaaggagaacaatgaaacttactgagcattagtgcacaatctcttattatagccttcttcttgttcttacgtctcttctttgaagtacgagcagtaacattttcagagtttgcagcttctgaatgcacaaattcaattggtaaattgaccccttgagaagttagaggaatggttgcttctaaagaagtttctgattatactatactgaaattgtgctttattaaatcatttccagagaggaaatttgcaagagtcgcagttgcaacaccaacaatgctattagaaattgttggagcattagtaacaggcaaagcaatttcaaccccaacacctgaactttgcaccttgttcatcaacaaagaagcatcaactttattcaatgcagcatataatttgactttagatttattgatgtcgtaaagaaccttcctcattccagaatcaccttcaacatcttgaaaattcaacaagagcacttgtgaaaacatagcactacaatatcatcatatgcatactatttttaaaacaacaattttaaattatt

SEQ ID NO: 402332 - DNA, 1031 bp, Cannabis indica
tgagtttgggttcagttcggtgaaattggtactttttgatgctcttcaaggtgaagttgtcgctgtttgttggctctgaagcggcgaaggactacgaccacaagttttatcttggttgaaaggaattcttgggtagaactattccttgttttgtaaaagagtcgtctcttcctttattggttgtttattttattactgttagaaatttataatttttatgactcataatgtggttgattgggcgtttgccggcccataaccaattttggcgacttgctctcacgtctattcctacgaacctcttttataatgaccgcgaaatctaagttttattttaattaaacgtcttttttttatatataaaaaaaaagagaatgaataaaaaaaaatataaaaaaattaaagaaaatagaatcctaaaataaatataagatgttaattacttcattttttttaaaaaaaaattataaaaaatacattgaaaaaatgtgagatatcacctcattattcttaaacttttttttatatatatacacagaagattacaaatatattacaaagtaaaataaaaaaaaatatatatttaaagattttgcaacacattaagtatttttaaatcattcgagattttttactaaattagtaaaaaataatataaccctttttatttagtgaaaacttaaagcatcctaaaaattgtaaaaaatatattaaaaaatatgtaaaatatcattttatcactacttatatttaatataagaaaatctaacatcacttcacatgcatatatatatatatatatcccataaaataatactttatgtatttggtgatgtatatatattatattagagtgagtttatatccttctcatgtccaaagttttgactatgtattaaacttttggacactacctactctacttttattagtgcatatttcacatgatatatatatatatatacagtagaacctctatttaagaatactctatttaagaataacctctaatttgttataaaaaaatcaag

SEQ ID NO: 402333 - DNA, 1053 bp, Cannabis indica
aaagaaactctgctgccaccctcgcccacgcttcctaaccttctaacagattccctcaaacacccacttttagtttctaccaatcaccgtgggcaaacccaagtacttatcatgagtagccactgatgtcaaccccaacactctaagaaccccatcttgatgcacttgttgcacattcagactaaaagtgatatcaaacttctcataatttgtcttcagcccagacgcaacctcataagttaggacgatatgctttatagtttcagcatcacctccattagctccatcaaaaacaaggctatcgttcgcaaaaaaacaaggtgagtaacctgtggtcccgatcttgaacaccctctgcatgagcgaacaacgaggacagtgattcaacatagaagaggaataaataaggagatagaggacatccttgtcgtaaccctcttgtcggaatcactcaacctttaggatgaccattgattaaaaacgtatactctggcgttgtcacacaatccatgataaccttaatccagcccttagctagaccaaactgtcgcatcatactggccaagaacctccattctacatggtcatatgctttactcatgttaagtccgagtgccataaatcttcttctaccgttatttcttttaaacaatgaatggagcagctcacaactaaccataatgttgttatgtatcgagcgtcctgggacaaatgcactttgaaaagatgagatgagggagccatgaacacttttcatcctcagtgataaagttgttgcaacaattttatacattacattacacaaagcaataagtcgatactctttcaccaatattggtttttatacttttggtatcaacaccacgtttgacttattaaactgttgcacaaaagaaccgtcatttaagatagcaatattagaatattttatatatggaagttattttctaattaaggaaatgattttctatttaaggaaataaataaataattgattttctgataaatgaatattttatattcattaaatctggacaaaatcaattatgtaat

SEQ ID NO: 402334 - DNA, 639 bp, Cannabis indica
tatttttttaaaaaaataacatacattttggaaagttagttgatatttttgaatagatatttaggtttgttaaaaacctaatttttcaaatttataggttttaattttaaaattaattatttcaaaaataatattttacgatttagatttttcaaaattaattaatttaattatttaattaatttaaattaaataaatcatatttccaactatcaaaattgttgcatgtaagtgttttatatattgtttattatcaaaacttgttttataaaacctattgatattcaatctaaattattatggttaacttgttgacagatccaatgatttgattttaaccatagtccaattgccaataggtcaaataaataatttgtaacaagtaaattttgtaatctttttcatctgtatataaatctcgtaacatgataggctctatctaaatcagtgtgtgcatgtgcctatatgtttgttttgggcctagatgcctttaggaagcccatttaatcttgataattaaaatggactaggttgctaaaataaaattatcacttttgatagattttatttaggtccaattagtattgggcttattcaatgaataacacttctttaattaaggttaaatttctctccttt

SEQ ID NO: 402335 - DNA, 987 bp, Cannabis indica
taataatgaaagagtggctcattctctttagcatttatgactttatgttttctaaactcttcgatgctaataatttctttcaaaaaccttaaaatttgcatcttaggctgtcaatattattatattttgaaattgtaattaattgtttgatgtagatgaaaggaaagaagaaagtttcaagagatcatttgactccaccaactcaaccaccgatacaccgaaagaggcctaatgaacagtctgtcaaacggtacattccgtctggaaagacacaattattgtctggactttcaaagattgtgaagaattggcctgctaagaaatcaaagagatactatattaaaccggaagtgttcggaggagaaggccaagagtgttggatcagcgcagacgaggtggaagatgtgtgcgagctctataagattggaaatactattatgcctttttggtgcatgtataatagtgaataactaagttaatatctaagctaaaaattatttatagaactgtttattaataatttgttttaatttagttatttgcaagaacacacacttaatcttggtgggttgaggaatacatacgcatttaataatcctgcttcagtagcaactgatgctgggaaactcaaacaacgttcagaaaatctatgtcagcgattgatgggtatgcaacctcaaaaatggttaatatgtccgcggaattcagagtaagtacgtttttatattaataaatgtaacaaactaatggatcgattagtcagttgactgaattaacatgttttgttctgtagtgatcactggatgacaattatgattcatgccaatactcaaagtgttgcatgtcttgactccacgaatgactctatcccaaatgatattatgaattgtatccaaaagtaagttataattttttaaatttagattatgttacaaattaattcattaattaatttcttttttgtttagtgttgtggacatgtacagg

SEQ ID NO: 402336 - DNA, 833 bp, Cannabis indica
atgttataaaagaaagagagaatgggtgaagtttttgatataagaggcataattttgggatatgaaatataaatctacattgcaaatagtgatttaacttttgttgaggttgttatttttttcttaatgtacacatattttattaaattttcctatatatttagatattattaaattatttaaatgaaaaataagtgagagaaagaaagagaaaagaagaaataataaaaataatactaaaataaaaaaaatttgaataacaaatagtgtgtagatacatttagagattaaatcgtacttagcttaaattttttagctattttagcacatttaatcaaaaatgaattgttgataatttttaaatttatattttttagctattataacttacttgttgttgtgagtgctctaaaatttcttttattatttttgtatggtgataaataactaagttaattccaacactgttgcaccctagccttttctctatgtgaaaaaatgcatgtggctatgtaaagcataataaattaattctgtcatactttctgcttgtttaaaccaaacctctctactggattcaattaattagactttgactaactattattattaatttttaattaatttaaatatacttgaatatacattttcattataaattttatataaattttattttacaagaatatactagaaactttaaaaagaaaaaccattaacaattaccaaaaattttctgttattttttttctgtaagatagaaatattaataccaaaagctaaaacaaaaatatacacacatctacaacaaaaaaatttatttttagtcataa

SEQ ID NO: 402337 - DNA, 647 bp, Cannabis indica
tttgagattgcttcaggttctccattgttttctggtttgacaatctaggttttttggtttttgccattattttattcctgggtgtgactgtttctctactttcttggggtgcgactgtcttccagggtgcgactggcttgccattgttttctggtttggctttcctggggtgcaattgttttttggtttgccattgttttctagtgtgtgatatttctagggttgtttttctagttcgtgtttgtttttcctgacatgagattgtcttcctggggtgtgattttcttggtttggtttggtttggctggttcacgtctgtagctctggtttgtgattgctccaggctttgtcgtgtttggttgttggttttagtcatggcttcattgtcttctccagtggaccttagtttggaaagtgtcgatcattcctctggaggaggaagaagagcctacagtcagttatgaggggccacttattgacgaggcggaggttgatactcgatggagtattatgtgtcatttttttacggatacgccgattgatttcatggcgatgcagaacctcatggctatgctttggaagcctgatatgggcatgtatgtgaaggagttaggaggtaacaagtatatttttcaattctatcatga

SEQ ID NO: 402338 - DNA, 639 bp, Cannabis indica
atgagatcagacagtcatgacaaagtgttcaataagtgcatcaacttttatttagcgaagataacattagtggcgacaatatcaatatatagctggtaaagtccctatccatacgacattcgcacatggaattgggggcaaatgtatcccaatttttgtcctcatgacgcggcatgcttacgtggatagaaccaatatcacatggtagtatagctcactaaaagaaaggccaagtcagcacctaaataaacaaagacccttgcactcaaatggggattaagtgacagactagctccctctcaaaagctggccagccacccctagctggccctatgctggctaacctagggatagcaccatggtcggctagcctagcctccacaagggcctgccagccaaggcgtgcactacagaccttgatggacacctctgcacgtggacaacaactatgggctgtgaattgggccctaagagtctaacagaaatggctgaataatatctagaatcaaggacactttggtcttttgtaaatatctaacaaactatacaaatgttaagggatttgaattgtaaacctagggtttaggcctcttatataaaggccttaacctctagttgaaaacctaagttgcctctaag

SEQ ID NO: 402339 - DNA, 1082 bp, Cannabis indica
aggtgaataaggtgcagtcttatagtgtatgattccacgtaatttcttgatctttctactaagttgatttttaatttaagccacaaatagtttaaacatattaagagcttcacttttattttattaaatacacaaatgtgaaatcagaacaatcatcaataaagtgataaagtagtatttaccattcctagtcaaagttccatcaaaattcataaatatcagaatgcattaaatttggaggctcagtttctttttctatcacagaattatgtggtgctttgataatcatggcttggctacaaaatttacatttttcaaaaccatttaaggataattcaagaacaaggcctaaactactcatgttcttgataatgtgtttatttatgtgacaaagtctagcatgtcaagtattaaaagaacacaacatataagcaaaagcattaactttattaacttgaacattcaatttaaacattccctcagttgcacaccccttccctaaaaatatcctatttttgcttaaagtaaacaaatcagcccttatagtctgtgtaaaccctgccatgttgagaatgtagcctaagaccagattttttctcatctctcgagtgtgcataacatcttttagaatcacagttcttctagagataaagttcatttctacatttccagtaccagcaactatagtggtgtgagagtcacccaacaatactttctaaccctcaatagcatcaacatatattttaaacatagttctatcatagcagacatggtaagaagttccagtatctacctaccacccttcagatccaccaatgaggttgatatctgaaatcatagctgtaaatgatagctcttatatcaggttaacatgcggaacagacactacaagaaatgtcacttttaccagcacagttcgctactacgttggtaaaagtaatttttaccaacgcattttgcaaactgggctggcaaagaggtcaaagttttaccagcgtagatttgcagtggctaaaatctaacttttaccagcgcatttacgtgctgggaaaagtcatctttgccagcgcttttcattttat

SEQ ID NO: 402340 - DNA, 461 bp, Cannabis indica
ttttgagtggtgttactggaaatttttagagtaattgttgtacatgaatgacattatttggtgctcttacatgaaacatcttatttgatcctagatacatctttcgcaataataataaggggaacttgcactttttttttcactgcataaacataaattaagaatagggatgagatatactcaaattttagattgattcacttaaagaaccagtatagtaaaattgtttttttttatttggtgctctaacatgaaaggataactaggtttttaaatgtgatatggttttggtgatggttgtgctacttcttttgagtggtgttacttgaaatctctagagtgagtgttgtacatgaatgacattatttggtgctcttacatgaaacatcttactgtttagatactttttttagactaataaaactaatgtattagatttttatgggtgactattcaatggt

SEQ ID NO: 402341 - DNA, 957 bp, Cannabis indica
tgtgtcaatttatgcacaaccccttactcactcactggttagctgttaaacgcatcctacgatatctaagtggcacaatctcatacggtttgcatttaaaaaaggcctacagatcatgatgttgtagcattctgtgatgctgattgggctacagaccctgatgatcgtaggtccacctctggtttcaccatcttttttggtgaaaatctcattgcttggcagtgcaaaaagcaacaaacgatttctcgttccagcactgaagctgaataccgcagcttagcaagcacggtagctgaacttacttggattcactctctcttcacagagcttcaaattcagcttccaagaccaccaactgtgtggtgtgacaactcaagcaccattcttctcacagcaaaccctgtccttcacgcaagaactaaacacatagaacttgatctctattttgtgcgtgaaaaagttctgcagaatcaagttcatgtcaaacatgtaccctctgtagatcaacttgctgatggcttgactaaagcaatctccagtcaacgttttccccattttcgatccaagcttacaattcaagctcttgcctctgccacagaagactcgaattgtaaacttgaggggccgtgttaggggtatacggttatattagttaagcaactgtttgtatcagttagttagttacagtcttagctgtcattctgttttcggttgtaaccaacttatgtctgttgctctaattctatcactatataaccatgtactcttgacactgaatcaatgagattgctctttcattcatcaatccctctttactttctttctgctctttctttcagtctttccttttcagtcttgttaccttgttcatattctgtttcactcttcagctatggccaagagattcaacatggtatcagagcaattcccccctctctctgcaaacatggcgaccac

SEQ ID NO: 402342 - DNA, 881 bp, Cannabis indica
tttgctgaaaaccaaagcaaagctatagagagagatggagagcatagagcataaaattatagaggtaaatggcataaaaatgcatgtagccgagaagggacaaggcccaactatcttattccttcacggcttcccggagctatggtacacgtggcgccaccagatactcacactggcttccctgggctaccgagctgtggccccggacctccgcggctacggggacactgatgcaccgccttcggtgggtagctacacgtgcatggatgtggttggagatgtgattgggctgttggatgccatagctgctgaggaagagaaagtttttgtggtgggacatgactggggtgctctcattgcttggtacctttgcttgttcagaccagatcgtgttaaggctttggtgaacctgagtgtggtttttaaccctaggaaccctaaaaagaagccttatgagactttgagagccgtctatggtgatgactactacgtttgtagatttcaggtatatttgttataaatccagaaaattaaaaaagagtatgaactttgcttttaaagagttaatttattagtcatgacatggggaagattactacatctttatgaaattaaaaccaaaatatatggttaatttgattagtatataatataaatattgtaacatttaatttttctttcttaagccgtatttttttttcttattttggtaagataatttattaaaatatggttaagttgattagtatataatataaataggctaattagtaattttttcccccgaactttgacatgtactaaatcgtgcccctgaacttttttggccgttagaaattccccttgaactattgagattgttaaatttaaggacttttgtc

SEQ ID NO: 402343 - DNA, 1053 bp, Cannabis indica
gacacgaacccagacccaaaaccgaataccgacctagacctggaccaggatcgaaacacgggacctagactcggacctagacgtagacccaaacccgaacctagcacctgaacgcagacctggacccatcccaggatctgaaaaacttgtaccaggactcgaactaagactcggaccccgaccccaacctagacccagaccctgacctagaaccaaactcggacccagaattagaactggaactatgattaggacctgaacctgagacatgaacctaacctaaaccataacccaaactcggactagaacctagactgagaccttgactaggactcggacctgagacttgggacctgaaccttgaccgggacctggacttgacctggtcctaaacctttgctgggacccaaaacaggatcaaaaccctgacaggggcccaaacccgaaccaggaccaagacagggaccgagacatggacccgaactcagaccgagtcctagactcaaaccaagactcgggacacaaacctgaacctggacccagaccaagacctaggaatccaacttggatggaagacctagatcccagaaacaagacccaaatcggaacagggactcaaacctgaactaggacctcacctagacccaggaatccgaagtcagacccagactcggacccgaaacctgccccggacccaaacaggacaggaacctagacacggaccatgaccaaacctgaacttgaacacgaaccgaaaattgcacccgaacttgggaccaaaactcaaacccatacctagaatcagacccaaacctagacctggacccaaacacaaactcgaaccttgaccgggatcggaacccaagacttagacccagaactgaacctggacactaatcgggatcggaacttggaacacggacccgaacttggacccagacccagcacccgaaccaacacctagagcatgattcaatcctagaccgaaattcgaacccaaacccaaactcgaacaaggactcgaaccgtgacccgaactcaaacccatactca

SEQ ID NO: 402344 - DNA, 733 bp, Cannabis indica
gttagctctctaatgttcatgttcagctcgttggcttttaatgttcatccaattttccatgaactagtgttgaaaatgttcgtgttgattatcgagagagtctcgtagctgttgttgcaagttagccacaatttggctaagctaggcaatctgaggatcagcctccttagggtcattaatctcgatgtgaggctccctaggtgggatctggtcattggtgccagtcccgggagcatttggtggccttagaggaagatttaaagagctagttttgaggcctactctcgacacctagggcgtgggagtagctccaattctaactccatcaactagcgtgcccctagttgattgaccagttgttgggattcctctgtcaacactcatagagcgtgtatcaaacatcttgttagtaaacttcttgagttgtggctctcaatgagagtactaaaatattgactcagaaatttagactagacttctaagccacacccgctcgctagattgacgagaatgaaaaagttattaagtaattataagagggatacaacacatttatagtagttcattccctatatcgcgtcagcaatagagctacgtctactttgagtttttatttctcacgagatggtattacagaaataggctaagtatcaaaaactccaatttctagagagagaagctctaaccttgtgggtagttttttaaatgtgtaaaatgagctaagggagctctc

SEQ ID NO: 402345 - DNA, 1271 bp, Cannabis indica
atgtaggatgaacacgtcaaaggttttagatattgttgtattttacaataagaattaaatagatggcatgtgctcaattttcttagtcaaatatgaaatattaataaagttttcgttcagtccaaatctgaagtaattaatcgctgaaaaaagttgatatcagtttacttatttcaatttagtctattttataaaatgtgtaaattatatattaacaaaatacaaagatagatatatcaaattttcataagcttatcgcatgttcatccctgtaaatgctatctgcctatggtaccaagagggtcgggggcggcgggcaatgccgtaaaccttctagggtctgtcgggagtgtcagtgagtggaaggatctcgacaagattgttgcctggcaaatgcgagcgtcttcaatgggattttacgacccggatttgagatcgcaacgtgaaatctacaaatcgataattattcatggcaatatatacagttcatggtggttcgtactcgataatatagtggtagttggttcgtaatctagagtataagagatgatatcggtcttattagtttttaacgttttttccgatggaggtggaggtggcagagcttaggaggacgatggttgtacgcggttgattagccggacaaagtccatgcacgtcatagaattgaatggtggagaaaattaaactaagtaattaccttatatattttaatttattaaaatttgtattcatttcaaattattttacatttaattatcctatttcgttatcaattagatttttattttagtaattaacgggttgatttgtgcatcaattatgtttgtataattatattaatttcattcacatttttaaagtcttaaacaattttaagtcaatcttattttttatattttattaattatttcttttaaattttttttatattattgacagtcaattagcatttataattatattaacaataatttatgtagataatattttattttctaagtttgatttttacaagtttttagttttgaaacgtaaattttcttttgtgattttttggtatttatttagaacatttacataattagtgtgtgtttggaagtaactttgtaattactaggtcgggtaattactaaggtggtaattacacagtttagtaattacactatattttaaaatgcaaggtgtgtttggatatgaagtggtaattacatatgaattcttaatatcttgtttggcaaaatagttagtaattacatggaaaaataata

SEQ ID NO: 402346 - DNA, 584 bp, Cannabis indica
tgttagagctttgttgcataaaatctgatggactaagtggttttcgcattcaccttgatgtagctcttggagaatgtaattggatttagccggtaagagacatctgagcaatggccctgagaatgatcgtttgtagagtttcccattgtatagtgtaaatttggctgctctagcccttagttttcttaactcgctcttctcatgtggaagggttccatcctctaggtaccacattattggcatcatccagttgtcttgttcagtcagactttttacatattcgttgggtttccatgtcgctggccattgcatgatcatcgcaagaatggtgactccatctttagtttgaatagattagccagagcgccggtgtggttgttctctagtcttggcacttggttaatggtgaattttgtgaatcttaaaatcttgtcttgaacaatctggaggtaggatgccatttttgaatctttggcctggtatgacccgttgagttggtttacgataagttgagaatctgacatgacttcaatggttttggcattcaaatcaatggataggtctagcccagcgatcaacgcctc

SEQ ID NO: 402347 - DNA, 663 bp, Cannabis indica
aaggtaaaagttaggggggttaaggtacctgtttccacagctgccattcatgctgtttatgacctaccaacatttattgtagaacaacaaccattgagacaacaacttcaagcaaggaacttgaattatgaggacatagccgaaaccctagggtatccaggccttaggttccatgaatttgatggagaaccgtatcagctgtatcgatgtgaactcaacccggtagccaaggcatggttatactttgtgagcgcaaggttggtaccaaacaaacattattctgatgctctgattgataggcttaagtttgtttatggaattatgaaagggtacaacttgaatgtgggggacatagtcagggtaacatttgatatggtggttgagggctcttgtggaggtggacttgggctcgctgatattattaccactttgtgtgaggcacatggagtaccacagtactcttatgatacaaaagcagtgccacaacgcagtattaccttgtccacaatgcttcgattcaaaccacctcaccctcatggtcaaccgccagctcagagagatcctcctgcaagagaaaaagaggagcatgaagacattgaaccaccacgtattgctgggcctctcgacccaaccatgcaattcactcatgatcagctgaattat

SEQ ID NO: 402348 - DNA, 609 bp, Cannabis indica
tcaatcacagctcctttgcgatttagcgttggtttcggagttcgccaatgccgatgatgatgatgatgaagatgacgatctgtctcagcaaccgattatcctttgggattgagggttggtttcagagtttgccaacgtcaatgatgatgatgatgatgatgaagacgacgatctggctcaacagccgattagggagcttggcttccttgagtaagatcagatataggaggcttgataggtttgattctgcaatttcatacgatttgagtgcatattctgagtaagatcagatatatatggggcttgataggtatgattctacaattttatatgatttgagtgcattgataaaaaaattctccaatcccgtctgggaaagcggcaaatcaacttagtatcctttcgaggtgggttagcattacttgcacacgatctttaagtgatttttgtaaagcccttgaattgctcatgattaggtcaacgattgaccaaggccaagactgtataagtagccttagttgagtaaacttctgtgcgaatgtttttgttatatcaatgatttctttttgaaattttatattattgtttacaggaaagaatgaccaatgt

SEQ ID NO: 402349 - DNA, 540 bp, Cannabis indica
gaaaaatcggggcaatattttgtgaaaagtgcttatcatttactggacaaaggcaaagaaaataggcatactagtgacaactcaggcttttggaataaactttggaacctgacagttcctcccaaagtcaagaactcgctatggcgcgcctccacaggttgtttaccaactaattgatctcaattgaaatctaaatatattgatgtaaattatctctactctctatgtaatactaaaagagaatcaatctcgtatgtacgttgattacctattccttttcacaggcttgaaggaaaagattgggaatcggtgtttcagcagtggtacaagagactttttgtgacttgttacacattgaaatactcgatttggtggctcggaatgaaggctagttacaatggttacttgggctttgtggaaaagtaggaatgaactggtttggaataaaaaacagagatgtaggttgtggtgtttgcaaaaattgtccttaatcaatgaaaaaatgctcaagactgttaattccatttttggcatatttaa

SEQ ID NO: 402350 - DNA, 642 bp, Cannabis indica
taaaatatacctacttttttttagtaggttgcccaatatacctttattctctacttaaatctaacatataatttacattaattaaaggggtctaaaaggaacatcatctatataagtaggtatatcttaaaggatataatgaaggtaaaaattaaaataaatagtaaaataggtatatatgttggattaaaatcctcaatatgggctcatatgtatattagtgtattgctatttgaagtttggcccaaaataaagtgatcattttagtaattatgggtcattgggtattaaagtgtcatgggctaaatgtgtagataccctaagcgatatttctaatttattgaggggctaaattagaaatacttaaaattaataacctagctatgaggttataaattggtagtggtccccaagaaacaagtgccaatttctattctcatcttcccccatcaagagagaaaattagaaaacctaagtcttgttttcttggaagatcattacccaaaatcaccacaaagattatctctacaagatggattaagatcatcactatctatgaattaaggtacgcttccgccatttgaattcttctctttgaatcaacaaaggtattctttagatctatagttatacacttataat

SEQ ID NO: 402351 - DNA, 826 bp, Cannabis indica
agttgcaataggggtttctatgcaattttatgttgtaatttcggttgcaaggctagttgcaatagaggtttctatgtaaaattctgtaaaaatacaaaaaaactattttaaaatataaaaataaaaaagtcacttaattatttaatcacattttatttttttaaaaaaaaattctaaataatttataataaaaataggatttaaacaattagttgcatgcatattttattttatacttatgcaagagattattttcgacattataaattattcaaaaaattttaaaacatgaaagatatttatcaccaactacatataacaccatataaaaaataatagaataaaacttcttaaagtacgagaaataggaaatgtgtagaagtaaagtgatatctccacttatccatttaaatatatatagaacacttcttaatgggtattacccattgatggttattaaacaatttaactatatatattaattttaaaaatattaaactattagattttgatccaacgacaaataataaaaagagaaatttgaatttctatgcttaatttaactacttaattaaaaaaaatcaaaaaatattactttttacactatatcaaaaatatttttatatacaaaatacttaagtcaaatttaacccttttttttgccgaaaaactttttttcttaatttttttttcagctgatggaacaatctcaactcatctaatgtaaaaatgagagattcttttaattagatagaaaaactaaacataaaaactcaattttcataatactacccattaaaatttggatccctataaaaaaatataa

SEQ ID NO: 402352 - DNA, 801 bp, Cannabis indica
gatggaaatgagataaaagttccgtagttgtaacgacaattctttgacgcaaaggatcaatggaggaagtcacaattaggatttttctctttttgtggttttttttttccttttattttccactaatttaatttggacccttagatacaattagatctaatgacttaaatgtaatgttaaaaataatgtaaaaatgtgcatctaatgattgggacccaattgagttctgtttacccgacaactaactctggtgacatggacatcaatatttgacacgtggcaagaaataaaattcccaaaattgagtagtcgtgagtcatagtagtcgacctgggagggtttcctagccttgcgcttaggttcactctgggaactctggaatgggtagtggatcccgctaagttatttctaactcaccatctttcattattctgaatcaagaagacaagaacaatcaagtacaaggccaaattgaaaagagatgaaacaacaccccgaaagtaacgtagtcacctagggttttcacccaatgcccaagttgacttcctaactagggtttcagttttcaggttcttcatagtgcaaatgcctcaaactttctactttgacatgaatcagacttgtcacgaacatatttgaggtattagaattagaatcaaacactttcaattttgagcacctagcactcaggtttacatattatcaacctggggtgcttccaatcacaatattgaagaagtatcctaagcattttattcgtctccatccaaaataaagaatcaagtgctttcgggaaagaaa

SEQ ID NO: 402353 - DNA, 849 bp, Cannabis indica
ctagcagagttggcagaagctctataaatccaaaaaagatggagatcttggctttcgttccctcattcattttaatcaggctctacttgctaaacaagattggcgtatcctcaaacatccaaactcaattgtcacaaaaattttagcagccagatactacccaaactcatctttccttaagtgctcccttggtccctctccctcttttgtttggcgtagcatttgttggggaaaagagttgttgcaccagtgtaacaccctaactagcataggcgtgttaacgtgattttaaacataatgtgcagctcgttgttaatcaacgaggttaatgaaaatcgtgattaattaaaatttgcttatttaattaaatacttatagtattacatacaaaatatttcgggatcccgtttacaaaacactttacaaaagtttgctaatcatttacaaaatatttgtcgcccagcggctaacagcaatagccctgatgtcccgaggatcgtacgctccaggcctaaccgccccgaatgtacaatcttcatctgctcgtcctcacggttcctcaactttagccttgcccttacctacacataaacatagcactgtgagtcaacagactcagtaagaaaagcataaatcatataacatacataaatcccgaattatgatcagacgcccatacccctgaccataaccctaatccccgtgtcccacacggtactgagtctagaaagttcgtacaacggtactattgaccataatatcagactatactcggtatgctagtcatactctagcagtaccgatgtgatactgtattagcctatactcggtatgctagtcataatctag

SEQ ID NO: 402354 - DNA, 540 bp, Cannabis indica
tctggattggttcaatccaaaactgactgaccaatttaaaaaccattctaaaactgaccaaattgaatagcggtttggtcggttcaaaccgccaaaaccgattttttttttgcaaaaaataaagtccaatttattctataaaccaattattcttaaatctaaagctattgcaaccatatagacactttctttaaaaaaaaaatgctacaaccgtacaaattatttgttcaaagaccaattgtaaacacatgattctacatattataagtgcaaccatatatccaaaatatctagttaaaagtctaaagtctaaaacacaaatcaaatataagtccgcattaaatatattattccacaaccaaacaaatgaaatacattaaagcaatagatagaaaatagagtccaatccaacaagcaaagcaaccatggtccctgatcaccacctacacttacaaaaaacaagaatacacaattaaagaaaatgatttatgaaagtactattgagagaaataaagcttcaagtaaaaaaaaaaaaaaaaa

SEQ ID NO: 402355 - DNA, 1042 bp, Cannabis indica
agaaaatcaaatttcccttctaatattgttgttgcaataagattttctagcatggttattgtatgagattgggtgctataagagttgctaacatagttcctatgtaagattgaattgttgtaagtgtatcttgttaggacttaatctgttagtggtagttaataccgttagtctgttatcaggggcggagccaggattaagttcttggggggccaattattaaaagataagtatcgataaaaaaattaatatttgtttgagcaataaaagttgatactttagataaaagatatattcacataaataagaaagagtattgaaagcacaataattaacacataatcaaaatttcaagggaagaattagaaaaattaaggtcaaagtttttattagggatattctacttaattactttcttactgtacttaatttattaattaaatataatagaataaatctataataagtacacctcttaaaaggggtgttttgacaccttcctagctatttgttttgatatttaggagagtttttaatctattttttttttcatgattgtgtatattataattatttaagattacttataaatttttaaaagattccaaatagtttgtagtgccaaaaaataaggtttaaacaattacttattctgcgccgaaaaagaaaaaacaatcacttgtgcaacaaaatatttaaatcttatttttgacaatgtaaactattctaaaaaaatttacaagttattctaaataattataatatacatgattataaaaaaaaaatgaattaaaaaattcttctaaatatcgaaagggataaaagatatacttaaacaatcttattttgaattgtatttaaataacatacttatatatttgtggcaaaatttaaaaataagacacttaattttatttttcactctaattatttttttctatatatagtaacaagttattattaatttataaataatatattaccacataaattattataaaaataaaaaataaaacaagttaataattcaatatactacttt

SEQ ID NO: 402356 - DNA, 725 bp, Cannabis indica
tttactcatcatcattaaggtatatattaatttcttttattaattttacccattatcattcattttttcttaattttactcatcatcattaaggtatgataatatatattgattattatttgttctttttgttaatagttgctcttattaattaaatatatatatatatatatatatatctatatggatgtagttttaagaattctcactcataggaattaagttaagtattttaaatcatgaggtgatttgatatttttgataaataactatgattatattactcaatcaatcaataacacactattactattatatcttatcaaaaatttattcaatatttttgataaataagaatcattgatgactttatgcttactataatctctctgtaataattattttgagtctttttttaagttttaaataaaaaaaagtaataatattacaaaatacttctagctagccaaataaataaatctacagcctaaaataaaaaaattaatacaaataccacttacacacaccttcaacccaagatccatgctacctgaacaactatcgcgcaaccatcgcgtaactacgcagcaatccaacgtaccgaaatgaaaaatttaatcagaaagagaaccaccattaattccggcaacttcacctaagaagacgaccagaatcaatcaaaacatgggctgcttcgaattcataaaaaaggtgtagaaaaacta

SEQ ID NO: 402357 - DNA, 558 bp, Cannabis indica
tttcaatttaatgaaacaatgtgcctttttctattttaccacatttctcttttaattatttaaatgccaaattttattttaataattataaataattatcaaataaaaaatacaagttatatatatttattaattagacccacaaagtatcttaattaataaataaatccctatttttcttttcttctcaaaattgcccaaactttgtgaaaattctcaaataagacacaatctatcttcgaattctaattgaattattaaatcaattaattgagtctaaatatgatattgtcccaaacaatatgtaaaccatgagcctatgtaaccaagctcctaataagtaaattcaaaatttactaagtaaatttcttagcttattaattcttcctgactccactatagattcagaattgcaatcttgattacatagaatgctcaatatatcaaatatagatatgatatgaattatctattattttaatctaaacaatcaatgatcctttatagacggtttacattgagaagggacaaatttaccgttttacccttcaatgtatt

SEQ ID NO: 402358 - DNA, 770 bp, Cannabis indica
taaatgatacattaattataatactataattattaaatgtctaaacattccttatccatagagagaatgtataatcttgtaaggacgtacaaaagaaataagattatacgatatgaataaaacaagtcggtagtgtattaaagtaatgggaatttttaactgctaagtacggtttactgtacactatacttctagtgtgcgtgattttgattcctatcacatatgtggatagacatgtagcaaaggtgttgtgtataattcaattatacatgactagatcgatatgtaataaacatttttcattataacgtgtcgtttaccatgaaagaattattcatatcacaacgatgatcattaatagatcaacctgaatcctgagtatactcctatttgtattcattgagttcttagagtagatgattcttacaacttctgttttaggaacttaataacatgagtggctaggaacatgttatacaatagtggaatccaagctttcctaagggatcgaatattagttcctttataatgttaattctgggagtgctaacagttggatccgaatctataataagttatagattaactgttcacattaaattaatggtacataaggagacaagagataattagaaaagtaaaacagtaattttgacaaactctaatcataaactaataattggagggcgaagtgcttatattcatgtagataattgtgaagatagcattttgatatctttgattggtattgcttataagtaatatttaat

SEQ ID NO: 402359 - DNA, 1055 bp, Cannabis indica
gctccaggcaccaatgcccgagggattgctcgtgctaggtccactgcactcctcccgtattaccctttctggaggaaaacaattgaattcctcaggagccacagaccttatgatacaacctttcctctgcttgatactccaggactttagaatgccgccaacgtaggccccaattgacctaaccttggatttgatgagtttagcctctgacattgggatgctgtgggatctttgatttgcgaggcttaggagacataatgccaaactcaaggtcaccttgttcaaaagcaacagtgacttcgggtaaaaatatttgtctcgcaagcggaataaaagataatactgtgggttcaggccaggttgtgtctcgcaaaaaacaacactttcccttagaaatctcttgccaaaatcacctataacgactggcaatttacaaatatttatcagtcgagatctgacactattatgtttgtctaacggatgacaattctttgggatttgtcccattaaaaacaacaagctaagtcagaccaacaataaagattcgaaattcatactacaacattaataacataaaataacataggttcaatttaaattcatacacattcagaaattatcatatattcagcaagtgagcaagacatgtgaaaatacaaaacaagcacatcttaaataatttttaaggtttctaacaaattgatgcagtgtcctgtttagacgagagtaggggtgtatatcggttagtttggtcgggttatagtgtatttttacaaacccaatataaatgtcgggttataaatatctaattgtaacccgttcaatgaaaaaataaaaaaaaattgtaacccgcccaatgattttcgttggtttggtcgggttaacccatttaaaccgatctttattgtttaattttttcattgttgttagtttttagtgttcaaaagttgttttgaaaaaataaatgtatagtatattcctttcaagattaaaatagttatagtttaaattaatgttaaaaaaaataaatatgaattgaataaacattaaagtat

SEQ ID NO: 402360 - DNA, 851 bp, Cannabis indica
agagagagagagagaatgaatgaggagaagaggatagggtttcatggatgggggttttattaatggtcggctatccccgacagtttaaaatagtcaagtatactatagctgacaatttaaaaatgtgggctatagtataccggattattttaaaccatcaagtatagccctatttaaaaatcactataaacccataaaaatattgcagattaccctcccaagtgttctaaactgttgggagtacctaatttttcctgacgattgaaaacactcattttaatttattagcgacagtctccaaaaaatatattttgaggaccgacgagaatgcccagttttgtagtagtataaatataaaagtgagataaaatgtctcaatatatcatttattccggtttttatttttgttaaacttgaaaagtaggataaaaagtcccctttcttgtagtgaatgtataataaatcgtacttagtagttctatactaaagatttctttagtttaatacactaccgactagttttattcatactgtataatcttattaactctcatgtacatccttacaagattatacaaactccatatgaataaagaattttcagatacttttataattaatgtattcatttatcttataattgtatttcagatattccataatatattatctattaattacttacttttagagaataaatcccaacatgccactgatgtcaggaatgcaagtgcccgttgtaaagcactgaccaaatgtatgtgttaggttatatttagcctatgtttcgggtttgaaaagtaagcattttctcgtctattggcgtcttttggagcagttttacgcttgat

SEQ ID NO: 402361 - DNA, 718 bp, Cannabis indica
ttacatatttagtgtgcatgttttatgattggctaataggtaacatatcagtaagagcggtattagtgtacatagggttgcactgaataccgatggatatatgtttggcaaagtacaaaattgacgctatcacatcggtacgactagagtacagagtatagactgatattatgatcaatcgtactgtcatacgaacgtctagacttagaacgcgttgaacgcgggatataggattgtgattgagtgtatgggcacctgattataattcggtttatgttatgtttatgcttttcttatagagtttattgactcacagatatttatatgtgtaggtaaaggcaaagcaaagactgaacaatagtgagctcgagtaaatatatacatatcggggcggttagacctgaagtgttcagatcttcgagatattgcaagtttcattttgatagtcgctcggcgacagcttttgtaactactgtattcaaaaaaatggttgtaactttacaacgggatctcaaattatgtaaaatatttatatattaaagattaaagtttaattgtgaaaattttaattattcacgtttttaataaactcgtttattattagcaaaagagtatacagtaatttaaaatcacaatacctatctaatttagtaagtttttacatggttgttttgagctcgtgtgagaagagataaatgtgtgtgtgagagagagagag

SEQ ID NO: 402362 - DNA, 719 bp, Cannabis indica
aacataaattaagatcaagaatagactctgataattgactaatttattacattacatccatgtttaaaaatatgtgtgtcatagagtactctggtgttttgaatatagtctagaactcaaaatacatatttcaatagtatagtccacccctaagtatatagagatcatgatccacccctaagggatatagagatcatggtccatccctaagtgatatagagatcatgtggagttatgaatataatccagagttcaatagatataaaagatcgttgaactgcatattattcttaactttttccacccctatcagatcaaaagatctttttattaaacaaattcttaataattgttttagaattaacaattattcataaacatagaattgagattctaagtgtttatgtagtattaactctttgcagagttgaatatactatagaatttgtatcaataataaaaacacatacacatacaaacattaaaacatataaatataattggtactggcatacacaagataaagtaaatgaagctcaattcataaatgcaattcattttgaaaatagaaaattttattataaaatcctccaaaataaaaggaattgtatgcaataatatgaaaaatagggaataaaatcccaaaactaataattgaaatccaagttgttctgaaaataaaacaattaattttcaactcaaatttaattttctataaa

SEQ ID NO: 402363 - DNA, 551 bp, Cannabis indica
acgcctatatatatgttcatatacatatatacatagtataatatagagagaactttgactctctttgtcaaaaagtgagatgaagagcttatattattctatagtattatatttttttatagtttcctttgtctttttcaagtgtcattagtgttgagtatatgcccacacatattaaggcaatatttaggtgagtgtgaaagactgtgtagtctttcacaccctgaaggagattcgagattctgttcttgattacattctgcaacagaaaggaataaggggaaaaaacaaaactgaaggagacattaatttttcatgcgatcattgtaaggatttcataaactccttatatgtttaatttaattattttagaatccatgttaaattgttaatttcaacatacttgagtagtaaaaaaagattctggttaaataagctttctaacaactggtatcagagtcgtggtaattttttattgttcatgtaaactggatttaaaactaattttttatgtattttatgttgaaatttagattgttacatgttaagtg

SEQ ID NO: 402364 - DNA, 365 bp, Cannabis indica
actaaatttgattctaaataattaggagaaatactcttataattcatcattataatatagtctttcataactcattttttgatgcaactaattaattattattaatttgaaaaattaaataacataataacaatgtacatatatgaacaagctttcaaaaataaactaaccttttatccatgaaaattaatgagatcatattgaaaagctatcaagattagccttgaaattaaatgggtctttaaaaaaataaaaattattggctttttatttaaaagaatgtagtatttttaaaggaaaaaatattttttaggcacttgggctgggtggctttagtcatggacctagttcgccttagttcaaac

SEQ ID NO: 402365 - DNA, 1003 bp, Cannabis indica
agagagagagagaatagggttgaaaaaactatttctattttctctacttttctcaatttatttctcgattgattggatttttgaatgtctcttgatttatgatgctagatatcctatatatagtgttataaataaagcctttaattctttatttaaaataaacgataaatatctaatttaattttaattcaaattcaaatgtaaatatctaataactgaatatcaaatattagtagatcttttattttaataattatcctttcaattaaataattatccaataatgtatttaattaataattaagaataattaacttaatttaatttaaattattttaatcaataaaataattaaactaaattaatcatgggtctttatatgtcactctacacgtgtagaatgggcgtacacgcgtgggccatattttaagatccaaaactgatttccataaaatttattatttattctatcaataaagatgctaccagcaaaatcttttatgtgtcatattgctaatatggaactaagagagatgctcaattttcttttagggcaagtgggagattattaaggtttatcccctaataagcctgtaaagacgtttttgattattaagaaaaaaagaaaacatttgatatatgtgtgaattttaagttattaatatttattattgaataatttatattaaatattggaaaactccttattcatatttgagactgtggcttgtagctgtacagagaactaagaccacttagctatgaataaaacaatcagcaacacattaaagttatgaaatctttaatcaatggttgctagtacggttcattgatgccctttctatggtgcaagtaatctcagttcgaattactgatataatgagacatctaagtgaaggtgttgtatataatagaaattatatatgacaatgatcgatatgaatgaagctatctttattaacaggccgtttatcataaaaacctaattcatatcataacaatg

SEQ ID NO: 402366 - DNA, 799 bp, Cannabis indica
tttggatttatttcccaatctcataactcttcacattgaatccagcaactactttgaagctatctcagtgtcagatgagaaatctcttgaggaactaacatctctatctatcaaggattgtggtagttttgtatctttcccaaatgtacttattgctcccaagctgagtgagtttatcattcgtgattgctctaaattgaagtggttgccagagcagatgacttccctctcatctttagagtcattgacaatctcaaaatgtccgttgatagggactttgcctgaagatggtttgcctgttaatttgtctattcttcatatatcctatgatgaacttttgaggatgaaatggaattggagaacattaccccatcttaccactctttctattaatggatatggaatagaagaagatgtggaatcatttccggaggaagggctactgcctaccactattaccgaacttcaaatctggcattttgcaaaacttagagtcccggacaaaaatgggcttacacaactcacctccttgcaaacacttgagatttggttctgccctgtgtttgagacaattccagaagacggattcccaaactccctcacctctttggggatatatgattgtcctctagtgaagaaaaagtacctatatgagagtaggaggaaaaagtactgggacaagattagtcacatacccaatgtcactattgcataatgaccttgcatttaccacatctcaggtttgtttttgcatttactctctaattttgtccaagaactgtaaataacagagtgagga

SEQ ID NO: 402367 - DNA, 727 bp, Cannabis indica
ctgaaaaaagtagaaaattacataatacgccctaacatttaacaagaaacaattacaaaaatctaatatttacagcaaatgcttacaaattcctaaagttattttagagaaaaaaaaggagttattatgatcttgatacttcatatttatatttttcttatttttatttaaatgagacatttttagattgaccaaacaaatgacaaataatgtggatcacaatcatgtatttagttatttttggacatatttttttgaaatataatgataaatttttttttttaaaattcacacaatgtgcaatagatattgagatattaaaattatattattatttagttatttttctgttgtattaattatatattacttattatattatctctcaataaattgtatctattattaattgtcactattatttcaaaaaaaatattatctattattaatgtaattattattttaatttttaaaaaataaattattattttaactgttactaactcaaatagaaaaaaagagttaaaagtataacgttataacaacaaatttcattgaaaaaaaaaataatatactaatacaaaataataaatcaagttattaaaactaggtataagaaaataatttcgtaatataaaaatatgctaaggagttgatattactttgtatattgtaacgagatcgatgtcttgccctttttctgttgctttgtagttatatttttatt

SEQ ID NO: 402368 - DNA, 538 bp, Cannabis indica
tagcaaaaacctcagaaactctgctctaaatcaattaagctaacacatttatgaacaaccctatgagcttgacaagctaaaatccctttgaaattcaaaaaataatgaacataacttatacaagctaggtctctctctctttaatagttataagattgtattgaacggatttgatgatttctcgatcctatgtgattattgctcaatttcatcgagagatgattagcaggagcacttcctaaagagttttgagacaaaataaagctcgaataaaagcttgttacaatgagttcttcttcaatgtctgtacgagccttgttttgcattttcagccacatatcaatcttatcatcatctaggtcttctccataatcgaccatcttgcaagattcagaggaggtggtggcgaccgtacgggtcagacaaatcgtggcagctgatgagactatggtgtcggaggaaaaacttctctagcagaaagttacgaactttaagagcttgtttgactgtgttttcagtttttaaaattgtgttttta

SEQ ID NO: 402369 - DNA, 755 bp, Cannabis indica
aaactttttttttttcatataatactttacaaattttattttaaattaattgaacatcattacttcactaaaaaaaaaactcaaatttaaatactaatgaaactataatcttatttactgtaaaaataccatttgttattgtttcacttaaatactaatgaaactataatcttatgttaattgatcttataagaagagctttatatttttatgttaattcgcacacttttcagagcactcccaataattttttttgctctatcttttaaaataattatacaaattttattttatttttctattttatttcaaacttttacattatatcatacatcattaaatattatttttttaaaaaaaaaaatcaatatattttatttatttcaaacatataatataaatatatatacacatatctatataaaataaaatattaaaatctaaaatatacagtgtgtttttaatttaaggataattacataaaatattattttttgtaaaaaattatatgtttatatgttttattttttttttacacttttcaatgttttctatagaaaccacaagaaaactacataaaagtaataaaaaataatattcaaacaacatcaaaataacatacagataacaagaaatcaacaataaattaacaagagtacaacataaaaagactatatttctgtaaataaatcataaaaatatttaaaattccgcacaattgtatttttgtgcatttgtgaaataatcccttaatt

SEQ ID NO: 402370 - DNA, 639 bp, Cannabis indica
aaagaaaaagaaaaagatgcatagagtttcttatctatcaagctaagagtaagctaattcaatcacctataatcttctctcaccaatatggacactttatatgtgacaactgtaaaaattatcaaaagtgtttcttctatctcattttttcacacctatttttctttttaaagatgggaataatatatggaaaaattattttgtagattttttgttgggaaaatctattgcaattaaccacaatattttccctttttatatgtcaaaaatgggatacttatcaaacaccacaacaagcaattattaaatatcaaccaaagcaccacaagcaatataaaatacacaaatcaagaataaaagtgagacaccaagactttttacgtggaaacccaatgcgggaaaaaactacgggaccgtagtccgctcaaatcatccactatcaccaaagttcaataatgggattacaaagttcttctctagtaaaactagaggctcacaacaacatcaagattaaacaatcttggatcaccaatacaatcatcatcaccatcatctcaaaagatggatacacaaatagaaaaagtttgggtctcaccaagtgggtattatagaagagcaccttagagaggacaatcgcca

SEQ ID NO: 402371 - DNA, 449 bp, Cannabis indica
tgagcgattgttggatactttccgaaagtggtgttctgtactcattcccaaccaccggctttgggatttgaaaagtggtgattacggtccatcgttcttttgggagccgttgacactacaggaatggcttacagatgacgtaagtaaactaatttataattttactttactttacaactaatctacaattaatattttttgttgtctaactgctttctctaacctttatatgcagcatatagatgcagcagtccatatgctgaggaggcgacgcttcgactatccactgacatttcctcagaagggtatcattctctctacattcgttaccagcatgatcagcagtgcatggacgaatcacaagggtcccaggagaaactttgtgtgggaggattatatcctggagtactgcagaggtgttcatcatttgttaattgtttagattttct

SEQ ID NO: 402372 - DNA, 619 bp, Cannabis indica
gttttttgtatgtagtgtaattttggggtttttggggccagagcttcatgtttgatatgggcagcaactatgaaagcagagaataaagaataataagtgaaaaacgtatatctagtacttctatttagtaaatattatttattgatataattatttgaaagtgatacagatttgctaatttatattacaaagttacttgatatacaaacgtttacgtttatttagtaaatatttattgatataatataatttgaaaacgaaaactactttatattcattgctttggccatagaaggtggttcatatttagaaggaatcaagtacaaatccttctttctacagactgtaataccaaatctctctgtcatgtccaactctccaggtttcattccattgggaagtttccaatcgaaatgatatagcaaaaatgctagaggaagctcaatactggtgagagcaaatgatattccgggacatattctccttccagcgccgaatgggataaactcaaaattatttcccttaaaatcaatagagctttcaagaaacctctctggcataaaactctcaggttcagtccaatatttaggatctcttccaattgcccatgcatttacaa

SEQ ID NO: 402373 - DNA, 546 bp, Cannabis indica
gtcattgagcttgtcgaagaacctgaagcaattgcgatgaaaatcttggcaatttcaacattatatgctggattaatagtttgattggaaagctgaaattacatttattaataagaattaagaatgatggttgagggtgaagaaaaacctttaactatttatctcatgtcgtagtctcacttttaatttgtttttatttttatttatgttattttattctaacaccaaaacccattttttctaattctagtcattattttttgaataataaattgagaatagtcctccgaatcgacctgtatttactattatatatactgaagtaattggtaatatagaaatacaaattagtaaatttgttgtggtagacgacacgcattaggcgaggtggggattgctccctcaacctcataaccgcttcttaaattcatcatatacccggccgccccaatccgcgtttaaattaaagtagggatgggctgggtggggattatttagcgagagaatatttcccatcagttacccattcatatatatatatatata

SEQ ID NO: 402374 - DNA, 745 bp, Cannabis indica
atcagagcggggaagaggagctttcccacgatcttgatttgttcttttcttctcttcgctgtgttcttctctccagcgaaggttctctctatttttttgaagttttgttctgaacttcatctctttctttcgtttctcaatcagtgtttcttcctgatcctttttcgtttccaccatggaaactgacaatcaaactgggatccaagcaattaatgacgatggtatttccgctactgtcgaagaagttactggaccacatactcaaaccaaccatacgcaacaaaggaatccccttgaagacccttcaaatccctactatttgcaccatggagacaacccaggtaatatccttgtgtctcaacctctcactggacaggacaattacatgtcctgaagtagggctatgcaattagctatttcagtcaaaaacaagattggattcttggatggtactattcctaaacctcactcttcaaattcgattatgtacaatgcttggtatagaaacaacaatattgttatttcttggattctaaattcagtttctaaggaaatttcttctagtctcttgtatgatgaatcggctgctgcaatttggactgaccttaaggttagattccaccagaaaaatgggccacacatataaaatctaaggaaaaacctgatgaacctaaggcaagagaaccaaaccgtgagcatgtatttcactaggctcaaaacgatttgggaacagttagctaattac

SEQ ID NO: 402375 - DNA, 1128 bp, Cannabis indica
aaaattgctcctgaatgacagccgtcagagatggaccagaatgtcaacatattcaggaattaaaataacctaaggaaatacaagactcaacaggggctcgaaagtgttccagggttgttttggaatagacttaccctttatgaggagaggcctagcaagtgtgcggaaggaggcttcaacatctggagctgggcccatatcgagatgggcgcacacctgcctccgaggtgctactttgctaacttcagcatcgtggctgaggtagcaccttttcaattcattccccaagcgtaccacttgctgtcagggtggtacgttttttgtgttcaacatggcaagcccgtgccgatgcaggagagatcttgtatttttacaagatcaagtctcagcccatgataggccataagaagaaggtggatttctacaggttggaaagctacactaggagtgttccttgccttaccaactttatgaagtacacacacgagttcagagactactatttttacacccgcgacttcccattgaagagggttcctatccttagtttggatttcaacactgcaagtaagggtcgttcccttctttagactttaggattctgtttttccccccttcttaatgtattttgatatcttttttcacatctgttacactgccttcctcaatcacctttgaccccagagttggaagaaaggatagctttctacgaatcattctcgcctaaagagttgcaagtagaggggcttgttaccactaagaaccttcaggaattaggcctcatttctccacaccaggacgtgaccaaccttttcgtgaggaccaagtccaggatgctcttcgaggggatccaaatgaggttcaggaggcaattgcacttatcactattgaagaggccttaaaggtagtaaaagctaatgaggaatggctggcggattggaggagaaaattcccagaaagcctaagcgaggttgaagaactcactattagattcaaggaggtagtgcagattgagggtacttcaagagcgagcacctttggtagtggtgagacaccctttcatataattagggctcccactctaactaacttaaagattttcgattaatgtggattcgatccacattt

SEQ ID NO: 402376 - DNA, 535 bp, Cannabis indica
ggttgagcagtggctcactgtgaatgaaagaatcttgaatttatcggtgtgtttggtaatgattgggtgacctgtgccacttttcagttctaggaggacgccctagtgtagtgggaactagtttccctaaccgggatgtcactgttatgacctgggaagaatttcgggagttgtttaacgccaagtattataatgaagccgttcgcagtgctaagcagaaagagttcactgagttagtgcaaaccgagggtatgtcagttactgaatatatcacaaagtttgaccgtctggccaagcttgccgtgggtatcgtgccaatagatttcagtaagaatgaaaagtacctggccggtttgattgtgaagattagacatgatttggtgatcactaccaacgaagcaacatcatatgcagaaatggttgagaaagccctacaagccgagggtgctgtaaaattccttcaggagctccgagtgactccgaatgttggtgggacccccacccttcctactcctgtttatggtagggatggtgg

SEQ ID NO: 402377 - DNA, 958 bp, Cannabis indica
tgcttcccaatgagccaaacaagcaatatatttgacattaagcttaacgctggactagaaactgtttctatgttcaataatatttgactagaatctgctttttaagtccaataatattggactagaaaaaaaaatatttttctagtccaacattggtaaactagaaatgtttttcgagtccaatagtgatggactagaaaagtacacattttatgtcccaggctactatgtccaacacaatatggactccaaaaatttatctagtccaatattgatggacttaaaaaggagtttttctagtagtgtctctatatatctactcctctagggatattggattctttactttttagcaactacttttgtgttagtcagtaagtaacactagtagttaattaattattggtacaatgccaaaaactgtatagaactttccatagactaaacaagtatctttcctgtaactttaacattcagtctcactggtagagttagagattccagatcagtttttacacttctccaaaatcactgctccaccccaagagtaatcaccatctcattagtagactttctagcatcaaggcaagtctagaaacctaatttggtgtagtctaagagtattaaaaaaacacccttatcgactaacatatagttcctcttttcgatcttaagattcacttgattatcgtccaatgttcctttcctcgattaatatgatttctattcatttctcccactcaatagcaggtgtctggtctaatgcattctaaagcatacctaagaccactcattgttgatcctaaggaattatttcgttggcctttatcttttctgaaatagttgaaacttttccttagataaataaaatctatgtctagaagttgagaaacttctatagattttcattagaaaacctaaacctatggccgaccactattgctctatttttaccatt

SEQ ID NO: 402378 - DNA, 681 bp, Cannabis indica
gtacaaccgacaagaaattctaccttgtaaaaaggaaagccactttagagatgaatgtattgccctaaagaacaactcaaaagggaaaaggggaaagacaaaggtgaagttgatgttgcaacagatggttatgaatcaggtattgtgctgttgtgtcaaatgtagattcgggtaaagaatggatacttgacttagggtgctctttccacatgtctcctactaaagatttgttcaacaatctttaggagaaaataggaggaactattttactaagagacaataaggcttgtaccatccagggaatggttttgtgacactttaaatggatgatgggattcaaagaaccattgaagaaatgtggtatgtgttatcccatattttgcaccatgacgtggcaatgcatactagtgacacgtgtctgttattctttatgcttgacaagagaaatgttccgaacagacttcgagtaatacatctgcacggacaaagtcttcttgatcgagcaaagcaagggcagatgatccgtacaataaatgaagtcattcctccgagctatgcatcaagacttaactacttaaggattgatattgtgaagctcaagaacaatccctacaattatgggatcatatcaaagggatatggcaagctatctgaatcccccattttatgtattctaaatat

SEQ ID NO: 402379 - DNA, 674 bp, Cannabis indica
gactaatctcgagaattagtcttattaatttttggggtaagcacttgcccctagtccataagaactcttttaagtgttcttttagactaagtttagcatgcgctgtcccttttgcttggttttgcagttgtctctttaggctcttacgccttgagatctttttgtttgagggagtctttcgccacttgggctttctcaacctatttttagatgtaaccttattattaagggagtttagactttttgagcagtctcaaccttctatcgattacttattggatgttaagggagctgattagccttttgggtctcgcttagcctttttttcaagttattggaggttaagggagttgtttagcctcttgtgttgcgctcagactttttcaagttttgcaattctaatgagggatcttatatccctgagacgacactcgacctcttatattgcttatgtggcacttaaagtgcattttgaatgagagaaaataggtattccttttagagaggcatccctctcatagtcataccattttccctttcatttcatattttttttttcactaactcgttcactttgacaattttgattgacaagtatagtgaccaagccaaacatatgcgtgaagagtgttgaatgccatatgtgaagtgaaaacttaacatttcattggtaa

SEQ ID NO: 402380 - DNA, 506 bp, Cannabis indica
tatatgcttaatttaatatatattataaaccacataaaattttatttttttaaacaaaaatttatgagttgactgggtcaacccggtcaacccgaacccacgaacccgtgagctcgaaacctgcgaacacgaaccatttcatgggttgggttcgggtacaattttttgaacctgaaactcgcaaacccgaaacccgcaaacccgaaacccgatcaatctgcccgatgttcaaccctaacttcaatgacatttccttcattatcacgcgctacccaaccaatcccaaaactattagtcccactaacaacacaagcatccacattgatcttaatcatatgttcaataggtaaaatccaatgctcgctacaaataccagaggaagaagtagactaccttacattataggatttgtatataaatttttataaaccgccatatctgaataactcgcctaaattaaaccgagataactaacccgacaaaaaaaaactgcaaaactaaaaaaa

SEQ ID NO: 402381 - DNA, 575 bp, Cannabis indica
tcacctgattaggcgatgcgatattcttgttggtgataccttattaggtacgggcagcagtgatatgagaatgtcaggctatggcatagattgaaactgttgctgggttttcttggcgatgtaccttattaggtacgggtggtagtgacatgtgaatgtcgggttatggcataaactgaaaccattgttggatttttttctggcagcgtaggcgaagtgacatgtgagtaccaggctatggcacgagcttgcctgattaggtaatgcaatacatgattatcagattaaagaatcgactggcctgattaggcaatgtgatgtaataaagatggttactttatgagataacatatatataatttatattattaaatgaatattatttctattattggtataatgattttgtattaccaaatatctttatactaatgtttatttgtgacaaatgctagtagtgatttgtgtttcaccttaagagtaatgcgtgatcgtttgattctgattgtctgagtataaatgataatattcgaataataatttatatgattgttgttattgttggaaattatttt

SEQ ID NO: 402382 - DNA, 822 bp, Cannabis indica
aataataaattaaatatagtcattgtggatcgacctatatttaccattatactaaaataattagtaatataaaaataaaattaattagtaaatttgttatggtaaatgacacgcatcattaggggtttaagttggtattcgaaactcaaaactagtgtgcaaaaactgcctaaggtgacatgtcgcctaaatcagtgcatgggatgttttcggcatttgtcaatgtatctagaggggctcaatgatattactccatccgatatatcgcctggtgccttttctggacaaaaatgttgcaaaatattgagaatttatgggagacgtttctatcatcaatgatcaacattctaatctccatttgatgtcctattacaactggtaatagtcattggagtgtgtgatctgaaatgtaaaatcctaacactgtaaatagaggttttgattcatcttttggaaacacttgctttctatttattgggcactaactagaaaactctttgagtttgtttattcttaaaggcatattcactaaattccttagtacttagtagtagaaggaataggcttttttgacaaaggtgtaaaaacctttttcaagccattaataaccccctttcaacacttaggtggtgtttggttggaggtaatgaaatagaatggaaatgaaaggaaacaatctccattccattcctttatttggttgcatattaaagtgttggaatgtcattccaatggaatagcctttccaccaaaatggtggaatgacaattctattttagaatgaaaggaaaaaccattccgatgagaaaaaatttaataatt

SEQ ID NO: 402383 - DNA, 1028 bp, Cannabis indica
catacaatcttatctatatttcttgacaaatgttaaagggcacaagtggtgcctagcaccctcttatgtgtcaatatcgctatcgatccaactaagtatcagttttcatataatttaatataatataatagcttttaaggagtatcgctagccaatcgcaatgcgacatgtcgagaacgtgctagacacggtacctaatagcaatcatctattcctttatatccatttcattatcttatgagttagaatttgaggaataagatgaatgaggttcatcccaaaaccaattggcaatgggaggagtagcttattcctcttatatattctattatctttccacacattggcaatgtgggactctctaacatccctttcaagatggtagctattttacttgctcactatcttggacaactcgatcataagcggctcatttttagctcactatccctgatcacaagtgactctttttgctctacttttcggatcggtatttttgaatttttgatggatcttttttatctttggctcactatatccccgaatcacaagttggtttttttttttttactttggctcttggatcaattttttttagatttttgttggctctttttttttcggctatacttcgatcgggttattttttggggttggatagtcgctagagtatttttttttgtttgttttgctctgataccatgttagaatttgaggaataagatgaatgaggttcatcccaaaaccaattggcaatgggaggagtagctcattcctcttatatattctattatctttccacacattggcaatgcgggactctctaaatatgcaacaactatcgcaattctaatcgacacacgtacgtacgggccgcgacgaaggaggaacgatcggttcagccaaaacattctcataacagaatttgccaaactaatgttaacgccaataaaagtgtaaaatttttgcaaacatattaaggtagttttaagatcgtttaattagtgtgattttaagatcgttcgaat

SEQ ID NO: 402384 - DNA, 806 bp, Cannabis indica
tacctacaataaaaaataaaataatataatattattaaaaaaaattatataccgatttaacaaaattatatacaaccataaacacaattgtaccataacttacaaaattatatataaatcttcgtaataaaattaataaaataaaaattaaacatacataatctaaaataaaatgatatattatgcaataaaaacttatatgccatataacaaaaaatatataccttacattcgaagtatatatataataataacaaataaaaataaaaatatataaatgttgagcgagattttcgataaccaattaattagtagaattagaagagctgtagaaagttaatgtagatgatttttacgtggttggggcattaacgagccttagtcgacgagtctttcttatttatgagagtgtttattacagagaatgttctgggtgaatttctctcttgtttactctctttgattccttaatcaattgatcgacccctttttcattctgtctatggtgtatttatagtgtttttcgggaggatccctaggaagggatcctttgtctttttgtgttaccctctttggggaataactttctggtagatccaaaataagaaatacatgacctataccgtaggtatttttggaactaggtggatataatcatttatcctcccttgactgatgtgattcctcataatgtagtcgtcactagactcgttgtttgctgtgtaatcgccgtaaataggggctagtgccatctgtcaaatccttttatggagtttctgatacgttttaccccatgcggcattaaa

SEQ ID NO: 402385 - DNA, 1028 bp, Cannabis indica
aaaaataataataatatataatggacccagtaatgtccctgttgagatggttgtttggtagacaaagagtcataatttatccagctaaagtaaggtagattgttccttcataacggccatctttctctcttttttttccttttattatctctctaatttatctaaccacttgacataaataaatgtatgtagattaattaatattaatgcaagaaagctagctcactcacgcattatttaattattgagctgacttgtaattaagatcggaaaattttccttttttaattgagtatgatcatcaacaaatttgtcgcttcaaaatgatgaaataattatgtatgtctaaaataaaactaaaatgactggataaaaatatcattggtacgataaaaatattgtcataattaattatgaaccaatgtattaattgatattatataccattatttaatataaaaagttgtgatcattgagattttattaaacaatttattactttgttaaaaacaattatagacggtacatactctttcccaatatcctaattatagggtttcatctctttctttttgactttctcggccgaaacaaggctgctacctctaccgttcaatgaatagtaaaagcatctttaatgataacatcttttaaatatattaaaaaaatttacttcattcaaaaaatataatattttattttatttctcttttatattatttttaacacttttacttttaaaatcactccaatagtatagcatgttagacattttatatgtataaactgaaacatatatgattaagaatgaagtgcagaattaataaatcatatatgcacttataatttaaggatcgaaatacctccagccattgattcttgagcttcaaacccacataagctttgatctgcaaaggaaactggttgatgtgggtaatcgggcttcctcgctctctcaactctctttagatggaatttgttgttatgaacagaatgagtgagtaactcagggaccgagaccctatatt

SEQ ID NO: 402386 - DNA, 611 bp, Cannabis indica
ggattgagttcaatatgtggcgatttgtttagggggggggggaattttaatgtggtcagaagagttgaagaaaaaatgaatagtacctctagtactaaaaggctgagaatgtttgatgagttagttcaagagttgaggcttatggatccaaaaattaacaacgaaagattcacttgggagaacttcagatcggtacccatttggagcagattggatcgattcttattcaataataagtggaagatcatttttccttttgtcagacaagaaatgatgacgagattagtctctgatcatagcccaataatcctggactccaatttacctaaatggggccccgcgacttttcgatttgataaccagtggttggatcacaactcctccaattttttgaggtttagtagaaaaatggagtggcgttgggatggtcggggaccaagctcatgtgtaaattgaagatggttaaagaaatcatcaagttgtggagtaagtcgactttcggtaacaatcagatgataaaaaatgctttgcagagaaggctggttgaattggacaaattggtagtgttggcgggaatcaagcattaatggaggaaagaagaaatacaaaaa

SEQ ID NO: 402387 - DNA, 633 bp, Cannabis indica
gtggaactgggtcgtcgagaaacatgaatatcctactttagaatgttcaggggcttgcgaacccctggacattgaagacaatcagttcccatgtgaaggatcatcatcctgggataattttcttatccgaaactagactaaaagaggaagcgatggagagaattcgaattgtgctgggttttgatagctattttgtagtggctgccaagggtaaaagtggtgggttggctctcttgcggaaggaccctttgaggttagtgtgaaatcttttactgtttctcatattgatgttatagtggagaatggtctgggttttgcttggagatttactggtttctatgggagccctaatccgggtggtaggaaaagctcctggcagcatttggagagactccgtaatatgagacagggggcttggatttgtggaggagactataatgagattcttaaggccagtgaaaagaaacggatgttgaaacaagactctcagatgcgcgactttcagaaggtggatttggctctaacgtttgccggcgcaattggtgcatttcgccggcaatattttctattgacggcgaaaatagtcgtcggtaaaaggttgaggtgggcaaaaaatgttgacttcctttgccg

SEQ ID NO: 402388 - DNA, 441 bp, Cannabis indica
taaaattataagattaggaatgtgttaggtttaacattttatcttattagatattttttttattaaaaattatatttttgaaaaaataacatgaaatttgaaaaattggttagttttaggtttttttttttttttttttagttgtataattaagatgattttattaagaaagcaaaagccatttaaggcaacatagtgaccacaaagggggccacatcccttaccaaaccagaaactttgcatgtttctcttctcgcccacgtagcaagagagtcagcaatgtagttatctagcctaggaacaaaagccacaacaacctcctcaaaagcagaaaacaacctcatacaattagtaaataactggtaactattccagcaatatgggatggattttgcttcaaaagccagcactgctgttgttgctccagaattcgcccaaaat

SEQ ID NO: 402389 - DNA, 1103 bp, Cannabis indica
agcctctatgaaaagctcagaataaaatcctcccttcttttaaagtaaaaaccttttccttcatggcttaaaatacagagaatattaacacgccacatgaggaaactaactaacgttctggaaaagaacccattggctccagaagatctaccaatccgcagtccagaaggaccacccgttccaggagggctcaacctgagggtggccccattgctcaaacaacacgtccccagagaactcaacccgacattggtcctagtacgcggaaaacccgctcgaggagaacttagtgtgggattggttagaatcccaggacgagggatgaagagctaaaccctggaggtgcccaatctgtgggagaaagaacttatggaatggaaagccttaccctttcgcaaatttaagatgccggtatggaaaatgtataccggatgagaagactcgttggtgcacatcaaatacttcaagatgaaacaactcaacaatggtacttcaaactcaacccaagaagattcaactcttacgatgagttctctcgagaattttacacacaattctcgttctcgaggcttgtaccattgcagctagaagaccttatcaaagtcaaacaatggcaaagagaacctttgaaggattaaatctagaggttcatggaaaaccttatcaaagtcaaacaatgacaaagagaacctttgaaggattaaatctagaggttcatggaaaaggcaacaaaattcaaaggcattaaaaaagaaggctgatatacaaccatactagggggcatactccctttggttacttctggaaacacattcgaaggatctcaaccagcaacatgaaggagttccttgataaagctgattgctttatcaaacttgaagaagccatacgatagtcttagatagggcatgtccacgttagaaagtcacgagacatcctgcaatcgcatgacctaccagaagcgcaggcaaacaccaacaactctagtaaacctctagtggcaaaaacactaaaaacaagaacaacaccaactgctctggagaaacagtggaaaaaggggaagtttaacacttctcccatgccacaaaagaacaaggaggaga

SEQ ID NO: 402390 - DNA, 643 bp, Cannabis indica
cacaacacacacacacacacaacgtatagtgtgtagtaaaccatacttaatagtttcatattaacaattcctattactttaatacactaccgacttgttttattcatatcgtataaccttaattctcttgtacatccttataagattatacattctccatatgaataaggagtttttagatatttattaattatacttctataattaattaatttatttatcttataattatattttatatattctataatatattctctattaattacttgcttttagggcataaatctcaacattagtaaagtaatcttgtttcagatgtattggttatacatcaaattggactgatatatacaatagaaaagatatcgtaaacttacagtaatatttttttctaagtcaatatcactatgttgatcttaaattaatgatttcaatcctaagatagttaggttctggcttaactatattgcacgtgttctttgacatgttttatacaagcttacccataggattagcccaatacttacatttcgagaacacggtagtgcaattgaatgtgagcactaatcatagatatggaattgtgacagtcagtagtcccgtgatctgtaaggggaaacaccgggtaagctgtgcaatc

SEQ ID NO: 402391 - DNA, 550 bp, Cannabis indica
attcatttgttgatactaatacaactaataactcggatgtgtttgctacaggaactgagttcaatacaggaggaggagaaccctctctcttaaatggataaattgctatgttggaatgtccgaggggcctataatcaatccaagcaacaattaataaagcgatttattaatttgtaaaaggttgaattggttgggcttctcaagactagagttaaggctccaaagcttggaaccttatactcgaatgtgtttgaaggatggtgcttttcatctaacatagcttggcatgctggtgggaaaattgttatagcttggaacctgtataggttcactgttgatatcattaagtgcaccaatgaattgatgcatttgagggtttcaaccactgagggttttaataggcttctcactatactgtatgcttcgaataataagagagaaaggaggactttgtggaaggatctatgtgatttaagtactaatgagcattggtgcctaatgggggattttaatgatattttggccaaggaagaaagaattgggcatagag

SEQ ID NO: 402392 - DNA, 687 bp, Cannabis indica
aacttaaaaacacacatgacgccatattattggagcacgtattaaataaaaaattatactttttctaaaaaataaaactgtttatttaattaaagaaaaattgatttaatttttctatttaaattgtattttttaattaaaaatagaatgaataataattatttaatacgtggtcaaataatatatggacacatgtttctgaactcccacttaataaatttagttagcacttaacaactaaaaggtacaactacaataaaatagtaagttaataagggctactttttttattcgggttatatgtgtaataattgtaaatgttaaaattaaaaagttttgccacaaatattctgaaaaaaaaaaatgtgatttatgaaaggtgtgtttggtaatatttttttaatcagatttttttaattgaaaagttaaaatattttctaaaatcatgttctgtaaaactggtttcacttttttaattttttctattgagaaccaaaattttgaaaacaaaaaaaaaaatcatgttcaaatttgtttataatagttttattttttccttaattaataatttagactccgaccctgtaacgcccgtattttataataataaactcgacacttaattttaataatttatatattaataatcatatggatcgggatcccgagtatcaaaatacaagttaa

SEQ ID NO: 402393 - DNA, 635 bp, Cannabis indica
agaacttgtattgacttctctgacatgaataaagcgtgcccaaaggattgctttccactacccaggattgaccagttggtggatgcaactgctgggcatgagcttatgtcattcatggatgcatattctagatataaccagataaaaatgcatgtcccaaatcatgtgcatacgagcttcgtaaccaacatgggactttactgttacaaggtcatgtcgtttgggttgaagaatgctggggcaacatatcaacgactggtgaatgaaatgtttgcgaattagattagacggaacatggaggttaacggcgatgatatgttagtaaaatctgtaaaaactggaagtcatacaacggacctcgcagagttcttcgaaatattaagaaagtacaatatgaattttaacccgaaaaagtgttcctttggagtttcctcaggattgtttttggaattcatagtcaacgcaaggggcatttaagcaaatcttgagaaaatcaaggctttgatagatacgccatcaccaaccaagcctaataaagtccaagccttaacaggaagaatggcagcacttaacatattcatttcgaagtcaactgataagtgtctaccctttttcaatgtattgcgaggaaacaa

SEQ ID NO: 402394 - DNA, 611 bp, Cannabis indica
cttaacataaaacaaaaatctgaaaaaagaaattaacaaaaaaatctgatccactaggtgggtgggacataagatcatttcaaaactgggtgaaacgaaaaatggaagcttcaccttccaaaacgaaggtaattagaatcaatggcttcacaaacaacttccctcttccatctccacttgttatcttccacttttcccaaaagggtacctcttatttcttctcaaaactccctcagccactcaattttccctccacaaacttcatcacattttgaccccatacccatcaagcttcaaagatttcagagactcagaacaaaagcaacctttaatgaacaaggtgctaccacccctcttcaagttcaacccaacagagtatgtttttccaaagaaaccctcttttgaatttgatttattttatgaatttgaattttgttttgaactgtactggtattttattccttttcgatgaattaagggtaagtagcgccataagtatctaaaatttcaagtttgtaagtgtcataattctaacgtttatttttagcggcataacataagtaccaaatatttgtaaaactgtaatttttttttttaatttcgtcagtaca

SEQ ID NO: 402395 - DNA, 613 bp, Cannabis indica
tcactagcaaacgagtacagtgatatcatggaggtaatggatcaagacaatgttgggaccccaaaaaatgggtctttggtgggctctggtactcaggcccgccaagagccatgagttgcttaagttggaattgccgtgggcttgggaacccgcgggccaaacaattcttagcggaccttgtgttccaaaagaagcccaatttgttatttctttgtgaaactttgtgtaataaaaatagtatggaatttattagagtccaattgggctttgataattgttttgtggttgaggctcgcgggcatagtggcggcctagctcttttttggaaggaaacatttaatgtggttatacaggggtactcttttaaccatattgatgcaactattcaagctcaacatagtgttcaatggcgtttcacgggggtttatggtgaaccaaaccgagagttccgattcagaacttgggatctccttcgttccattaaaaacgacagcaccttgccgtggtgtcttatgggggattggaataacttgggctctcaaactgaaaaacgaggaggaaggaaatatccggatcgtctaattgaaggctttcttgaagctatggcagattg

SEQ ID NO: 402396 - DNA, 797 bp, Cannabis indica
gggcagcaagagaatccagagaagaagataagggagtcaaaagtggatgtgggggagagggacagcattattattgaacacagctcatagtctaatacaagtggttcacctgctcattatttatttatttatttatttatttttcttatacttaaaagttgtcctaagttccttactaaaaagaaaaaagaaaaaaaaaagttgctaagttacttctgagatggttcctacatccgagccctgagtgagtgagaccacttaagaagacaagacaataaatgtgaatatttggtggctgatttgcttgtgacggaccaaccacgatactcaacttaattctgaattaattttaaaagaaagtaattagctccaattttttttttttttatgacatatgtttatattttctaaatgatatatgcttatattaagaaattaattattatttttttaataatatatattattatcctgataggaacatcacttttgtgtctatccatagaaatgttttgcttttgtatgttgagaggttatcatctaattttttttttttcacaatggctattggctatgcatattataattatggcatgtatttcattcattttccaaaaaaatttcaaaaaatttagtgttaaaaataagattcaatcaaatatttgtgttagttatttaatttccctttttcttttttactattttaaactatatttcgaaaccgcaagctatttcactaaaaaaaaattgaaaggtggtgataaaaaaaataaattataatttttctatatacaaaa

SEQ ID NO: 402397 - DNA, 669 bp, Cannabis indica
ttttttttatacaattactaaattacatgtatatttcaaagtgttagttatatttatataacttttaaacaatattttacagtacataaaaaattattaacattattagaatttaaatatttacttataaatacttaaatttttatatcacactttataaataaattaatatgtaatcttaattttcttgttttaataatttaaattatataattataatattctttattataattaaattttattattttactttatttataattaataaattcatattttattattattaataaattataaagttttttaatatatcgtgtcgtgttttttgggcttatcgtgtgtcatatttttcggactagtctattcattcttatgtgtcgtgccctttgtgcttctcctatatcctgccgtgcttaaggatatatttttcttgacgtatcgtgccaatttgtagcaccatgtcatgtagttatcaaacttgtattttttcatgcctagtcgtgcccatacttagactcgtgctgatttcgtgtcgtgtcaaaaaatttgacccatgtttacatcattaatattacatatatatatatatggaacacttttcaatgagtattactcattgatgggtactaaacaatttaactataataattaattttaaaaata

SEQ ID NO: 402398 - DNA, 757 bp, Cannabis indica
ttttcagggtttgtggctcaactattgtgggcgggaatgtgacagtccaacttgcccaagtagccatcctggtcgagaacccgcaagcgcgcctcgataaccttggacggagggctcacacacctggcacccaaggtaccttgccttctatgaggaaccacaactataagttccttactaacgtagtccatgccctcaaccaagacgtctccatcagcatcgactgactccccagcctcattgtatcccccatagtttgggggtgcaacctcctcctcttcctccgcctcggagggattgctaggacagacatcgtcctgctcctcaatttcctagaccttggcatctccttcatgatccccctcctcttggacggttggatcttgttcggcactgggcatagtggcgtgccgagccacttgagggtcaaatgcatcagccatgcgagttgtctttttagtgcaagccatcatcctatggcttggcaaaatatttgagggagaatgtctttcactggaagaaggtcggctagaacagagacggggatggacctcgtgaaagagttgaagcaggtccttgtcgattcgatgttcgctctcccaaaactcacatgggttcatctacaaaagacaacacacaagataagtgtttgttcggaaagtcaaaactcagaaagtttgaaatttctcgagttagggcaaaaaattttatgaagcttagaataagcaggatgaaagacaggaattatgcagttcag

SEQ ID NO: 402399 - DNA, 501 bp, Cannabis indica
cattaacattcacaattttccctcaaaatcagcttgcacaattaacttcaaaaatcatgctcaaactcacaaaatccaagctcaagaacttgaactaaattcaatatacccaattatttttccagcaacaacatcatcaattaacttgaatttaagatataaaagaaatcctagaattccctctgaggctcaaacaaccaccacaccaagaatttaagcaaaacacacatagattcccaaaggaacatcacttcatgcaatacataaatatcatattcatcaacaacctaatcatgcatgtctaacattaaaattcagcaacatagtaggaattagagttataaaaactacctcaagagtcactttaagggctagcacaacaatttaccaacactttacttcaatttcaagctgaacccaagcaattcaccaattgaaatcttgaaaatccaaagagagctagagagagagagagatgtcgggtgagagagagggataaac

SEQ ID NO: 402400 - DNA, 615 bp, Cannabis indica
tttttttatggtaattcaaagtgtaatatcttatatatgtcaagtttttattttaaatgctatattttttcctattaagatttcttaccatatttatataattaaactaattttatttttctatatttatgtaaataaccaaaaaaaaagagagaaaattacattgaaatacgtaaagtacattttatttatacagatacccatattaatttttttttgaaatgcatattaatttaaattgataaaaaataaccaaaattatttacatttagtattctctctcgttattggtgcatcattcaccattctttctttcttccataaactgttatcatatataataaaaaaaaactttatatatataatttttattattattattttagggtgtgtttggaattggaagtaaatgtgtaatgactatgtagggtaattactagagtagtaattactagagtaattacacagtttagtaattacactatattttaaaatgtaagatgtgtttggatatgaggtggtaattacatatgaattcctaatatcttgtttggcaaaatagttagtaattacatgggaaaataatattttttaatagctaatgtttaatatgga

SEQ ID NO: 402401 - DNA, 618 bp, Cannabis indica
acatcccaccaaacacctatggatagcctaaaaacccatcacaagataagtaattatgccctaaattagatctgggaaattgtgctaagtatggtgtaaacaaacacaacaatggtggccttttactaccattataagcctataaatatcccaatgataaacagaaatggggatcaaccaagaaaaagctttggaataaatactctcataaatacggtgactcgtggactaaggttcattaatgcaccaaccacgtaaaaatcttttcttctaactttcattaaatacttcatacaactttaattactggttgccgaaaatctcggtcaacaacagtgaccaaggccggcctaagcatatgacagcttcggccattgtacaagaccccctacattaaaagcccccttttttatcatccctttttatatagatataatataataaatatatttttttttataatatattgtatacataataaatgttcataagagtaaatatgaacttagcacttataaaaaaaataataaaatcttgtgcttccaatacacattattctaaaaaatttacctattttagaatttatgaagtacctttttgtaaaaaaaaaaaaatgaa

SEQ ID NO: 402402 - DNA, 918 bp, Cannabis indica
agagagagagagagatgtagagagtgatatgttgtctttcttaggttttctaactattctttcttcttttttttaattgattaatactaatcctaataaaagaaaacagcttctagagtctactaaaatccaaaaagatgactaaggaaaaagacctatttgcccttttaatttaagctaaagatttaaacaactcaatggtagtttggtcatttccaaacaccgttaaattccaataactccataacctatcaatgactccccgctactaataaaattctataacacaagcaaaacgtgactctctaatagctcagcgtcactttccaccgctaccgagcacaatcacaaaaaacgagaaattcacatatatagcataattaatacatttcgaatttaaataaatctccacaaacatgtaaatcataattaataactcaacattataattaaccctaattattcaataatccaaaatattgatcttaagcggtctttagaattatcccccattaaaaggatttcgtcctcgaaacctaacctgaacagctttggatgttgagtcttcatgtcagactccaattcccaagtgccttcttccatgttatcccaaattcggcactctgacgtggcatcacgagaatggtgacacgtggactctacttggagcacctgttcggaacaatatgttgagcaggatgcctcgctgacacatccagtatggaatattcaacgagccgtgcagaatgatcaacacttagcgaattcagcttaacgcatcatgagtcaccaactcaatccctacaactcagggatcaacttacgtggatgtggcacacacacgatcccactatcggtgtatttagcctcaatcccacgatccttgcattcaacattgatcacacgatctttctgttt

SEQ ID NO: 402403 - DNA, 641 bp, Cannabis indica
tatttttattagtattttttaatattttttgttaattattttttcaaaattaataaaatattgtaatttaattttttctaataaaaaaggacaaaattttgtaagtaaaagtgcaaattttttttttttttgagttgaaatatttaggtgtgccctgttttgggtctgtagcagtttgtgccttttaacagttttttttttaggattttaactacttttttcccccgtgttttcctggcagttttttcatcagcaccgccccctctaccctccttcttcctctgtttacaccggccaccgtagcaatgtcctccgacattgaccctctcttacactccatggattcaactctgaaactaactgatgaagaacgatcggtcttctcctacatgatgatgtgattccttcctccactgccatccctactcctactctccttgctagagttattacccaaaactatgtctataaaccaacttttatcaaccaaatgtccgaccattggaggggccgttctccagtcacaatcactgagtacagggatgattatttcaagattaccttcggctgtgatggtgatgttaggttttatgccctaaataaaactccgtttcaatgtaatctattttattcaacatcaa

SEQ ID NO: 402404 - DNA, 593 bp, Cannabis indica
ttctcgactatccttttttattaagccacaaggaggacattttctttaaaggtgttttattttatggttctaagatcctaaaagaagatacttttggaaaataattgttgtggcttggataatatgatttgagagaaataaacaaacttataatcaacaaggtaggactttgcaacaagttttaatttgggtattatttttctgggaagaaatcaagaagtcttgagttaaggatcaagatattggtcaagggcggattattaatcaaaaggaagaaatttttgtgatccaaggtctcatactctttgtggatggagcaatatgcaagagtaataatattgttagagttgaagtagccattttctccataaacaatcatatgatggcatctttatcaaaaccatcaatggtttggatcatttgttaagtaaaatagtatccctagtcaaagtggaagtctaaccaaatgaatttctgttagaaattattggaattacaattatatatataaaatatgtgttggatcatcaaataaataagtcaaatttatgagatctattttggaataaagtttatgacttaagggtatgatt

SEQ ID NO: 402405 - DNA, 716 bp, Cannabis indica
aacttattaaaagaatattttcaagtttttacatgggaacactcggatatgcccagaatagacccagctataattaccgataaattaaatgtaaacccaaattacatcctggtcaagcaaaaaaggaggaagatgggagcagatcaaaataaagccgtgaatgatgaagttgaaaaaatgctggaaaatgataccattgaggaagtacaataccctacatggctcgccaacccggtggtagtaccaaaaaagaatgggaaatggagagtatgcatagacttcactaacttaaataaagcttgcccaaaggacagtttccctctactccacatcgatatgataatcgacgctaccgctgggtgtaacgtgcgtgccaagatggcacgttacaagctaagtgatgcccacaagtgggccaagtggtggtcaagtggtggcccatgttgaggtgcaagctggtggcatgctgatgcttagtttgtatggcagtggcatttttgtaaatatcttcaatattgtttggaacaggacgggacttggtatttgccatttatttgggtctacaaatataatgttgcgatcgaattggagaaactctgtgatttggtttatggtttgaccgtatgtctacagagccaaaatcatgtacgttcctagtagaaggctaaaagcttagaatgccctttaaggggggaccctggtgtcagctctccacc

SEQ ID NO: 402406 - DNA, 1163 bp, Cannabis indica
gttttgacttttcattgaatattgttattctctaatctgttgagtagtcctggtcggcatatttgcccgttttaacgttcaatattccaaccaaacactcatcttgtgtgttgtcttttatagatgaacccagctgagtttcggggaagcgaacaccaaatcgaccaagacctgcttcaactcttgcacgaggatcattctagtcttcgttctagcctaccttcttcgagtgacaggcattctagcttaagtcctttgtccagccataggatgatggctcgtaccaaaaagacaacgcatatactctacgcatccgaccctcaagtggcccggcacaccaccttacccagcaccgaaaaagatccagccatcttcgaggaggaggatcatgaaggggacactgaggtccgagagattgaggagcaggacaatgtccgtcctagcaatccctctgaggcggaggtagaggaggagatggcacccccaaactatgggggatacaatgaggctggggagcaagttgatgctgatggagacgtcctggttgagggcgtggactacgcctgtgaggaacttactgttgtggttccacatagaaggcaaggtactttgggtgccaagagggtgagccttccatccaaggttactgaggcacgcttgtgggatctcgaccaggatggctacctgggtgaattggactgttacattcccacccacaatagacgagccacaaaccttgaaaggggaatgtgcgcttggtcgggtgctcatgcccagcaggggcattgctgcctttgcacccgtaatttaggaacgtggcagacttcttccacctctgtccgacccaattcactcctaagcgcattaagtatctgtctgccctcttcgttctttatgcttcccaaaggtgggatatgccctctccgcatgaggtaagctggttttttgatttgaagtccacccctacacaaagcatgttggggtacttctatttctctcaaccagacttcaagtgcttgacaagcaccagggacaaagctgttagccaaattgggcattttaatgacgagtacttcatggttaaaggtatgggcatcgcccatactcggttccagaaaatccccacatatcaccgccctcccttcactcttgctcttagagat

SEQ ID NO: 402407 - DNA, 594 bp, Cannabis indica
actcagaccccaacgatcatttgcttgattcaaccgagtaatgacagttatgagggtcagtaatgacgccaagtgtttatactttccgctgatgttgggcggttccgcggaagaatggttcaaaaaattggaaccaggatctatggattgctggaacaaggttcaagttagtttccgaagacagtttgtgcgacgagaaagatcaaccttgaagtcagcgccttaactaacattaagcaactacccacggaaaccttgaagaattttataaagaggttcaagaaagaagcctcgaaaaccaataaagtcgatgatggacaacaacttgcacatcttctagccagaatccatagaggaacctcattctgtaaataattgcaacaagaaggagtcgctaacctccaggatttccagaaaagggtttaaaagtacatcaacttggaagaaacccaaatagtggcttactgaggatactatccaaccagaatggcaggatatgcacccggagctcagctctcgggaaccctccctccggttactccaccaatgagtggcatacaattcttcgctaccccaggatacaatcagagccca

SEQ ID NO: 402408 - DNA, 512 bp, Cannabis indica
agtattttttggccttctttcttctattctagttcccccatctggcttctcacaaatattggggatggatttaatttattttttttttgttatggagcttggcaggtttgatttagatcttggcaggttcgggtttgtttgattgtgctgttgtgtttgagttagtgtggatttggtagtagttgtggttgttttagatttaaaaaagaggttaacgtggtggttgtggtgggcatttgtggtggatggtggtggttccacatctgtggtggtggtggtgatgatatttttaagaggaatgaagatgaagaaaaaaaaatgcatccagaaaaataaaggtaagagagatagagagaaataatttatgattttttttaattaatagttttcttttttctttttaataactgaaaagaaaaaaaaatgaaaaaaaaaatatttttttatgggtaaatagcggtataagtacctaaagttttgagtttgtaagcggcataaacctaatgattttt

SEQ ID NO: 402409 - DNA, 682 bp, Cannabis indica
cttgaacttggattattgcttgagttagctttagatttggaagtgaggtagttttcatgatcctaatcttgttttcagatttgttttaattaaattcttgctgaaattgtagagtaaaaagcatgtgtttgagtttggattaccttcttgcatgtgtgatgaaaaggatgctaatcttatggaattgagtttctatttattatgtgatttgtggttgagcttgggcagtgattacatggtgtttttagattggaatttcatgtttaaattgatgctatgctgctgaattttaataggtttgaagtgggttgagttcatgcccttgagcatgaagttttgatgagtttaggcatgatttttgctatgtttctcaatctgatttttggtgatcttatggggatttagatgcatgtaatgtgttaattgagtgtctatgatatgctagtaatcccagttgttaatttgtatgcttggttgagaaattggagtgaaaatttgagtttgaaagctgaaattcgaagagaagggctgctggtttctgggttctgcacccagatgccgcggcatgctctgagcatgccgcggcccgcccctggttacaggaacctgggttttgtccgaggtgcggcggcatggtctgggcatgtcgcggcccgccctcgtgtttttgggcagttttgag

SEQ ID NO: 402410 - DNA, 649 bp, Cannabis indica
aggaactccgtgctgcggtaaatttcacgttcgaagaacagaggcgcatgtttgccgaatggaaggataaagagatggaaacgttaagggctcagcaagcagtcattaacgatcgtagtcggcaagccactgtgctaatacgaaaagcctatcaaattgccgggcagcagctagcgaatttcatccccttgggtgaaatagacgaagatccagcaatgaatacttccaagactataaatggtcagctgtaaaatccccggtcacagctctcgcctgtgggccaagtgttaggcgggcagaccttgtctagtaattcatctggagaagtcataccaaataattccaaccaagtaaatggtgccggtcagcaaattggaaaaaccaaccagtcactgagacagccaggcatttccgtatttgataggttggggacgactcatgatctcagaaatgatctgaataggaggagaggagtagacgatcagcttgacacgccgatcgtgcagcctagaacccgcgctcaatttcccgctcaaaaagatgctaatgtgactcagatcggctaagatgtcgaacagattagtccagccatgcaggcatagttggacgaactaaaaagtatgttacaaggcatggccggtaagaggaa

SEQ ID NO: 402411 - DNA, 764 bp, Cannabis indica
ctttgtttcagattcagatagataaatgacaagcaacatttgcaaagtcaaagtttttttttttttttttaatttgaagattgtcagacattgattatcataattcttgttcttaatcttttcatctaatggaatcaatcaatttcttatgtttgtggattgaattatgttttctcctaatttcactgagtattttgtatgttagattttagaagattgagtgattgattaccaccaagtcactatatattactctaatattgttcttaatccaataatctattaatctctttatctattctccctatagttatactacaatcatgttttaaattttcatttcatttcaactcacatcatatcattagagtatctccaaactagttaagatagttgctctaatggtgtgctacttatgcaaattttcaatagcaatgaaccttctccaatgggatatgatgcaaaattgcaaatattgtgatatatttagcacaacaaatttgcatttattgaaaatatgaaattcttttttatttattattaatatcccacctaaaagttcaaaagtttagagtaatttacgacataaatatttaaatttaactcttagttacaaataaatatttaagtttaattttttgtggtaataatacttaagttataattctgaaacttttataggtacatctaacagtgtggtacttatagagttccaaaaatatcatttaagtattcttaccgtaaaaaattaaacttacgtattt

SEQ ID NO: 402412 - DNA, 1238 bp, Cannabis indica
tgtgcgaaggcttcagcttctacccatttggtgaagtagtcagttaaggctagcatgaataccctctgccctggagcagttggcatcttgcctacaatgtccatcccccatctcataaatggccatggtgtaagtgaagagtggagcttctctggaggtagatgagatatttgagcaaacctttggcacttgtcgcattgttgaacaaaattataggagtctgctcgcatggttggccaatagtagcctattgttagagctttgttgcataaactccgatggcctgagtggtttccgcattcaccttgatgtagctcttggagaatgtaattggattcagccggtaatagacatctgagcaatggccctgagaatgatcgtctatagagtttcccattgtatagtgtaaatctggccgctttagctcttagttttcttgactcgttcttgtcatgtggaagggttccatcctctaggtactgcattattggcgtcatccagttgtcttgttcattcagactttttacatcttcgttgggtttccatgtcgctggccattgcattatcaccacaggaatggtgactccatctttgatttgaatagatgagccgagattagcaagagcgtcggcgtggttgttctctagtctcggcacttggttaatggtgaattttgtgaatcttgaaatcttgtcttgaacaatctggaggtaggatgccatttttgaatctttggcctggtatgacccgttgagttggtttacgataagttgagaatctgacatgacttcaatggttttggcattcaactcaatggatagatctagcccagcgatcaacgcctcgtattcagcctcattgttggtaagtttgaagtcacatctgattgcccgttggataacatctccttgaggggaggtaaggacgattcctaggccactccccttgctattgcttgatccatctactgctagcatccatgtcgagtttgtttgctcgtttaagcataataattccttttctgcttgtacctgtccaacacaagaaaagtgcggttgatatgttaggtcgtattcactgagctcaataacccatttggtcatgcgtccagaaagttccggtttgtgtagaatgctatggagtgggtattgggttagcaccactataggatgacactggaaatagggcctgagcttgcgccctgttgtgacaagcgctaaggccaatttttccagctg

SEQ ID NO: 402413 - DNA, 527 bp, Cannabis indica
aacacacctactatagtcattaactattgaaagaaaaataatgatattggagtgagtaggcaccttgtatggcccccaaagatcagtgtgcacatattcaagtatctttttagttgtgtgccttgccgaagtgaagttcagtttattttgttttcctaaaacataagcttcacaaaatggtaaagcacaagaatttaatttttcaattataccttgtttgtgcaattttttgagaccttgttcactgatatatccaagtctatgatgccacagttccatatctgattctagccctttcaccatacttgtttctctggttgggacagtctccccatagagaacgtataaaccattgatcttttcacctttcattttaactcaatttggtgattctcaagcttctgtgcatggaattgtatctctatcctttatcttcaagcgcaccaaaggaaatgaggttttgtctaagctctaggatgtgccttacgtttttcagcacctttgattcaaccatgatactgtttgat

SEQ ID NO: 402414 - DNA, 619 bp, Cannabis indica
acaattaactttcgtttttttttttcttttttttttttcaagtaggaaggagaagactcatctccttcagcatcactaaaggaagaagaaacacattttcaggtacaattaacttcctctttttttttcttttttttttctttttttttcatttcaatgactttttttttcatcaaaaaaacattgttttgcttctatctttacattgaaatgttaaatataccaataaaaatcatttctttcatatttttaggaagaaaaaaagtgagtttgtgagtgggtatgattgagtccgaaaatttaagaaaattttaagtgggtttgtgagtgggtatgattaaatatttgtttgtttatttttttttaataaaatacattgaatattatttttttgtataatttttttttttgttactttttatttatttctaatttaatattattgttgaattaatatatttagttctaatcatatatatgtattttttgagtaatttattttatttaaattagaatgttataattacccacaaataatgtgcacctatgctagaaattaaaatttattttacacctagaattagaatatgttacaatattatttttttcaaaaaaaaaa

SEQ ID NO: 402415 - DNA, 790 bp, Cannabis indica
ccattggacaatcagaattggaagtggtaaacactaaagaagacttatgagtgcaattgtcaaaacccaagataagaagacttggaaacgatataaatcaacaccacctatgttgagtactagtagttatcctcctagtccgtcacaagcaactcaatcgactaaagctccaactcttgtctatgtttttgttggattgaagcgaaaaagtgatgatgatatgtgtatggacgtcagaagagcagaagcaaactctcaatcaggtgtatctaccttatggtggttgatgaattaatggtgcagtctgcgaagtagacttgccaggcccaatgagtattttatgttggaatgcctagggtttggggaaccccgatgcattgaatgcattgtagactattatttgtatgtattcccaaagcttggtcttcctatacaagattaagctttaccataacttgtctatgtttctgttggattgaagcgaaaaagtgataatgatatgtgtatggacgtcagaagagcagaagcaaactctgaatcaggtgtatctcctatggtggttgatgaattaatggtgcagtctacgaagtagacttgccaggcccaatgagtattttatgttggaatgcttagggtttgaggaaccccgtgttggaaattattttaccaagatctatttactatcatgtatgttggattaacaacctaatatgaattctaaaataatgaaaaataaacacatataaagttagaaaaccttacagtgggtgcagcggaatatatgaatcct

SEQ ID NO: 402416 - DNA, 519 bp, Cannabis indica
ggcaggtggtacgcgtggaaggggagacatagtcgagaaaactcggcgcatgcactcctgtgcatgatttccgcgcgcgtagggaaggtgctcatgttagtgtcattattttgtgacagtgtttgttatgttcaatgtctagtcgtatctgggtttttagtctgttttatctgcactagcgttctgttacgtgagtttcagttaagtattagttagtgccaggtggactgattttgtggatatataaatagtcggaatctgttagtaaagtttttatccattaaatcgttcagacagttatttcggttgtgtgtggagatagagtcgtatcttgtttcttgttgttgtgatacaggtcagatcttggagcttgaggatgttcatcaatggcggaatgatttgaatctggaattgctgagttcaaactgaagggagttcagtgtcatcttcatcatcagatctgaagggatttcaggttgaagccatgttaaagaagagctcagttgctgcacaagggat

SEQ ID NO: 402417 - DNA, 599 bp, Cannabis indica
cttattttgttgaagatttagacttgattgagctattgttattttttaattgtgtggatgaacaagtttgagttcaacaactcaaagcttgctcaacaatggcactttttgattcttggtacaatgattgtgtttgagctgtaaaatatgtttaatatgttatatgttgatgctctggaaagttttgtggtgattggggaagatttgagtaggttatggaggcttaaaagttaagatttttcgtgtttttttgctcagacaactggaattccagtttgttcagggctattccaactggaattcctgttagactgtatcggggaaggctgaattttgtttcggccataacttttgactcgagactccgtttcagacattctttatatcattggaaagctcgtttcgagctctatatgtttatcaatattttgaatgccaatttatattatgtgaaagtggattcagggattaaccctatacttgtgaatcccaaaaattgtgactaggattattggcacttggtcaggagcacccagggatttggaatctccatgtttgcaggacatcaggtaagacagtagttgcacgtagagatatgc

SEQ ID NO: 402418 - DNA, 1069 bp, Cannabis indica
atttgtaaactaagaaacttagataattctaaaatttcttagaaagttaaattgtaattcaaaataagaaaaatctaaaaagttacagtatcaaccttagctccctataattaccaagtttgggttgaggagtcagtgtataccaaaaagtcaaaagttctaaactattaacaaaagtttactactttctcatacaaccctctcttctaagccaaactaatttcatatactaaatcaaaaactactcatcaacatcactacttcactacattaccacaacaaaccattaaccattgtgaagtccttttttggtaatttagaagccaaaatattttttattttatggtgagatttgtttgcactcttaaccgattttctcacctttaatattcagttttattgctcttttctatgttaggaaagatgtattttcagctagatttttcttgtatggaaacttcttgtaagagaagcaattctcttacggaatagtttgttttcaaaggaaactttgactcttgctatttttcttatgaaattcgattgtgtcttgatacaatcagattatacacactgttttttgaaaggtatcaagacccaatacaagatcggatttgtttatggaaagtttccttttctggtctgatttgctgcgtcagaatctatttccgatgctacaaatcaaggttatcttaggaaagttttgtacaactgtagattcgactttgtggctgtctctagggtttctatgttctataaataaaacctagagagcatccactcgaatcggctcttctagtttttcattttgtgcatttttcttatttgtgagaagagtgttatttttgtgagaacttagttgttcatctaggttctagtatttttcatatctgttcttactatgtcttagagtttgttagaacaacttgactgaataagagagttgtcttcgggagaagacttgttcaagccttactttaggagaaagtaagcactcacattttaaagacgaatggagttcgctttttgaaggtgtttcagaagtcagattcataaagtgcattacaaa

SEQ ID NO: 402419 - DNA, 762 bp, Cannabis indica
ttccaagtccaagtcctagtttctgtgccgttcaacttccagtttaggttccaattttacgtaacagggtacgggttcaggtccacttttgggtttgggattgggttcaagtccgagtgtgggttcgggtccttgtcagggttcaggtccagggctaggtccgaaatctagacataacctacgggttttgtccaagccctgggtccaaatccagatccaaatctcgggtcccagtcgggttccatttctggtgcggggtcacgagctgggtcctaggttcaatttcgggtctgggtctgctactaggtcccagtcctagttctgtttcccatgtacctatccagattctgggtctaggtcccggttattgtgtggattttgctcccggtctaggtttgggtttgagtcctagtctcggttcgggttttggtctctgtctgggtttttatttgggttcaggtttgggtttaggtcctggtcctagtcctagtcctagttcggttctcgttccagttgcaatttcgatcccagtctgggtcttggtccgagcccaggttcgtatccggatccctatctaagtccaattctatgtttgggatctggtcctagatttaggtcaaggtgcgcatctcagttccagtctggtacacgaccgtgtccgggcctgagttctagtgtcagtttttgtatgagacaaggtctcttttcggttctaggtctgggtccaggtcctggtcgcggtcctagtcttgttctagggtc

SEQ ID NO: 402420 - DNA, 566 bp, Cannabis indica
tagggttagggtttgttgggcttcgactgggtttaggccctgtatgtaacaagtaaaaaatgggaaaatacaaaatatatgggattttataaaaaaaagttacaaaaaaatatgacatttataagtttatcacattttcttacatttaaagttttttatggtataaaatatgccacatttttatgaatttaatattcaaacttatattttatactagtatattgttacgtgcgatgcacgtatgctatgttttatattaagtattatattatgagttcggaaggaaatctcaaaatctcgattataaagtaacaaagaagtattaaaatttcatctgctcattataaagctacctttactcaaaatagcacaacaaaagtaacaaagaagtattaaaggtgtaaattttaccaaaagcaatgagaattaacaactgatgattacattctgtttcagtaggtgaaattgagagagagacttttgttgtgtttgcctgtatgggtgatgaatgggttaatagtaaagattgtttaattttttggttttaattattatgtttatttttt

SEQ ID NO: 402421 - DNA, 969 bp, Cannabis indica
gttatatatataataataaataataataataataaattatatatatgtataaaaaaaaacaaacataacaacccccaatatcgtcccctctctctccttctctttctttctctctcttcaatccacaaaagaaaaccacaagacctcatcaccggcgtgactccagtgacccatctccagccaccattcggccccacgcgtcagaccattttaatctccaggtgccggtgacctcaacccccaagcggcgccactcctttcgcctccattagccccggatcacaagttaaagtttggcagttcaaactttgaacggatttttcggccacctccggtgtccgtttgacgagccgtcttcaccactagactcagctcgtcaaggagaacaacctacactaagctatttttcccaactcgctactttttctggtgacatttttgtagctccaccccttttcggcgactctctggtgatatcgtgtaccgttttgataaattattggcatgggtatgatctactcatcgaggtggtcattttgatatatgctacccaaaaaaaaattggcgacattttcggtacactgatttttatcgccactgatagttaatgtgcaccgcttaggtgaggtttcagaactccaaactttaaatatagtcatattatatgtcgttggacttgattttgaatgtaaaatgcaatgatgataattatttagctatttgatggtataggtgagagtaatatctaagattggactaaacaattgaagctcgggacttgagagcttaagatcgtctttcggacaaaggttaacgacttgggagaggtagggactcaacttaattattggacttgattttttatgtgttctatagcattagacatattctaaatttttataatttgcaaattgtttgaacaattaaaaacttaatctgcatatttttctggattgttctggggcactg

SEQ ID NO: 402422 - DNA, 669 bp, Cannabis indica
actaaatagaattcaaactagaggtggtaaaaggtatttcattacttttattgatgattatagtagatatacttatgtatatttgttaaagtaaaaggatgagacctttagtgcttttaagattttaaagcggaggtcgaagatcaacttaacatgaaaataaaagtgttgagaagtgatagaggaggttataacttctttaataaatttactatttttgtgaggaaaatagtataattcatgagagttcgacaccacatacaccacaacaaaatagtgtaaccgaaaggagaaatagaacatttcttgaaatggtcaattctatgatagtgtactccatgttgaataccaacttatggggggaggcactttttacttcttgtcatactgttaacagaatacctatcaagaagaatgacatgtctccatatgagatatgtagaggaagtaaaccaaatattggatacttcaaagtgtagggtgtaacgcccgtattttataataataaaatccgaagtctaattttgataattaatatattaataattatatggatcgggatcccgagtatcaaaatactagttaaaagtattttactaatatgtacatatacactattttttttttaaaatttagtcggtacaagcatcctcaaaatacagactccaa

SEQ ID NO: 402423 - DNA, 741 bp, Cannabis indica
aatgaaatcctttagatagagccgtacttcacaaaggtatcctcggaggtcaactggatgatatttcggtcttcccccggcagtcgagcaagtttttgagctctatctctaagagcaagagtgaggggagggcggtgatatgttggaatctgctggaaccgagtacgggtgaagctcgcgccatccaccaataagtactcatcaacaacatgcccaattttgctgatggccgaatcatcggtgcccgtcaaccacttgaagtctggttgagagaaatagaagtaccccgacctacctttcttggggtggacttcaaatcaaagaaccaactgacctcgtggggagaaggcatatcccacttctgggaggcataaaggacgaagagggcagacagatacttaatgcccttaggagtgaactgggccggaccaaaggccgaaaaagtccgccacatccttaaagtattggtgtaaaggcatcaatgccccttgctgggcatgagcacccaaccaagcgcacatcccctagtcaaggtttgtggcacgattattgtgggcgagaatgtagcactacaattcacccaggtagccaccttggtcgagagtccggaggcgcgcctcagtaaccctggatggaggactcacccacctggctcccaagatactttaccttctgtgaggaaccgcagcagtacgctcctcaccgacgtagtccacgccctaaaccaggacatctccgtca

SEQ ID NO: 402424 - DNA, 583 bp, Cannabis indica
tataaaaccgtcaggaaaaatttgtatcccgacggtttataccagtaattacaggaatagatgacagttttaattagaattcgtaaaatttattgagccctgttttaaaccgttaggtataagagcccaataaaaaatcgttacatacttctcgccacatttcccacgtgcccacctacttcttttctatttcccacatgctcacctatttcttctcacctattttttctccatttcccacaccctaaaacgaaaatcttaactctccaaaaccccacccacgcatccgcaccatcgccctcctctctcgccgtcttcctccctctctcgatctccctttcttctcgtctctctcctccatcgatctccacccacccctccttccgtcggtctccctctcttctccgtcgcatacgtcaaaccaccaccacctctcgtcggtgtccctctcatctccatctcatacgtcggaccaccaccaactcctgcccgtttccttctctctctttctctctcttcgagctcggtataaatacatttatttatttatatacttttttatttattatatatatatttattt

SEQ ID NO: 402425 - DNA, 637 bp, Cannabis indica
ccttctgccttgtggttgagcttctggtggtggctggccatagagatggggatccttgagcctattgaccatgctcacatccatctttctctgcggcactactttgttgtcaaagggaaactcattcacctcataagcttgacacagatcagtaacaatcccagccaacccaagtgcacctcttgtggcgctttgaacgatcaattcaaaactaccccgaaaaacttgacccacactaatcttgtaccctttcatgatggcgtacacatatttcaaacgatccatttgcacatcaaaaaaatgcttgctaggcaccaactgggcactcacaaaatacagccatatttttgccataggatttatttcacactgatgcaacaaatttggcgaccaatcctgcccatcattatcatggaacctcaaccccaggaatccaaccgtttcagctacatccactaagtcaagatgttcatcctctttaatcaccctcaatcgttgttcatctctagtgagatcgggcaattcatagagtgtgttgatcgcatcagatgtggcttggacttccttattgcaaactttaactagtccatgtttcctttcgggccagttggccaagaattcacaagccattgtgaca

SEQ ID NO: 402426 - DNA, 611 bp, Cannabis indica
tctctctctctctctctgatctagtttaaataggtattgcaataggtgttgcaaagtctgttggagaaaaaattgagatatacttcaagcttcaaagtcactcatttacaaggattgcaaattttctccctgctctggaatgttctagggtcttttctggtattcttccagtttactcccagttctcttctagttcacttccacatcccaaccgtcgttttcttcttctctttctctaattaatgcatcttcattataccctgcatatcatcattgcttattctttaatgcagcccccgttttccctctaccgagactaccattaatgcttgctcagataacctttggctctccttcctttccctatcctttcatgcattcaataactgtcttgttcttcagatggaggcgaatcattgccctatggctgggcagacgaggatctagacctccagcagctcgaatggcgcacgtatctcctcatcttccaggttatacttacttcaggtatatctttcttttaattttctatttaaagcccagcattttgttttctgatcatccttcacctgtactttttaccacttttgctctcttatctttctcgctcc

SEQ ID NO: 402427 - DNA, 947 bp, Cannabis indica
caggtgttcttgaagatcttgaattagtttagagaagatgcgagctttgttgcttttgcaaggactgcaagatgctttgttgggagaatttaaactccctgcaactctgtctgagaaggagaaaatagagattcttgaaaaagcacacagtgcgattattcttagtcttgatgatcgagttctcagggaagtgtccaaggaaacaacaacaacttgaatgtggctcaagctagaaaacctctatatgtttaaatctctagcaaaccggttgttcttgaaacaaaagttgtattcttttcaaatgttcccacggaaaagtattgaagatcatttggatgatttcaacaagatcgttcttgatttggagaaaataggaatcaagattgaggatgaagaccaggccatcattgttttgaattcgctggcttcagaacagtatgaccattttgtcgacaccatgatgtatggtaagaattctttgacattagaagaagttatcactgctttaatttcgaaagaaatcaagaggaaatcgaaaattcagaagaaaatgtagggatatggcttactggttcgaggaaaattccaaaagaaggggaacaaggcacaaaatagtcgaagcaaagggaaggtaaactcaaagactaagagaaggtgttatgtctgcaacaagccatcacatttgagaaaagattgtccaattctcaagaatcacaacttaaagaaagatggagatgctggtgtggtctcagatggtgatgatagtgatggctatgacagtgcaagtgttcttgtgatcaccaagaacaatagggataaggtatggataattgactctagatgttcttttcacattttccctaataagagtcaattttcaagttatcaatccaaaaatggtggcactgtcaagttaggtgataatcattcttgctccatacaaggaa

SEQ ID NO: 402428 - DNA, 1249 bp, Cannabis indica
ggttagagtttactccatctatgaggggtttatctaatatacccgacaggtgcgatgcctttgtccaaaatatccatacatcacttaggttgcaaggtgtcaggtaggtgagttagagccctatcttttcaaattttgatttgaagagaatattagaggaggttccattgtaccaccatacatcttgccacggtcatattcctaatttttatagtaataactaggggatcattatgcgagaaactgactagtgctacaccttcctcgataaaggagatcatgggatctataggcttctcttgctttagagctccggtctttgatagctaagacttttgcctttagggttcgtgacggagtgtctgagcattagcactccctaactttgctaattttgcttaagcaatgtggggttcgcctattatgtacccctagtaatgtcctgctacgtgtggtggtcattcggtatcttccattttggcttccgtgcgacttggggttggttatcttacacataacgacgcagctggggattgttacgccttatcaggtactcaatctccctcttaacattttgacactcattagtgtcgtggccgaagtcattgtgatatctgcagaacttcgacatgtccctcttgcccatctcccttctaataggaaaaggctttcgttatgggaccattccccgagtggccatgaagttggtctcatgcttctctgttaggagggcgaagcaagtgtacttctcctccttgttcttttgtggcatgggagaagtgtttaacttccgcttttttccattttcctcccagagctattggtgccacgcttgtttctagtgcttttaccactagaagttttggcagagttgcggttgtctacctatgcgcctggtgggtcatgacgctactgagtgcctcatgactgtatgttattgacatgccccacctaggcttgttgtatgacttcttcaagtttgatacatatgtctattttaaagaggaactccttcatgttgttggtggatatcctctagatatctttccagaagtcgcttagcgggagtatgccccaatgtatggtcgtatatcgaccttcttcagtaaggcctttcacttgggtagtctttgccataaatctcttaatataatccttcagaagttccccttgtcactgtttgacttcgacaaggtcttctagctatgatggtagaagtcttgaggatgagaattgtgtatagaattct

SEQ ID NO: 402429 - DNA, 1348 bp, Cannabis indica
catgtttatcaagttttgcttaacaacttaaaaaaaaaatgcaaacaaatcacatattcacatttcaaacatcttaaaccctgattaaaatgaaataagaaaaaatattcaaaactcaatatcaaagaaaataaaaaacataaaccctatatcagatacatgggttggtctcacaagggaagagttacattggagtgaattgtgttcggcggagcttaattcatgcttgacgagctcgagagaatagaaaggataagagtaaggagaaataatagatcaaaaatggtggtggtggattaggatcaaacttagaaagagagatggtggtgatggtttcgatggatcagtgagaaacaagggagatgtgggtggcgctttcaacagactcgagagaaagaaagagagatagtgtcggtaatggttggaagtaagggtgttgcttaaactgcccgtaccacaccgcacaaaaatgtagtttgaaattctttgcggtacggttgtggtttacatttttgccaaatcgcgtagtgcggtgcggtttgcgattttgaatttaataatcacgattcaaaccgcaccgcattctattttacaaaaatactaatttttacattatgatttctcttttcatatatgagcaactcatatgcttacaaactccaagctataaaattaaatttaaaaaatatctatataaattattctcatttttattttttctaacttcttattgttaatatattattactgatatatatatgggtatgctcttaatgggtattacccatgtatgggtattttattcttgaccattggatcaaatatctaatggttgatatttataatcattaattaaatattaaaaaattaatatttcctattttgttattctctatattcctaaaatagataaaactattaatagaaataaaaaatttataaatggaattgttatttaaaaaataaaacacactaaaaaaattaacaaactattttttttaataaaaatcattttaaagattaaaaagaaaaaaagtgtatatttatctttttataaaatttcttcatactagaattctaaattgcattactgaaaataaaaaaataataattttaagctttaaactgtaatacacataaaatgtataagatttttttttaaacctaaaatctttaattttataataattaacaattatttatatgtttttatttttttttttaaaatacttgagcttaccaaatctataagaacaaaaccaatgaagaaaattttaacaaaaaaaaaaatgaaggaagaaaaaagtgtcataaacattattgaataatggcaattgccaacacaaga

SEQ ID NO: 402430 - DNA, 520 bp, Cannabis indica
aaatatatataaatatattttatgcaaaaatatatttatatattttggagtgtaaatattatttcacttaaaattattcattcttctataaattaacaaattatttaaataatagagtaatttaattaaaatggcacaaatgtaataaaaatatgatactatgactagatattaggtataaataaatattgctttaaaaaatgacacttttcattagaatataaagtgagtataaaaaagagtgtaaaatagagtgtgattatataacaaaaatgagaaactaaatgaatgtaatacaatcaaatattaatagtgataattaatttattaattttgatatctatatacctaggtgacgtttggcaacaattttttaatcagttttttatttttaaaattaaaaaagtgaaaatattttttaaaaacatgttgtataaaactatttttatattttaattttttaattgagaattcaaattttaaaaacaaaaaaaaaatcacttttaatattttttttaaa

SEQ ID NO: 402431 - DNA, 725 bp, Cannabis indica
aaaaaaaaaaaaaaaaacaatgacaacctgaacccagtcaaaacccatccagactcggctcaacccgaactcgacccatctgcactcgaaactcgaaaaccctgtcactcaaatgggcgagttcgggttactaattctaacacccgaactcgaaatcgggtaaaactcacttaatgtgcactcttactttaagttctcaatactacactgatgtggtattttaattggttaacagtttcttatatcatttattaaaaagaatactaaaaggtattattggttcctagtaggggtgggcatcatccaatccaatccaattgaaccgaaccgatccaatccaatccaattacaaaaagttagatatccaattacaattggattggattggatgctaaaagttggattctaattggattggatcggttattggatgtcaatctcaaaatccaattaaaaaccgatccaatccaattacatttatatatattaaaaaattatttatataataaaaatattgaaaaatataataaatatttattatattttattagatttttcttgtatgttgaattcgtaacacttgattgtttagtgtatttattttcattgatgttttgttctattttattactttagaaattactgatgattttaattatttaaaacatttagcttacaatacacttgtaaaatagtatatttatgaagtataaacttaaataaaa

SEQ ID NO: 402432 - DNA, 760 bp, Cannabis indica
cccatctccgcggtataaattttcatcgctaaccatcacctccttatataaatttcatcctcgattttttttaaactaatcgagatactaccaccatatttatgattctaactctcaaattgtagtttctatcttgctgtttttctatagcactttttcaactagtggaattgtctcattttatagtacttcttcttttttttttctagtccaaaaccaagacaagatgtttttcccattaataaatttgtctgaagtttaacatcgtcatagctcagaatatgggttgagtttgatacatattttctcagcatggagacatgaaacacattatatactccgaacaacgcaggagttaaggctagctaataggctacctagcctttttaattcagtgaacatgtatataatatttctctcgtaccacacttattaaggtacctaaccagtggtacatttaattatcacttttaaataaaaacctcatcaggaaagagattattctaaaataatctaacctttattaaatatgctcaaagtatgtttctaatattccattgatcttctcaagttatccacctttcaagaataaaacattatactaattttgctttaacttccatgattttcaataactttttttttcattccttaacatcatagccaaaggtataaaccttagaattttacaagattagactattcttttgttggaaattattttatcaggatcttagatctactcacaagtatgttgatt

SEQ ID NO: 402433 - DNA, 623 bp, Cannabis indica
gatttacacaaaaagggttaacctccaattccacattcattaattataatcatggaatttcaaacgagctttccaacgatataaagaactcccaaaacggagtcccgagtcaaaagttatggccaaaacaaaatttagcattttccccaatacagccaaccggaattccggttggaacagcacttaaccaactggaattccgtttgtctgggcagcaacaacacgaaaaatctcaatctttaagcccccataacctactcaaatcttcccaaaacaccaccaaactttccagagcatcattatatgacataataaacatattccacagctcaaacacaataatttccctaagaatcgaaaagtgccattaaagctccaagtttgagttccatgaactcaagcttgctctacacaactaaaatcagaacttataaatagattcgaacacaaaatcaagtctttaaaatctcatccaaagcataccaagagcaatatccattcttttaccaacacaaccatgcataaaacacataattcatcaaacttccacaaacatgcattcaagagcatattcaatcaaaaaaaacatgctttctcaatctcaaataacagaagagaaattc

SEQ ID NO: 402434 - DNA, 787 bp, Cannabis indica
ctcttttttcacaactcacttaatttttttttctctcacacacacctctcacacaaaacacatatttatagagttacaaaacttgagcatcaagacaacttggaggtcaagaccatccaaagcttccttaagaagacttttcaaaacttggcaaccaaaactttcatttgttcataattaataattacccaaaaaaaattgcaactttataaatactatcaaataagtaaagaaataaataatttgagtcaaagttctaacatgtgtttatgaccaaaataattattatttttttgtatttattcctactaaaagttgacttcaagttagtttgttaaaaaaataagacacttcaattatccctaattacatgattgttgtgtaattatctcgttaaacaaacacattaaatctagtagtcattttaaattacactcaattcgaattactcaattattttccaaactcacccataaaagacccgagtgagtttagtttaggttttgatttataaccgaaagtaataagttaaagatagaatcttattcaagttcgtaaataaatatatttacatatacataatattgaaaaagtataccaatacaatttctatttatttcggcatctgaaagaattttttaatcaattttttttaagattatttacattgtggttattgaggacatcctacaaaagtttaagaaatttagaaaaatttaacatactaaaaatagggttcaaaccgtctttttcacacgcgtacaaaataaaagagtctcgcgtgcaa

SEQ ID NO: 402435 - DNA, 1189 bp, Cannabis indica
tattttattatatacaaaataatttaaaatttacagcatttgtatttatattggattacaagcgattagttcaaacttcaaatattagtagttttattgtaccaaaaatattgatatattttatttgtcaattgtctttataaaagttttattataaaaaaattaaaactttaaaattattattttatacataaatatttttttttacatcctttttataaaaagaatatgaaaccactcaattatacttatttatcaccacatatataaatattttttaaaattatatttacatttataaagtttgaattagactgattactttcaatattaaatttaaaagtgcatctaaaaatatacaaatgcatctgttaactttttcaatccaaacaaacacacatttaaaaaaaaaaaaatacaaatgtatggatttgattgaattaaatcatgccaaatggattgttaaatcttaaagatgaccaaaggagaggtgaaccatattattgttcaattttaaatcccattcgtttagtttaataagtaatcttgaaaagtgttattattaatttattatatgagaatatatataatacttgacattaagtgtgaaatagctacacaacactctttaattacttaattgacactatggtgtgatgtagcgatgttgggctcattaagttagggtggtgagttgtgatcttaataataataatcaataaatgaagttggtgggttgtgatatcttttctgtttcgtaccgtgattgatgatacgacatagatagatgcctagttatataactccaattcagtccttttatataattgaacttaattgattactatctttcttttttaatggaagaaatgaatattttgaaagataattagaatttttatcatgaatttatgtatattaaattatatcttaaaaatgtgtaagtggttatttatttattttttttttaaattattaagatggctggattcaagaagttatgcctaattttgttcaattttactaacgaaatgattatccacgtattaaattatgttatctgaactttgatatctaccaaatcatgttcctaatctttgatatgtattaaactgtatcacgtgaacttgcatccacgctatgttagattttttatttgggtttacattaaattttattggttttatta

SEQ ID NO: 402436 - DNA, 552 bp, Cannabis indica
tcatctccgatagttgttcgaacattgattatgggcgaaacgacggtgtttggaatgccctggttggctgctgaactagtattcccagtctcttgcataccaggtgcgatttcactcaccagagtcgtcacaccgtgacccacgatcgagggttgttcgggatttgtggttggcagaaccctcatgtgccctggattctgcagtgtaggatccaccgcctgtggatttgctggatcaaccacgcctctacgagtttgtactaccattgtacttgtgactacatttgagaacgatcttgagtttagctctcaatgaaagcaccaaaatattgacctcgcttttagccaacgacagtgagtctaatttgtaagcgacaagtagtataatatgtaggtaaaataattagggtaaatggcggcaaaaccccctaatacttttcgttttggtttcattaaacccccacaacccaaattacctgccggtaaacccccaaaaccacctattctcgtagtcaatttaccctttccgtccaaatttagctgttaaatgcca

SEQ ID NO: 402437 - DNA, 991 bp, Cannabis indica
attagggccttgattttttttgggttgggttcaattcctctcgcatttactatgaaaccaagaaatttctccgaggagaccccaaaagagcatttcttcgagttaagcttcatattgtattttctaagtatcccaaagcattcttcgaggtccctcatgtgatcttcactttttatcgactttaccgacatattatcgacatagacttccatatttcgtccaatcttttttttttcaaacatcccatttactagtcgttgatacgttgccccaacattttttaaactaaaaggcgtgactttataacaataaagtctcatatttgttacaaaacttgtgtgttcttgattagggacatgcattttgatctggttatatccagaatatgcttccataaatgtcattagctcgtgttctgcagttgcatccgctaactagtcaatccttggtagtgggaaacaatcttttggacatgccttattcaagtccaaaaaatcaatgcaagttctccaggtgtcgtttggtttcgggacgagaacaagatttgaaatccacaagggataaaaagcctcacaaataaagtcatttgtcaataatttgtccacctcttctttaagtgccccttgtctctcggaatctaagggtcaccacttttgtctttttgctgggtaatagggattgatattcaaatgatgacaaatcaccttagggtcaatccctatcatatatgaatggctccaggaaagttgatcctggtttgccttcaaaaagttaattagctgcttttttagtttttcatccatatttttcccaataaacacaaatttagtgagattgtgtggatctaaaataacttcttccagctcttcaattggttttagctggttattctcatcttggattctagggtctagatcctcttttttcttctcgccttcttctgttatgaccatcattaattgatggttggctcttctattttgaagttcta

SEQ ID NO: 402438 - DNA, 971 bp, Cannabis indica
attaatgaagaattaggaaggggtattctatttatgtctttcaaaattttctcatattcaacataatcatttcaattttgtatagagtgtatgattcaacttgttgttcagttaattgtatgattcaactttttcctttaataagaacaaagcttttgcttcaatttttgaataatgtattttagagaatgacaaatctatctggattgttaattctggatctacttaccatgtctgttgttcattctagatgcttgaaaattagaattatttaaaacctaaagagttgaaacttaaagttggtaattgcgaaatggtattggttagagctagaggaaaatataaactcatgtttcagaataaatttttaaatttagacaatattttgtttattctaaattttagtagaaaatttgatttttgtttcctatttgcaattgcaataatatcaattgaattttttgagttttgattctattatttctcagaatgatattcaaatatgtgttgctatagaacaagggctttatgtccttagaccagatgaaccatctacacttaataacgaactgtttaagatagcttaacctagaaaccacaaaaagcataagatcaataatgaagacgaaacatatctatggtacttacgtcttggttatataggctatgatagactttgtaggttaaccaaaggtggtccattgaaaaatatcaccttaggtgaattactagtttgtcaatctttcctataaggtaaaatgactaaatattatttctctacaaagggagatcatgccaaagaaactgtagggttaggacattcagatgtctgtggaccgctaaatgtaaaaaccagaggaggttataagtactttgtcactttcattgacgattactctagatatagttttctttacctaatgcaaaagaaatttaaaatgtttgagaagtttcaggaatttcatgctttg

SEQ ID NO: 402439 - DNA, 860 bp, Cannabis indica
tgggcctggagggcctccgctctagggcagcttccaggcgaagggtcctcccagctgcatcctgggtcttaatgtaagccaattcttgttccctcctgaagagatacttctgataccgctcatcagccgaagtaattatatctacccggagcgccctttccgcggccggagtccttacgttcggacagacgaccttggaaaggttaaagtcatccaccgactgactctcggatatcagcttgactttttgacagttctttgtcgtgactaagtcaccaacgtgagggccttcttgtcataggtagagaaagtcttagcctactggaggaatacttgagtaggtgtggtccgcaggtatggagggatcctaacccactccgtaagaagttctgggcggtccatggcctggaaatcggaagaaaagaagaagtggtggcggtactccttcacgtgcttctgttaattaaaagggactgagccctcattcaaagggtgggaccgaagtccataaaatccatctttaaatttgtcccccttcttagggacggatacaagttcataaaaatataaaatttcagtcagactgggcgaaccccagctccaggcagcgtacaaaatgaataagcctgaaagcaggcggtatgcttggggaatcagttgatacggcgcgaggccaacaaaaactaaaaaattaacaaaatagtcctgaagagggagcatagccccggacatcagatgggtctggctccaagctccgaagtcaccatagttgtgattgggtgtctcctcttcctgaggcaaccggtggaaggtcccacaggctgatggcttgatgcctgccaccgtcacgatcttttcga

SEQ ID NO: 402440 - DNA, 587 bp, Cannabis indica
cctaagtggtggagagaggccatgggaaatagatcagcccattttttgattacaatggcccaatccaaacgctccaaagtgggtaccatgcttccaagtgaagcggcttccagagaaagcgagcaggaaaagagagtatttaccaataaagctttgaaaagaatgcatggcatggggaggtggaaaccgtgagtatttcgatcgttaaagacaaggtaatcattaaaatccccaacaatgagccacggtgaaagaggggcagcatcaaaaagacgatgcaataaggtccaagaattgtgtttatcagcaacatagggagatccgtaatagcaagacaaatgaaacttaatattatttatagtaagcatacagtcgatatggttaagggaatgggacaaaatattaacaataacatcctccttccaaaataaaagcaaacccccccctaatccacttctaggaacttgaaaaaacattagcaaaataacatattagcccctaagcaacaaaagtagaagataacaaaaacgcttggtttccatgacaaaaaagagctggggctgatgctgcttcgtgaggagggagaa

SEQ ID NO: 402441 - DNA, 636 bp, Cannabis indica
agaattggggtgattttcctctggtttttggcatgttcgaagagagagaagggaaagaaagggattttcttcaattttttacttttctttcttaacttccaaaataaattaaagattaaccaattaatattttgctgaataaaattgggcaggtgttacattcctaggttgccacctaaccctcaccataaaatgaccaaaatgccctttacttacaacttaagcaaaaataaagcctaggggtaaaatagtcaaaaaccataaccccgctcaaactcggtattctatttccttcaacatgcatcccactaagaaataaggttctagacttacccatgtgatcaaactagccatccattgcattttctgctgttcccaagcaaaaataattaaaattgcataattcacatataacacaaataatacgcctagagtttaataaaatctccgaaattgagaaattataactctaatgcccatttctaataatgggacccacaattaatttaaattcgtaaataatataaaaatatcagtaattagtgctaattgcctttactaatccttattataaactgcagtcattacaattatccccctgttaaaaggattctgtcatcgaaatctaacctgaat

SEQ ID NO: 402442 - DNA, 703 bp, Cannabis indica
ttttgtatttgtaattgataatatcataatcttaaattaaactatagaagtatatgatattatatacttaaataaattaaatgaaaacgtgataatacacatctaatagcaataaaaaaaattactatacgattttaaaaaaaataatatagcataataccgttccaaaaaaaaaaaaataatagcatcatataatttataaaacttaacgttttgaatttaaattagaattccatattttgttctcctattataatcattttataaaaatattatatatcttttattaattgattctataatttaacagaatattaataaaattaatacaactttaaatttataaaatgaatgagacaaaatatattttttttagtattgaggtagctctataataatatgaaatttttacatgaaaaatccattttacacaatttattacaaaattactcacacacgcctatgactacatttttacttacaaagttacttttattacacaaataccacttagtcatcattccatccatcatcaatcaaatcctactctcttccctctcttttttcattttctatcaatcaatccatcatttcactctttttttttttctttttcttttttattttttaatttttattttctagttttttaattttttaatttttttaattgttaatttttctagtttttttaattttttta

SEQ ID NO: 402443 - DNA, 523 bp, Cannabis indica
atctgtacgttcaccagataaagaggctgcagatcatccaggtccatcaacagccctttccaacattcgtcaagaaagtgtggatggtagagctaatggcactgatatctttggtgctgaactgtcatttactctggggaaatcacctcccaatggagttgttacgtctggtggcaactttgttgatggggaacttggagagggttctccaaaggttgtcttttctccccttatcaatacctgtaacagtagtgataagcatagcttgctgttaatttgtgctttcagaaatcaattgtttttttaatatgcatattccaattatttgactctgtgcagagtgagagatcagatggaatgttttgtgacgatattttcggcgagacgccaactggagttcgaaaaactgtaagcatgttatataattttttattttcgtggatgttttaaatgtagtgtttttaactatggctggctttaaatagtttgtttttttaaacattaatttccaattatgtatggc

SEQ ID NO: 402444 - DNA, 553 bp, Cannabis indica
tgatcaatttcagtactgttgttttggatcactaagtaatagtaatcactaaaccaagctttgtttgccgcaactagaagaaagagtgagagccttgacttgtgccacgttttgtgtgtatatatatatatattgcaacttaataatagcctaccacttgtatatatacattttagttttatatatgatcacataaatattctttttgaataacaaaagatggttgtcatcgtaaaatagtttctatcactctcttttttccatatttatttcaatactttataagaaagtcatttaatcggaaaaagaaaaaagaagaaaaagaaagaaaattgcccacaaagtaggtacgtaatctttaatctttactaatacaatacgaaacaagctagtcgatgtatagaaagtgtcctaataattcaaatacaccatttttcttaatatggtaaattagtgtacgtgtttttcccctaaatagctttctcttataatcttttgttatatacacaataaaattatatatataatgttataaaataatataaagtagatg

SEQ ID NO: 402445 - DNA, 729 bp, Cannabis indica
aaatttttaaaaaaataacggtagtcaacaaaaatacacgagagcagctcttccttcttcgtgacctagccgaacgacacctatcttaaatctccacgattttcattcaacacccacgaaatttagactgcaacaaaatgtagatcttaactataaaaaaataatactactcccgacaaatccaaatacaaaaggtaaaataggacaaaaaaaaaaaaaaaaaaagaacacaggaatttctacctctattgataagaaaaaaacatacaaaaataacctaaaatcaaaaattcaaatcacattggtcagagaatttgaatacaagaagatcagataaacttcaatgcttacccagaaatgaatcagagaacaaatacaaggtactaaatttttttttaatgattttcttcctaattaaattattttgaaaaattttcttcatggttgtaaatattttttaaattttaaaaaatcagataaataattaatgatataaaaaattgattgattttaataaataaatgagattagattataactaaaaatatacaaatataatcaactatattttattgagaagtatttcatatatatatatatatgttgtttcgaggattataatgattgtttgtgtacaagtgaacaactactgttgaattaaatctcatttattgttgattgttaaaaagtagttgtttaacaattgttttgatcgatgaaaatagttgt

SEQ ID NO: 402446 - DNA, 620 bp, Cannabis indica
gattaataaaaataatttgttaaattttaatttatttttgacagtaatatatatattgtattttcagtttcagaagttgtacactatccaccagtactcaaatgtgaatcaagaaaatatcattacaaccctgaggaattgaccaataattattggggcaaaatttgacaaatatatctcgagatcaacgggtccggtggggccgcgtggtggttcttcctccgtctaagcaaacccaacattggggaagcactcctcgccggactctttgccctcgacctactcggtgacaatcccctcaccattttctcttttaatgctgtgaaaaaaccctgctttctctccatttttacagctcttctagtgaacttctgagcatgaagaagaagaagaaggaggaggaggaggaggaggaggaggaggaggaggagtagggggcgggaagagaagaagagaaagagggattagggtttttacagctctgctagtgaaaacttctaagcatgaagaagaagaggaagaaggaggaggaggaggaggaggagtaaggggcggtaagaagagaagaagagaaagagggtattagggtttttttaattttatttattaaattatttttt

SEQ ID NO: 402447 - DNA, 508 bp, Cannabis indica
tttactttaggcacttttaaaatatttgggaacattcttatagtcgttatgctaccgaaattttggtagagttagaataaattttactaaaaaaatataaatattaaaggaaaagtacataacataaataactagttaattactcgctagttgtaagaaattaggtgacataacacatttatataaacttttcaattataaatgacaaaccaaacaaatgaatggattcactttaggaaaagtcattccaattctactaaacattccaatcaactaaacactaccctagttagttaattacaacttttagaacttatacaacttaataacatgaaccaaactaaaacaagaattttagtaatatataaattaatatgaattaattgtgagaaacctagttagttacattgtgtaagtagtaactagttataattagttactaaattactgatttttttggttaggatatttgttatggataaatcatgggtcaattagtgattcaggc

SEQ ID NO: 402448 - DNA, 779 bp, Cannabis indica
taccttgtttagtagcagaagtttatggctaataaagattttcgactattcaaaaaaaatatatataattttaattgataaatacttttttttatatataattaaagtaccaaatataatcttatataatttatcaaaattagagtttctaatgcacataatgagaatatgacctataaaattgggtataaattaaagagtagtaaaataaaggtaaaatttaaaataagaaataaagtgtgtatagagtataattttctcacagtcatggcctttccttgaggaaattagattctatatcttttttatattgtttttttttattttttttttatttttacctacttttaaaagtttattatttttacctctttttttaaacattgtatcaatttttccctatcattgggtacaatatatataaaaagagatatattttaattaaataaaaattagaaataaatttagttaattgattaataaaaaaaaacattttttaacttaccccatttccttgggcttgttgggcttctgcaaaatttgttggacttgacccaatcttcttgtcagatgtgagagtcgtatcaaaccatttttattagggaaagttactttgtttagggataattatataaaataaaattatagttttacttttaatatttcttttatatttttaccatttttataaaaacaagaaaataataagaaaattatatgaaattaacaggaaaataatatctaaacaatatgaaactaacaacaaaaaataacataca

SEQ ID NO: 402449 - DNA, 875 bp, Cannabis indica
agggtgctcctgcaatccctgctacagaaataccagttgctcgtgcccctgttgtgcaggcagaacctgtagctgcactaaatcggatggaacccctgtatgaaacgttccgtaagcaggcacctccaattttcctaggaggtcccgatgtcatgaaagccaagcaatggctaacagtagttactagaatcttgaattttatgggcgtcactagcaatggtagtgtaatgaccgttacttttagacatgggatgtgattatttatatgttttattctctatagacactattttcatgaaaatatgtgttatgattattatttcacaattccggagattttattgaattatatgtgtgattgcatgttatctgtgaattttcatatttttacatttttatgcccggtaacagtggaaatgggtcgaatggaaattttagtcatatgggcacatatttgaatcaagtattttacggggcaatattattggatatcttataatatcaaggtttaacgaaataacagaattcgacaattttacccctaaggctacgggatcactttgcggggtaataagggcatttaagtcttttcatccttagagcttagtcactctttttgtaagggataggtggctgtggctgatccttttgaggatgaccagctgctgaggaagcaaacaaaaggaaaagcaaaacataaagacaaagaaaagtcaaaaaaacaacaaatcaccttctccttctccctcaacttcgtagcttctgaaccagggccaaaactcagatttccaccattttcaaccctctttctagttggagttcatcaaggagttcaactgtaacaccctaactagcataggcgtgttgacgtgatt

SEQ ID NO: 402450 - DNA, 561 bp, Cannabis indica
gccatgtggattagaactccaaatgagtaagtcaaaaaattataatcactctaaccacaacaccaaaaacatcatacactggaaaaactcttcaaactctaatttcgttaagttctaattttgcctacgtggcaatgacaggtcactaaaaaattatcctacatggccatatttttcaaaataaaaattaaaatgagtaattaaaataaaaataaaaatttaaaaatataaacaaaaccctaaaatttgtaatagacatctgaaaaaaaaaaattaacagagaatattaatcaacatgcttgttactaaatttagatcctggtaaaatattcccaacattaagttactttcaaaagcaatgaaaaacccttagattgaactaacatgtgacttttttcaagatatgatatttttttgttataaattgcagccacaacaaaacaaacttatccatattcaaatgtaaggtactaggtgactttcataagtaataaaaaactctaagattaaactaacatgtgactttttttttcaagacatggtatttttttgttataaatt

SEQ ID NO: 402451 - DNA, 722 bp, Cannabis indica
tattttgcattgaacagttccagaaacttttcctaggtcattgttgtaacatcatgatttagggacaccatgtcccaccacacttgagcgtcttcttcgaattggaatgtggcacatgccactctatcattgccggcgacgcccataaagtttagaattctggtaatcactattagccactgctcgactttcataacatcgggacctcccaaaaaaactagaggtgcctgattgcggaacctgtcatacagtggttccattcggttcacgacagtgactggtcctgcctgcacagctgaggcaggaggtacttgcactactggagcagggattgcaggagcaccgtgctgtctcaagccccagatctcttcatcttgttcattaatcctcgcttgcatttcagcaaacctgttttcccaattttgggcagcctgggcagcctttggagggttaacatcacctcggtcgcatgccttgcctctagtacctgtacctcaaccacgaatatttaggggtatctaaactacctgaccaccactgaatcccaccgagttactttagctcctggtgtcttgcctggcgtccatactactagaacaaactgcgtaactaagagctagtctggtcagattgtgatgaagtaaaacttacttattgccgcttattggaaattaaaaaaaaacatgtgcctattctactatcaggctactaacatgcttcct

SEQ ID NO: 402452 - DNA, 495 bp, Cannabis indica
aaaacgttacattgattgcagcgtaataatatgacttctttcgctccactcttgttcctttctatcacaaagtaataacaagatctgagcctggatctctttctcttcttcgggttggttaccaccgtcttccgcactataattgagtacttgacttcctatgtgtgggcatgacactctatcactatgggtcgattatgaagaacaatgaaggaggctccaaatcactatagaaggtgtctctcatcttctagttgtctgacagagttagaaactagatttggtaggttgaaagtgttggatgagaataagagcatcgtgttctttttgtagtgtttcaactagggcttaggattgaattatatggattaaaaaagaataaaatattgggtaaaaatcaacctagtggctggccacttaatgtgtacctctctatttacaattttgtcaccttattttaatcacttattcttctttcaataatactatattttc

SEQ ID NO: 402453 - DNA, 554 bp, Cannabis indica
ctctctctctctctctctctctctctctctctctctctctaattaagcaagtactctttttgatattttataagcttaagtcaattttttaaaacactacactatattattcatctaactaataataagtgtgataaatataaaaatgtacatacaataatatataataaagccataagcaatgtataataaaatttgttgataattttattatatatttataatttttatcctcaaaattattatgtgagagagattatttttacatgtgttaaaaatattagtttttctacttaatatataatctaataattagttttgctattatttatttaaatttactatagttaagtaaactaaaataaaagttacaaactcttcaatcttcatcctattcagaaggggcctttttttttgtaagagatattgaacataagaaacaaaaataatagattaaataaaactaataatgcaatgagaatataatcacggctaacctaaatatctagttatctatgcttaccgaaggccaatggtggagaaaatatacccca

SEQ ID NO: 402454 - DNA, 818 bp, Cannabis indica
gacaatataaatatcaataatcataactatacattataatcattacattacacttattgtctatttaacatatacctacgtgttacgctcacacgcctatatatgtctatgtggcatagacctacgtgttacactcatatgtctaattacaataaggccttagaacggttcacctcggtactagttaccgagtccaaccaggttatgccttgaacgcataatctttaatctcaatatatatagcatggcataatatttacacattaacaattactagagtaataattctaagccactaaactgctcactttaaggtaataaccctaatcccggtttctaattactcacaaatataatattcaacataagcgccactgcgcataactctacgtgctaacctctgtattacctaatgtcccacaaacgtggagattccaaatctgtgggtactcttgaccaagtgtcggtaatcctagtcacaatttatgggattcacaaatagggttaatctctaaatctattttcacaatattataaaattagcattcaaattttagataatcacatagagcttggaacgagctttccagcgataagcggaactctcaaaacgaagtccggatcacaaagatacgagcattcgaatatcgcgtccgaatctgccctgaaacaaaatggcgggctgcggcactccccacacggtgccgcgacacctgggttggaaacccatgttgggttttgtgccctaaataaaactcatttcaatataatcagatttactaattgataaagatcataaatcacattttatgttgcat

SEQ ID NO: 402455 - DNA, 576 bp, Cannabis indica
tttttttttaaattcttctctatttgaaagagattgaaatttctatgtttagagggagatagtctccctcaaaaattactctctctccctctattcttctcctttcacctcaattcatctctcctcctctcccctctaccaaacttagtgtaagtatataaacttcaaaacaagaaaagaaaagagaacagagaatatatacttatcgagtggggacgtgtggccaaggcgacacgtggcagttcaagtggatagcattatgtaacacgtgtcaaggttaaaggaggtgtatagaaagtgggaccaaaagagtccaacctcggggctaggcaaacgagggaaagcggtgggaggggaggcagagatcatggattagggaatctgtgtggggacggggccgagggaaagttcacgtgcttgctgttgctgcgattatatattagacttggggttttcttagtgtgcacccaataaagattctctcctttttattaataacaataatttattattaataataagctaattagtaattttttccctaaactttgacatgtactaaatcatgccctttga

SEQ ID NO: 402456 - DNA, 1032 bp, Cannabis indica
aaaagtcactgttactgaaaaatgtcaccagaagtaaatatctcgaatataaacaaaaaatagaaccggttctataacataatgaataaaaacaagtgattcaaaccgattataattgaaatataaccggttctgtaacataatgaataaaaacaattaatacaaaataactcaaaacaactataatttaaatagaatcggttctataattgtgtaataatgaataaaaacaaataacacgaaataacttaaaccggttacaactaaaatagaaccggttatataagataatgaatacaaacaagtaacacacaataactcaaactgattacaattaaaaaataaagagaaaatcagttcctaaaatactgaaacatatattaaaaacaaaattagttcataacaaaataccgcataacacataatacctcataaaagtgattataatttttttttaaaaaaaaaatgatgatcaattccaaaaaatattgaaacataattataaaaagaaccggttccataacaaaataaataaacactaataataatacacaataattcaaatataatataaaaaaaactgattatatttatcaactagttaaaaatttaagacaacaaattgattccgtaaagcaattaaaataaaaactcacacacaaaaaccagttaaataaaataactcaaacaaaaacatccattcaatatgctccaacccaccaaataattacactcataccatatctaccacaaaaatactcatttattatgttatataaccggttctattttagttataacatgtttgagttatttcgtattatttatttttattcattataacactgttatagaaccgattctattttaattataactaatttgagttattttgtattatttatttttattcattatgttacagaaccggttatatttcaattataacggggtttgagttattttgtattatttatttttgttcattatgttatagaatcgattctatttttgtttatatctgagacatct

SEQ ID NO: 402457 - DNA, 510 bp, Cannabis indica
cggcttaacaaagggcttttggttttgtttgatggaaaattttatgatataaactagattggtgtattagttcgataaggatactaaatggaaggttctaaatgagtattcatgtaataacagttattagagtactgatgcagtttaaagattcaggtttgtgtattgcttatatattggatggaagagctatgctaatctgttttatctggagtttataacataagcttcaaggtttcagaaatgcggagtggaagcaatccatatgcggagttagaagaatattaaattttaaacagacttgtgatattaggaacaattgatacaggttcttgaacagaaagagaaagtgctacgaaacaaaagactatatcgcttattatgatactgtgaaggaacaataatattgaaaagtgatttggaagttacagtcccagttgcgggggcggtgtcccgagtagattaaataaatttcgaggacgaaatttctataaggaggggatagttgta

SEQ ID NO: 402458 - DNA, 990 bp, Cannabis indica
tttacacaaattgtataaaaacccatgtgtaattttttaccatcatcatatattcttttttcttttgtagttgtcactcattagtaattagaaacaaagtgagaacaaaatgactcctcaatcaaatatttttccaataattttgtttcaaaataaattaattcttttatcatttgtttaatgctgttaactaattatattatgttgtttttcacttttgtttaatgttttttattttgttatcatttattaaatgttatttaatattttatcattgtttaatgttatttaattattatattatgttgctgttcatttttgtttatttctacttatttattttagttttttttttttatctaaatgtaacttttaagatggtaataaatgctacgtttgattttatatataaaaaaaattgtaacttttaaggtttttgttagaaagtaaatatagaaataatacaggtttttcttttaatattcaacttatatacattataaaataaggtaaaaactaattttggattacgtattttacaaaagatatgaattggattctctgttttgttaaatgacaaaatatatcctatattttccaaaatagtaaaaataagaccatgagcttaattttcaatgattttattttttaatataaccaactttaagataatttttaacacgaacagatactgaaaatgtaactagttttgtcataacatctctagattagattattattaagttttattttgataaaaaatcagttcgtgatcttatttgtacaattttagaaaatacagaatcaattttgtcctttaataaaacagaaggtccatttagtaacttttacaaaatacagagtctaaaatgatatttaccttgaattttagtgaattatagaaaaaaaaaaattaatctctattcaaaaaatagtatttttaaaatcaataaaaaaaaaatatttgtatttttaaaagtaaattttttt

SEQ ID NO: 402459 - DNA, 730 bp, Cannabis indica
tattttgtccttttgtggagttagtgtgatttgaataggtgactatgtggcatttgtattgcctgaaatgagtaagtgtaatctttttattttcattttacaaaattgggaaaaagttaaaaaattcaagaattgcttttctctcttcctctctctttcggccattccttgggcagctggagtttgagttatttttctgcattttccagcaaggatcttcttgattttgaggtgcttaaactctaggtaatttcttgtagctttttctttggtcttcttgagtttttatggaaaaagatgataacttgcatgcttaatttggttgtcttgctgctgttaattgttgttgttatcttcattagtttaaacttgtttatctgagttgaaggaagttggttgtaatgcatgcttgtggtgtttattcaaagttttggatttttgctcaaaaaccatgattttagagaaaatgtgaaaatagatgctgtagagattgtttatgcttgagttcattttctgcagcttttatatgcttgtttgagtagattcaagcaaggtttgatgcatgtttattagatttaaccaagtttgagttttgaactcaaagcttggagctttaatggtgatttttgattttgtgcatgaagctttgttttatcccttgaaaaatgttcattggggtctaattagcaggtctggaaagttcggttgagtttggaaacgttttggttgg

SEQ ID NO: 402460 - DNA, 525 bp, Cannabis indica
atgtatatctcgatgtattataagactttcatatccaaataaaaccgagtgaaattcttctcaattctttctctcttgtcatagaatttattttattccaaattatgtgtttttctcaacattatttattaggtagttttaatatttattttttaaaatgtgagatttttaaaaggtttccaaaacttggtacaattggaaatcactagcctaatctatctatgtaaccgaaaaatcatcacgcgctccttgagcggttgtttaaattttttgagaaacttacaaaaatactggaatttgggttaacttttacaaaaatactgtcacacggaattttttttaaaaatactgtgtttttataaaacaccagtaaaacacaaagcagaacaactcaaaacaacagtagaacaccagtaaaacaccagtagaacaccagtgaaaacttaacacagtatactgcagtatgaaacttatagaaaaacacagtaaaaaagtaaaaaataccgcctgacagtatttttgtaa

SEQ ID NO: 402461 - DNA, 934 bp, Cannabis indica
agggtactttatgaagtactgagtttgtatgattataatgatgtgaaattgtataggcatattaatatgtgatgtgttatgattgcgtacatcttgtcatggtgtgattacttggattttatattgcttttggatttagtcacttttcttgctaagtctctgtgactcgcgggtgcttaatggtgcaggtaaagggaagggcaaagttgagcaaccatgagtttgagatctctgcagcagtgtacatataagccgcagtgccatggccctagtggacatgattcctctttttggatgtattttgaagtgtgaagttattttgtaaagtcacttttagaactgattgtaaatattttaaaacgggggtccccataaatattaatagttatcttttataaaagttgagtgtttgttttgactacttttaattaaccatactttcatataattataaataaaaaaatataaattttgtaaaaagttcacacacgtggcgtccctgtgggacagggcgttacattagtgtacaccattactagattcatagatgtcctgatcgtgaccttatgaaaagctagaactgttaactaaagtttgcatgtttgatagctattctaagtgattaggggtggaccatcctatggtcattaagataagaaagtgtttgtttcaacaaacactacattcctaagaatatgactaaatctgaaaataaaatagcaaagtagaggagatatttttttgattccatactgttctatcttcttattcttataagatgatctcattgcctctgttgtattgacacaactgatgaggacaataccatttaggttcttagacagaaagtcaccataccttgtcatagtgggagggttttaagaaactcaccctgttatgacttggaagacacttgtgattaaaaatccattgt

SEQ ID NO: 402462 - DNA, 543 bp, Cannabis indica
tttgtctcgcttaagtactcagacttcccatcaactattatgttgtgtacggtgccttaaccttcttgttgacacgttgtgctccacgtggcattgatcttgctcacgtggacatgccacgtcatgtgggcaaaaattgggataacagttatatgtgttataatttaaaattataaggagttttgctataaatattttaataatttaagtgtagaaaaaattaattgctaacagaaccctgtttagtaataaattgtaaaaaaaataaattgtaacgtccttgcttcaagcttccattgtgcccttacacccatggaatgatggctcttatacatgggtacgttactctgacaactttgtggagtgacgactgaccctacaaatcaacatgagtgtttccagcatgctttgtcctcactcacacacttcctgggaaaacttcctaggaggttacccatcttgaaattatcccaggtcaagcacacttaaccatggagttcttttgtgatggactactaaaaacaagatgcaccttgttgatat

SEQ ID NO: 402463 - DNA, 650 bp, Cannabis indica
tgagtgggagaaatgagttggtagcaaattaatccaggaatggaacattggaagacaatcaagtaaatcttagatcaagaaaaggaactatatgttagtcgacaagggtggtattttaatactcttagactacaccaaatcaggtttctagacttgccttaaagtttgaaagtctactgatgagatggtgattacgctggggtggagcagtgattttggtgaagtgcaaaaacaacatatctaaaatctctaactctaccagtgagactgaatgatgaagttgcatgaaagatacttatttttagcctatggaaagttctatacagtttttggcattgtaccaataatttattaactactattgttacttcctgactaacacagaagtagttgccaaaaagtaaagaatccagtatccttagaggagtagacatatggagatgaatttcacaatatcaacaattttgtgattaaggatacgtaatggtggagaaagtttgtattgaatacaacctgtcaaatcctgttacagagagaatactacacactacacttagtctggatatcaaggtgttgagattatttgaaatacacttttgttttatgttagtgcaagagggagtttattgggttttgtgccttatataaaa

SEQ ID NO: 402464 - DNA, 453 bp, Cannabis indica
tttacgacataaatacttatattttaacactcaattgaagataaatattaagtttaagttttttttactgttataattatatttttgaaacttagtacctgattattaagtatgaagtcagtagtgatgtggtctaaattattaaattcttaatttttatataaaaatttatttaattatatcaataaaaaatgacacgtaaataatgtgttcgcacttaaccgttaggtagctacgaaaattttaaaaatataacttaaatattattatcattgaaaaattaaacctaagtattcatctgcaactgagaattaaacttaagtatttatgtcgcaaattactctttattatattactatgcgtgcaagatatgtcataggcacgtaactctcgtcaaaagttgtaaattataatcatatatcttacttttatcaattatatttaaacaatcgt

SEQ ID NO: 402465 - DNA, 825 bp, Cannabis indica
atcctcatttttgattctagtagaaatttgactcctttgcgtattgattcactgtattgtaagtcttgccagcatatgctaatccaacaagaccaaaccatgcaccatatgtaaagcaacatccccatttttccataccttcaaatatacatatatatgaaaatcatacacaatagataataagattaatatcattttaaatcatgtattttgcaaaaattacagattgaaccatctgctttattaaatgacaaaatagaccttgtattttttaaaatattataaataaaaccctgagcttaattttcgtaatttttttttaatttaagcaacttgacgataattaattcttaacacgaatagatgccaaaaatttaactagttttatcatcacttataggttggattaattattaagttttattttgacaaaaaagtaattcagggttctatttatactattttgaaaaatacaaggtccattttgtctctttacaaaataaaatgtccaatctataacttttgtaaaacacaagatcgaaaataatatttgttggattaaaatcctttgtgggcacatatgtataatgtatatgctattataaagtgtgatacaaaattaagtgaccaattatgttatgggtatcaaaagggtattaaagtgtcatggaattaatgtgtagataccataagttaatttataatttgttgaggggccaaattataaatacccaaaactcattataaaatgagcctataaataggtagtggtccccaagaaacactagggtttctgtattctctccttccccatcagagaaaata

SEQ ID NO: 402466 - DNA, 526 bp, Cannabis indica
gcatcagtagctttgccaatccaaatctgcaattttggcatcacaattctcatcgatcaatatgttgttgggatttatgtcacaatgaatgatcttattctcgcaatcttcatgcagatataagatgccgcgagcaatgcccaaagctattttcactctgtcattccaatgtggttttgtctctgatttgaagagaaagtttgataatgatccatggctcatgtaatcatagactagaagcctgtttgaattttcatggcaataaccaaaagacgaaccagatttttgtggtgagttctaccaatggatctcatttcatttaagaattccacctctccttcgactgcaactttctcgagccttttgacagcaatggctctttccccatctggaaatcttaaggttcctttaaagaccgttccaaaagaaccctttcccaatggttccatgaagaaatttgtagctatttcaagctcgttggaagtaaatgatcgaacagttagtacttcatctaccttcaatatct

SEQ ID NO: 402467 - DNA, 889 bp, Cannabis indica
tccgatcagcgttaggtgttggctattctgcagcaaccaattttttagactggtttatggaagtgttggcagtaggcaatatggggttggttgaagaagctatcatggttggttgggcaatttggaaggctcggaatgatatgctttggaatggtaaaagttgtagtgctgctgatgttgtttggatggctcgtaccactcttcgacaatggacgtgtgctcagtctaagaggctggactcgatttccctggcctctaatcgcactgacacaagagaacactggtccaaaccggctgctggacagttaaaaattaatgtggatggggcggtttttgaagacacaaatgaggtcgggactggttttgtcgcacgtggctgtgatggccgattaattgaggcgttttcaactatttcttctgtcagttgccgacccgaaattgcagagattctaagtgtcaaagaggcacttagttggataaagaagaataacaagtcaaatgtcattttagagacggattgcattttagttgttcaagctattcttagttcggtatctatgccttctatttttggtttatttgttcaagattgtcaatttattttatcttctttaagtaatgtttctattggtcatgttaaacggtctgctaacaaagccgcgcactgtatggcacgtggtgcttgttattggtcaagtcgtcgttttactgagagcgatgttcctcttgctcttcagcccattgtattagcggatgtttctgtctaataaaaattattttcattaaaaaaaatattaatattaattaaaaaatactccaaatacatcaatttattcttttcttagtttttattttttttttactttttaaattaaatattaattaaaaa

SEQ ID NO: 402468 - DNA, 1186 bp, Cannabis indica
gatctctgatcatatttgaatagtatcatgctatacattattggacttggtttgaagaacacattacaatgattataattatttatttgattggagaatgtaggacaaagtgactgatggagtgactaatctattaacttaagaatcgggggcttaagtgtgtcttttttgaagaaagtttgattatcctaaggaggtaaggattcaacttgatttttagattttattttatatgtgttgaataactttagacatatactaatttttatgatttataaaatgtttgaaaattgaatacataatttgaatatttttgaaaattgtgatttccctctagcaaataagtcttcaccattgtcaccttgattgtcctctgttttcttttgaatttcttttaaattcagagtagtcttgacttcagacattgtaagagtttctctgccatagagcattgtatcaacaaagtggtcatagaattttggcaaaaacttaccagtataatggctagatcttcttcttgtaattttactccaatgttgctgacattgagggtgattttgttgaattcatccaagtgattcctcaagtctttctcttcatccattctaagagtgtacattctcttcttcaagtatagcttaattattagccacggacttcttcgtgtatatggagctgaacttattccacaaccttaaagccttgtcttcactagacacctctcttagaacttcatcgcctaaactgagaagaatggcattgtgtgccttagttttgatctccttcttcttcttcttcttcttctcatcttcaatctccttaagactctcttcatcaattgcttctgaaattccattgtagacaagcaatgccttcatcttgatcctccataacctggaatcatttgtcccattgaacttatcaatctcgaatcttgctgcatccatcttcttgatgattcttggagtcttcgaatatgaatcttgattaagctaaaaccttgctcagataccatttacagtgattgatcatcacaatattcaatcaagatcaaaatctcaatacacatgaacaagagtaacaacagaatgcagcaagggagggattgaatgcatttgagttttattgatttcaattggagagaatgagagagagagagagagagagaggaggagagagagagaga

SEQ ID NO: 402469 - DNA, 990 bp, Cannabis indica
caaagacttgatattaatgtgtacttggtatcttgaaatgggattgactaatttttgaatttattattttattatgcatattaacgtgagcatgttttatttgttctgtatttagctagttcatcttctactgcctcaatatctgctaatattaattctattcctatgcttaatggaaccaatttcaaggattgaaaaaggaacttacttattttttttttgatgaatcagctttagtttcattactccaataatccattttacaatcaaagagcatcccaataaagggacctcacatattaatcacctgctttgtacattttgcatctattgtcaaaaattattgttacaactataagtttctgaaccaagccaagtcctttgccccaacctgtctcggccaaacgctgtagattctatgtctcaccatttatttgactttacaacttactctatctatatcctcatcttttccattccatattttgtcattcctagcattccatatatggtagactaagctggccattgcagccgagagagtgtgtttttcgaatttgctgcatttgcttctttcaatccacctcataagtcttgataaggtttgagtagaagctttccaccccaaccaatctttagtcttctggaggcaatgctgagagaaaggacatgagaagaatagatgatcacaagtttcttcctgagcattacataacacacatcctggatcattgatgatcccaaatctatgcaatcgttctcttgtccttaatttgccctgtacaacaatccacatattaaagctgcatttcggaatgttaaacttcccccaaacttccttactccaatgcatttttggttgtggagggactaaaagtttatatccaagagaaagatgatacttggattgtgtgaactattgaacattcaccaatgtttttatctgattcttggcctctaccacttttttccagtaccaactcccttgaa

SEQ ID NO: 402470 - DNA, 492 bp, Cannabis indica
agatgggatgccgtggaacggagaatggagtcgagtgatgagatttagagaagaggagaggcgaaccacagaggttggtggtctgaataggtggaggcaggaacatttggttatggcgactgcaactgcaactgcaagcgagagagagagtgagaagaagcagtagggtgtcactcttcactccgataagttgttttacctttttttttttgtttttttttttttttttttttttaaattaagcgttctagatagaaatgaagattatgattcgcagtaattacaaataatatttttggggatgtataactccaacataacatatacattgtgagcaagggtctacttagtcatattaatggacaataaaattataaaatctaataatatgagagaaattacaattccaaaataagggagatattcttttacaaatgtaggaagattaggactgatgatgcagaatcaaaacaattaaagaattaacaatga

SEQ ID NO: 402471 - DNA, 788 bp, Cannabis indica
atattacacaatattaatttactttgtaattaccaactgttttgcaaacatgacaatagaaatttacaaataattaccacttgatatccatgcaaccttgtatttaaaatacaatataattgcaatgtaattactaccctactaattatactgtatagtaattgcacagttgctttcaaacgcacccttagttgtaaaattagttttttttttgggtgaatgtgttggaatttattttaccaggacctagatttactaacaagtatatttttaacattctaaatatgaacttctaaaatgatataaaataaacacataaaaggtatgagaaaccttacattggttgtagcagaattaaacgactcattctgctcggatctctaacccttgtatcctttttgtagcagagtataatcaagatctgagtccgatactccttcagttgtttcgattcttcacagtcttacacactatgattgaggactaacttgatatgggtgggcatgcactcaatcactaaggctcgaattttgatggcgaataacactaagaatttcaaaataatagagagaaaagaagaagaagaagtctcaaaacactagttgtctgacagaatgaaaactaggtttagaagcattagcagcattagtttggataatgagttaagggtgagcataaaatccaaaaaaccgaaaaaactgtttaaactgacctaccaaataccgttggaaccgaaaccgacgaaactgaaaaccgaaaaaccgttaatggttaaaaccgccattgaa

SEQ ID NO: 402472 - DNA, 503 bp, Cannabis indica
aataatttacactttatattgatgtagttttcttcatgacaaaccttgtaaaacttgactttgtggcacttgatatttttagaagaaattatttatcatggattcttggagacaacatcaaagatcaaaatactgaaacaaataaaataaggcaaggctatgattttccttcgccatcatctccatgaagggttaaaatctgaatatttaaccataaatgatcctcttatactttggaaaattttgaaagaaagatatgactatcagaaaactgtcatattgacaaaggctaagaatgattggttgcacctgaggttgcaagattttaaattagtaagtgattataactctgcaatgtttaatatcacttataaattaatgttgtatggagaaaaagttactgactatgaaatgttaaaaaaaatatatactacttttcctgcctctaatgtgctcctgtagtagcaatatagagagcgaagttttaaaaaatattcaaattt

SEQ ID NO: 402473 - DNA, 624 bp, Cannabis indica
tggaataactcatttattacataagagtcatattatatttgtaacccgttgactgtaacgtcttaggcaaggaatcaatttacaaattggcacttggtatattagcaagaaaggatatgtcgctaaatacgaatagcgaggcaccgatgaaagtgacacatatcaactagaaaagttatttacttgcaatgaaaaaactaagcgtaaaagtcggattggctcaaagaatatgtaagcgagatgactatctcgctatgggaagacttcctatagcttcatccagctaacaggagcgaggcttacaactctagcgtatcagaagacttctttgtaaataaccgagatcaacacaagacatacattgccgaccctggaaggaagaatggccccaactcgctattgggatcactacaatcaaggttttatcgagacatttccagattcaacagttaaagacgtgtttaatacactatagttttgacacagtaaaagtgggaaaatcacagttatacgatttgcaaatcataaaccgcatttacactagtttatatttaatcaaatgccacgattttagggatgattgctgcaaaaatatttcgatcaactttgtaattgaatgtccac

SEQ ID NO: 402474 - DNA, 849 bp, Cannabis indica
aaataaaaaatatcttttaaaataaaattaaacataagaaatttaaatataatttattttaaatatttttcttttaattttttgcaatacataataaataattaaatctatttttagtacaaaataatttattatagagtttttaatcaaaataatttttctaaaagtttaattgcaccaagtttagcttctaactgtagcttctccataaattcttcaataagttatttttaactacttacgaaatatttttttatcacaatttttataaaggacattttacacttgacaccttattttttatctagtttttaaaaatgacttggtcaagtatcaataatatttttatttgtttgggtatgttaattaccctcctttatacccttttttctatttcttctttctctctatcttatttttctcttacctcaaattttaaaaataatttttggtcacgtcgttacttggataagcataaaaaaaatactactgtgatctactcttcaatatatgtgggaagtatatattttttcgtctattttcaaaaaagaaaccatttggttacttatataatgattagttactgttttataccttttgtaaatcttaattaacattcattttagaatttgttaattgaattatattatattttatgataactaattatcaaaatatataaaataattggtatatagaaatgatagcttgttatattaatgacaacttattaattagtttagaaaataatttttaaaattacttaaatgtatgttaaattataatctaccataatatagcttaaatataactaattaattactacgatgtatacaaataaattttaga

SEQ ID NO: 402475 - DNA, 792 bp, Cannabis indica
aaaacattcataaaatgaataaattataagcaattttgtgatttgacataagaaggcatgaaattgggataaatgttcatatctagaacagtttataatgatcttcagatgaccacactaagatcgctaattttagtgattgtctattatgttaataataaaaaaaatttaggtagagcccaataactaatatcattgtaaaatataattttatataattagggagtagccataatacctttaattatttaaaattttaatataaattaaaaattcaatctaacggacataacatgtaattaattatatacgtgtaataattttaccccctaagaattttattgtatttattaattagaataatatgttaagttaaattctcttaatctactctatagggagttatgaggatttaattttatagtattattacaaatttacataagatatataataaccttttattttcctataaagcaaatatttgattaaacatatcataaagtgtatatgattttatgaaatttataatttagcccgcatgcaattttagatttagtaaaattttcatctttattttatactttgatgtctagtgaaccgcataattttaaatgattaggaagtatccacaacattctaaattatataaaattatatatattaagtgaatcacgatcacataatggacatgaattataattaattatgtggatataataatttcatcccacaagaattttattatgtttatataattaattaggataatatgttaaattaaattctctt

SEQ ID NO: 402476 - DNA, 607 bp, Cannabis indica
gactttggttcgttttttttttttttttttttttaaactaaaatggggattgatccagattccttccccaccctttcggtcattttgacaatctcgaaaatcagatgtgagttgtaagaatcttatattttaggttttttaattggatcatcggtaattactataagagttttcatcacacaaatggtatcgcttacaatagctagactttttgatccaaccaagaaaaaatgtcaataaaaacaatttgttccactacactacacaatacctagtacaaaggctttagcttggatcaagtattaattgaagcttttttttttctattatcatttgcttggcctttggaggctaaaatttattgtggcagtgtcatcctatatggaaatctcggagggaggtgatactgatagcctagttaaggcatgttgagttttaaagcccttatagctgtgcacagggtcaacctaagcaatttgagagcctttggcaaaaaattaaagggggtaacttgaaaaatacttgttttttgtataagtcaaccaaaattactagcaaattatattcatttaaattatactcacttttataggagattgcctaatat

SEQ ID NO: 402477 - DNA, 867 bp, Cannabis indica
agaaatccaaaccgtaaatttaaaaaaaaattgttaaaaaaataatatatgaagtaatttttcttattaatatagctaaccaaaaaataatattacgatgactaatttaaaataaataaataatattattaaaaataaaaataacaaaaaataatcaaaattgttaatgtttaaatacctaacaaataaatatataataaaaaaatagtataaattacgatgacaataacaaaatagacaataaaaatatgtatatgtaagtaattagtaaaaaaaaaattctttcttgtacagctaaaattttgattttaattgtttagtttaattaatggagtgttgacaccatttttcattaatttaatttaagaagataattagttagataataaattcaagaaattaagagataaaaataacaaatcaacactaaatatatttattggttttgtagttgaaatctatgtactccacgaattaatatttatttttgagtgttggttttgtttcttccgattctcacctcaactatgagtatttattagatcacatataatgtttttaggcctatctagatccaatcaattatatatcggatgttagattttatcatctgatccgattcaattaattttaatcatccaattgatctaacattcattagatgttggattggatcagttctatccattggatttattttcgatatatttattaattaaatttgggtttacctaatatattaaacctagtattttttgaatcggattggatccatctaatattttttgtcaagtatgtattggattggactggatccatcaaatccaagaaataaatagtaaaattttaatattaattttcatatat

SEQ ID NO: 402478 - DNA, 772 bp, Cannabis indica
gcagagagagatttttgtgacaaacagagaaaaaaagaggaggttttattttgtttagtgataattagtaaacatcccgcgcttagcggtgaatatataaaatattttaaattatatattaaaaataaattatataaatcaattaatgataattacttaataaaattgtattaaaattttaactttactattaaaaaatttattacataaatacttaaaatattaaatttgttgctaataaatacaaaaattcgaaaaataataaataaattctcatttatggtttagtttttattctgaagtgtttgttaagttttgagttcgaattttattgtgtgtgtttttaatgtttgagttttagtgttttattggagttctaatgtttaagtttgtatttatgagatctgtttttatttatttatttatttttatagattttgagagcttaaaatttaatgttgtttttattgattattaggactggaagtttaatttttcatacgggaattcaagtttgtcttttcgtttcattgattgaaaaatattagtagaaagtttatggaatgaaaattttaaatatatgaaaataacatttgaatcaagaatcaaagtttattgttgatctccgtatacaaaaaaatatttattgttaatctgtaaagataatatggctggaagaagttggaaaaattaatttttatttcatttaatatgtatataatattttttttttgaatattatgaagttattttagttattttttgttttttt

SEQ ID NO: 402479 - DNA, 1244 bp, Cannabis indica
ttttagaagttcatatttagggtgttaatcaacatacttgtgagtagatctaagatcctagtaaaataatttccaacaccaggtccctatcctattcctgattttgggttccattttttttgttttgggtcctagtcgggttcgggtttgggtcctagtctgggttctggtacttgtttgggtttgggtgtgggtatttgtccagttacggtttgggttccatttttcggtctggctccgcgttcgagtctgggtccaggatggggtttgagtcctggtctgagttcgggtccaggtctagatcccaatttgggtctgagtttgggtccgggtctgggttcggttccatgtgtgggtctgggtttgggtccgagtctcgggttttgatcctaatctgggtgtaggtccgggtgtaggtctgagtcccaggttcgatcccattcttggtccatgtccctcaaccgtaaaccctaattcctaaaccctaaaccctaaccgtaatccctaatcccttaaccctaaaccacaaacccaaacctacaaagaagaatcaagactcgaactcggactagacccacgtacccaaacagggacgtaggaccgaggacccacgacctacgagtttgggtcgttgggtcgtaggttcgggtcgtgagtccaagtctgtgtctggtttgggttcgtgtcccgagtctcgatctgagttttgatcctggtttgggtcccgatccgagtttgggtttgggtcagggtctgggtccaagtttgtgtctaggttcgagttcgtgacctaagtctcagtctgagttttaatcctggtctgggtcctagtctggtttcgagtttgggtcctagtccgggttctaatatgggttttggttcgggtgtaggtcttggtcctgatcttggtccagtaacgatttcggttccatttttggatctgggtccatgttcgggtctgggtgaaggtcggggtttgagtcatggtctgagtttgggtccaggtctggatcccagtttgggtctgagttttggtccgggtttaggttcgggtccatgttcgggtctaggtctaggtcagagtctctggttttgatcctaatctgggtctaggtctgggtttgggtctgagtccccggtgtcatcccagtctgggtccaggtccaggtccctaaaccgtaaaccctaattcctaaaccctaaaacctaatttgtaatccctaatccataaaccctaaacccta

SEQ ID NO: 402480 - DNA, 1156 bp, Cannabis indica
cgtatcattcagtccatcaggaatactaccattcgcaaagaattgacaaacctggttcacaacgtcgctattaactatttcccagtagttttttgaaaaaagctaggggtcataccatcgggaccaagagatttatcaagatgcatattaaacagagcacttctaacttcttcttccaaaaccggcctaagtaaagacatattctgatccatggtgatcgacggagtaatctcctctaccacagttgagtaatcgaccacatttgaagtaaataagttagtgaaataatcaatcataacattcggcaactcatcctcccaagtaacccagttacccacatcattcataagccgagttatagtattgtgtttctttctagaagtagctttagcatgaaagtacttactgttactatcaccttcttgaagccacaaccgtttagagcattgacgccaaaacacttctcgttggttcataacttcactaagattcaattcagcctcccgaaacttatgaatggatatagcatcacgcccctttttccaatactgaatttcccgcttgcaatggctaattctttgctgaaaattacttgtataatcttgcccccacgcttgaagagattccccacaatatgaaattttcttcataacatgctgaccttcacaaaggtcccaactatctttaacaacttggcggcacaacggttcacggagccaggcattttcaaaacggaattgacgaaatggcaccgtcacagaacgtaccgtcggctcaagaagcagtggacaatgatccaaagcagagacttccaagttatgtagctgagccatacgaaacctctggaaccagttagaacaaacaagagcacgatcaagacgaatttcaatccatgaatcagtgcctctcccacactcccaagtgtaaagatacccgattaactccatatcaacaagatcacagtcggacaaagcttgattaaaactatccaccaacatctgtggatatctatttcctcctcttttatctacatgactagtagtattgttttaatctccaatgatgcaccaaggaagagaagattccgactttaacgatctcaataaatcccatgttttataccgaacagctctattaggttctccataaagacccg

SEQ ID NO: 402481 - DNA, 684 bp, Cannabis indica
gaattgtataattaatagtattttttatctagttttattggataaaactatattaactagttaaatataatattattcttaaaaaatattaaagagagaaatatattattttggagaaaataatatttatttttttaataatatttattttaatccttgtgaaataagggattaatgagaattaatcaattattaattattgtcagaataaataacaaatcttatttatggtaaaattgagaaattaattttggaccttaaaatatagccaacacgtgcatgcccattctacatgtgtaaggtgacatataaagactcatgattaatttaacttaattattttattatttaaattatttaaattaaattgatttaattatcttctaattattaattaaatgaattatttgataattatttaattgaaatgataattattaaaataaaagatctaatatttgatattcagttattagatatttatatttgaatttgaattctaaatttaaatcaaatcagatattttaaataataattaaaaaaattatttataacactatatatagaatatatagtatcataattcaataatctgaaacagataaaaaatgcataataaattgggtaaattgcggcataaatacctaatgttttagaatttatacacttaaatacctaatgttt

SEQ ID NO: 402482 - DNA, 739 bp, Cannabis indica
aagtagatattttccatcaatttattgggccattaagggcccaattcccaagtagcttgttgtccacattttaagctgtatatagaatcctactaggttaatcctcgccgcccatagacctgtaggggaggtttggtcggccatggtcctgctaggacctggtaggtcatgtgtctgtcaggatcatgcaggtcaccatagctctaccaagagaaggccagccttttgatactagaggataactttgtacactgtttccttgtagagctcaggttcctttggtcgaacagaagctcccttggtccggaagtcactttttggccggccaagttatgcccagatcctggccggcctatatgctcaccttggccgccctataagctttccttggccggccagacatattggtacaactccttgatggctcgcttcactcctttcagttactacttgacgattttgccataccttgtatggagggcctgtcttgctattagcaaggttgtattctacctgtactctgtctttggcttacttagccatgccatgttaggtgaacaaaaatttgagataacgtttatatatatataaaaatataataatatttaaaatttattgttaattataattttagtttaattactggaatacttttaattattttgaaatattatacatttttcttttattttttttaaataattaatatagaaattgttataaatattaataattatgt

SEQ ID NO: 402483 - DNA, 741 bp, Cannabis indica
ttaacaaacaaaatacaaaaaaagaaatgacaaatggaaaaatgggctcatcactaaaataccaagtttatgtcaatttcctaataaagttactggtttcctttttcttttttattcggactttttttttttttagttaaaaaagcttagaagaaggaaatgatgagagggccacatgcttggatttggaagagaatattattaagggcaaaatatgttatatcatatggatatatatgcagtaggcgtggaatgaattgaagaaagagggcagcggctggatttttgctactccaaaaaacgcctacagtgaagaaatgaagaaaaagaaaaaaaagaaaaaaaggaaaaagagggagagagagagttttatttagggtttaatttagcatttttatttagaaattgacaaaaattaagaggaagaagaagagaaatttgaagaggaacttggagtattgtgacaagttccaaatgggtttttatttctctctctcttttcttctaaactttgtaatttttgcacaatccatcatgagttaatttttcttttgctagaattattttgttgatttaaattgtgatttggtattttgtttctatgtttagtgaattggtttgaggaaattgcgtggggtacccactttaagttaaccattttaatttttaccctctttttaatattttattttttctacccacttttttagttaatgttcctataataccctttcttcaacc

SEQ ID NO: 402484 - DNA, 589 bp, Cannabis indica
aggaagctaaagagaagccgctcaccaatgtaaacaatctcagtgagcggccagagaaattatttaaaagagaatgcgacgacatcacgtttatggagagtgacgtgagatgggtccatcacctgcattccgacgcactagtcattgtcgccaatattggcagagacaatgtccaccgtatactcgtggacaacggaagttcagtgaatctcttgaacttccaagcctttaaacaaatggggttgcatgagaaggatctgcgacctgtaacgtcgagtatatacggtttcaccggcgacgtcatcgcactgaaagggatgattaaactcccgattaccttgggaaccgcccctgtaacagccaagtcaatggctgacttcgcagtaattgaccagtattcggcatataatgccgtgattggtcgaccaatcttgaaggagatgaagatcgtaacatcaatctatcatctcacgatgaagttccctactcccgctggagtaggctctgtgcgaggaatccagtcagactcgcgagaatgctacaatgcagcagtcaagctcgcagaaaagaagtcaataaatgtcatcta

SEQ ID NO: 402485 - DNA, 754 bp, Cannabis indica
ttgtttagtaattaattaatattattcaatactataaaaaatatctttagtgacaaacttttagtcataacataatttttttgtgagtaaatgtgactattagtcacaccaaaaagttacttgtgactaaaatatagtatttggatacaagttgtcaataatttaattttagtcacaataaaaaatacatttagtcacagcaaattataatttttatgactaatacttttagccacaacataagaatgataatttataattagtcataattttttcacttttagtcataaattttgttgtgactaaaagtaaaaaaatttgtaatacaaaataaattttttaaactaattataccgtgtaataataattacatacaattcttatagacgataaacaatatttaataaaaaaattatattgtatacccgttttacattctatattttaatttttacttttttttatattcttcaaaatatatttacttttatagcttatgttcctactatatctcttaagttaatgtaaattatgtgctagatttaagtaaaaggtaaaatatattagacaacccgctcacaaaagtgagtacattttaatgaaatataatatgaaagtatttttgattaatatatatagggtaaataccattttagaccatgtgttttgcaaaaggtatcaattggaccctctgttttgttaaatggcaaaatagaccctgtattttctaaaatggtacaaataagacgctgaa

SEQ ID NO: 402486 - DNA, 582 bp, Cannabis indica
ttttaaaggggtgcattgtagaatcaccctaatatttgttatgtgttgaaattgtattatcttttagcataatattgaagtatattttggagtttttacaaaaatactagatttggtcaaaagtttataatttaccgtgagtagaatttttacaaaaatactgttttttttataaaacaacaaaataaaataattaaaataacagtgaaataactaaaaaaaaaataagccgttaaacaaccgtgaaaacataacacagtacacagtataaaatttatatagtatttttgaagaaaaaaaaacacaatattttttaaaaaaaaattctacccaataataaaaaataaaaaagttaaaaatatgagtatgtaatgaaaaacccctatatatatatatatattttttttttgttaattgagctattttaagtttacataactttttataagatgctttgattagattgtttggttttgttttttctttctttctttttattgaacgttgtagactgttgaatgaatttcatataaaataatcacatgacaaaattacaatccaaaatattttccaaattaagta

SEQ ID NO: 402487 - DNA, 781 bp, Cannabis indica
gtatacaaagtcagcgcacttctaacttgttcagacgaatttctccattgaccagtatgctgagttatatgtcagagaaattgttcgtcttcatggtgtcccaaattccattgtttcagatagagatccgaagttcacatcaagattctggaagagtctacattgagctattggtactcagttaaagttcagcacagcatttcatcctcagacggatgggcaatccgataggactatacagatttttgaagacatgctacgggcatgtgtgcttgaatttgaaggatcatgggtaaagtaccttcctttgatcgagttctcttataacaacagctatcaagaaataatcgggaaggccccttacgagcttttatatggaaggaattgaagataacctattcactgggatgaactgggtgaaagaaagttcttgagtctcgaggttgttcaaagaactagtgatgcagttgacaagattagagcgcgaatgctcacggctcagagtagacaaaagagttatgctgatccaaagcgtcacgatatagattttcaaatcagggaattggtatttctctgaatatctccgatgaaaggcattaaacgctttggtaagaaaggaaagcttagcccaaggttcattggaccttttgaaatcctcgagaggatagggcaagtagcgtacaagttggctatgctcccagcgctcgcagccgtacatgatgtgttccatgtttcaatgcttcggaaatatgtcttaaactcgtcccataccctgagttat

SEQ ID NO: 402488 - DNA, 805 bp, Cannabis indica
gtcgtttaccttttttttttttttttttttttttttttttttttttttagatgatagcatgtttttctcaaggctaatgttgaagaatgtatttgtctcaaaaagattagatgtaacgcccgtatttaaatatttttaaactcaaaagataactttaatatattatatctttataactatatgggtcgggatcccgagtatcaaaatacaatttaaaagtattttactaatatgtacatataatatatttttttttaaaaatcgctagcatgcaacatcaaaatacagactccaaaatagtaaaagaccgaaaccctccaggttgcactgccgcgatatgtacaatcactgccgagctctatctcactgttcctccagctttgcttttcctttacctacacaaggtagcaaactgatgagtcaacagactcagtaagatatgcaagatatatatataaaaataatgcgatgccggctttatgattaagccgccctgagctcaataattaagctcaccaaatggataagaacgttcttaagggaagtacgactactgtaccaaatgcactaaagtaccaattctgtactcgtgttggtagagccctaactgtactcccgggaattactaagtgttgtaccacgaacacgacgtacccctggtactcgtgttggtaacaccgtaaccacactaatatgcaacactatactaacaccctaataatcacattcatattagtgctagtagtgcaaacaactaaaacaagcatatattcatatatatatatattcttacgctatcttacct

SEQ ID NO: 402489 - DNA, 554 bp, Cannabis indica
ccaacgatatatgtagatgatgacaaaagtgtccaacaattactcttcatatagtcaataagtagctgtggattgtggtggtattcaaaattttgcaaacttagataagagaagataagtgggagtgagacagagactataattagagggaaagagaggaagaaaagatgagtgagagagagagaaagaaactacaattagagagaaagagaggagagagaaaatatcttttaattaatttaataaaaggctaattaggattttcgcctttgacatgtaacaaaaatcatatctcctgaacttttaattttttccaattttagtaaaaaaatctaacatggatgaaagttcaggggctataatttagtacatgtcaaagttcgagggatatgatttagtcgatatcaaagtcggggatcatggtttagtacataaacatcactgaaatagtaagattgaatgaaattagacaaatgtccttaaatccaacaatctcaatagttcatgggacatttttaacgaccttaaaagtttagggcatgatttggtacatg

SEQ ID NO: 402490 - DNA, 497 bp, Cannabis indica
ttttttttttttgtaaagaattatcaaaagatttaactcaagagaaatgaaatgaaatataataggagcagattatatacacgtatgtcaatcaaactaaagcatatgtcagaatatattttaatattttttatgataatctgtcatatagttataatattaggttataaattttaaaaatttattttatttgaatttactaggcatattaaaaaaaaattaaatttgttttccgcgtgtaaatgtgacgtttggtaatatttttttaatcagttttttgtttttaaaattagaaaagtgaaagtacttttcaaaaacatgttctataaaactgtttttgcttttcaattttttagttgagaatcaatttttttttttttttattttttaaaaaaattacttttaatatatttttaaaacatattttttcttaatctaatattttggactttgacaagacgcggacccaaatcctctcccatgacccttgtgctgaa

SEQ ID NO: 402491 - DNA, 690 bp, Cannabis indica
ctattttatctaaacatcactgctccatttgccaatcagcaaagcaaaaacgactctcatttccctctaacaactttgcacaaaacatttccgatttactacacatagatatttggggacttttccacataattagtgttgaaagctacaaatattttctcacaatcgttgatgataaatcaaggtttacatggacacacatgctaaaaacaaaagctgaagctcaaactatgttcataaacttttttaacagaatttgcacttaattttctacaacaattaaagttgttcgttcggacaatgctaagaaattaatatgagttctttctttgcctctaaaggtattaatcactactactcatatgtggaaagaccacaacaaaactcggtagtagaaagaaaacaccaacacatattaaatgtggctagatcactttgctttcaatcaaacatacccctttcatattagtcttatatcatacaaactgccacctatttacttaatagaacaccgtctgttttgcttaaaaaactcacctcttatgaagtccttcacaataagcctcccacttatgaccatttaaggacttttggatgccttacttatggctccactttggcttccaaaagacacaagttcactcctcgatgtcatgcatctatatattggatattattttaccaggatct

SEQ ID NO: 402492 - DNA, 781 bp, Cannabis indica
tctctctctctctctctctcgaagcccctataccagctagggtttggattatttttcaaaaattcaagcagtttgcagtagggatttagtttttttaggctctaagtaagctcttggctctatcctctttggtttcatgaattttggaaaaaatggattatgcatgttttgagatattgagttatgtagctgctgttagtgattgattttgtttttctggagtttagttatgtttttttatgttgaattaagcatgatttaatggttgttattaggtttaatcaagttttgagttttagaactcaaacttggagctttaatggtgatttttgtttttgagcttgggtagttgttttattgcttgaaaaatgcttattggggtataatatgcaggtctggaaggtttggtaaagtttggaatcgttttggttagggtttgaaattttttgttttttgggtaaaaccggttaactagttttacaagtactgtaaaaccgggtaactggtttctgcagcagggttcccaaaaattttagctttgcgattcgtgccagtttcaggtttcaggttggttaattccttgctaactagtttagggtattgccattttaagttgctgtagataggtttttggtttaaaacctaagtgccggttgtgatttagcgagtcacttattcatgttgttatcgatgtgatttagaagcctataattcgccgggcagttgttccactcaggttgactggcacacctggattcggaattgaggtaagattagtata

SEQ ID NO: 402493 - DNA, 667 bp, Cannabis indica
ggggttggtgttggtcgccggtagaatgaagattggcaacggtgaaggaatagaagcaagtagtctatggtgtttgaaatttcttttctctttgagaaaactctaagataatttggtaaaatgctgaaagtaaccaaatgaagtaagaaggctggcttttataggccagaacaggtgtgagatagctatgatcaaccatcatcgtacggtcaggatgggaatcgattcgcattctacagatccaacggttggaataagcgctcatcaaggcggtagaaaacgtttgagtactcgactgatacccttttaatgcgtcgtatcaataaatggacagaaaacgaatcgttgtctgcaaaaagcaaataactgcagtaatgatggtgataaatacatccccacgcgcccaaggcacgtgctaggaagctaataacgcaaccggaggcatctaagcaagccttgtttactttcttacttaacaaggcttggggggtaaatgttgctcctgattttgtccaaaatacgtggaccaaccggattgagacacgtagactaaagaggtttaactttgggataattcagctaagtctctttaattagagggatcaacatttaacatgcctcccggagaaggcatgtgggtttcacatactcccggagagcaaagcta

SEQ ID NO: 402494 - DNA, 546 bp, Cannabis indica
aaaaaattaaaatttaatgacttcactaattaaagattgtcacttgtcaatttacttgatacttacacggtatccacaagtttaaaattataacttaactattattactatgaaaaattaaatataagtatttatttttaagcgagagttaaacttagatatttatactgcaaattacttttatttcttttacatttttaccattttggtttaaatttagagaaaattgccaaaatttattttgatttctattttattaaaacctattttgttctttagtgaacatgatttctttggtcttataattcatgcatgtaaaatttacttgccggtaggaagaatgtttttattaattttatcaagcggtcagttaattcggtggcttatgcatttgttagaccattttcaatgagagatataaaagttgagtttgagtgattgtttatgtactaaaatatgctccccagactttgatatctaccaaattatgctcttcaaactttgatatgtactaaatcatcctctctaaactttcatcaatgttag

SEQ ID NO: 402495 - DNA, 854 bp, Cannabis indica
gcaaaaatacagggtccaaaatagtatttacccaaaatcatattaaatgtaaccaaatattcttgaaaatacccttacccaaaaaacatactgttaaaattttacttattgattatgattggtcaaagattagcaccacatgcaccaatttttttaaaaatatatatttatatatcagcaacaagccaaaccaacatacaaactgatcataacaagtataataaaagagtaattaattaattaattgaacaagtattacatcaaactaagcttgatttggtttggcaactctctttaaaatcctttttttctggcttgttctcaacacaggttcttgttcttgaaccttcttctgtttttgcttctggttctgattttggttcggattctgatttttaaaccctttattatcggaacaagtctttagaacccaatttggtttttttacctcttcaattggaattgtcctaattctagcaactgcagtagttactttcttatgcattttgggagttgaacttctttcattcaccaacttgtttctacttccaatcaacccatcattatctgaaataattaatacaaagaattaataaagcaataacacaaagatgaaataatgttattgtgttcaaacatttgtgaaaattgatcatttatattataatgacactttacaaaatgatattattttataaatttttataaaaaattatcacgacacaatttatatttctattaatttataatttgtgtgcaaaataacttagttaattggaggtgggtcgaacttgacccacttcaattaatactggggtcggagcgtatctcattgctattactcaaacaagcat

SEQ ID NO: 402496 - DNA, 578 bp, Cannabis indica
tctacttcaatgtttccacaaaatggagcttagcgaaattatgaggtatatatatattatttaattttggtgatataattagtattaattaatagtcttttaaaccatctttaatgacatgatcaaattgtcacatacaaaaagttatgttaaattcacacaagatatgtataaaatttctaatagagtgttttttaattaattaaaagtgcttttatatatatgttgttaaatttttctatattatgatctcatttccttttttttacaacaaaaaattttaattttaggcacaacaaaatttataactaaaagtaaaaaagttgtggctaattataaattattatcctatgttatgactgaaagatctgtggctaaatgtattattagtcacaaaaattacaatttattgtgactaaatgtatttttagtcacaatacttattgtgactaaaactagattcgtgacaacttatatttaaatactataattttgtaacgtccccgcttcaagcctctattaggcccttacacccatggaatgatgccttttatacacgagtacgtcactttggctgc

SEQ ID NO: 402497 - DNA, 528 bp, Cannabis indica
agttactttcttttgttttttgtttttttttgaaaaatagtagttctttgttaaataatttttattaaaatttattattagaaaacgtagttcatcataaagttatttttgttcatcatatgatatgatgtgatatgataaagggcatgtttgtttattaagagttagtccacattgctaatgtgtgaaaataaattgtgatatataaaaggaatgagctattcctcccattgttaattggttttgagatgtaaccccgttcatcttatccccaaattctaacatggtatcacagccacttgtgatccgttgtgagcccaaattgccaccggtccaaaaaaaccgtttgtgatgccggtccaaacatatacttcgttagcctccatttgggacctttcggccaatgtgctagtttctagtgttgggtcttagacctgtttcaaaaattcacaaatttcccgagtacacctacaaatttcccaatatttggtcttgtaggattctttcaaatgtcacgttcggtcctgt

SEQ ID NO: 402498 - DNA, 1013 bp, Cannabis indica
ccactcaggaagtgtaagtggctcaataaccctgcaggtctctaatgttcagccttaatctactgacaagttaaacactgggatacaaattcaaccacatctttcttcatcccgcacaaccagtataaagctcttaaatcttgatacatcttggttgtgccaagatgcagggaatatggagtaatatgagcttcctcaagaatctcatttcttagtttcacactacttggaacacaaactctagttttgtataacaacatcccgttacttgacaccgtaaaatctttagcttgaccagctaaaacctcttctcagatcattaccagttctggatctgttaactgagcagctttaatttagtccagcagatcagatttcaacgtcaaattatgaagttttcctacaacaaactcaatacatgatctaaccatgtcattcactaggtgaggttagatcttaatcatactagtcacctgtccgggaccctttctgcgcaaggcatctgccaccacattggccttcctaggatggtaaaggatttcacagtcgtaatccttaaccaactccaaccaatgtctctcccacatattcaaatctttataggtaaagaaatatttgaggctcttgtgatcggtataaatctcacacttctctccgtagagataatgctgccaaatctttaaagcaaaaactactgccccaagttctaaattgagagttgggtatcactgttcatattccattaacttacgggaggcataagtgatgacctaattggcttgcatcaaaacacaccccaaaccctgtctagatgcatctcagtaaaccacaaacttctctttatcagatgtcaagtgttggggattattttaccaggatcaagatttactaccatgtatattgtttaacatcctaaatatgaatttctaaaacaatagaatttaaacacatataaagttgttctgttggcactgcgggagccatagcagcaggtggttgtaggggaggctcaa

SEQ ID NO: 402499 - DNA, 502 bp, Cannabis indica
ctctctttgttcatctattttttaccccaaaaaaaaaatccgaccaccactccgtcctcaccaccgccggctgcaccaccgcaccgccgccgtccacaccaccgcaccccccaaatgccggctgaaagatatttttttaattttaatgtattgtttaaaaattaaaatttatatatatgtgtatgtgtatggtatatatgtatgtatatggatgtgtatatatgtatatgtgtgtatgtgtatgtaggtatatatgtgtgtatgtgtatgtatgtatatatgtatgtatgtatatatgtatgaatatatgtatgtaaaatgtatgtgtatatatgtgtatatgtgtatatatgtatatatgtgtatatgtgtatatgtatgtatatataaatgtgtgtatgtatgtaaatatgtatgtatatatgtatgtaaatatatatgtatatatgtgtgtatgtgtgtgtataagtgtatgtgagtgtatgtgagtgtatgtggttgt

SEQ ID NO: 402500 - DNA, 668 bp, Cannabis indica
atattatctcctttttcctttcctaatatacaaattattatgtattaataaatctcatcaattaatcaatgacaaacaagaaaaaaataaaattattttcttctattttctactatattttttaatgataattttttagtcatcatagattttatatatatacatatatatatataattaaatatcactgattagtaagctatttcgatctgttagttaaacttactgattagtaaatggcatttcatttcacatgttaaagttaagtatacaaattaggtgttcatttatattggatccataactttgaataactgtatttttaaaaaaaaaaaaaaaaatcaatgtgtggattgaaatagagacaacaatagtgtgttttagtatttattttgcatgtttatcttagaaataattttactttttatgtttgaaatgaagtataattttttttctagtgattttgtgttattgttttaatatgttgcttaattgtttatataatttttttttggcagccatgatggataagtttattgtaccaacttcttctcaattaggtgaattgcatgatccaaacactaccttgaatactacccaaagtcctactctaaacaccacctcaaatcctacccccccaactagtattaccactccaatcactaccc

SEQ ID NO: 402501 - DNA, 941 bp, Cannabis indica
cccagatccagacactgactacatgttaggtccaagccctgggtccttattcggatcccgatctcgggtcccagtctagtttaattttgggtgccaggtcacgagctcggtcttaggttcaagtctgtgtctggggtcgggtctttatgtcacggtcatagttccgttcctaggtccctatcctgattttgggtacaggtctttgttctggtctagatttaggtcccggtctaggttcgggttaggtcctagtcccagtttgggtttgggtctcagtatgggttttatttgggtttgggttcaagtcttggtccttgtcctggtcctggtcctaaacctagtccggtcccagttctagttgtcattctaagttcaagtttggtttagcgttcgagtcttggtccgagtttgggtttgggttcggatctcggtgtaggtctagattgggctctgggtgttgattagggtcttgggtctgggtcaaggttcgggtctgagtcccaggtttcgggtctgtgtttagtttcaggtgtaagtcctaggttctgatcccaatctgagttcgaggttgagtcccgggcttgggtccaattttgggttcgtgtctgggttcgggttttgtcctattatgggttcgtgtctgggttcttatcctggtttgggtcgaaggtcgtgttcggttcccaagtcttggttttagtccagttcctagtctgtgttcgggttcaggtctcagtcccactctttgtctgggttcaagtttgggtccttatcagggtttggattaggtcaggtctaggtccttgtgaaggttcgggtcccaagtctcatgtcccaatcctagtcaagatcttagtccaggtcctggtcatagtgggttatggtttgggttccgttgtcgtctcaagtctgggtcctagtcacagttccaattcaaattc

SEQ ID NO: 402502 - DNA, 1064 bp, Cannabis indica
atgagcgtgtagctcccgaataatataatacagtataagtaaagtcattgataagaagcggacctgtgactactgaaggactggcggcagcatccgcctgggtgatagcaaacacacgcgttggtacaggtttaacttctggcttgggttcctctttcttaagttggggacaatctttctagaggtgcccactgatccacactaaaaacaaggccttcggttacatgctccaaggtgatgcttcttgcagcgcggacactcaggataagagtaggtctgacgtccccctttaccctggtttccgcgaaactcttactttgccctgaactccctgtaggtgggaaaattctcttcttctgcttaatagtggaatcaacactctccttgccaggaccaaagatagggagagtagtggttccaccagaaccaagaacgtctcatttttcatgcagaaactttactactccctcagctcatagagccttattaaacattttagcataggttgtagtgttattagttgtaatgactaaatcatgtctgatcttaccgttcaaccccgccaagttttccatctggaacttgagttttcttgatgatggggattcaagaaaaaagatacgatatgtgaagtgatgcaaaaatggggaccaatgcctgtttattaataattgaaaaaacaataattaattatttttgtctatttctaatttggccgttcatcaaactagaaattatccttatggcatccacatattaaaatcatgataatcatgcccttaagtcataagctttatttcaaaatagaccacataaatttgacttatttatttgatgacacaacacacattttatatatataattgtgaccccaataaatttctaacaatctcccactggccacatatgtatacatataaatgtgttaaccttattgagctcataactttgtcatcataaccataggcatatgtgatctcttccattaactatatcaacataggatcaaagcgatttttattgtatcaatcacaactaaacccatcaatggtcacatacatcaa

SEQ ID NO: 402503 - DNA, 503 bp, Cannabis indica
ttttctatttattcactctgtttgttattttcaagtctgacctcactatggtttatggaggaccagttggaaataggcatgtttagttcacattgcatgtaaattccttgctacacttcaatgattgatctatgttatttggctatgtgaccattgatgggtttagtcatgattgatatgacgaaaactgtttgatcctatatgggtatagttgatggacgagattgttgcgagtacctttacatcataacaaattttaagctcataaggttatatatttatcaagtgacatatgttgcccaagtgggagattgttggattaaaatcctattgtgggcacatatgtctaatgtatatgctattataaagtgtgatacaaaattaagtgaccaattatgatatgtgtatcgaaaaggtatttaattatcatggaaataatgtgtagataccataagttaatttataatttgttgaggggccaaattataaatacccaaaactca

SEQ ID NO: 402504 - DNA, 504 bp, Cannabis indica
ttgtaacatggcatattgttgttagtagatagatattgtactaattttggaaagagaaatgttaaagagatattattggtgtttggtacttttttctaggttatatagttgttggtgtaattaagtattgagtctcatataatttaagaaaataaatattgttattgggtaggtgcctagcgcctctagacatgttgctttgcgatacttcttaaaagttattacattaaactatataggacccaataattagttgtaccaatgacgatattaacacataagagggtgctagacaccacttgtattttttagtatttctctaagaaaataacttttagagaatattactaataaatcgtaaagcgccacctataaaaattgctgggtaccgtgctcttttggaaaatattaaacatggttagaaaactgctaaagagtacatgtagtgtctagtgcaatattttttttgagaaaaagcgtttatatcataaatcaagagttaga

SEQ ID NO: 402505 - DNA, 644 bp, Cannabis indica
gtcgcatgagattttgggctaataatacaacttttatggaattggcaccaacgaaacaaacgatataacacacacgaacggttccattataatttacaagtcctatacatctacatgtcttcttctgctgtaactatatatatgatattgatatataaaaacgtacactactatagtttatataattatattaacatttttactgttagattctattagtaacatgaagtgaattacttatcggttattatataaatatttattagatcatatcttattgatattattatataattaaattgtattgtatcatacttttttttattatattatataaattttaatttatttcataaaatattgtatgtgcatatgtatatgtactatataaaaatataatatatataatacaatttaatataatatcatgtaatataatacaatataatacttactacgaatcatgcaagattgtaattaagaaaaagaatgaaattaattacaagcacatgaataactttgataaatttcatatatatatatatatatattagatgtgagttacgtgacgagccacataaatattagttttattttaagttttagtagtttttgtttaagaatttagtgactaattgtaaatt

SEQ ID NO: 402506 - DNA, 597 bp, Cannabis indica
gaatccgtcaaggagaccttctatctccgtatctctttcttcttgtggctgaaggactctcagctagccattagaatcaagaagatgacaattgagttctctagaatcaaagtttgcagagagctccttccatgtcccatctcttgtttgctgatgacagtatgttgttcactcctgtcactgctcagtctagtatcgccataaatgatttccttcatacatatcatcaagcaactggacaatcggtcaatctagataaatcatccattcttttctctcccaacacccctcaggactctcaaaacctattcagaaattcgttgcgtctcactaatgagggattcatcaacaaaaatctgggggttccccactatgttggccgggttagtaactctgtcttccattaccttatccaaaatgtctcttccaagatgaatgtttggaatgaaaaattattttctaaggctgccaaggaaatgctcatcaaagctgttatgcaagttatcccctctttgtcatgtcttgttttaagtgttgggttttatgccctaaataaactcatttcaatataatcagatttacttattaatataaatc

SEQ ID NO: 402507 - DNA, 884 bp, Cannabis indica
gtagaaccaatcgacttctcggatgaggaagaggatcgatcactggaagctcggagaaccaaatcgactatgcaagattgtttttaggaggctctgtcacctagaacttccctgaatacaatactgcaaaaagaagaggttcagtgtgattttaatttctttatggaggcaaacaggttatgttcagaagaggctgcacaaggaatccatactacacctctagtcttgcgatctaagaatgtagttaggaatctctccacctcattcgacaacactaaatcacacagtcaggtcaagatctcattggatgatatccaagaggaagtaacttacaggaactcatctcctgtatgctatatacagggtgctaaccccccactgtctgtacgggatggatttgtgagaaggctatggaaggataaaatagacaaggtaggattactgtcatatggcatttttttgatcaaatttcatgaaattgctgatagagattctgtgcttaatggtggctatatattcttcaataaacgaccggttataatgaaagcttgggatccaaatgtggatttcaaaaaggaagatgtgagtagggtaccggtttggataacaatggatgatctagaatggaaatattggggggaaaattctttattcaaaatcattgggcaggttggggcgccaataatggttgatgctgtcacaaaggaacgagataagcttagctatcctcgggtcctaattgaagtgtctatccatcaagattttccccataccatttattttgagaatgaatttggaaatactgtaccagctaaggtcacctatgaatagaagtcaatcctgtgtaagaattgcaaaggtatggggcatgagacagctgattg

SEQ ID NO: 402508 - DNA, 883 bp, Cannabis indica
tttttaaaaataacatttatcttcatagtaagggtctagattttttttacctatgactcatttcaactcaggactcagctctgttcttaaggttaattgtgatgttgcaatcctttttatcttattttattttaattttttgtcaaatgatttgagaattataggactgattatttagctcgtttttctaattctagtcctagtcatatctccaatgaaaagatatcccgattggattattgtaaactattattttagttaattatcattaataaaattctattatttatttaaaaataaaaaaataaaaaggaaatatcatacctatcattgtttatataatctaagcatttgaatgtaattatttttatcacagtataaaattaaaacattattgaaaaaatatacaaagtgtgtgatttatgataggaattattacatagaaaatataaattgacattttatttacaaaaatactttcataaggtaaagataacatttataccttttatgtgattttaattactaaaataccacttacactatcatcacttacacaatcagacgatggttgcaggatggttgctgcgtggttgcacggtggttgcatcagacgaatcagacgatggttgcatggtggttgctaggtggttggctaaaggttgcatcagacgaaggtttcaataagacgaaagtttctaggtggttactgggtggttgctgaaggttgcatcagacgaatggttcaattagacgaaataattgttagcaaaatgtttaagcaactgtaatgcaattgttgtgcattaaaaatcaaaacactgtttccacgtacgtaactctatctgcatgtctcttaatgatttaatacgaataaattcac

SEQ ID NO: 402509 - DNA, 520 bp, Cannabis indica
atgcatcggacccgtcggacccataaactatattttttcgcacctacatcggaccccatcgggctattgccttccccaaactgcgatttgggtaaatcgcagatatgaaccttagacattgttgggcaccgttcgggtctcctctgtgccgaagtgggtctcctccgtgacacggtgatgagggtctgaatggtggctgtgggtctcggtcggggtggttagtcggagtgggttgtgtgggggattctgtgatgtgggttcgggcgaagggcgatgatgagggttggaatggtgggtgtgggtctcgatcggagtggtcagtcggagagggttgtggggggttgtgcgatgtgggttcgggcgaaggggaagaggcagagagagtttgaggaaaagagagagaaagggtttgaaattttgagaggggtatttttggaattttggaaaagtagtcatatattttcaatggggagttatatttgcaccccttaaacttataaatacaccccattattaaaaa

SEQ ID NO: 402510 - DNA, 521 bp, Cannabis indica
aagtttttttaaaaaaaaaattagttgtttttagtttaattttatttttttaaattttttaaattgtttttaattttactttttttttaaaaaaaaaaactttctctttaattttctttttaatttattaattttacttttctaatttttttttttactttttatttgtatttttttttaatttttttttttgaaatttttacaaattttataattaataaagtacaatataatataaaacatagtataatttaacagagcattctgatataatttaatattattaaaattagagtaatttgcggtataaatagttaagtttccggtgacaaataaatactaatttaatttttagcgttaataataaatacttaaatattattacgactaaaaattaaacttaaatatttatttacaattaaaattaaacttaaatatttataccacaaattacttttaaaattgaaatttttacataaaaaatctattttgcacaatttattacctaaatacctctacac

SEQ ID NO: 402511 - DNA, 625 bp, Cannabis indica
ttatgtgatgttttctatagtttaaatatatttaattgaatgggttaaaatatattttgatgcatgttagttcgatttaggtaagtatggagttttgaactcaaaactttggttttcatggaaaaatgatgagttttgttgctgcagttgctgctattgtttgattgtgttctctgtgattaaaatatgttggaataagttaatttaagcttgaattgtaggctgttattgggtttgggcaagctttgagttttagaactcaagcttggccctttaatggcaagttttgattcggagctggtagttgtgttttattgccttgaaaatgttctttgggatgtatagaacaggtctaaagagtttggtttgttttggggttgaattgcatgagttatgaaattttgaccctttcgtgcactgaaccggaattccagttcagggaggcctgtacgaaccggtctaccggttggcttcaaggaaatttttcgagaaccggaattcccgttgaggaaccggtcttccggttggggaaaatttgggaaccctagttcttcccatttttgtgttatttagggtattggcatgctatttatagatagggaaatttttagtttcaagtttaagt

SEQ ID NO: 402512 - DNA, 575 bp, Cannabis indica
cgatgactcgaaataactgtattttatttctgagtgataatgactggaatcacatatcacaaaaatttattggttttttttgtcaatttgaacgaaaaaaagtaacaatattacaaaaaaatacttttagatggccaaataaataaatatacaaccaaaaaaaaaattatacaaataccacttacacacaccttcaactcaagatccatgtttccttggcaactatcgcgcaaccatcacgcaactacgcagtaacacaacgcaatcgaaatgaaaattcaaccagaaagagaaccaccattaatttcgacgacttcacttgagaaaatgaccataatcaatcaaaacagggtttgtttcaaattcataaaaaggtacagaaaaactactacgaaactaaaattcaattggaaattcagtttaatattcaatttttagatctatgaaaggtagatttcaaaaagttgagctggagttcccaaacaatccaactcaagtataataaaaaatattacatcaatactatagtaaaatgtttatcctggtgtattttttttttattgtttttcaaattt

SEQ ID NO: 402513 - DNA, 595 bp, Cannabis indica
ttaaatattatatgaatacttaaaaaaataaaatatattaatataatcattttgtaaaaagtattaaaaattaaaaaattaaactatttggatttaacaaagaataaattgaaagaagttaaataaataaaaaaataataaaaatatcaatatcaaagagtagagacttaatattgctaataaaataaaagtttgggaactaaattaccaaaaaaataaagtttagggataaacttaccaaaatgtatatagtttggagaccaatttgtgaaaaaaaaaaaaaaatttagggaccaacttgacaaaatatatataatttaggaacatgtagtacaaataagtcaaaatttatcaacattcgggagacattagtgcccctgccctaatatttttttttcttgagaaattataaaacactttttgttcatgtgttgaattttttttcttatgcagtagattttactagcaataattgcataaactactattttttttgtaaaaaatttacagtttcatgtttaaatatttttttttacaattttacggttttctatagaaacaatacgaaaataacaagaaaattacatagaagtaa

SEQ ID NO: 402514 - DNA, 817 bp, Cannabis indica
tgttatacccaaaattcgactactattttgatggaagacacgtgttaaagtatgaagaatatggatcaatgcgtgtaacgttaattatatttgaaaatagaataactcattaaatgccaacgtgacagagtatatttacaacttgctaactatatagtcttatgcgagataaagatatacaaactattgcctcatgcattaatgagaaaccatacagcattggatgcacaaggcgagacatcaacctcgtgacacatgagtagacgtaagcgaggtataatgactgtgaagacacgtagcatataatatacagtatacaaaccaagtataacagtcaggtaaactcgatcaactaatagcgaggcgcccatctcgctacaggaaagcacactccttgtactttcaccaatcagcttcagacatcttttagtgagatttatagtcttgacaagtcagttctctcaaatagaagctgacattcaaatgatattggctgttgaagttcacctcgtcaccaaaaactgcgattgtaagatggagcgttatgtcttcagagcagaagcgacgagatttacattatcaacctcgaaaagatatgggaaaagctccaactcgctatcaaggtcattggtaccgagttcctatcgagacaccccagaatataatgatttataacgtgtttaatacaaatttactttgaccagtaaaagcggactaatcacagctgtgtgatattcaaatattaaccgtatttatattacgtgatatataatcaaaccccgtaatttcaggggataattgctgtaaagattacagt

SEQ ID NO: 402515 - DNA, 683 bp, Cannabis indica
gaagaggaagagaagaagaagaatggtttacttgtaactattcatggtctttttagtcttattagcaagaagaaggagtgacttgggtgaggaaaaaaggaaaaaaagaacaaaaagaaagagaaggttgttaaaaaagaaagttagggttagttttttgctttatcatgaggttttaattaattttgtttaatattaaattaattttttaaatgttaaaataaaaaaaaaaaaaaacaaaaaaagtcaattttgctaatttcaatttgttaaaagtctattttcacaaattttataacttttgtatagaaatcattctcttttttctttttttttttcttaggaaaggaatcttgattttctacaatggaatcgaatctaggagatgcaatcttccattacacattgcaaaactagaaaaagcttattcgagaagatggagaaattttatagtattcaatcacatttggaagaagaatcaaagttctctacaacttaagagttacggcagagaaattgattatttaaggagtgttggcagaaggcttttatgaatctctctctctctctatttgaggtgggttttcaatcattttgcatgatgctgatttacatcacttttggatgttttgaagagtgaaatttaaattttggtagttgtttcatttctagcatatattata

SEQ ID NO: 402516 - DNA, 640 bp, Cannabis indica
agcaggactcagattggcaaaaaccgtgggggccaaaaagagtagaagtctacagcgattcgcaactggtagtaaaccaggtgtcgggagaatatcagacgcgcggagaaaagatggccgcatatgtggcaatagtccgagaactgctccatgagttcacggactacaaagtagaaagaatccccagggaaaagaacgctcacgcagactgtctggctaagttagcttcagacagtgaaattgagaaactgggggtggtacctgtggaacgcctggcagagccaagcatcaaagtcaaaaataccatagcaacagttgagcaagagcccagctggatggtccccatcatcgaatacataacgaaaggcgaattgccccaagagaaggcactatccagaaggatacaatatcaagcgcaccgttatgtgatgatggacaaaattctctatcgaagaggactcagcatgccttatttaaggtgtgtatcagaccctgaagctaagaaaattatgctagaggtccatgaggggttctgtggagatcatacaggaggcccaagtctctcaaaaaaaatattgagacaagggtacttctggccaacaatgaaaaaagattgcatagactacgtccagaaatgtga

SEQ ID NO: 402517 - DNA, 676 bp, Cannabis indica
gagatggaacagattgaggaacctcacttggaagacatccatgacctcagttcagacgatgataattcagaagaagaaggtggttattgcacagaagaagaggaagaaaaatatgaagacatcataagtaacatcaaggagctttggcaagaagatggaaatcccaacaaaggctcgaagcccactgagcaagttgaagaatcagaaggagtggaagcagtctatccagaggagagaaggaatttgatgctatctgaaattgatcttgttagttccatggtagaattgggcatgcaactaatactcaatgagaatgtagtgaaacaaaagactccgagtctcaagggtggaaggaagagaaatagagaactcaaaaatctggcttttaacataaattatgacaaaagccagaaaaaagagggtcctccaaaagaatcattatgagaatcttgacctggaatgttagaggaagtggagacaagatgaagaggaaagcgatcaaagctacaattagtaaggtcaatccggatatggtaatattacaagaagtgaagaaatcatccgtagacaggatgttcattggcagtatttagagatctcgattcaaagcttggatcttgattccagctattggaaggtcagggggtacgctattagtttgggatactagaagcat

SEQ ID NO: 402518 - DNA, 799 bp, Cannabis indica
acttaccttaatggttttcaaccgttgctagatattatcccaatttttgcactctaacgtggcatcacacgaatgctgacacgtggaatccacttggaatatctgctcgggaagaatagtccgagcaggacatatcactggcacgctcagagcaaagtatttagctatccgcgtagagcagccaacccttagcgaattcaacttacgcatcgtgagtcatcagcacaatccctataactcagggagaaatttacgtggatatggtatacacacgatcccactatcagtgtattcagcctcaatcccacgatccttgtattcagcattgatcccacgatctttctgtttacacgcattgtaacgagaggggaaactcttcctctccaagtttacttgccctataaatagtgatgtatgttcactgggcaagggagggatcggtcgaaaaagcagttaagctaacaccatattattatctaagaattatatattcagagatacgattgtaagagctataagaaaaggaacctttctccttgatcttaagtcaatacaagtaacgaggattaggctattaccgaacaaatcggggctgaacctctataaaatccctgtgtcttattattgctatatcatatatctattattatatatcatttatcgcttataaaatagactaattatcgttggctaaaagcgaagttaatattttggtgctttcattgagagaagaatcaagaatcgctctctactcaaaatttgtgtaacaccctaactagcataggcgtattacgtgatt

SEQ ID NO: 402519 - DNA, 690 bp, Cannabis indica
ctcctctgcatttccatgccatcctatacaataataaaaccaattttaattaaacaacaaaaccatatcatttaaattctaattaattatcttcatgattctacttcttattatttatggatatatgtagtcaatttatttatttaattattattttttaaaaaaactattgcaattaatttgatattagaaatacatgattagggtgtagatttaattatatagtaggtcaatcatcaattttccaataaattattgtataggtcaaatatattgttatacttgtataatatatcaatataatgacacataacaatttttatttaaaaaaacacataatagttaaactttataactaatagagacaatagtataacataggaaaattattaggtctaaacatcgttcttatctctattgtaatttttttttattttccatataaagtaaaatggtacacattatacttaaagtctatattctatctatttatatttaattaattaattgtacgagtgattattttattttatatgtttattagtgactttttaaaactttttcttaagcataaactattcaaaatttcttgaaacatactcgatgtctactaaaactgggggtgttcacaaagtatcagatccaatccaatccgcacgatccaatccaatccaatccgcaaaatgcgga

SEQ ID NO: 402520 - DNA, 957 bp, Cannabis indica
gtgaaaaagagcaaaccagaatccaagatccattcttcactagaattcatacttgaggcaacaagatatctactgattcatatccttcagcagctagatcaacttctcccttagactttttttctgttttgttctctttttaacttggctttgagagcaagacaatcatctcaaaaatgcttttcttcttatagtactagcattgttttcctgttgagtttcttgaatcacaccttgctttatgtcccccatttccatgatgattcttccatgatgattcttgcttcccttgtaatctcttttcatacttctgcctcttgtaaacagaccttcaccacttgattcaatcttgtcatctcccttcctttgaatctcctttgaacttaatgctaccttgacttctgtcatggtaagtgattctttcccatacagaatagtatcaacaaaatgttcataggcctttgtcaaagagctaaatagaatgatagcttgatcctcatcatcgattttgaccccaagataatcttgttgtagtcatcaagatgagcttctcaattctttggactcatccattctcaaagtgtaaagtttcttcttgaggtataatttgttggtcaatgacttcttcatgtaaatctcagagagtttattccataaccccaatctttctcctcactcaaaacttccctcaatacttcatctcccaaactcagcaagattgcactgtgtgctttggttttgatttcattcttctttttcttgtcattaatggttgttagagcttttgtatctaatgcatctaaaactccttgatgaactaacaagactttcattttaattctccacatgccaaaatcattggcaccattgaacttgtcaatttcaaacttagatctggacattcttgatcttcttggtgagttccttgaagaacagtttcgattcttgaattgctga

SEQ ID NO: 402521 - DNA, 652 bp, Cannabis indica
ccataggcatgtcacacattttatattaacaacaggacaaaacaagctagaggaaaataacagttagtgattaattatcaaccacttaactatttcttgacggacgataaatttcttctaccaaatagaattcacttttctctagcatctcaaaagaaaaaatatttctcaaattttgacctaaaagctgactttttgaaattgggcatcaaagaagaagacaagccaaagacaacgttttgcatcctgaatcaccatttctaatggacaataatgcccttcggactcaaaaggatgccatcccttttctagatggcaatgactaaatatacattctaatcctaaactaagcctaatctacgttgatgatatactgttgttctcacctaataacaaggcccatgctaacctcctggcccaatttccagagatagtgaaaaagtatgggattatgctttctgaaaagagatggtagtgggataaacagaaatagaattccttagagaaagagcccagacgagagtttggaaaaagggtagtctggatagaaagaaaattctttggatataatctggccatatcccctgatgagagtcaaatgaagttctagggctctttggattgctataacccttgggtttttggttttgac

SEQ ID NO: 402522 - DNA, 1024 bp, Cannabis indica
gccaaactacaagccaatcatgattgttgacgacacattcctaaaggccgcgtatggaggcacattgctcattgataacacacaagatgcagaatcaaaaatattttcccttacatactatattattgattttgagaatgacaaagcctaagagtggttcttcataaaaatcaaagaagcattcgaggttcaagaagatcaatgtctaatctctgaccgacatgaaagcatcatcaaagcaacaagaaaagtattctcagaaataacacatggctgctgcatcttccatctcttgtcaaatttgaaaaaaaaaaattcaaagcatttcaaaggtccattctttacagaagaaaaagcttacacagaaatagagtttgaatttcatatgagggagcaagacaacttggataagtgcataagaccaaagggtcgcccaacccgacaacaatcagaattacttaatgcctctacctgtggatgggcatttacaagtgattatcgagggccatcatattgttggagattcaaacaaagctagagaaagttatgtccgaactctatagtatgaataataagataaaatattagtcgtagaggaaagaaagccaaagtagctgcccacagaaaagtttgtcatttcattcagtgaagagaattccaaccatgtcatatatctagacaatgatcccctcgtcgttgaagtacgaattgcaactaagacagtggctcagacaatgattgataatggagcctcttctaacattcattttaagacaacatatgagaaaatggggcttcaactaaaagacttggtttcttgcacgcaactggtgtacggtttctccgggcaaagtatcattcctcttgggcatactcatcttttgatcatggtaggaaaggctccaataaccaatataattatggcataatttcttgttggaatttattttaccaggatcttagatctactcacaagtatgttgattaacatcctaaatatggactttctaaaacgatgaaataa

SEQ ID NO: 402523 - DNA, 560 bp, Cannabis indica
aacatgtggcagagctatacctagtagatattggtttctcagtccaagagttgtattcccagagcttattggtaagccgctccctgatgtctaagaataatcaattttccttgtgctaccctctgtcccaaaattatgatggggatccttacccactcgtacgtggagactggcatttttaaatcagattctctatctcatattttaagtaatcacacttattggtggttatgcttgatgtcaccatgatactcacattttcttgtttgggtctctcttgtttttacctcctttatacattggaggtggctttcagttgtgaactatgttgcaagtcgcttgataaatgttctcacgagtatctttcaagtcggtatattttgtgtactggggttcataccacttccttcctttttttggaggctcactccagctctaagttttgttgttcctttttgctctagggctgacttatttccaactctagagctacaatttgttgacttgcttgtgcctttttaggagcaacactccatccagtttgtgctgctcttaaccca

SEQ ID NO: 402524 - DNA, 729 bp, Cannabis indica
aaggatcaccattaagtttgttcgaggactagcatgccatctctgtccttgaccttcttcctatgagtttcttccgacttcatcctctcaaagtgatccttgattcgtttgaagatttacagatggagtaaccactcattgccctgagccctaacttcaaacagtaagttgctttcttctttctgatgtttgttacattgtgtggatttattacttagtctgtttgtattgttgtcatctcatctagttttggtagtttttagggtttaaactgtatctaggtttatactagggttcaggcaatatgtaggttattttaagatctccaactcattactttcgggtttgataaaattctctcgagggattgggactgctttttacttgcagcaatgtcccactctggttcaagaatttatcgtctagaagttttagagtttgagttccctacaaaatcagccatcctatataaacccaacccttcaaaacccacctccaaattaaagttgaacgatgctagggttagggaacacgtagtgagaacctaataggaagatattggtagtcgctacaggtgtttcttgcaagaaatctccgaaggcaaacgccgattcttgtgagaagcagcctggccggaaccatccagcatgtcctttattcttgtggcaaaatctttgtttttacccaacgtcacgattgcttttgaaccaggtgacttggattttgaaa

SEQ ID NO: 402525 - DNA, 662 bp, Cannabis indica
agaacttggtcctgccttgtgacaaagtgcaagcatatgcaagacattcaaaggctctaaggtgttcataagcttttggaataaatcttttcaaagggagttttgaaatttaaattgagggttggtgttctattaatgagataaatagcagtagcaatgcattcatctcaatacaccaaaggtatgtaagattgaaacaataaggctctagcaatatttaaaaggtgttggtgttttctttttacaatagagttttgttgagggctttggacacatgaataataatgaattacaccaaaagaagtgaataattctttaaagtctaactcttaggcattatcagatcttacccctttaattttagcaccaaaatgagtactaattagtttaaagaaattgggtaagacagtttgtacctcagatttagctttgatgaaatgtgtccaagtgtacctactatagtcatcaataatggttataaaatatttatagccatttatagtaagtgtattgaaaggcccttatatatcaacatgaataagatcaaaatgtgcagcagacatgttgtgattggtagtaaaaggcaactttttctgcttggcataatgacacactgaacagtggaaatcaatagaagatcttgaatgaaaatgtaaagcttt

SEQ ID NO: 402526 - DNA, 645 bp, Cannabis indica
aataaatgaattagagaaaaataaatagaagcaaaattttaaataatttagtaaatagatataagtgggtcacatcgaagtatttttctaaaagtaagtttataaaaatttactaaaatatcatttatttatcataaaattattaatatggataaaataataaataacataaatatacataacaagaattagttctattttggaattattacataaaaaatttaaattgacattttatttacaaaaatacttccataaggtaaagtcagcatttataccttttatgtaattttaattaccaaaataccacttacactatcatcacttacacaattagatgatggttgcagagtagttgcggcgtggttgcgtggtggttgcatcagacgaaagttttaatcagacgatggctgcagggtggttgctaggtggttggccgaaggttgcatcagatgaaggtttcaatcagacgaaagtttctgggtggttgctgggtggttggccgaaggttgcatcagacgaatgtttcaatcagacaaaataactattagcaaaatatttatgcaactgtaatgcaactgtgtgaaacataaaaagccagaacagtgttttcacgtacgtaactctatctacatgtctctttat

SEQ ID NO: 402527 - DNA, 539 bp, Cannabis indica
atatatactataaatgacactgcgtgagtaatgtttaattatgtcagtccgtataaaatattcttaaactaattgcatttgtaaccaaataatttctgaatgactcaaggccaaaaaacggtattcaaactctgtacttaatctgtctacatcatgtcgttttcttgaagaccagccaagaaaataagtagtagcctactacttgtctgagattgaacaacgattatcaacagagttggcctaatcggcatctgtaatttgttggacatctgtaaattttgagttggtgtaaagctgtgataaataacaaacttttacttcagttagttattttactgttaaaattagtttgttaattcttgtcagttggtctctgtttttttaatagagtttgttacttgttttcttgatacaatcccttgtaatccttttctatataatggaaggttcagctcataattgattagagcttttacaattctttgtgtccagtttaaaattgttccagataggaattgtattgataagctactccttca

SEQ ID NO: 402528 - DNA, 625 bp, Cannabis indica
gtgtgagtggcctttattaggggtaatagagtccctttggtccatccacattgcaactttattgaaagttgagtccatcaggaaaccaacatatgggaaacacttcaatccagatcaaactttgatgggtagagtgctaactggcagggatgactatatttgggagaaacaggaaatcctggtcactcatctgactccattctatagggttcttcatcgggtagccttgtacaattggtttcctaattctcatttgtccgctgttacacttgagattggaaagttcttgtatgctgtaggcactaatgtgtccattgatctaccctcgctcatctttgaaaggatacttgaagcctcagaaactactggcactcgtaacaagttaccatttccaagtctagttcaacgagttcttatggatgctcaccctcctcttacaacgcatgattatcaagttcagaatccagttctcagtaagagctttctctctgtggtcaataggaagccatcctccaccattccctctagaaccaaagtgagtaaaggcaagtctcctatgtttaaagggctttcggattccaactggcaggtacaaatgttttctgagtttcaatcttttgccaaa

SEQ ID NO: 402529 - DNA, 757 bp, Cannabis indica
atatttacatatttagctttatgttgtttttttttagtaaaatcaattaaaagtaatcaacaagttaaaattgtaaacatatatgtttatttgtaaatattcataaaattgtacagaattatgtaattatgttttttttggcacattttgtaatattgtacatttacttgtatatcaatgaaaattgccctataattattaataagagttgaatattttgatatatgaatgaatgttaatttattaatattttaatattgaataattttatataaaaatattaaaaaattccttatgtgacttgtaattttatggaggattaagatcacttagccatgaataaaatagtcagcaacatatcaaagtttaagaatcattaatcaatggttgcaagtgcagttcacttatgcccatcattcgatgcaagtaatcttgattcagattactgatgtagcatgtcatctaagtgaatgtgttgtatataatacagattatcaagagctaaacaagttgacaataaaaaataaatatcctttgccaaggatagatgatctgtttgatcagctgcaggaaaagaccatcttctctaagattgatcttcgatctagttatcaccagttgagaataggagtgttcataaaatagccgatccaattaaattcccacgatccaatccaatccaatctgcaaagtgcagatatctgcacttgtgcggattggaaaattcaaaatctgcacttgtgctgattggatgttg

SEQ ID NO: 402530 - DNA, 559 bp, Cannabis indica
atatgtatttaagtgtagtatgtgtattctctctgcaataggatccgacaggttgtatactatacaacctttctccaccattacatatccttcatcacaaaatcttgatattgtgaaatttctctctatatgtttgctcctctagggatactggattctttactttttggaaactacttctgtgttactcaggaagtaacactagtgcttaataaattgttggtacaatgccaaaaattgtatagagcttttcatagactgaataagtatcttttctgcaactttaacatttagtctcactggtaaagttagagactccagatcgatttttacacttttccaaaatcactgctccacccccagagtaatcaccatctcatcagtagcctttctagcatcaacgcatgtctagaaacttgatttggtgtagtctaagagtattaaaataccacccttatcgacaaacatatagttcatcttcttgatcttaagatttacttgattgtcttccagtgttcctttcctggattaatctgatacttactcattactcccactc

SEQ ID NO: 402531 - DNA, 989 bp, Cannabis indica
catagaatgatggctcgtaccgaaaagacgatgcgtatggctgacgcttctgacccttaagtggcttagcatgcaactttgcccagcgccgaaaaaaatctagccattcaggagcaggaggatcatgaagggtacgttgaggtccaggagattgaagagcaggacgatgtccgtcctggcagtccctccgaggcggaggaagaggaagaggttgcaccctcaaactatgggggatacaatgaggttggggagccagtcgatgttgatggagacgtccaggttgagggcgtggactacgtcaatgaggaacttactactacggttcctcacagaaggcaaggtaccttgggtgccaggtgggtgagccctccatccaaggtgactgaggcgcgcctgcgggcactcgactagggtggctacctcgacgaattggactgttacattcccgcccacaataactgagccacaaaccctgaaagggggatgtgcgcctggtcgggtgctcatgcctagcaaggggcattgttgcctttgcacccgtactttaagaatgtggaagatttcttccgcctctgtccaaaccagttcactcccaagggcattaagtatttgtctgccctcttcatcctttatgcctcccagaagagggatatgccttctccccacgaggttagttggttttttgatttgaagtccacccctaagcaaggcaggtcagggtacttctatttctctcaacaagacttcaagtggttcacgggcagcggggattcgaccatcagtaaaattaggcattttgttgatgagtacttcatgatggatggcgcgggcatcacccacactcggttccagcagattccaacatatcaccaccctcctctcactcttactcttacggatagagctcaagagcttgctcagctaccaggggatgaccggaatattatccagttgatctccgaggagaactttatgaagtacaggctcta

SEQ ID NO: 402532 - DNA, 770 bp, Cannabis indica
tgtaagctcgagaaaattccttggctttatatttaacgccaggggaatagaagcaaacccagacaagatccaaccacttttggacatgaagtcacccatagctgtcaaggaagtacaaagcctaataggactctttactacattaagtagatttgtgtccatgtctacagacaaatgtgtacccttcttcaacattctcaaaggcacgcaaaaaattaaagtggacagaggaatgcgaaaacgcaatccaagagctaaagaaaaagttcagttttattccctaaataaaactcatttcaataaaatcagatttactaattaataaaatatcagaaattgcttttatgttgcatcgttcacaagatttatttcatgattatacttattgtataaattctattaagtccagaacatatataaatatgtatatatttgttcatgattatagtgtcgtcagcacagtagaatatataatgattatatgttcaaaaatttaattcccatgatttgtcagttcactggatttagactggcatgataatcggcaataaggtatacttacaccttggataagtgttatgtcctttccagggcattggcaaagtttacaagtatcggatgtatggagtatacattggaagggaccaatattgatcttgaataaaatatcataaacttagcgatatatctttctaagtcaataacaatggttgatattaggtgtatggatctgaatcctgatatgattaggttcaacttagttgtattat

SEQ ID NO: 402533 - DNA, 569 bp, Cannabis indica
tctttcttcttatcataaacttctaatttaattgtaacggtttattttgttctattggataatgtgttttttttttttttaattatcattataaatatatattgttaggaggtaattataatgaaagtattacctttatgcctaccaactaatatgaatatttacatttttgacatttagagaaatttcaacttttttttcccaatgtgatgtcctacaatagtgataattaattggcatttcacttttttttttgaactagtggagtctcacgtgcttcgcacgtgtggctctgaaaaatatctatgcacaattattttaaaaaaataattaatattttatttacgaaatttataacattattaaattgtatcctctaaaatatacatcatggtgacaaaattttgtaaactctagaaatatagtacttttgttcttttttatcgtttcacagtttatgtatcgttgtaaattaattacttttctcataaacattgaccactaataaattatgtctattcttaaaaaattaattaattttttttctaataattaaaaaaagccaacct

SEQ ID NO: 402534 - DNA, 1019 bp, Cannabis indica
attagggaaattatctggatacgcctctaaggaggagattgagccgtatcacccagatattaagaataccccttttccttcaggattcaaaaacccccatgtctcgtcctatgacggaaccactgatccgatctcttatttgattaagtttaacagaataatgcgagcgagtaatgtgatgaacaattttcgctgtattttgttccccacctcgcttgtcggagcagcgagtagctagtttaacctgtttactcatcattcaataacttcttgggagcagctatccagggatttcaagaaacaatttcaggctgctagggataggcgacccgaagcagcctcgctaaccaatataaagcagtagcccgaccaaacaattaaggcatacttaagtcattttagcacggctgtgactagggttaggaatttggatgatagcacgcaacttacagcccttcaggcggggatctctactgatccattgaccgcagggggcgagttgtgggatgactaacaaggacgtctagtgagaagcatcactaagttcaacgaaagggctcaggtgtttgttcggaaggaagaagcctgaaaggaaatgaatctgttgaaaacaagctcgggaggcaaacccagcaatgtttcaacaggaacagtttccacgagaattaataacttgggggcttctggtttgaagagaaaggacggagttaaggaaccgtcgaaggataaaaagaaacaaaagaagcatgacaaatacgtgccaatgtatactatttatatagagcttaatgaaactcgggagaatatttaccttgcacatgagcgaaaggtggcctttggtaagcccggggccatgaggaatttgaggacgcaaaagagatccctaacaaatattgtaaattccataaggatattgggcatacgaccgacgaatgttgccaattgaaagaagagatagaaagtctcatcgtttgaggccattttaaatagtacgtgaaaagacagggccatggatacaa

SEQ ID NO: 402535 - DNA, 529 bp, Cannabis indica
accaaccacttgaatatatgtccattaatttgcgtctcagtttataagttctttcacatttttaggtgagcatatctttttatcattgttgagtagacaatctttctggaatttcaatggtcaccttgtataccagattgaccatctggtaaatataaaactattctccattattaccgtattacaatgggcaattcaagtaatcttcttaaccttagtgatcgactactctccctgacgttctattatacgttactaacttgataccatttgtaacgtccccactttaagcctccattgggccttctcccacagatttatggttcttatacacaagtacgtccctcttgggtgcttcatggattgattactatccctttaggccaacacgagtgttcccaatgtgctttgttctcactcgcacacttcctgaaaaacttcttaggaagtcacccttcttggaattactccaagtgaagcacgcttaactgtgaagttctttcgtgataggtgttggaaatattttacc

SEQ ID NO: 402536 - DNA, 445 bp, Cannabis indica
ttttaaaaatattacatttttctctaaataaaggccaaaatatttttttcctataatccactaaatctcaagacctgcttaacagttaattcagttagaattattattgttattaaatataacaaaaaatcgtatagaaacccatattgcaactagcgctgcaaccactttagaaattcaaaccggaattaaaaaaaaaaagtaaaaaaatagtaaatagagtaattacctgttaaatataatacctataatgaagaagcatgctttccaattcccagtattctgtttcaccgcgcgctttccattggcgtcaactgagctatcgccggtataaagctcggtgtctccgccattcttaaacaacaaaacaacattttatgaaatgaaatgagaatctgagcagaccaaactttatagcttttttaaattgagtccccacaactta

SEQ ID NO: 402537 - DNA, 754 bp, Cannabis indica
gaagtcaaatggacatgaaatagttaataagtgtaatgtgttcattcaatgcattaatttgacaaatgacatatccttttgccgattcacaagagtacaagacaaaacagactaataagaaaaagactgtgtgaagggaaaaatagtatagtacacagagaaagtgtgatggaccaacaaattcccctagattccttcctcaatgtcaaaaatcaaagtttgatcatgatggggttcatttttttttcttaggattgtttattatttgtattataatagagattttacagtgagggcttgtgttaaaattccaaatctctaggatgagaaagggtaacctggctatgattcttattgttaaagaaaacatttttaaatacaatacaatagataatgagctatgcataaaaagaaagcaaaaaagcaaaaggtataagaagagagagtgttagagaggggacactatcacaccccactactactaataccttaaatacactcaaaataagtccttttaaaatcctttctttgtggcttttttattttgttgttgcccttttgaatagtacaagacattctagtgacatgcacatacatattgggaatagattttgttcagttgttaattattgaaaatcaaagtatatcaaatctaatttagagtacattcaactttaattaaagtagtagtacataataaaatgtattttatttttaattaaaaaaacattaaatccattttcaatgtatagta

SEQ ID NO: 402538 - DNA, 845 bp, Cannabis indica
taagtgatgtatttgatgttaatttttttttaagtaccttatagaaacactcataagtcatatgtatacattttatataagatcaatggaataaaaaaataataaattaaaaacttgcgttactgaagacgttgtttttttttcttcttttttttttttgtggttattgcaagattgcttgaaagtttccatttccttgcctccaaaactaattcaacattaaaattttagtcaaacaaggaatttggtctacctacttactcaaaatcagagttaattcctacaagtttttatattattcgcttgcattcaataacacatttgcaatgttggtacaaaaaaaaaaaagaagattacaaggaaacgtactcttttcgattaattaagcattattatattcttttcaaaaaaaaaaaaaaactgaaaacagaatgtgttattaatttattatatttttcacaagagaaaatgagtaatattctattttttttaagaatttaataacacggtaaggttaattaattaagcatacaatttgatactttattatacatgtataaatcgtgtattgcattataccacagatataatattcaacacacaatcgaaacaaaaacaatacacatacttaaagcacttactacaacaactttaaaatagaggaactttaaaaaaatttaaagaaaccgtactaaaaaaacacgttacaatagatactctaaattcattcattttaaaatttctttaaaaaacattactcatgctttacatttataaaataggctctaaatatattttattaattattttgatttttaataattatttttatatgaggatatgtg

SEQ ID NO: 402539 - DNA, 386 bp, Cannabis indica
aaatggtcgtggttgtgctctctcttacttagccgagtgtcgagacgaacaaagagagggcttcgattggctggctaccaatattaatgaaggaacaatttgggattgggggtggcttcggtctggagaaaatgggaaggaaggaggagagtaattattaaggaggctagggttttttaattttttgggtctgacggaagaataatgtaaatataaatataaattacatattttttcaaataatattcgagtatagggtgatacttaaactatatactaaaatgtggacccatacatggacccgatttttcaagggtagcactgttggaaatttattttaccaagatcttagatctactcacaagtatgttgtttaacaccctaaa

SEQ ID NO: 402540 - DNA, 970 bp, Cannabis indica
aatcgccaaatacctccaatgaccgtattttagtttcaagtgcaactttaaggccaataactaatgcttcgtattttgctacattattggtgcatatagctagaatatggaaagagtaaggtattacgcctcccgacggtgtcacaaagacaattctagcatctgccccactacttcttgctgccccatcaaaatataattgccatgatgaagtatcatctgtgaagacttcttcgtcaggaagatcttctctcaactccatatcatctagaatcgggtgtgctgccaaaaaatcggccaaagcttgcctttcattgctttttgcgggacaaagttgatttcaaattctgatagcatcatggaccatttggcaagtcatcagaaaacacgggcttggataggatatatcttagagggtcagcttttgacactaaagtcacaggatgtgagagaaaatagtgttgtagttttgtgacggcaaaaattaaagccagacacactttctcgattggagggtagttttgttctgcccctactaaagttctgcttagatagtgaagagcaacttcttttccctccttgttattttgcgccagcatggctcccaaggagcggtcgagtgaagtgatatataatatcaatggctttcctaagattggagctctcaacacaggtgggtgcaacatgtacttcttaatgctttcaaaagcattttggcatgcctcatcccaaataaatgggacatttttttgcatcaaccgtggaaagggttgacatctaccggacaggttatcttcaaatatatgcaagtcttccttgtagtccatgtagttgacgtaaattacgcgggggatgcatttccaaaattgctttgatttttgcagggtctatttcaattcctcgatgtctaatgataaacctgaggaactttccagatgttaccctaaatgcacattttaaaggattcatc

SEQ ID NO: 402541 - DNA, 928 bp, Cannabis indica
ccaagacagagctaacgtgatagcttaagcttcggcttccatagcagaagcactggcagcagtggtatgttggatatattaaaggcccacgagccattttcagagttgacacttataacagcaataccaactacattgttagattagaaaggatcagtaaagagtgaaaacttcacctttaccacattaaaatcattagcgattccaactgggactctagatcgaatctcactaccctcataagctacaagatcaaaaaataaaaaaaaattctgacagtacaagaaggcaattgaggaaaagaaccttgaattctagaacaatttctctgatgctacacttccaactcaatttctttgtagtgttgcaaaaggccatttggtttttaggtgtgtttcccttgtggattgataagattctaggtagctcattggtccagttcctggaagcttttctctccaacctcaaggacatcaacagtattggccccatttagctaacttatttaagctttttttttttttttcgcttctaagagtaaaaaaaatatattttagaagtgtttggataaaacatatatattcttttaatttaaaaatcattttaaaagaaactagaatttgtagtttcttctaaaaaaccttatttgagaaagtatttttaaaatcaaattatatacttctaatttacttacatagaataatttttttaaggaaaatttgcggcataaatatcttatattttttatttcatactgttaattctatttttggcatatttaattgacaaaaatattttattatttattattattttcggctagtatgctttaatatggtttcctattttgtgtattcaaactggaaggaaagttgtctagctttcctatttttggaaaaaaggtaaaaatggtaagtttggttaccca

SEQ ID NO: 402542 - DNA, 1248 bp, Cannabis indica
atgctttttccctttgaaactatcgctgacgacaaagtcactaatactcactactataatatgggcctttagaggctattttttttaactcttttcataaaaagggaagctaaagggtgtaaaaatacccgcctaatacaaaattgacatttagaggaagtttttaataaaaattgtaggtatatatttatgaagtacatttagaggtaattttgggatcaggagttggaattaccctctatggcgtcgattatttgaaattaaccgataccatctgtatagctgacacgtgtaattttttacactaaggcgtcagttaattttaaataacggacgccatagaggtatatattaaccctttcaacatacagggcctcatttcgtcttcttctttattacgatacacacagcagcccataaaaccacccaaacccttgccaacccaccacccctaaatccttctatctccactatttttacaccattttacccattttttaaaaaaaccttctattttcgatacttaaacccatataccaaaaaagttacaattttctcctatttcagtgttaaccaaacctattggaaaatagtggtgggtataatttcggtcaccgattttagttgagaaaatgttaaatttcaacatctattaaggtataaatatgatttctattcatttttgtattgtacattgctttattttttgtttttataattttttttttgggatttttttatattattaacattgttgttgtgcatgtgcatggtggctggactttttgcagaattgatcgccagattgtgcttataaggtaaaaatttaaaccttaataaatagtatgtatatatatatgtattttgaatatgtgtatatattgtgtattttatttatgtaaatataatattgtaattgtattttatatattctaaataatatatatgtatatatattgtgaatgagaatgagatagaagagattaatgagtttagaaataaagtttttaaaattttgttagtgtgagatataatttattatatatgtatgtatatgtaaatttttcaaaaatgtatataatttagtaactagtaactagctacttttttatagctagtaagtaattatataattaaaattttaattttattctatttcattatattgtaggttgtgagctaattttcaaggtttcaaaaaaaattagtattggtcggattttagcttgctataggtatatatattca

SEQ ID NO: 402543 - DNA, 849 bp, Cannabis indica
atcctcgggcagaatagtaatttgttaccaagaggaatacttaggaattttataatcacaagtatattccttatcagcgagcccaccgatcgtaggttaacctccctcaaaagaaaattgcatgaccgaagaccgtagggaagagttaacaggcgcttgtgcctactaatcatctcgggtgtaggagtaggtctcatcaaaagagttgtcagaacaaacaaaattagtcaaaaacttgaaaaaggaaaactgatgtaaataagcaagaagagaacaatcacttacgaagtttgcaaaatgcggttgtgccgatgggggaaagaccagacatccacaagaagttgttcttaaaagacactttatttggcaagtctacaataattttaggttcgctgggctgagtaccgagatagaaaaagccccctgtagcgttcttcctcgatggaacgaccttaattgagtaaagatactcaatctctaccagtgtgggacacccccagttaagaattttgtacaagactttcaaactagcgagaatcctgtaggagatgggagtcagctggaatggggcagctccaatgtggtttatatagtctttaaagtagtcctaaagaggaagggtggcccctgcactgatatgctcaaggctccaagcgcccatactagttgaaccactagtactagtctcaccactggtcctcaagttgctgcttgcaaaacgtgcagggggtagcaactaaactcaccctctcgtactgatcttacttggcatgattgtccaagctcaattccacaggtcttcagcatctcgtctgtgtagcctgagatagatcgcaccttcaattctat

SEQ ID NO: 402544 - DNA, 933 bp, Cannabis indica
agggaacctagtttttcctatttttgcaatatttagggtattctcatgttatccatcaatagggaaactttagtttcaagtttaagtccctgaaaagtgatttagcatgtcacttatcagttttgtgaataatgtgatttaggggcctgtaattcgtcgagcagttgttccactcgggttggccgacatacctgaatttagaaacgaggtaagattagtataatgattacataaatatatacatttttaacgtacattttagttgcggtcagaataacatatcagggtatcagtgaggtatacatagagttgcatcgagataccaatatacctatgttaggcatatcaatagccatcagattagcatatgagggttccagtgaagtgtacatatagtttcacagagatgccaacaaatatatgttaggctattcgatagtatgaattaactacttccacattagtacgactagactactgagtataggctggattcccagttagtcatactttgtcgagaacgttcgtgactcagttagtagattgtgattaggtgtatgggcgcctggttgcggtctgaatatatgtttatgtttacgattatgcttttcttactgagtctatcgactcacagttattacttgtatgtgtaggtaaaagcaaggctagggttgagcagccgtgagggcgagcatatgaagattgtacatgttggggaggttgggcctggagtgtacggtctttgggacaactgagcatattttgtaaacgggatcccagttttatataaatatgctattatgatatatatatatacaaataaagttttaattattcacgaatttcaataaactcgttgattagcaacgagctgcacagttaagttaaaaatcacattaacacgcctaaactattagggtgttacaatttggt

SEQ ID NO: 402545 - DNA, 1098 bp, Cannabis indica
cagaaaaaaaaaacaaaaacaaaaacaatggcagtggaatactctgttcacgaatactacaactcagacgacgataatggcgatgcactctctttctgtgatcttccagtattggacaaagatgacaccgagctcgacccttttctccactccaaccaacgaagctgtacttcttctccagagaaccacaatcatcacgatgatgatcttttcgagttttctgtcagccctgagacaaaggatgatgaaagcattattttttgtggagttcccattatacccccgaagaaggctgaacacaacaacaataacaagatcaccatcaacaataacagtactagtagtcgacacacgagaagcggtcgtttcatccgaagatcagagaaattatcatctgacggcgtcgtttcgaaccgggccagctcgttccgtttcggtaatgggaccaataagagacctagtaataataataataataatttagcgggcattgggagcttccggtgccgtggtgaaggtgcaggagggtttcggcgaaagcataataaggtgataatgggattggtgaggttccaggcggcgccaaagatggagctgagtgagatgcgaaggaggcagagccggcggagtcctgtgccgatgtttccggttgaaaatggcggcggagaaccaaccggcaccggtggaagtcattggggtctctttaggcctcttcggtgtagggcccacttcgttagcgcctggaataaggcctcgtttcgttgtttgtgaatcatacgtagtctcgttgagaccggagagagaagtcaaaaagagaggaggaagaaatattttaagatcttccagttccgttgttctattacttattttctatatgattttatattgtgttcatttttttttgtctaatgaatctattacatgcccttattatctttttaactataataagataataaacttcgactcctctccaatgtcaacaaaaaaaaataataataataaataataataaaatttaaattaaaacaaatctgattttgttaaaataagtgttttctataatttttttttcagctttaaaattttgtgttttaa

SEQ ID NO: 402546 - DNA, 548 bp, Cannabis indica
catcattcctcacatctccaattccagcctcaccttgcccaataccaactccagcattaaagagatcatcatcatcatcactaccatccccataatcatcatcagcaatatcatctcctttgtcatcctcatcttgagcatcattaccttcctttaaaattgactcttcatcatcatcatttttagaagtgcggagagcatcatcagactgagttctagtttgagtatgagcagcatgggagaaatgaaaaacaaaaaaaaaaccaaaattataattcataactaacttaagaaaaatagtaaaaaactattaaaataatataaaaaaccacaaaaaaaacatgaacatcacctcaataagaatgtccagcttcttgatcatttcagcaaaagaatttataaaaatatgctgctgactaagaacaacagacatattttttttttcaattcctcatactcaagacgggtgacatgctcatgagcattcgataaagatgcactgtaacaccccgatttcccgagatgtcacataggatagtccgtataaa

SEQ ID NO: 402547 - DNA, 584 bp, Cannabis indica
taacctaattcctgaaaacctaacaaacacgcgaaaaccctaattcttcaaacgattagcagaaatcagccatggaaatagttcgaatccctagaatcgaagaaaaccccccgaaaagaacaatttagtgagacttttttgaacgttttcgcgggaattttctgggaacccaaacaggaaaattcggaaattggagtttttgaggtttggaaaaatggaaaggtctctctctttctcaaccaatctaacactctcttgtctgatttggtttgaagatagggcaactagtttatgatgtgaaattacaattttgccctcaaacaagggggtggcaattcgtgttcgtatgttctgtcgattaacatgaatacgacatttataataatagcatctctaatggttaaattttagaaaatgctcgcttatgtaaatttcttatttgaacgcgaaaatattatatcattaaagttaaataggtgctattatagaaaattgtattgaacatgagattgatgctatctttttttaaaaaaattaaaataaataagtagtgtgacaatattataataaaataaataataatt

SEQ ID NO: 402548 - DNA, 1254 bp, Cannabis indica
gagttcgttgagttggattggaattggctctcagatttatacttttaaagtatcttgaattatatataagagggatcaaagtgagtaaagtaaaacatgaaacttattattcttgtcttttaactcttgtaaggaaatagagccctttggtctcatgagatgagaacccttaaagtgcttgttttatttgcaatttgattgtaattgttcttttgatgcaatacaaggatcttatttatatcaaaaaaaaaaaaaaattgttaaacaattatagttttatgttggctttttatttatttagtttacattgaattactttatatactattttttaacttttctttttcttcaaatttacggcttaagttgcttcggtaatttctatgtgtgggttgatatatgaatattagatgcgatttatatttctctgttggttgttatatgagtttctatgtagatttacgtaaaaaaaaaaaactgttttgaaggtgtaaaattgcaaaaaaaaacttttttatgttagttttaaatattttgttttatttttatattaataatataaactgagcatagttgaaaataaatcttaaaaaaagataagttacttagtttgaaaaataaatcatttatttatatattttatttctacttctacaattatattttaattatttgatcatatgtgttaaaataaaaacattatctttccaaaaattattaaatattaacacaaaaaataaattaatgaatataaaaatgaataaataattaaaaaatcaacaaaattacaattatttaaatattaagaacttaatgtttataaataataaaattttgggatcactttaccaaaacttatatgcctagggactaatttgcaataaagaaaaaaatgatgatcaacttgaaaaactttaagtacaaataagtctttgttaattattgctttatttgtaatactgatttttttcctttaggactttagctattaatggagaatattgtaaagagcttgatatgtgtgtaagtttgaccataaaaattaatagcttaatttgtgagcaattccacttgttatgcgggttgtaagtttgaccttagttatgaattattttttgagtattcaaaatagtttatgggttaattaatatgaaaaatacaagataatataacaagagttagctaattatgtgaaaaattactaggagtaatcaaataaacctatggctaacccaataacgaaagttccgtaag

SEQ ID NO: 402549 - DNA, 659 bp, Cannabis indica
gatgaggaatggcttcagaatttatttgagaatgagggacgtaacatttcagctaccacaagggtccccgccgaatttcacgcccttcgcttgcacgctgagcgccgccgtgataaccgtcggatgcaagcccgcaaccggcgggcctgggatgaggacctggagagggagcgtttggctaacgagaggcgaatggaggaatgtttaagggagggggctcccttttaccccctggcttccctacgggttgccgtcgttgcctgaggagggttgttcaggggtctatcgtaatcccgggttctctatgcatactttgctggcaccatcccgaccgcgagcacttctgattcctaagtttaggttttgttagctgtttgttatttccttgtgcatggctttcgtttgtatacaatcgctgtttattatgtctctttttttttatatatttttagttatatttgtgtaacctgtgtttgggttacgatcttttaatgggtttgtatttattactctcggtgtcccttcctatgttttgtgtttgtttcatataaggttgggagaactgcggctatgttaagtgtatttattacttatcatttatacatatatttatacgtacttattccgagttttttttttttgaatggggtgctttggaa

SEQ ID NO: 402550 - DNA, 1174 bp, Cannabis indica
gttaggtaccttaataagtgtagtacgagagaaatactagatacttgttcactggagtaagtaggccaagtagcctattagttagccttaactcctgcgttctccggagtatacaatttgtttcatgtctccatgctgaggaaatatgtattagactcgacacgtattctaagttgtgatgatgttaaacttcaaacaaatttattatatgggaaaaacatcttgtccaggttttggactagaaaaaggaagtactatgaaatgagacaattccactagttaagaaagtgttataaaaaaacagcaagatagaagcagcaatttgagagttagaatcataaatatgggggtaatatcccgaattgtttaaataaatttcgaggacgaaatttttataaggaggggatggttgtaatatcccgataagtctaatggtaattaattagggtttatatttatattatgtgttaatcaggtaataagtgggattatgatcctactaatttatttcagcataaaatttaaattttgctataagtgagtaaataagcgtaatttataaattacggagatttatatagaatgtgtgaatgtaatatgagctatatgtggaataaaaatattttcaggttcggtgaccctgaagacctgattagtggataaataggtgtaatttgttaattacggagatttatttgaaatgcgtggatataatatgagttatttgtgaaagaaaaagattttcaggttcggcgaccctagagacccgattggagaccaaaaatattacaacaactttagttagaaatattgatgagattattggaataagttgattttagaaatattggggtattttaggatactcaaagttggccaaataccttaaatatagagatttcttagtggctgagaaatcatacgataactattaataataaagtttttattaatattattattaataatattatattatattatattattattattattatcaaatatatataaacgaaacagattgtttcgttttgattatatatatattaagtttacatataaacagaaaagaataaacgaatgaaccctcgttctctctctttcgataaaaccttctccctctatatccattttcttcgattttcaatatgaaacttagcgatctaagctc

SEQ ID NO: 402551 - DNA, 1128 bp, Cannabis indica
agaagtacacgtgttgatccaaccgttgggaggcgcatgagcttcactcaaccttaacctgtgcccatcagttcgagaagatcgtgactgtggccgggatcaagccttttgcctctagggtcttccaccagttgttgcgagatgaggagatgcccaaccgtaactacggtggttttggagcttggagcccgactcaccttatgtctggagctatgctaccactctaggattactttataaactttttagtttttgttggccttgtgccttatcaacttattccccaagcataccgcctgcttttaggcttgtttattttctatgtagccagaggctgggcttcacctagcccggccgaaattttgtacttttatgaactcgtgtctgtccccaagaagggggatagacttaaagatggtttcttcacactccgggcccatcctgctaatgagggttcggttccttttaattttcaaaagaatgtaaaggagtttcgtcaccgatttttcttgtcttccggtttccaagtcgtagaacgtccaaaactgctcatggagtgggtcagggttcctctgatgcaccgcactgcaccgcccctacccaactcatcctccagcatgccaaggtcttctccacgtaagacaaggacgggctgaatgtggagaacttagttacaactgcaaattgcaggagggctaagctaatcacagagagccaatcggtggatgatttcaacttgtccaaggtcctttgtccaaacattcgcagttcgatctccgagaaggcactccgggcggacattatcgcctccgcggaagaccggtacaagaagtacctctttaggagggaacaagagttggcttatattaaggctcaagccgctgccaggagggctctttgggtaaaagctggtaatgagcaggcaccttcccggcctaagctaccgttctcgattcccaacactggggctcctggcgccagcacctctgggtccggtaagtctcccttagttgttcatcatgtcccttctgctcaagattattctcgatgtaggcctgtagagtttgatgaacgtctccttagatttagaatgccccctacccgatggggcgatcatgccaagggttt

SEQ ID NO: 402552 - DNA, 707 bp, Cannabis indica
tccattcctctccaatttagtcaggaccgagatcatctcacatggaagggtgagatctctgggtggtttactgttaaaagtgcatatcgtttagcccaagagattaatggggaagatggtcaagatggcgatgtcgctgcaacattttggaaaaaattctgggcagtgaaatcacctccgaagatgaaaaatatggtgtggagggcctgtcaaggctgtcttccaaccatgacacagttgcgaacaagacatgtggccgtgtctctcgtctgcccagtttgtaacaaccacgaggagacaactttccatgccctcgtgtcttgcccagcagctgctctttgctggaatagagtcggcattggcacggtggtaaaccagcagcaggagaacttttttgactggtgttcctcggtttttctggtgttagatgcagatcagaggagacttttgattgctctttgttggtctctgtggaatgcgaggaatgacagagtttggaataacaaattggtaagtgttgaaagtatagtgttgttagcaagaacataccttaatcaatggcaaacggctcagaattctaatgttacatacccgaatcctggtctaattccaggtgacggtgctgagcaatggcagccaccatatggagatagttttaaggttaatgttgacgctgctatattcgcaaacacaactcaatttggttt

SEQ ID NO: 402553 - DNA, 626 bp, Cannabis indica
ccaattctgttataatcctaatactcttaatatttttagagttaattatatttatatatattttataattacatttgaatataattataatttagcttcttactcaggtttcacatcatccatctgtgactgcactttacgcaacagataagaaagaaaatattcagctcttatggtgtcaatatccagttgcaaaattttctggtacgtgtacattataggatagttcaccagtaaataaaatattttaattctaattttagtattctaaattatttagttttttttttaagaaaactatttatgtaaaaatataaataataaaataaataaaaaatagacattataattattaggactaacaatttgtatttttgtatagatacaattatgataagacacaattaaagtagattcgaacacaaatacaattattaaacgtgtccaaaactaaaactcgcaaacacaatatgattaatttagcaggtcataagatagtgacatgatttaacaaattaattcagttaattagtgtgagctgacaagttagttaattaaggtagtgtttggttgggaggtaatgaaaatataaaaataggaatgagaatgtgaataggaataggaat

SEQ ID NO: 402554 - DNA, 704 bp, Cannabis indica
agtatatatatatattttgttgaagttacaaacaacttaggtgatacaaaactgacataaattgatcctttatgttcaatatattattcagattactttatattaaacatatattttttataaaagataagtttaccatagaaatacattttctttaaagggaatatactcatttagtaccttgtgtttttatgaaaaatatatttggtatcctatgttttcaataatacttaattggtacctcatatttttaaattgtacatatttggtactgttgcccctgattttgcccaatatacgtggaccaactagacaggaacacgtggaccaaaaggccttaaaactcaaattaattgttaagtctttatgaagaaaggcagcatccgggacgtgcctcccggagaaggcatacaaagtcccctatgctcccggaggcctaagtagcatcaaaacatctccgcgaagtgtcagacttcccctgagcagtcatctcgcatttaatgccgcatgggaggaaacgtgttgggactgccacacgcaataaagtctgacgacacaacccccgatctgcacctacaaggctatgatcacttaagtctattgacggctacactgcgaagggtcacgtcagtcaaaagacaataaggacattccacataaaatccctacagcacctagggatttgaccatgcattacccatggt

SEQ ID NO: 402555 - DNA, 1189 bp, Cannabis indica
cgcccgcggagggtggacactctcggccccgagcccagacttcgggatcccccccgaggtgaaggagtatacagtgcctcacgacattgtgttgactccgatctcggggggatgaggagaggtagaatctttggatagccaaacataattacgccctcgacgagtacacccgggggcacgctgaggtgatggccttgaggagggttttgcgagaggaggtgcaaaactctcttaacgaggagaacttccggaatccgtgggatctgaacatggaccccttgacggactggttcaaccgtttcctctgcccaccttggccccttttgcctccgagatgaccagtgagtacgtctcccagctgactcggtgtgcgcctaaacggtacgctacttgtgcatccttgaactccgtctactaggctcaggacatcagccatgccttggctgcggtaagtactttgcaatttatttctttcctcattattttacttaaggccttcactcactcttacttctttgtccagattactgcagaggccggccgcctttccaaaaccataattaataatggcttcgtcttgtccgaatttgggggcatagaagaagttgtgaagatcctgcaagacctgtctgctgaaaggcgggcgttccaggaggaggctgagcggaaggaggctcttgctaaggcaaagttcgaggaagaggctaagcaaagggaagcccaggcggaggcgatgatttgagaggaggtccttcggagggataggctggaggcgaggcaccgggaggcgctgagggcggagggcgaggctactgccacggccaaacgcgagcttcgggaggccagggaagccttagatgagatggccgccaaggtgaggtccttagaggaatataactaggcggacttggaatccaaggccaacctagccgtggagattaaggagctcaaggactttaaagaccaagccttaaaataaggctaagagagatgagctcctctcccctgtttcctgcagccgctgcattaagcgctttgatgacggcgtctacatggcctggtcgacaaaatggccagaacatcaagccttgacttctaccccaaacatgcgaagatgattgccaaatttcgggagaagaagaagaagcttgacgccatgcttgagcgcgtattggtcctcgccttcctc

SEQ ID NO: 402556 - DNA, 1623 bp, Cannabis indica
ataatatttttatcttttcaaaatttcaaccatataataaattaaattcatagaaagaaaaaaaaaagaaaaaactatcaagtttatatttatctataggtaaaataatttctaacaactacattaaattataggccataattataataagatatttaaaaagaaataaattaaattcacttcaagtaatatttatgaaaaaaattatttattattattatcgaaattaattattatatcttgattaatgatttttcttcataatattaaaaatataattttgattaaagcaagataaatatggaaataaaaacatgataagagaagtaggaaaatagacaaaatagataaacttataaaatgttagatttagaaaaaaagtttaaataatatttatgtattaaaatttttttggctttagttattagttattaagtttatatgcatttatagttgtttcttagaaaaaaaaaattaataataaaaactaagtttggtggtttcaaactcaggtcccaagaaaacataatacctgccactatttaggctgccattatgttgggtccaacttaactatatttaatgttaattttaattaaatatagtaattaagtaattaggtcttaaaattttaaatgggcccctagaaagagtgggccctaggcacgggcctagcccgcctatgcctagggccggccttgctttctacgaatgtctcacactcatatctcaattctgaagatttcaattcaaaaaattgccccaagtcgaagtgcgattttgtccacgacaagcctaaaaacgattcgacgaacgcaagtcgagctctaaaatttgacgataatcatccggagtcattctaaccattagatcacatcaatggtcaagattagcttagaatgaattttcatatttttgtatttcgttattaatattttaatggacctccatacctataaaaggataactccactaactcaccttttacatttttctaagtctccttaaggttagagcatatttctctagtttttcgtgagcaataaaaactcgaagtagacgtagctctattgtcatcgcaacttgaggagtgaactactttaaattgtggcgtctcttttatttaatttctttcatctattacttttctcgccaatcaagcgagacaatggtgatcaattttcagcgtcaacagtaatcttattctcattaattgaattatattatttggttgaaaacaagaatcttatatattattttaaaaaattaaattaaatgaaaaataatttcttattatatctatttaatattaattatacataaatacaagataattattctaaaaatatatatttattaattaataaatataaaattttaggggaattaccacatatactattttttaacttttttttctttttctaaatttatggtttgcgttttttctaaagtggttgcagtgctagttgcaataggagtttctgtacgattttttgttacaatttaggttgcagtgctagttgcaatatgggtttctatgtaaaatttcgtaaaaaatacaaaaaaaaaaaaaaacaaaaaaaaaaaaaacaaaaaacgttaaagttaagtaaagtaaaa

SEQ ID NO: 402557 - DNA, 533 bp, Cannabis indica
accccttccataagtgtccctcccaaacgcccctacccttaacccatccaccaccaatctgataccagtcaatcacccacgaggacaagtcctgcaacaagatttctctttccacaacaacccaacaaactactctgatgctgcagggctatttctgagctcaggccaaaacatgggaaatcctccactcacggatcaaggagcaggcccctccaacttaggtccaatccattcctttgctccccctggacagcatcaatccctcacaccctcagggccaaactttgtagctcttttatcagtggccagtggtggaaacttatcatgctctgtctctccccaacagtcatccactccagggtccagaggctcatcttccccatcctctagccagctgcaagcccccctgatgatttccaactccactgcccaactggattcgctccctgtggaccacattgctgacattccctgtgacacgtcagtagtcccgtgatccgtaaagggaaacaccgggtaagctgtgcaatccc

SEQ ID NO: 402558 - DNA, 690 bp, Cannabis indica
tgttatgtgattgctggctccggaatccacgtaccaggctgtgtcttgaaccatctcaggagtagcaacaaaggctgaagctccattatttccactgttattgttctgaggccctttgctgctgctgttagctccatttgggtctgaacccatataggtttcatcgtaccggttgtaacaataagcagcactgtggccatatctcccacagacctgacatgtgggcttagagttgttctggtttcttcctcctcgacctctaaatctgcctgggcctctgcctcctcttgcttgacttgaaataccacgatttccttgaccatagttaggagcgtttggagatctatttcctggaaaacctgtaggtctagtggcagcaacatttgcagaaggagaaccagatattggagtttttgaggatccggagagtgtggttaacctgtccaacttgctgtcgaagctcaaaagaatgtcctgaagttcttgccaggtagttgagactcttgcttcaacttgaagcactattgggagatactcgatgtcgagtccagagagaacgttggatacgagttgtttctctgggtaggggtcacctgccagtgctagaacatcagaccactggcgtttttgccgtagataatctgccatggacagatttcctttcctgaacgtttgtatcttcgtccgata

SEQ ID NO: 402559 - DNA, 886 bp, Cannabis indica
tttttattaatattttatattatttttttgtgttttgtagtatgttagtatcatttatataattttttaattaagttatattttgtataataattagtatattgaataataaataatgtatttatttttattaatttatttaaataaatgtatatatacattattctaaataaatctattacacaaatattttaaaattagtccaagtgtttacaagttattatctaactaaatataaaaaaaataaaggaaattttttttacaagttatctaattaaacatagagaaataggggaaaaaattcttataggattcaacaccattgcaagcgttggtgaatcactgcaagtcttcgtgaatcaccgcaagcaattgctctatctgttgttgttgtaatggtcaactcaatttttgcatcgtatgtcttcttatccccaaattgtaaacagaagtaaatatttttattagtatatatattagaatgtttgttaatataataaataagataattaatagttaaaatttacagttttcacatcggttaagtatttgctaggatttgcatgtgcgactgataaccacattcttagtttttaggttattttgggcttttttgctactgatattcttgaatttgccccaataaacacattttacccccccctaacttctcgcatgccctgttttgaaaattatgtaaagtgtcctttagatgttcttaatgtctattaattcatatgttacacatctcttccgaaggttatagatgccttcatcctagtggcgagaatttatgtggctcgcaatgtcacatttaatgtaaattgagtttttcatacaaactaactacttcactaagaatcacctacctcttgctaacctgctc

SEQ ID NO: 402560 - DNA, 363 bp, Cannabis indica
aacattattttttttataaaaatgatttaatttaagtactatttataaaaaaatttaaattcaagagaaaaattagagtttctcattctcaaatttatagctattgaaggttgcaattttcttcggctaggcctgctggccttccctaggctcaggtgctgtttggtcgagattgtgttttgctattgtcatttgatttttactactacaattagtcttatctatgtgacatggttttgaatgttttagtaatgtctgtgcatgtgacatggttttgagtgttttaatcttgtctatgtgacatgattttttttcgttattagttcttctttgttcttttatgacttgccattacatcgtggt

SEQ ID NO: 402561 - DNA, 505 bp, Cannabis indica
tttttttttcagaatcggcccagtagacgcggctagaagtgttctagccgcgaccataagaaggaggacagagagccatttttttcgaggttatctcgccgcggccagaaagagtgtcgtcgcggctatagtggctgggaagagaggctatttttggtggttatctcgccgcggcgagaagaagtgccaccgcggccatacaaaataggcagagagggatttttgaccacctatcatgccgcggcgagcccactcatggccacggcgagatttgtctgacgggtttaaaagccaaaatatcaacaagttttcaaaacacaaatgtttcaaatccctaacaaccacctctgaaaaacctctcttcaaaacccatttttgttcatctcatctcattctaaaccattttttctttaaatctaatcacaatctctcatcccaaatcatcctaaatcaatattcctcgcatcaaacactctctccctttcaaaatcaaccccaaatccct

SEQ ID NO: 402562 - DNA, 541 bp, Cannabis indica
aacaaattattgaaaccatgtatgatgctgatgttgtttcttcataggtggatagtatagaaaaagtacaaagcatgaagagactaaccaatcaataacaaaaaactaaatagaaccataataaatattctaaaactagtacctaaaaccactactatagaatgtaagaacaaaattgtgtggcctccattatattttctaactcacaaagatactatactgtgtgcataagtaccaaggtaagaggctcgcagttgttatagaccaatatgctggaccatcttactcttggccttgggatcataaaatgacagactaaataagcagggttcatcaacacaactatttgattcagtagccacagatattaagttggttaaccaaatccaaataaagatatttacttcaagaatcacacacaccacattccttcatcacccattctaattttcgctctgtttttattcatacaattaattagttaataataatatatataataggtcgatcaaataagtaaaaaaccatcgctatatcgatc

SEQ ID NO: 402563 - DNA, 816 bp, Cannabis indica
tcaagaataacatcacttaatccatatttttccaacataattcagcttgaataaaatagatcaaagttgaagaaactacctcaaaatcacaccaaaggcaaaaataatgatttccccaaaaccaagcttcactttaatccaatctcaagcaatttcaccaacaaatttcaagagaaatcaaagagggctagagagagggagaggggttgggtgagagagggataaacaccagaaatttctaattcatttcccttaaaattcattttattaaacataaatcaaaggtccaaaaagaccattttgcccctagggttaataaagcttgcatacacacacaagggcatttaagtcatttcatgctcatttaaactctaataaatttcagattattctcactaataattaaaatgccaataattaaatgccaattacattttgggcccgaaccccgttcggcccgaaatacccggttgtgactataccgcgccaacctgtcagaacacacttgaaaaagacaacacaggtatactatataataatatagtcccataagcaagttaataaattaatttcatctttttacacttctcgggtcataattacgaaaatgcccctggctcaccaacgtggtcttaacatataattaatcaaataattcatattaattcatatatactgaattatataataatgtaattcctcaattattcatcattatctaattagggttttactaatccattccttaattctaggtattacaattacccctccttatagaaatttcgttctgaaaatttacctgaacaactctgg

SEQ ID NO: 402564 - DNA, 630 bp, Cannabis indica
aaagaattttcttgaaaaacgtgccaaactaaaaattttatattaattaataaactttataatatattaaaatatttacaagtgtcaggatcccgttttcaaactttttaaacttaatattccaaaatacaaaatatacaggtcgcacagcgactacaaaatacaactcccagatgtccccagaccaaaccctccaggtcgcgctgcttcgtcatgtacaatctcatcccagcttaggttcactcctgttcagcttttgcctttcctttacccacacaaggaagcagaactgtgagtcgacagacttagtaagaaaagcatctaacatatcatataatttctgacttgtacttacgcgcccatacagctatttacaacgcttaacagatgagtacgaacgttccatactagggtatagccattataccacatacactacgtaccacaatgtacgagtgatggtagggtttgttcataccctgagtacccttgagtgatataccacgcactcccagtacctctccgtacttatgccggtatcacggtactctcagataacattcactatacgaatgcactctataccataagtgttggtagtgcaaataaaattttaagcatgcatataca

SEQ ID NO: 402565 - DNA, 875 bp, Cannabis indica
ttgtttgcaatatgtacttcaactaccaaagggtcattatatgggaagataacatggctggcatttgcttcggtgaatgttattgttggttcccctacacgtggtatttaaggtttcctttcttccacggctagaattgtatcattttgttcatactaaaaggcttgagcataattttctctagctttacccgagtctcaagcgaggtgcgggcccccaatgattacatgtagattcccatccacttgtggaggcattagttggttattatctgcatggctggctatttactcgtgattggtcttgacatatttttgagtgtgagttgtttttttgtaattaaaattcaagctcctgctttaaattgttacattcattcatgccatagccataagctgcatgaaaacgacagaacttagatgtatctcttttactcatatcctttttcatgggagagggtttcttgtatgacaccatagattgggtggttgcatagattgtttatatatcatctattaggactgagaaagcagtaaatttagaggcattctttctagaatgctattcggagttaccagtgaacttgcctttctttccattaccctgtctgttatcgttgttagacctctttccatttggatttgaactactgggatgttgtgaattttggacggatgcactaactatagcggtgtgttgctgattcctcttctgtcctactgtatccatacgtagttgtaataccatggatttatgaaatggattagcaaaaccctaactagattattatgaataattgaggaattatattattatataatttaataaataagaatttatatgatttatgctatgataagtgttgggttttatgc

SEQ ID NO: 402566 - DNA, 502 bp, Cannabis indica
acaaaaaacagtaaaaatataaaatagtcctgaagtggaagcatggctccggacataaggtgggtctgactccaagctccaaaaccaccatagttatggttgggcgtctcctcatctttgggcaagcggcggaagaccccagaggcggaaggcttaatcccagacacagtcacaatcttctccaactgatgggcacaggtcaaagttgagtgaagctcatccgcctcccaaccgttggagcgacacgtgtacttctcctggacaacgggtcccttcatcacttcttccagggtggccagggtaaccgctccttggctggaggatttagctccggatgtagagacagacatttctcgaagagcaataagattctgaaaaaaggaaaatccagcagttagcccccgaaccaaaccctaacgtgaaaagagggaatgggggtcccctaaccgttagaaagaggccccctccagatgtttgccaaaaatggaaattccagggattc

SEQ ID NO: 402567 - DNA, 860 bp, Cannabis indica
actcaagaagaacaacttgggaaactagagaagtttctgaagatgaaccactagatgaccaggcacctcatcaagaagtgccacggagacccccaggattcacaacccaggggaatggaaatcgtgatttaccagagtcttctcgcaaaaatgcgagaagaaggcaaccctagactagggaacaagaaatccctcgtgataacgagagagatcttgggactcaccctaggacaagtgggttgcccccgagacatcatcaatgtccttcttgcactgatagggaaggggaatatacaaacaccagtaggggcatgtatcgactcgttcccaaaggagaatgtcagtacatgacgaagcaacttctagctcgggatgtacaggatcccgagataattgtcgatcaatgcgaggaggggatggaacttgtcccagtaatgatcgagaaagtacgagcacgacaaagactgagagttactgtaggacgaggtctataagtaactatgacccacagcggtcagatctttatgagcaatggaactagaagaagcctgacttacgtcaacaactcaatcaaaagcaagaggatcctatcccattgcgaatcattgagttggaggacaagttcaggagataccgagatgaggaatatgggaaactacctggttatgactcggacgaatagcctgagcctttccatccaaatattatgagcgttgaattccctagggactaaaaaaccttctcatctcgtcatacgatgggactacagattcagtttctcacctctataattttaacacaataatgcgagctagcaatgttacgaataacttacgctgtatttgttggatatattttac

SEQ ID NO: 402568 - DNA, 699 bp, Cannabis indica
ctttatttatccacacatttagcagtagactacttttaagaataaaaaatcgagacatataataataggacttgggtagagttcaaatcaaatgtcgataaaagtaaattttgcgaaaacgcaatttttttacaaaaaccatttttctcaaagacacctaattggaaaaaaaatataacttccattaatctgagttctaggaacatatttaatagaaaaagtattttgtaagaaattatagtaaatgatgttaaattatagaactatattagtaaatatttttattttaaaatttatagagaaataattcttttagactatttattatttatattgtgttttgccacataaaaatattaataatttttttttttataattagaagcaaattacttaaagattatgatatatctatattagttttattaaaatcttttttattgaaaagttatgtcgattttatttaatttttttatgagtttttgtgggtcgttgttatatatattttgttgtatgatatattatgatttataaatgatatttattttttatttgctacctggtatataattttattagcataatacaaatattttaaggaataattacataaggcacaattttttgtaaaatatttacatttttacgttcaaataatgttttttttacatttttgcagttttctaaaaaataacacga

SEQ ID NO: 402569 - DNA, 548 bp, Cannabis indica
aagtcgctatttcaaaactgtcactttaatattcttttccattctttctgtttacgtgtatatgtattaggggtgttcattggatcacatccaatggatttggacccatccgatccaatccaattatttattggatattggatttttccatccgatccaatccaattgaattgagtcatccgatccgatccgatccaatggatgtattggattggatcggttccatccattggatgctttaactggttttttattagattggattggatccatccaatgaatcccatggatgaatccaatccattttaaccactatttaggctaatttcattaaaaaaaatatatatgaaaaaatataatttaaaacctaataaataataaaataatatataaaatattaaataaaataattaaatatataaaattataaatattaaatatgattggatggacattggatgatattggattggattggatcggttatccattggatcggatgtctcatccaatatccgatccgatccaattggatttttaaaatttgc

SEQ ID NO: 402570 - DNA, 511 bp, Cannabis indica
actggttacccagcctcattgtatcccctaaagtttgggggtgcaacctcctcctcttcctcctcctcgaaaggactaccaagacggacatcgcccaactcctctatctcctagacctcaacgtccacttcgtgatccccctcgtcctgtacgggtggatcctattcggctctgggtaaagtgacgtgctgggccacgtgaggatcagatgcgtcaactttacacattgtctgtttaatacgagccattatcccgtgactggataggaactttgaatcaaaatgtccgtcacttgaagaaggcaaactagaacaaagacgagatgatcctcgtgcaagagttaaagtagatcctggtcgatttggtgttcgcttccccaaaactcacctgggttcatctataaaagacaacacactagatgagtgtttggtcaggatatcgaacattaaatagccaaatatgtcaactcggagtactcaacagattaaagaataaaaatattcgacgaaaa

SEQ ID NO: 402571 - DNA, 585 bp, Cannabis indica
cacaagaacatcataaatatattcaaattaaaacttagcatttagtcattcatactcaaccatgaaaatagaaataggatattaaagttctctatagtaaaatcaaagtcttccacaataggaataaagttctaaagatttgatggaaaaaaaaaagttcaagacataaattaaactagcttcatccactccaaaagatgacaaacctacacgtaaatgtaacaaaaatattaataaataagtaatttatacacaataaaaaaaataaaaataaactacaactaatatatgatttatgtatatacctcacaatttcttaatcaataaccacagttttcattttcttattctcctttgatgttatgtttcttttctctgaattatctaaaattaaaaagagaaacttataaaaatatatttgtaaataaaaataaaagaaatagagtaatatatttaccttcttcaagaaagtcatatgttggattaaaatcctattgtgggcacatatgtataatgtatatgctattataaagtgtgatataaaattaagtgaacaattatagttatgggtatcaaaagggtatt

SEQ ID NO: 402572 - DNA, 1054 bp, Cannabis indica
aaccaggtcaaggtgggggcaacaacgaagtccctgctcgggtagttggtcaagaacaccaaaaggcccctgtagtggtgccaccacaacaagaagatttggtgcaagaagttgctcgtctcagggaggaacttaagaagcaagatgaagagcttcacaactgtaaggaacaacccaatcaaggacaacatcgatttttgccggtgcaatacatgcctgtgccggagggtcaatgggaaccaatatatgaaaggttccgcaagcaacacccaccaaagctcatatgcaatggaagctgaggaatggttaagaacaatggaaggtatttttgagtacatgcggctcggtaacagagatactgtagcttgtgctgctagtttattgaaaaaggatgctcaaatctggtgggacgttattaaacaaacatgggatgtggtcgcaatgaccttggctgactttgtacaagtttttaacaaaaaaaatactaccgtgaagcaatacgctcaactagagttaatgagttcatgaacctgaggcaaggtaagtctacagctacagagtatgctcaccaatttgacaaattagcaaagtttgccacatatatggttcctactgagtttctaaggattcatcgctttactgaagggctcgaatcccaaataagtcgggacataacgatgttgcaaggcaacacgtatgctgaggtactaaaaaaagccctagaagctaagttgtgtgaaaatcgtatacagaaagacagtacggctaggtgggaggccagaaatgccagtaatggaggtggtgatagcaaaaggaaacctccaagtaaccaacacaacgaagccgacaagagaaacaagacgaggtccaataactacaaagggaagaaaacatatgtggagtaccccctatgcccaacatgtagtcgtaagcatccgggagaatgtcaactgaaaggcaagacttgttacaagtgtgggaaaccagaccactataagaaggactgtccgcaaaagggtgatcaactcaaggatgacaaacttgtcctagcttg

SEQ ID NO: 402573 - DNA, 820 bp, Cannabis indica
ataacccgaaagagctttccaagtaaaatgtaaaatctttggaggggctttaagcttccacagcatctttcaaacatcatcttccatggatgagttccaactaccattgaccgactgtaagtgattataggagcttttgacagtaaaaaaaccagttggatccttgttccaaaaccaactatcactcgctagattaacagtcaaaggcacctatttgatgagctcaacatcacgtggatcaaacaagtcctcaataagctccaagtcccactgtctactatctggcttcatgagttgagacactttacaattggctagcgccggatgattagataccacacacagattagcctcagacaaaagccaaggtgtgttaagcacctcagtagatgaaccaagtcctattctcctccgggcacagtccctaagcaacgcttgtgactcaaagacactgcgccatataaagctcagattgccactcaactcggcctctaagaatgaacagttataaaaatatcgagacttacatatccgacccacaagagaatcctgatacagcagtaaccgccaaccttgcctacccaacaaagatagattgtactcacacaggctccgaaaacccatccaaccagagttcttatgtttgcatagtttcctccaactaaaccaactcacacccttcctactactcgaactccaccaatacttagacatacggctttccagctgtgaacaagttttcagcggcaataagaacacagacatagcaaaacttggcaaagcctgtgctacagtttttattagaacttcacgcccagcg

SEQ ID NO: 402574 - DNA, 684 bp, Cannabis indica
  modified_base (29)..(29): a, c, t, g, unknown or other
atatatataatatatatatagatagaatnagttaaatttttgagtgatgatcagtactcgacccataataaattgttacactaattaaatcacattaattattagcacacctattttactctattactacatgacaaattagctaaagaaaaacgtcctttaaatgagagagagaaagtaaaaggaaaagtaaagtactaaatttcaactgctacaactataaattaaaaatttatagttgtaggaaagagtcttactttaaattagttaaattatgaataagaataacgacctaattctaattatttgtaacgtatgaaacaaaaaaagaaagaaataaaaaaaaaaaaaaaaaaaaaaaaaaaaaaaaaaaaaacatggggacaaaaatggggaccattttattcatatgaagtgggcggatttatctatatataaatataaatttacatatataatatagaaaaattctatcatatactcccttaaaatagatatattgatgcacctctatctgttttagtatccgaaataaatttttattagtcaaattttttctcatggtcatgtacgttataattatttaagacatcctgcaaaattttaaaaaattcggaaaagtttaacacgccgaaaactatgttcaaacagtgtattgcacgcgtgactattttattttacacg

SEQ ID NO: 402575 - DNA, 955 bp, Cannabis indica
atcaaataattaagctaaaaataaaatgtgagtggtctcaatttaatattatcaaaattaatatttacttgtaatgttttattgaaaaaaagaatagtgtaaaataaaatattaatttaatatttaagagtggtgtaattcaacaagtatagtaatttaatatttacttgtaagtttttagagaaaacaaatagtgtaatacaaatattaatttaatatgaataagtatagtaaaattataatacaattataatatcattattttattataattgtgagacctacctttaatatatatatagtatattgtatatgtgttgaatatgtaaataccaactctttatcattttttttttcatatgttgtatcaactcttattcattgtatatgtgttgtatatattatgattattatatatatatatatatatatctaataggtacataatccttgtaagggtacatgtggctttgcctttgaaaacgcctaatattgacgatgataactccgatttcgcttcttctgtggctaaaggtggtcgtcatctagtgaagaagaagtcaaaggttgattttgcctaaagaaaattcaactttgaaggccagaagagaaagtaagaagtcaacttcaaaacaactgtgatgaaactgtgatacaaaagttatatttgttgcaagccaactaacataaaactacaaaacaactaataattccacatatttaatacaaacaaatattacaacaatcatgttttatctgttcatgtcgcatatttgacaattactgagccctatttttataatactaatgatattatagtagcaaaaccattattcaactaacatgcaacttaattacaactaaaaatagttaaatatgaatagtgtatatagtaagaaactatttatcagtatttttttgtcactgattgataattacttgtaccttaatagta

SEQ ID NO: 402576 - DNA, 502 bp, Cannabis indica
ttttttttctaaaaaatattattttatgaattttttttcaaagaaaagttaaaacaatatagaaaaacaatataagctaactgattattctccttatagtaactgattactatctagttaccttaagggagcgtttagtataaggaatttaaaataatctgattaaggggaatatgattatctgtaaacttattactgtgtttggctattcatgataatattaattagattactgttaattaaattatagtgtttggttgaacacaaaaatcttatataccattttggaatagtaaattaaaataaaataaaataataattattatatctctttcaacctaattataaatatagtaaaattattatttgtaaaaataaataaatttatttacaatgtatttgtccaactgatgagccagaaaccaaagttgcagtgataagagagcgatgcaatgttgaattttaaatgtatctaattacctttatttggtttttttttttt

SEQ ID NO: 402577 - DNA, 589 bp, Cannabis indica
aaaataaagatttaatcgataacttttgtaaaagaaatggtccaaaataatatttaccctaaacgactcagatgcaacaaagtttacgttagtaattgatacataaagcaattttctctattttgaaacaaacataaaactaattcaacctcaagctttttcagtaatatgcttgtttttatattcattgggaaataataggccatcaccgatgctggcactcaaaaagagagccaaaatgaccttattcgttttttttttttttttttgtaaatcaaaatgaccttatttattatcacaaaacaaccatatcattttttactttttttttttaagtaattttacataaattactaaaaatttaatgaaatgttacatttatacagctacaaataaattcttttccttattttacttttatattattttaaattttaataattataaatatactcttatcatattctcatttattttaattcactctgttcacttttcattctttatatgtttagtttattgtaattagaaataagaattattatttaccatttacattgttttgtctttttatttttaaaaaatttgt

SEQ ID NO: 402578 - DNA, 854 bp, Cannabis indica
actacttaagcttctatttatagattgataaaatgactaatgtacaaaatacgcttacgacaaattacataaggaaaatttgcacccagaatattctaattagattaacaattatcacactaatcggtaatgctcttattgactttccgaatcaaaaggcttagattggtatcgatcactgttcatatcacccaaatgttgtagtttatgcttacattgactatcttacagggtatttcaaccctaatcaacgaccatcacaattcaaaatattgaaattgaagaaaatattataattaagtgcaaaattcaacatatataatattaattacttataattatttataaaaaattctacaaaaaaaattattattatttttatgaactaaatcttaaataaactctatcttatcatgacgtatgtgtttgtatgtaataaaaaattctataattaatcgtatgcttgagacatttaattctttagcacaattattgagtttttatacctcatgacaacgtgacattttaaatggaatagattgaactcacagaattgactatgtctaaaaacgcttacgagcaaaaacaaagtactgaaagtcagggttgggtatatatacaattatttgcagtgggaccgctgttaatgccttgccgctaataattctaacgattattttttttttatttttttaatattattagcggttggggcccgccgctaatactattagcggcgaagtctaccgctaatagtttttttttaaaaaaaaaactaaataagtagaattagcagcgaattttggttccgctgctaatgctaccactattaagggcgaatttttcccatcgct

SEQ ID NO: 402579 - DNA, 581 bp, Cannabis indica
tttttttttactattaaaatagaaaagcatattaaaacctatgaattttcctaaaataattctcttttacatttacaactagacaatttactccctattcgcgaaacaatttttttagtattataataaaaaataataatttactaatataatatatccataagtttatagaagagaaacgtggtacaactagaaagtaatcaccattccaaaatgggcccaagcaagattcggaacggacccatgcccaccaaagactcaaggctttgacttcgagacataacactctttcgaaatccggaagcccgctccctagtcttttgggacatggaaggaatgaagatctcttaatgaagataagggcaggtctcacaggatgacacccaaaagcctaccacagattgggagtcggatgtctaccgcgggctggataccagatgtctaccgtagaatgacgtttccacctctctgacacaagattagattctatctcctgcaccagactattgtagttcacgcaccaccatataccccttttgtgtgacggctcccctaatacctttgtctgccacgcataacct

SEQ ID NO: 402580 - DNA, 543 bp, Cannabis indica
aaaaaaaaaaattaaaagttcaaatcgttgcttgccacgtgtataaaaaaaaaatcaaacgtgcaacaaaatatttaaatcttatttttcaaactgtaaagtattcaattagttctaaaaaactataatatacatgattataaaataaaatgaactaataagtttttttggaagccagaacaaataaaaaatatactaaaatgatcttttaacatgatcacttaaagcaaagatctgaaatatgacataaaagtccatcaaaattactacaaccctttctagattagatgtcttaataaggtggataggattgagataatttgaagctacatacacgttgcttacatccttctctaccgcaagccgtaaaccaactttgattgaattcaattcagcaacaaaaggagaatgaggcatatgaaagaaatcagtttttgcccatagaacatgaccaagattgtttctaattagcactcgtgtgctaaacaaattatcttctatggtattattctttaaacccccaacttgttgggttttatgccc

SEQ ID NO: 402581 - DNA, 635 bp, Cannabis indica
ctataaaactgcttttacttttcaaatttataattagaaatcaaaattttaaaaacaaaaaaaaaatcacttttaattatttttttaaacaaatttttttttcttaatcaatcttttagattacgaccagacccggacccaaatcccctccctacggccctggcgctaaacccggcttttgacttgaacccgaatccgaccccggacctagatccgacttaaataaaatcaaaaaataaaaataaaaataaactttacagaacacacttttgttttctgtttttaaaattaaaaaacaaaagtgattacaaacgcattttcgtttttcaaaaataaattttttaaaagcaaaaattttgcttttcattttgtgattaaaaaattaaaaacaaaagtgttacaaacgacacttaatttttaaatgacaaatttcaatttcccatttaaaaaatcaaaattctcatatttcttaaagcaaaaacttctaataatgtttgtttaattaaatcaatagtgtcataggtcttgttaggaaaaatatgagatccaaatggaagaaataaagataatgaacgaaaagaattaagggcccgtttggcacagcttttgaaaaagctaaaagctgctttttgaaa

SEQ ID NO: 402582 - DNA, 1281 bp, Cannabis indica
tactgtatttatcgcgaataatcctacttttcacgaaagaactaaaaacatcaagttaaattatcattttttttttgacgcggtgatcaaaatcacacatgattaaacaaagtagcaatccacaatcgggggagacatctcctcgaaccaggatagctcatcgtctaaccgaagggcatgctttgccaaaccatgtgcggcagaattttaaaccgagccacataagacaaagctgcccccggaaatttagacaatcaagttatgtcttcaaaataacaccacatcacattgaaaaaatacctccccatcattaataattgtctccagagctagcgaaactgaaaaaacaatgcaacaccaaaccaaaaatacaattatattagaatgacaatcttcaaataaaaataaatatacaaactaaaaaaattaacacgcaactcagatcactagctcaacattactaaaaattaaaaaaaaaacaaattactaagaataactagccaaagatattaccctttggctagtaacaaaatactaacacccaaatataaattgctgaaaatcaaaatcaaaaaattatatataaaattaaagttaggagtaaaattcctgttattgtaagccctccacaaaataacctgacaaaataacaaaaaataaccctattaccacacaatataatgaaaaaaagataatgtgatagaacaatgataaatcaatccatattaaatataaagacataaaaaattgaaatacttatctgtttaaagtgaaaaggtcgttgaagtagaaattatgagtacaaaagaaatcattcttttgccaattgagcatactacaaaattaccctaaacatatagggacaagccataaaaatggtacaaaagccataaaaggcatataaggaaaaagtaatgtaaattcatatgaaataaagtaaaaaatattaactaaaatttattaattgatttataaataaattgaaaaattaattaatataaaatatacataaataaatcaattacaaatataattaattgtgtaaatgttctaaataaataccaaaaaatcacaaaaaaaatcacctttcaaaactataaacttgtaaaaaaccgaacttagaaaatattatatacataaattattgttaatataattaaaaaatactaattgacagccaatcatataaagaatttttaaaagaaataattaataaaatataaaaggtaagattgacataaaattatttaagattttgaaatgtgaatgaaattaatataa

SEQ ID NO: 402583 - DNA, 682 bp, Cannabis indica
gggagtcctagagtatgtgcatgctgacctttgggggccaactagaatccaaacacatccatgtaaacactacttcctatctattgttgatgattttagtagatgtgtttggacctatttacttaaaaccaaagatgagtgtctagaacaatttaagatatggaaagctttggtggaaaacaaaacaaattacaaggttaagacacatagaaccgataatggtctagaattcatcaacactgagtttgataggttgtgtaatgagcatgggataactaggcataggatagttgtgaaaactccacaatagaatggagttgctgagcgtatgaatagaacccttttgagcaaagttaggtgtttacttcttagttcatgattgggaaagccttattggggagaggccttaactactgcttattaccttgttaataggagtcctaatagagttatagacttgaagacaccttatgagatgtggcatgggaaaatacaaaacctgaaacacttgagagtgtggggatgtacaacatatgtacattaatctaatgataagcttgatgctagatctatcaaaggcacgtttctaggatatcctataggcacaaaaggttatagaatttgcataaaccagaatggaaagcctaaggtgattatttctagaaatgttgtgtttaatgaa

SEQ ID NO: 402584 - DNA, 1015 bp, Cannabis indica
tattatacacagttcttaccaatggatcccctaatcacataatgaaactgggtaaatcacatgatcaaaaccctaatccgagaaactcgaacccacaactataggttctgttatactctctagggattacactaaatcaggaaataaggaaacacccaactaaggcactgaaatggacgagaattgagaaaatggaacattcggggaaccctgtaaaaattggctaatcggttttacaggtaccggtaaaaccggctagccgatttataccagttcacccaaaaatcccacattttgcttgaaactccaccaaatgcaaccaaaccttccaagtacctaattagggtatacacaatatattccaaccaataattccaagaaaacacactaaattaaaaaatgctattaaagacctaaacttgagttccaaggttcaaacttgcataatttcatcacaataaaaccaaaccagctgctagaagctataatcaactcaaatcaaacttagaattcaaattatacaacaatcaaaccctaacagctcatacttttcaaaaccataaacgcaaaccaagtaaaagcttcaaaatacaacaaccgtaggttctagggttaccttaacttgagttccccttgaagtccttgctgaaaacaccaaaaatcagccaccaattccctagtttatggctagttcgaagagagagagaagggaaagagaggttctttgatttttggtcttttttccttatttacctttaattttctctaaatgaaaaatggatttctacattaatccttggctaaaattaaatggccatgtgtcactcacctaggcagccaccaaaccaccatttaaaattactaaaatgccctttaggttataacctaggcatttctcaaaactaggggtaaaatggtcaaattccataaccctgcttaacctagtattttattttctccaatatatatcccactaacaaataaggttctaaacttacccatgtgatcaaactag

SEQ ID NO: 402585 - DNA, 883 bp, Cannabis indica
ttgggtaggattaatgttttagtaggagtattcaattgtatgataaattttttaactactatcaaattgtaatgccacatcaaataaataaacggtaaaatattgaaaaatctaacaaaagggcatgtttcaatacttgttatatattaggaggtatttttaccaagtcataaattataaagaacaaaatctggtagtattataagtaaatggggcaaaaatgctaattactctatttttattggagcataattgtttccaacatcggctctaacttcttttgtattagttgttctataaataacaagagtatgatctcatagtaacaaaaatttgtagttgttacatcaattacgaccaaaaactaatgcagagatttattataagttaattatgatttttgtctcgtaaaccttaatatgtacaaaattatatcccatgaactttttaagttgttaaattttttttttctgaactatcaagattgttgaaatcaagatttttttttctaattttagtaagaaaagtctaatatagatgaaaattcaggagaattatttgatatatgttaaagttcgagaagcataatttggttgatattaaattctagagagcataatttaggtggcatttggtaacacttttgttttttaattttaaaaacagaaaaatgaaagtagattttttgtttttaaaaaataaaaatgtgttctataactacttttgtttttaaattttaaaaatagaaaacaaaagtatgttctgtaaccacttttgttttataattttaaaaacagaaacaaaagcgtgttctgtaaccattattatttttcaattttaaaaatagaaacataaattttgatttttttttctttttttgtaa

SEQ ID NO: 402586 - DNA, 608 bp, Cannabis indica
ctcatcaattttagtgtagagatatattaatggtcatattagctttcatatttcaacttaataggaataatatcaacaagtgacaactatcatgaaagcaaaatagtaataaagagaatgagtcatgttagaatcaaatagaatgcatatcaccataaatcgatgcactaaaattcgaatctggtgtaatggatgagaatgagaggactattctgaatgttcattgtcctttaaaatatgtcaactgaacatgtttttatcacaccagtaaactttattctttaaaaagccaataataaaaaaagaaagaaacagattatatatttataatattttcttttagcgccacatctatagccaaatcaaatacattaatattattcgatgctagtatagtaggataacgaactaaataagagttgactcattcatttaccttaatcactaagtggttcgaaatttcaaggaagaagaaagagaagaagatcgcagctaggtatagagagagaaggctcaggtttttctctaaaggaaaaagtagaaagttaagtgtgtaaatttcctgaagccttcaatatctatttatagcattccactagggtaaggtt

SEQ ID NO: 402587 - DNA, 1215 bp, Cannabis indica
taaatgctgatgtgcatcgaaacaacaaaaccgccaaatctagaggacatgcatttttttcaaaatgaattatgacaaaaatacccaaggtaatcatttaaaaagcacctttgattaaaaagacactttttaaggggcaattgctatacccaaaattcggctggcactttagaggaggacacgtgtcaatcttggagaatacgaatcaacaaatataatgacaattatacttgaagatattaaaattgaataactcattaaaggcagagttggtagagtatatttataactcgctgactgcaaagtcttacgggagataaggatatacaaactattgactcatgtgttgacaagaaaccaatttgcggcagaagacacagtcataaggatgatatctgtgatacaaagtgatgaacgaacctcactacatgtaaagagatgaagacaaggcatgttgactgttagaacacttaacatataatatacattatacaaactaagcgtcacagttgaatgaattcaaacaatgaataacgaggcatccatctcgctataagaaggcctactcatggtaccttcactaatcagctctagacatctttcaatgagatccacagctccgtcgagtcagctctctcagatagaagctgacactcaaatgatgttgactgcagaagttcaccttatcaccaataactgcgattgtcagatgcaacgctatgtcttcaatagcataaacgaaaatatgtacattataaacctcggaaggatatgggaaaagctctagctcgctatcaaggttattattgctatccgagcagggtaacgtagcgagatacattctgcagcgcatctaaatccacgtcagcaatgaccaagtaaaagcgaataaatcacagctgtgtgactttcaaataataacagcatttattttacgtgggacgtaatcaaatcccataattttagggaaatattgttgtgggatactaatctgattgtaattaactgcctccccatgtaactataaataggggcagaatacactgaaaaaggggacaaaaaattcttgagagaaagaaccctagtttgtatcagagaaatctaataagatagactcgtggactatgcaaaactttaattacaaaatcacgtaaaaagctttgtgtcatttcttcttttactactattatttctgtgcaaatcaatcacgaaata

SEQ ID NO: 402588 - DNA, 712 bp, Cannabis indica
aagatgtttgacacaagaaaattttcagaaagttctaacggtgttcggatttcacaaagaaaaatagaagagatgaaacacgaattgacaggaaagtagaacacaagttaaacaagattatagaacatgaattgaaaagaaaacacaaaagatagataggccaaacccgatgatcctaggctctgataccaaatgatacgaaccacaccaacagttgtgatgaaacccgacaccaaatatggcacactctaagaattctcgaaatttggatgtggaaccgtcacccaatgcttagttaagaattctcttaagaactcaagaagaaaacctctcaaaaacttattccaaaatattctgatttttcaaattgtttacaaggctttatatagccaacttacaaccaagaaaaaaaggaaactaaaagaaagacaactttccaaataaaacaaagacaaaataaaggaaacaaaattaaaaaaggaaagttgcatattgccttggaaaacgtgataagctcaacttggatctaaattgagtccactttgatgagaagcacaaattttttctctccttcagtgttgactgcggtctcctcttgttttaaaattctattgactaagttgttgagttcttctttgaatctcttggcttgcgcccttgtcagcgggccaactggaactttacttgtttatttagccttagtgttctcatc

SEQ ID NO: 402589 - DNA, 649 bp, Cannabis indica
ggtggatagccatgaattttataacatttagacatggtatgtccattaattccacaatgattacaaaataacttggatctttgagattgaactcctcctgcaaattcaccagtaacctcagaattcgatttctgggattcaatttggagattagtgatgcctctttgactttcctcttgaatgattgaggcaaaagccttattaattcctggaaggggttcttgcattagcacttgagatctagcaagactgtaggattcatttaaaccaacaagaaattcaagaactttatcttcttcttggtactgctgtatcactttcatagccccacaagtacaaacaggtggtggtctatactcttgaatcaaatcccatagggtttttaacttggtaaagtatgaagtcacactactcgaaccttgattaaggagatttatggcgcgtttagcttcaaaaacacgaggggcattcttttggttgaatctttcttcaagttcagaccaaatggtggaagcattatcatggtacatgatgctatctcctatttcacttgatacagcttttaatatccaagagaagattaaattgttacatctgcaccaagattcgtggtcttcgtcttcctcatctggttcaggcaatctaccat

SEQ ID NO: 402590 - DNA, 694 bp, Cannabis indica
cgtctaggaggaggtcttctctcaatgtgtccgtcgaattgagtatccttctcattcgatggttatttggtaaaaatcttctatgacctgcgtaagatgtcttgccaattacccgattggaagaggtatcttcattacaagtgggaaaagctttgtatccctgaccactccaactagacaaataactacgagctggaaaatcattaactgtccacagaagagctgcgcgcaacttgaacatactgttggttcgattatctctcgtatcaactccgttaacccacaactccttcaactcatccaccaagggtcttaaaaagacatctatgtccattctcggtgatttttctccaggaataagaatggtcaacatattatctttcatacataaccaaggtggaagattatagttcgccaaaactacaggccacatactgtaagcttggctcatgttgccaaatggattaaagccatcgacagctaaaccgagacaaacatttcgaggttcactagcaagattaagatgtttggcatcaaagtccctccacgctgcaccatccacagggtgtcgcatcacaccgtcatcttttgatttatcagtgtggtgccataccatgtattttgccgtatgccttgaagtatacagtctcttcagtcgcggagttaacgaaagtaacgcatcaccttatgaggc

SEQ ID NO: 402591 - DNA, 534 bp, Cannabis indica
aacatgcaacccatcatcatcattactaagttcatgcttttcaatcataatatttcagcaaggaagtcacaaattaaaaactataaaactacctcaatctcttgaacaatcaaacctcaagctcccaacaccctttttccaacaacaaggtccaattcaagccgaattctcacaaatcaagttgaaaatcaatcaagagggtaagagagggagagagggtcggttgagaggggaaagaaaataaaggctgaaaacacattctatttctcaaaaatcaatttcactaaacttagaaattaaagctcaaaagaccaaaatgcccttagggcctacaacacacatattcacccatacaagggtaattttgtcatttcatgcatatataactcacaattaatttcagattatcactcatcaaataaaatgccaattaaatcaatgcaatttggatttcgggcctgaacccggttcggcccaaaattccaggttgtgagtataccgcgcccacctgtcagaacacacctgaaaagacaa

SEQ ID NO: 402592 - DNA, 573 bp, Cannabis indica
aattactctttttattatataaagagaaaggcgatgataaaaaataatcaaatttagaattttgatatttttagtatattagttagtaattttttttgttaaattgtattagttaatattaactgtatatctttctttaaaaaatattatatatgtagataatttttttaatacatatgtatttatttattagttaattctatacagttgtatagttttattttttatttttttaattaattagtgatctttaattaaataaagcaaaattagaaaaattagaaaaatgagaaaattaaaatagaacaaaaaaattaaaaaaaaataagagaattatggaaagaatagatacttagaaattttatttttttaattattaattaattatcgtaaatttaaaaattataaattgatatgttagttgttgtgtatgattagatatttttatttgggtaaataccattttaaacgctttgttttacaaaagttaccgattggaccctgtgttttgttaaatgacaaaatggatcctgtattttctaaaatagtacaaataggaccctgaattgattt

SEQ ID NO: 402593 - DNA, 1351 bp, Cannabis indica
tacaaagaatggaggtctcaacctgcacgaggtttctccgatcatggcagaatatcacgagcttgcctctacacgggcgtcattggtcctttgaaataggaaacgtgtgaggcttgcgccatcaatccttgcagtcagtcagagcataagcgaaaagtttggggtcacaatttcaaatagtcgttgagacagctacatttagctaactcaaatgattttcccgccttcctcttgcccaactataaaagggcgggcatgaatctcttttgacttgagcattgaagaattttctgcaggaaaacctccagtgcttttaagcataagtgttcataaaatacatccaatcaaatttgcatgattcaattcaatttgcaaagtgtgaatattcatacttgtgcaaattagattctagattagaaattctaaaatttaattttgtgcagattgacatgtaaaagtaaccgatcagattcaatatacacatatttatgtatatatatttttttaaaaaaaaattacacatacaattattaatttaaaataaatgaatttaaaaatatatatattattagaaattgaattaactagtcaaaagaaaatctagataggtgatatttttgcttgaagtatttcttttctatttttattattttcgaaaattgtatttttatatactttaaattttcgaacccaataaatatattctcaaaggaaatttttaagttgctaattatttaatttaattcaacttaaattaatttccttaatatttatatttaagattattactaagatggaaataattaattttatttcaatcaccatctaagtataattttataaatattatattaaattcttatttttgaattttaattcttaatttagaatttaatgagatttatttattagaataataaagaaaatacattttaaagaatgagctttattattattaagatattcgatctccattgtgggttttacaccgcgtttgttttagtgagtaatcctccctaatggaggaacgttcattagcaatttcgcaccgtttaatctcgcatgataagtggtttgtaagtgttttatatggtatagatcaccctaatggtggcgaccatatttgacttgcaaattgcgaaacaatggtagaagctcataagatagaatagccttgactctcgcctaaacgggacaacgctggattccaatcttgatcgaataaaaggttgctagaatgtttaacattttagatgagctgacaactctattcaatggatggtagctttgactctcgcctaaacgggacactgatatcagtttgttgaaaaccttggaaattatttaggat

SEQ ID NO: 402594 - DNA, 579 bp, Cannabis indica
ttcttttttgtttcaaaattcattggttattattatttttcactctcttattcctcaagttgtctcgctttctctccattaacatatatgtgttttattttatttcttgttctagttcttcttatttattttcttttcattttttttttatttagtttttgaaattttcagccacgttttttagaaaaaaaagtgtaatttttttattctgatttttcagaactaggcttgcaaatatagtctctattgcatctggtgttgaggttgtgtagaagatggttagtttttttaatccttttttcttttatttttttttatttattttagtgttgttttacgattgttttgtcatgatttatttatttgacattgatttcattgttcctgctccatctcgccgaaattaatggttattttccaggtgttctcgtgttgttgtggtggttttgtccatgaatgtggaagatagaggctataaatatatttcttcctccttctctatggttgtttttgtggtttttttactttgattttcctataaatacatttgacgagttcactggcaaaagggttttgagg

SEQ ID NO: 402595 - DNA, 583 bp, Cannabis indica
ttttttattagtgagccatcaggccgacccaatttatagactcccattcccactactgcttcgatgatatatggatcctcccagttcaggttgaacactcctgttgatgcatctctcgtatatgtaaagactcgtcttaacacgaagtctccaacattaaaactgtcttttcttgactcttttgttgacgtatcttatgactcggtggttgtatgcagcattggtgatttgcgacttggttcgtttttcctcaactggatccagggacatttttaaaagtcccttatttttttcttgattataaaactctcttctgtgagtcgatatattcacttcaacaggcaacattacttccgagccaaatgctagcgagaaaggagtgtgtcctgtggctgttttctcggtagttctgtgggcccagagcacctgaggtagctcgtcaacccacctacctttggcagcgtctaacttcttcttgatagtatcctttagagttttattaacgacttccacttgtctgtttgcctgagggctggcaactgacgagaagcttttgataattttattcctcttgcagaattca

SEQ ID NO: 402596 - DNA, 768 bp, Cannabis indica
cacttaaggtttcgaatggtgaaaaacaataaaataggtgcgaaatcactaaggaaagaactctctcatctattagttgtttgacatagaaaattaagtttgacttggttgaaggcatcgagtggatgagtgagagcatcatgttccttttatattatttcatctagggcttagggctaaattatatggattaaaaaagaataaaatattgggcaaaaatcaacactagggccgaccatacaaaggaccaatctctagttacaattttgtcacctttttcaaccacttattcttctttcaataataccatatttttcaattcaatcttataaatactaaaactatttattaataattataattaattatcaaataaaatttttatttatattatttattaattagaccatacaaagtctcttaattaataaattagccccaaaacctcttttcttcccaattaagcccttgcttagtgaaaatttatacataagacatagtctaattttagaattataattgattaattaaaatcaattaactgagtctacaagcagtattatctcatctagtgaggggaccatgagcctatataactgagctttcaataagtatatctggattcaccaagtaaattccctaacttattaattcctccttgccccactatagatttggaattgaataacactctcaattatatagaacgctctatatgtacaacgatatagatacgttatgattaaccattgttacaatcctaatagt

SEQ ID NO: 402597 - DNA, 571 bp, Cannabis indica
tacaaggtctattagatgatactccaaatgctcataagctaacacattcaagtgaatcctccaacctacgacctgtaaaaatcaaacatctaagattctcatcaaaatgaagtatcaccatacaagagagcgttcctagaaatgataagttcacctttggtacattaaactaaattaagaaggcacttaggttggtctccaaacataacatatgtactcgaacaatcgcatatttgcctcatcaatgagatgttaagttttcactatggcattcattgctctccacacgtctcattacacttgtcacttgaaattgtcaaagtaaaaaaaactcttaagactacaaggatcaaccacccctaacagtccaagaaaaaagtaaaagccaaaagatagttccacaagaaagagcactcacaataatcagggggatgctcctcaaaattagtcctaaaatgtgcgcagggaaacaaacaaaaataaagaaaaaggtcgaatcggttcacagaaccatcatctcccttaatgtgacagttagtagtcccgtgatccgtaaggggaaacaccgggt

SEQ ID NO: 402598 - DNA, 543 bp, Cannabis indica
aggttcaagttcgggtctgggtgcggtactatgtcccagtcctagatctgtttctcaggtccctatcttgattctggttccaggtcgcggttattgtgtgggtttgggtcccggtctaggttcggatttgagtcctagtcttggttcgggtttgggtctctgtctgggttttgatcagggttggggtttgggtttaggtactggtcctggtcctattccttgtttggttctagttccatttgcgattacgagttcgagtttggttttgagttcgggtcggagttcgagtcatggtttgagtttgggttcagctccgggttacgttcgcgtcctgggtccttgtctaggttgggtctgagtcccaagttctaatcacaatctgagtttgtattcagttctgggtctaagtccttggttctgatcctagtctgtgttcgagtttgggtccgggtccgggtctagctttgggtctgattcaaggtgtgcgtctttgagttcggctcctagtttgtttccgtgtttgtgtccaggtctggaccccga

SEQ ID NO: 402599 - DNA, 560 bp, Cannabis indica
tgccagtagtagaatagggcctctatgcaagttatagcaaaactttcatgtagcaaccaaatagaatgaagcgagccctcaaagagctatacaaacatccttggctgctcaagagaagcctataggccggccaggatgagcctacaggccggctagaatctgtgcacaagctaaccggctaagaagtgacttttggaccaaggaggctttcgttcgaccaagggaacctggtctctacaaggaaatggtgtacaaagctaacctcaacttcaaaaaggttggcctccacactcaaaggctggcctcctcttgatggagctataatgacctaccagatcctgcaggccttgtcctgcaaagtcctagcaggaccatggtcggctagggattgacctggcaggactatgttggctagacttccttataggtctatgggcggcaaggattgaccaagtaggactttatgtatatcacaaaatgtggacacaaggcatgggctgcgaatcgtgccccaaaagcccaatagaatggctgaacaatatctacattcaagggcactt

SEQ ID NO: 402600 - DNA, 573 bp, Cannabis indica
ggaaagcttcttcttctttatctctatttttattcatctcagaataataaaataacattaatctttttttattattttcttttcttttctttacattttatttatttacatgtcaagagttttacaattcattcttacaaaaattatcaaacaaaaataaattatattttaaatattataaaataaaaataaaaaattatgtagaattattttatgaaaaaaatgcatataataaattaaattaaattaagtagtgtgaaaaacaaaatttaaaaaaaataatattaagagtgattttcaaaaattattttaagtgtaattatttttttttgaagtaagtttataaattatcaaacaacaaaaaaaaaattcttctcttccatttttatcaaccatatcaaatgctattttttatttaaaaattactttaaataccaataagaagtgacatgttgtagataatgatttagcattttaacgactagttacctgttaggctaaaataagtttaagtttcgggttatattttcggttagttttcactctttgtttctagttttagggctattttac

SEQ ID NO: 402601 - DNA, 826 bp, Cannabis indica
cctcaacgaacgtaaaaaccacattttcatctccaatttcagcttatttccaagctcaacagtctcctccatcccatgaccccttgtccacgacccaacaacttcagcattgtttggattggaaaccattaatgagattttgggattattctttggggagggtgtggagaaagaatgtctttttgagaagcttttatgcagtgatggagtttcattgtcttcttgagtagttaaaagggagacaatctcaagatcagtggccaaggcggcttctacccatagagaaacagagtttaattgctcggtaggggtacctttttcatgggatatttcggaattaatgcggctactggcaattgactctgctatttttgttgatctcactacgtcgtcgtatattgaaaagaagcggtcaatggttggtagagggttcccaaccttggatgtggaggagagttctgaaaacatactgaggcaccaaaataaagactattagatagattactttatggtcatttatcatctttcagaaattaaagacaacaaaaaaaagcaaattagttcctataataagtaaaaccatgaaacaattatgaataatattcatttttaacacatactatatataagtcacacttaattataaagaaagattaagcattaccttaagctcctgataatagactcagtagcaattgcttcttcaagtgcttcagctgcagcagtggaagccaaaacctttctctgcatagcctcctgcatttgggtatgttttagtcagcattctttattattagctagtaaaaagggcgagaaagacaaacaa

SEQ ID NO: 402602 - DNA, 833 bp, Cannabis indica
gttttttttgttttttttttttgttttttttttttttttgagagagtgacttaaatcacacactatcataattgttgacgcaaagaaacatccaatcaacaagctaattgtctagctaaagatatacaaagttaaaatatgagtcactgactcactgtaagcaaaacaatttatataagactaagttatctaagaaatttagacaaaacaacttgagaccaccttcaagaggcatccaatataaccaattggaccaaaactacttacaaaataaataaatataagaaagtggattagcacactatacaatgataatattataaatttttaaattaaaaataaaacacaattattattttagcaagagattttatcttttcttttttcactcaatatgtcacaattatgaatataatattaatttaatttaatatatataggttgtttggatgatggcatactttttaaaataagagtcaggtcataaaaaatatgaatagtgttataaaaaaaaatatagatcatgccgtatcgtgtaataattttatatgatagacacggtgcggcccgtaagttcggtaatttcttgtcgtatttggattcatgtcgtgttttattcgggtcgatccgtttttcttaaataaatcaacttattttattatacaggttcaaatccgtgctctatatatttgcatttttattataattgatgatctaaatattaacctatacatgtattttataattttaattacttttatatcttttctcaataataattacacataattatataaaaaataattatagttattatcattttaattgataaa

SEQ ID NO: 402603 - DNA, 1090 bp, Cannabis indica
ataagtgaacatttgggttgagcattgcttcacttattttataagtgaatagttaggttgagcgtagctcctattacttattttgtagggttgagcgtagctcctattacttactttgtaagtgaatagttgagttgagcgtagctcatatcacttactttataagtaaatatttaggttgagcgtagctcctatcacttattttataagtgaatagttgggtttaacgtagctcatatcacttactttataagtgaacatttgggttgagcgtagctcctatcacttattttataagtgaatagttgggttgagcgtagctcatatcacttactttgtaagtgaatatttgggttgagcgtagctcctatcacttattttataagtgaatagttgggttgatcgtagctcatatcacttactttgtcagtgaacatttgggttgagcgtagctccaatcacttattttataaatgaatagttgggttgagcgtagctcatatcacttactttgtaagtgaatatttgggttgagcgtagctcctatcacttattttataagtgaatattttggttgagcgtgtctcgcttgttattgcttttactttatgtttttgagttctaaaatataacaaacacttaaaataattgacagaggtattacgtggaaaccctttcgggagaaaaccacgggcgaagcacgcaaaaatccactacgtaaaatgagagtgtacaaggggggcattgttttgccatacatgtgatttaaaatggtatttcttaaggtgtacgacgttccagttatttcctatgtttcttccatctttgctcggagtttgtatgctctttggccaactatttttgtaatctggtaaggcccctcccaattgggtcctaatttgcctactcctttgtgatgatcgcttagcttaaatttggaaattagcagatcattagggtttgattatggaatttatttattaattctaaattattaatttatgatgatttatttgaattcagaatgcattttatatgtcatatatagaaatttcataattttgcatattcggtgcccgacaacattgaa

SEQ ID NO: 402604 - DNA, 1031 bp, Cannabis indica
atcggcaatttttgaagtgattataactaaataaattaattaaaatagaataaaaaatattaatcataatacacatatatataagtttaggaggatttattttagaaatacccaaaaattaacaaaaattttattatttttactaaatttttttattttttttttaccttttatcgactttttttcctttacaaaccgctatttttaggttgttctcaaaaagactgttgtttacacgtgaaaatatatcataactttacggcaacatgaaaacaacgttgtttttcctctaaaaaattacaaatccgtaaaaatgtaaaaaaaatcataaatttttttgtcgctttttgtagctattttgttgttgttttacaattgtttatatattgttgtctaggtgttgtataattgtttctagttgcattagtttgttttttttttgttttactaaacacagttttaatgccctgtccaacagggacgccacgtgtgtgctcttataaaagttcttttcaattgatttataagattatactgaaagtgtgactaattaaaatttgataactttataataaacataaaaaatatctttataaaagataagtagtattaatcttggggtccccctgttttcaaaatatttacaatctggtttaaaagtagttttacaacataaactttatattcccataaatacaatcaaaagaaacactctgaacactgggccgtaacaccgcgattgatatgtacattgctgctatgaccttcaaactcatggttgctcaactttcgccttccctttacctgcaccatatagcacccgtgagtcacaaaatataacatatatctatttattctcacattattacaattacataatatcgtaattacataaatcccagtgcttcataaagtacccttaccactcgctaaccacgagctgaatatgtcattataatttcccagtaaagcaagcgataagtaagaaaactatccgcggttttaggagtaattactcgtaacggtaataa

SEQ ID NO: 402605 - DNA, 513 bp, Cannabis indica
taattttaatccaataaatgcatcaaaagttaaatttttctttttatagtttcaattatatttataatttttcaataatatttacattgcaaagaaaatatatttatataattttttaataatattttacagaaaatcacataaagaaattattagaatttaaatatttatttataaatattcaattttttatgcacactttatacataaattaatatatagttttaatttgatattttttaatagttttattgataaaattataatatttgatgagtgcacatttgtacactcattcttatttcttagtcaattattagatgaattagtatttatttttgtataaatttgatgtgttttctccaagtgtgtaggtttgtgctgaaaaaacattttatgatagactgagatctttgagcccatttttgacaatgatttcatcattttctcgaagatcttatgagacccaaaatgatagaacttgttcccagctttccaaaacatgttaaatta

SEQ ID NO: 402606 - DNA, 554 bp, Cannabis indica
tatgacctcgactttggacccgagacctggctcagtccccaccctcgaagcccaaccccagtccccggtccaagacttagacctgaacccaaaccctagaaatatatctggccccatactaggatcacaaaccccgaacccaagaccccacacacctgacttaaataaattaaaaaaaaaaattaaatttacaaaacacctttttattttttgttttaaaaataaaaaacaaaagtaattataaaacatatttttatttttcaaatacataatttaattaatattgatttctatacatgttttaatttaatttaattataaaccaaatgtttctttaattgcataagttctcaatatttataaaaatataattttcgtccagttttgtctaaacagactctattttgaatttattaaaaacaggtttgaacgtagctcatattacatttttccgtccaaaatcaattatttaaaatctcgactatttaagacactaacaaaatttgtacttatgacagaacataattttgttgtgactaaaagtgatatttagt

SEQ ID NO: 402607 - DNA, 522 bp, Cannabis indica
taataagtgatgtgtggaataaaatttgtgttcatattccacgaatttaatgatcgaattatggttccaaaccactttgcatagttagaaaaaggtcagcacataaatttatatatataattaggttaatgttaagtaatattaagtaataatattaaatgtaatattagttttttaaatgttatggtagcatttggtaaacactttttaattagtttttgttttaaaaatggaaaagtgaaaatatttttaaaatatgttcataaaactgtttttactttttcaattttataattagaaattaaattaaaaacaaaaaaagttcactttcaaaatttttttaagcaatttttttcttaatcaatcctttggatattacaaccagacccggacccaaatcccctcctcacggccttggcactgaacctggcttctgacccgaaccctaatccaaccccggatcttgactcgacttaaataaaatcaaaaataaaaataaaataaactttacagaacacactt

SEQ ID NO: 402608 - DNA, 514 bp, Cannabis indica
aaaaagaaaaaaataaaacaaaaaaccataaaacatgaacaaagttaaatctggcatatttaaataaaaaacttttaaaatcttttattaagtgtaatttctttctttgcaaaagaatatgtgcccaaataacccatcactggtcggtcctaactacaaggcatatccctcgcgattctaatttaattatgaaaaattatctaaaatgattcaataacatttttatttatttgtgtatgtttaaatacccttacttatatatattttttttctctctctatttctccattttttccttccttatactttctttctctcatccctttcttttttcttattttttctcttctcttaaactttaaaaataatttctgatcacgtcgttactcggatgagcctataaaaaatataattgcaatatactcttcaatttgaacatttcaagatgtgggaagtgtattttttttttgctatttttagaaaaaaaaaatccatttagttgctaatatagtga

SEQ ID NO: 402609 - DNA, 650 bp, Cannabis indica
attattaccttccgatcatttgagtaatttcttcgggaattgggcggccatgtacagggtctaaatggataattttctttggcgtaacgacctctagcatccaatgcgcactagaaaattatattggaatataagtaagatagtataaaaataatttgaagtcataatatagaaatgaacaattagcactaaagaattaaatagagtttacccgatattccaaggaataaagaacatttggtggttgttattcatcaatgataaccaagcagccaatcatcttgccgcattgtcaaaagactgactcttctcttcatcggttatcccattcactgcgagaagctctgggttgtaaaacttgaaaaattttctcataccgttgatgctctcccagatgtgcctgccaaaaaaattgttaagtattagtgtcttataataatttgactagaatttgatatataaggttaattagattaaagaagagtatacatcattccaaacaacattccctggttgccgatgaagtcacacattgcaacctgctgcaaatcctctccagataacgtgatatgggtacgcggtgctatgaatcctcggggtacaggaattgtgattatatcacgttttatctttgaggttcaggaattcaa

SEQ ID NO: 402610 - DNA, 395 bp, Cannabis indica
ccttgtcttgcgtgcccttagtttgcctcttggaggaatccacgacaagagtgaccaccacgtcgcttttcctcttctgatgaacgatggaaaaagttgccgctgttccagattttggcttgcagttaaggatgggtgcagaattcaagaaaagtcatttctgcaacagcaacaacaataaaaaaactaataataaattgccaataacagtaagattttaacacactagtttatgcatccaatatgctacctgatggtggtcgagaggttttcttggagaggcgttggtcattttgctcttattgtttctcagatggtccttgtacactggctctctctgaaggctcgcgttctctgaaatcaagttgtgttctcgtaactttgaagtcgtacac

SEQ ID NO: 402611 - DNA, 700 bp, Cannabis indica
ttttttaaaaaaaaaagaagataagtcggtgctgtagagcaggaattgggcgctatagcgcacaggagatatttcctgaataacccatgtgctaaaattatctttcttttcagaccagcactatagtgcaggaattgggcgctatagcgcctcgcacagtttttgtttctgtacttgattagtattttggccataacttctccaatacaactcacaatttgacaattcaagatgtttcggaaagcgaaaaatgagatctaaaactttcatggtaagctccagttttgatttcttcttctatgatcgtcaaaatttgaaattaagttccaccttgtaaaacttagctcgtcgactttcaatatcttccaacaaaatatgttaaaattcctccaaaagactttaaatgcatgattagtctttaaaatatcttgaacaattaaaatcacactagtcaatattttgaataatcaatttttaagatattaatacataaattgatcatatttataagacaaatatggactcataaaattcccccacacttgactattgctcgtcctcgagtaagttaatgataaaataaatgatacttaaacaaatcggtctttaaaaaaaataattttagtttcaaaaattgtacagccacttattattctaagaaaatccaaactcttcaatcattagaatttcaactcaagat

SEQ ID NO: 402612 - DNA, 533 bp, Cannabis indica
gttgtgggggttgttcagagattttttgctacgggggcctttgatgaagcttgtagtgacgcaaatgtagtcctaatccccaagaagaagggcccggagacaatgaaagatttgagacctatagctctttgtaatgtcctttacaagattgtgacgaaggtaatgaccaaccgtatgaagcctttcatggactctatagtcgcggattctcagagtgcttttattccaggacgactcatttctgacaacattatggtttcttttgaagttcttcactatcttaaacgtaagcgccaagggaagactgggtgtatggctttgaaattggatatgagtaaggcgtatgaccgtattgagtggaatttcttagaagcggtactttcgaaattgggttttgtggatacttgggtacatctcatcatgcaatgtgtgtcatcggccaactacaaggttatccatgggtcccatgagatgggtcctattgttccaactaggggccttcgtcaaggggatcctttgtctccttacttatt

SEQ ID NO: 402613 - DNA, 565 bp, Cannabis indica
gaagaagccactaatccacctccattgttgaatgttcttgaaaaaattgagattgaagatgatgagtgatgatattttcggatttaggggaaattgaagatttgaggtgtgatttttttttttttaaaaaaaaaaccaaagattgatgagtgaaatttagatttgggatgatttggattaaggaattggtgaatgggtgaagagaatttgaaaaattggtgaggaaacttggttttcggatggagaagatgagggagacggctgggaatgggattttaggtttaggttgaaatggagtgaaaaataggggtttttatagaatttttgttagctggtcgggactagattcgaaaacataatttcaggatttctgtaaaccccctagtcgcgaccatggtcgcgactagaaaaaaggatcgcgactaggggttaagcttgtcgcgaccactggaaccaaaatttttccaatgtttctgtaagcttccaggtcacggctagggtcgcgacccaggaacttggtggtcgcgaccactgggttccgagtcttgaaaaaatattttttttt

SEQ ID NO: 402614 - DNA, 724 bp, Cannabis indica
gtgatcccacaatagattgggcttgaatgggagaaaagaagatttaagaaaggaggaagaagacaaaaataaagggtaaaaattcttcttgtgtatgagcaaaataagatttcaaaagccatgaatctaaccatatgatttattgttaatgaaaaaaaaaaaaaatatttcatatgtgtaccaccacgcgagatagataatagccgcgtcaatccaccgttattaaaaaatgaatagaacaagacagaatagcacaaacttaatattctaaaaagtttaggtagaattttttacgtcaaaaataattcaagaggcaagacttggtatttctcaaagagattttttattttactgaaacacaatatttttataatttataaaaatatttttgtaaagttagtacggtaaaaatataaaaaatgtcgtgtcacaatatttttataaaattttcctcattttatagtatttttataagtttcctaatttattaatagagataatttaagtttcttaatttattacatttaaagaatttttcatagaaacaacacaaaaacaataagaaaattatataaaagtaacaggaaaataacatctaaataatatcaaaataatttcagctccaacactcctcttgctattcgggatagaatgtgtgctatgctgaggatgcccatggcagatgcgcaaagtacctatttgggtctcccttgtactatgggga

SEQ ID NO: 402615 - DNA, 941 bp, Cannabis indica
  modified_base (40)..(40): a, c, t, g, unknown or other
ggtccagtctgagtccagatctagacaccgactgtggtcngttcccaggccccgttaccggaatccccgagtcaagatctgggatcgctgtcacggggtctcggtctgggttctggttaagggtcccgggtcccatttctgaatttgggatcagaagcgagactgtgctttgggtctaggtgcggaccctagttatgtgtccctaatctagttccatgtttaggtctgagttcaggttcggggttgggtcccgagtccatgtttgggtggggatcagggtctggctccaaattcgagtctaggtcggattttgagtccgggtccttgtccggttgaggttctggatctaggtccgatttcagttatgattccacgtccaagtcctagttacagtcccggtcaacttccagttttggttccaattttgggtcacagggtacgggttcgggtccacttttgagtttgggactgggttcaggtttgggtgtgggttcaggtccttgtcagggttcgggtccaaggctgggtcccaaatccagacaccgactctgggtttggtccaagcccttggttccaatccggttcccaatctcgggtcccagtccgggtcctaggttcaagttcgggtctaggtcaggttctaggtcccggtcctatatctgtttcccaggtccctatcctaattctcggtcaaagtcccggttattgtgtgagtttgggtcccggtgtaggttcgagttcgagtcctatcctcggtttgggtttaggtcgttgtcctggccctagtcctagtttggttctagttccatttgtgattctgagatcgagtttgggtttgagtttgggtcagagttcgagactttgtgtgagtttgggttcgggtccgaatttcagtttaggtccagatcaggctccgagtgtgggttcgcgtcctgggtctt

SEQ ID NO: 402616 - DNA, 604 bp, Cannabis indica
tcttcaataataacagcttccagtacaaaatcagtaggccgaccgtgaagaaaccaaactagacgaagaatcacataaattccagcaacttcacttaagaagaagatcgtaaaaaatctaaacacatatagttttggatttatacaaaatcaggcaaaaaaactagttccaaactaaaatttaaccctaaattacaattaaaattgaagaaaaataattcttctaatatcaattttcagattcataaaatgtagatttgtctgaaatagatctggagttcctcattaatcgaagtcaagtataaactaaaataaactataattgtgggaaaattacaactaacagtgcggaatcaaatcaataaaactctagacaattaaacaattagcaatgacaatattaacaaaccgagaacaacaaatagaaatacaacataggcaaacagagtatatataacgctagaaataattaatatagaaaataaagaaatcaacaccataatattggttcaagtcttatagatcgatgagatctatggctctactccagttctagaactccactgaaatctttctttattgattgagcaagaatatgtacaata

SEQ ID NO: 402617 - DNA, 710 bp, Cannabis indica
atttatatgtatatatgtataatgtatatatagtgaaattgcagtttattagctatatctattgtttgaacaaaataaatagtgatggtgaattggtttgagaagaagaaagagtagtgaatagtgattgtgattcgtggtagaacttggaagtagagcctagagagatgcctcctccggaattcaatggtgggcctccaggcccattcggttgtttgggttctctctgtcatggtttatgcaggcttgtttcttcctggtcagttcaaaatcaaaattatctactttcttgttttaattgattagacttaaaccactatattgttaaaacacaaactctctcaataactctctctctctctcttaaaaattcaatgtaaaatagagagtgaattttgataatatatttaaaaataaaagggagaagaattgagagttgtcctcttctatatctattttgggatgaattgaaaaatgcctcttttattaatcaactaggtaatatagcagcttttcggctaatttaattctttagtattataataagtagttacttaaaatataattctaatatatagtaaaattataaatatattatcttatttcatattattattaatagttttatttattaaaaactaaatgcacaattttattaattattattttaatttatttattaaaaagtttaaaatttattatatatagta

SEQ ID NO: 402618 - DNA, 1028 bp, Cannabis indica
agattcctgactttgggtgcaatcgtactgaaacaacttaagtgtgccttaagggattctcctggttgctgtttgacattggttaacgaagatacttctggtctccgatctctcgcaacttggaattgctttataaaatctttcaacaattgttcccaagaagttatggaatggttggtaaatttttcaaaccaactatttacggctcctattaatgaagttggaaatgatatgcattgcaagttgtttaaaatattgcttgctcgcaatatggtattaaagttgttcaggtgcgctacaaaatctgttgtaccatcatattgtgcgacatgagggtttttgaatcctgaaggaaatcatgaattcaatatatcaggataaaataattgtctctttgtttgagtcatatcccaatagttccctattttccatcctgatacttctttaacttatcttccaactatattacttgcaattgtattggatccacaagttgttgctccatcggttgtacgccagcattttgatttagttgattatgtaaatctggtgcattacagtttaaatgctcacgtaggtcaggttgtctttagtttaattgctcgcgaagattagggtcacgatgtcttttaacataattactcacagatcttgtccttgagtaacttttagattagtaactgtgagagttacttatgctttcttagttgctataataatgtcgtgatcctccatcacctcacattcacctaggggtgttcataaaatagccgatccaatccaatccgcaagatccaatccaacccaatccgcaaagtgcagatatccgcacttgtgcgaattggattggattctaaaatttaaaatccgcacttgtgcggattggattttgattgacatgtaaaagtaaccgatccaatccaatccacacatatttataacaaaattaaaaaattatatatacaaataacatgttaatgtaaagaaaatagtaatttaaaagtctaaatacatataatacaattata

SEQ ID NO: 402619 - DNA, 667 bp, Cannabis indica
ctggcgattattgtgtacgactgacaagcttcgagaacacaagctgattccagagaacgcaagtcttcaaagagagccagtgtacaaggaaccatctgagaaacaacaagagcggatagacaaacgcctctccaagcgaacctctcaaccaacatcaggtaacatatgccacgttataaactagtgccttgaaatttattgatacttatctttcatttgtcctcgcagagatgaatttcttgaagtccgtgcccgtcctcaactacaagccaaaaagtggaagagcgacgacatcgcccgtcactactcagaagaggaagagcgacgttataactactcgtgccgtggattccaccaagaagctggctaagatcgcgcaagacaaagggaagaaagtcatgatcgagccaactatccgagcctgcgattttctgactatgcaggagaagttcgtgggcgaggagttcatatccaaggcagagaggatcccttttgaagagcttgttctacgctctatggagttggcttcgcagttgatgactctgttcatgaaagtcgttaccgctggttctaaggaagctgaactgctgaagaggcaaaatgcccagctccaggagagcataaagaaactaaaacaagacgcggctgataaggacagggagcttga

SEQ ID NO: 402620 - DNA, 771 bp, Cannabis indica
acaccaagatttttatgtggaaatccaatacgaaaaaaatcacgggaccgtagtccactcaaatcatctactatcaccaaaattcaataatgggattacaaagttcttctctaataaaactagaggctcacaacaatatcaagattaaacaatcttggaccaccaatacaatcatcatctcaaaagatggaaacacaaagaaagaagcttggatctcacaaaaatggtattgtagaagagcaccttagagagaacaatcgttgaatcgaaaccaatagattggtcgagcaccttgtaaggattcaccacccaaaatttgagttaaaatagatgagaatcaaccacttaatcttcaagttaaagtgccaaaatcctactttctctttccctttcttttctttctgctgcttgccgttcacgacaccaccatcagcttctacttctttttttttcttttcattgtttcagttaattgggccttaaacccttatttagtccaacccactaagggccagtttggcacagctgtgctgtggggaaaagcagctgtagctgtgctgtgggaaaaagcagctgtagcagaactgtggaaaaaagctgagctgagtgtttggtaaattataatttttaaagtgctgtgagttgttaagattctattacaataataataatattttaatctagttcattataattacaaatatatataaaaaaaatatgttatattaaattttttattttttatattatttttaattatttttttctata

SEQ ID NO: 402621 - DNA, 546 bp, Cannabis indica
ttatattgataaatgacatgttaggaccccattggtgagccagggacattttcgtaattttaacccgagaaaggtaaaccgtaattttaatgttatatcgtgcttatggactgtattattatatagtatattcgttctgtctttatgcaggtattttttgacaagttggcgcggtatagtagaaccgggtattttaggccgaatcgggttcagggcccaaaatatattttcgggcttcaatttggcattaatattataatttttaaaatctgaaagtatgtgttatatatgggtgtggtggaatgactattttgaccttgtatgcatacatgtgaatattttggccttaaagggcaatatggtcatttgaccttttatgcattattgaacaaaagctaattttgaaaaaaaaaaatagaaactcatttctggtctatttccagccctagctgaccctctccttccccttctcatctctttttaaattttctcacttaattggaaatttagcttgaattggaggtgttcttggtgtgttttgtgttt

SEQ ID NO: 402622 - DNA, 524 bp, Cannabis indica
gctatattatacttttatccacatacattgtgatttttctcaaggaaaccctacaaacaaaatgacggatcagtcctcttttcaatatagttttgacaattttttttttcctgcgaaggtgggacaatttttttattccaataggattaatacctatttactaaggtcattccgtttggccagggccgtgatagatggatttgaactttagaaaataatgataaattgacgtgcaagtcaacctacctggcccaagctgttgaaagagctcctccctgtgacgttgctcatttgctttggaataagctatagaattgtaaaatcccagaaaggatgaagaccctttggtggtatctcttgtccaaggcaatccctgtgtgagctgagatctgtaaaaagtttcctattgaggatgttacttgtcccctttgtgggacagagaatgaatctattgaatatctttttctttcctgtaatgtggcttttcacttgtagcggtcctcttcttggggtatttatccaat

SEQ ID NO: 402623 - DNA, 719 bp, Cannabis indica
gtgaaaagaaaaagccaaattaaaaaaatacaagtaaacaaaattgtgagagagaaaagtagtttcttgtgtaaaagtttgagagagaagaaaaatgcattctttatattagaaaaatttcgttaatatgtaaattgtttaaattataaaacatccctataatattttttatgttctacatgtccataaatttgataaaaacaaaattgttatacttccaattaatataatttttgatattcaataatttgtactatcaccattttggtgtttcaaatttgctaaacaagtccattttttgtcctacaaataaaaaaagctccattttctttcttctatatgtctaaatattaatgacgtttgcaatgtagcaatgtaggatggtccacctgcacgtgcgggacacgtttatattaggatttgcatatgctttttttttttgacaattgtgtattgggtaaatactaaatactattttggactttgtgttttataaaagttacccattacaccttctgttttattaaatgacaaaatagattttatattttctaaaatggtacaaataagacccttaacttaatttttgacaactttttttttaatataaccaacttgaaaatacgaatgtaaacagttttgtcattacacttttagattggattattattaaattttattttgacaaaaaattaattcagggtcctatttttaccatt

SEQ ID NO: 402624 - DNA, 733 bp, Cannabis indica
tgatcccaaatgcagagacatataattttaggtgggagaacatgctttcctacaagtctcaccaatgaagagtgtaaagagttttggaaagtagggaaagttaagccctaggtttatagggccatttgagatactcgagaaggttgggcaggtagcatatcaactagccgtgccactagcattatcagctgtgcataatgtacttcatattttaatgttgaggaaagatgttttagacccaactcatcatgtcttgagttacgaagccgtaaaggtaagctttatcactcttttagtttgagttttgggagttgtggttaggtttgaacatgcataattggaatttaggttcagtttgagttaaattttgttttagttcaatttttgggttatagttaagttgattgaggtcattttcagctagttttgctggtttggtaagaagttgagcaagtttgagtttgaaaactcaagcttggctcaataatggtggtttgagtttctatgcttgtttgcttctattattgcttggaaatagtttattggtgttattataggtattctgcaaagtttggttgaatttgggagaaatttgaatgagatttgaagtttttagggttttttctaaagagtcggttaaccgtttctccaagcatggccctaagaaccggcctgccatttggaattcaaattactggtttggcaagtttctagagccttagttttgtatgtt

SEQ ID NO: 402625 - DNA, 888 bp, Cannabis indica
aaatggtttatgagaaatgcatgagtcactttttatttatatataataaaataaatcccattaaataaaaaaaaataggattctagattttgtcgaattaataagatttttttttcctattaatatatagcgtacgtacgtgtgtacgtacgatattgaatatatattaattaattatagctaaccttttaaaactaccaactaattaattagattgaactaaattatatattactatatattatagtgaaactatatttttatttgtactcgtgaaaaaaacgtacctacctatggatatatatatatatgcacaaataatcatcatacatattacatatatgtatacattaatattattaattttgaatgaaaaaatctaaattcatctacaacatctatatataaatggattcaaataaaataaagaaaaataatttatttatatatattacttttttatttgttattggtacctaaggtggatcaactgatatatagtgtaaatttatgtatatatatgtatcgttattgataatgttaaaattattatttataggaagatgaggtttggtttgtgggacttttgctcatatagcaaaatatcatacttatatatagacatgttatttttattttgtaatttagattttcttagtcattatgtactacatgtattatttatttttgattatgaggaggtagatttttttattgagaaacatatagcgtgacaaattattgttcatatattgaataattatttttcattgatgggattcatatatatatataactgtgtatattgaattctttattcaaataattattttttatttttccaatgattatttattgtttcatatatctagaaccctatttgattaa

SEQ ID NO: 402626 - DNA, 582 bp, Cannabis indica
agatgaaaatttttacgtggttccgatattagtgaaccctagttcacaagtcaatcgtatttagctaagtagccttgatgtattatagtgttcttgacaagctcaagaactttagtttcttactatagtgtttacagaatgaattactaaccctttgcataagggtatactgtagtatttataggttaggatctgagttcggatatatctgacccgctagggtttgcatgtaaacacggtacactaatggggtaaatacataaaatacgttgactttgggcccatagactaaggcctaatctgtggggcgaaggtgaattgtatgcttagggaccacgcgatattgacagatagcatatgtgtgccgtctttgtgtactatagtgtcaaaatagtggtcgtcggacaaaaagggaggttttcttttggtggtgcgcacactcttagggcctgacacaggggataatcccctgatttggtgatattcagtgtcagagggccgccacatcatcctggactaggttttcaggatgcctcttggaattccctttcgaatgtatccaaatgctcattcagagggtct

SEQ ID NO: 402627 - DNA, 907 bp, Cannabis indica
  modified_base (855)..(855): a, c, t, g, unknown or other
aagtatattttcttataaataaggatggaatatatatttgatctatcaagtttattttttacattaaaatatgaatcgtatatataatttttctaaaatatatatatttaaatagtgtgaattagattagatcggttacttttatttataaatcaatattcaatctgcatgcctggcgatcttctccttgagatatttatccaatttgtgacactggtatctgtatgtaagattgggtcaaattcatttggaaccttaaacacaaggggattgtggcggaggaagttttcctatatgcatctctggtggttgataccatctggcgcacccggaacgacaaggtacataataaccttatagtagacgtgaagaagtgtattgactctattcgattttcttttgcagatttacatgctactatttttccttcccttatcccttgcctgaaagagagctagtctcctccccctcaggattggatcaaattgaattgcgatgttaaagtggggcttgatagcatgtggtacaggggttgtagccaaaaaccatcttggtaaggttggtttgggttcaaacgacttgagttgattatttgatgccctgtgcgggaagcggtggcctgttgtttggccatttctgctgatttggatatagatgcctaagtttgttattgtggagagcgactcgaatgatagttatcaatgctcttaatgggaactggactcattgggttattagaaactatgtctctttttgtaatagttactctcatttgtttactagttatattttctcaaatattagcaggacatgtaattttgtcactcataatgtggctaagtgggcgttcacccncaaaaaagtttgtgttattccgatatctaccactccgattaacatattatgt

SEQ ID NO: 402628 - DNA, 336 bp, Cannabis indica
tctctctctctctctcaaagtctttctctctctttctctctcgatctcccttgcaaccagttgaaagctaggatttttcagcttcaatccagaatgttctagttggtgctggtaggatttttaaagccaattcaaggtaaccatgttccctccctcttctctttgaattttcatggttttaggcttgagttctcataaaattttgagagatagatttttgtatgtgatttgttgatgaatttgttttctgtggttgttttggagatatttgtgttgatttgagttaggtttgaggcttgttgtggggtttggtcaaagtttgagcttaaaagttca

SEQ ID NO: 402629 - DNA, 698 bp, Cannabis indica
aaatacaaatgttgattcatgtatacatacatcatactgacttttagtgaaaccaatactagtaataaagttctcaaacctgatatttcattgccttagtgcctgcttcaatccatatagagaccttttaagcaagcatacttggcttagattgccatgttcatatccttgaggttgttccatgtaaattttttcatccattctccatgaagaaatgttgtttttacatccatttggtccacctcaaggttgtctttggctactttggctaacatgactctaatagaggtttgtttgataacgggggaaaagatttcattgaagtcaatcccttccttttgagtaaatccttttgcaacaagcatggccttgtatcctgttggttcaactcctaggatcccttcttttactttcgtgatccatttgcagccaattattcttgcatgttctggttttttcactacaatccatcttttattcttcagtagagaatccattccattatccattgctctctttcaggctctactttcaagtctgctgagagcctcttaaactagggttgtgcagaaatgattcaatccaatgacaaaccgaccgatccaatgtaaaccgaccgccaaaattggacatccaatcatgattggattggatcggatgtatattttgaaaatccaatattggatcggtcgattctt

SEQ ID NO: 402630 - DNA, 276 bp, Cannabis indica
aatatcttaaatattcaaccatattgaggtaggttatgcgaatacatgtactgcggtcggatggatagataaattttgtatggataatgttattttatttgttttgtattattttatttgttttgtttattattttagacattttaaattttaggaacgtccaattacagctgttatgttgccaaattttagtagaattagaataaattttactaaaaagcataaatatttaatcaaaagtacatagcacaaataactagttaattactagctagt

SEQ ID NO: 402631 - DNA, 856 bp, Cannabis indica
gagccatacgaagagtctaagagagatgccaattgtgcaaggagaatcagaaggcacttgcgaggcgagagctagatggctttatgacggttatttatttctgacacagaatcagatcttgtctcctatgtcaaaccatggtagtgcgtgcaccaccctttgaatactcttctttatctacggctcctctgagcattttatccacaaagtgtaagcgttttcccaatatgtgccctacaccaacaatggtccccactatacagttgatttgtgttggaatatattttaccatgatctagatttactaacaagtatgttttaaacatcctaatatgaatttctaaaacaatgaaaataaacacaaaaaaggtatgagaaaccttacagtggttgcagcggaattaaatgactcctttcgctcatatctctaacccttgtatcctttctgtagcagagtatcaccaagatctgagcccgattctccttcttgtttattggattcttcatagtgtttgcatactatgattgaggactcacttgttatgtatgggcatgcactcaatcactaatggctgaattttgttttgtgaagaaaggctacggtatttttaaattagaggaagaagaaggaagaggtctcataaacctagagagaaaactaggtttttagctttagagacattagttggataatgagaccatagccttccatttatacaaatttccactagggttagggttaaattatttgaaataaaaaatcgataaaaatagagtaaaattggcacctagttgccggccacatagtgggccctacactagtttggtttttcccctttttctcaactattttatc

SEQ ID NO: 402632 - DNA, 647 bp, Cannabis indica
agggccgggcctgtatatatatatgaggagtggtatattttgtctaccattatgaaaatgatttaattagaacatacataatatcataggaaataaagtgagaaattatttcccctttttagttttcattttgatgggtgtcaatccaccttgagcaatcgcaatcgtaataaccaggctatgttaaagcttaattagcccatgccactttggtttaaccaatatttattgagtacaggtcggcctgaaatttagtcggccataaaataaaaatatttttaggtctttatttaaaaaataatgcagtattttgtaaaattagtaaaaaaaaagttggagaaattttttttgagcattgctattagataccagtggtgtttaatactttcttgacatgtcgcgttgcgattggctaacgatactccttaaaagctattatattaaattatacgagaccagatacttagttggaccaatagtggtattgacacataaaaatgtactagacactgctcttaagcatttctcttttttttagcccctaaattagtctgtctatactcaaagtcggacttgagtgatatgaatagggaaatttcattttttacccttaataaaacccccaatatcaaaatttagaccctcca

SEQ ID NO: 402633 - DNA, 581 bp, Cannabis indica
tggtgaaaatgtgagatttatacgtactcatcataaaagtctcaagtatgttttcacccagaaagatttaaataggacgcaaaaaaggtggctagaattggttaaagactacgactatgagattctgtaacaccccgggaaagccaatgttgtggctgatgcactaagtaaaagagcacccgagtaggttttcatcacggttttgatagcctctcaaatagcttctgagatggttagtgcatgtattgagtttgtaattggaaagctgcacacttgacactccagtctaatttgctagaaagaatcaaaaaggcacaattagaagatcctgagctagtcaagattttagatgaggtgatggctagttggcctaaagacttttcaatctcgaatagaggaatgttattgcataaagattgagtgtgtgttcctagtattggtgagcttaagaaagagatccttgatgaagctcacaccagaccttattcactgcatccgggaaccaccaaaatgtatatagatttaaaaccatacttctggtggtatgggatgaaaagagatgtggtagactacgtgtccaa

SEQ ID NO: 402634 - DNA, 749 bp, Cannabis indica
ttatctttatatattaaaagtgctaatgaaaattcttcgtttgacatattttttttctattattttaatcattcacgttaagttggacgtgttggagaagattaataaaattatcaaaatatattaataaaaacaaaaaaaaacttataaagtggtaaactttaattaataaaaagttaataacaaaatataatttgtcactaaaataaataattctaattgctaaccggatcctcaaattcaatcgtaagcaaaaagtaataaaatgcaaaagaaaggtaacagtagatatttattattttaacaataaaatctctagaagtcgacaatcacatctgcgatcccgtggaaccattgagagtcgccaatcaattggagattactcctatagccacacacatcgtcagcgactcccaaagcatcaatatcgtcgatgatattcagcagctgagagcagtggagtttcaaaataattcaacctgcacggagattaattaccagcacaagtgaatgtgcaagtttcacctctacatgagaaatgacatcaatggaaaatccatattggccttgttcatcgagttgagacgatcaacaatgtggaaggcactttgctttcgagaacatttcgataactgcttttgtttggtcaatcatcctccaaccacgagcatgtgattgacctttcctctggcaagattgcaatcgggaatggctctctactagtgttagaatttgggaataagatgaat

SEQ ID NO: 402635 - DNA, 799 bp, Cannabis indica
tcagatttctgattgttttttcaaggcctttttgtatgatctttccgtccctttttttttatctttcttgccactatttataattacatagtggcagttaattacgaagttgactgtaatctttttacaacaatcatccactaaaatcatgggatttgattacttatcacgtagtgtaaatgcggttatgatttgaaaatcatatagctgtgagtttcccacgtttatcgggtcaaattgatcatgtatttaaacacgtctttaatcgttctatccaaggatgtctcgacaaaagcttggttccagtgatcacaatagcgagctggggtcatttttctttctgaggtcgacaatgcatgtctggtggcgacagcagtttttatttacaaagagttgttcgaggctcgtttgaatgttagcttttgactggtcaggattgtgagccttactgagaaaatgtctgaagttaactgagtgaagttacaagaagccttcccatagcgaaataggcacctcacttgctaagtctcgagccaacccgactgttacacttagtttatacattgtacactaagtgcttccgcaattgacatgtgtcgctttcgtcttcttagacgtaatgtacttgatgcctcactattcgcattcagcgacatgtagtttctcgctaatatactgagcaacagtttgtatattgattcctcgcataagaccttccagtcagcagcttacaaatatactctgatacttacattattaatgagatattccataaaaaatgattgcatcgatccatatt

SEQ ID NO: 402636 - DNA, 506 bp, Cannabis indica
tagtttgagtgactattagagtattgttattgtaacatatatgtggtgtttagttcaaccattttatgttttatcttttgctgatgtgtcaccaactgttttgacagttggtacccgagttagttgtttcaacaaacgaccaacttcacatactataaatagaccttgtaacacactttttagttatgttgtaaaatcagattttagtaataaaggaatgaaaaggagggatgtttaagggaactaagagcaactgatcttggttccctattggtgaggttcaatgtaatttcttctcatcctttcttcattgtatgtactgttttcaacatcaataaaaggtctatgtttatcgactcttggtgttaattttctctttgaattgatctttaagttgctggttatatcagcacagtttgtgatcaaactgtgtgggtaattgtgcttggttttggttgctgcattgtgttcttgattgggttcttgagagtgattcattcactaca

SEQ ID NO: 402637 - DNA, 475 bp, Cannabis indica
tttgggtttctaaagtggctgcaacgctaattgcaatatgtcgattttttgttacaatttaggttgcagagctagttgaataggagtttctatgtagaatttcgtaaaaatacaaaaaaaaactattttgaagtgtaaaaataaaaaagagaaatttacgcatagagacgaaattttaaaattaatattacaattaccgctaactatataattatgtaatatattgttttattttaaaattttaaaattatgtaatataactatataaaattttaaaattaatatgcaatgtgcatattattttattttgtttcagcttttaatcatattggtttacttttttttttctctaaataatatatctatttatgtttttgtcattatcttaattctttcttttcaagctacaactttttttttattattataataacaatattcttttttataaaatttagtgtatatattatttttt

SEQ ID NO: 402638 - DNA, 491 bp, Cannabis indica
aactttacggtttataacacttaaccacaaaaattgaatttttggcaactaaactacttaaaccctggttccgttttgctctgcacacctccgtctaaaaatcacagttaagtgtcacattagacttttcacgtgtacacacttgtacacgtaacaaatttctagtggtccacgtaatattaattttaaaaaataattataaatatttaaaaattaaaaatcacatttttttttcttttttaaactttttaaaaatttaaaaaaataaaaaaatttgatttttttttactttttttttttcttttcttcttcttcttcttctagccctctttctctttctctttctcttgcgggaggagaggccgagggcaaggatcttggcttggggaccgaggtgtcggagctggtagctccagcccaaccacatatagcccatgaactactcaaattcccagatgaaaatctcatgaaagttcaggtgcaacaattct

SEQ ID NO: 402639 - DNA, 617 bp, Cannabis indica
gaatagcactctcaattatataaaacgctctatatgtactacgatatagatacattataattaaccattgttacaatcctaatagtcaaagatcctctatagatgatctacattgaatagggataaatttaccgttctactcttcaatatattttatccttaaaacacttagctacctataaatgatatttcagtaaactaatataattactgaaatgagacctcaatcatttatctctattcagccaagctcgaaggaaattactgtttcacttccaaatacttatagaagctatagattccatatatatgattagcgttctcactcaattgaactaccattgccagaaccattggttagcttccacaaaaaacttgaagaacataaataatatagctaagctgaacctaaccatatcaggattaagatccatagacctaagatcaactattgatattgacttagaaagatacaacagtaagtttataataacttgtctaagatcaatatcggtcccttccaatgtatacttcatacatctgatactggtaaactttgccaataccctaaaatggacataacacttatccaaggtgtaagtataccttatcgctga

SEQ ID NO: 402640 - DNA, 558 bp, Cannabis indica
tgtgtaggctatattttgaggtccgaaatcaatttctcaatttttccacaaataaaatttattatttattcttccaataaataataattgattaattctcattaatctcttattttgtaaggattaaaataaatattattttctttgaaataatttatttctctctttaatattatttaataataatattatatttaactaattaatataatttcatctaataaaactaaatagttaaatactattaattatacaattcataatttttataattaatcaaaataataatttcacaaattactattttacccttaagaatttatttcccatataaattaattatcactcaaaattcattcatcaaataggggtgactcggggaccatggacctatattttaaagctccaataaatccaagaaaactatgaatctcctcaatagaataatccggtttattaattctattattactccactataaatatagaattgcactctttgacaatatataattatatttacagaattcttacctgtagtctattgatataatcaat

SEQ ID NO: 402641 - DNA, 556 bp, Cannabis indica
actgttattattattcttgtttactagtaacatttagggctcgtttcgtacgccgtattataatgtattatattgtattgtattagtattatttaatacaatacaatgtttgatattatgtttgatattgacttgtattaattgattgtataaaattataatatatttttaatacactcgatcccaacaccaactacgggtccgagtctgggttccgggtccgggtctaggtcgggttcgggttcaggtctgggaccgggtccgatccgagtccgagtctgggtctggtcctgttccgttccggtccgggtttgggtctgggttccgaatctgagtcgggtccgaaacttaggtccgggtcccgagtcctgggtctcaggtcatagaatggtgttgaccccaaatcttttgtaaacataataatacaagctaatatatgccatttattatgtattaaataatacaacatacattgtattaacaaatttggtcgtaataattaatacaatacattactttatccaaacataatattatttattatttaatacaacac

SEQ ID NO: 402642 - DNA, 541 bp, Cannabis indica
agccatgggaatggaagcttgaatttctgttgataccatatgagtgaaaagagatgaaagtgaagaggaaaacagagaaaatactctgtattgaactcttttattattattgaactaaattaatacaatttacatgagaaggactctttatatagagagctgagttagttgggaataactaactcagctgaaatataacagcaagagtcaagaattagttaaccgaattaggtaactgagtatgaaggagggtaatctcgtaataattacctccaaccaaacgccacctaaattctaacacaatataatgataattgttgtactaaaaatcgatatggcggtcgaggctattgtgatccgagacaacaattggtatgtaattgtggaggcaattaatgttgggtgcatattagaaggtagcttaatttggctttggcacatactttgtactttgtgtctctctcgtaactagccaatattagaatatttctaattaaggaaataaaataatattattgattctgataaatgaatattttat

SEQ ID NO: 402643 - DNA, 867 bp, Cannabis indica
aaggtcccaactatctttaacaagctggcggcacagaggttcacgaagccagacattttcaaaacagaattgatgaaatggcaccgccacagaacgcaccgtcggttcaagaagcatcaggcaatgatctgaagcagatacttctagattatggagctgagccatacgaaacctctggaaccagttagaacaaacaagagctcgatcaagatgaatttcaacccatgaatcagtgcctctcccacgctcccaagtgtaaggatacccaattaactccatatcaacaagatcacagtcaaacaaagcttgattaaaaccatccaccagcacttgcagatatctatttcctcctcttttctctgcacgactagtagtatagtttaaatcaccaatgatacaccaaggaagggatgattttgactttaacgatctcaataaatcccatgttttatacataatagctctattaggtactccataaagccctgttaaacaccaaggaagagaagctacttccgagatctgaatatcaacataatgaaaagaatagttaagcagctgcacatcgtcattattacgccaaagcatggccaccccaccactatgacctctcgcatcgacaaaatacaatccatcaaaccccaccgcaactcgtaacctttccaacttgtccttacgacaaagagtctcacacaaaaatagaaaattgggtttcttttggataataagatccacaagcaattgataaacccgtgggttcccaagcccacggtaattccagctaatgatactcataatggacggtgggcctattggaaatattttaccaggatctagatttactaccatgtatgtttcattaacatc

SEQ ID NO: 402644 - DNA, 719 bp, Cannabis indica
gtacggctacaacaaaatagaaggataatgtagttttgctattactttttttgattaaaatcatatgtgtaataactgaaaatattataaaaattttgccgtaaatataactaaattaaattatttaaaatctaatatttaattttaccagtactaaaattatagtgctagacatgtacaagtcatttaacaacatcttacaatcagaaataatactcccaaagtatgaaaccataagaatagagatacgtaacgcttgcaccacagtaatactatcggtttcaatgataaccttcctccaatctttccgttttaaaccaactcagtgcctctttaacacccaaagcttccaccattttgggttgcaacacccctgaccgacaacaggtaaaagcttccaccaatgcgccagtttcatccctaatcacccctgcaaagctataagttgcagttcttgaaaaaatgacagcatctacattaatcttcaaggtgttttcaactagtttggcccaagttttagcaccatcgacatcagtaaggaatggagccgtaggattaaatgttgaatcttgagctcgagtccaatctgcgagtaaagcttgagctaagtgagaaacattcgcaacagtaggggacttatcagaccatactagctcattttgatgtttccaaattgcccaacatgtcattgcgatcacctccttttctccccatccgcc

SEQ ID NO: 402645 - DNA, 896 bp, Cannabis indica
cagtcacgtaatccttttgacattgatttggtaacataatccgtgaacataagattattagttggcaactcaaacttggtctaaaaaaaatctaaattcgtatatatattgtattttttgtataatgattttgtttgatctattacaagaaaaaattagaatgttactgctattctatctcatatattctgaatgcctgtatcatcaacgtcctcgaactcaaacttattcataggaatagtattgcgaacaagaaacttgatgtaattgttaaacttgtttccatagtcatctaccggggccctagtcgccatatgaaatctaaatttcaattttcgacctgcaggctgcttggccagttcttgttcaatatttttccccttatactttcccctaactctcttttttaacctccacttgaacatgcatcagccattctacaaatacaagctacgaataattaattaatcaaactattaacaaaagaggcatgtatttgatttaattaatggtgggtttaatattacaatactttaaagtctacaagtcatcataatcatcatcatcattaacgggtacattaattttattatcattatcactagtgtcttcgtcatcactataaataatgaagtcatctaaatcttcacggttaggctgctcacgacccctattggtcacttgaattgggtcaacatcatcacggacatattcgacatcgtccaattgtgcaagttgaatgactaaaaggattcctgaagagtttcttttttgtatagccttggtctcattatcttcctcatctgaaaaatcctagacattgcgaagggtgtaaaaattgacaagcttcgaatcaaatccgttcttcagttcaagaatgtaatacattgaatttg

SEQ ID NO: 402646 - DNA, 551 bp, Cannabis indica
gtttagctcgtggtgttggttttgtggaaatggtggtttgtggtgttgtgcgggtatggatgaaaaaggtggctggaggtcgagtgtcgtggttgtttgctaggcctggtgatgttgcagctccgtggggatggatggaggtgctggtgggaggagtggagtcttgctgctggattcttaaattgggggaaattggcagcaatgatggggatgaagcttcggattttgacggtaatggtggactgagttgttggttcgtggagatggtgattcggtttagggattggtggaaatggaagtggtgactggttcgtggtggataggagggtggatggatggaaatggtgataatggagttgctggtggtctcgtgggattggtggtggttgtgcgtggagctggttaatggggctgattttgggggagtcggctagagtttcaaagatgaagaagttagacagagaagaagaatgaggcgggaggatagaagaagaagaagaaagaaaaagaaaaaaaaatataaaagtaaatttttaatttaattttttaat

SEQ ID NO: 402647 - DNA, 607 bp, Cannabis indica
aaattctcttaatcaaccagatacaagaaattcaagctcaataataataattgatattaaaacaagcaaccccaataagttttaccaagactaatattaccaccaagttacaaataaactttttttcaaaaaaaagttataaataaaccattgatgtatctttttttttagtaaataaataatccattgatcaaatagagaactttacaaacaaccaaaacaaacgacctcaatcactcacaacaccattcccctaaaccagttttggtcttttacactcacagtccaacactctatatggtaatatgtatgatcccaataaaccgcattttgggttttaaaaatatagtatacgactcactaataatagctaaaatattcagcaccaacgaaagcaatctatcccgagttttaagcctcccaagcacagctagccaagacataaatcgatgcttatgcaagctcagtcaagaccaaattagacagtaccgaaacaaaactttcattgccatctttcagagtttgatacaacatagttgctaaaagtcttctgcctcataacattcataacagtcaaggagaaatgatttttcaggatttcttggac

SEQ ID NO: 402648 - DNA, 549 bp, Cannabis indica
taaagactatattttagtcacatttaataataaaaaattatattgtgactaaaaaattgttactaaaaataacaattttttgtagtgtcttaatttttttcacaacattagctatagctactataagttataagttgttaataattattattacaaattaatgacagatcgttgatcagtttcttgacatatacccttttgccttttaattacatctttaattattttaatatgtattgacaaataagaaagggacaagagttcattttattaggatattacatatgaaataataattaagtcctttagtttaggggttacccatgtgatgtgatcatgagatatgtttcatcttaataattaagtatatatatatatataataggataaatactattttggaacctggggtttgcaaaagttatagattggaccttgtgttttgttaaatgacaaaatggaccctgtattttttaaaatagtaaaaataagaccctgagcttaatttttaacaactttttttttaatacaaccaacttgaagacaatg

SEQ ID NO: 402649 - DNA, 640 bp, Cannabis indica
atatatatatatatggatatatatagtcctaatttattatatatatatattttatatctatagctagattcagttcatgcacttgcggttggttttttggctggtccaaactgcatctttccttttcctttttactaggtgcccgcttctcatcataatccaatatatactatcctttcaactcatcaaaataaatataatatataaatttttatatatatgaggtgtccataaattatccactctaatgttaatttttaattaaactaattaatatttttaagttaagtttaatagaataattaaattttatgttattatacgtaagaataaatatatatatatataaaaattaacatgaatttttttttttgattggatggagttatatttagttaaggtgtaatgaaaaggggtacttttcaacttatcccgaaattaattgaatcggatcggatggtataatttaacatctaatatataattgaatcgaatctgaataaacttaaaaacattagatacggtccaataaacacccctatatttataagattatttataccacatactgaaatttttaatttttttacttttttactgtggggcggtgaattttttttcaaaaacactgtgtaagttt

SEQ ID NO: 402650 - DNA, 699 bp, Cannabis indica
tgtcaacctgggtgctaggccttgcttttggcacccatgagttattatttcttccctaaaagtacctatttccctatttttgatgaagacaaagatgatgcaaaagttggatcatagatatgacgcttggaagtcaccctgatttacaaattgtcaacctgggtacccaggcaccaggtgctttgggtgctcaaaaatgaactttctttgaatttgattttgatgcctcaaatatattaatggtatgtctagttcatgtcccaatgcaagttttgacccatttacactaagatggtctcggaaatcgaaaccctaatcaaggatgtcagtttgggggctggatgaaaccctaggtgcctaggttgactttcgggatgcaggttcatgtaatttcagctcttagggcccgaatttgattgctccatgtcttcatggcaaagaatactgaaagatagtgagttagaaatgagttattgaagttcgaacttccatctcggagttcccaaagtcaacatggacacaggattagggacccctccgaggtcgactgctatgactcaggtctactcaactctgtgacgtcatcttccttgtcacgtgtcaaatattgatatccacgtcaccaaggaaagttttcgggttaacattcgaaaaaatctattttgatttgtcaaactagtaattatttattttataata

SEQ ID NO: 402651 - DNA, 603 bp, Cannabis indica
tcggattttaacttgctataggtgtatatattccctaactttttgttattataataaattatccatatatggttagtggagtttgaatatcttaaatattcatccgtggtgaagtaggttctgcaaatacatgtactgcggtcgattgagtggataaattttgtattgtttatgttattttatttgttctgcattgttatatttgttttgtttgatactttaggaatttttaaaatttttgggaacgcccaattacagccgttatgcaatcaaaaattcagtagaaatagaataaattttactaaaacacataaatattgaaggaaaagtacacaacacaaataactagttaattactcgctagttgtaagaaattaggtgacataacacatttatataaatttttaattataattgacaaaccaaacaaatgaatggattcactttagggaaattcattccaattctacctacattccaatcaactaaacactaccctagttaattaattacaactcatacaacttaataacattaacaaaactaaaacaagaatttagtaatatataataatatgattaattgtgagaaacctagttagtt

SEQ ID NO: 402652 - DNA, 880 bp, Cannabis indica
catcttggtatactgttggaagccaaggccaaatgtgtgagaggagttgtttctcctgaggttgccgaagctattggaatacatgaagctttgagttggatcaaggacaaacaatggagccgtgtggaaatagaatcggactgccttgttgctattcaatctattcgtagctcttctaccatgtcttcctattttggtagaattattaataagtgcaaaagtttgttagatgatttgaaagattgttttgtttctttaaggtttgttaaacggtctgcaaacaatggagctcactatttagcgagatccacttgttttatagctgatcgtagtttgagtgtgagcactgctccctcggagttcatttctgtattgatgaacgatttgatttaatgaagttttcttctattgtcagtatcaaatatatgacaagatatggcaaaataatacatatctttgtcaaaacaaatttctctcaactgccactattcaaattactttcatagttaaagacaccaagtcaagtaagtttgaattattttacaattctcatcaaaatagaattgtaattcaagaggtctctaaatttattggtgtgagattaaaaatgagttttcttttaaaatgaactccatgtctccaaagaatacatgatcacaagatacaagaagaaactatgaactacgttcgatttgatcccattttgggtacgtaggcaacctaattgctaagattaggtacaatcacaaatcctctaaattccaaatgaggtcattaacctcatcaaatcccaaatgaggtcattcacctcaaaattctcaaatgaggtcttttacctcaaaaaatctcaagtgacgttctcttatctcaaaatgctaaa

SEQ ID NO: 402653 - DNA, 917 bp, Cannabis indica
aggattaagaacatttgatctaggatcaactaggcgatattgacttgaatagattttacggtaagtttaataaatctaagtcaaagttcaatatcggtcccttccgatgcatactccatgcatccaacctgagctttactttaaccaatgttctggaaagaacatagcatttctccaaatgcaagtaaactcttgttgtagattatcatatcagtaaaaccctgtgtctgataaatctaggaaactttattcacatagtcatgtttactttccaaagtgatgacaacacaataaacaggatcaagtatgtgaaaagggtttaagatgaatttataaatcaaatagacaagcaattgataaagtgaaccaaaacatacacaaatgaatgaaaaatacttctgtttctttattgatgttgaataaaatagattacattgaaatggagttttatttagggcataaaacccaacaatgaacaggacggataaatatttgatgtcctttggagtgaactgggttgggcgagagatgatagtaatgcgcaatcctcttgaagtacagaaacaaaggcagcattgcaccctgcttagtatgagcacccgacaaggcacaatatctctgtcttggactagctggccggtaatttggagaagggaaaaagcctttgacacctcccaggtactcgtccctttctaaagttctcatcttggcttgggttactatagatggaagagaaacccaccgagctgttggaaattattttaccaagatcttagatctactcaccagtatgttgattaacatcctaaatatgaacttctaaaacgattatgcaataaacacatataaagtattagaaaccttacattgggtgcagcggtataatatgactccttccgttcagatttctaaccctt

SEQ ID NO: 402654 - DNA, 864 bp, Cannabis indica
ccttgaggatttcacttctatgtttcagattacttggaacacaaaccctagtctcttacaataacatcctgttatctgacatcgtaaaatctttagcttgactagcttaaacctcttctcagatcttcactcattctggatcagtaaatttagcagatttaattcattctaacagattagattggaacgtcagtttatgaaggttgcctacaataaactcaatgcctgatctgaccatgtcttctgctagctgaggtgaaatcttattcttactagttacttgctcgggatccttcctgctcagggcatcagccactacatttgccttctcgagatggtaaagaatttcacagtgataatcaatgcctctgtctcatattcaatttttctaggtaaagaagtatttgtggctcttatggtcagtatacatctcacatttctctccgtagagataatgccaaaaatatttaaagcaaaaactaccgtggcaagttctaaattatgagttgggtatcattgttcatactcccttaacttaaaaaaggcataagcgatgacccgatcgacctgcatcagtgcacaccccagaccctgtctggatgcattgtagtgaactacgaacttttcctgatcagatggtagggctattactggagattcaatcaatctctgtttcagctccttaaaacttgcttcacacttgcctgaccataaagaccacttatcctctttggtgagttcggttaagggcattgagatcttagaaaatctttctaccaaccgacggtattcaccacctagactgagaaagcttctaacttctataactgtctttggtctcggccaatccctgacggattcaat

SEQ ID NO: 402655 - DNA, 820 bp, Cannabis indica
ctaagtgtggccaacccaagggagagagagtttggaaatccattttttttttctaatttcctcattgtaataataaaattaatttattatttagcttattttaggaagaaaaataataaatctaacgattatcacaatccacatactattagagacaaaagaagggtgaattaccaatttacccttattttcacattgaagtagctttgccacctaggagtattttggtcaaactaaatatccccaaacaatcccaacttactaaaagtcattcgataatgccctgctatttctaaagtactaaccatcataaagtgactctataggccatacgtcacattccactatcactagcataaaataagaaaaacatgaatttttgcatataacataattaacacgcttacatttttaaatatatctccacaattgcataaacaaaaattaaaagtctaattttaaattaaactctaattatctgctaattcttagagataaactaagcgatcgttatagttcctgacctatttatctaatcgtgattaggtgtatcgacacctgattacggtttggatatatgtttatgtttttgattatgcttttcttactgagtctgttgacgtacaattattacgtgtatgtgtaggtaagagctagaatcgaacctggatgagtctaaagctaagggtgaagattttacatatcaagactattagacttggaatgttcagggtctttgggaaaatttaggttcccttttgatagtcgttggtagacaactttttatgtacaaatatttgtaaacttatgtaacttttaa

SEQ ID NO: 402656 - DNA, 500 bp, Cannabis indica
ttatttagtctaatcttagatatcaattttgcatattctatcaaatggctaaataattagcatcattgcattctacattaaaaatttccaacaacatataacatatattaaatttttggagtaccaaaattccacctaagcagtgcacattaattatcggtgacggtaaaaatcagtgtattaaaaatatcgccaaaaatatgggtagtatatttcaaaacaactacctcaacgagtaaatgataactctatatttatcttataaatatgaccaattttatgtgttattatttttaaataagcctctttaaacatttgattagtgtgattttaattttttaggattttagaaggctaatcatgtcttataaatatgaccaattttatgtgttaatattttaaaatagactctttaaaattttgattagtgtgattttaattttttaagattttagaaggctaatcatgtgtttgaagtattttggaattgttttagcata

SEQ ID NO: 402657 - DNA, 636 bp, Cannabis indica
tgcctcgtacaatgactctaaatcctccaagttatcaatgctcatatttctgacacctggtaatcttgggagacttaatagtggacactgcttgtcttctctaatatcaatacttatcaatgaaggaaggaagccaggcaaatctccctcgaacacaggacaatcatcaatctcaagtgttttgagcttcccatatgttgttgcctcttcagtttgcattgaatgccaatgcttccatgatgacatatccttgaaccttaatgtttccaatgatgaaaatggctttctcccagaacaattcccgtaaaactcagcccccaccgtcactaccgaattgcattttgagatggaaagatcttttagcaaaggaagttgcccaaatggtggtaaattggagcaatgatcacattcatagagagttactctagcaatgttgctaaatgaattattcccaacccaatttggaaatattttgcctggatagtaattaatctcgagctccttcaacgttgtgtttggtgaaagcatttcaagcacgccctctccatgttttggatcaacaacaacatcattaacactccattctaacctcaatttctcaagttgcttcctctctagtacaataacttgatccgg

SEQ ID NO: 402658 - DNA, 981 bp, Cannabis indica
attatttctagagaaacatagatgtacatctttcattctgaaattaaagctaaaaaaaaatgggtggattcttttttcccaaaaaataaaaagccaaagaatattattgtagcgaccacaatatttaaatatggattagtgagattataagttctaattttattattatcattaatattgttgttttatgtgaatgatgatgttaaatgtaaaatatgctatctttgtgattttagctcggagacgatggaaaatgcaacggaggttattttagccacttggggaaatatagagctttttagtgatagagaatatgtcatgtaagctcaaatggttggtgttggcggggttgtggtattagactattttacccctaagctgattattgaattaggtttagaggtaagggtagtttagtaattttacacttttggataggtgtcttcacctatgtttgagaccttccacctaattaaataaaggttaattagttaaccttttattagttattttatgaaataagagaatagatgagaatactccttcattgttcttcttcttctttgttcggccagcaagaaccaacagacaaggggggaattttctttcaatttcagaggttattaagtgaaatttgagggcttaatctgaggtaaaaaccctaagcttgctctattatggatttatgatgttattggaaggttttgttaagtttagggttgattttgatgaatttggttatgtgttggtaattttcgtttagggttagtttccgtaggtctcaaatgatgttttaagattgcttgtactgcttttggtagtaattttttaggttgagcaagtttgagttcatggagcttaaacttgactcaataatggcatgttgagttctattgtgtttttcttgctactattgtgtgggaattattctagaatgtattttcaggtgttctggagagtatggttgcatttagggaagat

SEQ ID NO: 402659 - DNA, 1239 bp, Cannabis indica
aaaaattatatatatttgaatttcaggttggtttatgtgtaacttgatttttttcgagttttgaattaatgaaactcgaactctactagtgatgaattgaatgtaactcgaacccgatttactaaaattgaaatttatttttttttagatttttcagattttagatcaggtgggttttaagtttcgggtgtaaatgtgcacccctgatttgtatagtagatcatgttttgaatccctcacctttttttttatgtataattaacttataattatgtccattctaaaattaaatcttgaatcgacccctatttatatgtacatatttcgaagtaactattagaaatggtcctaactattaccattccataagttgaggtgtggtcctaaccattccatatgtattgggtgtgtggagttgagttgagttgaccaattacttattaaaatggggccaaaacccttttcaacactcacaaatcacaaattttttcttgttttttttcctaaattaataattagaaaaaatgtgagtgaaagaagaagaggaaagcaacttccaattacaagagtcatattcttgacaataacaactatatatacccaaattagcattagttggagggtcccacaaaaacacaaattatacatttttattaaatatttttcaaagtgcttcaaatcaaattattactattaaaatacataaatcttccattttttttaatgaattaaatacttttttaatgttgtccttcaaaaagtaactaaatttaatgtaaattaatattaaaattactttgcctaggaatgaaaatttcaattcctctaatgtctttttcaaactaatgttatatacataaatatacacttttatatatatagcatctagtcttggcaacttattataataatcacattttaaattaagtagttagaaagaatcttaatcatgtttatcctttttgggtagccccaaattgattgaaaccttatcttggtgttgtctcatcatgttaattacatatataattatttatatttatacttatattattattattattattattattattatgtgagaacaattacttctccttacacaataaattagtcaaattggacactcacactcccactatttttttttattgttccactttaaaataatttcgtatacactctatttgttttggttatttagttagatttttttaattttattttttttattttgtt

SEQ ID NO: 402660 - DNA, 721 bp, Cannabis indica
aatccctatcgacccacctcaattctccaaaactggtgccagattctaacttcaggagccataatcccccaaatcgaccttttatgccagttgtgtctccgttatggccatacagcaccagtttgtcattatcgttttgacaaaaactgggtcactcctaaacctggttcatctacaaacgctcaaaatcaacctcctcccaaagcctttcttactgagcatgaattcgattacgatcctcaagcctttgctgcatcttttgttcctgactttggggatgactcaggctggtttgtggacacggggactaccaatcatgtaacaaatgacattggccatcttgattcagcaactgtctatccaggaacagaagggcttgctgttggagacggtaagaaactcctcatttccaatattggtcttgcctctttacctgcatctaatagccaatctttaacattacaatcagttcttcatgtacctgcaatcactaagaacttagttagtgtatctcaactaactaatgataattttgtgtttcttgaatttcacaaatcatgttgctttgtcaaggacaagcaaacagggaaggtgttgctcaaggggactcttaaagatgggctttatgtgctagaagaatgctccaagaattcggctaaggaaaggcaacaaatgtaggtagtgtctagtggtcattatcctaccgctatgagttgtacaa

SEQ ID NO: 402661 - DNA, 642 bp, Cannabis indica
ttttattttttctagatgttactgtaatgtatttccactctcacgccgctcctctctgtctttaaagcctgaaactgaaaaaacttgagccattgttcatatcccaagtataaatcatccgttttggtcatttctgcaacatgaaaacccaatattcaaagagaaggaaaaagaaaagactcctattcataaacaaggaacagcttagtgaaaacccaattaccatatccataatcaaattcaaagtctgattctagcttagagtggaaaataataatataacgatgttcttaaaacccaaagagaacccctaaaaccccacttgacgcagcaaataaaaacgaaactagctgtaaaaatttagcatcctccgaaggttaagaaaaaacattcctcggcaatttttgaagtggccaaacagaattacaagcatgaaagttaagaaaaagcataaactttgctaaagcgaagtgggttcataaaagaagaagtacatttgagaaaaaaaaatgatactttaaggtggaggtaatgaaatagaatggaatggaaaggaaacaatttttattccattccattcctttccaccattttggtggaatagttattccattttaaaaagaaaggaatgaccattccaat

SEQ ID NO: 402662 - DNA, 1514 bp, Cannabis indica
cccgccatgtttcgttgggctttggaaccagtaccggattggctagccattctcgatagtagacatctcgaatcatgccacttgttagtagtttgtccaccactttttctaaggcttcagccttcactgagttgaggggacgtcgcttctgctggaccggcggcatgtccggattgacattaaggacattggtgatgacgtggggacttatgctggtcatgtcttcttggcaccacgcgaaaatttccgtggcgcccctcagtgtctttattattttttctttttcctccggttctaggctctttcctagccggaggactttggtggagtcgaggtcgcacaccgacacttcctcgacgtcctccattggttctacaattttttcagatcccacacggggatccaactcatcatcttctgccatttctggctcaataatttctcggaccatcaagacgggtaggtgggcagcaacgttataacactgcctggcctccccttggtttcccctcacggtccctatcccagcttcttgggtggggaatttcaggcacaagtgccgtattgacgtgactgcaccaaaatctaccaaggccggtcagccgaggattgcattataagctgttgggcagtccaccaccacaaatgtgcagtacttgaaagtgctttaggatgtgtccgggcacaaggtgactgggagcctcacttttcccatcgggataagtgttgttccattaaatcctgtgagttgggaaccacttggtgaaaggtctcggtccgttaggcctactgcagtgaaggcttctttgaataatagattccaagaactcccgttgtcgatcaagactctggccacgatcttactggcaatgggagtctctatgaccgaaggatcatggtgaggaaaacgcactgtcttagcgtcttcttctgtgaatgtaatgggctggtccattagccggggcctttgagctgggagctgagtaacctcccaaacctcatcgcatttttttgcccctacgtatcacttgagctccttacgggtagttcctccgatgtggggtcatcccgagatcatggccactctcccgttgggtcttggtggcagggctggaatatgttgggcatctctggggggagccactgggaccaatgctcctgctacaccccctggcgctccttgaggcacagttccagccgcctgaaccggattgagatggggcaaccagtttttgatccactcgtagagatgtcccaatcggatcaagttttcgatctcgtccttgagatttttgcattcattggtgatgtgcccaagtcattgtggtactcgcatctcttactggggtccctctgggagctatccttgtacagaggggccggtctctggtagtgcgtattttgcctagtagcaaaatatacacgttcttgggagtccgtcaactccgtgtattgagtatattgggaagtatatgttggaaattattttaccaggtatcttagatctactcaca

SEQ ID NO: 402663 - DNA, 544 bp, Cannabis indica
cggtgtgccagatgctgtcgttactaaggctgatcatgggttgggttggccggcttgagggtatttcaatgggccaacccaataagatcggcctgaaaaattataacccattcaaattatctttatgcataacccaacccaacccacacatcacgggttgggttggtttggactacaactcttatgttaaaatttagatctaaacctaaacttaagagaaaagaaaataaacactgataaaaactatcaaaattcaaaaattagtgatcataatacagtcatctaaaatattataatccaaatttacagtcatccaaaataatataacaaatataatctaaaaattaaaacaaataattaaaaaatttaatcatcatattctttaattccattatacagaggctgttgaccgaggttttcggcaaccaataaaataataaaaatttagagagctgcaagaaattaagaaggagattttttacgtggttggggcgttaatgagccttagtccacgagtctatgtatttatgatagtatttaatac

SEQ ID NO: 402664 - DNA, 506 bp, Cannabis indica
ttcttaatcgatattttagactctaccctgacttggatttggacttggacccggattcggatctcgacctggaccccggacctagacctaaacccaaaccccagacccagatctgaacccgaagcccgattcccaatccagatcaggactcgatccccggaccggactaggaccccattcccagtcacgacatcggacccgaatccaaaccctaatctggcgccaaactcaaaccctgaccgggtctcaatgctggacccagacccggacctggactcgatctcagagtcggaccccagctccaaacccgacttaaataaaattaacaaataaaaataaaaataaatttacaaacacacttttatttaagttttaaattgaaaacaaaatagttgtaaaatacatttttgtttttccaatacaaaactattatagtaagttgcaaataaatacttaagtttaattttttgcggttaataatacttaagttatatttctgaaactat

SEQ ID NO: 402665 - DNA, 673 bp, Cannabis indica
agatgcctcgctagcatgcctaaagcaaagcgattagcaatctgcacagagcaaccaacacttagcgaattcaacttttgcattgtgagtcatcgaagaaatccctataacttggggatcagattgcagagatatggcatgctgtccaaatcccacgatcagtgtatactacatttatcatgtaatctttctacttatatccattgtaatgagaagggaaacacttcctctccaagttcatagccctataaatagtgatgcatgttcactgggcaaaagggggaaaaaaatttattcgatactttacccttgagatattatctaagaattcatattcagagatactgttgtaagagctataagaaaaggaacctttctccttgttcttaagtcaatacaaataacgaggattaggctattaccgaaatgctcggggctgaacctctataaaattattgtgtttatattgctttactatatatcgattgctataaatcactcatcacttactaaataagactcattgtcattggctaaaagcgaggtcaacaaggtgggataagggatcttctttccaagtatgcaccttccaggttggcatcttaaatttgtgggacaattctaggatattaatcttgggggagaaaggggttccatgtgctcggtccaactc

SEQ ID NO: 402666 - DNA, 732 bp, Cannabis indica
aatatatatatatacttcacgattacttttcaactttttttaaaaaattattataatataataataataataataataataatataatataataataatattaataaaaacttaattattaataattatcttatcatttcttagctactaagaaacttctacttctagggcgctacctaaaatctcatatactcttaattatcttaatatttacattatcaacttatcacaatattcccactaattctatcaattaagcctgttatgacatttctgacccctgatcgagtctccaaggtcgccaaaactgaaaatatttttattacaccaataactcatattacattcacatatgccatataaatctccataatttataaattatacttatttatccacttataacaaatttaaaatttatgttcaactagattagtaggatcataatcccacttattacctgattaacccataatataattataaaccctaattattaactattaggcttattgggatattacatgttacccggattttgtagcagaggggaaaaaccagtttttcagcttgtcgtttcgtgtgagtttcaggtttctagttggttgtttccctgctagtttcggatattgccatattaatttacagtagataaggttttggtttttaaaatcttagtcccggttgtgattttagcgagtcattttatgtgtgttattatcgatgtgattt

SEQ ID NO: 402667 - DNA, 1721 bp, Cannabis indica
aagttttacacttggattacgggttaaagcccgggcaattctaaagatgtcaacatttttttagaacataccactgctaacaataacagaaaaatttatcaagtatgggctctatagagataccgaggaggacgatttggtggtcgagaaaccacgacttgaggttgttagttttatggtacgaaatcatgtatgcagcgaaagggttttatattatctagttatcattgtaccatatcccaatgaatcttcagatgtgtgtacattaaatcaaaataataaaataataagtctagagtatacctcttgaaacctatcaaggtatcctcaaaacttcttatatgttgtatcccttaatccagatgatgaggaaattacaattggactcacactagtgtcttccaaatcgatccaccacgcacaagaaatagtgtgggctattaggataaattgtataagctttgttcttgttgagttctcaacgaatgagcaagaacaggagaaaactgttttctttttctttctaggtattttgaaaatagttgtgttcaggaagtgagaagtgtgttctcctatttatagtagttaaatcctttaattaaattatatttaattgtttaaataaataaatatcgacaactaaattcagttactaatatttatgagagaatatctcaactacttgagaaaatatctcaacaaccttaaaatatctataatcacttttcaaattggatagtttttttttatgcaaaaattggatagttacctaattgaatcaattaaataattaattaacccaaaagacaaactatagggacagtaacatgctatagacgcctacttttgtctttaagacaatgttggtgtcttttgtcatgacatctttggtcctgaccaatattgtcttaataatttttgtcttctccatatttaatcaatttgaaatattatttatttattacaaaaataaataattttctattcaaaatagatttttccgaacatcattatacaactctttatccttacccttgacagtatttcaatgtggcgattcgaggaccatggacctataattctaagctatgacaaaatagattatttattgagtctcatcaactaaataatcatttattattaattccatgattactatactataaatatagaattgaactcttagtaattataaaattatatttaccgagtttaactgcaatgtccattgatataatcaatttcagtgatgagccctccatgtgttggttcataattagttttggtcaaattattattttaccattctaattacttctttatcctttagtaccattaattcactagtgcaagtataattcaagatatctgaatttgtggcacaacattctagttcaaaaattaacacataaagggaactagcatttgatccgctaggaaattcaggattccataattgtaaattatgttcccaatcatccatattattagattttcaaaatagaagttgcatgaatcatcttctctgagaaattttaacgagcgaatcaaaatcctaataacatgatcaggagttcatgataactcagaattcaggtcgatctaatattgatcatcgttatgatatgaattaggtctttatgataaacgacatgttaataaagaaaacttcattcatatcgctccttgtcatatataatctctattatatacagtacctt

SEQ ID NO: 402668 - DNA, 546 bp, Cannabis indica
tttaacacgccaaaaattgcatttaaactgtgtgttgcacgggtgactattttattttgtacacgtataaaatagactttttaaacattttgcacattattccgaattttttaaaattttattagatatcttaaatagctataacgtacatgaatatgaaaaaaaaaattacactaaaaattttttttggatgccgaaataaatagagagtacatcaatacatccattttaaggggtgcacccttaaaaggttttttctatagatttatatattatctaaaaattataatattgtgtaagtgtatagtgtaagtataccctatattctcatggagaccataagaattagaaaacgcaattgagatttctcaattatttttagggttatttgaggcaaaaccccttaaaatagggaggtttttgcaactaacctccaattctaatttttttgcggtaaaaatacctaaactcaagttctgttagaagttagccctttccgtctatttttggctgttaactgccatggtggaatgtccacgtgtacac

SEQ ID NO: 402669 - DNA, 867 bp, Cannabis indica
tctcaaaagtttgcttaggaatactaaatgaagggatgcaaataaaggacatcaatgatacactcatttgcctcattcctaagatttcaaagcccacccgaatgtcggaattccgcccgatcagtttatgtaatgtgatttataaaattgtggcaaaatgccttgctggccgaatgaaaataagtatgcatcaagtcatttcggaggaacaaagtgcctttgtggggggtaggctcattcaagataatgctataatcggattcgaaagtctccattgtatgaggactaaaaggtttgggaatgaaaggaaaatggcgctgaaactggatatgtctaaagcatatgatagagtggaatggaatttcttacgaacaatgatgaggggattgggttatgaggaacaatggatagattaagtaatgagatgtgtggaaagtgtgtccttttcggtcctcattaatggagaaagaattgggattttccaacctacccggggtcttcgccaaggtgactcgctttccccatatctctttctgctctgttcgaaaggtctctcttgtcttattcatcaagccgaaagggcgggaaagattaatggggttcaattcgggaaagagagaatcaaagtgtcgcacttattctttgccgatgacaacttgttttcctcgaggcaaaggagaatgaatgcgatacaatgaaacttatcctacaacaatactcacagctctcgggtcagcaagtaaacttagataagtccgaagtcagcatgggaagaggatatcatccacacaggggcaagctttagcaaacagattggggttcgagtagtttcacaccatgcaagtacttaggacttccgagctttgt

SEQ ID NO: 402670 - DNA, 681 bp, Cannabis indica
agagagagagagagagagctgaagggggcggctattttagttaaggttttatgatatatagtactagggttaggtaggtgtaatgcgctggcccattaatcagtataatatagatttttttttaagttttgtttacgtcagttttcatctgacgctatttgacgtcagtttctaaccagcgcaatatctaaaaataatatttatttttaaccgacgaaaagtagcatcaaatagcaactagcgtaaaatttagaaccaaacttttgtgtcgtcttttagtgttgattgacatgttgaccgacacaaaaagttaattttgtagtagtgatgtatatttatattgttttagtttttataattttttattttaaatatgtatttatatgtatattttgtgtattttttatgtatataaatatgtgtatgtattatgtatatatataaataactgcatgtgtgaatgtgtatgtatattaatatatatgtgtatgtacatatatgattgtatatataataatattgtatgtatgtatataaaagtatatatgtatgtgtcttatgagtatttacatacgtttaccgagatttttgagaagaagaaacaagaattttatgtggtctgagtggctatgaactctagtctacgagtcaatattattgagctagaaaagcttcaaggta

SEQ ID NO: 402671 - DNA, 639 bp, Cannabis indica
aataaaattaaaattcattcttttatttaatactatcattaagggcccgtttggcacaatttttggaaaagctaaaagctgcttttcaaaaaagttgtgacaaaaaggtgtttggtaagccgttaaaaaacagcttattgaagaatttatggaaaagctacaactaaaagctaaagctggtacaacaacttttagaaaaagctgttttgattaaaagactataataaattatttttactaaaaatttatttaattatttattatatattataaaaaataaaaatattttttaaatgaaaaaatatttaaaaataaataatatttaaatttctaattttttattttattttaaaaaataatttatatttatatttttattattaacaaacaatatcaatttatgtttcttataaactacaattttatcttttgcaagtgataaaaatataatttaaaaatattaaaaattatttttatcaaatgcatataaatttatactatagaaaaaaataattaaaaatatataaaaaataaataaaaaatttatataacatatttttatatatatatttgtgattataatgaactagattaaaatattatcattattataatagaatcttaacaactcacagcact

SEQ ID NO: 402672 - DNA, 935 bp, Cannabis indica
ttcactatcaaatagaaattaaagggggggttttgagttgtaattaaataacataaaaagaaaataaaaacaaattaaaattgagactacgatatgagaaactagttaaaggttattctccacccttgacaagcattcttaattcctattaatgaatgtaatttcagtttctaatcaaactattaatctcccagataaagttgaagcagtcaattatctcaatctccctattgtatataatcaaggcgaagcgttcaataattcactcttttacttaagcagtaaatccacgaagcatgcaatttatttaacttatagataaagctttgagatttatggagatagactaatctaggcaacaaatcaatgaagcatataattcatttaacctaggttctattcttcatcataattaaaaattgtaatttgtcacaaacacttagaatcctagactattaggtgaatagtaatcctaagatgacgatagattaaagtaaaacctaatttatcggtcgtctaaacaagattaaaacaataatcatgacattgaacatagaaaaaaagaaataatttgatataatggaaactaaaaattaacattcaataatgaaactaaaaattcatgtgtctcgggttttgaaataacccttagctaaaaaaaaaaacctactctaaactagacattataacaaaaattataatatttagtaagagttgaaggataagaactagaatgaagaacactttgaagctgcaatctccgtctcttccttgctctctctctaagtttctatctctatttggtagctctagggtcctctgctaattacgtgtttctgatttttttttagctctcaaaacctcctaaaaacactaataataatgtgtttatgtaggctaacaaagttatctaaagatattaaaaaggtttaaaa

SEQ ID NO: 402673 - DNA, 686 bp, Cannabis indica
gccaagtacaccgcattcactatattgtttgaaaatatagaaagtgtatacatggaaactcagtcgctggccccatataagaagcccgggcccatgaggaaagatgccagcaagagggacatgacaaagttttgtcggttccacggagactatgaccacgacactaatgaatgctacaacttgaagcgggaaattgaattcgtgataaggaaaaacaatccacaccggcaaaagtatgttaagatcgatcaaggtcagtggaacgacaacaaccaagatttgctacctccaccggtagacgaacatctgcaagtcattgttggaggctcgcacattgctggagattcgagcaaagctagggagaggtatgcccgaacagcgcagcacgagcaagaagaagttattctggtcgttgaagaaaggaagcccaaagttccacgagaaagagagccgaccataaccttcaacgatgaagacgctgtcaaaattaaatttccacacaacgacctgctggtcgtggaagtccagatagctaataaaatggtggccagaaccatgatcgatgatggagcctcttctaatatcttgttcaaaactgcttatgaaaaaatgggactccagctaaagtgtctaaccccatgcctccagcctgtttatgcttttttcggtcaaggagtcgcacctct

SEQ ID NO: 402674 - DNA, 956 bp, Cannabis indica
taaaaaaaaaaaaaaaaaaaaaaaaaaaactaaataaaaaaatagttaaaaaaagtaattatgttttggtttcattatcattattttgtccaagaaaataagttcatattatttttggaaagaatattggtagtaaaattacttaaattttatgttttttaacatttaactacacaaaaattttgatgacaaaacctacttaaccccattccattttgctcttaacacttctgccaaaaaatctcagttaagcgtcataatggattgcccacatatacatgtgtgaacatacgatgagtttttagtggtccacataatattaattaaaaaaatataaaatatttaaattataaaaaaatatttattttattttttcttttcttttactttttactttttcctttttcttttattctttttttttttttccttgaaactctaatttgctccactctaacctatcttttttctccttcttctttattatcatcgccaccacagtcactaccaccaaagccaccgccagaactaccaccaaagccatcgccagaactaccaccacaccaccacaaccaccaccacaccaccgcaaccaccaccataaatcacaaaaaaaaaatatcaccaaaaatcacaaaaaccaccacaatcggcacttggagatgctcaatcgggatctgaaactttacaactaggggaaacaaaatcgagctttaattggctcaatgggacccagagatggcttaatcagagtcgtggtgctttggctctaacgaagtctaccacaaagagatgagagagagaaagagagggtctgagagggagaagatcgagagagagaaagagagggtagatcgagagagagaatagatgtggagcttcggcttcagcaaccaccacgaagaaagagagagagggtgtgggaagggaagatagatagatagagagagagagag

SEQ ID NO: 402675 - DNA, 590 bp, Cannabis indica
tgagttctggccaataaatccctggtgtatttcttctgtgtcaaataaattgctgaagtagtgcgatgaacttcaaatcccaagaagtaagtgactgacccgagagccttaagagaaaagctgttatgtaattgagaaataagagtgtgaacagcattgttatcagcaccagtaatgagaatatcatcaacatatattaagataaggagcagatggccattgtgattggaaaagaagagactattatctgatttgctgctcttgaatccccactgtactaaagtatttttcagggtgtcaaaccaggctcttggagcctgtttgagaccataaatagccttgtgaagcttgcacacatgattgggaaaatttttgtccacaaacccttgtggttgagccatataaacatcttcttggagttgaccattgagaaaagcattgttaatgtcaacttgttgaatgtcccaaccattagagatagctaaagtgaacataattcgaattgtgcaaggtttgatgacaggactatatgtctcaaagaagtcaataccagctgtttgttggaaacctttggcaacaagccttgcttt

SEQ ID NO: 402676 - DNA, 680 bp, Cannabis indica
agcttttcgcatttttgtagcagggaaaatcagttaaccggtttgatagcaccgttggagcaggggagaaaacttgggttttagctcgaacaagttttgttcggggatttttcagagcctagatttgagtattttagtaacgtataagctattttgaaccagtggagagttagaatatgtctgattgcgaagttagggttagtccaaagtttggagtaagttgtttattgagctttcttgtcgtgacataggatccgggatcgtcgagcgtagttccactgagttcagcccgcatacttgactactagactgaggtaagaaaagtattaagcaccgtatatggttaacgttatgattgttacagtcttgattatgatcaagatcccggtatgtatttttgtgactcgattatgatcgagggaaaataataggaaacgattattatcgttgtgactcgattacgattgagggaaaataataagaaacaattaccatcgttgtgactcgattatgatcgagggaaataataggaaatgattattatcgttgtgactccgttatgatcgagggaagtgatatgaaacgattattatcgttgtgactccattatgatcgagtaaaagaaacgttcattaccgttatgagtaattacacttgaaaccgcggataggtttcttact

SEQ ID NO: 402677 - DNA, 712 bp, Cannabis indica
ttttttttttttgttattttctagttattctataattgtatttatgttgttggttaggcgttctatatttgttatataattatttttatgtatttttttgtacagttattgtttagtttatttacattttttattgtgtatatttttagtttattccatacatttttttttttgtatatatgtgtatttgttttgttatttttatgttatttttcagtttatagctatttttaaccatcattaactcaaaaaggaaaaaacaatgaaagaataaaattgtaacaacaaattttatgaaaaaaaaaatattgtaatagtaaaaataataaatcaagttgtcaaaaactaagtaaaaaaaaaattgtaatacaaaacatattgaggagttgatattattttgcttgttgaatgttttgttatttttctgttgctttgtatttatattttgttgttttatagttattttcatgttgtttattaagttgttctagggttgtttttgagttatttttttattttactgaaacaaagtattttttgtaattttaaaattttaaacactagtatttttgtaaaattaatacagtaaaaaatataaaaaaacttcctattataatacttttgtacactttccctaattttataatattcttgtaacttccttttgtattcatatttagggttgtccatccaattcaatctgcactatttt

SEQ ID NO: 402678 - DNA, 651 bp, Cannabis indica
acttattcggatcggatatgatccgactagacttttttttttataagaattttaatattaacttataattttatatccattataattttttattagtattattaaatacaatactatgcttggtattgacatgtattaatagattgtgtaaagataatatatttttaataaactctaccccaacaccaacaacgggtcgggtccgggtccgagtttgggtttgagtcagagtcctgggtccgggtcttggtttgggtctgggttcgggtccaagtttgggtctggatccgagtttgggtccgggtctcagtttgggttcgggttcgggtcccaggtctcggtcccggtcccaatccggggtctcgagtcccgattctggtttgggtcccaggtcccggtcctggtctcgagtcccaggttcagtcctgggtcccggtctgggttcggggccgagtcgggtctgggttcgagtctgagtctcgggtctcgatccgggtctaagtccgggtctgggttcgggtccgagtccgggttcaggtccgggtctggattcgggtccgggtcccgggtcccgggtccgggtcccggtcggggtcctgggttcgggtccaggtcccaagggatccgagtctggggtccaagtcttgaatt

SEQ ID NO: 402679 - DNA, 667 bp, Cannabis indica
atttaaatttaattaattttgtagacgtagataaaaaaaacttaataaatataaatattgtatcataataaaagtttttaaataaataaaattgatctccataacaaaagaattaagataaataaaatttataaataaagtattaatactactactactaataataataataataaaatacctacatcactaagcttcttcatccatatcatttgcatcaaatgacactgatgtatcaacagttatatctggcatatctttcctaaccaaactaatatcttcactgtcaacatcgagagatgcaccgcaaacttcagtttgcaaataagactccacattctcgttatgtgattgcacgctcatattataataatctctaggatttatttttaaagcaacatgccatccttcgtgtttgagatcttccacatacattacttgttctgcttgagaagctagtataaatggctcatcttcacgcatcaattttgtaaggttgactcttgtgcaatctttctcttttttaataccactactcgaaatccaatcacacttaaataacacaacacgatttcctgaacaataatctagttcgataatatctgttaatatcccaaaaaatgtaacatctccaaaaataggattcggatccctactacttgaaaaa

SEQ ID NO: 402680 - DNA, 841 bp, Cannabis indica
ttaataaagtttatatattatatataatagaatttttattaataaaattaattgaacataacttgactcaaaattaaaactaatcaatataacggcttcatttagctttatttttatgtaccattttctagtttttaaaattaaaaaaattatttagtttgaataaaaaataaaaaattatttttttaatttaaaaagtttttttcttaagaagttgttttgaaaattaaaataataattaatttactcaccaaacatcttttaaatagtaatattaaaatacattgaaaagtacattttaattttaaaaaaaaatcataatataatactttatcggcggtttaaaatagtcaaaaaatctccttttttttgaaaaatttcatttttcatacttaataaaaacactccttatcaaaatttaaaaccctaattaatttatactaaataatttattttaaatatattttctttcccttttacctttgttttataaaaaaagccaaaaactaattaaattatactactattaaagttttatatttataacaatatacttttaagtttattaatcttaaaaaatgataaaattaaacaataacgagaccacaatcaacaatattatgaggtggtgtgtttgaattttaaatgtgatcatataaatactatataaaaaaaatctttagtgctcatttgggatgagaagttttctataaaaaaaacactttgttaggaaatcctaagacttgataattcccaaaactatttactaaagagttcccaaaactagtgttttctataataaaaaaaaaacaatttgctagaaaatcctaagacttgataa

SEQ ID NO: 402681 - DNA, 847 bp, Cannabis indica
aatgaaaggtttggtgggatcttcaacattatttaattgattggtggccatagtgatgaatggaaacacgaaggggaaaaaaaattaaagatcaaagggcactgataccatgtgaatgttggaagcaattgattattattaattgataaagagcctttatataggcgtgtacatttacaagaaagaatactgatatatactacaatcaaggaaaagattgactaagttattaacaaactaataacaataaaagagagagaacagaggaatatacaaaacaactctaacgaatataatggtacaaattgttatagtttgactgataatagctggcagtattatccttctacaataagcatatgcgagataagagtaataagtattagcagatataattgacaagacaatatgtccatcttaggataaacagagtatataatagtgtataggacgagacatcaaggagcttccaactcattgacccacatatttgtgcatggaggaaataactgcattcatccatctcgccctttacgcggcggagttaccaatatcattacaatacgaagaacattgtgagtggaagcatatttatacttagcattcactacaaaaatttttacttttagtcacaacaaaacttgtgactaaaagtgaaaaagttgtgactaattaaaaattatcattcctatgttgtgactaaaaggtccgtggcaaaaagtattagtcacaaaaattacaatttgttgtgactaaatgtatgtttagtcacaatacttgttgtgactaaaactaaattagtgacaacttgtatctaaagaccacgttttagtcacaagtaatattt

SEQ ID NO: 402682 - DNA, 567 bp, Cannabis indica
tatcaaaaaaaaaaagaatatagtaacaaaatttgtcattaaataattaagaatatatagtatatttgtgttctgaacattttatactatactaagtttttctctttacagtaggccgcatattaataatatattttgaaatataactattacacatcatagtcatttaggtggcgtttggtaacacttttttaatcagttttctatttttaaaggtggatagtgaaaatatttttcaaaaacaggtcctataaaactgtttttacttttcaattttataattagaagaaatcaaaattttaaaaataaaaaaaaaattactttcaatatttttttaaacagttttttttcttaatcaatcctttgaattacaaccagacccgcacccaaatcccctcctcacggccttggcgctgaacccggcttctgacccgaacccgaatccaaccccggatcttgacccgacttaaataaaatcaaaaaataaaaatgaaaatgaactttacagaacacacttttgtttctgtttttaaaattgaaaaaacaaaagtggttacagaacgcatt

SEQ ID NO: 402683 - DNA, 939 bp, Cannabis indica
ttcttgtgtatatattttgattaaagtctattaataatttttgcaagagattaatacatataataataaaaaataaataaaataatcttacttaagagtttttgttatggctggcaaaacaagatgaggatgagattgagtgcaccaaagtttagaagtgacaaaaagctgagctcttgatttgatgaggccaagggaaatagcttccgaaatggcgtctccgagaggctgttcggtctggtaaacggcggcggtgtcaaagtgtctgtagccaagcttgattgcttcaacaatggcttctttggttgtctcagacctaacaaatggaaatgtagctgttccaaaccctataacaggcatactaatattattactactattaactataacacttttgttttccataacaccaacaattgttatgtaattattaactttataattatgatggttaaagggtgtatatataagcactaattaattatatatatattgggaatctttttgcaaataaagccggctgatcataaaatattatatatgttgttaattatatacagtgcatgacatcatcgatcttagagcttaaaaatggccatatagggatatgttttgtcattactttctaacacatgcatcaacagcctgcaacactattttttttttccaattttcttttatagttacaacattttttttttttctgaacatacgtagtaaattggaatattagaaattctgcttttacttttctaattaaaaaaaaaagaaaattaattaaaaaaagtagggtaaatagcggcataagtactaaaaattttatgtttgtaaggggcataaactcaatatttatttttagcggcataagtacccaatgtttgtaaaactataattttctctaattttgtcagtacagactctgttattgtctaaaacagg

SEQ ID NO: 402684 - DNA, 802 bp, Cannabis indica
aaaaaaaaaatataaaaacaaatgacattttttaaaaaaatgttataaaaattgttgatccatatttttcgcacaatgtttgaagatctaatttgcagtgttaacccaccaaaattaatttgaagtaggaattggaattagaagtaactagtcaaaatttatttgtattatatttgttctaatttaatgatatatattaatattaattaatatttgctttggaaagcgtttaggaatatatcgtataactcaaaccataaagttgtctactaactgcatctacatttgtaatctttttccttttatgtgttaatcaaatatttagagatttgcacgaagttattagggctcatcataatgtcatataataatgtatttaatcatcaaaaaatatatattattatgtattttagtgtcaaggctggtcttgaaatatagtgagtcattgacccttttaaaaaaaaaatgtggtattttttaacatttaaaataaataaataaataaataaataaataatgtaattttaaaagaaaacaaaatatttttgggcttctaagctagatgggctttagatacagacttaacccacatatgcttagagccacctgtatactatctttaagggaaatttacatgatgtactaattttgttatttttttactaaaatactgctaggcagtattttttactttttgtactgtgttttttataagtttcatactgcagtatactgtgttaagttttcacttggtgttttttagttgtcttactggtgttttgagttgttctgtttgtgttct

SEQ ID NO: 402685 - DNA, 538 bp, Cannabis indica
aaaataaagttcatatgtaagttgaaaataaataatgtttaatctagagtattaacatagaaaatgtaatagtaatttcaaaaagaaatttaagttatatattatgtaatatatagagaaataaaaatcaaactcaaaatattagtaaaatatattaaaagcaattgaaagcaatgtaaagttttaatagttaaaaaaaacaatgtcttaagttttgataatttaaagaaaatactaagtaaagttttgaacaagaaaaaaattgtttaaaattttgaaaattaaagagaaagacttcataaaatttttaaagaaaggaaaactaaaggaaaacattattgaagtctttttttctaatcctctatcgcctcactgcaaatacaatagcgaagtgtttgtatcgcttgaatgttgagaatattctaccaggatctagatttactaataagtatgttgtttaacatcttaaatatggatatctctataacaatgaaattaaacacataagagtttaaaaaatcttatattggttgcagcg

SEQ ID NO: 402686 - DNA, 604 bp, Cannabis indica
aaagctcagaatgctatttaaggaggtacccaggtgtcagctctccaccaccccctggcaccttggtgctaagtgcgctactactagtcagttggactagtaggacgggcatatgaggaccacaaggggactcatatgtttccatgagttggagtaatcatggacattatcgggccgacccagtagtgcttttaagaagctgccagacgttaatgagtacgtttccattgccttgtcggtatgccgcttgcacgggacgtggcccaaacctccaagagacgttatggtgcaccttggccacaagtctgaacacgagatgacacgggtagtcattcgtgggctagtttgcatatgcgcatgggacggatacaccatgttggaaagagaaagaggtctaacatacgcaattagtttggtggcttgtcttgagggcctgccaacatgtgtggaggcgtgctgccttaaggattggtccatggacgtatgggagttctttggcaacgagggagacttttcggatagtctcgaatggggcatgatagaagcgttggcacgttaacttggtgttggcatcttgccacacatgctaccttggtcacgagtg

SEQ ID NO: 402687 - DNA, 713 bp, Cannabis indica
tattcgggaagttcacaatgcatgataaaacacctcatatatcaaatttgactcccattattaatttttaccaaataattcttttcaaacttttcattttatcctctttttttctttaatattaaaaaaatataaaaaattaaaaactaccaccactctctctttcttctggtgtctttctctctctgtcagctctcagctcactctctcaaaactctctttaagctccttcatctatctctctctctcagtggtgaaaaatcggaccacactccccaatcaccaaaaatcgttcaccgttataataggtaagttgtgtttcaagcattttgttagacattagtaatatatgtagtttgctttcactactacaaaaataactttttgcttcagttgtaaaatgacataaaaacatttcgtgtcggttatttaaaccgacgtaataacatgcagccgacgcaaataagtaatttgcttcatttctaaaccgtcacaaattttttttgttttgcttcggttgagaactgaagcaaaaagtatgctttattatcgtcagttcttgaatgaagcaagaaacttagcttcaaattgtaaccgaattgctaattaattaattgcggcggttacaacttgacacataattttatgctttttttttttactttttgttgtcggttattaaaggacacattgttgtaggtaggggaaaattg

SEQ ID NO: 402688 - DNA, 724 bp, Cannabis indica
tctctacaatatttgtcgatggcagtagtcaccttttgaggcaagataaacaaactcatccaaaaatttataatccccaaaaggaccaagtgaataagttgatgttggtttggttttatggtactaaatcaggtatgcagctaaagaattcgtatgtctaattttcattataccacaacacaatggatctccagatgtgtatacattaaaaaaaacataaaatgaaaaaaaaaagaatacatacctcttgatgactatctgggtatcctcaaaacttctcataagttgtatccttttggttgatcagaaactcacaccatagtcttccaaatcaatcgaccacacacaaaagaatattgtgggctattaggataaagtgtataatttgttcttgattaatactcaacacatgagcaagaactatttgagagagaaaaataatttttcttttctcctccgtagtttaaaaatagcactaaaaaatcatctcctcgtttcttaaatcatgcttccatttataatagttaattccccattaattaaatcatatttaattatttaaataaatatctataaccaaattcggatactgatatttcagatgagaaaatttctcaacaacttgagagaatatctcaactaatttgaaatatctttaacaactttctaaatttaaatatttgtctaattgaattaattagttaacccaaaaagacaaaaccaa

SEQ ID NO: 402689 - DNA, 758 bp, Cannabis indica
tcctctgagctcctgcttctgtcagctctcaaaactgtgttacaagtttatctcccaaatcaacccagcatcctttgatgactcgctaatttttgacaaacttgataacacctagtcttactcttaagacttgaagtcattccaatccactatctcccatcggcatatgctctttgaaccattcgacttacagtctcccatagaacaccagtgtcctcataaacacaaaacatgccaataacatgccgcaaactagcttagtcttgatctcagtctacgcccctgcatattctctatctgcaacttggagcaatcatgcaagtcttcgcactgaacaacccatctgttgtagtgtttccctctggattcacacaccaaaactgaacaagtaccctgattcttcaaacatatgaattagtgggctcccccacttcaacttgggaaaaacttctctcttagaggaatacccctcaagatatagctcgcaagctaaccgcatactcgcatacgattcctccattccacatgtcactttgatgaagatgttgaactaatgcctcggtcattctaactctttgcccctcgacatttcaatgttgccttagtaccttagtcctgctgactttcaccttaggccaacattgccatggtgttatcttagtacctgagtcccgcagactttcaccctagataactgacactgcctgtatctcgagtcttctggactttacatcctgaacaacaatcaatctccatga

SEQ ID NO: 402690 - DNA, 459 bp, Cannabis indica
ccatgagttagaggttttccagtgatgtacatatcaacgcaacgcctcgactttcagtggataagattcatccttttgatagtattttgaaaataatcttattttgtacaagttttggaacagaacgcaaaagttttatacaggggatccccgtacttaatagtggttttctttatgaaagttatgtttataattcaattaagctacacttttcttaaactaataaactataaaataatttataaaagcacacatgtggcgtccttgtgggacagggcgttacagtcttagtgcaaagtggccaaaacttgcattggaacatcgacttgacatagcacggacatgtttgaggcattagaatcagattcagagcaggttggttttgagcacccggggcccgagcacccatcacccaggttgacaatttatcaatctgggtgcctgttggaaattatttta

SEQ ID NO: 402691 - DNA, 1044 bp, Cannabis indica
tgtaatcttgggcccattctattgtgtactactagctattactattcaataagatccatcattcattgattatcaagctaagttttcttgtctattttcattagtaagttttgattttgtgattggtttagttttgaattgtgtttcttggacattgttactactgtaacaacttgttttgagggtgatgattcaccacaaatggtattagagcttagggtttagagttcaagaatcacattcaaccaatcaagactcatcttcatcatttcaagaatcaaactcgaactttcaagaaccaggttcaagcaatcaagaactggttttaatggcttcagcaaggtttgaggtagacaagttcaatggttcgaatgattttggcctatggagaatcaaaataaaggcatttctagttcaccaagggatctatgaggcacttgatgaagccatgaaattaattgaagacaacaagaaaaaacttgagattgaagccaaagcacatagtgccatcctcctcaatcttggtgatgaggttttgagaaaagtttcaaatgaagacaaggggattgggtctttggaacaagttggcatctatctacatgaaaaaatctcttgcaaacaagttgtatcttaagaagaagttgtacacacttcgaatggatgaatcaaaggaattgagaaaatatctagatgattttaacagaatcattcttgatctgaataatcttggggtaaaaattgatgatgaagacgaagctataatcctattaagttaacttcccaggatgtatgagcactttgttgatatgatcttgtatggtaaagaaactctaactatgaaagaggttaaggctgcattgaattctaaagaaattcagaagaaggaagatgagaaagattagattaatggggaaggattactcattgttaagggaaaattccccaagagagaatacaagggaaatcataacttaaatggctacaaaggtaaccattcaagatccaattctagaaactccataggagagccaagctctaatggag

SEQ ID NO: 402692 - DNA, 757 bp, Cannabis indica
aatctaacaaaattaatttttaggttttttttaaaaaaaaaattaattagtgtattaattcgtattttttgaagattgtgtacattttatattttcttttttaaaatgtgtgcatgtttcaaaattctctcatatatgtgacataattacagtattattgtcaatcaatcaatcttatttctagacttttatcatatatttggctaacaattttgacttaattttatcagttgagaggaatgaaaattataaaataagaatgataaataaaaataagaagatgaataaaatagaatgtaattttaaatgcataaaagaaattgaataaaaaaattaattaagctttttcttattttttatttccttctatttctaactaaagtaatcattctactaaaattataaaaaacaattattctattggaatgacaattttattccattaggtacattttgttgagaggaatgaaaacatatgaatatgaatgagaataagaatagaaataggaatagaataaaatcaaatgtaaaatgcataaaaaaaattacataaaaaaattattatatatttttttttcatgttgcattagaatgacgtttccttctatttaataatggaatagtcattctactaaaattatggaaattgaaaaggtcactccatcaattttatttcaatattttattaccttcaatcaaacaccacttaattgtctattattagtaagagtgctaaaaaaaaaaaattagtccaaac

SEQ ID NO: 402693 - DNA, 606 bp, Cannabis indica
ttaatagtataacatctctatatatagcatctctatatatatattaaataaataaataaattttcttaccttataataaattaataattaaaaatatgaaaaagaaaatatagaagatattatagtatgatattcttttgtaacattcttttctattctaatagtaagcatcaattaagaaatgctaaaaatatattcatgtcatcatcatccttcatagcaatgcactcgcattagcttctttggttttacttttaaatattgtactaattttttttattttatctcacacttttacattacattatacatcatattctatatattttttctctacatcacttaaatattatatcttaacatttattttattaattaaaattaaaataaaaggccaaacaattttttttaaaaaaattatttaaagagtgaaagagaaaagaaaacataaaatatatttagctcatcactatttattgagctatatgtagaaatattttttgggtaaataccattttggaccctccgttttgcaaaagttactaattggaccctgtgttttattaaatgacaaaatggaccctgtattttctaaaatagtaaaaa

SEQ ID NO: 402694 - DNA, 944 bp, Cannabis indica
ttaaatcaaattcaataacatttgattttcttttgaattagtaaaagtagatatgaaacaaaaaaaaaaaaaaaaatagttggaagcactcataatttttgttagttaaaattattaaagcaacattgttttatattttactaaaaataatatttttttaataagttatacttacactaaatctatttatatatataagggtaactattcaatggttacatttttattgtaaccatatggtaacattttttttacctataatagaaggttaccaataggtaaaaattctatttttagaattaattaattataattactattttttaagtaattaaataaatatttaagaagaccttttttagcaattaaaatttataaataatttttttaataatatataattcccttagctttattatgttaacaattaagctatttaatcataatattacaatttttttttacaaaaattaaaattatttttatataatttaaaattttgtccttataatgaatttttttacaagaacacaccctgctttttttgcaggatgtgtgatgatattatattgacacttaattaaaacctaattaatctttaaagtcttgatttttatttttttaattataaattctaattaactaaagtcttactcgcaattatcctctttcattcactctccaccacacttacatcgaaaatgattgacaacgaaaacatagaacctatagcaaatttgtctgaagatgaagataatttttttcatttcatgagttttgtgaaaaataaatgtgaagaagatgtctctgacatgagtaacagtggaattgagcatgacactgaagatgttaacaatgaatggattgatcctgatgtagctgtttggagtgattttttaaattttttgcagattgataaaatttagaagactatataagtccat

SEQ ID NO: 402695 - DNA, 676 bp, Cannabis indica
cctggtctataccttaagccacacggaatgaacgaagaagatggacatacctccatcgttcaaatcagcaacacaaccaaaatgaaaccaaaacgagggtaatgcaaccatcgattccggcaaaaattaactggaaaagaaaaactgcaatgatttaaacagaaaattatgaaaaaaaaaaccagaaaaactgggaagaaactgaaattaaacatttgattttggttttaatcattcaaaacaactccctctacaatcgaaaaatccagattcatgcaatgtaaatctgtactaaacagatctgaagcttcccctcgaatccaaaacaatgtatgaaatgaaattttttaaaatactaaatctacgttatatacagttgtattctggttgatttctggtttacaatgtgcaattcagttttttaaaacacaataacaagatctaattcgaattaaggaacgacatgttacgtataagtccatttattatttttttgtggttgccttatagttgcattaacgttttataatagtttataaattatgcaggaatttcaattaacgggtaccaacaaatagcaattatacaaagtaagataaatagctgcaaattagttttataatagttggaaattgatttgattcaaataaaactgatgaaaagcatagggatcaca

SEQ ID NO: 402696 - DNA, 623 bp, Cannabis indica
cggtctcagaacatcttggatagtattttgtagtcacaatgcgacatttttgtgaaaatattttggatatgattgtaaaagtttaaacttaggatcctggttatgtaaatatatatatatgtttataaagtttaataattttagtcaaagttttaatttggcatgattttcgaggaaaaccctttgattagcaaaggtggcaagttaattagaaaatcactgtagcgcgcctaagtatcaaggcattacaatttttggtatcagagttgctagatttgtcatctgaagatcgtcaagacatgtacgattattgtgagagaaaagctcgactcatggttttgtaagcctttacttgtttagtaaataatgtgatttaaaagcatcttaggaagcataattgtttataatttctttatttgaatgcattgccttaaaatccataagtttgatagagtttatgtgatcattttctgatccacctgccttatgggtgttggattttgtgccctaaataaaacccattttaatataatcggatttactaattaataaagatcagaaatttcttttatgttgcatggttcacatgatttatttcatgattatgtttaatgtataaattc

SEQ ID NO: 402697 - DNA, 682 bp, Cannabis indica
cacacccctatttagtggtattagattgccttgcctttcctcttattataataaccacatataccaacttctctccatgccaacttgtacaatacgtacgccaaaatatatctatatataaatatggttaattatgatttttaccccctgaatttttaaggtcgttaaaaatacttcataaactattaagattgttggatttaaggatttttgtctaattttagtaaaaaaaatctctaacatagatgaaagttcagagggcatgatttagtatatgttaaagttcgaggagcatgatttggtaggtgtcaaagtctggggagcatgatttagtacataaataattactacaatagtaaaattgaatgaaattaaataaaagttctgaaatctaacaatctcaatagttcagtggagaatttttaacggcccaaaaagtccagaaagcatgatttgacacatatcaaagttcgggggtaaaatctctaattagcctataaatattattgtaagtatgattttgactactatagtaccactttatatatatacatgatccctagcttcatcagtctttacccttattatatttgagaaatttgatattatatgcttaaaattaatttatccattaaaaatatgctagcatattttgcatcatgcaaaatatactcacactatt

SEQ ID NO: 402698 - DNA, 781 bp, Cannabis indica
gtcaacactatgtcgtgaggcaccgtgtactcctccacctccgaaggaatccaaaagtcatggctcggggccggagtgtccaccctacggggccgcttagaaggctcctcctccaccatctttccctttcgcttgcgctcgagggcagccggatctgccacttcaccttcttcaacttcctcaactccctcctcctcgtccaccaagacaatggtgcccgaaagggcattggaggaggacctcccaggagtgaccaactgagaagcagccggaggtggggaagcatcaggactgtgggctccagcaagagtggccaagagttcatccatgggcctggctgctgtaacaaagaaaataagtgttaggacattcacgagacagcgtacacttagcaaaaagcaataaaactagtcctaccctgactctctaattcggccctagcaaagtctcgaatcatgatgttggcttcatcatccccgagaaagttgttcgagggaaggaaccaactagaggataaatgggctgaatggtccaagggaataagcgtcggaggtccagaacccatccggaaccgacctaaataatggcctaagtgggagaaataatactccttggcatgattcccctaccgggtggaaggcatcctaaacctttggagacgctcatcgaaccctataggcctaaggctggtatagccacggacgggaggaacataatgtattgttaaaagggacttaccggaacccgaagtgctggcatcggaagccccattatttggtac

SEQ ID NO: 402699 - DNA, 758 bp, Cannabis indica
tttttagctaaattttaattaaatagctaaaaggttaaaataaaagttattttattattttgctctaatcatgcttcctattttagttagtatttgattattttaataatattttataaatgaaatttgttaaatataaattaattcaataaaataataaaaaaataataatatgcttgattagaatactactaaaaaaattagcaaaataataaggagtttcttacatgagaacaaactattcattctctatgaagtcattttttatatggtttgagcttatttttaaacctcaatgtccttatatagtatgattacatatgctctaaataataagacatcacaatataacttataacaaatttttaaaaataattgaatgatatttaaaataagttaaaaaaaatgaagttttatatgaaaaagtaataaattaaataaagggctatttttttattaaaaaaaactaaactaaagagaagtgggctgccattagctatgtggcaaggggaagccggggggaggtggcttttgctgcagcgactgtgatgcagcaggagctgactccaattgtggcggaactgctggccattcgagggggactacaggcaggtattcaaaggggcgtgaggcggtttacacttgaaacagattgtcttggagcggttcaattgattaaagatacgaaagaaggatgtcgggacattgacggactgttatttcaaattaaagaattgcttttgcacccctctgttatg

SEQ ID NO: 402700 - DNA, 341 bp, Cannabis indica
agagagagagaggaaatagccactgtggaaatgaagggtggccaaaatgaaccttatataggttcttacatgctcttccctctgaaaatttagtgggtagttaaactgcctacaaaatggccatgcagaagattaatagtgcctaagtgggaacatgtggagaaaaaaaaattgaaatgattggcaaaaatctattctttgtcatgaggcgggtcatataagaggccaagtatctggctggccataagctatctaattgagacttcaatagtcaaagggacttggagggcaaatgttatcccaatttttaccacatgacgtgactgttggaaattatttta

SEQ ID NO: 402701 - DNA, 656 bp, Cannabis indica
cattagtacacgctgacctaagcagtaaaaggggaatttacaactttttttccctggtagacccaacccttgtggtctagcttggcctgaacatgtacaatacaccctaaaaatcctcgacctcatggctgaccaataactgacttaccctttcctacacaatagagcacgcgtgagccaaagtccagcaagatagtataaacaacaatatgaatatcaattaaaatcactaagtattgatgccactgcacctattgtctatttgacatagacctacgtgttacgcttacacgtctatttacaataatagattcgaaattgcactattaactataaagaacactttatatgtaccaagatatagatacactatgaattatccatctttctaatccaaatagtcaaagatcctccatagatgatctacatcgaataggggcaaatttaccgttctacccttcaatgtatttcatccttaaaacacttagctacctataaatgatatttcattaaactaatttaattattaaaatgagatctcagtcatttatctctattaagccaagctcaaaggaaatcattgtttcacttctaaatacttatagaaactatagattccatatctatggttagcgctcctactcaattatactatc

SEQ ID NO: 402702 - DNA, 1213 bp, Cannabis indica
ccacatttgaagtaaataaattattgaagtaatcaaccataacattcggcaactcatcctcccaagtaacccattgacccacatcattcataagctgagttatagtattgtgtttcttcctagaagtagctttaacatgaaagtacttactgttactatcaccttcttgaagccataactgtttagagcgttggcgccaaaatacttctcgttggttcataacttcactaagattcagctcctcctcgggcaacttctgaatggatatagcatcacgccccttcttccaataatggcttacagtggctaattcgttgcttaaaattgcctgtataatctcgcccccacacttgaagagattccccacaataagagattttcttcataacatgctgaccttcacaaaggtcccaactatcttttacaacctggcggcacaacggttcacgaagccaggcattttcgaaacgaaattgacgaaacggcaccgtcacagaacgcaccgtcggttcaagaagcagcgggcagtgatctgaagcagatacttccagattatgcagttgagccatacgaaacctctggaaccagttagaacaaacgagagctcaatcaagatgaatttcaacccatgaatcagtgcctctcccacgctcccaagtgtaaggatacccggttaactccatatcaacaagatcacagtcagacaaagcctgattaaaaccatccaccagcacctgaaaatatctatttcctcctcttttatctgcatgactagtagcattgtttaaatcaccaatgatacaccaaggaagggaagatctcgactttaacgatctcaataaatcccgtgttttatacctaacagccttattaggttctccataaagccctattaaacgccaaggaggagaagctacttccaagatctgaatataaacgtaatagaacgaatagctaagcagctgcacatcgtcattattacgccaaagcatggccaccccaccactatgtcctctcgcatcgacagaatacaatccatcaaaccccaccgcaactcgtaacctttccaacttgtccttacgacaaagagtctcacacaaaaatagaaaattgggtttcttttggataataagatccacaaggaattgataaacccgtgggttcccaagcccacgccaattccaactaatgatactcataatggacggtgggc

SEQ ID NO: 402703 - DNA, 527 bp, Cannabis indica
ggtgacgatctccctcgcctactcttgcacttgatcaaagaacttgtgccattgtcgctattcagaatcacccatggaatagtgccaccgcacttgaatacttcttccaacatgaactctccagagtccatcacaatgcccctccagtgaaccaagtagccctttgtaatgccctaatctatagggacgccacgtgtgtaattttataaactagtttaatactaatagactaattaattattacaaataatgatgatattaaaaacttgactaaaataaaatattaaaaacggacattataatgacataaaaagtgtgttttagggatccctgttataaaaagttttacaaaagaactataaatgacgatgccttaagaacataaaaccaaaatataaagtagatacaacccaaaacaactcctgaaaacccaggtcggtgagatcaatatgtacattgttggagaagattgtcacctcatgattgatctagttttttcttgcctttacctgcaccacataacaccc

SEQ ID NO: 402704 - DNA, 649 bp, Cannabis indica
agaagagataagtagtaaaataggattagacgtgttgtttcatttaaatgaaattaagtggcataaatctaactctaaagtccatatgcaattcggccctaagagatgatttagcctaatttattttaagtccatctcatataaacctaaccctaagtgaagcctataaatagaaagagaagagagctttgtatgatgatgattttctatgctggaaaactctaaaaagctcacttcttctctttgatttttgaaaatttagaggctattttttcttggatttcttcatcaaattttgtgctccttagtgttgagaactttcccacacatttcaaaggaatacccaacatagtgaggaagactatgtagtctaattgtcataagaaggagaattcaggttcagatcttgatcatactctgcaacagaaaggatcaagggttagagatctaaatgaaaggagccatactattctgctggcaccagtgtaagattttctataacttttacgtgtttaattctttgattttaggaaattcatatttaggatgatagattataaaattataatccaacatacatgttagtaaatatagatcctggtaaaatattttcaataactaatctcagagtcatggtaatgatttagtt

SEQ ID NO: 402705 - DNA, 581 bp, Cannabis indica
aaaaaaaaaaaaaatagtagaaacaagtagcatacctgttgattaatcattattgtatatattggtttataaaacatgttggtttatcactaaagcataaatattcaaagtatccgtatgtgtttgtttgattagaaaattcgaagcaattagagaatatatgtttaaataaaaagaatttaatttctaatataaatttgtttcgcttaaaaaaatcaaaatataaaatataaatttctccattattatttatttaattaaacttgaaattatgcacattttcattccaaaacaaaataaatataaaaaaaaattacatatagactaaaaattataaaaatacgtcaacatgaaattttttaattttcactcattaaagttttttatttataaaaatacctcttcagtaaaagtaataaactgttttttaattattttatagtttatttataagaataattacataaggcactattttttgtaaaatatttacatttttacgttcaaagaatgttttttttttttttacatttttacggtttttcaaaaaataacacgaaaacaacataaaatcaacaaga

SEQ ID NO: 402706 - DNA, 558 bp, Cannabis indica
gtatgaagtcgagtttgcctttgcaatgaaaataaaagtgtgaaaatgtgatacctttcttttgcgggatgatgacagagtattttgaaatacttctttgtacacgatattcttgatgaatgttgggtcttccacctcattatcaacatttattataatcaatcattctcttgtagtgactcgagataccacgacatataattggccatgagtgaatacttgcttaggaagatacaatccgatatgtttgagtgattgtccttggcttttattgatagtcatggcaaagcatggtgccaacgggagttgtcttctattaagcttgaatggccacatggattcattcggggacatgattattcttggtattgttacattttgaccaatgtttgttcctgagatgatatcacctctaattgaccatttaccaaggtgggtgacaatcagtcttgtgccattgcataaaccttctgtttgatttaaatttctgaggagcattactggagcaccttcctttaggtttatgtcatgatttgggatgccattaaatttcaaact

SEQ ID NO: 402707 - DNA, 879 bp, Cannabis indica
tgataggggtaaaatttgtagaataattgaaaaataggtaaccataatagattttaaaaaagatggtaaaaattaaaaacatcaaattaaaagaagtatgtagtgtaatttccttatatctatcgtgaccacaaataatacattgtttaaatttaaaaaattcataattttcttaccaatttgtgtttttgtgtgtgtaattttatgaatgtttatgttaataatatttttcaattaaattgtgtttcaaaaaagaaaaaaagttttggttcatatttatttttgaaaatagcataaacatcatatacttttaaaattaatttttcaaaatattttattaactcgttactttcaaaaagaaataacttaagcaacaacacaaaattaaacatataactactgaaaatatattgaaatttcaattttttataattactaaatgaatctaacaaataatttaactaaattggaatgtgagtaaattgtttgatcacaaagagattctaatccaatagaataaacttttgtaggatcaaatttaagaatagtaatgaaaacaccaatgaaaagaaaaacacaaaataaatgtggtgtcaatattcttttaaatatcacaatctatgaggccacaccaagagaatgaagtattagtctaatcataaaagtaattgaacttgtacaaaataagactcctattaacattactagattagtattagtattatacttagttgtattttagttatgtatattctttgttgtataattaattaattagcttttttttaaaaaaatttttgggtgattcaataaacaatattatttttattaattttttttatttaagtgttatttataaaaaacaaacataacaatatt

SEQ ID NO: 402708 - DNA, 541 bp, Cannabis indica
gtgattttttcgatgattttttctttgtaatttttccagtaattttttcagcgacaatgccgatttcgacaatttttttggcgccggcagtaattccgataacttttccgataccggcagctgctctgatgatttttctggtgccgacagtagacttcagttatttttccgacaccaataccaaataaaactacctaaacaaataaaaataataaatataggctttgaaaacctaatttatatatatatgacatatcaaatatcataaaaatacctaaaaatagaaaaatgttatataaattggtcaaacttaaaagtgtcatatttaagtaaacaacttttaaaatctcttagtgagtataatttcttctttcgttatatgatagtgtatattattgttattggaatattatataaattttgaaaatttgtaaataatttatagtattacaaatgtaatggattgcttttattgaaatattaattttttttaaaagacccataaatttttatttattgaaataaagtagttttatttttt

SEQ ID NO: 402709 - DNA, 967 bp, Cannabis indica
aaggatggagactttttagtcattcggactctctcatcagtaagccttttaaagctaggtactaccgcaatggtacaattttaaatgcggagttaggtagcaatccaagttttgtctggcgtagcatttatgaaactcaagggattgttcgaaaaggggcaggtgtagagttagtgatggttctcggattaatgtcttgttggatccgtggctcctagatgatgataatccaagtgtaacttctattaatcctgctcttgttgatcaaaatgttaaagcgcttatggaaactgattcgctggcttgggatattgacttggtgcatgattttttaatgaaagggatgctaatttgattcttagcatttccttgtcttcaagtcatttatgtgatgcttggtattggagttgggaaagctcaggctatttttcagtcaaatcagtttataagttcttgcaagtgagcaaagaattgggggcacgggatgataactccatgttttggaatactctttggaagctaagtgttcccccaaaagtgaaagacttgttatggcaggctgctactaattgtttgccgacaaaaacaagactccgctctaaacatgtgccagttgatgttgttttccctgtgtgcaaagaaactgatgaaacaatctaccatagcctggtggattgctcttttgtcaaggcatgttggcaacagttggctgctggtgttaatttgacagcagttggttcttttgccaattagtttgcttcagtcctacagcagctagatgaggaaaaacgaaggctagttgcaatgacgtgtagggcgatatggaggcatcgtaatgaattagtttggtctaagaaaattcccacggttgagagcgatgttcatttagctaaagccctcctcacagattggactcgagctcaagatacaactatgattcccactgctgctttccttacagatgtag

SEQ ID NO: 402710 - DNA, 517 bp, Cannabis indica
aataattatcctaattatatgttgaaatatctcaaactaagcttttttcaaatttttataaaaatatccaggctatttaaatatttaaaatactaataagtaaaatgatataaaatatataattttttaacttataatttaaaaataattaaatattcagcaaaaataaccaatttatgaatttaaaagtattatggttagaatatctataaaatatctaggttaattttaaatttattaattatttaatttatcatataagaaaattttaaaataatatttcaaattaaaaggatagactattttttaatttaaaatatagctaatattaaaatatttgatcttatattaaatagtaataaatattaaagaaattaacaaaattttaagatctgaccgtaataaaatatttaatttttaaatttaaacctcaaaatataaaaaattaataataatctattaaaaattaaatattattaatttaaaattgatatttaagtttaaatatattaaaaat

SEQ ID NO: 402711 - DNA, 1026 bp, Cannabis indica
tctctctctctctctctccctagaactagctagggttgggaatatttttgcttaattcaaggatttctagcaagcttttaatgattttaaactcaaggtaatgttctagctcatctattgttgtttttcttaagtttcaagttaggtgttttatgatttttctatagtttggtgttggagtgattcatgttgtttgagactatactctgaggttaaaattaggttaattgagctgaattgaagttagtttgtcgctttatttggttgttagacaaagtttaagttttagaactcaaactttagtttttaatggttatttttgattctaaacatgttaagttgttttgttgcatgaaatatgtctattgtggtaaattaagcagggctggaaggtttggtaaggtttggggtcgaattacgggtgtagtgaattttttagtgtttcttgcactgaaccggtcgactagttcagggggacctgtagaaaccggtcgaccggttagtccccaagaaaccccacagaactagaattctggttggggaactggtctaccagttggggaatttttgggaaccctagtttttcccattgttgcgatatttagggtattgccatgctatccatcgatagggaaacttttagtttcaagtttaagtccccagaaattgatttagcatgtcactcaccaattttacgaataatgtgatttaggggcctgtaattcgtcgagcaactgttccactcaggttggtcggcagacctaaatttagaaacgaggtaagattagtataatgatatgcataacatgtttagcatgcatcttagttaagcttgttagattacattataatagcaatatcagtatatttagtattatgttcgatatcgacaaatgtatcttggcttaagtgctactcgacaatattacattggtacgactagagtatgactagtgtaccaagtataggttgatattatggtcgatagtactatactacttgatagtatcacatcggtatgactag

SEQ ID NO: 402712 - DNA, 721 bp, Cannabis indica
actattcatagacggtctttacagtatatttggcttaaatgttgattgatgctatcacatcagtacgattagagtaccgagtatatgctgatattatggtcaatagtattgtcgtatgaacgttctaaactcaatacgcgtgagatgcgagataggattataattgggtgtatgcgcacctagttataatccattttaagtttatgttatgattatgtttttcttattaagtctgttaactctcagttattgtttacatgtgttggtaaggataaaggtaagtttgagcagcagtgagtgcgagcaatgaagattgtacatatcaaggtggttagacctggagtgttcaatctttgggacagaaggctgtattttgattagtcgttacgcgataacttttgtagctaatattttataatttggttgtaactttttagatacgggatcccaatttatgtaaagtttattattttaattaaaggttaattaagtaaagttttaattaaatacgtttttaatcaaatacgttgaatagcaacagatacaacagttagctttaaatcacaataacacgcctaatctagtagggtattacaatttggtattagagccgccacgttgtcttctgaaaatcgtcatgatatgtacaatcatcattagagataagctcgactcacggttcagtaagcctttattttttttagtagtttgttttattagt

SEQ ID NO: 402713 - DNA, 726 bp, Cannabis indica
aaggttattgcatagggttaaaagggtgtgtgctagttaaatcagtgaacaactcctaattcaatacttttatgaagttctcttaccttttgagagaagtatgatggatgcagcaagtggaggagcattggtagacaaaaccccaacagaagccagaaatcttatctcaaacatggctgccaattcacaatagtttggcactcgccgagactctccctcagcatcacgacaggttaatgaagtgagcaaacccattgagaaccaacttagtcaacaaatagctccattaacctccatgatccaacaacttgctttaggccaacagataaagccatgtggaatatgtcaagttgtggggcatactactgatagttgtcctactctctatgaagggacaacagaagatgttaatgctattggacgtttcccaggtcaaccaaggcaacagtataatccatattcgaacacatataatgaaggatggtggaatcatccaaatctttgctatggcaatcaacaaaatatctagcaacctacaaaattgccttttaattatcaatagtggacacctgccagacagaatcaagcaccacaatttgccccaccagcacctcccaaggctactgctgaagatcttattaatgccatgttggctgatactcaacaattcaaacaagaactcaagcaacgttaaaaagtttagagaatcaagtgggtcaactctca

SEQ ID NO: 402714 - DNA, 663 bp, Cannabis indica
gtcatactctagtcgtaccgataggatagcgttgatctcgtacctgagccaaacatacatctatcggtatccagtacaactctatgtatactgataccgctatcaatgtaatctaacaggctctataaatatgtacgctaaacatgtaaatacataagcatatcattatactaatcttacctcgtttcggaattcaggtgtgctagccaacctgagtggaagctgctcgatgatttacaggcccccaaatcacattattcgtaaaactaatgagtgacacgctaaatcacctttcgggaacttaaaatcgaaactaaaagtttccctatcgatggataacatggcaataccctaaatattgcaaaaacaggaaaaactagaattccctaaactgccccaaccggcagaccggttgcccagccagaattccagttcaaaggggtttctcgaggaccacgaaattctgattcctacaggtcccactgaaccggtcgaccggtttagtgcaagaaacacaaaactccatctaaacaattaatttgatcccaaattgcacaagaacttccaaaacacctaataataccataataaatagaaatcaagaaactaaactggccaacaacatgtgaagcaaaaaccaccattagagagcaaagcttgagt

SEQ ID NO: 402715 - DNA, 798 bp, Cannabis indica
agtcatatactcagcctctgcagaggaaagggccacaattatctataggtttgatttctaactgacacactctcctagaatagtaaggacaacattagtggcaagcccaaaaacaaaaagtcaccccaaggccaagaagaacaaagccaaccccaagtccaaggataagaaaggtaaaggcaagtgtttccattatggcgtaatgggacactggaagaaaaactgtaaaaagtatctctccaagcttaagaaaggtaaatatgatttatttgtttttgaagctaacttagtgaaagatgataaatccttggagtcacttataatatttctttttcaatgtaaatacttgatttgtcaaggaaactggccattggggaggtgactatgcatgtgggtaatggagcacaagtgtctaccaagggtgttggcagagtccgtttaaaatttgataataattttttttattgaacaatgtttatattattcctgaatgtatccataatattatttctttatctcttttgcatgaataatttttcaatattgtttttattaataatgagattattatttcctaaaatggtacgcctatttattcttcaaaataaagtaacaaaaaattatgtacttaagccaagagatcaattaattttaaataatgaattgtttagagtagcattgcctcaatcaaataagaggcaaaaaatttctaattatgataaaacgtatctatggcatctacgttttggccatattggcctagacagaataaatcagttaataaaggatggtcctttg

SEQ ID NO: 402716 - DNA, 593 bp, Cannabis indica
tgcgaaggacatacaatatttgcaaattcaatgctcaatatgtgctttatgaatttgaaaatggtgaggaagtaagaatcaccaaatgtggtcattgttttcacaataaatgcactcgtgacatgattcaaggaaagctcactaaatgccctatatgtagaatcccattatttactcagtagagacttttatttataataattaattaataaaagtgtgtttcttaattaattgttggtttttattcatttctatgtatgtgtatgtaatattattaataatatagtgttatattatttataataatataatatatagattaaatatgtgtaataaactaataatatgtaacatatgactatattagttgtcatctttttgtaacatttggggagttgttactatgagtaacctctaccattatcaccaacattaagagtgtaaaagatgttacacacctttatttgaaattcttaatgctataggagttatggtgtgtgtaagagttacatttgagtccataacatctataggggttatgagtttgaatttcaaatggtgatatcctaaacactatataaaggaggtctatg

SEQ ID NO: 402717 - DNA, 948 bp, Cannabis indica
aaggctgaccttggcttaaagaaatcaaggtaccgcacgaggaaaaggtgagcatgtgacaattggtattaagaaatgttatatatatatatatatgcatctataaatatgatggctttatatgtatgaatatcatttgttaataataataataagagtaatttacggcataaatatctacgtttaactcctagttgtaaataaatacctcagtttaatttttggcggtaataatacctaacttatatttctggaactttgtaggtacctgattgttaaatattaagtaaattgacacataacaatctctaattggtccaagtcatgagtttttaatttttttttaaaaaaattaatttatatataccaataagaaaatgacacgtggataatgacatgacatttaacggccaggtacctttagagttctaaaaatataacttaaatattattaacaccaaaaattaaacctagatatttatttacaactaggagttaaacttaactatttatgccacaaattactctaataataataataataaatttatatctattttatataaaatgtggctatgtaacgaaattcttggtttaacaggattttttgattttctacgttaagtttaacagaatattctaattacttaacataatattctttatttattttataatattattatatatatttaaaaataaaaaattagacaaatattttatataaaataaatttaatttaattatatgtatttaaaaagtaaaaattatatctatatatatatttaaattataatttcacgacaactttttattttaaaaataattaatgatacatatatacttctaataatttgtacactttattataaccacactctcttaactacaaattaaaatattgtatctatcactatcattatttttttaaaatatatgtttggacat

SEQ ID NO: 402718 - DNA, 1426 bp, Cannabis indica
caattcctttttcaaatctcgctgcagctgcacgagcccttcctgcatgccataaatgacctacgaataggaagaaccctaaaataaaatgagaagtagctaaccaacttctaggagagacataatttaatagaattttagtttaacgaaatttttaaatttttacatcaattttaacaacatatcccaattaattaagagaataatttttattaattttataatattattatatatatttaaaaataaaagttatatagaatatttatataaaaaaattattttaattatagatatatttaaaaataaaaatcacatctatataaaatatatatttaaatttttattttaaaaataattaatgatatatatatacatgcttctaataatctgtacactttattataaccacaatttcctaactacaaattaaaaatattgtatctatcactatcattcttttttttaaaatatatgtttggacataatatataatatatattttgaaagcaattaattgtctaatcaaattcaaattttgtcaaaatatttttctaatataatccttatatatagagaataatataaaatacgtataataattaaaattcattcttttatattatatatataataatatctaatgagcacatcaatgtagtttcaatgttaaaaaaaaattcttaaagatcgaaatttcaaattctattttataaatgaaaaaataaaatatattacctaattaaaaaaattgaatatacatgtattttacttaatatcacttaaataaatttagttaaaaaaaaatttattatatgtgcattgtaacatcaacttaataattgtatatactactatgtaatataaattttaagttttctaagttttttatcttcacatatttaacaatcctattagatatatattgaaaccaataattaatgtgatatgagttaaataaaaaaaaaaaacaaaaaaacaataatgttaccgtgtagaatgagtgtaattaacactataacattaacggtccgtgttatccttagaaaaaaaatttaatgttacaatgttaattacaactagacaaaatttgataattgccaaacccacttaaatgtgtagaatgagcaaacccatttgcccatagtataagttatatatcattataacaactagctagtccgctccgcacgtacaagacttttcacttttgagtcaataatctaggtatgttgaaaataacaattagccatttccatcctattcttaaaaaatagaataattaaaaagctgttcataatagtagaaagagcattgctataatgtaccattggtgtctaacaccttctcgacatgtcacgttgcgattggttagcgatactccttaaaattattatattaattatatgggactcgatacttagtt

SEQ ID NO: 402719 - DNA, 936 bp, Cannabis indica
ggtggtggacattaatagtactcaataataatgctttacaatcatcacttgtattcacccatgattttttttttttttgagaaattatgtaagtttatctcaattaattttaagctgtacaaatttattaaccggatgaaaaattctataaatatctcacatataaaatcactaataatatacaaatatgatatgtatatgattactgaattacacatagctagattaatgcttaaaagaaattttttaaataatattaattataaaacttttataccaatatatacgacggagatttcaattaatataaatgtaaaatatatagttgaaattttaatttaataaataatataaaaattattaattaattataaagtgtatttaacactttaaaatatctaataacaatattataaagagaatttatcaatattgaaagaaaaaaaaaaaaaatttagtatcaataagcaagtcatcacatgattatatatcagggcataatgatcactcaaataacgtgtacaaatttttttaccttctatatgaattagctgcagcaatatcatatataaaaaatcgatatttaatttttacttctttaggtataacaacagtcattatttatctagttttaccgttaagagtaacgtaaaagtaatagtaagtaataaaacgacattttcctgcaacacgtgatacattccatggtaaatgtaaaaagtagtattgatgtaatattgacaaatgatcgatcagcaccagaacatatatatggcaattgtcaactagtaaaacatttctatctaaattatgtaaaaaaaatcattttattaattattgtaccttaatttgttccaaataaaatgccaactctatataattgcattttgagatcattattaaattaaaatatatagatattaaatgctttgggct

SEQ ID NO: 402720 - DNA, 739 bp, Cannabis indica
actattgaatataatgtgaattatacacatattttaatatatcacaaatttattatatatttagaatatttaaatatcattctttaaagagaatgaatagacatgaaaatctatttcaaaatattagatttgacatatacactattagtaatgccagaaacaaattaatatatacttagtttattattttttgaaatcagtgatttcaaattattgttagtatatgatatgtacatatacatttgctacttaattcaattgcatattactagaagtgactatataatttattaatattataataaattttgttagtgatctaatataatttaatatagttacattcttcaaagtgataatgaattacaaaataattatttgataagctatctgaagaagtcttaaatataattgctacttgaggtagtcaaatatattttgtatgtagctagatgtataatttttatcaagttatgaaaccgataataaataaattattatatgtattggttgtacatttaaatatataatatatcaaatcatgataattagactgttgaataatgtattaattaatctgaccacttgttagaaagacatggggaaaaataaatactatattatgattatatctatttgactgttacaataacatgatgaagttgtcttgtacctttaaaatatacacatcatggaattgatgatgaggaggtatataaagtttaataaacaaataatg

SEQ ID NO: 402721 - DNA, 836 bp, Cannabis indica
atggacttaagtttcttggggagggtgccatagaagtcttagcctattgtgataaagctaaaaaagaagaagaagaggcaactgagtctgaagaagatgaagacccatccaagtctcctactatataggcttgggttttaatttctttcttttttatttagaaaaatggccttttggctgagataacggttagccccttgtggcagtatttttgtaaagacaaatttgcattgttggatggccgactttgctttttatttatttctttttgtttattaccttgtatctttatatttgaacttaatatgtttgttcatttgcattttcaatcccaacttaaacaattatattttgatcaaacttaagttactttaggtaagcacttccattgatctcgttttttttctttgagattgcttaagtagttagtagtctactaatatgtatgtgagtagttatattctgctatgctttctcttcgcgagtacttcttatcagttctacttcgcgtgagcagttataatcttccatttataatttaataagcaaacttaaacataccttgaataattcactttatgaattactttgtacatattttgattgcctatatgaataggtaggccttctattcatattttacgttaagtattatttttcaaggcaactctgtgcctcgtttatgatacatgcctgaataatgcgagctgttagatattcagcctcgcatttagcttaatgttgtttttatgagttaatctcatttacaactgctacttcgatttttcctttctgaagagaatggctcaatttttgactttatattgtctatagac

SEQ ID NO: 402722 - DNA, 586 bp, Cannabis indica
cttggtaattttgtgtaattttttgtcattaattagtatattaatataatatatatgtagatgcaggtggtgatgttgtagagatagcaccaaaaccagttaacccagattgctttgtgaaatgctcaagcacatttgggaatcatgagtgcatagctgactgcaactcaaggatgttcagttatggctcctgtcagccagataattcttgttgctgtgttacagtattgaattaattacataattattatgttataatacatataacttataatttaccaataataatttctattaaaaaattcaatcttataatttgtctatttttctttttcttttcaatacatatataggccataacaaaaaaaatatatatttataataatacaaatggtaattgatctctatgctttattattcactagctagtcaccaatgccttgcctcatttacaaaatagatattcctactggtacagatctagtgggagaatttcaatagaaaataatctatggaaacaaaatatcattttatatcaagttgaatgagagaagagagaagagggaagagtaaaacaaaatactct

SEQ ID NO: 402723 - DNA, 1045 bp, Cannabis indica
aaatttttttgcggtcctatatgatgataatgatttgtttatatatatgtggttgtttaatatataattaatgagtagattagatgagcatataattatttagtgaagttgatttatctcatgcttatatataatcaattcttgttgaaatttagaacgttaatatgaaaatagatcatttgcgttggactttgatgcaaataatagcagactaaaatttacaatataatggaagaatctaaagtaccatgtctgcttacaaataaagaaaaggaaccctactaaaaaaacatggtcatattacaacctaaagaaaactaactaattacatattgttaattttaattactaagtatattaatatatatatatatatatctacatatatatatttacagaattttgctctctgcagcctctatattattgacggtggttaagagagttcgatcacatgaaataatttctagaaagcttataatattatagtgttatatatattatgtgataaggtatctatatcgacctctgatgaatatatataatatactaacacagtagacaaatcaaaatagggataataatatataattaagtcaatatatattatatactcacacttggagagctgaagtactggattatatagaggttgttgaaatttaaaataaataattaattattatatatatgcaggcgtattttaataatttaaaaagcagtgtacttttaaacacctactatatgaagtatgaacatcttcaattgtacattattaatcataaactaaagacacatttgacttaaattcataaatatatatatacacatatatatatatatatatatcatgtacgtataataatggttagttatatatatagattatatatgcatgtatatatatatatcttgtactgacaaaggtttagacccagataagttacgtagcatttcaacgtcgaagtgttgggggttcctgtctacgatgacagtaagtttcacaatatatttattacttatattatgtatattatatatgttc

SEQ ID NO: 402724 - DNA, 668 bp, Cannabis indica
taaaaatatcaatatctaatagtagaaatttaatgttgataaagaaataaaagtttgaggattaatttaccaaaatataaagtttgggggaccaacttgccaaaacttatatagtttggagacaaatttgtcaaaaaataataaagtttgaggaccaatttgtcaaaacatgtatagtttagggacctacggtacaaataaaccaattttagtataattttgggctaatctcttgaggagataatcttaaaattatggtaaaaaaatcacattattttatgagtagtaatgtgagtttgatattgtagttttgttgagaaaactaaaaatatcaaatggtatttttcaaagtgaccttaaagagtcatttcaagagaaaatacacaaaaagtgatattttatatacactttatgaggtaaaccacaaatttaatcaaaatgtgttgagacactgttcattattttaattgattttgaattcaaattttaaatcaagtttggttatgtgcatataagtggaaatattgacatatttgatgtcaaattttggggaaaaaaaattcaaaaaaaaaaaataaattttaagagaaattatagagacaaggaagtcttctatattttaaaatcaaaaatattatcttgataatgaaatgtgaaagggtgggggt

SEQ ID NO: 402725 - DNA, 856 bp, Cannabis indica
ctctctctctttaaccctctcttgtttttcaattcaaattggtgaggaatagcttgaattggacttggattcttggtgaattagtgcttaatcttagcttgagacttgaggtaatctttacagctgtgaatttaattgtatctactgaatttttgattgttagaaacacataattttggcattgatgaagatgatatgcataggttgcatgaggtgatgttctcttgctaatttatgtgagttttgcttgaattcttggtgtgatgggtgtttaagctctagatggaattctagggtttctcccttatcttgaattcaattgtttgttgatatttgttgctggaaaaatgtttgggaaggttggagctaagctcaagttcaagaacttaagttttgttaagtttggagcttgattttctatgcttttggacaatctgaattttagatttaatattgaaattgatgcatgaaatatgttgatttgagcatctattagttgttagcaaccctatttgatggtttggaagtttggttgtgatttgggatggtttagttgagtttttggggctgatttttgtgttttactgctggttttctgggttttgaacccaggtgccgcggcatgtatttagcatgccgcggtgcgcccttttctttctgggcaaatcctttttgcaaacttcaaatagccataactttgtgatctggactccgatttgggagttctatataccgttagaaagctcttttcgagctctatctgaatatctgaattttaaatgccatgtgtgttgggttttatgccctaaataaaactccatttcaatgtaaactattttattcaacatcaataaag

SEQ ID NO: 402726 - DNA, 1580 bp, Cannabis indica
caaacaaagaaatcgagctcaagaactataagactgaagagcaagtagcagacatattcacaaaggcactaccaagaggcaaattcaagcaactacgaaacatgattggatttaccgaaatgtgtaccaaggaggagtattagaattcgttacacatttctgcacaatttagtctagaaatttctataaacttgtagaaaaattatctaagaacttaagaaaattctagattagattaagtctagaatatactagtatgttgaactctagaaacatttagatttgtttagatataattccttctagtaaaagaaggatctagaagaaataattctaaccataaagtgtaaggggtgagcaactataactaccccttgaagggtttcaaattgtaaccaacaccaaacaaccaacatccaaactattaataaagcttactatatattcccatcgactttatgcctagcccatactttcatttggttttccattaaagagaggtccaatgtgacttgggcttggccatcacaaccccgtcttcaaaaatatattttctctcaaggttggaaacaccataccattgaagcaatgcagaagcatcaatttaatggctaggcatcaatgagggtattcccatgtaacaatatagataccttgagcatcccttatacaccatctcttataaaataaccttgctctcaaggttggaaacaccatacactgaagcaatgcagaagcatcaatttaatggctaggcatcaataagggtattcccatgtaacaatatacataagctctttgtgggaaaattaggactaaagtggagaatcaaatcaactaaaatttactaaccaaactgttagcaatgacaagaataacaaacacaaaatagtaataggagaaaatagggatggacagagtattaaaaatcaggagtaattaaagtagtaaaatgataaaattaacaccaagatatatactagttcaagtctgatagatcgatgtaatctatgactctactccagttttgaaacaccaccaaatcctctttattgattgagaaagaatacgtacaatacagtcgagaaggattctctgttggatctctcaaagtgtttcagctctcaaactcttgcccaagcatcttcttcatctatagaagattcttcatacaaaacccaatctctctctcttttctttatacttctatgtctacctctcaatctctttctctctcaaactcaaagtctcctcttgaaactcatcaatccagtgtcctaaaaatgaaaagtgttggtattggtggtatatataagcttaggataaagatcctaaggtcggaggctacaattaataagttgttaagttagttatgttatataaaaaaaacttaacaacctcctcgaaatagaatctccacatcagcacaagacgaggcacttctggatgagacatacgcttccttgacaaaggagcgaagcgtgtgctgaaggagcttctggataggaaatgggccagctcgagtcgactatccggaacactcttccaggaggaacaactagccatctgaaactcctttt

SEQ ID NO: 402727 - DNA, 573 bp, Cannabis indica
attattattagcagtgatttgaccaacttgtatttttatatcatcataatattcatcatcaaaagaagatgatgataaataagatgaactactaagataagaattcatattttttcaaagttaaattgtgtatatttttggtgtacctcaaattatgtatcatattcattttttatagtgtaaacactttatcttttaaatctaaaattagaagataagaaatctcgtggtataattttgattgctgaaataatttgaccacgatctcaatcattgcagtttattgtcacatcacatccttatcttttgaatccaaaattataagataagaaatcttgcggtttaatcttggccgctgaaattatttgaccacgatctcaaccgttgcagtgtgttgtcacttcacatctttatcttctgaatttaaaattagaagataaaaaatcttgcgatttaatcttggccgttgaaattatttgaccacgatttcaaccgttgcagggtgttgtcacatcacatccttatcttttgaatccaaaattagaagataagaaatcttgcgatttaatcttg

SEQ ID NO: 402728 - DNA, 532 bp, Cannabis indica
atttgtaatgtttgagagaaaaagttctgagctgcttgtgaagtatttggcgagaaagacattacagatttgtcattgttaaaacttgtccagatgctttgtgataagtgtcaagtgatttcttaatggacatggcagattggtcattcgattgacagaataataaactatcgtctgtaaagagcaagtgtgaaacagaaggagagtgccttgtcaatttaagaccattcaacataccagcttgttcttccgattgcaaaagtcttgaaagcccctctgaacaaatgagaaataagtagggggagagtgggtcgccttgacgtaaatcccgagaaggatgcacttgtcctattacttcaccatttagagaaaaggaaaaggagctgctagttatacacttcataatcaatgatgtccatgcatagtcaaaacccatcttaagcatgatagcctcaaggtattgccattcaaccctatcaaacgcctcactcatgtctaacttgagtgcggaatatccaattcttccttgagt

SEQ ID NO: 402729 - DNA, 497 bp, Cannabis indica
taccatgtatcatttctttctttaatacaactgtttttgcaattaagtcccttcaatcttaatgataacgataaggtacaaaataataaaaatattttataatgcactttcttaaagggtaattatcggaaattattttttagtcaaagtttttttcttataatgatgttataattatttaagataatttcaaaatttttaataaatttggaaaatttaacacgctgaaaataaagttcaaatattgtattgcactattttattttatagcgtgtaaaatagattgtttgaacattattttctatatcataattttttttttaattttgtaggatatcttaaataatacaaataaaaaaatagactaaaaagttattttggatgccgaaacaggaagaggatgtatcagtgcatcccttttaagggggtgcattgtagaagcatccacaataattttttgtgtagcattaaatattatagggtaattctaaaaggta

SEQ ID NO: 402730 - DNA, 557 bp, Cannabis indica
aaaaaaaaaaaaaaacaattcgaagctctcgtccaccatttttaatttatcagaaaataaatattcaaaaaatactatgaaagttagggaaaaaaagaggatggtaaggaggcacaaaccagtggattggtgttgttggtcggtgttgtcctgagacgacatcgattggtggttcaactggtttgggtttcttcttcttttttcttctccgaatggaatggaatggaagagaatggagtgtggagaatatgaacctcagttggggtctgtttgggcacaggattctactatactccagctctgatagtcatatccttgggccgttattggtgttgggcttacccttttcatatgtgggcctttttttttttgaaaagatcatatgtgggccttttggaatctattaataaggggtaagttgaaaaatgcctcttttattcatcaattaatcaaatttacctctaattttatatttatttgaaacatacctctttttatacgtattgtacccaaaatacccttacataagagaatcacatggagagtatcttgaagtg

SEQ ID NO: 402731 - DNA, 520 bp, Cannabis indica
ggcactagatcaccagcaaatttcgagaaccgatcaaattccagagtatactcggccaccgaaatcttcccctgagtaagcttcacaaaatcttccatatgtgaagttctcacagtgatgttgtaaaacttttcttcaaatagattcttaaattcttcccaagtcattacactgacattctgggtttgacccacaatgtcccaccagacgcgggcatggtcttgcaacatgaaggctgcgcaattcactctctcagttcccgtcactcccatattatccaagatacaggtaacagtgctcatccactgctcggccttaattctatcgatacctcccagaaaagtcagaggttgcagcttcacgaaccgctcaaatactgagtctttatgtggcataacaaacccctagttacccaccactggcacaggtgctgatggtaacacttgatcaacaggggcagccagttgccttaatcgccgcaaccctcttcttgacgaagtatgacatttcgcatttcttg

SEQ ID NO: 402732 - DNA, 760 bp, Cannabis indica
taataataaaaaaaaaaaaccttatcaaacatgattatatttccaagaaaaaatatgcacacatatgtactggttattgggtttaatttagccaggtcgggaaaagaagataaagtatggagaagttttgcctattatattgatataattttatgtgtatatatagtagtaggtaaagtaaagtcttttccgtttatataaattatattgttccacttccaatcgaataaggtactattgacaacactggtagtgcatatgcctatatagtacaaacaaatactatatacatgatactagtaaaatttatatagtttgatgatcgatggacggtgaaaagcctatgctgctacccagtcactatatagtacatgtgacatattttatgtatggtacttattatttactgaatccactcttataattatctaactgcgacttctttttagattgggataaaatataggaaagtatgttacttttcatttgcatatgctataaatagtatatataacatttttcatttggtgatgaattatgtgaaagataattaaatgaattaacatcaattaacttgaactccattaatttttttataattaatgaaagagacgcataacaatttacgataggctatgacttattgtaaataaaataatatcaattagtttttatttctattacatagctagggaaagattcaatctccaaataatcgacctaggggcaattaagccaatgaaatgaacagataatcgaa

SEQ ID NO: 402733 - DNA, 585 bp, Cannabis indica
gtcgatggctaatcgcactgcacaggatattagcactgggaaaaaggtacatcctcctattctcaaatctaatattgttcgtaacctagaaaactcgtatgaacactctgataaagaggcagagtgtcctggtttaaagaagaagattaagatagattttaaggatatagaagaggaagtaaactactggcaaccttccttagtttgctatgtaattggagcaaatcctcctataagcattctggaagggtttgtgcgcaggttgtggaaagaagaggtggttaaagttggcttacttgctaagggaattttcatcatccgattccaaagtatggagcaaagagataagattatgcagcagggatatgttttctttaataggaaaccaatggtgatgaaaccttggaacccaatcgatgatttcactaaagaggaagtcacaaatgttccaacctgaatacaattgaaggggctggacatcaaatactggggtgaatcatctttgttcaagatcgtaagtcagttgggagagccattgcaagtggatagtgtaacaaagaacagggatcggctgcagtaccctag

SEQ ID NO: 402734 - DNA, 871 bp, Cannabis indica
gagagtaaagatgtgtcttatgttctcctccgggagtcccactccatgtggtgtattccaagacttagttgattttcatgagtggatgttctttcagatccacatgtcacccttatccgcgtccacgtattttgggtaaaaccaaaggtaacattcaccccctaagtctcgtttagtgaagagtaaatgaggcttgtttgatgcctccggttagcttgttgatataatggcacgtgccttaagcgcatggactgcatttatgacagtcatcattaatatttatttctttttgaaggcaacgattcgcttcccgtccattgagaaactggtgcatttaatctgagtgtcagaaaagtactcaaacgttttcaaccgccctggcacccatttatctcacccgttggattcgtagaatgcgaatcgattaccattcccaccgtgcaatggtgtctgatcacagcttccttgcaccctttctggtctataaaagccagcattttttcttcattgggttactttcgctatttcgccatttcaacccaagtaactcctttgagaaaattttagaaaccaaagatttcttgctgctgtttctccgtcattgccagtccacattctaccgtcagccatcatcaacttccagctcattgcctttatgtaagctttctgggtatatttcgcttttactattcatttgcatgttagggcagagtttttggtagagcttttagttgtatttgatttctacggtggaacaattttggtgaagaccgttgtatggcgtagcttttcatctatgttctgctgcttcctttctttttcatttttcaaacaacgtttttgcttagggactgttgagagtatgacacgg

SEQ ID NO: 402735 - DNA, 805 bp, Cannabis indica
gtgggtcctcttcacctcctcggcttcgttaattaggcaagtgttctctgacttggcatcattccacttcttagtcacagcctcgcgctgacctatcaagttctgaatctcgctctccatgtacttcctttttttcatgccccgccattgggcgacgaaggagatgaaagtttgttgaaagccaacaaacaaaaatgcgtgactatttttgaaggatgttaaaaaaggaagtaagaagataaggatagaggaatttaccgtaaggccatgagcgacactcctttcaagcatcttctccaggtccccattattgattaagtcccattcattggggagtaaggccttgaaatgatgccaacaagctgcgccaattctccagtgtactccgagctagtactcccgcctcgataggcagagtttcgagggctttgctcgaagaggtggaagcttgctttgttttgggaacatgctcgtctgtatgtgtgggggctggaggatgggtcggagcctgagtctcagtttcagggatctcgagattaacagtctgggaggcttgctttttgttggtagttttcttgggccttttgagaggctccacattgacatctaatagagtctccgagaaggtcaacctctgcttccccttcttgcttgatgaatgaaagagatcctcgagattcatttctgcgagataaacagtgtgttagcattcattttaaaaacaagtaaaaggggaaattggggtataatctcctgcctaagggatttaccataatcataagaagatgatgttggaaatatttta

SEQ ID NO: 402736 - DNA, 762 bp, Cannabis indica
gagagagagagagagagaactgggaggttctagcttcttgattttttttttctcttttcttaatctctttctaattaattaatttctaaaaaaaaacattactttcagctgagaaaaaataagtggctagctgccattctaggattaagccacttaacccaatactaaaaacttaccaaaatacccttcttacttgttacttgagcaataataagcctagatgtaaaatggtccaaaaccatatataactccgcttaaattcggtattcataaaatctgaaaggtttgttccactaagaaataggttctaaacttacccatgtgactcaaatggtcatccatcgtattttccgttatcgctgagcaaaaattataaaattgcataatttatatttaacttaaataatactcttagagtttaataaaatttccgaaattgagaaattataactctaatgaccttttctaaaaataggaccaaaaacataataaaatcataaataattataaaaatatcaagaattaatactgattgtctttactaatccaaaatctaatatgcggtcattacaagtagtccacctaatgaaattggtcggtttggttgggttaacctgtccaaatcgaccactatttttttttttttttacatttaattgttatattttaattaattttaataatgagataaatatatatagattgaatttaaagttcaaatcaaccaccataaaaaataatattggttttaattttatattt

SEQ ID NO: 402737 - DNA, 500 bp, Cannabis indica
ccaccatcttccatttgcagtcgttcgttgccccatatttagacagaaaatccatcccaggattatatcaaaatcagactgttgcagctctattagattggcagttaattcacatccgtcaatccaaaaagacaaaggtcaaatccacctagtggatactataaggtctcccgaaagtaacagggtaccaaaccccacaacataaatatcacatggtttatgaaaactttcaattactctactcgacacataagagtgagtagctcccgagtcaaataatacagtataggaacaaccatttctagataactgacctgtcaccactgaaagactagcattagcgtcagcctgagtcatggtaaaaattcgtcctgggttctgagtagtattcttcttaggctcctctttcttggcctgatgacaatctctgataaattggcccaccatgccacactggaaacaagccttggcccgacattcaccctgatggtgtttcttac

SEQ ID NO: 402738 - DNA, 893 bp, Cannabis indica
ttagcctcagatatgtctagggctaatattgagtttgtgataggaaaattacataatctgacacttcagtcgatttgttggaaagaataaaagcggctcaattagaagatcctgaattgattaagattcagaagatgtcttagcaggcaaaactaaggacttttcaatctctgacaatggaatgttattatttaaagcacgagtatgtgtccctgataagtctgagcttgagagagaaattttggatgaagctcataccaccccttactcattgcatccaggaaccaccaaaatgtatcaaaattaaagccatatttctggtggtatgggatgaaaagggatgtggtggattatgttactaagtgcttaacttgtcaacaaattaaagcagaacatcaacgacctgcaggattacttcagccattaacacttccagaatggaaatgggaagacattgcgatggattttgtggttggtttgcccaggaccacaggaatgtatgactcagtttgggtcgtggtggatcgttttacaaagtcagcacatttcttgcatgttaaggtaacctatacagtagatcagtatgctgacttgaatgtgaaagaaattgttcgtctccatggggtaccaaagtctattatttcagatagagaccctaaatttacttcaaagttctgggtaagtttgtagaaggccatgggaactaacttgaaattcagcacagcctttcatcctcaaatagatgggcaatctgagcgaactattcagatacttgaagacctgttacgagtttgtgtcatggattttggagggtcatggagtaagtatttacctctgattaagttctcctataataatagttatcaaagtaccataggaatggctccttatga

SEQ ID NO: 402739 - DNA, 574 bp, Cannabis indica
atcttggaataggaccgggacctaaactcgggcctaaacccagcaccggacccaatcgcgaaccctaaccgagaccgaaacccagacgtcaacctcacctttgacaaaaatcaggacccgaacaaagactcgaacccaaactcgacctgaacccataccctgtggcttgaaactagaaccaaaaccagaagcggatcaggacttaggaacaggactaggacctgacccataccttaaagtataaccggacaaggacccacactcaaaacacaaacccaccctgagattgggtcccaaacccgaaccagagcgtgaccaggaccctagaacaagaccaggagcatgacaaggacctggaccgggacccgaaactcgaccaaaacctagccccggaactcgggctcgaacccagtcccgaacccggtcctggacccaaacaaggactgagactcgaacttgaaccccaacccgaactcggaactcaatcgtaaactcagacaaagcccctaacctaaactatgattcggacctggacatggacacgaacccagacccatacccgaataccgaccca

SEQ ID NO: 402740 - DNA, 571 bp, Cannabis indica
attataaaattaaactaaaaaaagtattatgtttcattaaataaatctacattttttttttgaaaaaaatcaaatatattcaagtttattccccgtaaatataggtggcgtttggtaacacttttgtttttaattttgagtaatcacaaaaataaaagtaaaatttttatttttgagaaaaaatgtgttatataacaactttttttttcaattttaaaaacaaaaaataaaaatgtgttctgtaaattttatttatttttatttttatttgttgattttatttaattcgggttagaggtcaggtcccaggtcaggaccgggggcaggtccaagtttgggaccgggtttgggttcgatttctaaggtctaagttggggtcggagttgaaatattgattaagaaactgtttaaaaaaatatttggaagtgatttttttttattatttttaaaatttagattcttaattagaaaatgaaaagtaaaaatagtttaattaacatgattttgaaaaatatttatacttttataattttaaaaacaaaaaactaattaaaaaggtgttaccaaacgc

SEQ ID NO: 402741 - DNA, 639 bp, Cannabis indica
taataataataacactaataataaagatattaagattgtaataaattatatgtaaatataaatatatatatagtatatatattgaaggggagttcccctttaaaaatcacgaaataataattaaaattacccattaatagtttagacagataagcaactatagaaccattcgaatcccttataacggctcctattccaatggtttgggaaaggttatctattgctgcatcgacatttaatttcaaacaaatgtaatcattagaaaacattgatcttattattctcataagtcatcttaaggatgaaccaaaatactctttgaagagcaaattgttcaacatgcatgttgtttaaaaattgtaagtaactactaaataacatgacttattagaattttattattgacttgtggattattaatgattaattatggattctcaataaccattaaaattaaaggttattatgaatcataattaatctaatacttgaggtgtaagtttgagaaaataaatgatcttttctataaactaggttcctagatcgatcgctttcactgatcaagtcaattcttaataccacagtttagtattgtgagatggataataaaatatttaacccttagaccttatagctttt

SEQ ID NO: 402742 - DNA, 803 bp, Cannabis indica
gcatgtccagaccagaccaaagtacaatggtcccagtaggttgggggaagcgtaaatacccttaaacacagttttattagcttggttaggcaatctaacaaaggctcaaaacctataaagatagattgagggataatggggaatgacagtagttgagcactgtgagttatgcttagtgcataagaaatgcagaccatttattttttgagtgcacttttgctgctacttatctccatgttttaagggtttacaatggcatgttgcagccaacacacttcaatgcctcaccaggtggattggaagatcaagaatcagcaagttcaaggaaaatgtattctcagccgctcttacatgtttgatgtactcgctcttacatgtttgatgtactcgctttggagagcccgaaatctcagtatttgagaaaaaacaaaaagcagatgcagggaagttaattgaaggagtaaaaaggaggttgtacaaaggattagtatagtttggccaaagaaagtaaattcagaggatactagatggtttcaaaatttgtaaagagtaatgtatgtaagagtatagagttaatggagtatataaatgtataaatcattttgtttgttgtttttaggccctaagggttattaatttggttgtaaaaatttattgtgattaatacaaaatttctttgattcatcaaaaaaaaaaattaaaactattttttttgtaatgccgaaataagaaaaaatagtaacaatacaccattttttaagtagtgttagtgtagaaggatcctatatatatatatactagca

SEQ ID NO: 402743 - DNA, 738 bp, Cannabis indica
tctctctctctctctctatcgttaattcggtaccctagaaatactatcaacctcgttcaccatctgatcggagatcggagatcggagatcggagaggaggaattccgtttcactcacaactcacaaaaggtactgttttgttagtctggtttaaactttgaggcttttgagctttgaggctgctaatgaagattaaatacacctttattgtctggttgtttgatttgagttttctctaaagtgattctttctgttttgttttattttgtatagagagatattctcactgtgaaattcattcatgctctctgtttattagaattatttttgttgatctggtctggttgataatattccatgtcttcagaatcagagcaaaaacaaaaatggcatggagaggacaattatcaaagaatttgaaggagcttagggttctgttctgccaatcgtcccctgcgagctctgccaccaggtcttcattcttttctcatttcttactttaatgtgtaatattatttgacttttgtacccatttaggctgattcatagtaatttaaactacaagaactttcatccatggccacattgaattttgagtagtggatcatattaaattactaaaaaatcatataaaaatttgtagaacttttgttaatgacttagagaaatagtttgtgctctttttttggcagagcatttgtagagaaaaactaccaggatttgaaagccttgaacccc

SEQ ID NO: 402744 - DNA, 1289 bp, Cannabis indica
gtgaaatgagtcataaattagaacagaaattttagactcaaaataaagtgaatcaatgtggattcaaaaattatgaaaagataacaaaattggagaagcaattttgaatattaaataatcaaagtggtgaacaaaattgatgagaattttgttagctttagtgtaatatttaggttaatcttgttaaggagataacattaaaataatgggtaaaatagtcacattattttgtaagaggtgatgtgagtttgatattttagttttgttgaaaagaaaaaactaaaaatgtcaaatagtatctttcaaagtgactttaaaagtcatttaattaagaggaaaagaaaatacacaaaagtggtattttgaaaaattatcatgtcatctcaaaagattcatgataatttatgttgagattaaatggagaggctttactttaaagtgaatttaaaatttcactttatagtggaaatgtggcggtgagccacaaatataatcaaaatatcttgagacattattgattaatttatttgatttagaattcaaattctaaatcaaatttggctatgtgcatatgtaaaattttgacatattttggtgtcaaattttagtgaaaataatttcaagaaggaaattaaatttaagagaaattatagagacaaagtggtcttctatattttaaaatcaagatattatcttgatagtgaaatgtgaaagtgtgggggtgatactccaatgtgaaaagtttaagacatgtttggtgtcttaaaataaagtataatttagacatgtttggtgtctaaattagtgtttaattttgatatgcttggtatcaaaattattgagaatttgagttgtgtgaaaattaatcttttatgattgaattttcaaagcttaagtacttaaggagaaaagtggtcacaaagtgaacactatattttggcatgcatgattcacatggaatcaatagtgagaggttataacaaatcgcttaatctccgtacaagattaaagcatgaattttcgagggatgggacctaaactcccttagcgttttgctcattgatggtaacctatcttaacactagtaaaaatctagtcttaagttcaataggtaataacaagtcaatagagtgaatgtggtactcaattgtcccatctatggatgagtacatgttgtaaaattgagggttaaaaccaaaaggttttttaatggagcttaagcttaagaaaactcacttaagcttaagaagtgtctaacgagtggtgagacactaaaactccacctatat

SEQ ID NO: 402745 - DNA, 355 bp, Cannabis indica
gttaaaaaatattttatggtatgcaattttttctttcttaagtatctggttttgtaattgatatatcttttcattactttaggcatcatatgtttgttctactttttagttgattgtaatatgaaactagattttgtattaaattattgcttttgttattatacataactcgttctaagatttagtttttaatttggttaatctaacataattagtttctcgttgtcatatttttaactatacctaataaatattattgatttctctttatcaaattccaaggtccaactctagcgacaactctaacgtccaacttcgatgtctaactacggtactttttggtagcgatgacttt

SEQ ID NO: 402746 - DNA, 742 bp, Cannabis indica
aggagcagagtgagacaggacttttccacttacctgaaaaggattcccataatgagaagatgcaggagccaatgcctgattctgattatatcctggggtagcggaaaattgtatgccgctcattggtggagtagccgctggtagggttcccgggagcttgactccgagcgcataccctgctattccagtccgataatgtcccccgtaagccactatttggaattcttctaagttgatgtacttttggactctcttctggaaatcctgaaggttggaggccccttcttgctctaattcattccaaaatgtagtccctgtacggatccctgcttgaagaagtgaagctgttgtccgtcgtcaactttcttagtctttgaggcttcttccttgaacctctttatgaagtttttcaatgtttctgtgagtagctgcttgatgttagtcagggcgctgacctcaagattaacctttctcgcggcgacaaattgtctccagaaactaacttgcagcttgttccaccagtccactgatcctagttccaacttcttgaaccattcctccgtggacccactcaatgttagcgggaagcataaacatttggcgtcattgctgactctcatgaccgtcattacacggttgaaccgtgacaggtgatcgctatggtccgagttcccagtataagctgccattttgagcatcttaaaatttttgggtagcagtgcctccaagatgtgtttggcac

SEQ ID NO: 402747 - DNA, 1153 bp, Cannabis indica
aaaaataaaaagaattgtaattgagaataaagagagaaataagtgagtgagtgacctgactaatcattagatcagcttgattccaatgaaaaggaaaataactaacaatacatctctcaaactcttcaacaagcttaacaaaagatgaatcatcaaaagataacttgcataatcgtggacattctcttctatctttaaaacgcatttgtctagctgccaacactaacatcctcaacaagagggtatttttcttaggatcctcaatataattttatcaaataaaactaaatagttaaatatcgctttaattatacaattcataattgatataattattcaaaataatagtttctacaaaattactattttttccttaagaattatttctcatagaaattaattattctcaaattcattcttcaaattaaaccttcccttgtatagtgttgtatggaggtaacttaattggaaaccatgaacctatatttcaaaataataaacacttaattattattgaactcatcaatagaataatctggcttattaattctattattactccactataaatatggaattgtactctttgacaatgtagaattattttacagaattcttacttattgaaacaccctaactaacttaggcatgttagcgtgattttaaacgtactgtgcagctcgttgctaatcaacgagactaatgaaaatgtgaataattaaaattttcctatttaattaaaaatataaagtaatacatttataaaattttgggatcccgttacaaaatacatttacaaaagtttgctattcacatacaaaagttttgacgcctagcaactattcagcaaaagccttgatgtcccaaagatcgtacgctccaagcctaaccaccccgacatgtataatcttcacctgctcgttctcacggctcctcagctttagctttgcccttacctacacatggaaatagcactgtgagtcgacagacttagtaagaaaagcataacataaaatatactaatatcccgggttataacctggcgcccatacacccgatcataacccctatccccgtgtcgcacacggtactgagtctagaacattcatacgacaatactatcgaccataatgtcagcctatactcaatatgc

SEQ ID NO: 402748 - DNA, 717 bp, Cannabis indica
tattatgattaactttatatttttttctcatcaatatttatatcattttcgctcttattattctttttttctactccactttgtttcaaatatcaaatatcaaatatcaaatattagatatcaaatatcacaagtaaaaaacaaaattaaaaatgttagatatcaaatatcaaatataagttatagaaaaaaaaaatatttgattataaaacacaatctaataaaatatatatatatatatatatattactaaatgctattttttttttttctaaaagaaggattcatatgtaaaatcaaaggttaaccgtaaggtttttacaatgaatgtgatcagggagtaaacttcactcaacaaaattagatacatcatggatgttgagattttatgccataaataaaatctattttaatataattagatttactaattaataaaatattagaaatcattttatgtttcatagttcacatgattactttcatgattatatgtttaatgtataaattttattaaatcttgaatatctagttctttatgattatagtgttgtctacacagtgaaagataatcatgattatatgattcaaagtctacagtcccatgatttattagtgcactagatttacactgacgtgataatcagcgataaagtttacttacgcattgatatgtagtatgaaattctgtattttaatattcccagtttaattatt

SEQ ID NO: 402749 - DNA, 1128 bp, Cannabis indica
tcctaaggtaagagctctagtttttctttttggtgttcttaagttgttatttagtttaagcatgtgaaattataattttgctactgtttgagtaagggttagtgcttgattgttttctagtgattaatggagttgatctaggtctgaatttactggttttggagcttaattcttaggttgagcaagtttgagtgctaagaactcaaacttatctcaacaatggcatgtttggtttctatgtgtgtttctggtttctactacttggattatgttgtttgaggttattataggtgttctagaaggtttggtaaggtttgagcgcgttttgagcaagatttgaattgtttgggaaaacctggtgcaaaccagttaaccggtttgacaggctctgtaaaactagttaaccggaacaggggcaggtttctcgaactgttcgattcatcaattcgtgttagtttcaaagccttggttgagtgattccttgatacttagtgtattgttgtgttagttagcaatagcatgatctttagtcgaaggtttgagtttcccgaattagggttttggtgtgtcgtttacctgtttatgttatgtgattacggcaccgatccagcatgagatttttcgtttaggtcggctaattcacttgaatttagaaacaaggtaagaatagcatagaacatattatatatgtgtgaatttatgtatgtgtgatatatatgcatgcttgttgtgatttgtacactaccaaaacttgtacggtaggggtacatagtgcattggtatagtgtaaaatatttaaagagtacgttatagtgttaccagcacaagtacagaaaggtacagggtgtgtgtggtacaacacttagtggtactcagggtatgagataaaccctaccaacactcgtaaaggggtggtacgtagtgtatgtagtacaatggttgtaccctagtaaaaaacgttcttactcatttgttaagccttgtaaataggtgtatgggtgcctagatacaagtcgatattatattatttgttatatgatattcttactgagtctgtcgactcacagttgctacttccatgcgtaggtaaaggaaaggcgaaagctgaacaggagtgagctccgagct

SEQ ID NO: 402750 - DNA, 682 bp, Cannabis indica
acaagtccttggccctttgcggtgtggggtatcgacttgataggcgagctacctaaaggaaaagacggagtgaagtatgttgtagtcgcagtcgactattttacaaagtgggctgaagccaaagcactcgcaaccattacagcgattaagttgcgcgagtttgtctacaactccataatctttcgattcggcgtcccttacaagctcatttcagataatggaaagcagtttgattgtaaggagatgcgacaattatgcgacaacttgggcattaagaaagcattctctgtagttgcttatccgcaaagcaatcgagaaactgaagcagtcaataaaataataaagcacaccatcaaaggaaaactcgaagagcgtaagagggtatggccagacgagctttcgcaagttttatggtcatataacacgaccccccaatccacgactggcgaaactcctttctcgctctcttatggatgtgaggccatggtaccagtagagattgggccaggttccttacgcagagacgtttttaaaattgcacaaaacgaaaaaaaaacagtcgctctacctcgaccttctggaagaaaagcgcgatcaggctcacctgaaaaaaacaggacttaccagcgacgaaccgcaagatattcaattccaaggtcaagacaagagtcctgcgagtagg

SEQ ID NO: 402751 - DNA, 618 bp, Cannabis indica
ttatcaaactacaatcattcccagatgcattaatgatgaacagaaacatcagaagcagagaattgaaggtcttaactgtagactaaaagagattcgtaaagcagagagtatggatgaggaaagtaaggtggtgttaggactcaagcattggattgagaatgaggttgaagctgattgtggttgctggttctcttatgaaggtttcaaaaggtcgatcatataactattgctagctaatttgtacactcatcatcaatgctgtttgttgtcgtatacaacttttcatgtttgtttgtttgctagctaatgtaatctccctcacttttccatcgacactacaaggaatcatcttctgaaacatcgaaagcctcgccggactactactcctctctgaagacgacgacaaagatttcctcatcccctgtttcgaaacgcaccgttttagtcttgtcattgactcattgacatggtccattctgttttcatcacaataagtatgtacaatgttgcctttttttttatttcgtttccaaagtttatgcttttttaaattggatgtgattcctgacagccttttgaaatgtttcgatgcatatggcagtatgattgaatctctgg

SEQ ID NO: 402752 - DNA, 760 bp, Cannabis indica
ccatcagtatcagtggatgtagaacatgaaaatttaaaaaatcggccaataaagtctttaagacttgacattaaagaagggtttgatattaattcattagagcgtgatctaggaatacgcccgccaatatgggagtatccacctgagaagcgtgacgaagttcgcaaagcttacattaaagttggtccatttcagattatactatctagctatcaaaaattagaagaagctcattcacgttcttttcaatcatcttggtttaagctatttccatcttggttggaatattctcctaaagtacatgctgcattttgtctaccatgctttttatttcactctaaggatgcacatcctagattgaatgcatttactattaatggatttcgatcatggaaaaaaagagaggaaaaaattgtgcatttttagcacatattggagacgatataaattcacctgagaaagcagttgcagatctcatgaaccaaccaacacatattggaagaaggtttgcgtacttcacatcacaagaaatcgctgacaatagacttcgtttgaaaacatcaattgagagaattaggtggctagcgtttcaaggatgcccttttagaggtcacaatgaatctaaaacttcaattaatcagggaaactttttagagttattgagtttcataacttcctataatgataaggtagcagaagttttggataaagctctacaaaatgccatatatacatcgccaacaacgcaaaaacaagtttt

SEQ ID NO: 402753 - DNA, 855 bp, Cannabis indica
atacgaactatatctactaccaattttttttatttttcttttatgtttttgtacataaaaaaaagtagcatcaggtgactatcggaccactatcggactaccatcgcaccccatcggaccctatcatcggactaacattggaccgccatcggaccttcgttttcaacctttactcattttaacaacaggaaggcatcagaccactattggaccaccatcgggcgtgacaaaaatcctattttttgcccaaaactcagatctggccattttcgaccctaaatctgacatctactcacatataacaaacattaatcattttattcctttgacaacattgcccatcataaatcaacaaaaaagaaaaaacaatgaaaaaaaaaatgggccaaaggcttaccttcaacatctcggaggtagtcgggtctcacggtggtcgtctgtgtaggtggtctgtgtaggcggtgaggggtaggtttggttttggtgagggtgagatgttgagagagaaccgagagggagaggaaaagagagagttgaggtttgaaaatgagaagggtatttttgggtacattaaaaagtagtcatatttttcaaattttgaaatgcattagtttaggcataaaattttatggtatcttatgcatactttttcaaatttcctttttggaattgacacagctttgcatcggttgaaaaatgacatattaggcttttgtgacggttttaaaaggatgccatgcatcatcatttccaaactgacgcaaaaaattaacaaaaaaaataaaataaagcccaagcccaataacagataaaaccctactatatataatacctaacctaaatttctatccagca

SEQ ID NO: 402754 - DNA, 559 bp, Cannabis indica
agggttagtgcttggtcggaggccgagagattgccggcggaggaaggtctggtagtggttgttgatttggtggtgagcttcctttttctttcgtttttttttttttttttgatggctgatgagaaaaaatgatgaggaggaagagaatggggctgaggagggagggagaagggtttttaatataatgaacttttaggggcgacaaaaagtcgctcctaataagttgactgtggcagatgacacttttaggggcgacaaaaaagttataagcgggaaaaatcccgccaaaatacaacatgtaattttcaaattattaaatgttgcccctaataattttaggggcgacaaaacttacaaataataataaaaaaaaactcacattccttaaggagcgacacaatgttgtcgcccctaataatcctattattagaggcgacaaaaagtcgcctctaaatttgtcacccctaaaactccaattttttgtagtgatagactgatattatggtcaatagtactgttgtatgagcgttctagactcagtactgttggaaattatttt

SEQ ID NO: 402755 - DNA, 1051 bp, Cannabis indica
attaaaagaaaaatattttaaaaacacagtactaattattaattaataaaagtactattaaacaattttttttttcaagggcgtctcttgccataattgtagtagttagttataataattaatatatgagtcttgtactagaaggataaaattgtcaccaaattttttatatatatatatattatatataaatcataatgtaataaatgaataattacgtatataagtttgccttatataatggtttcttagctgtttttgtggttgtttgtcaatgtcaatgtcaaccaaaacaattttttattttggtttcacaattggagtaattaataataataataaaaaaaaaaatcaagaagaaaaaaagagtgtcatcgttgtagtccttataattattggagttgatgacttttggtttttcttttcatacacaataataagcaataagaatcaaccctcatatagttattttcttacaattatttactcaattaaataaggaatagaagaaaaagaatatttctccctctattttttttaaagaaaaagatttttacctcctgaactttgaattttgacatgtactaaattatattctttgaatttttcaggtcgttgaaaaatttcctgatctattgaaattgttagatttaaggacatctgtccaatttcattcaattttactaatataacgattgtccatatactaaatcctgccctttgaactttgatatctactaaatcatgccccccgatctttaaaaagtacaaaattgtaccccctaaatttttatccacatcagactttgtttagtaaaattggacaaaagtccttaaatctaacaatctcaatagttcgggggaaatttttaacgacgtgaaaaatttagagggcatgatttggtacatgtcaaagttcaaggggtaaaaattcaaattagcctaaaagtaatgggttttatttatttttaatttattttttaatagggcaatttttatttatatacaagtaaatatataatattaaaaaaaatgtgtaaaaaaaatataa

SEQ ID NO: 402756 - DNA, 564 bp, Cannabis indica
ctcggtttaaggagctgagtcgcgggataacacatcgattgtcatgcacacttcaggtagagttgcgaaatgtcttaaaaagaacgacatagtccgtgaacaaatttaccgattgataattaaggctgagtcgcagactatgtcgctctctttaagacattttacgactttgctcaaggtatgcactacagtctatcaacaacaacgttcctaagataaaacactctctttatacgaatcgctctgcactaaacgatatcaatctataacaccccaaacattatttgctctgagaaatcgtaaggtttttgaagagaagagaattttttgtgttgaagagatgtgttctgccgttggtaggatacgacttaaaaagatgttaagtcaatcaaaaagatcagttaaaagaatgttactttgatcgcaggaggatcatgggttaaaagttaaaacgacttaaaccgacatagtctgcgaacgaatttatcgattgataattctggctgactcgtggactatgttgctctctttaagaaatttcgtgactctgctcaaagtgtgcac

SEQ ID NO: 402757 - DNA, 637 bp, Cannabis indica
aggttccataagcagacacctccggttttcgtaggaggccctgatgttatgaaagccgagcaatggctagctgtgatcaccaggatcttgaattttatgggcatcactggaaatgatagagtggtttgtgccacttttcaatttcaagaagaagctttagtttggtgggacatggtgtccgtgattcatgacgttaccacaatgacctaggagaagttccaggaactgtttaatgccaagtactataatgaggttgtcagaagtgccaagagaaaagaattcactcatttgactcagaaagaaaatatgagtgttactgaatatacaacgcagtcttaccgttttgcaagatttgcctcgggaatagtgccaaccaatttcagtaagaaagagaagtatctagatgggttaaatgtgaagatcagacatgacttgatgattactactgacgacagaaccacctatgctgaaatggtggataaggcactgcgagctaagggggcggtgggatgcatagttgagtctcgtgagactccaattgtcagcgggactcctacccttcctacatcaggctttagtaggggaggtagtggctcggccactgaacagaaaagaaaggcacctactgcatctagtg

SEQ ID NO: 402758 - DNA, 637 bp, Cannabis indica
aagttatatatatatgatatgatagtatgtatttatataacaacaatagaaaaaaaaaaatgaatagttagggtgtagttttatggagattatttttgaagtttttttttctatttaatttatacggtttatatatagtgattatgtaggggtgtaatgatttaaataattttaaaataaaaatgagaaaaataaggagagattttttttttttaaatttcatttatacggttcatagtgattataatataggtttaaattgatttaaatagaattaaaaataaaaaataaaagaattgaggagtaaaaaagaataaactacattattaattatatatgtatggtaaaaacgagccaagaacatgcgagaattataaataaaaaacgaaatatccaagcctcattcatagccttgtatttttctaaataaaatttgtatttttaattttctttaaaaaaattggataaatctcccttacttttttcctttttataaaacgtttatttagacattttttttttcattggcaaacttttatttagactttacatacatatgactaatcatgttttaaaaccttctatcaaagaaagaaaagaaaagtataataacctgatttctattagtttgaccatg

SEQ ID NO: 402759 - DNA, 570 bp, Cannabis indica
agtaaccaaattggttcactgttttaataagcacaagggtcatagtaacttctgttataaccaatgctgaccatgaattcatgaaatctcagattctactgccttggagctcgcttgagcccataagtgatttctgtaatagacaaacttgaataggtttgctgcttttgtaaccatctggttcttatatgtagatttgttcttcaagtctaccattcaaaaatgatgtcttgacatccatttcaaggtcaatttttgctacattggtcatcatgattcttatagaggtctgtctaataactagagagaaaatatcattgaaatccatacctgttgggctttgttccctaaataaaactctatttcaatgtaatctttgtcattcaaatatcaataaagaaacagaaatattttcattactcatttagtatgtcatttggttcatgtgatcatttatatgtttatttgatttataaattcatccaaatccttatcacattggtattcttgtttattgtgttgtcaacacagtggaaattaatcaagattatgtgattaaatgtattccta

SEQ ID NO: 402760 - DNA, 528 bp, Cannabis indica
ttagacattccaaacacacaaatatatcacaatattttcatatttttatacttatcaaataatgcaagaattaaatcctgaaaatatattttggaccccgaacccggttcggcccaaaatacccgattgtaactataccgcgctgacttattaaaaaaaacctatagatagacagaacaaaaatattatataataatatagtcctcaagcacgatatatcattaaaattacgattttatccttctcgggtcaaaattacaaaaatactcctgactcatcaacagggtcttaaaatgacatctatcaatataattccatatattaaattatataataatataattctacattatcacttatttaactagttagagtttttctaatccgattccttaatcttagggtattacaactaaacataaatatagaatctataacttctataagtatttagaagtaaaacgatgatttccttcaagcttggctgaatagaaataaatgattgaggcctcatttcagtaattatat

SEQ ID NO: 402761 - DNA, 1351 bp, Cannabis indica
tttctcctcaaatctaattttcactatgggtgtttttgagacctggtttagggtatttgggagttgtaaaacctatttttgagctagtggaagttaaggtttgtttggttgcaggagttagggttactcccagagtttttaatttaaggtatttattgaattttattgtcgtgacataggactcgggattgtcaagctttgtttccactcaggtcagcccgcacgcctgacattgaattgaggtaacagaagctttatgcactgctaagcgtgttggtaagaaatgattattatcatttatgactcggttatgatcgaggtaatgatgaggaacaattattatcgtttttgactcggttatgatcaaggtaatgatgaggaatgattattattgtttgtgactcgattatgattgaggtaataatgtggaatgattattattgtttgtgacttgattatgatcgaggtaacaattattatcgtttgtgactcgattatgatcgagggaaagacacggtcattaacgttaatgaatgaataaagatacagtcattatcgttaatgaaatgagtaattaatccttaaaaccacatatatgtttcttacttatcagttgctttatcgggcagcaatagtgacatatatagctcatggataacaagtggtaaggatgctttatgaagcattaaaataggattgtcttataaggcaattatttggttatgggattacataatgagtgaatacctgataataatgttaataaagttgttgactatgtgttgttatcattttcttataatgtgtaacatatgtgtttgtatagacgttaaattatatatgcatgttgaatatgtaatggatcacgagtatgtatattatgttgtggtgtgaatacttgtgttttcaatgcttttgatttagaggcttttcttgctaagtccttgtgactcacgggtgcttcttggttcaggtaaggagaataggaattgtgtttggccatgagtcagagttctcccagcgatgtacatatcagtcgtggcatcttggcttccggaaagcaggatcaaccctttttctatgtttggaaatgtaaccttacttttgtaatagcggttttgtaacttgttataaaagaattttaaaaataagggatccccgtattatagtagtattttgtatgaaagttttattctaatttaattaattaaaaaagtttttaattaaaccacacttttttctaaactagtaggttagttagaaataagtttgtaaaagcatacatgtggcgtccctgagggtcaggacgttgcaacatggtatcagagcgaccaaggtttaaagatcctga

SEQ ID NO: 402762 - DNA, 552 bp, Cannabis indica
gtgtgactccatcaaagattcgatggtctttctgaggcagtgtcagattcttgcaaggtcaatgatagtgtagctttgtttggatccagagtaggctcttatattagggtcttctcgggttggaactagtgttgtgggggttcacaaagaagttgcacatcaatacgatagtgtttcaagaatgaagagggggacaactatttgagatttaggttatggatatgctgtgtttttattttttattttgttgtttctgaaaacggtgttcttacatcaaataatttatttcttcaataaaaaatataactgtaacaacttgtagtaacataatagaaacatgttactgcaaaatatgaacttgtagtaacgagaaacaaatataaataagttgtgcagaatttaagttaacacaagataattatataatattcttcttattaggctgaaccttaggtggcgtttggttggagataatgaaatggaatggaatggaaaggaaacaattttcattccattcttttgtttggttgcattttaaagtattggaatggc

SEQ ID NO: 402763 - DNA, 582 bp, Cannabis indica
ccggccacccccgaccaaccctatggctggccaaccttgggactgcaccatggctagccagcctggtctccacaggggcttggccggccatgaggtgctcagtaggctttcctgggcacttctacacgtggacaacaacatataggctgcgaattgggccctgaaagcccaataaaatggctgaacaatatctaaaattatgggcactttggtcttttgtaaatatcttacaaattatgcaagtattaagggatttaaactgtaacctaggattttaggcctcctatataaaggccttaacctaggcctagaaacctaagctgcctctaagcctgaaacctgcttctaaactctaaatgtctgacaaactctctttctctctctctctctcacctaccctagcatcatctcaacacttgagttttgccattattgatttataccttgtattcctaaggatgctatagcagatcccacctatagtgatctagatagtcttaacccttggtataaatacaactaaaaggggagtaagtcattacccgctatcacaagggggccgaacctctataacaaatctat

SEQ ID NO: 402764 - DNA, 687 bp, Cannabis indica
tcacttcctctgtagtgaatccctgaaggagtaattttgattgctctactgatacccctgctcctttagagattacactattctgaactttctttctattcaccattttagtccctagcaggtctttgtagaacctcagaaatgcaccagtgatgagatctggttcatgcacccggtttccatcttgtgtttctattgagaggatgcgattttttctaattctatgcttaatgcaagcatggaataaggcagtgttgctgtcaccattctcaatccacgccatttttgctttctgttggagaaaagaagaataatctttctgcaccttcactaaaacttctcgagcctccttttctttgctatgaatttcctcattcaaaggttgctgttgaagtaagtcttgccatttgtccagatctgtttttgctacagtcagtgcactatgaagatcagagaacccctctcgattaatctcctttagcttcactttaaattgcttcattttacacaccacttgataaattgcttccagacatagtctaattttagaattataattgattaactaaaatcaattaactgagtcttataagcagtatgatctcaactagtatggagaccatgggcctatataaccgagcttccaataagcagatctagaacttactaggtaaattcactgactta

SEQ ID NO: 402765 - DNA, 612 bp, Cannabis indica
ggccttggagtcttcaatcatggcttcccagaaatacccttgccttagaattttcttagataaactctaccctgctgcgtggttgccacagaatccatcatgtacttctgacaaaagtcatgtagcttcttcttttgaacacacctgagtagcggcatggagaatcctcttcattacataactccctctacaatgatgtaacgtgcatcctttctcctcattttctgggtttcatttctgttatctgtgagttccgtagagttgaggtaggctgctattggcatcatccaatttggagatgtatcaatcatttccatatcctctgtgccgatgatactgggttttttaagaaattggatggggatcagatttgctttatcatttatgttacagctcgcaagtcgggctagtgcgtcagcagttgtgttttcttcccttagaatttgcttgagagcatagcttttgaattgtgcaagcaggtcgtgtattttacttaagatatgctatcatcttttacccccgagcctcgtactccccagatacatgatttaccactaactgtgagtcactacaaatctcaatgtgttcggcttgcatctcccgagcaagtct

SEQ ID NO: 402766 - DNA, 563 bp, Cannabis indica
catttttggaggaatcgaatcaactaataattacatattaatctttggagtaagctttcctccactcttgtcccttttctatcttttatcaagtataacctatttttcacatcatttttaattttgttcactataccattaacagaattagagtagttcatttggctgtattgtgttgagttgattaatgaagtttcttccttcttgataaaaaaaaatggactaagcttgaattttttttaatgatgataaggaaaagagtatcttcaataaagagctataaatgtgatatattgttattattattttttttaatattttgctaaaatttaactctaatagtgaagtaaaatgtgtgtcaaatttaatacaaaaaatagcatgggccaaattttagcccacaataaatactatcttttttaattatatttttaccacttattaatatttataagatattaaagtaatataaataaaattaattatttgtatattttgaatgagcactaatggtaatattaacttttatagctaatttgtactctgtgcattagagcacaaat

SEQ ID NO: 402767 - DNA, 814 bp, Cannabis indica
tatcagtgcgagaaggacattgatggtgtctcagtggtaacccgcttatccaaggttgagtcccaagatctctctcgttaacacgagggatttcgtattccctagtctctggttgtcttttgttctcgttcctacgagaagactcccgtaaatcattgttttcattccttgggttgtgaatcctcagggtttccaaggcacttcttaacaaggtgcctaattattttgttgttcatctattggaacatccctagtttccccaggttgatctgggggttttgttgagctgtcttctgcctcttggttcttgaacctagaggtctaccttgcggccttctcactctaggattaggttgattttgtgtagcgttttcttgagtcgccctagctgcagctgcctctctctccaactcagcattttgttggtctcttcttaaatgtgttggtcatgctgagcgtgtagttgttaaagtaggtggccttcttgagcccgttggctcttttccaggacgacgattagtctcttcaggacgactattgtcgtttttaccattatcagctatggagaaaaaattaattctttggttacgagggatttctctgagcttttatcacgtaggctctcaatgaaaataccaaactatatattaacacagattttcgttaaccattatgagcctattttcgtaatagagtttgcacagaaatcataagagatttgagaagactaataaaaacaaaaatgacactaggtttttacatggttttgtagttaactctgcatagtccatgagtctatcttattcagatattt

SEQ ID NO: 402768 - DNA, 503 bp, Cannabis indica
tttattctcaaaccatcatattattatccgatcgtgccctttaaattttttgtgttgttttaaatttctataaattatgtatattactaattcgacattgatgcgacaataccagtaaacaacataccaagtcaattgtttgtttgccaaatagatgaaaattaaaggaaatcttataactcatgaatgtgaataattcaaaagaatatagaaaaatgtggaaaatttaggaagcacgattggctagtagtaatagttcgggataaaagtagggctgagcatcggtcggtttagtcgattttttttctatataaaaaaatcaagaattcagttttcggtctggattggtgcaatttgaaaaccgaccgaccaattcagaatttatcttaaaaccgaccgttttgaaccacgagttggtcggtttaaaccgcccaaactaaactttttttttaaaaaaaaaatatgatccaatttattctataaacacattattctacatttta

SEQ ID NO: 402769 - DNA, 1301 bp, Cannabis indica
tattagtttgtgtaatgtgttttgtaagatttttgcaaatatattaataggtttcctgaagtgttgaatgatattatatctaaagagcaaagtgtgtttatttattgttgtatttcagatgatgttatgattaattagagtgtcaaaattctattaaaagacacaagaagggtaaaaacaaggttttagtttataaagttgatatggctaaagtatatgatagagtggattgggtttttctttgtggtatgatggagaagttggggtttcataaagttttaatttgtttaatcatgcggtgtgtctcgacagtatcctatgttgtcaatgtgagtggggatgtttggtaatattgttcctactcagggtcaagcagcaaggagatcttttttcctcttttctttttctaatttgttccgagggattgacttttattattaaccagaaaatttggttgaataacaattctggtcatacttctggtaggtgtgaccgtatgatttctcatttgctttttgtttatcatgattgtttcttctttctagaagctactattgaaagttgttctcgtttcaagaaaatcctattattatatgagcggatgcatcgagacaacttgtgattcccaccaaatctgcagtatgtttttcaccccgtatgcctagatctttgtatgttgttggcccatacattaggggttgccttgttttgcgagtaagagtataagagtaagagtggtttattttaatctataaaagataggatctagaattaatgaactctttgggtggaaatctaaactctttgctttaggagttgcgaggttttgttgaaattcgtgattcaagctactccaacttatgctgagcttcttccaaattcctggtgggattattaatgaaattcatagtatgtgtgcacgggattggtggagtggagataatgagaagtgcaaaatgtattggtgtactttgtcatagtttgtacatttgtttagtttagtttaattagtttttttttttatttcaaatttttacttaataaaccaaaaatttcaaaaaaaaaattacaaaaatacattaacatagagaaatttttatttttacggtttgaacttttttatttaaaaaaataaagaattcaatgaactgttggatatttttgttgttgttatagtttatttatagttgtcatgagattagtttctcactatttttagttatttaataatttattaatatttttttttttgaaatattatttatacttattaatttatagttgttgtgagattaattttt

SEQ ID NO: 402770 - DNA, 654 bp, Cannabis indica
tcacacactctacaagcatagtgtatagttaaaccgatatagcagtaccatattaagattctcaatacttcaatacactatcgacttagcttactcatatcgtactattttaatttctcttgtacatttcttataaaattattataccttctccatatgaataaggaattttcatatatttaataattatactattataattaatatataatttatcttataattatatttcatatattctctaatatattatccattaattacttgcttttagagcataaattccaacagttgtatccaagaacgtcgataaaaaaactcacactttgatcttctaaatttctcaccacatatgagaatcagtgtgggataattaggatacactaaataatgaagttcttggttttgtctcaacaaatgagcaagaactctctctagagtgaaaataattttatggcttcatccttttaggtatcctaaattatatgtatataataattaggttatactagtattataatttaaactaataaaataataataaaggttgaagtaaataagatatcaactaaaaaataataatattttaaatgtttgaataaatatatatgactgattttgttatagatatttattttgaatttaaatatttag

SEQ ID NO: 402771 - DNA, 553 bp, Cannabis indica
tgatcaaaatcactcatgattaacaacgcgactatccataataggcggcggcacctcctcgaaccagctcatcgtctaaccgaagggcatgctttgccaaactatgagctgcagaatttcttatcgcaagccacatgggataaaactgcccctggaaatttagacaataaagctataacatcctcaaacagcacccacaactcatttaaacacccttcctctgttgatagctgaaaaaataaacaacaccaagcaacaacaggtattagaagagacaatccttgatttaataaaaaaaaataatcaaatttatacattttcttttttttatataatttttttttgtatttttttatgatttgattgtatttaaactataattcactgacttgatgaaaaagattagttaaatttatagctttgataatctatttaaaattttttccttttacttctctaagatttgttgtatatattgttgttaactttaataaatttattgttttatatatgctctattttttttttaattttttccttttacttttcaaaa

SEQ ID NO: 402772 - DNA, 464 bp, Cannabis indica
gttatgcttatttatttattcaaagtttcattagcaatttctccttatatgcatttcttttttatttatttgttatctttttctaggaagctttgttcaagcaagagacatttaagagtttttacatcaaatatttatccatactactcacccttgatttgagtcttcttaaggggatgggctatattgacccttttaatttaaagaaactataggagagatcttgatacgcttctattttcttagaacaacagtatcaacaccttcagagttggtggagcagttaaattttttatcttcataatcatggtttcattattttagttcatatgcctttttaataatcacagctttcatacttcccacaagattgatagtttatgataggggtgttcatcaaaccgctcaaactatctgcaccgcaccacactgcaaaaaaataatacggtttgaaattctttgcg

SEQ ID NO: 402773 - DNA, 860 bp, Cannabis indica
catagacatcactcctttctgtatacctctggagacatatgtcccatagtcccttcaataagatccacatctaacatgagtttccccatcaggaattggaattgatgattgaaaatcaaatagcttggcaccatagtcttggtctaagtacactgcttccttaaagattctccctatggatgaaggtctttgaatgaccgtgatggagataagcaagtgcattggctattccaatcccagttcttaacctgctctcaaatggcagtcgtggtggtggtggttccttactattattcccatcaatgagaaaatgagagagattgccatgaacagggaactcataaaccaacatgggaaactttgagtcgaggcagtaacccaagagcttcaaaacgtttttgtggttgctcatctgtgatgccacagcaacttcagtagcaatctcttctaactttacatcaccaatacgatgactaaactttttcacagaaatttatataatcttcaccactatcatcatcatcatgaattactcccttgtacaggccgtaatttccatgaaggtgtatgaatgtggtatcatggaagttatttgttgcgttgttgaattgttgagaagagtatgaacggagtggattagattttccattgaacaaacgaatggtttgctctaacacagcacctccattcctcaaaaagaaaccattcatttcttcatcttctgtagtagtacttttgtagcatgaaaacataatgaagtgaactaaggtggcgtttggttggaggtaatgaaatggaatggaatggaaatgaaataatttttattccattcctttgtttggttgcattttcaagtattg

SEQ ID NO: 402774 - DNA, 651 bp, Cannabis indica
tcttaccactaaactacagccacaacatttgctaaattcatcacttaaatatttattacctaaataatttatggcataaatacttaaatttaacttgtagttgcaaataaatacttaaatttaattttgacggtaataatacctaagttatatttttggaactctataggtatctaactgttaaatattaagtcattatccacgtgtcattttcttattggtatatttaaattaattttgtaaaaaaaaaataaaaatttaatgactttgaccaatcaagaattgtgacatggcaatttacttaacacttaacagcgagccaagtacctacaaaagttctgaattataacttagagttttttgcggcaaaaccttcccaactatcgtttcacttgcatttaacccttcaagctcaaagtttagcggtaaagtcctctaaactattaaactagtcgcaaatttaaggtgtcattcgattaacggtgactatgggatgcttatgtgtatactcttgcacacatgtcatgtttacattggtacatctaatattattatttaaaatttatttttaaaattaaataaaattataaaaataaaaataaattttttaaaaaaattaaaaacattgtaaattttgaaataatttatata

SEQ ID NO: 402775 - DNA, 554 bp, Cannabis indica
tgaatatacgtcatatacagttgcatttctggttgattcactggtgtacaacaggcaattcagattcttaaaaacaaaaacaagatttgtttctaattaatgaaccaaacgttacgaataaggctgtttttaattttttgcgttgcattacagttgcaatatcgtttacaaattatgaaggagattcacttgacgtgtaccaaaaactagcagatatataatgtacgatttatgtaaatggtggcaaattagtttcattggaaattgatctgatttaaataatcatgatgaaaagtcacaatgacaaacaactatgttaatttgagttaaagagttgtggtttttaagttgatttacagatgcataatcattttataatagtttaattacattttttgcaggaatttatttgggaaaagagaaaggagaaaacactttgagaaatggttagtttctgaaatattttttgacgtttcttaatagttttattttagtttcctaatagattagtaacagcaataaaataaaataaaaatggcaaaagcaggaatcag

SEQ ID NO: 402776 - DNA, 532 bp, Cannabis indica
tatgaatgagtctcttactattcggttgatgttgaggaggttcggaaagcactcttttaaatgcatcctgataaatatcctggtcctgatggctttaatcctagcttttatcagaagttctgggatatcgttagtaaggatatcattcggttagttcaacacttctttacttttggtgaatttcctaatcatttaaaagaaacgaatattgtgcttatcccgaagaagtctaaacccgaaagcatgagtgatctaagactaattgctttgtgtgatgtggcttataagattatttctaaggtgttggccaatcggttgaaagttgttcttcctagtgttatttctgaaactcaaagcgccttcttacccggaagactcataattgataatatcttaatctcttttgaggtgatgcattatttgaaaaggaagcaaatggggagggaggggtttatggcacttaagttggacatgagcaaggcttatgatcgggtggagtggggtttttttacaggctatgttgaggagattg

SEQ ID NO: 402777 - DNA, 540 bp, Cannabis indica
aaaacaattaagataaaaactcatgcacaaaaaccaaattaaataaaataaactcaaacaaaaatatctattcagcatgctccaacccaccaactaattacacacatatcatatttaccccaaaaatacttattcattatgatatataacccgttctattttagttataactggtttgagttatttcgtattatttgtttttattcattataacactgttatagaaccggttatattttaattataattggtttgagattttttttttatattatttatttttatttattatgttacaaaaccggttatatttcaattataaccggtttgagttattttgtattatttatttttattcattatgttatagaatcggttctatttttgtttatatctgagacatctacttctagtgacttttccagtgactttttcggtgactttttccggcgacaacaactttttcagtattttttccggcgccagtgacttttccgatgccagtgacttttccggtaaaacttattattgttttaaaaa

SEQ ID NO: 402778 - DNA, 868 bp, Cannabis indica
taacgaatgctctatttcaaatgcggttgatgataattatgtaaaacactgctcatccatagaaacaaaaataaaaaagtgcaaaagagaaaaaagaaaaaaaagaaagaaatagagatttagggttttattgtccaaaagataataggggaaaaaagagagaatagagccaaaaattatacgatgatgattataggttatttttatgattttttttataattaaatttttatatatatatatatttatagtcgtattttttcttagttttactattttttcaaaaaaatacaaattttatataaaaaatatatttactcaaaaaaaaaaaaagagtgtaagactaagaacacaaaagtaactaaaaaaagggattttttattggtttttaaagtacaagtttgctaatatatgtgtatatttaaaaaagttattttatgggaaaattttagaataaagttaaaaaaaaaatgagagagatagaataaggtacctggttacctctttatggcaatttgttatccttacttgatttttatatattttttaggggagttctatttacactcgataagatgataaatacactaaattattaaaaaaaaatataaacttaaataatttttaaaattattcttaatatattttttttaaactttttcctcgtagtggtttatattaatttcaataattattttgaatttttttttataattttttctatctcatgtatatactattttttattttttttaagtaaaattttatattaattttttatttttttttggttctataatattaaacatttatataatttatttttatttgtataagtatattttttaagtaatatgaattgaaagaa

SEQ ID NO: 402779 - DNA, 511 bp, Cannabis indica
agatttcaaattttggctttaaagggttcgtttatttgttttgttagtttgctctgctaccatccaattaactcagtaattaattgggttgttgtatgtactgtatataaacactgacttatttatcactgattttagttttaattaacatatctataaatatgtatcacttttgaacattggttcggttgtaaaataataatttacttttttatatttaacttatttgtaaaaaaatattaacacaaaagaaaaataaataaatatctaatgatattatattgaatacggataccaagatctaagttagggtctgtaaagaccgcatatgattaataccttgaattattaaataattagggtttatgtatgagattttattattattgataataatacaattatgggaatttatttgagttcgtatatatttattatgctatttatgtaaatttctcaatttctgtgattgtgttcggaagctgtggaaagcggcgttgggcctttagag

SEQ ID NO: 402780 - DNA, 490 bp, Cannabis indica
gaccagcatgggaggactgaaaatataccagcataaaaaattcataaaatgtagaaaaaaaatatgaaaacactagtaaaaaaatgacaaaaaatcagttaaggacaataaaaaacaacacctcaataagaatgtccaacttcttgttcatttcagcaacagatttcataagaatcccttgctggctgacaacaacagagatactttttttttaattcctcaaactcaagtcaggagacattcttatgagccaatgatgaagaaacacccacaaagtcaggttgaccaacagacttggatacacctttaactttgaatttaacaacgtcctgagtagtgtcaccgaagaagaagtcatcaagcctcaaactcactctcaactgaagttcgagagatgtttcgtaattttaactgcaacaaaaacaaccaaaaaaattatgcacataaatctgacaacttaaaataacaaaaaaaaatgaaacatgaatta

SEQ ID NO: 402781 - DNA, 967 bp, Cannabis indica
gtagtgtctaaatcaaatgatcaacaagttgttgtatctcaatttctttccctaaaagataagtggcacaatagattgggtcaccattccagacgtgtattgagtcaagtgttgaatacacttaatgtaaatttcgttattaacgaaaaagagaaattctatgaagcttgtcaatataaaaaatcgcatgctttactattcaatactaaccctaatcgtgtcgaaaatttgctaaaattgatacacagatctttgaggtccaacatcaattacatcaaatacaaattacaaattttgtgttcaatttgttgatgactatagtcgatatacatggatctatcccctcaaaactaaaattgaggctctctcaacctgtctagtttaaaaccttagttgaaaattaatttgagagaaagattaaagttctaaaaattgattggggtgaatttcaatcttttgttgattgttccattcaaaatgggattaattttcaacattcttgttctcatacctcaaatcaaaatggtagagctgagagaaaatatacacattgttgagatgggcttgaccttactagctaaagcacgcatgccattaaaatttttgtgagattctttccaaacaattgtttatttgataaacagattgcctacactagtgttaagcaaatcaatccccttatgaaatcattcatgctaaatttcttaaggcttttggagttacatgctatccttgcattagaccttatcaaacccacaattttttaattttattatatcaaatgtgttaatttatggtacattgactcttacaaaggctacaaataccttagttactgtgacagtcagtagtcccgtgatccgtaaggggaaataccaggtaagctgtacaattccacaccgcctggggaaagtcaagtggatgattctgagactgtgtaagtatgggactacacagttgaagagag

SEQ ID NO: 402782 - DNA, 706 bp, Cannabis indica
cttttcttaaatgctcattagtaaggaacaacatgccctcattgaacttgatctcctcaggtttagtccttggatcaaattcattgttagactttttagactgatgcacatcttcaccatcactaggcaagcttcttaattcatcttcctcttcgtagtccccatcagagtcttcttggttaatctggctgcaaaaatcattaacagaaccccaccatttacttggatctgttatgctctcatcttctaagtctttagcctcgtgagcatattcttcttcctcaaaatatacaccatttagttgggcttctgtttggcattggatagcagccccacttatttgagtttcacttcaaatgggcctactaaaacagtctcttcttgggcctcacaatctaaaaaaaaaaaaaaaagatacaaacaaaatatcaatcgaaaccattaataacatcttaacataaatattatataattagaaataacaagaatgaacttatgaaaagtagaactgttaacaacaaccatttcttatgttgtatacaaattaatacattatacactttttttgtcttttgaccaaaccaatataagtagctaggatattaacaagtgagtgaagattggcatgtggatttgaagcctaaaacaattataagagcagtaggatatatcagtgattgatgcttgtgacttgaaagattacact

SEQ ID NO: 402783 - DNA, 603 bp, Cannabis indica
gtataactttttttagcaaattaatctttctagaatgtcgatggttttaagtatacttcttccaatttatcgcaaactccttttatcgtcttctctgcaatgagttttcttcgaacacactttgataggtacatgataattaatcgtgtagtatgccatctcctccatttgtgctttttccttaatttggtttcttttctgcaagaccctttggaaactttccgctgcacaaggatccccttcaaactttcaatccatagagcaaagcccccagttccatcgaatttctccaattttaatcttcccattgatgacattcaaagtttcttcaagattacaacggaaagaatcttgattctgcgttcttaatcgatcacttagctctgatttgtgggaaaaatcaagactaaaaggtgtagaatcaaatcaatgaaactttaaataatcaaacaattagcaatgacaagattaacaatagatacaataatcagaaataaaaaaaggggcaaacagagtgtcaaaaccaaaaaatactaaatgtagaaaataaagaaattaacactaagatatatactagttcaagaccgatagatcgatgtgatc

SEQ ID NO: 402784 - DNA, 590 bp, Cannabis indica
gcaactagtcatattctagattgcttggggcctccccttgaagatttggattatgagtttttggctcagcccttcactgcccaggaggtgaaaaaggctgtctttagcatctctggtgataaggctcctggacttgatggtcttaatgcctttttctatcaaaacaattgggctacttttggtcatgagctggttttcgtggtgttggattgcttaaatggtcaagctgacttctctgctattaacaacaccttgattgttttgatccctaaaaaacaacatgctaatactatgaaagattttcggcctattagtttgtgctccaccctttacaaaatcatttctaaggcaattgctaaccggttaaaggttgttcttgataaagtgatttccccttttcaaagtgcttttgtttctgggcgtgttatctttgataatattctcattgcccatgagcttattcatgccataaattctagaaaagctggtaaaaggggatgggctgctttgaagcttgatatggccaaagcttttgatcgtgtggaatgacattttctgaaaagtctcatgtaccattttaattttcctat

SEQ ID NO: 402785 - DNA, 909 bp, Cannabis indica
atgacactatgattgacgacataattaacgtcctcaactaaaatatgagtatgaccaacgtcattcgaatgtttagttttaaataaaatagtattatttctttatagaattaatttattaatggcgcatacattattaatgatgtactttgtcatcagttattttgttttttattagaaaactaaccgttgtaagtgggaagaaaattgccattaagaataccaccaataactatttcatcagagagggactgacatgtagttagtggtatgtcgccattgatgctcctacgaaaaactaaaattaactccccaaccccccccattctgatttccatttaattttagttctaaagtcaaaccctttcttttccaaaatttctctcttcaaaccccattcttttcttctctagctcttctccaccttaaattataataaaaccatacgccggtgccgtcgtcaccgcttgaagcttcattggaccaccgtctctctgctcccgtagccatcttcacctctagaagtttgacagaccactacctcgctattgctgcaaccatttttaagtaatgtaattttctaacacacgtatatatacatattagtataatattcttatgtatatttgtgatcccaaatttggcactctgatgtggcatcacgagaatggtgacacgtggactccacttgaagcatctgctcggaacgatgagctgagcaggatgcctcgctggcacatatagaatgaaatattcaacgagccgtgcagggtgatcaacacttagcgaattcagcttgacgcatcgtaagtcatcagcttaacttacatggatgtggcatacacacgatcccactatcagggtattcagcctcaatcccacgatccttgcattcagcattgatcacacg

SEQ ID NO: 402786 - DNA, 822 bp, Cannabis indica
gatggattctatggaaatcatgccgttaggtagagtttatctaagaaaattctaaggcaaggttatttctggtcgacaatgattaaagattcaaagggctatgttaagaaatgtgacaaatgctagagattttcgaagataccttgagctccgcccaacgagttaactcagatgcaaagcccgtggctcttcgccatttggggaatgcacctgatcgaacaattacccaaaggcaatggaggagtgcaatatgcagtggtagtggttgattacttcactaaataaacgaaagccgaaccactcgtaaccattgcatctaagaaagttcaagactttgttgtgaagaacagaatctgccggttcggattgccttacaaaatagtttcggataacggcaagtggcttgacatccaacgcttcactgatttttgtgcgaaccatggtatcatcaaaagtttctccgtagtgacacatcctcaagttaatggtcaagttgaagcagtcaacaagaccttgaaggatacactaaagaaaagactcgaagatgccaatagaaattggccggaagaacttcgtgaagttctatggtcatatcaaacaactgaaaaaacggcaaccagacaaaccccatttgccatggcatatggatatgaagttatgctgcccgtagaactcgagccgccatcccacagaagattgacgtacaacaatgatgcaaatcatgtactccttgccgaatcacttgatgaaatcgaagaaaagcgcaccacataaaacttaaagttgatggcccatcagtaaaaagtagcacggtacttcaat

SEQ ID NO: 402787 - DNA, 853 bp, Cannabis indica
aacttgtgatggtggttgttgtattgaatttttaagtactatgtgattgccatatatttattttagaaacatatcaaaattgttacaaaataagctaatttgtataagcttattacttagtaacttataaaattggttgatatattaaagttcgttgaagttgaaagtttaattatttttcttagctggatatatagaaaagaaacttaaaagttactttttcgggtcatttgtttttgtagcggaaaaaaaatatatgctttccacatatcaaaatgatcatcataaaaaatagattataattgtactaatttttgagtacaaaataataaatggtttagctagtaaaaaactttttaaaattttggaaaagaaaatatatatttatttatatatatatatactaggttgatgttacgtgcaatgcacgtataattagtttttttttaattaaatttaattaggttgatttatttaatttttttaattaaataatatttttttttaatttttaaaatgagatttgagattttgattttttgaattttttttttttaactaatgcaacaacattagtagatatatgcctcctatcaattagattgttcctggctaataatttctctataattttttggagaaacaagtaatatttctacaaaattaatttataatattatttttaatttcttttttcaaaatatagatattattgttaactgtgaaaatacaaatatatagatataatatttctgtaaaattaatttataatattttattttacaaaatcttaatattatggttaagatgtgaaaatacaaagatagaaggggcatggacatggttacatatc

SEQ ID NO: 402788 - DNA, 869 bp, Cannabis indica
tagccttccttcgctattgtcagccaacgttccactgtcgatcaacaacaacacccagttctaaagccttatgtaagtttttcgcatcccgtactttattgttcgtgttcattgcatgcttcactgttcatctgctttttctgggtttgatgtttgaagtttctgggaatttttgtcctgagtttctgcgtaatacgttagattcccctttctggcttttgagttatttttattatgtgtactgtatatttttccaaggacccatcttttcctcacgcaatgacattcaaaggtttagagaagactttgtctttctcgatttttaccctctctcttttttttccttttcttttctttgcgtattcataatgtcaccatctgtgagattcttgcacccgacttttgtccaggaaagccctctaaggctttcttgttgaaaactgtccggagggagcctctttccagcggttaggggatccccattcccttttttgacttagggtttggtatggggcctgactgctggaattttaaatctttttcagaaccaaaatgtctacatccgggtccaaatcttttaagaaaggaggaaagcgcctggccacccttgaggaggtgatgagaggtcccgtcgcccaggaagggtataagcctcgtgccacggggtggaagcggccgagcttcactcaaccctaacttgccctcatcagctggagcacattgtgctggtggccggcatcaagcccgcgacctccgggacttaccaccggccgccccgggatgcggagacgcccaatcataattacggaggcttcggagcttggagccaaacgcatttgatgaccggggctatgttgggttttatgccc

SEQ ID NO: 402789 - DNA, 531 bp, Cannabis indica
aaaaaagtaaactaggaaagtttcttattatttcttatcggtgtaagtcagtcccacaaaattagggatgtgatcgggacctaaatgatagaatatttaagggaggtatctctgaagatcttcttacgctgaattactctacttgaaagactcggcattcccagataatatggatctgtacgggaaatcacgcacaggttctgctcaaatgatctctattgaagatgtaaccttgacagattcaagtagaaagttctctggccaagccatgaaggtaaaatcacccatccagatttctcaatgttctccacgtgccaccatgctaaatgccacattaccctactgaatttgggataacaaggctgatctagaagatctggtgtggattcttcatcaagcccataaagttgtggattggatgtttgaacatttatacagaaagattcaaggatcccctattagacatcaagaggtaaaatccttattccaagtagttagatttaatttatgttatattgtattgagatccgg

SEQ ID NO: 402790 - DNA, 597 bp, Cannabis indica
caccttagcaaaacggggtggctgaaaaaatgaactgcaccatacttgaaaaaagtgagatgtatgctacttcagtcaggattatctcaaggattttggggagaagctgccttgatagcagttcacctaatcaatagaagcccatcaagagcaactgaaggtaaaactcctgaggaaaaatggttaggtaaacctccaaacctttctcatttaaaagtttttggatgtgctgcttatgcacattagagtataggaaaacttgaacttaaggctttaaagtgtattttcttagggtaccgtgaatgggtaaaaggctatagactttgggtaaagggaaaagggagatttaaaactatgaatagtagagatgttatattctaagaaaatatttttttcttgtttacctaatgaaaagtatagtgcaggaatggaagatactaaccctgtacaaacccagaagttaaaacaggttccgatcaggtggaacaaaatggagacacgctggtaatggttcaggtggaaccaaaccaaaaccagcagtccgataacaatggtcaagggggaggaactaatgctcaacaagagatcagggatgaa

SEQ ID NO: 402791 - DNA, 826 bp, Cannabis indica
ataatccatttgatataactcaaaaccataatactcagtcagtgtcatgcttgtcctgaaaatagtctttcaattaaaatacaaaagaaagtctatttaaaatgaatgtctactttatgagtaattctttacatacaagacataatgtgcatctctccacattgcaatttgcatccctcttgattataaatatttatttataaccaattggttttacaccttatagcaataggaaaaataccaaaactttattgtctcacatcaatttgtactctttatttatgatatcaattcaatttcgagagttggaaccttcatggcatgataaaagttgattggatcatcgtctatcattccattatttccttatgtcctttctctcatggatttctttaatgacactgatctttgaggttgttgagtttgattatctgaaacatttaccatatcttgaatgagaagttgtttgatattgtcttatcaaggttctggattcacttattgatcaatgaaagtcatgaaaacctaaacattgtcaaaagtgatagttggaattgagtttaacgtcaattccttctcaagaacaatatctataataatcttatttctctcccaaactcaacatcctcaaaattattaaagtttctcgtctcaaaattgaaccataatgtgggatcacaaaaattgtagcttttttaattactagagtatacagaaaagtatagttccttaatattttgcaatccatattcattttatgaggcttataagacctcatcttaatcgaacatccacaaaaagaatatatctatatgttagactatta

SEQ ID NO: 402792 - DNA, 583 bp, Cannabis indica
taactccttgtcacaagactttgaaagttgcccttgttaattaaatcccaatcgccttgcctaaaagtcttgtaatggtgccagttgtttgtagcatgcagggagcatatctgcgagccttctgtgccaccataaacaggcaggggcaagaaggctctagtagtgccatctcgagttgagatcctgagaattcaacttgatgaacagaccctagggcttgttcacttgagctcgcaatagctgggggcagtagagttgcctagagactcttcttgttcaatggtgagttgtttcgtggcacgcttcttgttggtagtcttcttgattctttttaaaggttcctgagttgatcccaaggcatctcctattaaagtcgcgcgcttcttggatttcttgatgggacatgtaggactgcgtaacacgtcttcgagatctagatccatgtctgcgagacagatgataaaatatcaacacttgagaaaaataaacaacaaaaatgtggagagataatctcccactcaagaaaaattaccatagtcatcagacgaggatgaagaaccaaaataaatctaaaactccttag

SEQ ID NO: 402793 - DNA, 558 bp, Cannabis indica
tataatattagctttgacatgattgagttattttataaatgttatagagatcaagagtttaatcctagcaaaaacatatttacttttatggcatctttactacacagtattcagaatcaaaataaattaatagaaaaatataacaaaataaatgaagaataatcaaaatcaatatttgtaatatgtcgtttactaagattatttagaaatagaataatagtgatttatcttatttactttatcaagaaatgtaattggaatgtttaaattaactaaattgttattttgagttaaattatagtatatagaagttattttataaagatatattttaaagaaaaaaattatcatttacatatttaatatcaaaaaataaaataaaatctattaccctcgtttaaaatattagtaagcgaaatattcatttttttatcccttattatttaattaagtttttattttttaattttaataaaataagtaaataaatataaaaaaaaaatgactacttactattaatttttagggaaattactccatatactatttttttaattt

SEQ ID NO: 402794 - DNA, 1241 bp, Cannabis indica
taatcgctgcgagtaaaattgtcttgtgcctccctcagaatctttttcagggcgtccaggagctcatccattggcttcgctgcttgaagaaatggacaaataaaggcgttagaacattatcgagaaatcatgcatgcaaaaacaaagaaataaaactaatccttcattgatgatctaattctgccctagcaaaagcatgtattaaaaggctggtgttgtcgtaccctagaaagttgtccgaggggaggaaccaactagaagataaataggcagaatgatccacgagaataggtacgggaggaccggatcccattcggaaccggcctaaaaagtgaccaaggttggaaaaataaaaacccttggcatggtcaccacatcggaaagggggcatcctaaacctatgaagccgttcatcaaactctattggcctacagctagaataatccttaacggaagagacacaatgaacaattagtggggacttaccagctccggaggtaatggcatcaggagccccagtgttggggactgggaacggaagcttgggccgggaagtcacctgctcttttccagcctcgatccgaaggaccctccctacggcggcttgggccttgatgtaggccaattcttgttccctcctaaagaggtacatcttatatcggtcctctacggaagcaataatgtctacccgaagcgccttctcggagttaggattgcaaacgttggggcaaagaaccttggataaattgaaatcatccactgactggctctctgtaatcaacttggccctcctgcactgtgcagtcgtgaccaagtccccaacattcaaccaatccttgtcgtttatggagaagacctgggcgtgttgaaggcgctcaatagcttggaaactggaggagaagaaaaaccggtgacgatattccttaccacttttctggaagttaaaaggaaccggaccctcattagcaggatgggcccagagtgtgaaaaaaccatctttgagttttgtctctcttcttggggacagatacaagttcataaaaataaaggatttcagccaggctgggccaagcccagcctctggcaacataaaaaataaacaagcctgagagcaggcgatatgcttgggggataagttggtaaggcgcaaggccaataaaaactaagagattgatgaaataatcctgaagcggtagcattgccccggacatgaggtgagtctggctccaagctctgaagcc

SEQ ID NO: 402795 - DNA, 1262 bp, Cannabis indica
attatgacataatgcttctttatctattatttatatagatgacctcctaattattatatcattcaatttattataaaaaccattcatattagtatctcctatacaactaataaggcaataacctcaatactttattaacatttacttcctatttatttcaatatcttactacaaaataaaaaataaaataaaacaaaatattctcaaatcacaattaatgtccctacctccaattaattacaaaatcccacatttataatttaaataccaaattaatattatgttatctataatattatgttatcaataataaactcaaatttataatttatatatccaaaattaatattatgttatctataataaactaataaggcaataatctcatatttaaatactataattattcgctattaaattttataatatttttaatcacacatataataaaatatttgaatttgattttagtacgataaattatttaagaaaaattaaattaaaaaactttcatgtaaatcaaaataaataaaaaaaatacactgaaacactaatttttaaaaaaagaagtattaaaagacatgcattcttttcagtattatattgttatttatacaattgagtattgggtctcatataaaagtaataatttctagagaatatcgctaactaatcttaacgtgacacctttaggtggtactaggcaacactgatagataatgtatatattttttcaaagaaaaatgctaatgggtatccatagtacttagtgtcacgggctcaccttttcaggcagcggaagacccgtgcgacaccttgacttctctaagccaaggtcagccttccaaccatccgagtaacaatgggctcatttttcgcgcaattgtgtgtctcatgcacacttccgtctctctaacaactcccgccgagtcatgctcgcaagcatccatgcatcgaggctctctagcctagatactcgcactgtccataggttaccactaagataaggtaaatcccaataacgtcgctcacctcgtcactcgtgaccaaggtagcatgtctggcaagaagcgcacaccaagcagacgtgccaacgcttcttatcatgccccattcgatactgtctgaatcgtctccctcatcgaccaaggactcccatatgtccatggtttaatcctcaaggcaccatgcctccgtacatattggcaggccctcgtaacaagccaccaaacaagttgcatacattagacctctgtctcttt

SEQ ID NO: 402796 - DNA, 775 bp, Cannabis indica
actattatgattaagatttcaccccacctagtagatgatatggtctgattaagtattgagttttttgtaggcaaacttaataatttgacattgcaatgagatcttttagatagaattaaagatgctcagttaattgatctagaattggtgaatatcaaagaagagatttcagttggtcaagctaaagattttacagtatcaagtaatgagatgttgttgtatatatctagagtttgtgttccaagcagtgtggaacgtagaaaggagattcttgaggaagctcatatcactccttatttactgcatcctggcactaccaaaatgtattaagatttaaaacccttctactagtgggaggggatgaagaaagatgtggtagaatctgtatcccggtgcttaacctatcagtagaataaggctgaacaatagcgacctataggattgttgcagcctgtgactcttccacagtggaagtgggaatatctcaccatggattttgtgattgggttccctagaaccacaggaatgcacgattctatttgggttgtagtggatcgattgactaagtctgcacattttctaccggtgaaaacaacctttacagtagattagtacccaaagttatacgtaaaataaatagtgaggttacatggggctcgaaagtccattatatcggatagagatttgaaatttacctcaaaattttggcaaagtcttcagctagccatggctaccaagctgaagtttagtacaactttccatcctcaaactgatg

SEQ ID NO: 402797 - DNA, 966 bp, Cannabis indica
aagaaacaccatcaagggcttccgaaatgccctagtcgaccactgacatattttggtaccaaaagatggtgcaggtctcctattagggttttagacgtcgaaatgagattttggagtcccaagacctaaaaaatatgattcaccataagaaaataagtgaaaacacacctcgaggtgtccgggaacatgcacactcgacctgtaccataataaggtgatacagatcatgatgacatggcacaggtctaatttggagctgaaaaatacatactgcccttcggtaaaacaagcataactctttcattttttcatccaaatgacaattcaacttgcattggaaatatcttttcaagacagattgaagtgtgtctcatggtcatagctcaattctaaagtgtgtgacttggttgcaagatatgattgaaaattaattagttttattaagtgtgaactattatgggatgttaggagagctatgccacaacccatgttgcatcatgacgagaagtgtcaccccaaaacacttctctcccatgagagaatttctagctgagaggtgacatcttttgtcactcatctccaattttgcatttctaaagcgcaatgccacataagcaagtttaagactagggaaataaccaacttctacaataatcccaatatttgtgggatatttgactaagaataagagatattttcatagatagttatttattcctattttaattcattatttagaatgagatgcgagatttaaaattgagacaccccgacatgaagggattactaacaaaccttaggaaattgttgaaaatattaaccaaccatttggtactggtgcccacacacccaagtgtgcccaacctagggtttatgggcccgcgaaacatctttatcctagagacttcaatctgataagaaaaccaacaaggacttgacttatttaggtctaaaatgactaaactt

SEQ ID NO: 402798 - DNA, 536 bp, Cannabis indica
ccaccatcatctgcaagtccgcagtattggtttggttcagttgagagcagaaacacttagtcggtgaggtcatactccacgtttatgcagaaggagtcaacctacagacaaagttccttgtagttgactctccatcagcttataatgcaatcctgggctgaccgtggatccatcccatgaaagttgtgccatccacataccaccaagtggtcaggttctgaaccaagtggggagtgaaagaaatatggggagcccaaaaaacaactcatgattgttatcaaaactcactaaaagagaaattgacaacattattgcaactacagcagtctagtccaacctttgcacttgatgaacccagtatggaagacctagatgatgtgtgcataagcaaggagttcctggaccataaagtccagattggaacaaagcttacacctgagttttaagctaggctgatcgaattcctaatcaaacgccatcactgatttgcgtggtcacatgaggacatgacaggtattgattctaacattattgtt

SEQ ID NO: 402799 - DNA, 609 bp, Cannabis indica
aaacttacttgattgtgttcatgaaaagcgctaagatggtagctttgagtcctttctcgtggacaacgcaaacaatcgattggagtatagaagctaggaagagggcaacgagaggagccgaaaccagaagcaaaggctcatattgggataagtatgaattagcaaaagttgcaaaacgaatccacagagaattcaaataatccatagctagctcctgtgaactgtgaaatcagaacataataaacaaaaatatgaaaaggaaaacgatgataacgatggtgattgattgaatttggaaatgaagagcgatggtgtttgtgaatatgaatataatatgtagttgtagcgtataagttaaaatcatatgtaataatttattggatatttaaagcatttcctataaattgtaatcttttacttttagacaataattagttttgtttgctttgcttataaaaaaataaataaataactagttttgctttctgtgttcatacgtgagtcggtaatgtaatgaaaaaaaaaaaaatggaaaaaaacagaaaaataccaaaaaggaaaaaaaattacaaaaatattttgggccgacccattaaatatttatacagt

SEQ ID NO: 402800 - DNA, 1621 bp, Cannabis indica
accagtaataaaaataatacccttcaatcctttcgagtatgaaaagaatttcctgaaaatatgatagaaaaaatttctaaaaggcaaaacatatgatgaaaaaaattccttaccgttgcttatttcggattttatgatgaagcaagtcattggtaacgagaataaatttggagacctttacattcttgataaactaacacctaaattagttgcttgttttggtgtaaaatccccaatcgaggcacattgtaggttgggtcacccatctcctcttctacttaaaaaattttctccacagtatcatcaccttagttcaagtcctagagtcaataactagtgtttcttttgaattagtccattctggtgtttggagtcctcctatctagtctaaaactggtttttgttattttgttacttttgtagatgattattctcgtgtcacttggttgaattcgatgaagaaacgttctgaattattctctatttttcgtgcctttagtgctaaaattcaaaatcaatttaatgtatctattcgtactttgagaaatgatgattccaaaaagtacaaatctagtttatttcattcttatatggtccaaaatgacatgctttatgaaatttcttgtgttgatattccatgaaacagctagagccctcttatttcaaatgcatgttcctaacagttttgggccgatgttgtttctactgcatgtttttttatttaaccgcatgccatcttcttcttcatggtgaaattccttacaaaactcttcttaccaataagccgctatttcctattgagccaagaatttttggtagcatttgctttgttcgtaatgttcgtccacatgttactaaattagataccgagtcattgaagtgggtattctttggttattctcgtattcagaaagggtataggtgttattgtcccgatcttaacaaatatcgtgtttctatcgatgttacttttgtggaaaaaacacctaatattttattttcaagaactcttactcgtcaagggaggatgacgatttgttagtatattctgtcacatcctgtgcgcctgttacatgttttgatgaatctcttgttccttcacatgcctcggtcatagctcccacaatgcctacacctccaccacctcctaagcctcctatagtgtacttcatgcgtccacctcctccacctcccgtttcaaatcctgcaccttcatcttcatcatcagatccgaaactcaacaataatcttcctattgcactacgtaaggtaaacgccaatgtacatgtcctatttcttcttttgttttttataatcatttgtcatcttcttcttgctcttttgttgcttctctttattctatcactattcctaaaactgttcgtgaagtcatgtctcatcttggttggcttgctgcaatgatagaagagatgaatgttttagttgcaaatggtacttggaacttgattaatttactttcaggaaaacggtccattgggtgcaaatgggtgtttacggttaaagtcaatccagatggaacaattgttcgcttaaaaacccgtcttgttgccacgggtttagtcaaacctatggcgtggactattgtaacgtccccgcttca

SEQ ID NO: 402801 - DNA, 882 bp, Cannabis indica
cattgagtgtcgcaggtcgagcatcatgcgcgcatagcactcggacaaggtgatccatgcacgcatgtgcttcaaacaattccttgtctgaaattgctcgcacgcccacgtgaccctacccctcgcccgtgtgcacaatgcaggcgccgaggtttctcggcaggacaccctgcaaatcacctgctccgcgcgcgtaatggctgtttgcagcctgtctgggatgcatgtgcagccttcctgaacagccactttaaatttgatttttggatgatttttcacccaattttgaattttttaattttcaaactctaatttcaaaaataaaatattatttttaatatatttaaatttaaatgtcaaattcaaaattaaaaatatttaatttttaatagattattgttaatttttgatatttagaggtttaaatttaaaaattgattattttatttaaaattatggtcagattttaaaaatttgttaatttttttaatatttatatagtatttaattataagatcagatatttttatattgactatattttaaattaaaagatagcattatccttttaatttgtaattttatattaaaattatcttatatgatatattaaataattaataaatttaaaattaacctagatatttttatagatattataaccataatattttcaaattcaaaaatagattattttgtgaaatatttaattatttttaaattatagttagaaaaataatattttatatcattttacttatcagaaatttataaatgatattttaaatatttaaataaactagatatttttgtagaaatttgaaaaatatttaatttgagatattttgacatataatttagataattattatttgtttatta

SEQ ID NO: 402802 - DNA, 503 bp, Cannabis indica
atatatgagaaatactagggccattctgactaattataatacccttaatctcacccttttacatagattcctcaaatagtctagataaaattttcccagctaagatgaaaagatacggggatagagtgtctccgtgtcttaaacctcaagagagtctaatcctaccaacctaatccccatttagacgaacattgagagtagtggtagagatgcattgatcaatccattgaaaaaatttatccgagatccgaaaacaccttaagacatgatcgacaaactaccagctaagcttgtcataggctttcataagatcaattttgattgcaaagaaacactctgtgcccttttcgtgctaaagagtagacgatttttgggactataacattgttgccttgaatataccttccaagaacgaaggcagcttgagtggggaaaataattttaggtaggatatgcttaattctatttgcagtgatctttgaaataactgttgggttttatgc

SEQ ID NO: 402803 - DNA, 516 bp, Cannabis indica
aaaagaatggattttcttattttcttaaattgcttcagctaaactaagcaataaaatcagatttaaaacttaatattaaaccctcactagaagacaaaactgaataggcaaaaagaccataatgcccttgcctatactaaaagagtcatacaaatcacttagggtattttgggaaaactctaaatttccgactactcacgacattcccaatgtctaattatactaccccgctacactaaaataccagcatgtgattccactgagccacacaccgcgttccaatgttgccgggcaccgaacatgcaaaaatatgaaatttctatatataacatataaaatgcattctgaattcaaataaatcatcataaataattaatttaatattaataaataattttcataataaaccctaattatctgctaatttccaaatttaaattaagcggtctttacaactatccccccttaaaggatttcgtccccgaaatctatcctgaataactctggatattgagc

SEQ ID NO: 402804 - DNA, 741 bp, Cannabis indica
attattattattattataagaatcacgagttagagaaagtaaaaaaatttaggaaaatttacatgtggagcctctcttttttgatctaatttccttttttaccataatattttattttggttaagtttatcgtttttacatatcgtatttattttaattgatttttttttttgatccacgcatttgcaggtgacgtcatccctagtcttgtcatgtattgtccatcttcccacgtcttatacctcacacgcgttaggtttgtcacgttttttgctacttttgataattgctccaaagtttgtagacttctcagtatattatatagttagagggagcgagcgatttatagtggttttagtgagtttcattgttttcaagttcagaagtttctagtgtgagagtattttagagagagttttgaaattcaaattttctctcctaggtttcatagagggtttttcatttcaaaatttctcaagtaaaaacatattgtaaatggttaaaactcgttcttcgctttctccctttggttcctcgaagcttcttcttgacaagaagaaaatgaagaaaataatttttgaagatgagaacgaaaatctttctagtggttccgatggttctggtgatgtatctgttaaggaagttaagaggaagcaatataatcgtggaaacaagaagattactgagaatcaacctttgaaaaagttaaaacaagttgtggaatatgatgaagatttgtac

SEQ ID NO: 402805 - DNA, 680 bp, Cannabis indica
gctgaccctgaaagtcgagacatcattactagttgctggacagatcagttctcccatagcccgattgataatgtgctgactaatattgacgtttgtgctactactttgcaaaaatggcacattgggaagtatggtcatatgaagaaaagagttgcagatgctcaaactcgtgttaataatctcaacaatacattgaaccgatcgaatactatcatggaagaactaaggacctctgaatcgatacttgatgatttgctagaacaagaagagatatattggcaacaacgatcaagagtggaatggatgagttcgggtgaccgcaacacaaaattttttcatgcaaaagcttcagcccgtcaatcgaataacaggataaaatttctaattaatgatgctggtctcaaagtgcattcgcgtccggatttggtctctgttattgaatcatacttccagaatatttttcaagctgctcctatggatgatgatgcactgtcttctgttcttgatacaattcctgttatggtctctgcggatatgaaccacggtctcactcagcctttcacacgagcggaggtcgatgcagccttgcaaagtatgagtccagataagagtcccggcattgacggtatgtccgccatgttttaccaacaacattgggatttagtgggggatttagtctc

SEQ ID NO: 402806 - DNA, 869 bp, Cannabis indica
acgcgcgcatctcccctccttgttcgagactgcgcgcatgtgcacgagtgctcgacactcaatgcaccaaaaatttcaaaccaccatatctcatttgtttttcattgaaattgagttctgtaaaagcgaaaaaattgcttaatttttcacaaggagtccaaataaattattttcagaacgaaaaatttcgtaattcacattcaatcatcaaataatacataaattaacatgaacacatccaaatcaacacaattaacatattcatcgttttaaatctatatttcatgaaagtaaatcattaccatgactctgaagccagttgttgggaatattttaccaggatctaaatttactaacaagtatgttgaattaatatcctaaatatgaatatctctaaaacaatgaaattaaacatataagagtttagaaaacctaacattggttgtagcggaataatatgactccttccactcagatctctaattcttgttcctttccgtcccagagtattatcaagatctgagcctagatctctttttctctttcgggttggttaccaccgtcttacccactatgattgagtacttgacttgctatgtgtgggcatgacactctatcactataagccaactatgaagaacaatgaaagaggcttgaaaactgtatagaatgtgtctctcatctactagttgtctaacagaaaaaactagatttgatttggttgaaggcaacagttcagaaagagcatcatgtttcttttttagtgtttaaactagggcttagagttaaattatatggattaaaaaataaaaaataaaaaataagcaaaaatcactagagtggctcgccactaaaggaccacttttgag

SEQ ID NO: 402807 - DNA, 801 bp, Cannabis indica
ccgatatcggtggctttagccgcaccgaactggttggtgattatgaaaatggtggaaagaagaagaagctgcgatagtactactactagtgtcgtagccattatagtgaaataaggtaaaaagggttttggaatgagtttgtgtaatggggttattttaaggcttatttatagggtaatgtttatgataaaatttggtatattaatttggttgtaaagctaatcttgtacctactactatacatggtaaagaaaaagaaaaaaagataaggagatttaaggattggaatatgtacttacatatttgcacatattctataaaaggatatttcatttattctataatatatatggcaagtcgatcgttttggtaatgataatttccttcaagatatatatgagtcatatatacatacactaatgatatatcaaaacattcaatataggaaagaagaaatggatatcaaccatgtaaaaatattatgacccgataggttgttgaccgacataataaaaatattatagataagataaaattagagaaaagctctctcattaagcgtttgatatatattattatattgtttgatatagatcattattttagttagttacaacgattaaaatttaaatatttaatattaacttattctagtccacttaaggttttagacttcatgtgtttcggtgcctgatctgaatatactgtttacaaattactctcaaaccttgatcggggtatttcttttcattattattattttttcagctctcggtctgtgtgaactctgatagcctttgg

SEQ ID NO: 402808 - DNA, 932 bp, Cannabis indica
cagccaagtacgtagacggtggcatacttgaattcaggctacatcgacataccgaatgatctaaacttcatcatattcacgtaagttctacatcaaacatcccaatatgtaagtgtgttctttatttacgaatttatatatactaattaactttactttttgtatagatcgttcaccatatataatcaaatgataggacagcctaatcgacctatccagtggatgactcctatctgtcctgaacaatcggacgacaaacagtgtggatattacgtcatcattaaaagtttcatgaccgtagaagatccaatacaactattgacccaacatgatgttctctactgcatacacaaatgatgagataaatgttatgcgtgattggtagattcattacgtgaaagcggaagcagagcgacaacagttgttgtgttaatcagtgtgtatatatctcgatttattattactatatagatttgtaaatatatttagattattataattagcgttaacttaattatatatttttaaatatatttagatgatattagcgttagttcaattattgtgactatacagaattttaaatatatttagacgataccagcattagtttaattattgtgactatacagatttgtaaataatttaaaaattaatgcagggaaaaaatagcagaaaatttgttttttccctatttttccaatgtaacgactgaaaaaaaaattatcgctgaaataaattaaaaacggtaacaagtactataaggcacggtttaaaactgtcgcctataacagggtataggtgacgatttatcaaccgtgccctgttataggcgatagtttaaaactgtcgagaattccacattgttttgaaccgtcgcctattctggccattttgcgacggttgtataggcgacagttatagaaaccgac

SEQ ID NO: 402809 - DNA, 786 bp, Cannabis indica
taaaaattataaaaattacaaatgtggaataataatctttctcttaaaattaatctatttcattctaaactctatcactcatagagtaataataaaataaaaagaaccacataatttaaagatttttctttatttattgtgttaatattatgcctgtcaccgtcactgtttccaccgataccattatagtcactattatggccactaccaatcttctaatattcaccgtttatattatcactatattttgcatcatctatataatttaaagtatcattcaatactgttgcccctgattttgcccaaaatacgtggaccaaccggatgatgacacgtggatgggaagggtttagcatttgaataaaacagctaagtcttcttaaagcaaaggattactttaggcatgcctcccggagaaggcatgtaagtctcatatgctcccggagagcaagatggcaacaaagcatctccggatggtgtcagatgccatctgaacagtcatctcgcatttaatgccgcatgggaggaggcgtattggaactgccacacgcaataaagtctgacgacacaacccccaatctgtacctactaggctatgatcaataaagtctagtgacggctactctgtgtggaatcacatcagtcaaaagggattaaggactgccctcataaaatccctacagaacctagggattagaccatgcattacctatgataaattcattgggaatgtgtggctttactgatagttacagaaatgcatgtaccttaattctagggatcacc

SEQ ID NO: 402810 - DNA, 666 bp, Cannabis indica
  modified_base (652)..(652): a, c, t, g, unknown or other
agctaatactcgctatttaatgaagacttgttactatgattcatatatttattatgtaataataatattggattttaagtagtaaatttaaatactaattaagtgagagaatattagaatatataaatatatatgttcaatatatatgtatatttatatatgaaaaatagaggatgttctgtaaatatacatatcttcaatatattattctacattcatttaagattgatcatgtatatgtttaaagattcatattaatctaataatgcatcaataatgctatatgtggcacttgacaccttaagtcatctcttagtatttctcttatatttagggtatgtttagttgggagaaataaaaacacataaataaatttgaaaatgagaataagaacaaaaataaaatagaataaaatttgaaatatacaaaaaaataataaaaaaattattaaatttttcctcatcttacattagaatgaatccttctattttaaaatagaagtgctattccaccaaatttagtggtaaaataacattataatacttaaaaaaaatataaccaaacaaagaaataaaacgaaaataccttttaactaaacgccatttaagataaaaggttgaaataatgctatgcaagataaaaaaaaaaaaanaaaaaaaaactcac

SEQ ID NO: 402811 - DNA, 811 bp, Cannabis indica
agtggagcagagatgttggaaaagttgacgacttctctttccttatcagtgagcgcttgagagatatcattatggaaagaatccattggttttaggtagagagtacagagaaggatttgagaaatggatatcactggaaatacaatgtagatgaatctgaattcatggatagggaacggtttgaagagaagagtgcagaaaaaattgaataaaagaagttagaaagaaaaaaactaccacaactgccacagagcaaatttacgtatttgtgttggtttttaaaacggtaaattgcggcataaaatacataatgtttcaaattttttacacttaaatacctaatgtttatttttggaggcaaaaatacctaatgttacaattctcttacacttttactaccacttccgttaattcataaatatagacacgtggagagttcagatacattacatttattttttattttattttaaaacttaatatttttaatatcagaatgttctcataacaattttcacatgatattgacacttcaattcgataatcatgttccatatactacactggttcactcagctatggtaatttagtattgcatttctcttattttttttttaaaaaaacaagtagtatttagtttttatattaagaatattaaattttaaaataaaataaacaaatgcaatgcattttggccctccacgtgtccatatttatgagttaataacggaagtggtagtaacggtgtaagagaattataacattaggtatttttgcctccaaaaataaacattaggtatttaagtgtata

SEQ ID NO: 402812 - DNA, 503 bp, Cannabis indica
tcagtctcttcttctccgccggaccgagactgttgccattttgagccataaaaagttgaaaactgtgaattgaaagagaatcaatgttacgtctataacaaattactgctgtatttatgtgtaatcttatagtctttggggtatgttttgggaagttaaatagttgtttgggtattgaaaatggataactaattaatgggtgggttcattggattcaatgtatcaacttttagtcttctctatatattgagaatataaatagatcattcagaaaatagtgaaggaatttaattagtgttggtattgttaaaagtagaatgataagtaaaatgtcatagaaaaaccaaaagttgtattttttattgtcattattaatgtcataaaaactaaaaataaaacagtatatactcattagttttataacttaaaactgaaaaataataaattataattaagatacaactttttttttttctttagaaactctaaataaataagaaaaa

SEQ ID NO: 402813 - DNA, 595 bp, Cannabis indica
cttaaaatatattctttattattatattattttattaaattatctcacactataatatgtatataaatataaaaatataatcataaacatattattttaatattaaaaaagaagtagaaaatttgatgtagtctatagtgtcccactattgggatactatagactttcacatatataggatagcatttagtgttctattggagcaattttgtgtccaaacttcactatttttaggattttagtatcccattagagaagaccttaaagcataggtatggtaccgactatttttgtgaggtgtaatattattattagtgaaatttaatattagattcaacttattttacttaataaatattatagaaaattattaattagttatacgataatactttgtcatggtagtattgtaagttcatatgtgtttggtccggtctgtatttatctgtgcttttcaataaatgagtcgtgccgtgctctgctacggaaaaatattagtctgtcgtgataatatttttaaagggtaagtcaaacacggccagtaagtctggtattattgtaccggtctgtatttttttaaacaagccagcccatt

SEQ ID NO: 402814 - DNA, 735 bp, Cannabis indica
ccctatttcatctcaatctagtgcgataaagtgtttcaaatgttaggggcgaggacacatagctagccaatgtccaaataagagagttatggtcattcgggaaaatggtaaagtagattctgaagatgaagaatagtttgttgatatgccaccattagaagatgcttctatagaagatgaagagtatgggccagaatatggtgacatgcttgcactagtcaccagacgagcattaaatttgcaagtaaaagaagaggaagaagaggtacaacatgagaacatttttcatactcgttgtcatgtgaaagacaaggtatgtagtgtgatccttgatgggggtagttgtactaacattgcaagttcatatttggttgagaagctaggacttccaacgcttaaacatccacgtccttacaagttgcaatggttgaatgatagtggtgaagtgagagttaccaaaaaaattttggtatctttctgaattggcaagtatgaggataaggtattgtgcaatgtggtcctactgcaagttggacaccttcttctaggaagacctttgtaatttgatcaaaaactccaccatgacagcttcactaacaagtactcattcatgttcactcagctaacagtaactctagctcctttgacaccaaaacaagtgtatgaagatcaaatgagattgaaatatttgagtgaccgaaagaattgaatgataaaagaaattgagtgataaaa

SEQ ID NO: 402815 - DNA, 854 bp, Cannabis indica
ggtcaagagtgcctataggcttcaacatgagaataatggccatatcaaccttaatgttcctactgatttgtggaagaaattgtggaatatcaaagtgcctccgaaggtgcttagttttctctggagagtgagtgcgaattgtcttccgacgaggtttcttttgtcttctaaacatgttcaagttgatactttatgtcccttttgctctgctgcccctgaaactgctctccatgtgctggtgcgatgtaattttgctcgttcctgctggcggcagtctcatgtaccggctgtagctcctgctgcaatgatatttaggagttggtttgaggagggtttgtccaaatggagtgaggttgagagtattgaagcggccatgactctttgggcagtgtggaagatgcgaaatgaggttgtttggaattctatttctcttacaagtgaagaggtaattcatgtagctaatgtgcatttttcggactcgtgcaaggcacagcagttcgaaaaagagaccctccccgtgcatacaagtgtggtgtgtgagaaatggtgccctccaaactttccttgcatcaaagtaaatgtagatggtgcaattttcgctcccgaagttcggtttggggtgggtatggtggctagatgtgcggctgggatggttcttcaagctaagtctgtactaaaaactggtttgttgcagccacatgaggtggaggccctcgggttcaaggaagccttgagttggataaagtccaatggttgggtgggggttattttggagtcggattgtttaagagtgatttctgatattcaaagtaataaaagtatggtctctccttatagccatattattttagaat

SEQ ID NO: 402816 - DNA, 947 bp, Cannabis indica
ggtaatgacttactcttttttttagttgcattcactcttgagatagtactatgtagattacaggtctagaccttgtaatttctaactatggctttcttcattattataattgtgagagagtgatctaatgccctttatatagtataggacttacaaaatatcctaattcaaataagtaaagatctctattcaaaatagagatattaacatcttttatctattatttaaactacaaaaataataactaaatccctagaatacaagactaatatcttaagggaatatccctatcttcatgttggacctgtctcgcaatttgtttagctgtttagagttgtatgtgttaacgccaattttcgttaaccgaaattaaatagccttttagtaataaatattcttcaaaaattaataagcaataaaagaaatgataactccagatacttttacgtgattttgtagttaaaatctacatactccacgagttcttcttataaggaatcttttataaaatacagagtacaattagagaatttgaataataataattcactatctgaatctctcctttttcttatgggctctgccactatttataaatgtataggtttacaattatttttttttgggattaattcaaatatgattgttcatgaaacatggacagtccccacatttcatttaaatcacatgtgagaaaatactaagtaactacctagtcgttctttgattttatccttttagatggttattgctgacgtggaaggttatatcttctcttatttgagttatcttccttgtccatcttgataagaaaatacgctaagtgttgggaagtttcccatcagtgaaagattggttgtcgaactgcttgtcgttgtcggagactattttgtacggtagtccgaaccggcatatgatgttcttcactataaagtcttgaaccttct

SEQ ID NO: 402817 - DNA, 713 bp, Cannabis indica
caactcatcaatatgtttttgtattaccatttttttttacttagttttgacaacttaatttatctttttgtactatactacattatttttttttatcataaaatttgttgttataatttcatacttttaactttttttccttttctttttgaattagtagcaattaaaatgataatttattttttaaaagttaaaaaaataattacgtttataatgaaaaaatagggtatataatataatacgtaatatataattaatatgtcaaatttactattacacattgtgttaattaaaaagaacaaaaaatctcaaatcttttttttttttgataaaatatgtccaaaaaaataaactaaacatatgtatctaaactataaagtaacgtacacatataaccaaaaaaattgtcagaaaaaaataaaaatatacaccataaaaaatacaaatgtataaaaaaacaactaataaataattgttgaacaaaaaatattctgaaaaccactaaaaaataacataaaaagaacaaaactaatgaacatatatacaacaaaaaaattgtgtggaataaattaataaaaatatacaccataaaaattgcacataaactaaacaactatacaaaaaaataactatggaaactataaaacacataaacaaaaaaaaaaaaaataactacgaaacaactataaaataacaaaaagacagttataaat

SEQ ID NO: 402818 - DNA, 1453 bp, Cannabis indica
gtctgggtcagggtttgggtccttgtctgagtttagggtttgctttgtgtcgaagtccggatcacggcttgggtctaggtttgggtccagattttgtctatgtctcagtaaaaaccaaggtcccaagttttgatcccggtgtaggtatgggtccgagtctgtgtttgggatctgttccgaagttcaagttcgacctgatcctgaacacgaacttggactcggaccaggacctaggacctgaacatagatgggcgacccagacctggactaggaccagaacttggtctcagaacttggatgaggatcgaggacccaacccaagacccaaacctggacataggacccacatcgacacctgggattcgggactcgatgcttggacccgaccagtactcggtgtttggatcaaggacatagactagaacctaaacccaaactcgaacttaaactaagaccctgacacataccaagaccaagacccacactcgtgaaccaaaactgaaacatgaattagaacgggaccaagatctttgaatggaacctggaccttgacccagacccggacctgaaccttccctcagacccaaatcatgacccgaacctagactcggatccaaactcgacccaaacccgtatcccgtgacttgaaactggaatcgaaactagaagcggatcaggacccaagaacaagacaggaccaggacattaacctagacccaaaactgtaaccggaccaagacccagactcggtcaaagagccaccttgggattcggtccaaaatctaaatccaaacccgaaccgggactcgggacctgaaccgagacctgaattcagaccagaaaattgaacatgactcaagacccagaactgggatcgagacccagaactggaccccagtcttgatcttggacctagacttaaacctagaccctgacctgggacatgaatgaaacaagactgggacccgtgattgggatgcaaatcttgtcccgtgatcagagaaccggggcttggacaagacccatagtcgatgtcttgatcagggactcagagaaagactcgaagttcgacaaggacctagacccagacccaaacgtgggacccaaaactgaaacttgaacaagaaggtgatgaggagcctggaacatggccgggagtgtgacctggacctcgacccggacccagaactagaccgaacctagaaccgaaactcgggctcaaacccagttctagacctagactaggactaagactcgaaccagaacctcaacacgaactcgggactcgatcccagaccaagacaaagccttgacctaaagtggaattcggacctagatatggacacgaacccatacccagaccgaaatactgacccaaacctagacagggattgaaacacgggacctagacccagacgcagacgtagacccagccagacacgaacttgggacc

SEQ ID NO: 402819 - DNA, 505 bp, Cannabis indica
gggtgctactgttgaagaagaaatttccattaaagcagcaacaaagaaatctccccggaaacttaatgtatgttttaaatttttactgaaaccggttttgcattttttttttatgtttcattattgtttcctaattgtattttgtttaaattttccaagtctttgttccaccaaaattggtttttatcttttatatgttagttcctgtttttgagtatgttatgtgaaaccagttttttgtgttttgtaatttgttattctttttctttgtgtttgtttatgatttattaatttgttctattttgtttttgtttattttttcaggatgataaacaagaagttaaagttgatgatccagattttgttactgagaaacaccatagtaagaaggcttctaatgtccatcaagcggacgatgatgatgatttttaaactgagaaggttgtctcggaagttgttgcaaccaaaaaaaaggaagtctgttagtgatgacgctagtgcgtca

SEQ ID NO: 402820 - DNA, 467 bp, Cannabis indica
taataataataaagtaaattgcaaaatttattggatgaaacaagttataacaaaaataactttaagctaaacaaaaaatataagagactcccaccataatagtctcatccttttggtcgacacaagagttgtataaagattcaacatcacactgaccttgcactgcaataaggaacatagctcaatagagtattacaatataaaaaactggtctgcctatttttaattagcacccaacgtggaagatttctcatcatcatattcaatcttttagatctcaacctaaaagtcaatagagctagctaacctgaaaaaataacacacaaatacaataagaacaagcataacttgtaaatctacaaattcacgaatgaaaagaatttatatctattctatataaagtatgcctatataactgaaattcttaatttatgagaaattcataagtgacttttaattttatttaa

SEQ ID NO: 402821 - DNA, 557 bp, Cannabis indica
ttgtgccttttctcgatctctggggtagggatgggtctcctagcgatcgctagaaacaaaaaaaaagaattggtaaaagtaagaaaaataaatcctaaaaaactcaaaaccaagaatttaaggggagttgttacttacgtatgatttgaaatttgattgtgttgatgggataaagaccagtggtccaaaagaagtcatctttgaactcctttttattgggtaacctcataatgatcttacgatcattaatgtgggtcccaagataataaaagccttctgctccgtcttttcttgcagttaaagccttgacagaataaaaatataaaatctccagtggtgttggacattcccacttaaggatgtggtaaagagactttaaacaagcaatgatcctgcaagaatttggtgccaactaaaatggtgcgatgtcgaggtagttgcagaaatccttgaagtactccctgagaaaaggattgctccagccctgatatgctcgaggctccaagcacaatttttgaaggttcgttggtgctacaaccttctgttggaaattattt

SEQ ID NO: 402822 - DNA, 552 bp, Cannabis indica
tatattgattagtactatcaatgtatatcttattttatggtagcccatcaacaaaaaaattctacaattaaatgtgtttagaataatttcgtgatctcctgaaaagtttagagtgacgtgtacaaaataagtaaatgttaattttttagcatgtcatggtagctcgatcctttggataaaagaatacttgacaataataataatttaaaaaaaaaattaaaataatgtaaaaattttagaaaaaacatgattaggtaataaataaattgagggtaagtattatatttattcttaataatataagtcactacttgtctaatttaatgtttaaaataaaaaataatgtatttcttaataaaaagaatgtataatttgatatactttttatctgttttggcattaaaaaaaattagtctaattttttttcatattaatgtacgttataaaatattcacgagtgaaacacactgtttgaactttatttttggcgtgttaaatttttccgaactttttaaaaaatttcaaaatatcttaaataacgtacatgaccat

SEQ ID NO: 402823 - DNA, 556 bp, Cannabis indica
acccaaaatcgacatcagaatttgttgttgtttcgccattaacgacatcgaaggcttgccggttgtgctttccacgatcaaaaagcttgtgagcctccattgccattagcgaaggatggcgttctagccacgtcgccttcccttgccgagcttgacgggtttttggaggaatattctggctcgggttctcgctgtacaacaccaacatcgtctccagcaccgatgtcgtctccaactttggtggttcgatctttgtctctggtgatgcaagcttcgtcgctagaaacttagatttacagccatgattagattccttgttttccacccttttcgttggagactcgtgaagattaacaagttgttccctgtcattttgcaactcttccttctgtgtgctagtttgatgacagcacctcagctgtccttcaacgaagaatgctttggcgatgacttcggggagtgttctcaacttatattcacgcaccttcttcttcacctccgcaggaagatttccaataaacatatcacaaagaaaggtttcgggaatatccgacaa

SEQ ID NO: 402824 - DNA, 443 bp, Cannabis indica
tattcccatttgtagttgatttttaattccaagttaaatttcggttttgattattttttttttctgttggaataaggaaaaggaatgtttatgtaaacatttttgcaaaaaaaaaaaaaaaaaaactttaaacaggaatggatgatgagaaacagaagaattcgagtaagtacgcgatggatttgttcgatgcagtggctgccaggagacatatcacacgattgtctataaacaaagctgaactatatgaattttgggagcaaatcacagatgaaaatttcgattctaggctgcaaactttctttgatatgtaagatttattataatgttttaaatttagatacttatttcaaatcgtttctttaaaccaaatataattgctaaagggctttcaaatatatatatatatgagtatacttttaataggtattatcggtatttta

SEQ ID NO: 402825 - DNA, 500 bp, Cannabis indica
ttgacaatggtgagaaccagagcgactacatcagctaccaccaccgatcccgtggtcgatgccaccatagctcagccaccatctcacacttccgcacaaacgcacactcaaatcgatccttcccaggattctgcagatccatctcttcgatctgaacctctccaggttcctcgagctcctccagctgcagatcgaccggcatatgaagatatcagatctccatattacctcagcaacgccgatcatccaggcttggcactcgcaacacctgttctctcagatcgaaacttccagccatggcaaagagacttcaaactctccattggcgccagaaacaaaaccccttttcttgaaggtactctccctcaaccttctcctactgataatctttacagttcttggatgagatgtaaccaaatggtaatgtcatggattctccactccgtgtcacctgaaattaaaagcagtataatgtatctggatactgcctctgagatgtg

SEQ ID NO: 402826 - DNA, 782 bp, Cannabis indica
ggagaggaattcaaaatactaagaaagggggctctcttttactagttgtctaaacaaaaaatgaaaactagcttatgtgagatggatgataatgagagcatcctattccttttatagtatttcaactaaggtttaagatttaaattttatagattaaaaaagataaaataataggcaaaaatcactaagtggccggcccacacaaggtggattccactagttacaattttgccactttatttcataattcatcttttctttcaataatgctatatttttaaattttaatcctataaatgtcaaaactatttatttaataattataattaattatcaaataaaatttctattgaccttatttattaattacaccttacaaagtctcttaattaacaaataactttcaaaacttcttttcttcacaagccattgcttagttaaaattcataaataagacatagtctgatttagaattatgattgattaattaaaaccaattaactgagtcaacaagcagtattatctctactagtgcggggaccatgaccctatgtaatcaagtttacaataagtagttttagaatttaccaattaaattctttaacttattaattcctcatgagtctactatagatttggaattgaactcttaattacatagaacatattattccaaaaaatagatgcgatttgaattacccatcatttcaatctaaatagtcaaagatcctctatagatgatctacatagagtagggacaaatttaccgttctacccttcaa

SEQ ID NO: 402827 - DNA, 579 bp, Cannabis indica
attaattttagaaaataaaaaaaattatttcttctctgtcgaaccctatctccaccacctctcaacaactccacctatccaccttcatttatgagcgccacattcgacaaacgaaaactggcaatccactcatctggcaacgatcgctcaaagcgaaattcaccaaagatccttcatcaataaactaatttcttcatcaaaaaattaattttgattatatagaagtaaaattcatatgagtttttaaaaattcatagtattttttcttatctatgatgatttattttatatttttaagtttttcttttaaaaaaaaaatactatatttagtgcaattaactttgcatgggcatgtatatgtattaaaacttgaggtaagttgaaaaataccacttttattaatcaattaattaaatttacttctaatttttatatttaattgaaacatacatctttttatatgtattgtatccaaaataccctgacataagagagtcacatggagagtatcttaaagtgacagggtcaaaattagtacaatatttaaaaaaataggtaaaaataatagactttaaaaaa

SEQ ID NO: 402828 - DNA, 774 bp, Cannabis indica
aaggaggacctctaagatcgctctcaaaatctaatcctgtggagacagagataaaagatcattggagcaacaaaaaaaatattaatatgtataatccagttcaaaccaccattcacaagagataatatttacccacaaaaatcacttgtgaagatcacccgtaacgatcaatggcgtttccttggtttggattgatcagaagctccttagccttagaatacttcatttccaattcaaattgaggtttgatgttcttgggaacgtatagagaagaaaagtggttagtgcaacctggtgttatgaatttggaggggtaattttctgaacttagatgggacatcttagcaagagatgacaatccaatctcaagatgaaaccaaaaaaaaaaaaatggcaagctcaagccaccattttatactcaaagtccattaacaagaaggctgaaggttggcaaatctaacggttgagagtgaggcggaagatataaagacggttcataatgaccctcgaaaccgtacaactgccaaaatcaaaggacgcattttgaaaaaaagggattattgttgggttttatgccatgaacaaaactctatttcaatgtaatctctatcatttaaatatcaataaagagacagaagtattttaatcacttatttaatgtgtcatttggttcatgttattatttatatgtttatttgatttataaattaatccaaatccttatcacatttatgttcttgtttattgtgtcatcaacatagtggaaagtaatca

SEQ ID NO: 402829 - DNA, 1354 bp, Cannabis indica
gtagtgttgaaagatttaaagctcggttcgttgcaaaggggtacaaccaacaggaggggatagactacactgatacctttgcacagtaactaagcttgttactgtgaaactagttcttgctttggctgccatgaaaggttggtatttacatcaattagatgtaaataatgcctttctacatggagatcttaatgaagatgtttacatgactttgcctcaaggatataagccaaagggagagctaccaccaaacccagtttgcaagttgcaaaagtcattatatggcttgaagcaagcttcaaggcaatggtttgccaagttttctagtgctttggtggatgagggctttcatcattcagcaaccgatcactctcttttcatcaaacattttaatgggaatttcatattcctattagtgtatgttgatgatatcatccttgctagcaacaatcttgaggaaccttaagccttgaaaattagactcaatgacagatttcaactcaaggacttgggaaatttaaagtattttcttggcttagaagttgctcgatctgagcaagggatttttgtctctcaaaggcattatgcatgccttgcagctgcttgaggatctaggacacttaggctgcaagcccatgaacacacccatggaacctaacctcaagcttggacaggatgaaaaagaaaaacttgcagacccgactttgttcagaaggatagttggaaaattgcagtacttgaccatcacgaggccagatatttcattctcagttaacaagctaagtcaatttttggcaacacctcagatgacacatcttcatgcagctgaaagagtgctacaatacatcaaaagcagtcctggactagggttgttttttgcagccaaatcagaggttaagttgcatgcctatattgattctaattgggcatcttgtccagacacaaggaggtctactacaggcttttgtattctcattggaacatcaatgatatcatggaaaagcaagaaacaacatactgtttctaaatcttcttcagaagccgagtatagggcaatggctaacgcaacgtgtgagattgtttggcttttgtctattttgaaggagcttaaggttgaacatgaagggcctgcacttttgtattgtgacaataagtctgcacaatacatagctacaaatcctgtctttcacgagaggacaaaacacatagagattgattgccatctagtgagggaaaaagtccaagaagggactgtaaaaactgtacatgtttcatccaaagaccaaatggctgatattctaactaagcctttgtttcctactcagttcaaaggattcaaagacaagatgggact

SEQ ID NO: 402830 - DNA, 520 bp, Cannabis indica
caagtttatgagagtttatttaactttgtataaatatattaagagtttctctaatgccattttattttattcccatcctcattaaaaagctaattgctttgttcaaacaaaaaaaaatacttgctaattagctacaacaacaaaatatatatttatatatataaaaaaatatataaattatataatataaattgtttgctatgaaggtgtcaacctcgtaacctttgtactgttatattattttataatataataagtgtagattaaaatgtagtaatatatattattatgtgaataatatgtattaggtgtttggtaaataaattgtgtaacatataatttatttaacctaaaattgtaacctacactttataacatggagaagagttacaaagttaattgcttttgtaacttcttttggttgatcataatattgtgtaataaaagagatgttacacaatttgatgataggattcaaatggtttgaaatatagttgttacaaactatattaatgctcat

SEQ ID NO: 402831 - DNA, 803 bp, Cannabis indica
tctgggataaatattggtcaaaatgtaactatttcaagaataatcatttttccaaataaatccaagtggccattcaaactcaatagaagacaacttcttttggcactatgttttaccataacagtcaataaaagtcaagaacaatcgcttaaatatgtcggattgtatctccctaagcaaatattcactcatggccaattatatgtcgcagtgtctcgagtaacttcaggagaaggattaaaataaagtttgcaaaactagggtcgaacccgcgcgaagcgcggctttgttccctagtatatgtataaaggaaagaattaaggagttgaggtgacaatctatatgatcttttttcctaattttagctctctcattttttcatattatttcattagtttttattatattttctgttttaatgtgctttaattttttatattatgaaaattattttgacaattaatccataaaactcttacacttccataacttaatcattatgatttttttaaccattataataacttaaagattttatataacagagtttgaatttatcatttaattcttaagactcttacattctatttaacgttctaccataatatgtgttagctaggatgactttgctggttttatacctataaaatttgtaactagagtataattattttcactttatatttatatctatagttatctatctatctatatatttatctatgtatatatccgtatctatctatatttatatatctactaggtgattgttacgtgccaagccacgtagtgttagttttatt

SEQ ID NO: 402832 - DNA, 891 bp, Cannabis indica
attaataattcttttcctctattttaagatgacactttttcattcattttcgctacataatatttcttttaaattttacaaaacatatatattgatctttttaattttcctaaaaacaaaaaaaaataaatgttaaaaatctatatgttgttatgacttatcataaattatttcattacattaagaggctgtttggaatgcattaatgtaagggggggataagtaatcttaatgattaccctgtttgttatgaagttttatattttttaagccctttaatgcttttacggtaggattccagctaccctgaaaaggtataatattgacccctttaaaaaaggtgggactcaaatattccctcagttatattaacgtaagattaagatttttattaaataaaaaatcaaatattaaatctgaataaaacaaaatacgacccgtaaaataattatatattgctctttcttccgccattactattatccatcatcttcttctccttactcattcaaacaataataaattagcacatcttttctttcgaaattcggaagcttcggtcgttggttgttacagtttgaattttgttcatcatttggaataggttagtaagttctaaaacattggctttcttaaaatatactgcacatatatatgtattttttatatatatgaatcagaattattggcattaaaatttttcctaatgttaatatatgatatccattatttgaggagttggtttctctttcttttcgaatccaacaacggcagtgaacatctatatatatacatatatatatactagtaaaaaattaacgtgcgaggcacgtatactaaattttatgttagtttttttctacgttattaaaaaagtgatacaattaaaaa

SEQ ID NO: 402833 - DNA, 703 bp, Cannabis indica
tatagtgatatacgatagtaactattttattaatttttagaataaataataactaattaaagtgaaaaaaatcttaaaaatatagggagaaaaaacttcaaattcactacaagaaaaaatatttacgattactgaaaaagtgtatttaaatgtattttgtaacattttagcaactgttaagacaacccatgtaaattaaaagtattgacatttaattacctttttcacatgttattaaatatattataacattattttggtgttatatattataaatagttaacattaatttagtgttatagttcattatattacatttattaataacattttcaaaatgtaattgaatagactttaattacattattattatgttatatatgaagaaatattacattattatattgttataatttctcaataatagctaatttctaatgttatgattgttatatttattttaataacatttaaaaattgtaattatataattttaaattacattattattatgctatacattaagaaatattacattttaatgttgttataatttatttaccaataactatttattaatgttacaatctctctaaccacttgaggctagctcaagtggccataagagggtgcgtgtgtgttggaggtcctcggttcgagtcccaggttatgcaatgtaatatataaacacttaaataaaaaa

SEQ ID NO: 402834 - DNA, 546 bp, Cannabis indica
gagaatcaatccatttttttagcttgcaattgttattagtattatccactaatctgtttgaccaagttatctgattagaggatggactttctgttttattactgctggtgatatccttcatttgaagaaagtttacctttcctcataagcatcagctgtttgtttttcctacttgtcttgatttcaattttggctatcgctaataaaagaaaagggaaggaaatagtatcttaattgcaagacataagatttacatctattctgtctatagtcttcttttggactattaaaagctacataaatctccaaagttcatttcagtcactttccccatcacaaatatcgttccgaatagctgctttagaattgtttgaagctgttagaatgacaatgtactgagaagtatttcataatcctaataattctctcctgtatggtgtcataagcttgcttactctgcccttttatattattataattcaggttgcagtagcatgtgcacttgcagcacaaaaattacgccgccctgtcaggatatatatgaat

SEQ ID NO: 402835 - DNA, 543 bp, Cannabis indica
tggagaagaaaaatcaaaatcaaatggataagaagaaacagaatcggatggagaagaacaacctgaatctaatggagatgaacaagtaaaatttgatgaagaagagcaagaagaatctgatgaagaagaaaaattagagccttcatcaatgtcacgagacaaaacacatccgatatttttttgaatttgttcactttattttattattatttgtcttatgttattcagatagtagaaagattatgttcaatttattgcaggtggaaaagatttctcgattggttcctatattaaaggaaaatgaacattttgagtgcaaaataagtataaaaatttggatggacgagatcacaaggcacattaatgatgtactaaagaatgacccgactcacttaaaattgttcaaagaatcttcgtttggtcactttcttgataattccgactactatagacattttagccaagtgatgtggctattgcttgttcgagaagaaaattgttacagagattcagagatgtggtttgttgtgaatgggataccaa

SEQ ID NO: 402836 - DNA, 843 bp, Cannabis indica
ctgagcagcccattatactcaggctcctcctctctgtaaatactctgaaaatgaaaaaggacataaaaatatgagcaggcccttttgtcagaaatacacaaaagactaccaaattagccaataatgacctctcatactcagagtgactctgaaaaaagaaaagaagaaatagaaagagagaaaaggtccaactctaacttttgtaaagagtacccttaactagttttcactagagggaataatacaataccaagtgaccccaacgagaaaataaatacattaaaactaaagtaaataaaaaatgtgctctcatctattaccactatttgatatgttcatcctgaatttttttatgttaaaagaaaaaatgtgctaatattcttatagtagagtcgtctcggtagggtatatttatttcaacaaggcattatccttaataggcacatagagtaagttcccagctgtaaccttgccctattaaaaatttaagaaaattcagcacaaacataatgctatacaatataaaaaattaacatttcttttcgaaacatatcaataattaactttaaacacataatcatcattctcaaaatttaaatattaaaatctatgtccatatctaattatgtaaatataaaagtataagggataattccaggcaccacttttgtctggttcaagtggatataagaaagtgcgtttatgttaaagatcttaggttcgagttctaaatccaggactgaatcattaagggggccaattattaaaaatttatactttgaacaaaatattttttataaattacacatcacaaaagttatttataagggcttattatgatat

SEQ ID NO: 402837 - DNA, 517 bp, Cannabis indica
ttagggttttattagttgggctgttattgtgtttgggcccaattactcttgtcagaaaagagtctttgattcttggagtatgttgaaaaataccacttttattaatcaattaattaaatttacctttaattttatatttaattgaaatatacttctttttatatgtattgtaccaaaaatactctaacataagagagtcacatggagaatatcttgaagtgacagggacaaaattggtacaatattttaaaaaagaggtaaaaatgatagactttaaaaaagagggtaaaaataaaagaggacaatatgaaaagggtatagagtgtaatttcctccagaagatttttttgttggttggctggacaaataggtcttaccttttttttttactttatttaaatttaactttaaataaacttttatagtattgtatccaaattattttaatactcatataactaagacataatttcaaatataataatttgtgttcttgtagatggatgtgtaggtttgt

SEQ ID NO: 402838 - DNA, 709 bp, Cannabis indica
attcgatagaatgaaccgatccatgcatttcacagaaccacagtgtctgctgaaccaatttttggccttcagaaccagaaggttttgttttcaattaacaagagaacttttttcttttcttttcacatccacacatcgtatttcgaagaataactgaaaagtgaaagtttcacaaagaagatggaatttgcgttgcacatgtctatcctattatcattccaaggataaaatcacagccatcgcattcattaagatcccaaattgactgctagagttgggaccatttgttttctatactacaccacccaactaatccgatccaaaagcctaaatttattattcatagaatactcaattctggaaagtgggcacacttatacataataaattagatttgcactaaatattgattgacatataaaaacataatctaatctacattatatgtacttctaaaaaaaattatatataaaactaatattttaatataaatttaattattaaaaataaactaattagcaactaaatctctttactcctctctttataaaaaaaaaaagtaaaagttcaaactgtgaaatttgaataaaatatagggcattttacaattttgtatatattatcactctatgtgtcatgtttatttttagtaattttaagtattgatttatatttatatacattagtatttataattttgatattgtat

SEQ ID NO: 402839 - DNA, 572 bp, Cannabis indica
caaaactagttctacaataaatacctcatattttttattataaaaaaagttgagatcaattccaaaaaatattgaggcataaatatgaaaagaactagttccatagcaaaataaataagcacaaataataacacacaataactcaaatacaatataaagaaatcgattatatttatcaactagttaaaaatttgagataaaattatgcgaatcaacggttcttctcgtactaggttgaattactattgcgaacctatcatcagtagggtaaaactaacctgtctcacgacggtctaaacccagctcacgttccttattggtgggtgaataatccaacacttggtgaattctgcttcacaatgataggaagagccgacatcgaaggatcaaaaagcaacgtcgctatgaacgcttggctgccacaagccagttatccctgtgttaacttttctgacacatctagcttcaaatttcgaaggtctaaaggatcgataggccacggttcgtattcgtactgaaaatcagaatcaaactagcttttactcttttgttccacacgggatttctgttct

SEQ ID NO: 402840 - DNA, 1038 bp, Cannabis indica
ctttaattgaagaaagcaagggagaggttagaaaaattaaacacaaaaattaatgacaatcacaattacaaaataattatcagacaagatgatatctcaaacttagagcaatgagtgactaacttcaatacaataaagagttaccttctcaatcacaccaaggtagcttccgcgtatgtctggttccaacccgctggattcatcagccgtaaatgcacgaacattcatttcatagacaacaagatctttctaagaaacaacaaaacatataagagacaagttaacatatattcattatcatgttggtatgcatgaaagatgttgtatgtaaattccatttgtaagacaaagtggtgagagtgagagagacaaaaagaaaggttatcaaatttccataatatttatcatttttcgaaatcaaaacaacaaatagggtgacaaagtacctcaaaaatatctacaaacttataattatctctccagtcaaaaggtaagctatcaaaatcataagttccaagaaatttagagaatttttcgttgacatccccaaagtatctgcgaccatcaactagctttgcctaaggatctactaggacaatgctactatcaaaacgatggccttgatgacaattttgtgtgccgtcaatgcgataaccatagtgaacattgctcttcgggtaatcctgtaaagatgatcattcttattcttgtgatacattatgtcaaaaccaatataagttaataataaatattttaattatttacacaacttttatatgctttctagttttatataaaattcttacaaaaaaaattaagaaaagcatgcatattatttagggaaatttatatatatatatattatatataaaacaacaaataatgctaaaagaagtattataatgcgttaaaaatcaagagagtctgcaaaaagatcaacattaaagttattagacaagataatatctcaaacttagagcaataacagttctcaatttgatgaatttgtaacttaaaaaataaaactatatagattct

SEQ ID NO: 402841 - DNA, 701 bp, Cannabis indica
aagtatgattagtttttcatcgacaatatcagatactttttgtacttcatcattgagaaaacgacccaacatagttaaatatattgccttgaaactaaaaattaaaaatatttaataaatttagataatttaatttaatttaggaaattaaaattttaagaaaagtagaaatttagattataagtttgtttcttacctcttatcaattagataaatttctcggattctttttattcctttttgattgcttgagttgtattgcgattgctaatatatttacatatttaatgcttaaatatttaagatttaataagaaatttgcatagaaagaaaatattattaccgaattaaagttaccaatttcttctttagaagacatgtaggggtataagtcattaaaattgactattttgtactaagcttgctcatttttgtcctaattttttggtaattcttctatttttgttgtagatgtaattatccattgatatagataatctttatattcaaaatggtcatgtgttttagtaacacgtgtattactttatttttaaaatgattatatttaaagtatctttccaagtgtcgatatcaaattcaaaaattgtaatttttactttattttcctatagtaaagtgaatatataattatagttaaatttaggaaataaaataaaaaatattttatgtttaattgagta

SEQ ID NO: 402842 - DNA, 712 bp, Cannabis indica
tggtccgcacaaacaagtcgcacggccaactccaaccgtaatgatccatcttgaacacgtaaaacaacataattggaagaacaactttctataacaaaaaaaattacaaaaatatgaaagatcaataatttactagggtaatcttgagataggacctgaataaccaatcaattagaggaaaaaaaaagaagttttgacaaaaaatattgaattttgtaacaccatctctctctctctcaataattttgtacttacaaatcaagaaaaataaatggatcttcggttgttcataaaggtggaaggttcgattttggggacaatgatgtcattaatacggtggagaactgtaaaatagagaagattcaatataaatgtttaacgtgtataagaatgtacacattaaaatttaagtttagagagttaaaacattgaaaggatttagccgcaaaaaacttattaaaattttaaaaataattaaacaatttgaaaatttgtttatttttattaaaaacaaactatttagataaaaaaatatatattaaaatttaatatttgtaaaaacagtatttttttcttcaaaaatctagatttttctaagtaaacataatattattttttagtttaatttgtaatattttttaaaataattttatatttttattgaattttaattattattttttactttttaacatatgagtttataaatata

SEQ ID NO: 402843 - DNA, 710 bp, Cannabis indica
tcaacccctagcctagagatgaagctaatctcattggcgtacagcttattgaacacatcggagtaaaccttgtaaaaaccctccctttatcggtatagccggaataaacggtgttggagaaaaaggagaaaaggttggggattaccgagtcagggacggagttggccgagttgggatcagcaaaagaatctgcgagcggtgagagtcgtaccaggcgcgctctttagagtcggagaggacctcataagcctgaaccagctcctggaacttagccgtggcttcggcttgggataagccggactggacgagcttgtccgggtggagctgcaaagccatcttcctgtaagccgaacggatttcgtcgggcgtgcattcctgctggagcccaagcacctcatagtggcaccgtcttcccgacgccgccattgtttttgggttcacacgctctgtgcctctgttgtgtgccgtatgaaaccgaattaaaggcgaaaaaaaagcagtttatggtatatttataggcttccagccaaaaaaggcaaaaaaaaaaaagtaatttgcaatgaaagtacatagatgaaatattaacttataaaataaaaatagatttaagaaaatattataaaataaaaataaagaaaaatattataaaatttaagaaaatagataaatagattttggtgggtattttttcttaattatttaattaacta

SEQ ID NO: 402844 - DNA, 412 bp, Cannabis indica
cgacaatcgtcatcgtggggtgaacccccgaaaccaaacttgagggggtgacaatcatcacctcggggtgaccccccgagaccccttgttcgttgtcagtagtgatagtgtaatgtggatgtctccatatacctttgagaatgtcattgtgtctatggtaaaatgcatgacctgtaccatgagggtgtagggggtagtggtatacccctagactaaccttttaggggggataagggtgtacccctaggttaacccccttggggttaagggggtacccctagactaaaccccatatagttcattgtagttgaggtaggggtagtagtatataccccccagactagtttgactatcataggtgtgtggtgatcgttcattccgcttacgagagtattatgttggaaattatttt

SEQ ID NO: 402845 - DNA, 617 bp, Cannabis indica
gctgaaggtggcagagggacctcggggcgatggagagtgagaataagaaagaaggtcgcggagggagcttggtcggaagaaataacaaagaaaatggtcaatcctaaattcgaattggagaagataattgaaatgaattgatctgatcgatgccttcgagggggttagtggagaaacttgtgcaaacatcctttgttactgtgataaaccaacagatatgttgtttatttttttttcaaaaactcccacccaatcccatcaaatttctcctgctatcgatgttctgacaaacacaatttatcacttaattgcgtcacaattgatcactcaattgcgtatgttaaggaaggacgccttgtaatactctagaattaggaatggattagcaaaaccctaattggtaattatgaataaatgaggaattgcattattatatagttcaatttatgtgaattaatatgatttataacatggtaagacccccttggtgagacaggggcattttagtaattatgacccgagaagggtaaaatgatgaaattaatttaattacgtgcttaagggaactatattattatataatatgtctgtgttgtcttttcaggtgtgttctgaca

SEQ ID NO: 402846 - DNA, 529 bp, Cannabis indica
attaagtgcggattggattgaattggttaccttttgaggtcaaataacatccaatccgcacaagtgcggatttcaaattttttaatccaatccaatccgcataagtgcggatttcaaatttttcaatccaatccaatccgcacaagtgcggatttcaaatttttcgatccaatccaattcgcacaagtgtggatatctgcattttgcatattggattggattggatcgtgcggattggatcggatcggatactttatgaacagccataatcaagaggctaaccatgccctcctattataatcacttgacgaaatcgaagaaagacgagctgcaacaatcctaaagttggtggcccatcaacaaaaggtggctcggtactttaataattaagtaaaggcacaaaagttttttgtgggagatatggtcatcagaagagtatttctaaacacaaaagatagcacgactagtgtgctcggaccaaactaggaaggggcatatcaggggttgaagttctagaatcgggagcata

SEQ ID NO: 402847 - DNA, 435 bp, Cannabis indica
ctaggttagtagctaaaggtttaagtaaaaggagaaataggttagtaccaatttgagggttagacttttaaaagtcttcaacagaattcagtttttgaaaaataagtatttttgtaataaatactgtaagaattctacctatattgacctaagggtctagcctcattaaaccgtacatctttcttggtatatccagataataggtgggagcataaactgaagcgttctgaaactacaaagatagttattgaatcgttagcaccgcataaaaacattcctcctagagtagctgctaatatgaataacagaaactctgctatagccatttctcctaaatgagaaatagggagtatattttctcaaaaaggtcaacgaatggaatgtgcacaagaccattaacggtgcaaagcgagacatgaggtcttgggtgaatct

SEQ ID NO: 402848 - DNA, 608 bp, Cannabis indica
ctatattcaatctatacaaggaagcttgtttaatctgcactatcttagccgccaaccaagaatagcctctaaaaatacaattgttcctgttaatccacatattgtatatcacagcagctaagattaccatatggatcctgtgtagcttgttccttctgtcaagaatcaaccaatttttctagccatcaaaatcaaccggccaagtctttttccccacccagcccccgatctgctctagcaccatttgagagtagctggactcgaaaaaaagatgttggtttgtctcggttgtatatccacaaaccggacaatcaacattgtccaacacgatgtgaaactgttggaacttgtctcgagtgagaagctgagtatttaaagcttgccaaagaataaatctatgttctggcatgatgaaagtgttggaaatttattttaccaggatcttagatctactcacaaatatgttgtttaaacaccctaaatatgaactttctaaaacgataaattaaacacatataaagttaagaaaaccttacactgattcagcggaattaatgtctccttccactcagatctctaacccttgtaccctttctgtagcagagtat

SEQ ID NO: 402849 - DNA, 663 bp, Cannabis indica
acaaaaaatagtttttcaattttggtgcgagtcacagttctctctctcttccatggcgaagaagaacgaactgtgcgaaaacctggatctcatctccctgttcttgatacgaaggatgatatactgcaggatgaccgaatagaggagatcgctgattcgttccaagttcttgttgaggaaaaagaaactcttgttgtaggagatgtagggcagagtagtgttcgacattctcctatattcttagaatttctttctctgccggttagttcaagctgggatagagaagttgaattagaacaagaagaggaacaagatcaatcttggttcatgatgttgggctttgtgccctaattaaaactctatttcaatgtaatcttttcttatttgattaatgtgttatttagtttatgtgatcatttatttacttatttgattaataaattcatccaaattcttatcacactgatattcttgtttattgtgttgtcaacacagtggaaagtaatcaagattgtgtaattaaatgtattcctagatttatagtacacaagatttaactgatatgataatctacaacgtagtttacttgcaccttggataagtgttatgtcttttccagggcattggttaaagtaagcttgggttggatgtatggagtatgca

SEQ ID NO: 402850 - DNA, 725 bp, Cannabis indica
caatctcatagttcaggaggaatttttacagccaaaaaagttcagggagcatgatttggtatatgtcaaagttcatggagaaaaattgctatcactttagaaccataaattgatgtcaaacagtatctatcaaaaatcctaataaaatgtttaattactcttgttcatcgtatcaacttcacacatatcaattaagaataaaagaagaaaaatagaataaagaatgttgaaaactttgttgaaaaaaccttctcgattgattttgctctctgattttcgtactcctagattgcttgctcaaaaatattgaagtcccactctttttatagctaaaaatagataaaaaaaaagataaaaaaaaaatatcatctttttgaaaattaaggggcgtgccgtgacatgaaaattttatgtcgcggcctgtgtttctaaaagtccacgtccttgggctgcttgcaaacacgggcctaggcatgagatttctatgcctaggcataaccctcctttatttgggcagtgagctttctgctgcatcgatggataatattttggccataactctttcaatattgctcggaattggacgattcaaatgatccgaaaagataaaagagagatctagaactttcatgttttgactttctccaaaatttgatcagaacatagtctaatttaggcttgaagttttagctttattttcttgtaaaattttctctattttatag

SEQ ID NO: 402851 - DNA, 1033 bp, Cannabis indica
ccctcaggataggtaaggacctggtctgcctcaatctggctctcgaaaagtgcctttccacgggccaacattctcttcacaaaagcctcactgccaatgtatgacaaactagcttgggggtttcacaacttgaactcataagtgagttcagaggacaagtcagcctactcctcccttatggcttgctggccatcaagagccttccttagtttctccttgtgctcatcaaggtcaaactttagcccggagatgaaggtagcttgtgtggtgttgtctgtgtttctagcgccaagcattgtctctaagccataaaccattctctgtctctctgctaggagagcctccagcttagatatggctttgtcctttaccacaaaggaagcctccaaggtcttcacttgatcccaaagagcatctgaggatcctagggagccatcatgtgctaaactcaacttcatcaaggcctaaaaataaaaaaaaaaaacaacatcagtgtcaaagtcataacagtggtcgcccatcctccccttgagaatgctatggccggccagcccctcacaacaacatccaaggccagccagccacatgcaacaagcctcatggacggccaacctacaccgcgccagaatggtgaacaaagcagaaagtataacttaccagagaaagatctcgaagaccggtagagtagagcctatttggcttgccgtcaccaagctcctactgatcctcatccatgaaggggagagctctctctatgcgtctgttgactgcctcagcaacccttttcctagcaaatgattcccctcttctgtcgggcctcggagtaccctggcctacaggctgtatcacaggctgcccagctggtgcaggctgtagcagcgggggaggcagtgatgacctgccaaatttccaccatgagaagtcctggccaccttggccttcactcgtcttgtgggctaatctgaaggtcccccaggaagacctctcagcctggaaagcatatttgcaaaaagaaagtagaaaagtcagaaag

SEQ ID NO: 402852 - DNA, 548 bp, Cannabis indica
tctttgacataatggttcacgtaattattcatctccctaaagaagccatactaggtagaacagtgcagtacaggtggatgtatcccatcgagcggtcaatgtctgtgtacaagcaatatgtcaggaatcatacccattcagaatgatctattgttgaatattttgtggatgatgaagcattaacattttgttctatgtacttctgcgaagtggaaactcgattcaaccgtcctaaatggaacaataacatcatcctaaatatgccaacttgacaattttctgcattcaagcatgttggccgaccagggtatgaagacagtcaacaccttaccaatgataagtgtaacgcccaaatgctaaggcactctacagtaatttttcaattacaattctatctttgctaattaaagaattttttcaaaaaatgtgtcaaattaaaatttttatattaaatactaaactttgtaatttacataatcatttacaagtaccgggatcccgtttttaaacttttatacaaatattcaaaatacaatatccaagtcgca

SEQ ID NO: 402853 - DNA, 569 bp, Cannabis indica
atttcatgctgccaggtctcgaaaacctgaatgctcttcctggaccaaagtaaaacaacaacccggtgagagtttaaaggcctatattaataggttcaacatcgaagcggccaaggtgaagaacgttgatgatagtgggagactcgtggccttgggggtaggcataactcatggatctttactatgggatagcctccaagggagaggtgcccccactattgacgaatttatgaaaagggcccaaaaatatataaacattgaggaagccaggttagctagcaacctacctcttccctcaggacaacctgtttcagctaccacaacaacaacttccaccaatccaaaagcaacaactgccaaccctccagccaccaataactctgggcacaataataagagaaagggcgacaatggaggagatcaaaacaatgccaaaaagagcaaaggttatcagtccatgttcacaatatactccgaacttgtagagacacaagaaaccatatatgtggcaaacgaacatcaggtggcctttcggatacctgaacccttgaaaggaagtcgtgcgaaga

SEQ ID NO: 402854 - DNA, 669 bp, Cannabis indica
gaacgctctatatatcaaatatataaatactatgaattatccattattataatctaaataatcaatgaccctcgatagacggtttacattgaactaatgacaaatttaccattttaccctttgatggattttatccttaaaatacttagctccttataaatgatatttcgataaaataatgtaaatactaaaataagagctcttctatttatattttttagcctaactaagatctaaggacactatcgtttcacttttaaatagctatagaagctacaaattctatatctatgattaaagctctcacttaattgcactaccgagtttctaagatataagtatgagttagtcctatcggtaaactattaacgaacaagttaaaaaactcgtatagtacaattaagttaaagcttaatcatctcagggttagatcaattgatctaaaatcaactaaatgatattgacttagaaaagatataacggcaagtttatgatatcttttccactgtcaatatcggtctagtccgatgtatagtcagtatatccgatacaagtttactttactaatgttgaggaaaaaattacacttatccaattgtaagcaaaacacatcactgattatcacgtcagtttaattttagtgcactgatattgttggaaattatttta

SEQ ID NO: 402855 - DNA, 680 bp, Cannabis indica
ttcttccaacctgcggaagacaactcgaagaacctgcctttcttcctgaaggctggccacttcttttgacaaggaggcaatggcagtttcaagttgatcggaagcctgtagatctttagtcagcatggccacctttttcttggcagcaagaagtttcttgttgacctctcccagttccatccagacagccccaagctaaaccctgacttcatcagcatccttcctagccaaatccacttcctcccgcatagtgttggaaattgcaacattcttagaagtagtcgatttcgcccataaataagcgtaagctatcttcacacaagtctgtacagagaaagagtgttgaaatctgaactaagtgaagtaggataaaaggaaactgtcaggaaagacttacccttgcaaactcctttagagctcctcccatcaccaactctagggaaaggttattgtctgccctagccagctgctcattcgcctcagggaccgatcgagtcacatagtgaatgagcatgtccttacctcttttggtctccgggtgtagcaccgaaggtgttgggttttatgccataaataaaactcatttcaatataattagatttacttattaatatagatcagaaataacatttaaatgttgcatggttcacatgatttatttcatgattatgtgtacataa

SEQ ID NO: 402856 - DNA, 914 bp, Cannabis indica
aggagcctaagaagaatactatatagaactcgggacaactttttaccatgactcaggctgacgctgatgctagttcgtcaattgtgacagatcagttgtctaataatggttgttcttatactgtgttgtttgattcgggagctactcactcttatgtgtcgagtagagttattgaaagtttccataaggcatgtgatatctatgcttcggggtttggaacactgttaccctcgggagaccttattgtatccactaggtggattcgttctttgtccttctggattgacggttgtgaattgaccgccaatctaattgaattgcaattatctgattttgacataatcctccgaatggattttctatctaagtatggggcaacgatcggctgtaagcggacaatggtagtgtttgagcgcgatagtgctaacccagcggtgttcgtgggtaagattcaaggggtacgcatactgttaggttatatttagcctatgtttcgggtctattggtatcttttagagcggctttacgcttgattttccttgtttcaggttcttggggtatcaaagttcaaattcagtcaattgatgaaaagaggggacaaactggtgaaaaatcggtaaaatctgctcttcgggtgtcagtagtcgcgaccatggatcgtgctagtcgcgacccttttttctgtgttcgcgaccacggtcgcgacttgaagatttggcagaacttatggttttcgaggttttcctgtagtcgcgaccagcctttaagttggtcgcgaccaggtacggaaaacgcagtctttgacctaattcagatattttcccaattggaggcacaccttttcattcctatataaggaacacgattcagaaggtcaaattaagcagaaatagacctgaatagtggatgaaagt

SEQ ID NO: 402857 - DNA, 814 bp, Cannabis indica
tttggattttggaatagagacattatccagtgatcattaatggggtatatgcatacaagtttctttgttttcgaaaatttttccttgtacactgatactatttttttttttctaatgtttgttttgctttttcttcccttacatgagaaagctcagcttggattaggttaacatgttgcttgtggtccaatgaatccagttataattttaatgacaacttgttcgttttttactttttgtatagagctatggtggattttgtggggtaacctatctgagttttgtttaggcgttgttttaaataaataaaataattgtaattgccttttataagtagatttttttaattaaattaattatttgcaagaacaccgctattttgtcgacactaccatatatagttttgtacacggaaaaatagacaatctaattatatgcgaacttaactagaataaaaagtgcaaaatacaaatatttctctattgtctctgtcgaggcaaaaagaagattaaaagaagattaaaatccaaccattaagagtatcttgatttttcttatctacaactacaaatgttatcttcaattatcaataattagagttttcttaaacactaatatattgtatctaatatttacttttaattgtcaaaattatattaattacattatttaaatatacataataataatctcaactaataactaataatatctttttcttcaattactaattgtatttttaaataaaataaaaaatacctagcataaaattaagtatacgtgtcttacacataactttttactagatatataa

SEQ ID NO: 402858 - DNA, 671 bp, Cannabis indica
tcaacttctttgcatgtgttgccaaggatagatcatcgttggggcaaaatctgaccgttagattggtaggtggcatatttcccatatagcgtttaagggcatcagatcgtgctaggccttaaacgcgtgtcacatcaaggcttctcctctttgaatttcccttatccctagtcgttggatcatttggttaggcacagaaggacacacatgctctgtacgatagcgtgtcgttggagacaacctctgacattgtacctaaaaaagcctgatcactaagtccacagtctaacacgtatatatgaggcttccactggctaaaggcgtagctcggttcagtgtgtctcaaaattccttggcccctctaggaaaatccattctgttcccgggagtaagtggctttggttcctcgaacagaggggtgtatgtatcgtttaaagtagtagactcactaggagtgaggtcgatcccacagggagtgtagttaagtacgttaaaattaaacttttacttctatttggttaaataaaaaataaagaaagaattaagaataagaaactagtaagaagcaattatacaagaaaattaaaagttaataaaaactagggcttcaatttcaattgtttttattggatatggcctaatatgattattttcctaatattaatttctat

SEQ ID NO: 402859 - DNA, 559 bp, Cannabis indica
atctgaacaaggcctgcctaaaatactgcttccccctaccccaaattgacgagatggtagacgccacctccgggttcaagttattatccttcatggatgcctactccggctataaccagattaagatgcacgttgcagaacaagaatgcactagcttcaagaccaataaaggggtatactgcctcttggtcatgccttttagactaaagaatgttggtgcaacatatcaaagaataataaactggatgttgaagggccttctagggcagagtatgaaagtttacgtggacaacatgctagtcaagtctaaagtgtgcattagccatgcagatgatcttacagaatgcttcgaagtagtccggagatatggaatgaaagttaacccgaagaagtgcactttcggggtcaaatcagggaaatttttgggattcatcgtcagcaaaggggaatagacgaaaatcctaagaagcgcaaagacgtgcaaagcttgacgggaaaggttgccgccttgagctgattcatttctcgatcaacctacaagtacatccctttctttaac

SEQ ID NO: 402860 - DNA, 512 bp, Cannabis indica
aaattgaaatttcaaacttttttgttttttagtgtgggactgaatttttttaaaaaatactgtgtaagtttcatactgtgtactatattaagtttttactattgttttacaggttattttttagttgttctactattgttttaaattattctgttttggttgttttacgattgttttaagttgttttataaaaagacagtatttttgtaaaaaaaaaaaatctgtgtggcaataaaattgtaaactttgacccaaaatctagtatttttataaaaattcctttgcaaactaacatgtgcgaattaaatagaggaaattacactatataccctttttatattgtcctcttttatttttaccctttttttaaaagtatcatttttacctctttttttaaacattggaccaattttacccctgtcacttccagatactctccatgtgactctcttatgtcaaggtattttaggtacaatacatataaaaataggtatgtttcaaataaatataaa

SEQ ID NO: 402861 - DNA, 516 bp, Cannabis indica
aaaaaaaaaaaaaattccttaaaggttccgttccattccacttccttttatccactcacatgtttgtattgtaatatcaacatatatgagaatggtaatatataatcttgtgcatgtatatctacctgtatgtgtatatgtatgtacgtacatacgaagacctaaactatatatcttgaaaatttgaagactctagtcagtaataataatcaacacttgaaaacatacaagagggaaatcaaaccatagtaccacactctctttattgatataacatcattgaatataagcacgcttttcataaaaaaaaatatacacatatataacaccattgaatccttcttacatatctgccttttcagctactacaacattttccacagataatgaagctttattattgtccgtgttcactgtttccacacgaaactttttatagatatcaccctgataaaacttcctcgtcctcgccactaaaaaaacgagaaacgacagcaccaaaaaccgtaacgacag

SEQ ID NO: 402862 - DNA, 634 bp, Cannabis indica
agagagagagagcgagagagagagaatggaaaatctctattaatagaaaaaatcagacaaagtttattacatgaagattagctaatagtgcaaaatcaacaataaaaataggcataccaagccttttacaataaaaaagaagaataaaaaaaagatctaataagccaccaatgagcaagcatcaaaaaagtatgaaataaattaagtttccaaccctaaataaacatctcacagaattcatctataaatgactactatcaatgactatcagccaatgatgttctaataaaaattaggacataacaactccattattcacatataaaataagagaaataatcaaacaagcaacatcaacgcaccaattgagaacaaaacccgccccaatcgtcaaaacaataaaaactctattaattcagtagatctcaatgaaaaattacaccaatattataaaaaaaaaactaacttaaaataacattaaaattaaaacaattgaaactaggcacaaaaagaaaaaactaaaaatgaatcagacccaaagcaatcactaattaaaaccaaactcctaaactgagaagatgatgaggaatttttaccacagatccacaaggctcagcctactaccaaccacccc

SEQ ID NO: 402863 - DNA, 544 bp, Cannabis indica
gattgatctccggtgagaaaggaattctgcgtgctctgtctagctaaagatcattatttatttttccagccataccgtgaaacatatttttcagttcgtctagctgagcctgtacggctgggctgacctgcttggcattctggtcaatttggattacgtcagcatctttctgagcggggatttgagtacgggctccgagctgcataattgtcgtaacattctgattgtctgctcccctccttctgttagatcattccttaggtcatgggttttccctaaactttcgaacaccgaagcgcctggctgccttagcagttgatttgcttggttgacaagtggaatggaaccattgatctagttagaaccatcaggtatgactcctcctgatgaattaccagacaaggtctgctcgcctaccgctgggcccaagagtggaactcgtgaccggtgattgggcggctgaccatttgcagtctgggaagtattcatcgttggatcctcgtccatctctcctaggggaatgacattcggcgattgccgacct

SEQ ID NO: 402864 - DNA, 792 bp, Cannabis indica
aaaattaagctcttaaacaaaaatatcataattaagagagcacacatataaatacataatataaatataaataatataaggtctcctcctagctagccagaccaagcttcaatttttattataattatggcttataaggtgtatcctagagttccttctctctctccctacttgactccagaaagagaaaaattcaccatatggatgaaatcactcgtcttccaaaccaatggttgcacagtttataactccaatggacaaattgttttcagagttgataattatgagaagaaatgcagtagtgaagtgtatctaatggatcttaaaggcaaagttctctttaccattagaaaaaaggtatgagtttttgttttgatcatatggtgtttgttaaaagttccattagaattatttgttgaactcaactgggccttcttgatttttgcagaaactacaagcttttggtggttgggttggctatagatgctgtagtaataataatattaatgatgatggtcagttagagtcatcagatatgatgaatattagtactgaagaaaaaccatggtttagagttacaagacaatattgtaaaatgcttatgggagatttggcttgccatataagtgttggttgtgatgataagtatagaattgtgagaatagcaggaaaagcagttggcttcagaatagtcaaccttgatggaaagattgttgcagaggtgagattttactgtcttttctgggtatgcatgtttcactttcaatttatttgtttttttttttttctttt

SEQ ID NO: 402865 - DNA, 613 bp, Cannabis indica
gagagagagagagaaatgattctttttctatttttgtaaattgagtataattaaatgattttatttgaattaaaattagctaaggataattataaaaatctgattgtaaacttaaatccaaattcatataagacaaatagctaatggggcaaaatgatcattttgtcccttccacactaaaaggcataaaaggtcactaaggggtattttggagaattctaaaatcccgactattcctgacatttctaatgtctaactttattatcccgctatactaaaaataccaggatgtgattctaatagccaaacaccgcgttctaatgttgccagacacaatacatgcaaaaagtatgaattttctatttgtgacataaaaatgcattctgaattcaaataaattatcataaataattaattcaatactaataaataattttcactcttaaattctaattatttgctaatttccaaattaaagctaagcggtctttacaattatccccccccttaaaagaatttcatcctcgaaatctaacctgaacaactctggatattgagttctcatgtctgattctaactcccaggtggcttcctccacctttctgtttctcca

SEQ ID NO: 402866 - DNA, 1436 bp, Cannabis indica
ctttatttcgtttttttttttttttttttgcttcgaaaatatatatatatactacattggataagcaattgaaagaaatgttgagaaaagtcaaatgaatcattagttaatatcaaatattgaaacaaaattacatatcattcagtaaaaaaaaattatgatttcaatgtagatattcttttttatttaatttgtaaagcatgtttcgggcgggactccccgttatgacgttagactctcaatcttcccttaaatatatgtgtgctcaaatttctaattcgattaatattgtacaatttatttatttttgccaatgtacaagaatgtcgacacaaaatgattcgtggtcttttagcttaatttaattaatacatttttatttcaagaaaaatgcattatttatttgaatctatattgaactagtgcgtttatcattcaaatgtcaaaagtggaaaaatcctcttctttcataaaaaaaaaaaaaaaaaaaaaaaaaaaaaaaaaggtagtaataaggcatgaggaaggagatgaagagaaaacaatgaatagggtaccagagcttaaacaatacctataatgtaaccttgttaaaaaatatatatatatctatattgtaacttagttcaaaaactagaatatatctttaccgattgaaatattcataatattaattttaactaataaaagtgaccgagtaatacacaatttttgttatctggcttccaaaaaaatcactaaatagatataaggagaaaagacgaaaggccaatatttcacactcaaataattattcacaaacatcgtgataaagaaaaaaaaaataattattattattattattattattattattattattattattattactcacaaacatgatatagcaagttttttggttagatgacgtataagggtcttgtataaattaatggtccatccattccgtttatcattctcttttggaattagaatatatatatatttatatttgtatatttatataaaactcttccaactataaacaaactggactgataaaataattataataataaagacaatatgcgtttataagacaaattctattaaaattaattagcttagatttagaccaattattttaagacttcgactatagcctattccatctcctttcacaatttaccttttttccaaataaagtaaagagaccaaaaatcctaatcatttaagctatatgcaatattgattttgattgagttctctacttcaagctactaatatatatacataggagtaatattgattcattacaacaccttggtcgttaggcttacgatgatgatcagatatttcatcatcatacgcctaatacttattgtttcatattgattttacttcgtaagttttctcatttgaattacataaatatatatatatatatatatata

SEQ ID NO: 402867 - DNA, 1055 bp, Cannabis indica
tggtttgttaagggaagtggcccttttttttggcttctaagctggtttagttttctttcaataaaagtctctgattatcaaaaaaaaatacctaagtttaatttttgacggtaataatacttaaattatatttctagaactttcgtaagtatatggctattaagtgttaagtcattatccacgtgtcattttcttattagtatatttaaattaatttttaaataaaagtaaaaatttaacaatctagactaattagggaatgtcatgtggccatttacttgacaattaacgaccaagtagctacaaaagtttcataaatacaacttaagtattattaccataaaaaattaaacttaagtatttatttgtaaccgggagataaacctaagtatttatgatacaaattattgtaatatttatgaagatgctcttataattattctagggcttatttggtacgtcgtattgtattgtgttgtattatgttggattatattgtattgtactgtattattatttaatataatattatgtttttgtattgacttgtattaatagattgtgtaaagttatgatatattttcaataaactcgaccctaacattgattatgggttcgggttcgggttcagattcgggtctagagctcgggtcttgatccgggtcctaatgcaagtttggatctaggtctgactttgggtttgagtccgggtccgggtccgggtcagagattagggttgacctgggatcctttataaatattacaatacaagctaatatagaccatttgttatgtattaaataatacaacttatactatattaaaatttttagtggtaataattaatacaatatattgttgtattcaaacataatattatttattatttagtacaatacgacatttatacggcctaccgaactagtctttaaaggcttatttgtaacgtcgtattaggtctgttgaccgaggttttcggcaactaataaaatattatagagttagagagctgtaagaaatttagagaaggatttttttacgtggttggggcgtta

SEQ ID NO: 402868 - DNA, 647 bp, Cannabis indica
aaaaacccaaccccatcttccttacagtttccttatagaggatatttaaccgttgtctattaacactctcttgatccttttattggcgagttgaatggtaatcaccaatggatcgacgtgaggatacctcacgtttttctcgtcttcctccgtgaatataattggaggttcttcgcttttcactttcttggaaggttttggggcaaatgtcggctgctcgttttttatctctttcacatatcttttctgggtgttattgctttcccctgtgatatgtggccctcctgaaataaccaggatgtcctctccttcaacaggaagaggttgtaacccctggttgtttgaattattgggcagactgggctggttgtatccatgactctgtcttttcacgtactatttgaaatggcctcaagcgatgagactttcgatctcatctttcaattggcaacattcattggtcgtatgctcaatatcctcatggaatttacaatacctgttaggatctcttttgctcctcgcattcctcatgggctcgggcttggcgaaggcaaccctttgctcatgtgtgaggtaaatattctcccgagttacattaagctcggtataaatagtatacgctagcatgtacttatcgtgcttcttct

SEQ ID NO: 402869 - DNA, 686 bp, Cannabis indica
gttcctggttcgtcttctgctccaacaaaatttgccagaaagtcaaagatccaagctcaaaaattgaccttcaatctcgcctctcctccagacatttcttctccgattgctactccaacacttgggtttggtgattatgataaatctcattcatccgatcacacattgtcgaagtcttcttcttcaaatggtgctcaaaatgtcaagaaagcattggtgactttgcccatggtaagttcacgaacaaggtcaaaggtatccaaacctcaaaagcccgaagtggttttgcccaaaaatgtcttcaaagggagaaaggtagtgtcttcatcttcaaaggccaaaaatctcaaggagaatcccccttccgtctcatcttcggattctgaacctgaagaaggaactgaggaggatcatgaattagagggcttatcagattcaagtgaagtatttgtgcccaaagatcaaccctctgttgatgattctagatctgaaagtgaagaacctgaagctgatcctgtcagtaaagaacctgttgccgtccctgctgcaattccagagaaggacaaaggaaaaagacccattgtctctccaagtcctattcttcccgagaaaagaaagagaccctctggtatttctcttgaaaacttcaagccccactctcattatttttgttataatgatcatgc

SEQ ID NO: 402870 - DNA, 517 bp, Cannabis indica
tactgttgtatatatttaatggtctaatgtatttattttttttgttataatataataatactaaaaaaattatataacttaatttaattattaatatatttttaaaaaaataatatgtagtaaatatatatatttttataatttttattaactaatttattatattttatcgttttcttatttttttttaaataataaatatttactaacttaatttttaaatttaaaaccatattgtatctcagcgctatatatcttattgaattaagttttgagcttcttttcattagaatacaataaaattaaacaaaaatattgtaataagaccatatattttaagggatctaacgattatataccactagatagaaataaatacaagttttttatgtataaaatactatatctaatttgattataatactattgttgactgaggttttcgacaaccaataaaatgttataagatttgagaactgtaagaaaattagagaaggatttttacgtggttgaggcg

SEQ ID NO: 402871 - DNA, 884 bp, Cannabis indica
cgaagcgcggcttgtttactagttagtaaataaaatgaaactgccacttgttaaaaataaaaccacatataattaattttgtgaaattaattccattgctaaatcgtgccgttgtttccaattcacggtgacagccttatttggttaattaacaaagttgcctttattcttggccaacaaaagagtaaccaattaatataagtttgaataaaccttaatatagaaaattttgacacctctcacttcaatctcattttgaaatttccataatccttctttattctttaaagttgtctttatcaaaatgaggggtcaatttgaaataaatctttgggttggactgggcttctataatatgggcacaccacaccacaagtgttaaaattttaagaagctcaaatcacaataataaaaagctaattagtattttcacttctcgaattttcacatgtatcaaatcatgttctttaaattttttcggtcgttaaaaattctctctcaattattaaaattgttgaatttaaggacttttgtccaattttaataaagaaagtctaacattgataaaagttcaaaagacatgatttgacacatgtcaaaatacgaacaacatgttttagtagatattaaagtctaaaaagcatgatttagtacataaataatcattaaattaataaaattgaataaaagtctttaaatttaataatctcaatggttcaaaaaaaaaattttataagtcaaaaaaatttaaaaatattatttagtaaatatcaaaatttaaaaaataaaaatcttaattagtcattaaaaaaaaagggtaaataccattttggaccctgtgttttgcaaaagttacagattagaccctgtgttttgttaaatga

SEQ ID NO: 402872 - DNA, 581 bp, Cannabis indica
ttttagttgattataattattttatgcagaattacgcttattttctacttgtttcaggtctaaatagtaaaatttgtaatatgaattgaaaatgagaataaacatgttaaatgagatgaatatgatgaatttatcatagaattcagagttctatgatataatgggtgaaagattctaaattttggatactcaacacgctctgtgatcgaaaatcaaaattaaagcttcaagataatttttgcctatgatgccttcacttacatgaaaaatattgtgataaaagttttatatctctctttcagctttctaaaacatcttgaatcgtccaatttcaagtaatattgaaagagttatggccaaaaaattatttttcgttgcattaggaagcttgctgcccaaaaatagaccctaggagctgcgacatggaaggtcaatatcacggcccgcctcatttatttagcaaaaattagagtttcaaccctacttggtgttgggttttatgccctaaataaaactcatttcaatataatcagatttgtttattaatatagatcagaaataacatttaatgttgcatggtt

SEQ ID NO: 402873 - DNA, 384 bp, Cannabis indica
gcaagaggaacataagattgaaagagcaaggccctagcaacattaagaaggtgttggtgtttcctctctactacagagttttgttggggtctttggacacaagagtggtagtgaataatacctaaggagctaaacaattcagagaattgtagctctttagcattgtcagatctaacacccttaatttgaacaccatattgagtcttaataagctgcagaaatctaggtataactgtttgagcttcagatttggctttgatgaaactaacccaagtgtacctagagttgtcatcaacaatggtgataaaatacctacaaccagcaagagtaggtgtattgaaaggcccccatatatctgttggatattattttactaggatctta

SEQ ID NO: 402874 - DNA, 764 bp, Cannabis indica
gaaaagtagtcataaacataaactcctgaaaatatcaattttgaaaaaggataagttgaaaaatgcctcttttattaatcaattaatcaaatttacctataatttttatttatttgaaacatacctctttttatatgtattgtactcaaaataccctgacataagagagtcacatgtagagtatcttgaagtgacagggacaaaattggtacaatatttaaaaaaagaggataaaaataaaataggacgatataaaaaaggtataaagtgtaatttcctcctttttttttttaaatttgaaaatgactcctcacctccacatacaattctccttatggccatttctcttggactagatagttaaatttaaaaaagtatcctcaaattaatattttgatgtatgtacaattaaattaaaagttgctatttcataaatagtaaaaaatgtagatgttcaaaaaatgagcaatagtagtaacctaggctcatttaatatattttcaattgggataattttaaaaaacaaaaaagttacaaaaaaggtctatatgaaatttttaatattcttacgattttttagattttatttacataaaatacagtcttttatgtatttcatgttgtactctgattatttcgatgttgatttcttattatttatatattattttgatgttatcttcttgctattttcatgcggttttcttgttatttcatgtggttttcttgtatttttattgtgaaaatgtaaaaaaaaaaaaact

SEQ ID NO: 402875 - DNA, 549 bp, Cannabis indica
caaggtgagaaaatttatctctctcttattgctgtttaaaaaatcgagtatcatatattgctttggtatcctctttgtgtatccctaaacacagatttgtaagctaaagttttaatctctataaagtaaagtaagaccaattaaaaattaacataaatagatcaccatatatagatataattttcataccacattatcatgattgatctatgtcatgatttaactatatcgatatatgtaaccattgatgggtttagttgtgattgatacaacgaaaaccgctttgatcctatgttgatatagctaatagacgagattgcacatgcctacagttatgagtttaataaggttaacacgattatatttatacatatgtggaccagtgggagattgttagaaatttattgtggtcacaatagtatatataaaatgtgtgttgagtcaccaaataaataagtcaaatttatgtggtctattttggaataaagtttatgatttaatggcataattgtcatgattttaatacgtagataccataaagataatttt

SEQ ID NO: 402876 - DNA, 816 bp, Cannabis indica
tttaatttgaaatctaattccaactcactcatctaattccatttttaaaaatttatatatatattctctttatatgtgtttagtttattaatgacttatatcacttttttgataattattttttacttacgtttgaaagtgggcacgacccacccattccccatttctaagaatttatatatgtattttatttctctctctatctctttttgtaggttggtatctcttatatatatattctccttatatctgtttagtttattaatgacttatatcacttttttaacaattattttttacttgaaagtggtcacaatccactcacgtgatccctattgccaagaatttatatatgcattttatttttctctttatctctttttgtggattggtatctatagaaaatttattgagattggtatttaagataaagaccatcaaccaaagattttacataaaatcattctcctcactcttcactatttcaaaaacttacaaagctcgcttctttcatttatttttttacttaggttttgagagaaaaaagcaagaagaacaatacagatgaagaagaagaacagcaggtcaaactttctaagtaaaaaaaatctctttttttctttattcatttcttctagaacgacataaactttactgggtttttgttatttttgccaattctattttttttttcttttttggcgttgtagtttagctttggttttgtgagtggtggtgttatattgtttgatgactcttatgacttattttgttattgttttattatttttttactgttgttttctttcatttttt

SEQ ID NO: 402877 - DNA, 509 bp, Cannabis indica
catctacaagttctccagttctaacaaggaagctctaactatgtgaatttttcaggatcttttgaacctttatttttcctagctaaaaaggctacctcgtttagatgcaatgggaagagctctcttttagtttatttactaataagaagtatgctcgttctacattagtatttttgattaaaagaggaaggctacatctctgagggagagtgaaagtcggaaccggttggaaaagagggagtcggagtgactgaagatagaaaaggcaaaaaaaaaatgagctgcttaataaaaaaaatttgggagagtgagccaatgttctcatatgaggtcactagcacacaccaaagaaaatcttggttcaaaatcttgttaaaaatttcttgtttattgtctttctcaagtgtgtgtgaatatgtggattgaaagaagttgtcttatctttttattaagtatggctcattgttaagctgaatgaattggttctttgctcaaatgatcattgctca

SEQ ID NO: 402878 - DNA, 448 bp, Cannabis indica
cacattgatttattatctacaaagaaaaatagaaatataaattaataaccataataatatttaaaaaaaaaaactaacatactttatgttaccttcttcaagaaactcataagcttgaacttcatctaaatactcttaaatttgaatcctttcaatcaattttgagtgaaaactagtgcctccactattttaggactcaaagaactcttaaaagagccttaaatctataaattgacatgcaacaactataaatgtcatatatatatatatatattgagataccacttgatgtgtgtgggcactactctatcactcaagggaatttcaaaatttagagaggaaaagagagagaggggcggcatagcttttctctgaaggaaacaatgtgcaaagtcatgagtttcctgaagccaacactttctatttatagaatgccctctaggtttag

SEQ ID NO: 402879 - DNA, 1019 bp, Cannabis indica
gtgccaccgaatgcagggaatcgcctagagccgttgtacgagcggttcagaaagtaaaacccgccagtgtttgagggtggtgccgatccactcaaagcagagcagtggatgagtatgataatatccattttttattttgtgcgggtcgaggacaatgatcaggtaagatatttatatgctgcgagaagatgcccgtatctggtgggagaccgtgtctcagggtcatgacctgaataacatgacctaggatgcttttcgagtattattttacgagaaatactataacgagtctatccaggcagcaaaggtagaagagtttatacgattgactcagcgcagtatgacagtaatagaatatgccactaagtttgatcgattggcaaaattttcttcagatgaggtagatactgaagctgctagaaaagcaaagtttatttgaggattggatgaacacattgcacgagatgtgatagttgctgctaaacaacctggggttgttcaaacttatgctcagatagttgaattggccctagctgctgagggtgcagaagatcagatacgaaagaaaaatattgtgagaagagattcatggaagcagacatctggtgttggttctggtaggggtaatgaccctggtgatcgcaagaaaagacctagtgaaccatcagctacaggcctaaacaaaatattccaaggtaaccaaggtttctgtcgtggtgggaatgaaaactggcaaacttttcctggatgtccaagaggcgccaccagggcgagtgtcaagctagagcatattttcactgtggggtagtgggtcacatgacgaggaattgccacagctgctgcgaccggaataaaagaaggatgatacacctgctcctgctcgagtgtttgccttgactcaggctaaggctgatgccgacccttccacagtgacaggtcaactctctattgttggtaccatattgactgttctgattgattctggtgcaacacattcttatatttcaagtagaataatt

SEQ ID NO: 402880 - DNA, 401 bp, Cannabis indica
atatatatatatatgtacttttttaatttgataaggtatatcaatataaaaatatttaaaattaataaaataaataaataaaatactaatatttaagagtgaagacattatgtattcaaaaaaaaaaatgtgttgaccaatttactaaaaaataaagtttgagaactaactcgtcaaaacttatatagtttaggaattaatttgtcaaaaaataatatttgaggaccaacttaacaaaacttatataatttaaggacatgtggtacaaaattacaaataatccattttttaacaaatatatatgttttttaattattataaagacaaaatgtgtgtatatatagggaaatttacatggtatactaacttttgccatttttttataaaaatatttttatttt

SEQ ID NO: 402881 - DNA, 783 bp, Cannabis indica
tcggggctgggttttcttacttctgggctaggtttgagtttccactgttccagacgacaatggtggaagagatggtgaggttttttgtgttaggggttcgaatgcttaagggttaagtgtaagtgtagttctgtccacttttaattttgtttttattttatttcccttttattttttagttttcttttattcaaattttgttcagggtttttaatttagtttttttttttctgggtttagttctgtttttaattaaatttctgcttttaatttaatttttcatttaagttttaaatttcttttgtcatattggtttatttaatgccatggtggcatgatttaatgccaaggtggcatgagttgctgacaaagatcgtgccacataagctatttttgcctttaaacggagccaaagtgacggaatagtgcagaccaaaatggaagtgaggttcaggtagtttagccgccaaaatttgagttttggtggttaactgtcacaaacccaaaagtttgggagccgccaatatcccttttatttatataactggttatatttttagttatatatcagacatttacttttgtgacttttttgttgacttttccggcaatgttgacttttccgatgacttttctggcaatttttccgacgatttttcaggcgatcgtgatatttcaggcgacttttccggtgcctgtgacttttccggtgccaatgacttttccagtgccgacgacttcaccgacaaaacttattgttgttttacaaatattagatttcta

SEQ ID NO: 402882 - DNA, 841 bp, Cannabis indica
agtaatgacgttatcagaaattatttttaaaatttgagataagagaaaaaaataagaaaaagagaaagagagaaagagagtagcgtaagaaaaggaaaaaagaaggaaaaaaaaaaggaaagaaatatataaataagtgtattgaaataaattcaaataaataaaaacgttattaaaatttgacgaaattatttttgacaattaaatcaaaaacaagtcattttaaacaatttttctaacttgatagtaatatgcatacttgcaacttgcaagttgattcaactttagtcagtaaaatttttattactattttatatacttgatattagaaaatatatataacatatctctctaggaaaaaaaaaaatataaacacaaatatttatttatatttattagaacatctatcaagaatatatttaagattaatcaaattatattctaactagtaaataatttacgcggcagatatttaaattttttaaaattatatatatgaaataaattgtgtaatttattaaataaataattaaataataaaaactgtatcaaattttaactttattaatttttacataatttttctttgaatattatgagaagttaggtgtaggtagactcgacctgtttgtaagcacccaataatcaaaagtctccatggctcaacatgaagtaatcaaactttttgtaccactgtctaggtgcctgtttgagtccatatgaactttttctaagcttgcacacaagattctcttttcccttgactttgaaaccctctggctgctccatgtaaattccttcttccaagtcaccatgaagaaatgtagttttcacatcaagt

SEQ ID NO: 402883 - DNA, 560 bp, Cannabis indica
cttgtggttgaggtaatttatcttcgtgtaatcgtgtggttgagatgggtatggcctaggcgtgattccagtacaaaagtaaaaatattaaaaatcacaatataaaccatattaaagtgaaaaaaagaataaaatatagggagaagttgaaaaatatctactttttcatatattaattaaatttattttcaaataaaatttaattcaaatatactttttttttttatgagtattgtatacaaattattcacacacacttacataattaagacataatttcaaacataatagttttgtatttttttgtagatggatgtgtaagtttgtaggaaagttagagcaaaattttgattagagaagaatgaaaactagcatgaagtgataagaataaaattgaagttaaaagaggtatatagtgtaattttttagtatatgtgttagttacctgttcttaaggggtaagttgaaaaatacacttttataaatcaattaattaaatttacttttaattttatatttaattgaaacatactttttttttatatgtattgtacccaaaa

SEQ ID NO: 402884 - DNA, 591 bp, Cannabis indica
agccattatcctatggctggacataagacttaagcaagaatgtctgtcactcgaagaagttggactagaacgaaggcgaggatgatcctcgtgcaagagttgaagcagatcctggtcgatttggtgttcgcttccccaaaactcacctgggttcatctacaaaagacaacacacaagatgagtgtttggtcgggatatcgaacattaaacaggcaaatatgccgaccaggagtactcaacagattaaagaataagaatattcaacgaaaagtcaaaactgaggaagtttgaaattttcgcgagttagggcaaaaattttcatgaagcttagaataagcaagatgaaagacaggaattatgcagttcaaaaagcaagcattgcagacgatgaaattgcatgaaccacaataaaggaaaatcgtagagtttctaaacttagggtttcctacatatcttctacatcaaagtcgaaggtgcattcagaatgtaaatgtgcaaagtaaacataaaagaaatcgataacttactcaaggatcaaatgtcaggattcaggttacgccgagccaaacgagcagttttgatgaaggcact

SEQ ID NO: 402885 - DNA, 602 bp, Cannabis indica
ctttttgttcgtgttgtaaggttcaagcatacatctcctgagctttgcccgattttctagctatatgtccccgatgatgacttgtagactggtggggtggtaacaggtcttggttattgtttgcctgggtggccctttggttctggtcggccttgacatatttttgcacatgcgggttattttttcatatcaaaaattcaatttcccgcttttgattattgcattcattagtgtcatggccataatctccatgaaaactgaaaaatttggacatgtcccctttacttatgtcctttttcatgggagcaggtttcttgtacgggactacagactgagttgccatgtgttatccccatttttgtactctcacgtggcatcacacgatggtgacatgtggaatcaactttatacgcctgctcgcaagagatatgccaaacagagcaccacacatattcgctcggtcgaagccttcttaacggtgcagtcaacaattcgaacagcacgccaacacttagcaatttcagcttactcatcatgagtcacagaagaaatccctataattttgggatcagatcacagagatatggcaagctgtccgaatc

SEQ ID NO: 402886 - DNA, 814 bp, Cannabis indica
ctctccaaaaaaatctcccagatccaatgttattatccccaaaaataacgaaggcggagatcgaataggcaaggtgggtttgagattcgaattttggaagaactagggtttggaaagcatttgccatgggaggaagaagatgaaaggttaaagaagaagaagaaggtagatagatagagagaggtaaagaacgaaaaaggaaaaactgaaaaaaggttttttattttttaaataattttttataattttaaaaatgtttttttaattttcaaataaaaaaataattaaaaatattaaaagattttattttaatttttaataaatgttttaaattatttttaattgaaattttaatttgaactaataaaatatcaacacgtggctttttttttagaacaactaacagattgttagaaaaaggattaacggacaaataataatttggagcttgagtattattaccgctatttttagaggttggggactaatctgcatcaaagtaaacttttgagggacttttgccgcaaatttcctaaaattaaaatataagggggttttgccacaaaaaaaaaagataagggggttaagtgtataaaaattaaaacataagagaattttgccacaaaaaaataaaaagggttaagtgtttaaaattaaaacataagaggatttcgccgcaaattgctctttcttaaataggtcacatataaggtccagattctagatcattgggtctagacagaaatatatagtatcagttactttcaaatgttctttttcggggaattttcataaatatgagaattgagggtat

SEQ ID NO: 402887 - DNA, 694 bp, Cannabis indica
gctaaattaatataagagaacgaaacattgaataaattatttggctacttatatttacacccaaaagaaattataagtacatctcatatataagtttatctcattttattttttaaaatatcattttttataaaaacacccccatttaattatttatttaaataaagaagtataccccaccaacttttttttttcctctttctctatctttttcttttaattggcaaatctttcactagaattattataaaaattgacatgtatttgaaatcttggggtgtacataagaattataggaggtgcaacctgcaaatataactcccaattgttttcaaaatcattattatatatagccgcggccacaacctaaattgtattttagattgatgttaaatgttgaaaatggtttttaatgaagtttatttgattaaaataaaaaaaaaaagaaaaaaaatgtataatttaattagaggcgtttggttgggaggaatgaaaatataggaatgggaatgggaataggaatagaatagaataaaatttaaaatgcataaaaaaaattgataaaaaaatcattaaattttttttcttgttacattggaatggtcattcctttctttttaaaatggaatagtcattccaccaaaatggtggaaaaaacattccattggaatgctattccaatactttaaaatgc

SEQ ID NO: 402888 - DNA, 924 bp, Cannabis indica
agagagagagagaaaaacattgtgaggcttttttcaattagtgtatgggtggtttattattatttcggtggatttactttttgctgatcttatagaattaagtgcatgcatactactgttttgtagattttgtttggtttgtattttctttctcttatttttaagtttctgtgtttaatttttttttccgatatcatataataagatattgtttcccttgatgttcaaaaagttgagtaattatatgaaatgggtcttttttgcaaccttgacttttgtctcccttgtcctcctttatgagacttctttttcacacatatgcagaaattcaaatggttttgtttattcttcttatattacttttcaagtttttctttcttttgttctatttgtacatgactatataaatgtattatttattattatgaaaaataaagtagtagtattataaaatgcagttatatgtgtaacaaaaggggagggaaaaaagaaagagaaatgcctcttttaagtatgtaataatgtcattcaatattaacatatatatatatatatttatataagggcaatgaaattcaacatttttgttttcccttgttttaccaaaaaaaaaaaaaaaaaaaaaaagaaattcaacatttttagactctcttatgggatttggtttttatttttcatgagtcaaagccaataaatggttgatatgggtcctacaagagtaccgcattacatatatttgattgatgcggttctgttttaatttttttttatttttttgataaagagtcgtaattgaagtaataacaaaacatatatatatatttattcgttgggggaattacgagcgcttgcaaatggtatttttatattattttttgttctaatttagattgcaacgctagttgtaataggaatttttatgta

SEQ ID NO: 402889 - DNA, 614 bp, Cannabis indica
aaattaaaatttaataataatctcacttagaggtatgataagaatgattacattttttttatctgtttgtattagaaattggttgtaggttggttatattaaaaaaaataacaaaaattaatttaggatttattttgtactattttaaaaaatatagagttcaaattgtaatttaacaaaacaggtctaatctataacttttgcaaaatataaggtctaaaataatattaacttttttttttaattgatattcattatagttacaatatcattcttcttgtaatttttttgaaaattcaaaataatttacagtatcgaaaataaaattcttaatattcatgttagtaacacgcctgtttaaaaaaatttagacttattttcaacaatgtaaattatttgaaaacttttaacaatttacaagaatgatattgtaactataacaaacaccgcaataaaaaaaaaattgaaaaaaaaaattctaacatgtgttttctaacacagaaattgattaaaaaattataaaaagagattaacggtaactgtttttgtttaagtccaaaaagataaaataaaaaattaactacacatgtttgtattgaattaattaattaagt

SEQ ID NO: 402890 - DNA, 933 bp, Cannabis indica
tcaaggtattaagcactataaaataagagaattgacttataaaaattactattgggtagctaatattctcgtttggtatcatactgctattggtctaatcggatcctatataatttaagaaaataatttttaacaaatattgctaactaattctagagcgttacttataaaaaaaaaattgatactactaatattcaatagcaatactctaaaacaaaaggtaacatattattattaatacattttaatattaaatatcatatattttaatttaaaaataatattaataaccgctaactagtctaacattgatttggtgttggggacgttaatattgagttagtcaacatgaaaattagatgacgattaaagatatttcgattggtattaatgtgtaagtgtgaaaaagaaaacccatttgaattgagctatttagctaatattagctctttcttcctaccaaatactgatcaactataaacgaaaagaaagaaaaattttattataaaataatatggcccacttggatttaattctcttaggtgcattaatgacctgttatatgtacacgtcaccacttttttatttaaatactttacttcttttttaatttttatatataaatacaagtcacaatctcattaaatataataggcagagaaatcgtaacccaagattaaaaattccgggaagtaaaagaaagatcatgatagagtgatgaaatggtatttgaatggtaaataatgtctcacaccaaacaagtggtgttcacaagttgaaaagcaaagttattatgttaggtataattaatgttcacgttatttttgtaggaaatgtgtacatggtattagtaaccaccacaattcatatatatattgttaccagtggcgggcccagaatttaaagtgagggggggcgtaaataaatttaaaa

SEQ ID NO: 402891 - DNA, 494 bp, Cannabis indica
tcatataaaggctccatgcggttaccagcaacatgttgctcagctggcaccgcaggggctgcaggaaccgcaacaggcggttgcgggggaggctcaacaggagcatcccgttgcctgagtcgtcggatctcttcttcttgttgctcaattctagtttgcatctcagcaaacctttgttcccaatcaaccggggcctgaggtggattctcctgtccacctctcgggactcgaccgcggcctctaccgcgcccacgggggttttggggatttctaccaccccgaccacctccggtctcaaccaattcaccctgccttctaacgtttcgctggtcgtccattatttaggacttagcctgcgaacccacaaggcacgtaggtcagacagtggtcaaaatattttcaagaccgcaattaagatttaaaacatcttatttaatcatatatacaacaacatatcttaaaacagtttgcaaaaagaaataaagcttacggaa

SEQ ID NO: 402892 - DNA, 682 bp, Cannabis indica
atataatataaataatctttttgtccatcaccatcagtactctctctctttctctttctctctcctcaagcttcaaagaagccataaccaccatcaccaccactctccgatgacccatctccagccaccgcgtggtcccacacgcttgaccaattgaaagcccaagtgtcggcgacctcacccccaagcagcatcgcttctttcgccgctgttagctcgggatcgcaagtcaaagtttgggggtttaaactttgaacggattttctgatcacctccggtgtccgtttgacaagtcgtcttcaccactaaaatcagctcgtcgaggagaacaacctacactaagctatttttcccaactcactacttttttaggtgacatttttatagctctgccccttttcggtgacatcgtgtactattttgacaaacagttggcgtgggtgtgatctactcgtcgaggtggttgttttgatatacgctacccctattttcggtgacatttttggtacaccaatttttaccgccatcgattgttaatgtgcaccgtttagatgaggcatcggaaccccaatttttaaatatagtcattttatatgttgttggactcgattttgaatgtagaatgcaatgatgataattatttagccattttatggtataggtgagaataatatctaagatt

SEQ ID NO: 402893 - DNA, 933 bp, Cannabis indica
tcttcttctcttccggcttccaaaccgtggatcgcccagaccttctcatggagtgggtcaggatcccccctctgcatcatactgctcctacccagcttttcttccaacatgccaaggttttctccacttatgatagaaatggtcttaacgtgggggacttggtcaccgtggagaactaccggaaggccaaactcatctcggggatctaatccgtggacgacttcaacctctccaaggtcctctgcccaaacattcgtactccgaatgctaaaaaggtgctccgggcagacatcatagcctcgacagaggaccagtaccagaagtatcttttcatgaggaaacaggagttggcctatatcaagtctcaggctgctgctgggaggacccttcgactggaaacgggtaaagaacgaacaccttcccggcctaagttactggtcccagtccctaatactagggcccctgatgccaacacatccagatctggttagtctcccttaacgattcatcatgtcccttctgcctaagattattcccgatgtaggcctatagaatttaacgaacgtcttcttagatttagaatgccccccacccggtggggtgatcatgccaagggcttttatttttccaacttaggtcattttctaggccgatcccggatggggttcggacctcctgcacctattctcctggatcattcagcttatttgtcttccagctagtttctcccctcagacagctttcttggggatgatgaagccagtgttgtagtacaagactttgctagggctgaattagatagtcagagtaggactagttttactgctttgctttcatgtgcatattttctcatggccactctgatacttaatttttttgtctttttgaagcagccaggccaatggaggatcttttggcgactctcgcccagac

SEQ ID NO: 402894 - DNA, 775 bp, Cannabis indica
atccccaccattaatccttttgacataaagttgatatcgttacaacttaaaattaaatctttaacaaaaaaaaaaaacaacttaaaattaaaattaatcattttaaaatgtaacaaatatattttttttgtacaaacatgaaaaaataattataattaagagcaacatttcaatttcttttatagtttattacaaataaataaccaaaatttaaaatttaaataaaattaagtttactaataattttattagttactataaatattttattattttatatttaaaaactaaataaaaaagtttattttatcatgcaatttttataattttttttaatttataaggaaactaaatcgtatcttaatataattagttacgtatcaaattattttaattaaaattatattattttattgtttaagatacttttatattactttttacttgtagtaataatatttttattaccttcaaaacttatttgagaatttaatgataagctacaataaagttactatagttattatttattagtaaaattagtagctttaatataatgttgaagatattatttggttgcttataagttttatagatacatattaaataagtttattttaaagttaatcattaagtaaaatcatatagtaacataaatatatataataataaaaaaaaaagactaatatataaagttagtttgtacattagttttttaaaattatatatttgagttattttttgttaacaaaatattaaaaaaaaaaaaaactag

SEQ ID NO: 402895 - DNA, 564 bp, Cannabis indica
tgtttcactaattatggttttttttattgattagtgtttgtaattcccttttacgtgaggtggaatatgatattagagagcataattgtgcctctatattgtttcatctgattttctttgcctatagctctaagatgtaaattagagataagttagtgattgtggttgttttgagtttacatgtgtacaattggtctgttggttaattcctatttcaatttcagtgggagtaattagtggatacagtgtattttaattctctctctatttatatttttatcttccaccttaattcaatttatttttttctacgtaataatatgtgcaattattattatacatatataaatttttattattatttttttctatgtaaaggctaatcttacatctatatatacatactatacttgtttcaactttttctaaataacacaaatttattatacatattatataatataatgttgaatttttttctcatttatttactttattattattaattttttattttttttaacaaataatgacaatattagcaattacattttttttttattt

SEQ ID NO: 402896 - DNA, 505 bp, Cannabis indica
ttttaaaaaaaaaaagtccaaattttggattctaattttactttaattggcatcgttcgtatcttattgtgcttctatgcactttttttaagcaccttcaatcgaaaaaaaaaatcttaaaattcaatatatatatatatatatacatatttatatatttttaaaactggaactttcggttatgaatgctaaaaagaaatttaaaagtggaacataattacaattcatagtgagtttatattgaatatcatcaccttttatgcttgtaatattatacatcacatctttattaaaaaagaaatacataatacaaatttaattaaaaaacaaccaaagagcattatggttaaggcataacattattaaactttgaaagttcattacaaacgaaatttatattaaaaaaaaaaaaatcaattatacatgagaatttttttaagatgataataataattataaaaacaagtggacactttaaattttcttttaataattaacacttttt

SEQ ID NO: 402897 - DNA, 660 bp, Cannabis indica
gggaagatgacatggctagcataagcttcagtaaatgttattgttagttcctctacatgtggtatcttatgtttcctttcttccatagcaagaactgcttcatttttttcatgttgtaaggcccgagcatacttttctctaggtttgctcgagtctctagcaagatgtgggcccccaataattacttgtaaatgcccgtccactggtggaggtattaattggttctgattattatatgcctgggcgacccattgatcttgatcgactttgatatacttttgtaagtgggggttactctttctgatcaagaactcaatctcacacttcaaattattaaattcttttgtgtcatggccgcactctgcatgaaagcgacaaaacttgattgtatctcttttgcttatgtcttttttcatgggagatggtttcttgtctctatgtcatctgttagaactgagaaagcaataaatttagaggcattttccctaggctactgctcgatgtttctagtgaatttttctttcataatttagatgaattatgaaataaagtggcaaaattataactagtgaggcccaaaagtgtggccggccacttagtgtattttttcccattattttatcttttttaatccatataattaaatcctaaattctagtt

SEQ ID NO: 402898 - DNA, 856 bp, Cannabis indica
ataaaatttgtttttcctaaattttttatttcgaactatttctttagatattccacagcttctgaaagtttttcaggagttccaataatattcaaatcatcaacataaatagtaatgataataaacttaaaacttgaactttttataaaaataaatgggcaaataggatcatttatatatccttcctttaataaatattcactaagtcagttgtaccacatgcgtcctgattgttttaatccatataataatctttgtaattctattaagcacatttcttgattgcttgaattatatgcattaggcatcttaaatcatttagggatcttcatgtaaatattactatctagtgatccatataaataagatatgactacatctattaatcgcatatcaagtttttcactcacaactaggctaactaaatatcttaatgttattgcatcgacctcagaaaaatatgtctcttcataatcaatacatggtctttgaaaaaaatcttgtgctacaagtcttgctttgtatctcacaactttatttttctcatttcttttacatatacatacccatttatatccaacgagtttcacaccttcaggtgtttggactatgagtccaattactttgtgttagcaagtgaattcaattttacttgaattctattttagctaatcttttctattttgacattctttgatagatttaagttcaagatcctcattttcatctataatttctagtgctacattataagcaaaaatattatcgataattactttgagccggtcccgttcttttcctgtattgatataatttattgaaatctcattatttctaatatttttaggtacctgaa

SEQ ID NO: 402899 - DNA, 672 bp, Cannabis indica
gttctcgttgagctcatcttacgacacttgcattatcttttaatagatgtgtcgccccaaccaaactccccacctgacaatcaactaagataaaatttcatacacaaaaatcagttcaataaaataactcaaatgaaaacatccattcaacatgctctaacctaccaaaagaattacacacatattatacctactccaaaaatactcattcactatgttatataatcagttctattttagttataaccggttggagttatttcatgttatttatttttatgtattgtaacactattatagaaccggttctattttaattataattggtttaagttatttgtttttattcattatgttatagaaccagttatattttaattataacgactttgagttattttatgttgtttattattattcattatgttatagaacaagttatatttttatttatatctgagacatctacttctggtgacttttccaataacttttccctgactgtgacttttccagcgactatgacttttctggcaaattttctggcggcaataactttttcagtgacttttccgacactggtaactttttcgacgactttttcgaccaaacttattattattttacaaatatggaattttcatctttttttacaaaaatatgacataaaaa

SEQ ID NO: 402900 - DNA, 674 bp, Cannabis indica
tcttctaaaataaaaatatactatttaattaaacctgcactatacataatattaaatagtaatcaaagttaataaatcaaatgccaacctgaaccatttcttttatagtttacattaatcgaatcttatctcattaaatttttcgaagtcaataaatgttaatgggtgctgcaatgcaccccttgaaataaacatgcatctttttttgttggcattaaaaataaaattaatctaatttttttagtagtagtgttatattattgttagagattttattacaatggaagaaaatcaagatgcattataactctatatactaacagaatttttatgttaaagtattagaatcaatgtttatgatgtatttgttaattctagtataatgaaatgtacaatactaatttccttatatatttcttctaatatttaaataaaatcatagtaattaatttatataaagattatgttttggtatattggtgaagacttatcaatctatctttttggtcacaagttcaaatcccaatagactattttttgtattttctttttttttttagctaactatatctatccttagcactcagcaatatctatcttatgcattacatcaatattattagtaagttaaagaaaacataccttataccaaaaattatgtacttgacttccga

SEQ ID NO: 402901 - DNA, 557 bp, Cannabis indica
ctgcccgaaggagatgttccgagtagagtaacgcatatacctacacggacgaggtcctcccagccgagcagtggacaatccgagcaacatatcaacacttagcaattcaagcatttgcatcatgaagcacatgagaaatccctataaatctgggatcatatcacagagatatgacaagctttctaaatcccacaatcagtgtattctaaatatgtaatatgtatgcttactaattatagatattgtaagtataaggaaaactttccctcaagcatgtagtcctataaatagtgatccattctcactggtaaaggggtcgaaagaattatctaagagagcatactcaacgatttcactgtaagagctttaagagggaaacattgcattcttcgttcttaagtcaatacaaatcaaggggagtaggctattaccaaaactgatcggggctgaacctctttaaaaatcatgtgttttttatttatcttttcatatcatatctgaattatatcctttatcgcttattattaacgactcactgtcgttggctaaaagagagg

SEQ ID NO: 402902 - DNA, 695 bp, Cannabis indica
gcaaatcaatattattcaaaattaagttacaatgagtccaaaaacgcctgaagcgtaaatgaatgatgtagaaattattaatatatttcatttgatttgcattgaagacgttaaatctagaggtaatcatggagatgccttaatgttataaagtactaataattttaaaaatgataaccatgatgaaaacggtactctaaaagactgacccaagagaagttagacataacacatttgatcataattgaatccctgaagtgattctatataggtacctataaatgataaacatatttgaaaaatatgtaatttaaagagatctctataagttatgtcaatatgggaggaaattatcatttattgaaatttttgtcgacaataaatattgaatgtttgcatatgcaataaactaacatgagatagcaaggatcatggtattagatttgtcgagaattatcgacatacattttgatttttggccaaaatattatgacgcaatccaggcaaatttactcacataaagtgaagtaagacctgtagggtgtgcaaataaatatttctaatgagaaatttgcatatatgtatttgtacataatgaattgttgtacaaagtttgcatagacatgagattgattgaagtaaggcttaaatattgagaaaatataatcatgatttgattatagcctggaatatat

SEQ ID NO: 402903 - DNA, 377 bp, Cannabis indica
aaggagtctggaccaccaacgactgggttcgaactggtcaggagggtccctgagcgggtgcaggcaccagctccacctttgcccgtgctgccagaggccaagaagggcaaggagattctggctcactacatgaaccgactggttcctgaggttagtgagcaactggctggtgctgatagcgactcatctctggatgtgttgggcggaggagccttaaaggagctcaccagggtttagtcttttttgatacttcccttttaacttttcccacttagctccatatgctgactttttccttgtgcaggccggtttgaagttggcttacacttactccctggctaaatctgctacttccaagagtacggctttgtccgaca

SEQ ID NO: 402904 - DNA, 954 bp, Cannabis indica
atcactaaaaaagtcatacaaaccaactgtaccaacttatgtcactcctccaccttttccaagtagattgaaaaaatttaagaaagaggagaatattatcccattttttgcactttgacgagacagtatatactagtgacacatgtttgtcattctttacacttgggtggagaaatatttcgaacagaattcaagcagcacatctgcacgcacaaagtttgcttgaccgagcagagcaaagggcagatgatccgagccgtgcatcaagacttaaccacttcaggtttaatatcgtgaagctcaagcacaaaggcaatccctacaatcatgggattgtatcaaagggatatggcaagttgtcccaataccccatttcatgtattctaaatatgtaatgtatgttcttaccaattatagttattgtaagcaaaagggcaatcttccctcgtgtatttagccctataaatagtgatctagcttcactgaaaaagggagcaaaagaattgctttagaaagagatctaagagaaaacactcagagatttcattgtaagagctttgagagaggaaacactgtgttctttattttcaagtcaatataatttaagggaagtaggctattaccgaactaaagcggtcgaacctctttaaaaccttatgttctgtatcgtttactgatttttgctttgtcttaattacatttcttatcgcttattaattgacttactatcgttggctaaaagcgaggtcaacattttggtgctttcattgagagtaaaatttcaagctttctctttgtcttaagtttcagcagacacatagaatggtggtgcaaactcgctagaggtgaaaatcggtcggttatggtcggtttttataattctataaccgactggtcggttacggtttttattttacgaaaaccgtaaacgaccgtttagaaattataaccgta

SEQ ID NO: 402905 - DNA, 503 bp, Cannabis indica
tgtgaagtgactatgggtgccgatatcagtttctctttaagagcttggaaggccttcaagcattcctttccaaactcaaaaggtaccccgttaacaagcaaattggacaatggcttggagatctttgagaagtccttaataaatcttcggtagaatcttacatggcacagaaaactccttactccttttacagaaattggagggggtagattttcaattgtagacaccttggccctatccacctcgatgcatgcctttgagatcttgtgtcccaaaacaatcccctctttcaccataaagtggcactttttccagttaagtaccaagtttgacttctaacacctgattagtactttttctaagttcctcaaacaatcgtcaaaagatgaattgaaaactgagaagtcatcgataaagatctctatacaaccctcaatcaaattataaaagattgtcatcatccacctctaaaattttgctggagcgttacatagtccaaatgg

SEQ ID NO: 402906 - DNA, 981 bp, Cannabis indica
atatttcaagaaaggtgattagatgattgtataaagttgaggatgtgttgctaagtggttccggtacctacttttactatagaacaagttattctacagcaagtggttcaaatcccttccagagttgtgggggaagaagagaatgcttggttgtaatagttgagctaagattagagaatcctgagaatgaattaggaatggattgttttgtaaagtttaatgcaattatcgattgtgaaagaaagatggtaactctttgaccagaaggtgaggacccagtcgtgttcgtgggaaaggttaaagagtcctaaatttaattaatttcagtgtttaaggcaagagatttaatgtggaatggatgcatcagcttcttaagtagtaagatatatattatgaagaatacctatggaccagaatacgttccaatggcctgagaatttctgaatgtctttccagagagttactggagtaaatattaaaatgggagattgactttgaaatggatctggtacttgggtagaatttatatcttaaactccgtatcgaatggtatttgagatgattgaagactcagtgacgagggaggctagatgttggcttgaaatttgttggactgggtactccattctggagtacgttagtttgtctgtgaaagaggtggatgaaaccttataagtatgtattgatcattggaaatttaataaacttttgatgaagtgtaagtattcctttgtcagggatagaaatggtgatgattaattttagagaagtaccatcttctctgagatcggtctttgatctggttattaccatttgaagttttaagagaagggtacttctaaagcagtttagagttgactttaacctaagtttacaactatggttagaagttttctggaattaacagaatgctacagaatatttgttgagggatgtttacactcttagtggaattagatcgaaagaattgaaacaaaggtt

SEQ ID NO: 402907 - DNA, 840 bp, Cannabis indica
ccccgtcgtaaccctcctgttcgtgttcaacctcagaatacagatcaagatattcagcgccattccaccattgctgaagacaactcaactcagattctccaaaccagatcggttgctgatgatcattccagcccgttcttcctcagcaccggcgaccacccagggctgattcttgtgaccacagtcctcaacggaaccaactaccagccgtggaaacgaggcatcacaatggcgttaacggccaagaataagatcgcattcatcgatggatctcttcctcatcccgaacctggtaacacaaatctaaactcttggttaaggtgcaataatatggtaatgtcttggttggttaattttgtctcatctgaaattgcacaaagcatcatgtattttgatttagctactgacatgtagagtgatcttgctgagcgtttcaatgagggtaatggccctagaatttttcaattgcaaacacagctcactcggcttcagcagggtgactgttctgtttctacatattttacaaagttgaaatccctttgggatgagttgaaagaatttcaacctataactacttgcacttgtggtgcaatgaaagtttttttggattcttacaaccaaaatcaagtgcttcaattcttgactggtttaaatgaatcctatgcttcggttcgtgctcaaatcttactcaacgaacctataccaaatctgtcctgagtgtttgcaatggttgtttaagaagaacgtcaaagatcactaggaaattctgattctattcccttggctgctgcgtctagctctaccaatcccccaagaaccaagaaacctaggccttcttgc

SEQ ID NO: 402908 - DNA, 649 bp, Cannabis indica
ctctctctctctctctcacacatgtccactataacatccctcaacacttgagatttgccatatttgattcctattctgtaactttaattgagctatatcaaatccaacctatagtgatctaaatagtgttctctctcagtatcaatacaactaaaaggggagtaggtcattacctactagctaagggagccaaacctctataaaaatctttgtgttcttttactttctagttctaaatgtgacacacgtggcaagcatcagtctgccaatttcttaggtcaacaatttggtacttttattgagagtaagtcgatatcacatctgatcaaatactatggttaacacgagaagagcttcggttgcaccatctgcatcattgagtcttccttgagaccccttagactatagatcttgatgtccatgtttcaggcatggctggaattcccatgaacactgtagatgtggtcaatcctgccgcttaggcaagcacctcgaatgtagccattacagctggttagagtgacacaaacatcttggtggatctaaactgtaggcccttgcctctgaggggaaccctccattggtgtctcccactgaaggaaggacccttggggaacaacccccagaaacaacaactagatctcatctc

SEQ ID NO: 402909 - DNA, 806 bp, Cannabis indica
ccttacttgatgcagaaactaggtacagtcagctggagaagttagcattggcactcattcacgcagccagaaagttgcgtccatacttccaatgccacccaatcacagtactcaccacctttcccctcaagaccatactacataaaccagagttgtctggaagattgaccaagtgggcagtggagctcagcgaatatgacatctcctacaagccacgaaccgcattaaaatctcaggtattagctgatttcattgcagactttacacctaactctcaagtgcaggcggaaaaagaactttgccaccttacagagggacagacaaatggcacatgggaattacatgtagacggttcaagcaatgtaagaggaagcggattaggacttgttctaacctcaccccaaggcgagaagatcgagcaagcaatcagatgtgggtttaaagctacaaacaatgaggcagagtatgaggctatgattgctggactcggactggccaaagaaatgggagccaaaagaatcaacgtctttagcgattcacaacttgtagtcaaccaaatgcaaggtagctatcaggcccgagatagcaaaatgacagcttatcttgagaaaacaaaagagttgcaatcgaccttcgacgagttcacagtcagtcaggtgcctagggaaaataatagtcacgcagacgccttagccaaccttgggtcttccatccagacaaccagccccaaaacaatcccaatggtgtacctccaatggcctgctgtctggaagaaagaagaagaagaagaagtaaatgacgtcgcc

SEQ ID NO: 402910 - DNA, 1107 bp, Cannabis indica
catgaagtattcatcagcaaaacaccttattttgacgatggccttgtcatccatgtcggtcaaccacttgaagcctggctgagagaaatagaagtaccccgaccagccttgtttgggggtggacttccaattgaagaaccaagcaacctcgtgaggagaaggagtaccccatccttgggaagtgtagaggacgcagagggcaaacaaatacttaatgcccttagtagtgatttgggccgggtagagaccaaacaagtcagccacatccttgaagtacgtatgcaagggcatcaatgctccttgctgaccatgagcccccgaccaggcgcacatccccttgtcaggatttgtggcgcgattcttgtgggcgggaatatagcagtgcagctcgcccaggtgcctgccctggtcgagagttcgaaggcacgcctccgtaatcttggagggaggacttacccatctgacgcccaaggcaccctaccttttatgaggaaccgccgctgcaagctccacactgacgtagtccacaccctcgactaggatgtctccatcagcatcgacttgctgcccagcctcattgtacccgccgtaatttggcggtttaacctcttcctctccctccgcctcggagggactgccgagacgcacatcgtccagctcctcaacctcctagacttcagcgtccccgtcacgatcctcctccatctggacagctgaatcctgttcggcgctggacagagtggcaagccgagccacttgaggatcggtagcgtcagccagacgcatgagccatcatcctatggctgggaacaaggttagaagagtgtccttcactggaagaaggaggactagaacaaagacgagggtgatcctcgtgcagaagttgaagcaaatcctggtcgatccgatgttcgagttcccaagactcacctgagttcatctacaaaagataacacacgagatgagtgttggtcagaatatcaaacgataaacaagcaaatatgtcgactaggagtaatcaacagattaaagaacatctatgtttaaagaaaagtcaaaactcaagaagtcaaaaaatttccttgagttagggcaaaagagttcatg

SEQ ID NO: 402911 - DNA, 579 bp, Cannabis indica
aagtaatgtatgctatcacacggaagactatctggtagtatggtggacagacaagtgaatcgagggagcagtacacttgcctgtttatgaattaaatctgtcgacattcttcgaatgtgttgtagaatgtggaagactgtttgtttctcggtgggcggtggtggaaaaccggagcacaccccaatcactcaagaatcttacaccattaaaatgggtaatcaatgcgttagcctcgcgacccagaagcactgcctcaacaaacaagcacaagccaagcttgtacaaatcttttaggttctgacagtttgtgaacctatcttggagtgcttctgtcttcacactattagaccggttgaaatattttttgatcaatcggtctgaccctgaacgagcaacctgctcaaccttctcctcttttgttggccccgaggataagtccaggcctgttatgagggcaaactcaaccactccgaatctgagctccttccgaccaatgtaaaactgcattttcaactcctcctgaacatcaaccttcatcttgtgcaacatgagttggtgaaataacaccgaggagaatgt

SEQ ID NO: 402912 - DNA, 729 bp, Cannabis indica
ggtgaattgttgtgctagcccttaaagtgattcttgaggtagttttaataaactctaattccttttatgattctgaattttaatgtaaaaggcatgaattagttgatatgtgttgttaatgcatgggtgaaagaattgtggtgtttttatgtgatgttagttcttgagccctagatggaatgattagggtatgttcttatttaatttcaagttctaaatttagtgtttattgctggaaattatttgaggagcttagttttgaagctcttgttcttgagcttgaagtttgcttagttgaagcatgaattatgtgaattatttgcaatatgaattgaggattcattattggatttttaatgcatgtttaggtgtttaatctccccaatgtttgcttgtaattggatattttaaattagaagttttgttgtgatttggggatgaaaagattggattttaaggctgaaattcgaaggaaagcttgctggtttctgggttctgcacccagatgccgcggcatgctctggagcatgccgcggcccgcccctcttggtggaacctgggttttgtcccaggtgccgcggcatggtttgggcatgccgcggcccgcccttgtgatttttgggcagtttgtgttgaaactttgaaaatgcataacttttgattccgaactccgatttgggagttctttatatcgttggaaagctcgttccgagctctgtatgattatct

SEQ ID NO: 402913 - DNA, 1041 bp, Cannabis indica
tttgttctattattttataaaaattaaacttccaccctttcttattaagtttatcaagaatatatgttcaaaatttataactaataacaattattaacttttaaactcttttaataacacgtattcaagattaataaccgataacattaataactttcaaacatttcaatattctatatttaatatcaataaccaataatgattaataattttcaaacatttgcaattttttttatgattttactccgatcaattgatacaaatacattatatttagaacagcaaagaaggaagaataaatctctttgagaaaatagaattacatgacagatggtggaataaagtacagatgtgtcaagtgcggtaaaaaaaattatctttaattttataattgttattatattttaattttttattttattttttttcaaaaataaaaataaatcacttaaaccaattgcggactgacacacttatttgacacttaaagtattaataataaaattgagtgtagaattatatttaattagaagtcatttttactattttttattaattaaggttatgggtgtaatgattttaaattgtaagaagttttattataaatatttcaataatttgagtaaaaaaaaattaatttctaaaaaattcttatttagtaacaaatagtgaaaaattaattaataattattagtaatttaattttaaatataattaattttaattaagattttataaaaaaaaaataaagtatcaaattacaagttattaatttatttatttgttttaattttaaaattaatcagaagtttaaaaccattcaatagtgatctaatgactaaaaataaatgtaaccataatggttacatatttgatgtaactattgaaatctcatccatatatatttatataagtaattaataattgtttaaatattcagttagtagtttttttttataatagttagtagttaatggttgcataccaatcagtttatttagtagttgttaaaaaaattttgtttaatcgttgtacctctca

SEQ ID NO: 402914 - DNA, 741 bp, Cannabis indica
actgatatactcctacttgttttggcatttaagagacttatttagttctttttttttcatgatcgtgtacattatagttatttaaaacatcctgtaaaaatttcaaaaaatttagaaaaatttaaaacgccaaaaaataaaatttaaattttctatcgcataactcttttagttcaatgggtgcattgtaaaagcaccttataattatttttttgtgtaaatttaaagggattttttctataataaactaaaaatggaacaagtttacatttatgaccccaaaaagggaaataaacaaaaatagaaactaaaagttattaaattacaaaaataccagtcaaggaaaatggaagcctccatcttcttcgtgacccagcggacgaatcccaacaaccaattctcaaccatttttcttccaaaaccaggaaaatcagatctaaaaaaaatgtagatctcaagggaaaacaacttaaatcctgaaaattcaaatacaaaaacagaaagaaaaaaaatcatccaacctccattgttgtacaaaaaaaactcaaaaacaacattgagtcaaaaaagcaaatcgcgttcagagatgaagaatcaaatagaaagagatctggaaatcattgaaactcacacatgatcgaatcagagaaagaattgaaggtaataacatatgaaaaaacaaacatcatctaagctttcagaaaaaaaaaaccagaaagcaaccacaaaacaacattttaa

SEQ ID NO: 402915 - DNA, 585 bp, Cannabis indica
gatgtaagagattagtagtgttcaaacacaatttatagtaaaataggtaagaaaaaaagaaaaagaagatgaagagagaaaaaaaaattgaatgagagtttatcagtagtttattgtaatggggttaactgttatttagataaaaatataactagaataatgagaaactaaataaataaaataaagggaaatacaatagtatatgtggtataatttatttgggtgatttggacactcatattgtaaggaccgtcggacaccatctatttttctattggtatgatattgtctgctttgggcctaagccctcgcggatttgtttttgggcaccttcccaaaagacctcattccaatagagatagtattcatccttataaacccaagatcctttccatttctagccaatgtgggactttggttgtacactcaacaatcctcccctcaaacaaaggaccatcttgcctccccttagacaattacagatctaaacctaaatccctcgatttcaacactcaagatccccttgagtaagctagatgaatcccttcaccagctaaattcaaaatcccttcgaatacctgaatc

SEQ ID NO: 402916 - DNA, 503 bp, Cannabis indica
gctcccaagggactttgagaagaaaagcgacaaagtaaaactaatttatgtatatgctaatattacaacataataatatccaagacaagagggatgaaaggtaaagaaatttgttttgaagattattggagaacattgtcccacatggattaaatgtaaaagtattgagctatatataagaacatgggctactccactcattgcctattggttttgagttggaacgccatgattctcaacaaagatattattctaagattatatcagctgtcaaaataacatatcattttctcgtgcgatggaagaagtagctgaatgcttgtcccttcaactcaatgatttcattaaaagggagagctttattatggtgattaatagaaaagtggtacagggacatgcatgtcaactaaatatgatagttattaggaaactcgtctttatgtaattatatatgtttctactgataaatccatgccttatgtattgttttctttttttttttt

SEQ ID NO: 402917 - DNA, 870 bp, Cannabis indica
gcggtgaattctcagttgataaacagagacaagcttcaaagattaagcttgtctattaattctccactatttttgctaagagtcacgatgctctactgcgtatagttcatggttgttgtgtttcacaacttgacccattgtatatgaggatttagattggaaagttgggatttgacatacatcaggtgttgattgttgttctagttgctgtggtttacttcatttgggtaaacaggaacgtttgtacttttgaacatagttcttacactagtgagctgattaattaagcaagatattaaagcaagatttggttgcttagggtgaaggaagttgtctctgaaagataaggataagcttattatcaatgctataaatagtagtatttccaattctgaactttgtcttagcttttgttgtaatattttttgtctaatttaatgagaaaaattctcctttcataaaaaaaaaaccaataatcgaagaaacaacataaaattcaacccccaaaaaacacagggtcaagccaagcccttacccgcttggatagggttcatctctaatataatataagccacaatttcaagaaacaacaaaaataccactgaacaaaaataccaactgaaaaacaacactaccaaaacacatcactgaacatttagttcccgtactaaagttaaagtaacgtttggttggagataacaaaatgaaatagaatggaaaaaaaataattttttattcaatttttttatttaattacattttaaagtattgaaatattattcctataaaataatttttttataattttagaagaataattattccattttaaaattaaaaaaaaataaatcattgcaatataaaatgatg

SEQ ID NO: 402918 - DNA, 621 bp, Cannabis indica
gtccttgatcttgattctcctgaattcgattgagctaatttcacgcgactcttctttcattagcctttttcttcgaaagagatttgacacacgacccctactcaaatatgtgtgtgtgctttatctattgttgcgagtaggcttttgtgaatgccttgggggtcgacctgtcccaagttgatttccagtatttctccctgttatattatttataataatataatatatagattaaatatgtgtaataaactaataatatgtaacatatgacaatgtatattagttgtcatctttttgtaacatttgggagttacttgttactatgagtaacctccaccatcatcaccaacattaagagtgtaaaaagatgttacacctcttaatttgaaattcttaatgctataggagttatggtgtgtgtaggagttacatttgagtccataacatctatggggttatgagtttgaatttcaaatggtgatgatatcctaaacactatataaagaggtctaaggtgctcattttggagatgaagttttctatcaagaaagcacattgctagaaaaccctaaggcttgataattcccaaagctatttcctagagagttcccttagtgctta

SEQ ID NO: 402919 - DNA, 674 bp, Cannabis indica
gtgacatttcttgtagtgactttatataagtagtgttttataataagttagtaatattttgtagaagttattttcttaagttatatgagacatgatacttaattacactaataacagtatgacattgaagaaagtactaaacaccaatgatacctattagcatttctctattgtgtgagtattgaataaaatttggtgccaatttcattttgaatagggtaaagactattttagaccatgtattttgtaaaattaccgattagaccctctattttgttaaatgataaaatagatcatgtgttttttaaaatagtatacaaataggactttgaactcaattttcgataattatatttttcaatatttttaacttgacgacaattcctaacactaatatatgtaaaaaagaaaatcagttttgtcataacacatctagatcaagttattattaagttttattttgacagaaaaatcaatttagtgtcttatttgtactattttgaaaaagacagtgcctattttgtcatttaagaaaacaaaaagtctaatcaataacttttacaaaatatacaagatacaaaatatattttttgtttaataaaaataaaatatattatatgtgtactttctttttggcttccaataattaacaaccgtcaaattaacttaaggga

SEQ ID NO: 402920 - DNA, 707 bp, Cannabis indica
aatcaaataagagagtgactatgacaaatagaacgagaagaaacttggaaaattttctataatttatggatttcgaaaaatcatcaaaaaatatttttattaattttctaactgcatagttatcattaaattaataataattattaaaagaagtcaaaaaattatttaaaaatcataaaaaaataagaaattaaattctaagcacgctggaaaaaagaaacgtcgaaaaacaacatttggcatggccccacgcgcccacacgtgcctcctacgagagtgggcttcgcggctgagttcgtcttcaacctccagtcggtgctccagtgggtcgggcgacccgattcgagtgcaggcgggtcggagatgttttctggccaaaaaacacgatgaaaacaacgacaaaagaaggggttttgtttggaatttaatttctaatcaatctataggatcgatttcgattataaatggcgtaaaaggatagatcggattgtgtctaatccaaaaactaagaacaaacaaaagaacccaatttcgctatgtatgtcatccaattcgaaaaataaatgatgtaaaactattgtggattattcattaataaggtttgcacaatcaattttattcaatagtcaatagaatttaaaaacccaaatttaattttataaagaaaatacatagaccctaaaaatttaatcttaaaattctcctaa

SEQ ID NO: 402921 - DNA, 752 bp, Cannabis indica
ttgtgaaaatatcccacaaaaattgcattaggggtgtggctgcccaggaggatgcacgtgcagcccaagaaggctgccaatagcctaggacgtgcggtgcaggatcagcaagccaattctgcacacggaggaccctgaatgtagggtattagcgcgcgcatgctactgtccgaacacgcttgtgaccaaggcttcagacaagttttgtctgcctcacgcgcgtgtgggaagcctccttgtccgagtgcctggtgcactcgatgcacgagttcgacacccattcaacctgaaacttcaaaattcataactttctcaatttttattagaatcgagttccgtaaaaaccaaaagtgcttaatttttcacaagaaatccaaataaaatattttcataacaaaaataaaattattttcatggaaaaattttataaacaacattcaatcgccaaataacatataaaccaacatgaacacatccaaataaacaaacaaacaatattcatcgttttaaatccatattttatgaaagtaaatcattaccatggctctgaggccagttgttgggaatattttaagaggatctagatttactaacgagtatgttgattaacatcctaaatatgaattctctaaaacaatgaaaataaatacataagagtttaagaaaactttacattaattgcagtggaatataatgactcttccattcaagatctcttgcccttgatttctttctatagcagaggattatca

SEQ ID NO: 402922 - DNA, 456 bp, Cannabis indica
tatatatatatatctaattttaagcttttcattaacatcaaaaattaaaattgtttatgagaattgagaaaaaaagatattagatatattttgctatcatctatatttttaattttttatatataaaaattaaaagaattggagaataatatcattcattggaatttcttgagataaatttatcaacggttaatagaaagtatgtatttgatatttactctttgttcattgtatctatattgtttattatttttaatttcatatatgtatttttgttatatttgatctattagactactagccaccatcaatcatattcctatctcaattttttatgtttgacaatgtagttagtattagtagttagctagtttcttcttctttgtctttttaccttttatttttttaaaaaaaaactaatatacctatttacataattaatgctgaaaccaatgg

SEQ ID NO: 402923 - DNA, 535 bp, Cannabis indica
aaaaaaaaaaaaataatctatatgcttttctacttaattaataaataaaataaggtttaatttggaacgctttgggtactggggttgagcttaattaaattggacttttttttaaaaaaaaaaaatcacattataaaaactcaattgaaaataattaagaatatcattgatattgaacacataatgtctaataattaaaatgtgaggaaaagtaacctttataaatatctctcaccaatttaatattaccgtatactattatgtatgattgatcaatcttacagggttggtctctgctgccagaagattgggttaaaatcaactgtgatgttaaagtcggaggtgaaactatgtatgttgttgcgattgcaagaaaccataacggatcagttttgtgggtggcagcaaaaaggctacacttctctgactcacttgctggagaagtcgcggcctgtcttttagctatggagacggcggtttctttgcatcatccttttgttttggtggagagcgattcagcgattgtaatcaagaa

SEQ ID NO: 402924 - DNA, 663 bp, Cannabis indica
gaaagactcctaaagactggatcagacttcacttggactaaaaatcaagatagagacaagaggatctattctaaaatagatcatacatttgtgaatgaagattggaatgataaatttcctttgacaaaagctcactacagctgggagactatttcagaccactgtgcttgtgtgatttcaatggctattgatgagaagattgtaggtaaaccattcagatactacaatttctgggctgaccatccagagttcaaacaagctgtccttgaaagttggcaaaaacctgtgagggccgtggggatgaaagctctatctctcaagcttttgaggttgaaacatgtcatgaagaagttcaatagagaagttacagggatatagggagaaggtattatgaagctaaagcccattttttgacagcaagaatgcaggctcaagctcatgctcaagacctgaattttcagcatgaagagaaagaggcagccacaaacttcatcaaccatgaaaaattataccatagtttcttgagacaaagaagcaaggtgacttggcttagcaaaggagacgagaataatgcttactttcatgctagtttgaaaaaaaggagggtagagaatagcattatatcttttactaatgaacaaggggtggtcatagacaatttct

SEQ ID NO: 402925 - DNA, 1699 bp, Cannabis indica
aaaacaaattacttagaagaatagtcctcatgaagtgaggctactttaagacaattgcctataacttgatccaaagaagaataggccagaagccatgcatatatacatagtcaaaaacaagtacaaaatcagcagattacatattttaacaatagcataagcagagaatctctattacagttccaacctaactgaaaataatttctaatgcattacatttcagtataattactaatttgggcaaaaaataatacatatatgcaataggttaataattattttgggcaatacatttcagtataattacttgagcaaaaaaatacaggtatgcttatgatgctcaatgcccatgcaactttcccaacactattattaaggtaacaccattaataaataattttatcatctctatctatatcatatcaaatattattatgtgaaaattacctattatcattattattattattattattattattattattattgacttatttttgatggtttgagaataaatttgtattggttttgtttagaataggtggatatgtagttaatagtttgatgatgttgataagttggatgattggtgggataaggaagagttatgtagtgttttaatttttatgtgtgtagtaagagaggagacaaagtagtaggctagtagtaaaagacttgctttggctactcaagcttggttacaatttggaagtttgatggggtatttatagttgctcaccccttacactttatggctagaattatttcttctagatccttctttactagaagaaattatatccaaacaaatctaaatgtttctagaatacaacataactagtatattctagatttaatctaatctagaattctcttaagttcttagattaattttcttcaagtgtatagaaattctagactaaatgtgtagaatgtgtagcacttttcatcactcctccttggtacacatttcggtaactccaatcatgtctcgcagtagctcgaacttgcctcttggtagtgcctttgtgaatatgtctgctacctgctcttcagtcttgcagtgcttgagctcgatttctttgtttgcttctgcttccctgatgaaatggtacttgatgcttatatgtttagttctactatgaaatactggatttttcgccattgctatagctgatttgctatcgcaatatatctttgtagcttcttcttgtaattctcccatgtcttcaagtattcttttgagccatatagcttggcttgtagtcattgctgctgcaatgtactctgcttcagctgatgattgtgcaacagttgcttgcttctttgatgcccatgaaaatattcctgatccaagtgtgaaggcatatcctgacgtgctcttcatgtcgtccatggatcctgcccagtcactatctgtgtagccaacaagttttgagtcacttgtaactccgtaccatattccatagaattttgttccttgcaagtatctgaggattcgcttggctgctccgtagtgaacttgacttggatcatgcatgaatcttgataggagactaactgcgtacattatgtctggtcttgtagcagttagatatagtaggctaccaattagacttcgaaattttgattcatcagctttcggtgagccatcttccttcttgagagctttgttattgtctaatggagttgatac

SEQ ID NO: 402926 - DNA, 756 bp, Cannabis indica
ccgacaacctgcagagtccagggccgggtttgtcgactcttgaaactacacatctctctcttctctctctctcgacccctctttattctttttcctttttctttacgtccagctcgaccccaaaccaccacccctcgccaccatggcttgagcgaacctccgatcaactttcaaatctggtatttttgtgtttatttattttaatcgattttgtattttggtttagggtaattttattttagatctagacttgaagcagaaagaagaagaaaagaaaaaaaaaaatttaaataattttttaaaattaaaaaaagtaaaaaaaaaaaattctgattttttgaatttttataattattttttaaaactatattacgtggaccactaaaaatttgccaaagtgtgtacacgtggacaatccaccgtggcacttaactgtgatttttggacggaggtgtgcaaaacaaaacgtaactagggtttaggtagtttagccgccgaaaattcagtttttgtggttaaatgttacaaaccgtaaaattcaggtggtttaaccgccaatattcctattattaataatattatattattatatattattatcaataataatattctattattattaatattatattattattattatatataaacgaaagtttcgtttgaatatatatatatatatagggaaagactatggtaggacatagtaagagtttcttacgagaacttttttgaccattaaatttagatcat

SEQ ID NO: 402927 - DNA, 589 bp, Cannabis indica
ctaactttcttgaccagtctttccttgatctctgcactgttttctctagaatcatctttatctcccgattagaaatttcagcttggccattactctggggatggtacggtaaagcagttcgatgtcggacaccatatcttgaaaggagtgcttcaaactgtttgttgcagaagtgactcccttcatcgcttatgattgctcggggagtaccaaaccgagtgaagatgttcttttgaagaaagcggagaactgttttaccatcattctgtggtgttgctgcagcttcaacccatttagaaacatagtccacagccaataagatgtattgattgctaaaagatgaaggaaaaggacccatgaagtctattccccacacatcaaacaattccacttccaagattcctgttaaaggcatttcgttcctccttgagatattacctgtacgttgacagcgatcacatgccttcacaaaagtactagcatctttaaagagtgttggccaaaagaatccactctgcaacaccttagcagcagttctagtcccactgaaatgtcctccacatggtaaagcatgacaatgatttaggat

SEQ ID NO: 402928 - DNA, 1153 bp, Cannabis indica
gatatttcgagcagcatccggcacttggagaattttctaggagctttccctaagtcccaatgtcaagggtggatggcaatacacagggatttgttgaaactgagtataggtagcttccatgccctccacgaagtagtactcgtcaacaaaaaaccccaatcttcctaacctccgtgtccatggtacccgtcagccacttgtaatccaactgagagaaatagaagtacccagacttgctctgcttaggggtagacttcaaatcaaaaagccagttgctgtcgtgcagggacgacacaccccatccttgagtggcgtagaggacgaacagggcagataagtacttgatgaccttgggtgtgaactgggtcggacagcggcagaaataatccgcaactctcttgaagtacgagtgtaaaggtagccttgccccttgcttactatgggcacccgactaggcacagtgccctttctttgggttagttgcacgatgattcggagaagggagataacacttaagtccgcctaggtacccaaccttattcaaatccctcattcggccctcagttatgttggacagaggacacacccatctggcccctaaggcacttttcctcttgtgggggactgcctcggtaaactcctcggtgacatagtcttccccctcaaccaagacgtcaccttgctcggataccgattccccggcctcattatatcctccaaagtgtggaggcccgactactccttcctcctcagctttggaagggctatcaggacggacatcgtcctgctcctctatctcttggacctcaatgtccccctcgtcatcctcctccacaatgggtagatcctgttggcacttggcaacgtggcaagctgggccatgtgagggtcagatgcattaactctccgcatcatctactttgggcaggccatcatccttctctttgacggacactggtgtgtatgccgcgcaacagtaacggcagggacaactattggaataccaaagttaccagaacttggacggcctacgggaagggtatcagcaacaccaggtcgaacaatatacgtcaagttggatggaagataacgtctccaacccttctttagttccaaaagaaagtgacaacaaccttctcctacgatctgctcg

SEQ ID NO: 402929 - DNA, 1040 bp, Cannabis indica
catagtgggcatcttgaaccctttggggtatggcaatgctgagatgtgaggagcaaaaggctcaggttcctcatcaaaatcgtatcccccgacacttccttcggcattcattaactgctgaatttgttgttctaatgctgttattcgtgggtcatttaccacaggagcaagagcattgagaccggctggtggaggagcattcacattaagctggggtgcatattctccttgttgtggaggaatgtcatactgtgcccgataaggagcctccctctgtgcgtgccccctgttcaagtggtctctcaagtcaggttgtcgcctttggttcagatggtcccgaaggtcagagctccttgcatcacgtggggggtatcgagggtgctcctcataatatggaggaggtgcattgtcttgaacgctcacagatcggctccttgagtcggaacggtaactctcccccatgactcaccgtcctctgttgttgcggcccccgaggtgcaggccgttgttgggcatatgattgtgttgcggcagtccgagatcttgataagtaactatcgtctcggggtgagtggggtcgcgcacgctgtggtctagtctccctgggtgctggtctcggacggacatagttatcacgagagatggtgcgttgtctttcccgtccatatcccctaggttgaggtacctgtcgagcatggttgtctcggtagtcttcttgcccgttttgagggggtcgaggcaagtcttgacttggaaggcgactgggaggtgcttccctctgtcgtgacctctcccttggggctggttgatgtggtgcttgtgcattagtacgtggaggctcaggatgccttattggtgatggtgggaacctgattggtgaaggagggttccgaacatgatctcttcccctctcgtccacaccaatatccctaggtgctggaagtggttgagatggtgggatcccattattgtgtgttgtgcccctctcctcacgggagtctcctcgtgggggatctacagcattgtcttgtggggcagta

SEQ ID NO: 402930 - DNA, 688 bp, Cannabis indica
ataaatcttttatagataaatactttattaaaaaaatttatatatatacgtaaatatatatgtaaaaataaaaaataaaaatatttaatatacgttaatttttgaaaagtaggacaatatcaaaataaatatttaaaattaagacaaaaaataaatcaaaaaatgtaaataaaagtcaccaaaactactattatttaaaggtgggggttagcgtttgaaataaattaaaaattttgagaacatttagctaaaaaataaaatttaaggatcaatttgtcaaaatttatatgtttaaggataattagtaaaaaaataaatttatggaccaacttactaatacttattatataattcaaggacttaccatacaaataagattttttttttttcagaggtaggctagtattacattttattttatgtttgtatggataattttttttatagagtagtgtaaatacttgtttatttttaacaaaaaggaaaataaatttttatcaaggtgttagagcacctccaaagaagctgcaaataagtggtatagtgtgtatatatgttctaaggaggctgcatatcatgcagcattttgatgttttatgtacagtgcacggcatatatgccgtgtactgtagtcacagcatttcttttttttttttttttaattatttatattattgtatttgtaaaa

SEQ ID NO: 402931 - DNA, 704 bp, Cannabis indica
ctaaagcccaataagcaattcaggcctagagttaaacttcagcccaagtctctattttaagcccaatctcatgtaaacctaaccctaagtgaagcctataaatagaaagagaagagagctttttcagatgatgactttctaagctaaaaaattgtaaaaatctcactttttcttgtcttttattttcaaaaattcagaggccattatttcttgaatttcttcatgaaattttgtgctccttggtgttgagagcttgcccacacatgtcaaagtaatacctagcatagtgaagaagattatgtagttcaatttccattagaagaagaatccaggtttagatcttggtcataatctgcaattgaaaggatcaatggttagagatctaaacggaaggagtcatattattctactaccatcactgtaaggattactgaatccctaatgtgtttatttatcattttttggaattttaaatttaggatgttagattatagaattataatccaacatacatgttagtatatcaagatctttgtaaaatatttccaacaaaagcatcatcaagagcataaaggctcttaacataggtcacaatcttgaaatcgtgctcatctcttgctaattgagaaactgaagacataaactgttagaataattttaccgagatctagatttattaccatgtatgttgttaaacatcctaa

SEQ ID NO: 402932 - DNA, 672 bp, Cannabis indica
gtttcagcaatgtttttcttcattctgccaaatttatgccgatgccactgttgtaaggatgtagcacatgaatccaaatttgacaataaaccttgaatcgggtcagtgaaagtggattggttccagcattgattgattatctctttgcattcggggtctgaaagccaaagcttttcgaaacgaaagcggcttcgtcttttttcttgctggtccgtgagtcccactggtgtaatagtgactgcaatagctcggtgatcggagctatagtagtccaaatgatgagccgtgggggtgttgaaagaaatatcccaaaggttgttaacgaaacaccaatctaacctctcctttacagtgttcacagccgagcgattctttatccaagtgtatgggtcaccctcaaaagaagtttcatgaagtgagcaatgatcaaggaccttacgaaaagtctccatttgtttctcatttcgaaggcttccaccagatttgttggagttggaaataatttcgttgaaatctcctattgtgagccacgggagtgtcggagctacatcagccaaccgttgaagaagagtccatgaagcctctttgttttgagcatgtggagatccataaaaagcagtaaaatgaagacacggatcactgccatttttaagataacaatcaaagtaagta

SEQ ID NO: 402933 - DNA, 1041 bp, Cannabis indica
cacaacaaaaattacttgtcatttaatatttaaatacatgttgctattattttattttagtcagtgttgttgctaaaaacacatttagttacaataaattgtgatttttgtgattaataatatttttagccacaaactttttagtgataacataggaatgataatttatatgtttagttgcaatttttttttacttttagtaacaaattttgttgggactaaaaatacgatttcttgtagtacacaatcttgtattatatcataataaaattatttttgtgtaaatataatatctatttttggaataaaattattaattctacataaataaatttataaattatatatatttttagtaagatataattattttttatataaaagtatacttttgttaatgcgagtcttagaacatgtataccaattataatttagaggttatttttatttataactggtctaagttgggactaaattttttttataatagattagaggttattcttgagtagagtattattaaataaatgtttcactgtcatgggcggctaataacctgtgcaacctgggcagttgcatagggccccaaaataataggggattattattattattattattattattattattattattattattattattattattttgaaaatataaaaagaattaatattgagaataggaaaggttgttattggtagttttccatagcataacgttaatattaatgttatgtacaattattatataaatacataattaaaatttccatttttatctcattcttcctctttctctcattctttttttttttaagaaaaccagtatcattctcttcctttctcatatttttaaatcaattttagtttttggctgccatcaattctcataaaaaaaaagccaggtatatatatatattatatattatataatataaatgttacataaggtttatatattgcttatatatattctctttctctaatctctataatatatatatatatatatatttattttttagattggagc

SEQ ID NO: 402934 - DNA, 1930 bp, Cannabis indica
tgactggatagtcaatgtggtatctaaggggaccattgaaattctgggaaaatattactttattaagcaattatgaaaaggcgtactcacccgaaatggggaaaagcttatgaattgagatgccatttaatggacatgtaattcagtgattggtgaatgttggatcacaaagtaggttgtttattaaacaacgagctatataatgcagtgtaaaataagttttaaagtggttagccaagcatgaagatagtgatgattgcaaggaagcaatgatagcgtataaactggggagtgaaaccttagtggtaatgatggaaaaagaacacaagagtctcagatgttgatgaatcagtatcatcaatgggagagtcactataattgatatggtagttcgtaccaaggggttatcaagaaaataaagaatgcacttgaggtaggtataattctagatgtgttggaaatgattatcaagatttctaccgaacacagaaaagaaactttaggatcgaggaatgatctttggttaatagttattagttaagaattcaggagatgggtatttccagtttacttatgggtacctggtatgtgcagtgttgcctctaccgtataggtttaatcaatttactttataacgttggctaatatttaatgattgggaaatttaaatgttctgtcaattcaagggaaattgatacaagttaaaataagtggagatgaacaagatttaagctgataataagatgggaattccttaagtttatgtgaacaaaaccgatgaggaattgcaagaggttaatgaagggtgtgatggaaactgaaatttattaaggaaagaatgaaagcaagaaatacaattaggaacgaaaaagaagcatctaccttttcatctcgaaaattgtacgagtgaggacaaagtacgctaaaatgattcatattaggatgcaaaattgatagtcgttctagagatttccaataggagagaatatgttaacaagtaaagatttacaagttatcaagatgtggttatgttagtaggtgaaaataagaaatgctttaattgagtatctatcagaaataagtacttaacttgttactaagtgaagttagtagatcagcttgggaggtctcataggaggaataaaaagatataattataaattatggactatgggatcttatgatttcgaccaagtagtagtggttggacatgctgagttaatatgttgtctatcggtgtagaaaatttatacaataaatgaggatatggaattcataagaaggaatagtctaatcttgtgaaattacaaggttgatatctttggctataatgttaagaattaaagaaggctattgagaaccatggagattaaagcaaaagtagtatgatgttttattcttgaaaggtgggtaacctgagaagaataatggaatatttgataaatgtaggggtgttcataaaaaccgataaactgaaatcaaccagactgtaaccaaatttttggttccacgtcatcactgaatttggcggtcggtttcagttttggtttttttggcatggcggttggtttcggtttttgaaataaaaaaatggttaaaccaaaaaattgccaaaactgcaaaagaccgcaataaactgccaaaaactgtccaaaactgccaaaccgaaaaagcattaaaaaatgccaaaaaactgtacggtctgttttataaggttataatttctaaatagtcggttacaatttttgtaaaataaaaccgtaaccgaccggtcggtccgttagaaaattgtaaaaacagaccataaccgaccgattttcacccctagataaaggttagattatcttagaataatctcttcccctgatgaagtgtatatctaaaagtgataattaaatgtactattggttaggtactttaataagtgtgg

SEQ ID NO: 402935 - DNA, 673 bp, Cannabis indica
agctcgggaatagatgtaagccaccttcagaccagcctacacagaaaaaaacgattagagtctgagccaagtaaagaaggattaaaggaaactgtcaagaaagactcacctttgtaaattctctcaggactcctcccattagcagctccagggaagattcgttgtgagcgtcggccagctgctcactcacctcaggaaccaaccggttcatgtagtgagtgaacatctccttacctctcttagcttctggatgcaatggcaaaggttgggtaggagcccacatctactcagatccgctcttggccagctcggatccgcccttcgactgttcaagcctgtctgagcttcctcctcgaaagtctttggacttagcagctttcaaagctgaagggtccacgacagttagctcctcaaaaagatcaataacctcctcagtcggtgccttttccttggatggggttgcctcactgcccctagatttcttggctggaggagatgagcttgagcttcctccaactctcttcttcagagcatcgagcatcttctgagacatgtctgcacgggataaaagcaacgtggttagaagaaaaaaaggcatcagaaatataaaaaaaacaatgataatcaaagaagtttaaaaataagaatgaagtatcctgcgcttcatgagaag

SEQ ID NO: 402936 - DNA, 556 bp, Cannabis indica
ggtgggtgtttgttaaactacatgttcctataggacacatgtgtaaataatttaagtcttattgtttatattattatttcttaaattaaaatatataaaatttgttaatataataatatctattctatataaatatataaagtgtgcctatatagcataattataagaaattgatggtaacttttaatttatgtataataaaataaataaaatagatcccattaaattaaaaaaaaatacgattaaatttttgctgttgtacatttatgattgggtttttaccctcttaattatttattgttaaccttttcctattataatttggacattcccatggcatcacacataatattccaatccatacttctcttctttcttattcacaacttaataacaaaatatataagtaattataataataaaaaagaagcgtgacttttatcaaagttcacaaaaccaagcatcaatggcaaaaaaaacccagcaaagtttacaactaacaaatgattgtaagtactcgtcatatgcattagtttccaggagcaaagttttttaa

SEQ ID NO: 402937 - DNA, 706 bp, Cannabis indica
attatatagttaactaattaatgtaaataatgatatttgtattgataaaataatatgcatatatatatgttatgatttacctagaaacattaccattaacaagaaaaaattagttaaatattctaattttcttatataattataataatatggttttaatcaatctctataaataattatatattagataataattacataataaatttatataataattatatttgtattaattaataaaaatatattaatatgtcgcgttgcgattgactagcgatacttcttaaaagctattatattaaattatatgggacccgatacttagttgaactaatatcgatattgacacgtaggagagtgctaggcaccactagtgccttctagcatttccctatatttttttcccaaatctacttttagtcttaattagaggtaacaatttgtcatttgagggtgatatttgtcacacactcacactccacaaaccttcaaaaaaaaaataaaaataataattcacatgttgtcaattttgtttttttttgataaaaaataaataaataaaagagaaaaagaaaaagaaaaaaaacacaaagacaaaataagaacagagagggagaaagaaaggtgaagtgtcaattgaaggagaggatctcaaaaagagatgatgggcttcaataaaatatattttttattttatttggtaggg

SEQ ID NO: 402938 - DNA, 577 bp, Cannabis indica
tctctctctctctctctctctctctctctctctctctctctttaattttttccaattatcttctttttttttcaaatttttttttaactttgtagatatgtaaatatatataagagtaatttgcaatgaaaatacttaaattttactccgagtaacaaataaatacctaagtcatattgccaaaaatatgacttaggtatttatctgctactcagagtaaaacttaggtatttttgctgcaaattactctatatataataagtgtacatttttatatctcattgttaacactctttctctctcttacaaaaagaataagagcactcctatattttttttatctttttacatgtgttgcccatgattttgcccaatatacgtggaccaactggacgaggacacgtggatcaaacaacttagcattcgaactatttgctaagtgtttatgtaataaggcagcatccgggacatgcgtcccggagaagacatagggagccccatgcgctcccagaagcctaagtaatgctaaggcatctccgcgaggtgtcaggcttcccctgagcaatcaagtcgcatt

SEQ ID NO: 402939 - DNA, 527 bp, Cannabis indica
caaaatataagttttatttcagtttatttataccacggagtctggtagaaaatcctaaattgtcttatatgaatattaagcagtgttttaggataaacactttattggtttatcgttgttgtgacatagggccgagatcattggggatcgttctccacttgggttggccaaaatgtatgaacttggattaaaggtaagaaaagtatattgtactgcatagaacgttgtctgtaatacaattagtattgttataaatgtattaatattgagatatagttaatattgttatataatgaaaaggctaatcagtagtaacgataatgtgataatattacccatgtgatatataggctcacctgattaggtgatgcaattttcctggcgacgtactgggcgtaagtacgggagtcagtgatatatgatgagtgccacgtataggtacgacctcaccctattaggtaatgcgattttcctggagacgtactgggcgtaagtaggggcatcagtgatatatgatgagtaccaag

SEQ ID NO: 402940 - DNA, 1044 bp, Cannabis indica
ttttgttaacgataataagcctgtgttcgtgaaaagttttgcacagaaataatagaaggtaaaagaagaaaatataacatagagttttttacgtggtttcgcagttaaaattttgcacagtccacgagtcaatcttattcagattattctgatacaaacaagggttcttttctctcaagaatttttttcccttacattctgccctatttatagtgatatatggtggtagttaattacaattagattcaaatcccacaataatatttccccaaaattgtgggctttaattatgcaccacgtatataaatgtgattattatttgaaaatcatacaattgtgatttatccgcttttactgggtcaatgctgacgtggatttagatacgctgctaagtgtatctcgctgggaacttgaatagcaataataatcctggcagcgagctggagcttttcccatttctttccgaggttgacaatgtaaatcttgcatttatgcgtgtgaagaattaacgctccatctgacaatcgcagttcttggtgataaggtgaactttaacagcaaccatcatttgaatgtcgacttttttctgagagagctgacttgacggggcagcgaatcttattaaaatttgtgttagctgattagtgaaggtaccaagaatatgccttcctatagcgagatggatgcctcgctatccgttgttcagattcttacaactattatacttagttggtatgatgtatattatacgccaagtgttctgactgccaacacatctcgtcaacacctttttatacgcagcgaggttgatgcctcgctatgcattaatgatgtcatccttatgattattccttctgacgcaaaatggtttctcatgaatatgcgaatcaatagtttgtacatctttgtctcgcttatgactatacagtcagcgagttatagatatgctctattaactctgcatcgtattataccgtattgtattgtatagtattctattgaattgtattttatgcaatatttttatgtaaaactatatgtggt

SEQ ID NO: 402941 - DNA, 958 bp, Cannabis indica
ctaatccatattctaaaatgcagccattacaaattcagtatagcattccatcctcagacaaatggacagtctgaaaggaccatttagatttttagaagacatgctacggcaatgtgtgttagactttgaaggattgtgggtaaagtacctttccctcgtatatcaacaactatcagacaacaatcaggatggctccgtatgaactactttatggaagaaagtgcagatcatctattcactaggatgaattaggtgagagaaagttcttgggtctcgaagttgtttagaggacaaggaagttgataagattagagcgtgaatgctcgctgctcaaagtagatagaaaaatgatgcatatccaaagcaatgggatatttatttctaggttggagatatggcatttcttataatatctcctatgaaaggtactaaacgctttggtaagagaggaaagcttaacctgaggttcattggaccctttgaaatccttgagacgatagggcaaatagcgtacagattggctatgcccccagcgttggcagctctacatgatgcgtttcatgtttcaatgctttagaaatacaagtcaaatccgtaccatgttctgagttatgaagcattggaactacaaccagatctttcatacgaggagcagccagtgcagatactagatagaagagagaaagtcttaagaaacaagacaattgcactaatcaaagtattattgttcgggtaaattttaggacgaaatttctataaggaggggataattataataccctaaggttaaataaccagattagcaaccctaactagatcaattatgtattaattaggaattatatgattatataatttaatatgtaaaactattatggtgtattgcattttaagacctcgttagtgtatcatgggcatttttcgtaattttgactcgagaagagtaaaatcgtaattt

SEQ ID NO: 402942 - DNA, 769 bp, Cannabis indica
tccaggttggcatcttgaatttgggccagggcaaggcattgatgtatgctgagaaaggtgagccccttaacctatccagctcaaggtctgatggtttcgagttagccaagcccttgagcatgtctcgtatttggtccaactgtgcttgcatagagcaatcttttattgtaggggcctggttgattggcctttcttgattaagttgcaaccttggattggcaaaagcttggctacccataccatgggagagggtatgttcaaggccatccagctctgagtctggtagctgtccatgatcgaccagccctgtgctaggtagggcttggtcgctcgttcttccttgactagctggtggatctaactgcttgaggtgattgtgttaactccttgaatttgttgttatcttgtgtgtttccatcaattcctagtcctaattggttaaagatttccctttgggttactccatctcaaatgctctggatcgggagttcgccctgttggccgactagaggtgcacttctaaggtgctgatcgaccatgggttggacaattgagggtgttattgtgctagaggtccctggctgggccacagaccaatggttgccaaagtctggatgttcttgccactagatctgcatggcaaggcttatcctccttctagttgggtaaggtttgtcatcaggtcctcgatctgacagttctttcattgaactgccttatcaggttgctagcttctctgttgcggtagtctaattctgcctgatgagat

SEQ ID NO: 402943 - DNA, 526 bp, Cannabis indica
ttataatatgtataaagttttaattgtatacatacagttctatcataaaaatataagccttacattttaataaccacatgatctaaaatcaatggtcaaaaaaagttccctaccggtagggaacttatgctaagtcctaccatagtcttgcccattgattatatatgtcctcatctacctctcaatctcaatggtggaaattgttttgatctttgcaactgtctccattgcatggagggtgatatattgtaacaccctattagtttacaattacgttttttttttttaattattgtacaaatctttgttaatcaaagaattttttgattttttttttttttattaattaacattactatataatcaaaatacaaggtttacaatatcccaacgactaataaaatcaatcaaatcaaaccaagtctacatagacacataaaatgaattatattaacataaaatagatatccgcacttgtgcggattgaattgaattggaaaatttaaaatccgcacttatgcgaatt

SEQ ID NO: 402944 - DNA, 888 bp, Cannabis indica
tctctctctctcttcttcttccaatttcgagataccctagtgaaagagtagtgcccacacacagcaagtggtacctcaatcatagtctggaagatagtggaggatccaaatcaaagagaaggacattcggactcagatcttgataatactctgcgacagaaaggatacaagggttagagatctgagtggaaggagacatattattccgctgcaaccaatgtaaggtttccttaactttatatgtgtttattatcgttttagaaagttcatatttaggatgttaaataacatacttgtgagtagatctaagatcctggtaaaataaattccaacaagaatgagattcaaggaagcaagaacacaaagaaataggaatcgggtaggttatgaaaataaatgtcaaaggaagttggtttatataaacatatgagagagaatcaaaagaggaaactaacttaaaagaaactaaccagcccacgaacacaaagaaaaccgccccactatttcctaaaaactattttttaaaaaaaataaataaaagaaaactagaattaccaagttactttccaaaaatagacaattatgttgaaacttaccaaacaaagcacaaaattttcttagcccacaaactaaatcaccaacgcctccctctcttttatttattattttacttttatttttatttttgaaaacccaaaaataatacaaaataaaatacccacaataaatataaggtaatctatagcaagcaactaatcaaaattcataacaaatgacaaatatacatgttatgctttcaaaagagaatatctaattagtatctcaagaacaaaccataattagtagatgttgaggaaaaagatatgatgttactaaaaaatgtgaacc

SEQ ID NO: 402945 - DNA, 748 bp, Cannabis indica
gatatcgccgtactccctcttgaacagctttctggtcgctcgctcaggttgttctcattggtgagtcgcttttctctggcttttcttgcatatcgctcctgcgagtttttggagtcacctgcgatatggggtccgcctatgatggttaggatgttgcgaggagttctcgaaccactcgcattttgattctcttctttgtcatccgctcggggatgactttcctcattcttcttgtacttgcaaaaatttcctcttctgatcagctctttaatctcgtcctgcaaaaaccaacactccagagtagtgtgaccaatatcattatggtacttacagaatcttttagggtctctcttgtcgcggtttcccctgattgggggaggcttcttgaagaccccatttttctcttcgacggagtagatatggtctccaggtactgccaactcggtatagttcacgaagcgtgggccacatttcctttttggggaggattccttctttggaggggacttggctaacttcagacttcgctgtctctgtggaatgcgtcttcttgggcttcgtcctctagaattcttccctctaggactgcgagatcgtgatcgtggaactagtgatttacgcttatctttgcctttctctaactctgctagagaattctcaatcctcttatgtggttctgccatggcaaagaactcgaccagcgattccggtcttcgagcttgcaattccttccagaaatcggttcttg

SEQ ID NO: 402946 - DNA, 670 bp, Cannabis indica
caaactattgactcatgcgttgatgagaaaccattccacatcagaagacacaatcataaggatgacatcaataatgcatagcgaggcatcaatctcgttgcatataaagaggtgtcgacgagacatgttgatgttagaacacttagcgtataatatacattataccaactaagtataatagttggatgaatctggacaacgaatagcgaggcatccatctcgctataggaaggtatactcatggtaccttcactaattagctccagacacctttaaatgagatccactgctctgacgagtcagctctctcagataaaagctgacattcaaatgatattgactgttgaagttcaccttgtcaccgagaactgcgattgtcagatggagtgtaacgccctaatgctaaggaacgctacagtgctttttcaattacagtgcaatctttgctaataaaaaaattttcttgaaaaacgtgtcaaattaaaacttttatattaattagtaaactttataatacactaaaatatttacaagtgtcgagatcccgttttcaaactttttaaagttaatattccaaaatacaagtattataggtcgcacagtgactacaaaataaaattctcagatgtcccgagaccgaacactccaggtcgcgctgctttgacatgta

SEQ ID NO: 402947 - DNA, 1077 bp, Cannabis indica
gcctccacctgagctgtcagcttagttatagtatccacttcatacatacctgcattttttttagatggacctctttctgttgaccatcattggttagtcatggccatctcttcaagtaactcaaaggcatcattcacacttttcctcatgaaagccccaccaactgcggcatctatgagtgttcgagtgtcgttaatcaatccattgtaaaagttgtgcacttgcagtcacttctcaatcccatgattagggcacttcctcagtaagtccttgaatctctcccaggcttcgtaaagagattcactgtcttgctgggtgaagttgttgatgtcagctctcagcttggcaatctttgcaggagggaagaacttggataggaatttcagggccaattcctcccaagtgttgatagagtgagttggcaaagagataaaccaacttttggcttgttcccttagtgagaatgagaacagcctcagcctgatggtctcatcgctaactccgttcattttgaatgtctagcacagttcttcgaagtttgcgaggtgcatgtttgggtcttctaacggcagtcccccaaactgaactaaagattggaccatctgcagtatgggtggcttgatttcaaaagtgttggcgtcaaaagcaggtggccttatacaggatcggggccctgtcaagttaggaagcaagtaatccctcatgctacggtcattgttgttgtgtccattagcctggtcttctacacctcctccgttgttcccattgttgccattgttggcatttttagtcatgactccttcttgttcaatctctagtgccactctttccaatttcttccttcttctgttccttctacaaatcttttctatctcagggtccacaggtaatctggcaattggaccttgacttctcataaactattgaacctgaaaaccaaataagaatttgagacaacacagttagtactcaaattgaaaggaaaccaaattagaacaaaatttatttttaataatataaactatcactccccgacaacgacaccaaaaacttgttgcgatattttgcacacgcaag

SEQ ID NO: 402948 - DNA, 617 bp, Cannabis indica
tgttagagccaaaaatgagcaagccatcaacatataaacatatgattgtgcatatatcatttttagatttgaaatagatgcacttgtcactttcattcactataaagccattagaaatgactaaagtgtcgaatttttcatgccactgcttaggtgcttgctttagaccgtacaaacatttatccaacttgcgaacactatattcctggccagcaatcacgaacccttcgggttgatccatgtaaatttcttcttctaagtcaccattgaggaatgcagtcttcacatacatttggtgcacaactaagttgtgtattgcagctagtgaaattaaaactccaatggatgttatcctagtgactggtgaaaaggtttcaaaaaaatttacattctgtctctatctaaaacccttggctactaaacgagccttgtatttgtcaacagttccatcaggttttaatttctttttaagaatccacttacaacctatagtcttccagccagagggtaagtttacaacacaccaggttttttttagtcacaagagagtccatttcatcatctacggattcttgccaaagatccttatctaaagaagacaaaacttcttggaagtt

SEQ ID NO: 402949 - DNA, 1086 bp, Cannabis indica
tttttcctagtagcaaagtacacgttcgtgggagtccgttaactccgtgtacagggtatattagggagtatacccccttttctgtcgtttttcctccgtccgagtgctgcctttggaggaccttttactcctcgagccttgggaaggaccggttagcctggctgttggagcggaatgcgagggggcttgtccatttatgcctgagggattctcaaagtgggacgatgcaggggccatggtctggccttggctatatccaggagtggcagagaactatatgccgctcatcggtggagctgctacttgcacagtgcccgagggctgagccctgggcacgtatcccgctatcccggtggataatatcctccataggccactatttgggcctcttcgaggttaatgtatttttggactctcttctggaagtcctgaaggcttgcagctccttcctgttgtagttcgttctagaatggagtccctgtaaggatgcctgcttggaggagggcaagctgttgtccgtcatcaaccttttttgtttttgaggcttcctcccagaacctctttatgtaattctttagcgtctctgtaggcagctgcttgatgttagtcacggcgctgacctctagattgacttttcttgcagcgacaaactgtctccggaagttggtttgtaacttattctagcagcctacggatcctggctcccatttcttgaaccactcctccgcggatccgcttagagtaaggggaaagcacagacaattagcgtcgttgctgactctcatgaccgtcatgacccggttgaaacgtgacaagtgatcagttggatcagagttcccggtataagctgccattttgggcatcttaaagttcttagggagctctgcttccaggatgtgcttggcacatggctcccggtcctcacagtccgagttggagtcgttgcctttctgtctccgggagactcaggcgatgtcttttcgaagtatggaaagttctgccatgattccttcgtttaacattcccgtggagaccgtgggtccatatttcttttggttcaaggtgatctcggaggtcaccttggtt

SEQ ID NO: 402950 - DNA, 1097 bp, Cannabis indica
aaaaaaaatatataaaaaataattctgctatctcaaaaattcgcacaggggtgatgtggcgtccatctgagtgacacgtgaagaacatttcatcacatggacgggcagtatgcttcatgatataccgtataatgtgatttatcattcgtaaacaactgactgaaaaaaaagctagaaatacccgaacaaggtacatttcgtcactgtcttagcaaaataacagtggcattctgagcatcttcgtcagttttctcgaatggcatggtccaagattcgtcagggaagctagtatcaagatacattctctagcatgacatgatcagccccaccttctgaaggttttcagtactaaagagagttcgcctgtctctctcccatgcatcaatatcaagcaacatggcatcgactctcctcttcatgtcaataagaggagtgagtcttttgaaagagccaactttttggaaggtaatttgtcttgacggaagaacaggagtatagaagtactcttggtactaaaggtcatagttactcttggttatattttctatgaatggtccaaattgatggaagctgtaaaagccttgttctttgcgggttggacttctttttaagtcacaaaaaagttattctcatgagaatttggaataggcaagttcctaaggtggtagaatatgaagaatgtggccagaatcctatatctatttggatttatctggtaagggcaggcaccgaagaaatcaactatggatatgaaccatggatgcaagggcaagtaagcacccacattcatgtggaatctcgactaggcattacaacaagtattttgagagcccttgggagcaccaagtcaaggctttcggacaacagtttcagggggacagtaatcatctcaaattgtatgagcttgaagctcagtgagggtgctagacacaagaggcctaagtttaaaggcttgatctctcaaatcgtcactctcaatgacagctttgagaagctcaattgccatcacttttctaccacgcgccttgtctaagttcttagacttagagcttagctctaatgaactaagccacatggggatcatactcatcaggtaa

SEQ ID NO: 402951 - DNA, 658 bp, Cannabis indica
gagtataaactttgtttttaactactgataatatttttagaggtggtcagcattttaggccctaggcactttggatccatccattcttttcagcttataggtccgagagccgattccattctcaattttgtatggcccttcccaatctggcccaatacccccactttgggttcttgggtggctggaaagacccttcgtaggactagttcgccaatggtaaattttctatctttgaccttggcgttgaaatatttagccacctttctttgataagctgccatccgtacctgagactcattctggagctcgtctatttgatccagcgcttcttgtaataaagctttgttcgttgccgcatcatatgttgcccttctgtgagatgggaacaagatttccacatgtaccatagcttcacatccgtacaccaatgagaatggggagtgtccggttgttgttcttggagtggttcggtaggcccaaaatactcgtggcagttcttcaggccagttgtttttgcaggctagcaactttttctttagggtgacttttagtattttgttgacggcctctgcccgtccatttgtttacggccttgcaaccgtggagaagcttttgacaactccgtgttggttgcagaagtttgtgaattcttcacagt

SEQ ID NO: 402952 - DNA, 601 bp, Cannabis indica
ataagaattaggtatacatacataattgacccatagcaattaccgcaatttgatagtgcaaaactatcaactaaatttttttttcctaggtctctaaatcaaaagtagttttatttatatcaaaatgtatacaattgtgatgtgacaatatgcatttatagagttagagaggagacttagctacataaccttagttggactgggcctactcatcagagactccagttaatagaaaaacccacacttttgcttcaactaaattttacacacacatatgctaagccaaataactattaatcacaaataatatgggctaacacagcaaagaaaacaaaaatactggatttgagtaaaaatttataattttactgccacacagaaatttttataaaaatattatttttttataaaacaaccataaaacaacaaaacatattaattaaaaacaacagtagaataacagtgaaaatttgacacaatacaacgtataaaaaatatacaatatttttaaaaaaaattctgcctcataatataaaagaaaaaaagtagaaaattcgtgataaaaactctaaaataaaatcaataaaaattaatgtaagtc

SEQ ID NO: 402953 - DNA, 646 bp, Cannabis indica
tttttgttaactaataaataagcttttttataattaatatactcaggaattaaatgaataataataattaataataataataataataataataataataataataaatgacaataggatctttaacgtgattttgatgttaattctacatagtccacgagtccattttattttggactgataaatatacaaaatataataaattattttataggatgaataatacatataattctctctttttctcaaattggccatcatttattccttgaattctgtccctatttataggagtctaggataatagtcacttccttgggatcttatcacttgtaaccattcgtaaaatgttgacaatcttcacatttcatatttctgtaatgagataattacaagtaactttcaataaccgcatgtaatatcccgataagtctaatagtaaataattagggtttatatttatatcatgtgttaatcatgtaataagtgtgattatgatcctactaatttattttagcataaaatttaaattttgttataagtgagtaaataagcgtaatttataaattactgagatttatatagattgtgtgaatgtaatatgagctatatgtggataaaaatattttcaggttcggtaaccctg

SEQ ID NO: 402954 - DNA, 1175 bp, Cannabis indica
caagatttagattgaatatattaatcaaatcatatagattgttattaatacttctatgtaataatgaagtttaattctaccatcttgaatttatatttatctcaataatcttgaattattaggaataaaataaatttaggtataagtaatactcgtgctaatattaatgttgcaaagcgcacaaacacaagttgtttaaaaatcaaagtgttagtccaatcataccacaataacaattaaaaattcaataaaaaaatttggttagatgccaatttagaaaaatcactatacttttcttacaaatacccatatcacgtgatatgctacaattgagtaacaaatagccctttgctccctcaaatatcatgcttttgcacattgagatccttctaaaaagaaattagactcaattaacctttcatttcaatgattttacttacaatcttctttgattgagttggagagtaaaaacatattcggtttggcactaagggtcaatattgaatttgaagatatttttttctatgataaattttatttacatttaaaacatttataaacttattacattttaataatttttattttatataaaatttatctttaattgtactaattttttttcttttaattcaaattcttaaaaaatatacctatcaaataaaaataaattatattttaaatattatgataaaagaataaaataaaaaattacattaaattttcatagaaaaaataaaaaatatgtataaaatttagaaaaaaaatatgaaaacaaaatcaaaataattattgaaattaacataaaataatgtgaggaaattttttcaaaaaaaatattaagagtaatttttaaaaattatttatatttattttttaagggtaaataccattttggactttgtgttttacaaaagttattagttggaccctctgttttgttaaatgacaaaatagaccttgtattttctaaaatagtaaaaataggacccctgaaattaatttttgacaactttttttttaatactaactaacttgaaaataatttttaacacgaacagatacataaaatgtaaatattttgtcataatacctttagattagattattattaaatttttattttgtacaaaaaatcagtttagggttatattttgtactattttaaaaaaata

SEQ ID NO: 402955 - DNA, 856 bp, Cannabis indica
acaaaagaaaaaatatattacttgcaattttttttatgtaattaatataaattaagattttttaagaaataaatggtttattataaaaaatatgtgaaagataaaagctaacacacataacaatttttgttagcataataagaactaagaagaatatataaaataacaagagttggactaaacatttaaactattttgtcatatatctaaatgcgagaagctgacaaatccatctatataggatgctgttttttctatatctatttaattttaaatgtatttattatttcattaattttaattttacataaaaaattgataacaaaatttgtaattaaattatttttgtaaataaatatctatataaaaacaattcaaattaatttttttaagaaataataataattaaaattaaaaattaataaattttttaattattaatatcattttatttttttaaaataaatatatcattaaatattactataatatatataaaattttaattgtatacagacagtcttatagtaagagtatacaccttatatcataataaccacaagatctaaaattaatgatcaaaataaaattccctgccgataagaaacttttgctagatcctactataattttaccttatatatgtatgcaatattattataaatattagctgtttttggacttgactaatggatggagctatagtttgagctttttgtttatccttttttctttcttttccaataacataatgtcggaactccactataaattataattagtaataacaataagagaaaattacactctataccttttttatatgttgggttttatgccctaaataaaactcttt

SEQ ID NO: 402956 - DNA, 1222 bp, Cannabis indica
atccgactctcggttcggctcatgatttgagtctgaggcaaggttcagttcccgagtttcgatctgaggtaggcttcgaggctgggtctgggtcaaggtcctggtcccagtcccgttcaaagatcttggtcccgttctaattcatgtttcggtttttgttcccgagtgtgggtctgggtcttggtatgtgtccgggtcttagtttgagttcgagtttgggttcgggttctggtctatgtccttgatctagacactgagtagtggtcgggtccaagcatcgatccgggatcccaggtcccgacgtgggtcctatgtccaggtttgggtctagggttgggtcctcgatcccgatcaaagttctgagacaaatttctggtcctagttcaggggcccaattcccaggtctgtgtcccccatctatgttcaggtcctaggtcccgttccgggtccaagttcgtgttcgggttcggtccgagtttaggtcgtggttttggttagggtccgagttcgcatcccaatcctagtcttggtttgggcttcgggtcccaggtctgagtctggttcttgagtcttgggttcggccccggtgtccaggttcgggtcggagtgccgtgttccgatttgggtctgggtttgggtttaggtctgattcctggtctgagtctgggtctgagtctgggtccaggtccggatcctggtctgggtctgggtttaggtccaggttcgagttcgggtcccaggtgcggttccaggtctgggtctaggtcagggtctcgttacagatctagcttctgagtttcgatcctcgtctaggtccatgttttggtccgggtgttagtcttggtctgggtacacgacgtgtcaaggcccgactttaggtcacggtttgggttttgggctaggtctgagtttggttctaggtttgggtccacgtcctagtcacggtcctagtcttgttcgatggtcctggtcttacagttcttgtttaggctctattttcgggtcctaggtttgggttaggggccgggtttgggtcctggtctgagtcctaaatcaagttcgggaccgagattggggtgcggttctaggttccaaccccaattttgtgtcccgagtctggttccatgtttgggtctgaggtcgggtccaggttcggcatcgagtgtaggtttgtgttgggatctaggtacgggtttcggttcgggtctaggtctgggttgga

SEQ ID NO: 402957 - DNA, 610 bp, Cannabis indica
aaaaaggactttacattagtcaaactcatacgggttgttagtagtactgttaatctgcatcttcccaattgtttaattttccttttaaacaaaagtaattaactccttatgattcgtttcattaataattatacaagtcattaacttttcacactataaaaataaagcacactcatcatcaaatttctacttcccctatttctctaccacatccttattttaaaatagtggctttccgattaaacaaactaagttttttataagatttaagttttgcagtgattaaataagtctaggccaaatattagattaccccaataagtttttcacttatatatagttttatcaagagcaaaaacaacatttattgttagagctttcatttgaccagtcactactgcacaacaagataagaactccacaaagaatactgtgtacactaatatattgcatccagtatttacttttagttgtcaaaaattacaaattatagtatttagatacacgtaataataatttcacctaataactaattatatattttctttaatttttaattgtatcacttttaaataacatataaaaaacttagcataaaatttagtatacg

SEQ ID NO: 402958 - DNA, 846 bp, Cannabis indica
ttttacaggcatctagatcacacattcagtgcgagcaaatttatatgcaaaaacgtaaaactttggggatgtgaagtaaaatagactctgaaattgtcaaaagtccaatatactacctttccaaatatgtagccctgcaggaggggatcttccttctgcctcataaagctgatatttttaagttcttcgtattagatacgaataagaaaaaaaaacgatttaaatgaatgagcaattcgtaaaataaactcacataggtctgaactatcgaatctgtaagaggggaacacgaatctatctgaccaaaaatatctcggaatttcgcaatcgtatcagccattgtctgaaacggtgacgggatatcgccagaaaatcatttgaatgtttagggagtcgttctcctcgttggcggcgggttcagcggagctcgaatgggtggaggtttcgggggtaaccctaactaagcttggggttagttgtgtttgttaggttacaagttcaaactcttgttgttttagacttctacaaaattatagtatagtaaccgagttcttagttgttaccacttagacagaactgttataaattaaaagtaaatattgtttaatataaggggcttatgtagctcctcacttgcatttgaggtgtgtgtggcacacctcacatatgacaaagaatattttactgtagcaaacagtaaattttgttgctttaacttaaaaacaccggttttgtgaccggatatgtacattttagtgtgtgatttttatatttaatatttttaatttaatttatttgtttagtggggtaaaattgtaaaagcacatatttattggatgtatctat

SEQ ID NO: 402959 - DNA, 464 bp, Cannabis indica
taaaaagtttttttagctaacttctcttaatttgttgttctatttatatttaaccatctaaacttaaattttgtcagtaaaactataactactgaactagtagcaaatttaaggtgttattccgtcaattgtcactgtaggttgtttattcatacattcttgtacacataatacgtttatatttgtactatgattatttaaaaattatttttaattttcattttaaaatcaaataaaatattgaaaaaaataaaaatattataaattttaaaataatttttatatctttaaaataataatagtagttgtatcaatataaatttgacacgtgtacaaaagtatacacataagtcttatatattgtcagttaactatcaaaattagatgacaccttaaatttacaagtagttcaataatttaaagagttttaatatcaaaatttaaatttaaagaattaagtgcaa

SEQ ID NO: 402960 - DNA, 685 bp, Cannabis indica
gaaggcacgtgcttccagatggccaggttttgatttgatcctccaacaacatgtgctgctgctgcctttgtgtccttaaaactctactattattattattattattaaagttgtttgtggcataagtatagttaacgggtatttgaagtggagtgtttaatataaatttagtgtaagaaaatctgtaaactgtgtttagatgtgtatagtaatatgtaaatatatttttgttaattgaattacactatttggttgaatacaagaatcttatatattattttaaaattttaaataaaaatatttttattatatttatttaatgttaattatatataaaaataaaataattatttattagagaaatatatttattaattagtaaatattaaattttattgtattttttattaattaaaataaatatttttatatattttatcactatgttatttatttatgttcgctatgtcatatatgtatgctatctgcataaaatttatgtataatgcatatatatatgttattgcgaataacataaaaatagcttaattaaaaaaaaaacgatctcacaaactaaattgtaaaattttatttataatatcaaaatattgattgcatttaaatatatttattaatttaaaagtgctattcaaattaatataatggaagaaaataatttaatccc

SEQ ID NO: 402961 - DNA, 740 bp, Cannabis indica
gcacactaatactttttagtaattctccatgtattatatacagtggggtatccatgatttaaagatgaatttaaacttttaacctctattctatatacaatatagtttaacaggtacactaaatctactattatatttatattctttttttttttaattttactatttaattaaaaatatcttttttttattctttatcaaaaatatatttattatttattctcaaactcaaattcaacttttttttttttttggccttaatagaacaatttcaaccatagcaaaattgtaagagtttcttttaattttgatagcaaaattaagtataaaaactacaaatgtttttaataatacctattcatactcatattacctattaaagtgtgccttctctatatatatatatgttataatgtatgttttttatgtacatagatatacatatatacctttttatcttctccttgatagtgactattttgtccatgggagttgagatatggacgcaaaaatcaacagaatctcccatgtctggacttcgatataagttaacaatgggcttggttgtatagagcactggtgggatatatgatcttttggttgtcatacctcataaaaaccgtagttaatatattcatttcctcaaccaccatctgatattatgaattatacaggcatatataatcattaactaattaatttccactgtatatatattaatcaaaattatatatatatat

SEQ ID NO: 402962 - DNA, 517 bp, Cannabis indica
tattaagtctagaaaatatatatttgtttatgatgtgttgtcagcacagtagaatataatcatgattatatgttagaaacatttaagtcacatgatttgtcaatacactggatttagactaacaagataattagcgataagttatagttacaccttggacaagtgttatgtcctttctagggcattggcaaagtttacctgtatcagatgtatggagtatgaattggattggatcgatattgaagttagataagatatcataaactcaccgttgtatctttctaagtcattatcaatggttgatcttaggtttatagatcttaatcctgatatggttaggttcgatcttaattgtattatttatgttcttatagttgttcattaaagtctagtcgactgaacactttcatcttaggaacatggtagtttaattgagtgggagcactaatcatagatatagaatctatagcttctataagtatttagaagtgaaagaataattttcttcgagattggc

SEQ ID NO: 402963 - DNA, 532 bp, Cannabis indica
aaccaccagctcggggagatcctaccattgtttaatgtgtcatgcactccaaccaaggtgtgaatattttttgtttacaatacatttaattttacttaaataaaagtctaataatgtcttttattttttattttgggcccccataaagtgtaggcccggactggccttgaactctcggacctgaccctagacacgaccccaaagcctgaacccgaaccaaaacccctgactcagcgttgaacccgaaccccaacttggacccgtagaggcgtctcaaggtgttgagaggcttaagggaataaacaatatttttttacttcgccctatttaaaacgagaccttttttataaaaattaaaataaatattatttaaattttgacacaatatcaattttaactcttttatctccatataacaaataagttttctcacctcgttagttaacttaaagtactatttgattataagaacatctctattaaagtgatatattttagcacttttgaaaaaaaaatactatgtaaaaaaatt

SEQ ID NO: 402964 - DNA, 582 bp, Cannabis indica
caatcgttgaacgttacctctaaaattaaccatatatttaaaataaattaattttttttaacaaaaatattaaatgagatcttttagcaaaatttgccacaaaactgttaagtgcaagcaaggatgaatgtatttaacatttatttgactaaatattaaatatttaattatttacttaaaaatatttttttctttttgaaaattacttgaaaaatatttttaaaaataaatttaattaatttggaaatgttttaaattattgtttcagattctatatttcatgcctatacaagtttgggaacatcgtaataatattgcttcttcatgactataaaattttttatatgtaataaaattaggttaggtattttattaattatttttaactaatttttaaattaatctcaaactttcaattatgatcaaatggctaattaaaacctatttaatgtaaccattaaaatctttttaatatatagtgttttgtttaaagagatatgatgattctattaaagagtttttatatcatatgctgaaatttctaattttttttactttattactgtggagcagaattttttt

SEQ ID NO: 402965 - DNA, 630 bp, Cannabis indica
tttactcatccaaacaacaataatggctaaagagatcagactttctacctctaaaaacaaccctaaaaactcactaataaataaagatgcatagcccataattaaacaagttcaaacaacaaattaatcatttataaactccaatctacatgcatcaaagaacactcaatacccaaagacatgcttttttaatcatcaatttcagcaacaaaactcagaattaagctcaagagtagcaaagtttgaagcttaccatcacccacgagcttccatcagcaacaattaactccattccaagcaagatttcaagattaaagcaaaaactgaaaaatgatgaataaggaagagcaaaaggggttcagctagggctaaacaaaccagaaaaggattttctcattttgtcaaaattccctttttgatgattactaactaatgggtaaaatgaccaaaatgcccctagggcctatatatgacatatacataaatcaagggcaaaaatgtcattttcatcacatacatactaaaatagatttaaagttattcactcaaccataaaatgccaatataaaatcccaaaaatgtatttcggccccgaacccagttcggtccgaaatactcgattgtgactat

SEQ ID NO: 402966 - DNA, 502 bp, Cannabis indica
actgacatctttccttgagtaagttttacaaagtcttccatgtctgaagctctcacagtgatgctgtaaaatttttcctcaaacaaacttttaaattcttcccaggtcattacaccgacatcccgggtttggcccatgatatcccaccagacgggggcatggtcttgctacgtgaaggctgcacaattcactctctcagttcccgtcactcccatattatccaggatgcgggtaatagtgctcatccactgattggcctttattgtatcaatacctccgtaaaaagtcggaggtttgaagcttcacgaaccgctcaaataccaagtctctatgcgtcataacaaacccctggttacccaccactggcacaagtactggtggtaacacgtgaactacaggggcagccggtgccggttcccttaatcgtcgcaactcttcctcttgacgaaatatgacacttcgcatttcttggaacatctgctgccaatcagcaggaggatta

SEQ ID NO: 402967 - DNA, 579 bp, Cannabis indica
atagttactgcactcaatctgaggtatagtatacagggacccaaatatttcccaaatatttgagtgtttttgaaaaaaaaaatcaggtcagacccgattaagcttgtgaggcaatcggggcggggtggggtaatgccttgttgggtcgggggcagacccgctcagtttgctattcctagttaggtttagaataaaataatggcttaattaaacccttgttggttgaacctattgtgggccctacaggtttcaattttgcaattttatttaaaaacttatcttttcttttacaaatgtcatattttaattctagctctataaatatcaaatctatctatttaaagagtacaaggcattatgtgttagtttacaagggtggtgctttaaatctcgtaggctatactagcacaaattttcagacttgtcttgatgaccggaagtctacatctgggatggtattcactcttgggggtggagcagttttttggagaagtgtcaagcaatttgcaatatctgactctaccatagaggccgaatacatagctactattgaggctgctaaggaactggtatggctaa

SEQ ID NO: 402968 - DNA, 565 bp, Cannabis indica
tgatgtatgctcaagtttgcactagatctaacatttcttttgtagtcaatgttcttggaagatatttatctaatcttggacatgatcattgggttacaaacaagaaagtcatgcaatatttgcaaagatcgatgagttttatgcttgtgtatcagcatgtcaacaatttctgagttgttaattattcatattctgatttttatggttgtgtagatgatttaaagttaacttctggatatatttttaccttggttggtgcaactatttcttagaaaagtgttaaatagactttaaccacattaactactatgtatgctgagtttgtcccatgttatggggcatctttgcaagctttgtggttaaagaattttattttagagatacgagtggttgattctatttccacacctatgctaatctattgtgataatgatgctgctgttttcttttcaaagaataacaagattagtagtgcttctaaacatatggaaataaagtatctcactgtcagagacttggtcaagaaaggagacattgtcattgaaaattgcaagaccgagtcgat

SEQ ID NO: 402969 - DNA, 910 bp, Cannabis indica
tgttcttgaatttttcacaattagtgagcaatctttttatttttctctaagctatattcaccaatcaatctctatggaaaatttagaaatcgtcaactttagtgtcatatggcctcttgttcttattttattttgtttatttttctacaaataatagacatactatcgacattatgtcgataacattatcaaacatgagggtggcagtcctcatcgatatataatcgacacatctcgacatactatcgacatagactccacaacacaatttgcatgtcagacacgtgtacaatggtaattaatccattcaactatcaacaagctatcgacattgtatcgatattcactcgacaaatacacattgcatgcttttcatttgtacggatacacatttaatgttaataaatgttacctatgttcccaacaactcttcccaaccgccacattgcatgtcagacacgtgtattatcgataagctatcgatgtaacgtcgacatcgtatcgaaaaatatgtatgtcgtttcatttcttttgcatgttgtcgacaaattatcgatatagtatcgatattttgtcgacaaatacacacttcatgcgttgcacctgtacagttacacatttaatggccattaatttttcctacattcccaacatgtatattgctctataaaagcatatccctttctaattcataagtgctcttgtcttctacttctctaacaattaaaaattaaaggcaaaattctcttattcttaagttataaatatgtctactagaaagaacaagagaaaattcccaattctaactcctgaagagctcaagcaggaggatgatggcataattgttggattaaaaatcctatgtgggcacatatgtataatgtatatgctattataaagtgtgatacaa

SEQ ID NO: 402970 - DNA, 462 bp, Cannabis indica
gcttctgcatcatcaaaactcaacgatatctactagttcttctgtaaaattatttagttcatctaaacactgatcatcactttgatcttcttgactaaaatttattggttgggtcgatagaactatggaccatgcagagttaagtggatcttcaacataaaacacttgttttgcttgagttcccaaatattaggctcaaatttcattgaaggcttaagttgcatcaacttttagttttgagtctatcactatctatttataggaatccttctaggtttaggtttgaattatttggcattaaaaaattgataaataaatggtaaaagggagctaaagtggccggccataggatgtgggcctaccaattacaattttgtcatttttctttaactattttatccttttctttcacaaatgccacattttctaattcaaccacttaaatgtcaaaactaattattt

SEQ ID NO: 402971 - DNA, 537 bp, Cannabis indica
gtttggtatactattgtcatccctacgtacaaactcatcatttttcagcctccgtttttttgttttttttttggaaagacactactacaaagttagcctttagagactgattttttaacccatttataaaaagggaagctaaagggtgtgaaaatacccgttttgttcgaaattgacatttagagatggttttttgataaaaaccgtaggtataaaattctattataccatttagaggcagttgggaaataagtattattttttttctggtcgaccctatggcatcggttcctttgtaggaatcgacggcatagggtacacggtttgctaacacgtgtaccctatgccgtcggttcctacaaaggaactgacgccatagggtcgaccaggatacatatacagcttcgtcttcctccttcccttttcacttaacaaacccagcaaaccagagagaaaagacccagcaaaccctcgccgaacccacctcctccccactatatctcccccatttctcaaccatttgagcctatttttttt

SEQ ID NO: 402972 - DNA, 888 bp, Cannabis indica
aaaattgaaaaaagcccaaaaataaagtagtttaagttttttatattttttaggagataaattcataatattattttttttaattagaaaatgttgttggaggaatttagacaacgccaatgaaataatatatttaaaatacaaacaagggtatgcgattactctacccagaatggcgagtattcaaattatggatacatagacgtactgtaaaatataaataacacaaagagaatatagtggtttagtcagattacggttggcttagtccaccgttgcaagggttgttctgtcttgtttatttcatgttgtatcactcctttgtatacaaagcaagtgtcctttgattacacggagattgatttaattatcaatttgtttgtacattgaacataacatttaaatcaataaaaatgtaaatacaataaatgaagattagtttcggcccaattcactaaatacagcaacgcatgcgaccttcatggtacgagttgtctgttcatattctcgcataagctcgcagggtcaagatgcgtgcaagactaagtctagtctaggatgtctgcgtcctatctgagtcgcatatacggacatctggtaacaggtcgataacttaggacatgcgagtccttatcgggttatcaaggacgttgggtcatccggaccagctggctgagtagagaatcgatctttactactttacaggaagatctttatagtcctcacatatatctcggtatgtgcaagtgtaacacttgttcatcggtcctgcttcgtgcgagctataggaatgcgactagactctgtcaaggtcacatcatcccgctgagtctggttcaagcaaggtttacactcagaggtctcctgctgacatctcagccctcctcg

SEQ ID NO: 402973 - DNA, 641 bp, Cannabis indica
ttacttcataatgtaattacccattttttcttcatcctattcaattgataagttgagttaagaagtttataatctggttacgacttaaacccaatctatgtgaaaacttcttatatttctatggtaagtttaatcacacaaataacattaaatatagcaactaataaaatcatacaaacaatccaggtactttcgtcttaaatcaatttgcatctatattaatagagcatattcaaatctcacatttcacaattttgacttgaattcataaataacaattatagatggtcactaaataattacaaaattaaaagtagaaagaagaagaagaataagaagaagaagaaattgtataatcacattaatccataaaataatctcaagtgatttacataataatccttaaaagaatttagctactaaaagacattctaaaataaaaaaaaaattcaataaaaaacataaaagatagagatggaagagaaaaaacactatttggagtcctccactggtgccttctactccttactctccttatacactcagaatcctctcaattttcaaatggtgtcaaagctttgccatcagtgtaacgctctaaataattaggcacgctacccaaaatgcttatgaaaccctaa

SEQ ID NO: 402974 - DNA, 864 bp, Cannabis indica
tgatcggaaacctaggctgccatggaatttagatttgcagaggtaggaccaactctcccaatgaactttcctattgtggtcagttcctccccaccaaaattaaaattgagccatcatggactccattttttttgtgtggaagtaatggggtaatttgaaacaagtcatcgcataggacggtatcgcttgaaccaccaatttaaggagaatttctttgcctccttttgagaagaaggtggaattccatctatttaaatgggaccacacgtgatcctgaaggtaagtaaaggcttcttcttttgagctgccaaaagattgagggagacctaaatattctcgatagagtctcgaataggcacattgagcaaagaaatgatctgattcttaatcaagtcattggtgtttggggagaaatacagcgatgatttatcatatttgacaagttgatccatagccaggctgtaatcatgaaggattaccttgatatgtgtgtctgcaataggagaggcgacactaaatagaatgttgtcatcagtgaaaaatagatgagatatgattggtgcagtccgggaaatctttaggccaagagcgtgctttcttggaaggcattgattaactttttgggttatgagtgattagaggccttcagagcataacatgaaaagataagggtcgagtggattgccttgacgaatgccacgggatgggatgacagatctcttggaattatattttaccaggaactttgatctactcacaagtatgttgatttaacaacctaaaattgaatttctaaaacgatgaactaaacatataaaagttaagaataacttacagtgatggcagcggaattaagtgtctcct

SEQ ID NO: 402975 - DNA, 511 bp, Cannabis indica
aatttagtgtttaattgctggaactggtttgaagagcttgttttgaacttcttgagtttgagcttaggttttgttaatcttaagcatgatattgagtgtttttgaggaatttgaattctgggattttgacgcatgtaatgtgataaatgagtatctagtatgtgctattaatcctatgtgcaaatttgtggtttggttgtgaaattgctatgaaaagattgggttttgggctgaaaattcgaagaagggctgctggttttctgggttctgcacccagatgccgtgacatgctgtgagcatggcgaagaattcgactaaggattcgggccttcgagcttgtaactccttcccaaattcggtccttggcaagatacctcttatcagcatgcaaacaagcgaagactcgggagccttctcgacatttgttacttctgcattaaaccatttaaaatagtcttgtaaagactcaccaggttcttatttgatgctggccaaagtcgtataaggtggc

SEQ ID NO: 402976 - DNA, 708 bp, Cannabis indica
tactgcatggctcaggcatccaacaagaatcctgaggcgactacttctacctctccaaccgagtagaatgtcaaggctccttctgtccagactgatgatcgtccagcctcttcacacttagatgatcctccagctcctttagatccagccgacctgtacaaagagcctgggactcccactgtttagttgccttctttttactaatttttatatgtttgttcggccaatagaccttcttttgagataaggtgaccggccaagcagtctttaaacttggaatatttttcattttttgaacaactggctgaccaggaatcctttaatcccaagttttaatgcattgttattcttaatcaatttcatcccttgtttataatcattgtgcaactgtgtttgttttgttctttaccaaatgttttgtacaggtataggtgccccccaagtgatcaagcagacttttgactcctggtcacttgttttcacaagtatgctttttgtctgttcggggctttgggtacgaccaaaccttttgtacacatttaataataaatatatgacatgctaatgaacttgactcaattcgaattgaaataaacatttttattcatttattggtcggagatatgtctgttaccatagtaacttacattgaagctattatgttgatctaatctgatctttagctttagcataaacaaacaaattgca

SEQ ID NO: 402977 - DNA, 980 bp, Cannabis indica
gaggcctttcaaaacataaaaagacatctaggaatgcctccagttttggcaaaaccaataactggagagacgctgtttctctatttagctatctcagaagatgcgtttagtgcagttgtagtgcgagaagagggtaagcaccagcaacctatttactatgtaagtaaaaggttactaagggaacaatccaaatatccccctctagaaaaactcgtgttgtgcatagtccatacgtctcgaaaactactgtcatacttcctggctcgccccataaaagtgttaatcgatcaggccttgacacaagttttatcaaaaccagaggcttctagaagattgataaaatggtcgattgaactggggcaattcgacataacataccatcctcgaacatccatcaagggccaagctttggctgacttcttgatagaaggtataactccataagaaattccacttgatcaacgagatgtagaaacttggaaattatatgtggatggtgcatccaatgaacagggttcgggtgcaggggtgatattaatatcgccagaaggctttaagtttcactatgctctgaggttccaattgacgcatccaataacaaggctgagtacgaaaccttgatcgtcggcttaaagatagcagagatgttgaaagtcaaaaatctcatttgttatagtgattcccagctgatcatgaactgggtcctcgaggaatacctggtcaaaggcttaaaaatggcaaagtatttagagaaagttcgaaagaacttggaaagattcgaagaacaaaactccaacaccgacgcttagcaaaacaagcctcgtagaatgacctagatgaattcaacttaattccggtagagatgctgagcgagccaagtatatgtgaaactgaagacgtcgagatgatagatagttctcctacatggatgactcctattataattatttactcgacgtacaacttccaaatgaacaaaa

SEQ ID NO: 402978 - DNA, 529 bp, Cannabis indica
ttttggatttttcatgagaaaaaataaaacttaaagacataggtctacatagacttgttttttcgatatttactcggtccttaataaaattttagttttatcttccatttttaagaaaaaaaaaaggaaaataatttttgaaggctttcatgcagagcttaaaagctccaaataatcaaagacctatgctttggttatttagaataaccaaagataaaggtgctttataatgtctttcgtggccattaccctagactttttcacttctctccactttctcagttaaaacccttaaaaaccctacagaaaactaccattaccatacccattttcacgattcttcaattatttttcacttttttttttaaatcttcaactctcaaactgataatcacatctagagtaccaaaaataatttattctagggttttaatgataaatttcaaaaatttatgcgacaagttaggtgggtgacagggcgatcactacaacattcaacaacattagcggcggacccctccgccgctaa

SEQ ID NO: 402979 - DNA, 830 bp, Cannabis indica
gattaataagaaagcatgccgtgaaaacttcatcagcccaaaaaggtttagaaactttcatttgaaacaagagggcacgtgcagtttcaagaagatgtctgtttttacgttctgcaacaccattttgaggtgccgtatcaacacaagaagtttcatgaagcatgccattagaggtcatgtaagattgaaattgagcagatgtgtactctttggcattatcacttctcaaagtacgaatagatacattaaattgattttgaatctcagcacaaaaagcacagaatatagaaaacaactcagaataatttttcattaaatataaccaagttacacgagaataatcatccacaaaagtaacaaaatacctgaatccaggttgagacaaaacaggagaaggaccccaaacatcagaatgaactaactcaaaaggaacactagcacgtttattgactcgaggacttaaactaacacgatgatgtttggcaaactgacatgactcacaatctaatgaagacaacgtactatattggggacaaagtttcttgagcaaaggaagagatggatgacccaaacggcaatgagcctcaaaagcagaagcaacactcgaacaagcaatagagcttggtggaagtgggtcaagaacatacaagccaccagattcatgtcctttaccaataatcttcttcgtcataagatcctgaaacacacaatgatcaggaaagaatgagatgcaacaatttagattacgagtgatttgactaacagaaagcaaattaaaagacaaattaggtaaaagtaagacagatgaaaaagtgagcagaggtgtagga

SEQ ID NO: 402980 - DNA, 1160 bp, Cannabis indica
  modified_base (97)..(97): a, c, t, g, unknown or other
atgtattgtattgtattatattgaattggattatatatcatatttttatatatactatgttaaactttaatttatactaaaatatatacatttaggngtaccataaaagttaataccacatatagttttacataaaaaatattagtataaaatacaattcaaatataatacaatacaatacaatacgacctaatacagcgttccaaacgagcccatgatgtatatgtgattatgactttaatttgcttggtctttagctagccagggtcatttggccgtggcaactaccaaacatgtcacaagaaattattaattttacttgttaatctctctttatattattttctatatttattttagaacattattattggatattaatagtacttaatactttctaaaagtgactccttacaattacgattggtaagtaatattcttacaaaaattatattaaattatataagacttatacttaattgtaccaataaaaaatttgctagacaccaatatttctctttattttatcccacaaagaatactaaaggagtattaatgtgtcactaatataacaatttttaaaggaattttctgtgaagaaaaaaaaaatccatgttataaaataatataaaatagataaaaagaaatgaagataaagatgaaaagagtaagagaaactaaataagaatttcttaattatttattaaaatagggtgaacctttatttatacaaaatatgacaaaaagaatgagaaactaaatcaatgtaataaaggaaatataacaaagcattaaatgtgataattaacttagtgatttcgacatccatatatataatatttcacaacaccccccttagatgtccataaaaattgcctacattaaaaatattgctaaaaaaactccgtcaaaggaaaagagtcgtgcagtgtaaactaagtcccccttatttaagcattcgtggagatcttctaatcggcaattccaatcttgtgagccatcttctcaaatgttgatgttggtaatgatttttgtgaataagtctgcaagattgacacttgattgaatttattgaacaccaatatgcattctcttgatgttagagatattattacaatggaagaaaattaaaatattacaactctattgtaatacaatac

SEQ ID NO: 402981 - DNA, 513 bp, Cannabis indica
gaagttttgtatttttgaaatttgtagttgcaaattggttctatttgagaagatttcaaaatttgaaggtcaggcttcggaaatagaaccctagaagcaaagaggaagatgactagagcgagtgtggcaacccggatcaattccaccaccagtttctttcttctcccttttattttcttacgttaatttctgtttttagtttaattgtggatttgaacatggagattatgaactaatttcccaatttaaggatatgatagatgttagttgattttatttcatgagttaatgttcattgttatttcatctttcttgattgtgcatttatttatttttgtgcttaatacatatgtttaagattgatcaccttaggcatgatttatcatctcaatacaaaatttgaaaagtgagtattgagaatactctaattgaataaacttaagttttgatgtaaaatgagagtatttgcatagcctttgtgacttttaaattattgcttaatgcaaattgtat

SEQ ID NO: 402982 - DNA, 570 bp, Cannabis indica
ttcaagtttattatttgtttatacttgtgtttatttatgtgactacattaaatttgaatatttacataaattatctttgaggcttttaaatttctgaaattagtttaaatttaaatttctaattcacccattccccatcttaaaaacataaattgggctaacataaggaaacacgatttgagagagagaaagctatggaatttttaaaaagagaaaatgaaattagtctctttgaatagtccaggtcaaagaaccagttatctaacaagcttgtcatcttatttcttatatcgacacactagatttaaggttagatgagatggacaaaaattaaagacaattggcctcaaatcaaagccatggccgaaccctatagaaatggcccataaattttattttttccactttatttcaattaaagttaaattaaataaattccctagaggccagttacttgtactgtaaagcaactctactagaggccaatcagattcgagaacttcttcaccagtttgaatgtgcttcaggacaaaaagtgaacttggggaagtcatcaatcttctatagtac

SEQ ID NO: 402983 - DNA, 790 bp, Cannabis indica
attagtttatttttttagttttaatttagttattatacgattctatataatatgaaaacactttaatattctttgtagatattatataattttatttttgttattttcaacaaaataatatcaattgatgaacaaataattattaatttattaatattcagcttctttgggggtttgattttggttgttttctagttgttttacggttgattctattttcaaagtgccagcatcaaccaaaataacatcttttgaaactgatcccctctttggagcagatcaaagttgtttagttgttgttattgtgttgttgtcaggttgttgcacagttcaatgtcctaagtggagttcacttccagccactgtcatattattgcacactattgcttgggtagctacataaaaggattgttattctatttttctgtgtagttgaatgtgttcacacacaatagatatcgtgtgaaatcggttttctttattaataactttatgtaaaacaacaaacttttgtcatttttgatttagagtggttggcaactttccttcagttgttatttcagttgtatttgagttgtgttatcccaaatttggcactttgacgtggcatcacgagaatggtgacacgtggactcgacttagtgcatctgttcgaatcaatatgccaagcaggatgcctcgctggcatattcaaaatggaatattcaacgagccgtgcagaatgagcaacacttagcgaattcagcttaatgcatcatgagtcaccggttcaatccctacaactcaggga

SEQ ID NO: 402984 - DNA, 670 bp, Cannabis indica
attaaagaaaaaatatattgggcactttatttttctcagcattgtgcaatagcccaacttgcacaccataagggtcggccctacatattacgactgaacattttgagcggattcgacccgaaccctagcaacccgtccgaaccccaaccagtgaacccgcaaattttttttaaaaaaatgttcgggcaggtcaggttcaacccagtacccttcgggcgggttcgcgggttgagtttttaggggtaccgggtttcgagttgaacccgagaacccgcccgcaaatccgatatataaatatattatatatatttttatttttttttattactttttttttattacagttcatatatatgtattaaattattaattaaaaaaataaaaaccctaaatcatttacacattgagcagctctaaaaaattatttacattcagcatcagcagcctccaccaccaaacctcacgaagacacaaacaatcccaccccacacccaacccaacccaccacaccagccaccaacgtccagcagccctcacccacggcacgaccgacgacgaccaaggtaatcacgttaacaatgaattcagcaaaatctgctcaacttttccaccatggacatcagattgcaaaatgattaagaaacaaaacataaatcccaacactttattt

SEQ ID NO: 402985 - DNA, 1162 bp, Cannabis indica
taattatcttatcatttcttagcaactcagaaagttatacttctagggcgctaagtcaaatcccacatactcctaattatcccaatactcatattatcaactcatcataatattcccataaattctatcaattaaacccgttatgatatttctggcccccgatcgagtctccaaggtcgccaaacctgaaaatacttttattacatcggtaattcatattacattcacatataccatataaatctccgtaatttataaattatacttatttattcacttatagaaaattcaaaatttatgttgaaatagattagtaggatcataatcccacttattatctaattagcccataatataattataaaccctaattatttaccattaggcttatcgtgatattacagttatggatcttgaacatgtgttcttgataaacttagcaactgatgttattgattattattaattattgattttgacaatgtatcgtcaataaaattagtacaccatttactggttattgatctcaaatatgtgttattgataaaaatatacatatatgaagttgttagtttgttttcaagtaatgtctaaaacatgtaacttgaagatatacagatgaaatgggagtttagatatgttgatcgagatttttgacaactaaataaataatgtagtaatgagagcttagggataattaatgcaagtgatttttacgtggttcgggcattaatgagtcgtagtccatgagtctctattattaatgagagtatttcttacagaaaaagtttctgtgttcttattcccctctcgttcgtaatttttgtgggggtatttatagagattggtgggaagaagaaaaggagtaacttgtctttaagtgccaactatgggcacacacaagttttcagaaggtacaaaatagggcatgcactgttgggttttgtgccttaaataaaacccatttcaatataatcagatttactaattaataaagattagaaatcattttatgttgcatggttcacatgatttatttcatgattatgtttcatgtataaattctattaaatctagaacatatgtatttgttcatgattatagtgttgtcagcacagtggaatataatcatgattatatgttcgaaagtttaattccctga

SEQ ID NO: 402986 - DNA, 512 bp, Cannabis indica
ttcccacttgtacggagtagatgttgattgacatataaaaaataactgatccaattaaatccatacatgtttatatatatatttaaaaaagtattatataaacaattaatatttcaatagtgaaaaataataatttaaaaatctaatacatatgatacaaatatatatatttatatatttcaaaatatagtagatcaaatatatattttattatgatttacaaagaaaatataatttaaaataaaattcaatattttttttatatatataatttttttttctttgctttaattttttaattttttgtttttatttatttcaaattcttgttggagatattaaacaaaaataatttattttattttgttgttagttatatatataaaaaatatactttttaataaatattaaataatttaacattaaataggaactagtctgaaataaccgatccaatccacacttttgcggattagattggattggatccaaaatatgaaatccgcacttag

SEQ ID NO: 402987 - DNA, 874 bp, Cannabis indica
taaatagtgtcactaaaaggccatactgtagtagtgagagtaggtttacaaagtatgaaacaatggtagaagctcatgataaccttgactctcgcctaaacaaaacaacgtcatattcttatttcgatcgaataaaagattgctaaaatagtgtccattttagatgagttgaaaactccattcaaataaatgatatctttgactcttgcctaaacgggacactgtatcaatttgatcccgaaataatataaactctcgatcttagagagtatcctacttgtatatgcttactaaaggcaacttatagttaaagttaaaatagtagtggtggtccaagctagaataattactcagagaatattttgtataaatttaagtcttagatattaaattttagattccaataaaaattttaaatcttagtttccaaaatacattggacaagaaagtataactttcactagttcttaatatccattttctatcaatggatccaaactttatgttaatgtatggattatgagttttgtattttgtgaccagatccacttgaactattctaaaaactttttgttgtaactagacctaagtcatcaaaatacaacatccatagtaatatatttatggcatttgcatcatattcatagtgattttaataagttcagcctctataaagagaatatatgcctatatcaacttgaaagtaagatcacatatattcaaaaatatggatgtacattcaggggtagatatgagttatcgttaaattcttaagacggtcactctagattatactttgaataaagaaatttgaaatgtttgataaattttatgagtttctagtaatggtgaaaaaccattaaggtaagtggtt

SEQ ID NO: 402988 - DNA, 1065 bp, Cannabis indica
aaggcatgtgcccaacaaaaaagcaataagactagtcctaccctgactctctaattcagccctagcaaagtctcgaatcaaaatgctggcttcatcatccccgagaaagctgtctgaggggagaaaccagctggaagataaatggactgaatagtccagtggaataggcgtcggaggtccaaaacccatctgggatcgacctaacaaatggcctaagtgggaaaaataatattctttggcgtgattcccccaccgagtagaaggcattctaaacctacgacgacgctcatcgaaccctataggtctaaggtgggtatactctcgggcgggagaaacataatgtattattaaaggagacttaccagaacctgaagtgctggcgtcgggagcactagtattggggaccgggaccacaggcttgggcctgggggtcctccgctccagcagagcttctagacgaagggtcctccaggcagccgcctgggccttgatgtaggccagctcctgttccctcttaaagaggtacttctggtaccggtcctccgccgtggcgataatgtcttcccgaaacgccctttccgcagccggagccctcacgtttgggcagatgaccttggagagattgaagtcatccaccgactggttccccgatatcagcttggccttccgacagttctccatcgtgaccaactccccaacgtcgagggccttcttgtcatacgtggagaaggtcttggcccgctggaggaatacttgggtaggcgcggtccgcttataaggatggatcttaacccactccatgagaagctccgggcggtccacggcctggaaatcggaggagaagaagaagcggtggcaatactccttcacatgtttttggtggttgaaagggactaggccctcattcaaaggatgggcccggaggccataaaatccgtctttaaatttatccccttttttggggatagaaacaagttcgtaaaaatataaaatttcagccagactgggcgaaccccagcttcgggcggcataaaaaataaataggcctgaaagtaggcggtaagc

SEQ ID NO: 402989 - DNA, 1179 bp, Cannabis indica
gataatactctacgacagaaaggaacaagggttagagatatgagcggaaggagtcattatattccgctgcaaccaatgtaaggttttttaaacccttatgtgtttaatttcatttttttagagatattcatatttaggatgttaatgaaacatacttgttagtaaatctagatcctggtaaaatattcccatcaactcctcggtaaacgtgctcctctaccactacacgactgccacgtagacctaccacgagtaaatatggaagtcatctttcatgatcgaccaacacctggaaagtcatataatattacttttaaaactccacatgtccacactaatggagtgggacaagcttctaccacacgcaacattctcgaagcttaggggtaaatgttatccgtatttttggcaaatgacacatagaatctaggtcagcaccaaaggcccattagtaggccccaacgaagacaattcaggccaagcccaagttatataggacctaccaggaacgtaccttagttctgtgactgaatgatcttctgccaatgacaattcgtatccagaagcagctccagtaccacgaaggagatgaaatacagcatgttcctagaagaccagtcttgtttccttttttattcaagcgcacaaataagagaataaatgctcatcaaatctcgatagaagatcgtatcaagctaaaaggggaagctacctaaaatgaaaatcaagaaattaattcatgattaatgtccacaattataggaaatggtttttgactaaattcaaaactgcatctattctgcctagtctacagatcatctccttcgtgggctagacttcacgagaaaaccctaattatgtaattcaatgtaataactccattggagggaaaaagggaaactaagtgtaattctcttatcactataaatacccaatgaatccttcggattaagggttgaattctctggcaacacttgctcatgcaaaatagagaatttacgctcattgtattcccaaaggcttttctagcttaagttacataataataacgactcgtggactaaggctcgtgaacgccccaaccacataaaaattatttatgttgcaaaagtcagatttcctatttgatacttggaaggcgcccagattgacagactgtcaacctgggtgctgggtgct

SEQ ID NO: 402990 - DNA, 732 bp, Cannabis indica
aacgacatccaaaattaggtagttgcacctaataactactataataccgagactcagattcaattcactccctgtatagattctaggtctttcacctacaggtgactgaacacctaatctacctataataacatagagactaggtcgtgaaaataacaatatgcacaaatcatgatcaacatgactctcatcagaataacaaaaaataggcaaaataataataatagaagaacatgtttccttttattttggaaaatccagcagcataacggttgtattttgaatagactcaaaaattataacctacttaaatatttgtacaaaaatgtacttggcactcaatgccccagaacaacccaaacaaattatgcagattaagtttttaatttttttcaaatattttataaattataaaagttgaaatatgactaatgttatccaacacatataaaatcaaactcaataatcaagttgagtccctacttatcccaagtcgttaaactttatccaaaaagacaatcctaagctctcaagttccgagctctaattatttaatttaattttagatattactttcacctataccatcaaagggctaaataattttcatcactgtgttctacattcaaaatcgactccaacgacttataatatgattgatattaaaagtgtgtgttctgaaacctcacttaagcggtgcacattaactatcgattgttgggttttatgccc

SEQ ID NO: 402991 - DNA, 973 bp, Cannabis indica
tacaaaaggacacaacaagtatagtacataataatgtagtccataagcacgaaaataaattaaatttacagttttacccttctcgggtcaaaattacgaaaatgcccctagctcaccaacggggtcttaacactacatttatcagattaactcgcataaaataaattatataatagtataattccataatagtacacacttagctagttagggtttgttaatccgttctcttaatcttagggaattacactaaatcccaaacctaatccctaaaacaccaaacctcaaaaccccaaacacaaaaacaccaaagcccaaatcccaatcccaaaccccaaaccccaaaaccccaaaccctaaaacccaaacatcaaacccaagacttaaaacctcaaaccccaaatacaaggtctaagatcctaaactctagacccttgtcacaaaaccccaaaccctaaacctcaaatcaaaaaaccccaaaagccaaagaccctaaacaccaaaccccaaaactaatcccaaaccccaaaccttaaactccaaaaccgtaaattcgaaacctaaaaacccaaaacccaaaccaaaaccccaaactcaaaacccaaatcccaaaccccaaactactaatgtaaaataacttaaccccaaacctccaaatccaaaaacccaaaaccccaaacccaaaacctgaaatcctaaacccaaaaccctcaaagctcgaaccccaaacgccaaaccgtaaaaccttgaaccccaaaccccatacccaaatagaaaagtgatagacaacggtcttggcttcgtccctatgaaatttcaaaattttttaagatgtgtaaggtcagattttgaaaaaacactaacgactgtaagtgtaagaaaaaaacttgttaaaatttatcctaaatagaagaacctttaaatttttgaaataggagtcattttaacaaaatttaacttcaaaccaatcttc

SEQ ID NO: 402992 - DNA, 781 bp, Cannabis indica
ttctctctctccctccattcgaaagcctccattaacgtcgccccctcctcttctctctcacttaaccagaaacttccattaatatcgcccctcctccgccctttgattttgatctcctccctctttctctcggtggttttaaaccacccacatactcttcttcttctctcagtggttttggatccacccgcctgctctctctctcttctctcggtggtttcaaacccgccagccattgaaggtcctccgctggcaccgcctgactccatctccaactccgattcggtatttctctcaatctactcttcaaacccctaaatatatattttgtatttttcttttctgatttatatatattattgtataatgatgtattgtaaattaatgaaatatttactggttgattacgatttctcgggagtctttgatttattccaaaaattgtttaagatttgggattattctaaagtttggtgaatttagaaatttagaattatatttgctgcccctttttgtcttgttagaacttttttgccttaatctgttactggttcaacatacagtaagaatatttaaagtttcataaaatggtttgattgaagataaattagaaggttcatagacatattggtaattctactaagcatacatatctggttagtttaaggcttcatatgaagtggtagcagtgatgaggagtaagttctaataggcatggcctcacttatgtgcacatgtaacaagtttgggtatgactgtttgctcaaataaaggcagtgct

SEQ ID NO: 402993 - DNA, 670 bp, Cannabis indica
gaccccaagctcacaaaaaatttatgttgtgacaaaaaagttatcacttaacgtaacaattttctgtagtgactcacacaaatttaaaatattagctaaaataaattttcttaatttgtaagcccacatattggattattaaaaataaaaaaataactcaatatatcattaataggtgtaattaatcacatgttcaatcattcgggatatatattctacacattattttgatgcttagcatatgggtcatataattcctgttaaacaaatagtttggttaatctatttttgctgattatgtgtaataactattcacggaaaggaaatttcatttttcttaaaaaaaaaaaaaatactttctctatttttaattattaatttttcacttaatgagtgaaaagatctcctcgtcaaacaaaatatataaaatataaaaaagatcttatatattaaatttattatgatataaaatattttccttaaaaaaatcttatataaaatcatatttctcttaataaattctcctaaaaacattcaatacgtatcgccagtcttcttaattaattattaagaaaaaaaaaagtgagatgcttcccttactctctctgtgttttttcagagaaaagaaaataaaaattcaaaaaaaagaaaagataaaaagtgagatgga

SEQ ID NO: 402994 - DNA, 613 bp, Cannabis indica
gcatgagaatcttgtagcacgactggtaattgatgttatttatgagtgcagaggttgtaggttcgatccttcccaccttcataaactataaagataataaataaataatattaatcttttaaaaagaattataccctagttcttttagttttaagatatttacttttttaataatactataaataatgtatatttattatgtattttttaaaaatttataaatatgtaaaaaattatataattttgacatatagttttttttttaaaaaaaaaatatgctaaaaaatataacttttcaatagagatgttcgtaataattaattaaatattactttatcgagagtttatgtggcaaaaatttatttattacataaaataattaaaattgatattgtgtcaaaaatttaattaatatttatctttaatttttatataaaaaaaggcctatttttaaattttgccccaggcctcttctcaccttgagacggccctgggtcttggggtgtcaaccctaagtattggctactacctcacacttcaaggggagaccctcatcgtcagtgactaattcaaatattcaaatcccgtaagaagctcaaaaatggttataaat

SEQ ID NO: 402995 - DNA, 612 bp, Cannabis indica
atgatatctaaatattctaaattgatttttaagatcacataccattaaaataagataatgcaattataatttttgaaatcgaataaacgagctagtagttataagcattttaatgccgaaaaaaagacttttacctctgttaattttcggttaaccgtttgccaaacggtgaaccatttttcccaaaaataggtttactatttaggaaacagtgaatcaaaattcccagtagcctgtctcgattttcgtgtcaaacgactaagaacaattactttcttccataactatacttaaactcaactccgtatttttgagagttggctgagcattcatttatttaccaaacatactaaaagtgtttatgagagctccctagtgttcaatccaattaaacacttttcacacacttaagccaaaatttgttttacatcttttaagtatgcttgctaatcaatctaggttcatcattgtattcttacttttctatagtgaattttcttgtaatcataaacatatttccatattgtgttgaggtgaggttggcaccggtattgtaaacaacctagttagagtgagattgacgctacagcaatttgagtttgaggttgctag

SEQ ID NO: 402996 - DNA, 839 bp, Cannabis indica
caattacatataaattttctactctcgtctaattaaacatgcaataggcattagtacagaaaccctacaagctatctaaagtaccatacaggtactctcgtcctatatcgaaattcaattctatttcactatagcataattgacactcacatctcagatatcacattaaaatcatagacagttaattggcgttcaggtaattaaaagtaattaactacaaataaaatagaatacatagaaattgagaaaaaataaaatcatatattagaaccataacacaatgtcaaacaatctccatcatagaccctaattaagtgtttagctactcatgttcatggaagcaaaatcacacatattaacttaagagaagagaagaaattagagaagaaaagaatgctgaaaactctttgaagataatgccttcagtattgcagttgatctctacaattcgtattccgtattctgctgtttatttccttccgaattgcttgacgaaattaactgaaattcaatgcttgtatagccattgagggactaaagatagaaaaatgcatatgctgaaaatcctattcagatttgaattaggaagccacccaagcccacgtgaagaagaaaaaagataagatttttgtatcagcaaaggggcgggccgcggcaccctccttgttgggctgcggcccgtgtgctagcttcacacgtagacgcctgctcttgaggatgtgggtcgcggcacgcccaatcctgggtcacggcccgtgtgtcttttttgtacgatgcataatatcttttcttctagacaagattccgatttttcacattaatattttatccgatttttt

SEQ ID NO: 402997 - DNA, 634 bp, Cannabis indica
gtttaaaatttcagggttgtttgaagtagcttaggttatgagtttgttcttaagtttaatttagagttgtttagatcctagttggtgtgttgtgtggcctattttgcgattgttggaagttaggttgtgttcggtttcagatttagggttttgttttggagttttggtttaagacatttattgagttttggttgtcgtgacataggaccggaatcgcccagctttgtttccacttaggtcggccagcacacctaatttctggactgaggtaagaaagtgtacgcatcacttaagattaagtgactagaaattgtgtttgatatagtttcaattatgatcgagatcttggttaggtgtttgatatgcctcggttatgacccagagttggaaacagtcattaccgttatgagtaattactcttgaaaccgtggataggtttcttacttatcgttcgctgtattgggcgacgatagtggcatacgtagctcgtgattaacgagtggtaagggtgctttatgaagtaccaagattgtgtgattatgatgatgtgtaattgttttaagcatgttaatatgtgatgtgattaaatgaatgttatattgtttatagatttatttacttttcttgttgagtc

SEQ ID NO: 402998 - DNA, 1007 bp, Cannabis indica
agttagcaaaagaaaatgttagtagtctcggtatacgtgcacaccaatttaaataaaaaaatcgacatttacagtgtattaaaatattaaggcacattttgataaatattttaaaaaaagtatgtatattgaggtaattttctcaaatcttaaagctttatctaagttaaataaattgcatgtttcgtggattttctgcttaggtaaaagagttaattgctgagcgcttcaccttcattacatgtaatagggagattgagataatttgactgcttgagctttatccgcgagattaatagtttgattagaaaattaaaattgcattcattaataaaagttaagaatgattgttgagggtggacctttaactatttatcttatattgtagtatcacatttaattcgtttttatttttatttatattattttattctcataatcaaaacctcctttttctaattcttgtcactaattctcataatcattctcttactgatctgctcaacactttggtggcttctactactcgaacgcaacaaaataatgcacaatttcaacaacctactcatgttgcaccatatagtgaaaagccaactactactgagctaattgacatgatagaagctaatacattgtagtttcagaaaagctttcatgttgcaccatatcttgaggagtcaatggaaacatctatgactgggtatgaaattcaaagttcaaatactttacatgtacaaatagaaagcaacccaatggagaatgtcaaggccataacacttcaaagtggtacagaacttgaatcaccaccacaccaagaagtacataagttgatttcaactaaaggagtcaacaatttatcccttgaaggatcatcaccaccaaatgtttaatctcttactttagttggtccaccatcactgaaaaagccatacaaaccaattgtaccaacttatgtcactcctccacctttccaagtagattaaaaaatccaagaaagaggagcccat

SEQ ID NO: 402999 - DNA, 803 bp, Cannabis indica
cccttcatttctttataaggggggatcgaaaaaatgatagtcgaagctctgccaaaatatcctataaggtttcttctttttttaagagaaacctagagaagcagagttagggttttactttgtaaacaccacttgtaatatgttcaagaagcctataaggccaatatactaactcatggactcgggataattaatgcatgaaccacgtaaaattctttgtcttagttatttatcaattatttaattctaaagctttcatttaattagtttttgaaaaatctgggtaaacaatcatcattgttgcagagtgggtcacttaatcatacaatgttgggtttaagagataagaaaaagaagaacaaggaggaagaagacaacgacagtaattctaatacagtggtggatgacaatgttagggcttatgtcctgaaaagcctgtaaggacatttctaattattaaataaagagttgaacttttgatatatgcatgaatgttaaattatttatatttattattaaatatcaaaaaatttcttattcatatataaggttgtggctcgtagctgtacaaagaattaagaccactttgttaaaacagtcaacagcatataaaagtttgggaatccttaatcaatggttgctagtacggttcagtgatgcctgttcttcggtgcaagtaatctcaatttggattactgatgtagtatgacatcaaagtgaaggtattgtatataatatggattatatatgataatgatctatatgaatgaagttttctttattaacatgttgtttactataaa

SEQ ID NO: 403000 - DNA, 661 bp, Cannabis indica
taaaatggtaaaatatacaaggtacaatttattggctgagaaaaatagagaaatgagccaaataaatggaaaggaatataaaattatagtatattttgaatttggtcttttcttgaaggctgctggagagacaaactggcgtggggacaacttgcagcagctgggaaacgtgtcggcgtgctggtggctggtggagagaaaggctggtgcacgcgggtcccacgcatgatgtcagcaggcggcttggtaggaggaagaaggcgcctgacgcgcccttgtctggagtggaccacacgcgcccgcctgggccttcagatcagcacatggacggctggagatgggcttcgggttgtgcgcgcgagtgggcttctacaatccaacaaaaaaatctgatttttttttttatatattttcttttttccaactttaaaataccacaataatttcaattcctataataaaaaagacaataaattaaatattttcacataaaaatatatttaattaattccaataaaatattaatttattttttaatttatctttttttttttgagtaaacctgatgctttcaaatgaacaagataaagcaaagtcaacaggtgtaactggaaggcaaacaaccattccagacgcactcgctaataagcctgagaccaat

SEQ ID NO: 403001 - DNA, 657 bp, Cannabis indica
gagagagcactcaaagccaggaccgccccaggtgccgtaagcgtcaaaccatcagatttgggaagagtgcttctatatatgatatctccacactccataaccgtacagggcaaccccactccgacgccaagaaatagctcccggaccgcatcgatcagctcaccgcctcctccgacggccgaagaaactcgaaatcttttgggatcagtaatcgaaatcctattgaaattgagagcaagcttcttgcccagaaacggagaattactaatattggggttggaagaggaagatctgtggggatggaggttggagttggtgagaccgacagcaactccaccagccccggcagcaattgcggcggccatacccgttggtggtcggtgaatagataatagtgtaatggattagtgtagtaatgtattggttgagttggattggaggaatgttgttggaatttagaccactagtctttggaaatagtgacagttaattcaggtattttttgtggagggaaatcgctcaaccggattgacagtatactcatactttgctaatcaagtgacacgtcacctcgatcaaagtcaaaactactgcgctctcttccttgcagattcaaaactacaatttttcagataacccatttttagtctcaaatta

SEQ ID NO: 403002 - DNA, 584 bp, Cannabis indica
atataaaaatagcatgaaaaatatcattttaaggtaatgtaggatatgatgtgttatataggaagagaaacaagttattagtattttttttctttctcaagaagtggaataaacaaaattaagtacaatctgaaatatgagtagacacactgtgatcatctttcgaaatagaagcatgttaattatattatttttaggttagatattatatattgcaaataaatttgttttaaatatagatatagtgaagaaaaattatcttgcttgatttatctcgaggtagttagaaaattatatccacatttaatttaattaatttgcactgcagaatttattacttttattaaaaaattagtaagtcttaagaaagaaagaataagattaagaaagagataaattagattatttaattccaataaattgttaggcagcactacttgactaataagttattaaaaaattagttaggtatgcatgcaaaaagcttaacatattcttttattatatatacatatatatgttaagtcatacattgtaatattaatatgtgatcaacttcttttgtttatttattattgagagag

SEQ ID NO: 403003 - DNA, 818 bp, Cannabis indica
ggttcccctggtttggattggtgcgtcttcagttgaggcttgaagtctttgggaacaagtgaaaattaggttggtgtgtctgggtaagatgattttgggaggatgactctgaacttagaagggacattctagcaggaaagaggtgatccattctgaaaatggatttcaccaaaaagtcagaggtttgtaaaataacaacttgagctgcccttttatacacagagtccagtgacaagaaagctaaagattgggaaatcaaacggttggaagaagggcagaatatgaagagacgattcataattactctcaaaaccgtacaactgccaaaatcaaaggatgcatttttccaagaaaagatcttaacgaaaataccctctgtaattattaaaacactcttttttactaaaaagaactttttaaggggcaattgtaatactcaaaatttggctgccacctcaatgaaggacacatgtcaaggtaaagaatcgataccattgcttttatggaataactcataaattacataagtatcagagtatatttgtaacccgctgactgtaaggtcttaggcgaggaatcaatgtacaaactgacacttagtatattagcgagaaaccatatgtcgctaaatgcgaatagcgaggcacgaaagaaagcaacccgtatcaatcatggagctacttagggtataatgaacaaactaactgtaaaagtcggatcggctcaagaacaagtaagcgaggtgaccatctcgctatgggaagacttcctatagctttatccagctaacggtaacgaggcttacaaccctggtgagt

SEQ ID NO: 403004 - DNA, 968 bp, Cannabis indica
gcttcgacgcttacaagcagtctgtgtaaaggaagagaaagcaagggaagatttctttgaagattgataagacaagcttgatggaactggacgccttcttttcctctttacttctctctatctgtccttagctaatagcttgggtgaatatatttatagaggtagcttatcgtgcctcttcgaggtgaaccctaacttcgtaaagaaatcaagtggcaactgcttttacctttatgcatctgcttttacctttatgcattcacacctaaacccaggtatacattcgtctcaggttttgtgcggctactattcatatatatatattttttttcgttttatacacatctatctactattttgcttcttttactgttattattttatttatttacagaatcttttctatttctttttttactcatcaagagtatttgttaacaacccagaaactattacattaacagagaggatgttgaaagattcatgagataaactggactgcaggatgcttttttggatgaagatgctgcaaggttgcatactattgctggtgtcatttcacatagtgcagcagtttcactggaagagattaatggaggcctttctcctctcaaatcctcacaaaagaataggaaaactagacatatagatgaccttcgatgatccccttcaacatgacagggctggtcctgtcatgatatgtcttctcttccaactgtatcaaaattgtctaaaatagtagttgctactaagaaaggatttgcattgattgggagtgcagcagcctgtggggccattctgacatctttcacatatccattccaggggtgaagtgagataaaagtgagttgtattttagattattatattatgggctcgtttggtacgctgtattaggtcgtattatattgtattgtattatatatcatattttcatataatactatgttaaactttaatttatacta

SEQ ID NO: 403005 - DNA, 518 bp, Cannabis indica
gttagcacatattgttagtgatcaatagttgatgggcttaacatctgtgtgtgtaaagtctagttgaagcagaagtatgagattttctagttaactaaagcctttgatgagcaggtcagtccaactagggtgatgtactagataagtctccttatttctataaaaacatattgtctcatcacaattgtatatttttgttaatgagataaaataaaaattgcttctaatttaaaaacctagagaggaagatttagttgatagtattgcactactaaattgtattaattactatgaatcaaacaggtatacatacctaattattatttattattattgtgttttatattatatatttttttttatcttgacattattaatttttttaatattaaaactttaaattattcaaaaaaatttaaaattttatcttaaataattagtacagcgcgtacacggttattaaaaaaactaaaattaaaattaaaacatatatgagatgtaccgaggtgtatttagat

SEQ ID NO: 403006 - DNA, 1413 bp, Cannabis indica
atcttaatatttttactaaataaatatctaaaaattgatcttaggcaaattaataattatttttcacaacaaattttttaggattaatgtatgataatgtgagagggagagagtaagtgcgtcacagagtaccgattgaaaaaggaaaaagaaaaaaaaaacaatgaaaatgtgtgagtggaagagaattcagtataaatgaaaaaaaaaaaaattgggaaacttacaaaaatattggaattttgattaatttttacaaaaatactgtcacacagaaatattttcaaaaatactgtgtttttgtaaaacaccagtaaaacacaaagcagaacaactcaaaacaacagtagaacaactaaaaaacactagtagaataccagtgaaaacttaacacagtatactgcagtatgaaacttataaaaaaatatagtaaaaaaataataaataccgcctggtagtatttttgtaaaaaaatgacaaaaattagtatacatgtaaatttcccaaaaggatttagatagtaaaaatactaaaatcagctcatgacaatatatatgttaacaaaatgtataatttactatttttattgtgaaaaggcccgacaaatcttcattgaaaactataggcccagcccaaccgatgctagtgtaaatgggtgtcacaatcgaatcaatatttgaaacctaaagctttagaaaatatataatatttcaaggttcctttagagaaatattatttcaaggtgtttagattttttattcataaatgaaaaaatgattcgaagataatgtaaaagacccaaaaagctggttcaaggatggaagagagaaaagttggtgaaccaatatgagtggaaagtgaatcaaactttgggaaataaaactggtcaatttttggttcataaactagggaattgagatttggtcattgattgagtgaaaattatgtgaattagggaatgtaggtggaagaggatgtttgattagatgaattaggtttggaatcagaaggaaatcagattaggaaggatttgcctttttgtaataaagataagttggtaacaatgacatcacaggtgtggaaggtgtttgtgtattgagtatgagtagtcatagtctcactctaacgcactcaatttcatttccatgaggaaaggaattgacccatcaataaggcccaattgccttttccgccatgggctcttgttcccaactcgcaaggtgttaatgtgaggaaatgatcttggatcctttattactttttttttttggtattttataaaaatattggattttgagtaaaggtttacatttatactaggggtgttcacaaattatccgatccaatccattccgcacgatccaatccaatccaatccgcaaaatgcgggtatccgcacttgtgcggattgga

SEQ ID NO: 403007 - DNA, 1295 bp, Cannabis indica
gataaagagtggagatcatactatagacctcgcagagtgcttcaagatattaagaaaatacaatatgaagcttaacccaaaaaagtattcatttggagtttcctcaggaaagtttctaggattcatagtcaatgcgaggggcatagaagcaaaccttgagaagatcaaggctttgatagatatgccatcaccaacaaaactgaaggaagttcaggccttaacaggaagaatggtggcacttaacagattcatttcgaagtcaactgataagtgcctaccatttttcaatgtattgcgagacaacaagaaatttgaatggacagaagagtgcaaggaggcctttaagagcataaaaaggaatttgtcgacacctccaattttggcaaaaccagtaactgaagagacattactcctctacttggctgtctcagaaaatacgattagtgctgtaatagtgcgagaagagggaaagcaccaacaacctgtttactatgttagtaagaggttactaggggaagaatcgaggtttccccctcttgaaaaacttgccttatgcctaatccacgtatctcgcaagttatggccttactttcaggcataatcgattaaggtgttaactgatcaacccctgaggcaagttttatcaaaaccagatgcttctagaagattgataaaatggtcaattgaactgggtagtttgacataacttatcacccacgaacatccatcaagggccaagccttggcagatttcttaatagaaggaataactccagaggaaaatctgcttgttcatcgagacgcggatacatggaaattatacgtggatggtgcatccaatgagcatggctcgggtgcaagggtgatattaatttttccagaaggctttaagtttcactatgccttgagatttcaatttgatgcgtcaaacaatgaggctgagtatgaagccttgatcgctggtttgaggatagctgaagcattgaaagttaaaaatctcatatgccatagtgattcacagctgatagtaaattaagttctcggggaataccaggctaagggcttaaaaatggcaaagtatctagataaagtttggaagaacttgaaaaagtttgattatttcaaaatcaagcaaatcccaagagaacaaaactctaacgctgatgccttagcgaaactggcctcgcagaatgatttggatgaactaaactttgttatggtggaaatgctaaatgaaccaagtatatgtgaaaaggaagatgtcgagatgatagatagctcgcccacatggatgac

SEQ ID NO: 403008 - DNA, 630 bp, Cannabis indica
tattattattttcatacatcttgctaacattttggaacttttaatttgcttaaaactttatataatatattttttttaaaaaaaataaaattgtggtgtagtttctccaaatgaaaaggtctctgcaaacatcatttttggaaagttgttcactcgcggttgtcagtcccgaaaggattcttgtggaatgatagtcgagtctggaaggatgttcccagatgactatcatgtccactctgggttcagtcttcaaaatagctagccctcccctagaaaggagttcagctggctagttgtcactcttggaatggtagatctaaatagttgactctagcacactatatcatatctggaagcatcttcagcaactgtccttggtccgtgagtcgagcaaatatatgttcctagaggctctaacacttaagttgacgtggagacttcgctcaaagaaaagttggtaattaagttagttatttctaattaacttaacaacctcgtttcttatagtcaccgactttaggatcttgatcctaaccctataaataccaccttcacttatcattttagagaaactggaataaaaaagaagaagaagatctcagagaggtgagattgagagtttgagagaga

SEQ ID NO: 403009 - DNA, 933 bp, Cannabis indica
ttgagagaaaaaaataataaaaatggagtctttaaatctcaacgtctagtttctttttatttttaacttttttatttaaatggagttgagtgtgagtgagaaactgatatatgacaaggaatctaatttaaaggctttaatttgattaggtcatttgttttaatggattttattaggtcatttaattcggaaccactagcaaaattgtccaaattaatagacatcatttccacaacggctatattctttcttatgattagtattgcgtgggtactttactatctcatcctcatttgacttttccagacacatgctcatcaattttcaattcatcatgaagcaaaacgaaagcccacattttattcaacctgacataaagattgagttataaaattagtatgaaaattgcaagataagtcccaaaaaatctagtttgatacagataaaatccttaattttaaaaattagtattaatagtctccaatattataattttcataagtctattactacttaagttgattgatccgtttgtaatatgctacgtgtttaagtattactaatccacatcataattttaattaaaattaatttaaaaaaaaaaaattattaaatcataaaaacattaatttttttcattttcattttcgtctttcttttttctttttcttcatctttttcttatctctagccaaccccgatcctaacccctacccaactcccacaatggacagcaatactccggccaccctcaacccaaatggaccattgagaaccccaaaaccccaaagctctctcattctccatctcctttgtaacgccctaaataatcaggcacgctacccaaaatacttatgaaattctaatcccctaatcgggattacaaatcaaaatagcgcagaatttaaacttttatattaaacagaatgaaaa

SEQ ID NO: 403010 - DNA, 656 bp, Cannabis indica
aataaaaaaaatgacctcgggatataatagtttaatatttagcggttaaattctataaagctccaaaaatataacttaagtattattagcgttaaaaattaaatttaagtatttatttgtaagtgagatttaaacttaagtatttatgccgtaaattattctattttttaaaataatattggaataaataagatttttatttgagtttaaacttttttaaaaaaaaaaaaaaaaaaaagataaagagattttatttgttttggtaattttattagacaaaaaatttggtaagtggtttagatttgattaaagtatttttaatggtagcattttttaaaatgtgctaaatattttcatatatcaaagatataatattttattttatctttattctatattatttttagtatttttactttttaaaaacactttaagagaatcttcaatggatgacaacactatagttattaaaagtacgtgcatcatcttaaaatattttttttttattttctctctcatccacataagatttgacaacttttcatacaaaaattactctaatggcatgtttactatacaatattcaagatcagaataaattaatggagaaatgtaacagaataaataaaaaaataatacggaatcaatatttagta

SEQ ID NO: 403011 - DNA, 1162 bp, Cannabis indica
agaaggatgaaaggtaaatctgatgcaaaatagaaaggaccttatgttgttactaaggtcttcctaagaggggtgtatgaactttcaaattcagaaggctgacgcatttattcgtgtgttaatgggaagttcatcaaaaagttctacacttaaacaaaaaggtatttacccatggtgtagacagcgcacttaaaaaagacgagtgtgtaatgaactacgcaaggcttaattccactccaggtacatagacaatctagtttacaactaggcccaaccacataaaataaaaattcgatctcctaaaaaaataattgcataaaaaatgcaaagaactacgaatggcttgatcccttaaaagggtacgttggcaatctgaacaaaattggatgcagccacaaaatataaaaaaaatatatatatattcctcctaacaaaggagtcaaaattctaaaagatctaaatgacaaaatactattagtcctcaaggctaataaacacaaaaaagctaacaaaaactaaaacttaaactaaaatgttttaaaagcaaaatcataagatcttcagtccatctggagaaataaagtcaaagcgtcgagtcttctctggatttcttcttcttgaaacttgagtgttgctttcgctctctcagcttcatagaatttttctacactagcttggtcctttgaccgacttatctcctcaacgagatgttgttgctccttcaagaaatcattgagactagaaagatctacctcaaacgatgcttttttggcttcgaacttagctcgttgttgttgtatggctacttctgctgcagtaatctctgcttcctctgccttaaaatcttcaaaatcctttgtcttgttagtgacaatatggacaaacgatctataactatcgaattatcctcatcacgacgaagaaggttcgtgataagatattcatcaagactaaggtcattctcaacaatttgagtagaagcaagagacttttcttgagctttgagcaaatcattgacagagtcagtgaaccatacaacctctgctaagccacatttacaattcatgcaaatggtactcaacacgtcaagttgcatacccacgtcagcacgatgttttgaaatgtctattgttgtcaaaggataagattgttgggttttatg

SEQ ID NO: 403012 - DNA, 707 bp, Cannabis indica
caccaccgagttccgttcaccacacaccattctcagcagcaagaaatcgagcagctgcacaacaatacctgtacgcagtcaaagccaagccaacgaatcggagcccgcacatttcagccaagcagaagtaattccgagcttgtgaatttaaattgaaaatctatttggttggaatgtattatttggtgaacattgtggtctgtgctattttatggtggagtagtacttgatttgttttgctaatctgttagtatactggtgttaattggggctgttgagagaaactttatgtggatgaattttactaaaacagagatcaaaatgccaaaaatcaagaggtgtgctcataagccttcgcagaaagatgctcgagaagctaaaaaatttatttcggacgatgctgaaaaaaaatatcttgattcggttcgccacaaggaattttatgtcgagcgaggaacgatagtaagagatgaggacttcggtagcatgccgccatggctaatagagaacataaaaaagagaaattggttacaattgtgtgaagatccggcctccgcagtttgtcaagtggtaaaggaattttacgcaaattttctggcacatgaattgccagctgagattaaggtgcgagaggttaaagtaaaattttccaacagagatatcaatcattactaccagctcaaaaatgtgacttgtgagttctctaa

SEQ ID NO: 403013 - DNA, 837 bp, Cannabis indica
ttttttcagattcttccaagttgaatcccttttgggttgtcattaaattctctgcataatagaatttgaattattatttttgttttgttcttgtgtgatttcaaattgatagaggttgcaattgctttttttttcttttggtttaccttttggttttaaatttgtcaggattattttattttgttgttgagatcttcattgcacctttcttttgtataatttttttggacttgaaatcgtgccttggttgagaacgaaaatggaggagatatggaagctttggtgtggctggaaacaaagaagaaggagagatgaagatgggggttgttttgtttcattccgtatatttgaaaaataatgtttttaatttccttttttgtttattttttcttaacaagatgaaaatataaattttgggcctaaaaagtctgttaaggaaaaaattccaaaaaaaatatatacgtatatatgtacaatttttaacatggaaataatataccccaatcaaatatatctatatctcaaatttaaactaatattctaagttttctttaatttcactcaatatatactatatcacataaaagtgatatactttacagcaatataaatataccacaaaactaatattagtgatgcacttaatttttttcatttccttcatgatatactaaatcacgtaaaatagatataccaatccttttaattaatataccaatcaattaataagttttctttattctttcaattaatattcataaaagacctatactattttttttatttttattttttattcatataaaaatatataccacaattcaaagtagatgtatc

SEQ ID NO: 403014 - DNA, 642 bp, Cannabis indica
caattatattttaaaacttaaaaatcaaatgtacattccattcttatgtataatttttttttcaacatacaatttaaaacaaaattaaacatttctttacacatacaattttttttttcaccatttgaatttgttatgtcttattttatttattttaatttgttgtttgagacttaaaataacaattatttattttattttattgttagttatgtgaatttttttttctttttttcataaatattaaataatttaatattaaaaagtaaccaatttaaaataaccgatctaattcgcacttttacggattggattggattggatttgagctattgcgcggattggattggatccaaaatatgaaatatgcacttagtgcagatcggatgcactatgagaaaaataatgcggattggattggatgagcacccctacttttacttagatcaatttttacatgattacatgagcatgtttggtattgcttttttatttttttgtcttcaaaaagtatttttagaaatgagaacaaaaaattatttttgaagttttcaaaatacaagtcgcgtttggttagtgttttctaaaaataatattaaccaaaagtgaattggtttttaaaacagaaaacaacattttgtt

SEQ ID NO: 403015 - DNA, 701 bp, Cannabis indica
gccaagatctataaagagaaaactaaaagatggcatgatagacatttatcaagaaaagagttccagcctggccaacaagttctattatataattccagattgaagctttttcctggaaaattgaaatcaaggtggtcaggaccgttcactgtggttcaagttttcccatatggcgcggtagaagttaaaggagaaaaaccagagactttcaaagtcaatggtcaacgattgaagccttatttgggaggccatattgatgaagccaagaaagttattcaattggtgcctctgtaaaggggaccttcagcattttaaattatttattggtagtttttttttagtaaactttagttttaaattttacattcttagttaaaaaaaataaataaataaataaaatatatatataataaataaaataaaataaaaagctgtgtaaaaaccgtggaaatcgtaaaaactagtcaatttaattaatttttagtgtttaggaaatattctttaatctttaaccctgcagaactacatgtcgtatgaaggaagcacacgggccgcggcatgctaaaacacgggccacggcatgctccacttagaagatacctggaaggagacacgggccgcggcatgctccacccttcatttagcatgccgcggcacgctaagcacaaatcaggggaaaaagagcttcgtccccaatgaaa

SEQ ID NO: 403016 - DNA, 665 bp, Cannabis indica
attattataattggaaatgctataagggtacaattaataatctatataattaattatggggtttcatataatttaaaataataatttttataaaatatcgttaaacaatcgtaaaatatcacttctaaatattgctaagcctcgtatttctttttacatggtgaacagagtcacacatgattaacaatacaacacactacaatcggcggtggaaccccttgaattaggatagcttattgtctaaccaaagggtatgttttgccaaaccatgagctgtggaaatcaaatctccatccacataggacaaaactgtctccagaaatatagacaataaaactataacatctttgaacaataccccatcaccttgaaaaacatcttctctttattaatagttgtcgccagagttaacaaaattaaaaaaaaaaaacatcacaacatagttatattagaatgacaatcttcaaaataaaaattaatatacaagtatagaatttaacacagaactcaaattactagcttaaaattactaaaaaactaagaaaacaataaaatttccaagaataactagccaaaggtattaccctttggctagtaacaatatactaacaccctaatttaaaattgctaaaaatcaataataaacagattatatttaaaattaa

SEQ ID NO: 403017 - DNA, 551 bp, Cannabis indica
gagagagagagagatagagaaatcaagttagtaaggggttgcacaagagtgaaacatgagagctgaacagagatgaattctcttcaagattgagggtattgcaagactgtttctagttcaaagaattcgacggttttgaagctcatttttgtaactggtatgaatcaccattagttttgttttgtgcacttgattctccattgatgtaagttgtaatcttagccatttatcaataaagatttcacagccaatagagttgtttctacctgggggattaggtccaggttttatccaaaacttgtgactgaacctcgttatttcttgctgtcttttatttatctggtttgatacatttctggtttatcattctaagccattttattcttgcattgtgttcttgttggtgcttgagtgcacaacaaatggtatcagagcactagggagatcagggattagtttcaagaactctatgcaagaaatcaagattgatgcattatggcttcaaccagattcgaggaggacaaattcacaggcacaaatgacttcagttt

SEQ ID NO: 403018 - DNA, 564 bp, Cannabis indica
tgaactctaagacaactcaaatatcaaggattatggaaaaataaaagcattaaacagtacaaacccctaaggatttccttagagaaataaatcggaccgagtcaagagctttagtaaaaatatctgcaatttgtttgctagtttcaacatattctaagacaagaattttattttccacaagctctctaataaagtgatgacgaatgtctatgtgcttagtgcgagagtgttgaacaggattcttagaaatgtttatagcactagtgttatcacaaaaaatggttaaagttttcaaatcaaacccataatctgccatcatttgtttcatccataacaattgggtacaacaactacccgcagcaatgtactcagcctctgctgtggacagagagattgagttttgcttcttgctatgccatgaaaccagattgtttccaagatagaaacatccaccactagtactttttctatcatcagcattacctgcccaatcagcatcactaaagcaaacaaggttagaattagtgtcttttgaaaaccaaatcccaaaatcaatagtgctat

SEQ ID NO: 403019 - DNA, 408 bp, Cannabis indica
taatattactttttttaaacaaaaataatattacttttgaaacaacatttgtatttttatgaaaaattaaattaaatttgtaataatgttaaaataatagagaattagtctacatattaatttttattttctttttaaatttataatttaaattgtttcgatgatttctatgtgaattttaattgcgatttaactcatttcgtgagttgcttgagtttttatgtgaatttttcataaaataacaaaaaaaaaaaaaaaaaaactaaatttaaaaatataaaaataaaaaaaaactcctaaaataattgtacatgtaaattaaatttttattatttttgggtatttaaaaattttctaattattattattattattattattattcttaactgcaaaacgacgtcgtgt

SEQ ID NO: 403020 - DNA, 683 bp, Cannabis indica
ataagacctcattctctataaaagaacacctcctctagttcatttttacattcaaaaatgtaaccataaggtcagagcatcactctttagtttttctctctagaatttagagctttcaaacttaactatttttcttgtaatcattctcatgagaataaaatctcaaagtagacgtagctctattactatcgcgacataggaagtgaactactataaattcttatgtgtgctctctattttacttagttacttctaactttgatctcatctatacataagagcaagttggccagatttctccatcaacaacaatgtcctaccaatttacacaattccctccatctttggctagtctttctcttaaagtcccattgcccgatttgagaatgatttgagcatgtattttgaaatagttttgacaggtttggcatggtcaagaatccatgtcatttttgaacaaaaaagtatatttaaagcactaagaaaatctcacatttctgatagtggtaccctctgtgaatgtggccggacctttctttactcttacactcgttagtatttttttaatatctcaccctacacatctcgaaaaattatgaaatttcaaagggatgaagccaagactgttttgccttaatttttttgtttcacacattgagagaaaaagtagttttcaagcacta

SEQ ID NO: 403021 - DNA, 1049 bp, Cannabis indica
ggtgcactcactacaaaattaagctacctttttattgataactctttagttataatataaattttttgtaactaaatgtgactttagttaccaaaaaagttacttataattaaaacataatatttaaatacaaattgtcactattttagttttagtcacaataataaagattatgactaaaaatacatttagtattgtgactaatattacattttaaccacaaaccttttaattacaacctagaaataataatttataattattaatcacaatatttttaattttagtcacaagtttattgtggtactaaaagtaagatttttgtagtgacttccaaaagaagtgcactcatactttatttgtgtgtttttgagtacattcgatagttttaaattttaattctttttttatacgacaatatgtacatcgtagttatttaagacatcatgcaaactttataaaattcagaaaaattttaacccgtcgaaaaaaaagttcaaacaatttatttcacgagtgtcttttaatttatacgtatgtgaagtagattatttaaaccatattttctatattataaaatagagtaatttgcggcataaattcctaagtttaactcccagatgcaaataaatacctaagtttaacttttggcggtaataatacctaagttatatttttagaactatgtaggtacctaaccgttaaaattttatgtcattatttacgtgccattttcttattggtatattttaattaattttttttaaaaaataaaattttagtgacttggaccaattaggaattgccatgtggcaatttacttaacaattaacagtcaggtacctacaaaagttccagaattataacttaggtattattaccgccaaaaattaaacttaggtatttatttgcaactgggagttaaacttaggtatttatgccgcaaataactctacaaattattttaaatttcttaaagctttgcatgtatgatattttaaatatgttttttttttttttcattttaacactttaaaataatttttttt

SEQ ID NO: 403022 - DNA, 809 bp, Cannabis indica
aaaatatacctattttttgagtgagttgccaatataccttcactctctacttaaatctagcaaataatttgcattaacttaagggatttaataaggacattatctataaaaatagttatatttttaaaaaaaatatatgaaaaatagagataaaaattaaaacaagtaaaataaaagaggtatacaatataatttcctctattgtgggttaaaaattgtacatggtatttttgtgttaaagtttgtacaattttttagctcgagttaaatttaatacatattttatcaccattaaaattaaatttcaataaaatattttaaaaaataacaatataccacatatataattcttcagagatattctaataatactagagatgcattatgccgatagggagttactttggagaggttaattctccttgcttcctagtctaattaattgtaacttcgtatttggttttctctttttcagtaaagttacagatataaaaaaaaaacgttaatagctcttgaaatattagagggtcattgtcattgtccgagtaaagcagggacaagcgcaggtgcgctaggccacgtgtgtatgtgttcataaaactgattatcttaatttttaatcacttaaaagtgagaaatactaacaagtcatgatactattatattagggctcgtttggaacgccgtattaagtcgtattgtattgtattgtattatattgaattggattatatattatatttttatataatactatgttaaattttaatttatagtaaaatattatatatttagatgtccataaaagt

SEQ ID NO: 403023 - DNA, 920 bp, Cannabis indica
atatataattgcaagtgaggaaatggccataaagtagtaaaaagaagctataaattaataacacttttatgcaattctctgcatctgtccatatatcttttaggttatcacttttatttatatatttatgtagtcacctctctaccaatctaaatgatattaatattatgtcaagatcattgaccacgttcatgacatggaaaatacctttccttttctaaaaagaaaaaaaaattatatagctattaactagagctagagctagaaagaaacaaaaagaaaccccacgtatagtatatttatctaatttaaatccatataaaaaatacagcacaaatttatattacgtacaccttcataaaagatagtttaatttagtattttgtttgttgacatagaagaaagtgttttagtttatttatttttcatattattagtgtatgttgtgcttaattatttaacattatctgtaaattatcatatcgaaataaaatagtaaaatagttatcgcactataacaaaatattaaaatttattatttttaatattgtaaattatttatttttttttacaaatttattagtagctagttggtagtaaataagtaaaacgactatataaatttatatatataaacaaaactaaaaactaatattcgataccgaaattcattaaaaatgtaccaaaatactctcttttgagtttgcttatatatatatgcctgcagcagagattcacatcatataatattttatgaaattaacttattatatacttttcaatagtcttaattaggtaataacatgatgtatataaatatatatatatttactaggtgaatgtacttgccgagccacgtattgatagttttatttaagattttagtttttttaagattttgaatatattttatttttaaa

SEQ ID NO: 403024 - DNA, 693 bp, Cannabis indica
aagtatatttaacacaattttagcactatgttacaccatttttggcaggctcgatcccggttattagtcaagctcaatggtcaatcagcccaccgatgaccgaggtatgttaatgttggaaaaaaaaataattttaattttttaattctcaatgctattacatttgattgtaggcattaatttacaatataaatattatttttaagataattccatgtacattgaattgatatatctaatgcagctacaaatataataaagtgttattacattatatattgtaataagtacaattggttcaaaaagtttgataataattagaattagtctagttaataaactttaattcaatattaaagatcatgacatatatatcctcagttaagtaggtaattcattcttcacgcacagtatcgatctcattcattcttcacgcacagtatcgatctcattcattcttctcaccataacactataatatgaaaattaatatcaaattatagggtgattctacaatgtacccccttaaaaggaatgtactggtacattcttaacttatttcagcatccagaaaaattttttagtctaattttttttcatattcatgtacgttatagttatttaagatatcttacaaaattttgaaaaattcggaataatttacaatatagaaaataatgttcaaacagtcta

SEQ ID NO: 403025 - DNA, 737 bp, Cannabis indica
atcaaaaaaatttaacacggtaaaaactccgtttaaacagtacgtgttgcatgcacgtgtgactaattttattttatacgcgtaataaaacagtattgattaaacatttgttttctatattgtaaattattctaaatttcttaaaattttgtaggtataaccagggtcggccctaagcataggcgggctaggcctgtgcctagggcccacctagctcagggtcccaaaaaaaatttatcccctttaaattaaaattacacatttttttatcaattttgaaaaaatatcatatatttttctaaatgagggcccaaaaatatttttttcccctatgatccactaaatttcagggtcggctctgggtataacgtacatgaatatgaaaaaaaaatagactaagaaattattttggataccgaaacaagtagagagtgtatcagtacatctattttaaggaggtgcattgtagaatcacccaaggaaaatttaatagaccctctagacacatcaatacttcccttataattcaatttaattggtgatggtagaaaattgcttaaaaaatattattagccttggtgcatcgaattaaaatttagtttgattgggtcaaataatagagtgcactcatgtatactttaaattactatttaattggtccacctaaataaataaaataagaaaagaaaatatttaattttttaaaaaaaaactaaggaatacaaatcatttttttt

SEQ ID NO: 403026 - DNA, 573 bp, Cannabis indica
aaaaggagaaaggttccttttctgatagctcgtacaacagtatctcttaatatgaattcttagataatatcactcaagtaaaataactcgaccctttgcccagtgaacatgtatcactatttatagggctatgagcttggagaggaagtatttccgttctcgttacaatggatataagcagaaagattgcataataaatatagaatacactgaccgtgggatttggacagcttgtcatatctttacagtctaattcacaagttacggtgattttcttgatgactcatgatgcgaacgctgaaatcgctaagtggttgtcgctctgcgtggattgctaattgcgttgcctcgagcatgcatatgagatatcttgctcggattatatcctacgggtagatactcggtgttgatcccacgtgtcacaatcatgtgatgccacgttagagtgcaaaaattgggataacatttgcccccaagtctgtacgggacttccgaagttgcctgtagacttcatctaagctgcttttgttgggttttatgccctaaataaaactacatttcaatgtaatccat

SEQ ID NO: 403027 - DNA, 613 bp, Cannabis indica
ttgtgggaagtctattgatggaaaagacagcagtactaaaggcataccaccaataggataggtccaaaccagattgagcaagtaaggtgagaccggtttcagtgatgtgtctgtgttttctctctgccctcccattttgttcatgagttcttggacaaggatgttgaaagtgaatgccttgatcttccaagaactttttgaatgatctgtattctcctccccaatcggcttgaacagatttaattggaagattaaactgtttttccactaaccctttccatttaataaagacctcaaaggcttgagatttttgagttagtggaaagatccatgtgtacctgctgaaatcatcaagaaaatgcacataatacttgtatccttgtttggcatcaacatgagatggtccccataagtcagtgtgaattaaggccaaaggttggtttgctctattttcagaaatggagaaaggaagagtatggctttttccagactgacaagcggtacaaaagtttaagtctttgatggaaccagtatggggaagagagggtaatagtttaatgagagtgtttatggaaggatgaccaagtttgcaatgccatgtgttaacatcttt

SEQ ID NO: 403028 - DNA, 1056 bp, Cannabis indica
aaaaaaattataaaaagacgtttagcagcggttagcacttgaagcaaacatggttagcttctgttgctaaccaacgctaaagtagttagcttctattattaactgatgcttaatgcgttttattttacaaaatcccaactcaaaattaggttttcccatttcgagcactctccatttctagtcttcttctatttctctctctctctgccccaagccccattaacaccattctcagccctaagccccaaatctcacccgctacaccctctccaccccaaaccccattaacgactctctctcagccatcgatgcaccactgcctgccctctctccgttccaatgacgactctctctgtagtctagtagtagtgtttatttcaatataactctatctttatctatctctttgtatacttgcaggtacgttttttattatatcttatttatttatgtcctatcttttatttattatctatgctcatatttatttttttgaaatatttcactcattagataatcttctgttaacgcagatttttgttaactaaattaaaacctatttcgtgatggatttgcacagaaataatagtagtaaaaggaaaagaaataacacacagtttttttacgtgattttgcagtaaaaagtttgcatagtctacgagtctattttattagatttttgatacaaaactatgactttttcactaaaggttttttctgtccatttttcgatgtatcctgttcctatttatagttacataggagggcaattaattacaatcaaattgatttcccacaacaattatctcttgaaattgtgggatttgattacgtcacacgtaaattaaatgcagttattatttgaaaaattacacaactatgatttatccgcttttaccgggtcaatgttgatgtggatttaaacacgctcgaaagtgtagctcgcagagttatctcactggggtagcaacaataaccctcacagcgagctgaagcttttcccatgtcttttcgaggttgataatgtaataccgtcgtttatgctattgaagacat

SEQ ID NO: 403029 - DNA, 1494 bp, Cannabis indica
gtggtcattaaaataataatcaccaatggtcagattttgaatcttgtccgttggatcgttttcgggttatttgttggaaaaattgcaactttgttgaggatgagttttggacccaaaatcttaagaattgtaatgtgggcgtgaaaaaaacttgatatatttatgaaatagcttaaaaacacaagttgaattgcgtcaatcgaatcaatattgagtgagttataactattttactaaaagttattcaacatcttcctgccaggttgacaacccagtcctcaggttgacacacaacgctggggttgacatcttgacgtcaacctggacgctaggtgagtgccaaaatgtcctagacttgtattttttgatgcctaagtgatgtgttgacaccaaataaatcatctttaatcctctagtaaagttgttcaccaattctcggagatgcctttttttgtgaaatcaagaaaactcgaaactcctcgattttgccaataatctaccttgttaaataatgaaatatcaaagtatgaatttgacctaccaaaatttttagttatctcttaatacaaaaaaaaaaaagaatagttcaatgctcaaaaccaaatcgaattctattaagcaaaacctaacgcaccacgccaggtgtcaaccttggtgctagctaggtgcttgtcaggaacctttctggggctcattttgatacttttatggcattcgagatcgcgaacgaggtccccttccatagtagaatttgtatttgagcagtgaaaccatgtaacatgtcaacctgggcgttgggggccttgttcaggctctttggaaatcttatttttttcctcaagatcacttgtatcttcattatttatgatgacagaaaaaaaatgtccagaacacttttttggaagaaggattgaaaatagccaaggttgacaaaatatcaaccatggtgctgggtccagtttttggccaccagatgactccatttgattcccaaaaatatttgtttcttaatcttttatgaaaataaataaaatacctaaaacacttctaaaaaaaaacttcttaggaatggcccaggctgacaaagggtcaacctgggcgttgggtcctagttttgacccctaaacggttctatttgattctcgaaagcagtcaaatgttaaatgttgatgaaaattgagaatatgtcaggaggacttcatctgaattgctgatggaaatggcccaagttgacaaagagtcaacctgggcactaggccaagggctaggttaatctaggcggtgggtccccgtcctagcctctaggtcgatccatttctcccttaaaagcacttgtttcctcattttggatgaagacgaaggaaatgcttaggatatttctttagtatggtggttggaagcgctttaggttgacaatatgtcaacctgggtgctaggtgcctagagctcctagtgcttcgagtgctcaaaactaaaagtgctctgattctaatt

SEQ ID NO: 403030 - DNA, 599 bp, Cannabis indica
atgaaatgttaaaaagtattttttccaaccgtttataattgttgggaatactaagtattcccaacagtttataactgttgggaatactaatagttatgatcaccgttgggaatattaagtattcccaacaattatattagtattcccaatagttacaaactgttggtatttaattttttttttatatatttcattaagtattggccacaatttttcaccgttggtattagtttttcccaacagtttatttgcttcaggtctaaactgttgggaaaaatttttgctgactttttctaacggtttttataattaactcttttattaaccgttgggaaaagcctattttatagtaatggtaatacaacgcaataaaataaaatccaatctaccaaacaaaaggtcacgtagtagactttttatgactttactaaaggagttataaaattcttataattttttatattaatattcatgtatatataaggaacacttcttaatgggcattacccatgaatggttactaaacaaatttaactataatattaattttaaaaatatcaaaccatcgaattttgatctaataacaaataatgaaatca

SEQ ID NO: 403031 - DNA, 243 bp, Cannabis indica
atttttttaaaaaaatataagttttaaaattttttataattatttgaaaactaaaaaaattagagtattatatcaaatatcatataatttaagaataaaacttatttattcaaattatttgtactattaatatggtaatgcgttatattaaaaaacttgtattattttatgaatgtgtatatataatatgtaaatgcatcaaactataataaaataaagcaatcaatagttgagattttaaat

SEQ ID NO: 403032 - DNA, 778 bp, Cannabis indica
tatactactttgggaagctgtgtgtgtggtcgttgaagctagcttatatatgtgtgtgtgtggatagtgatgaattaaagaagaaaaaggtagttggggcgtctacaatactaaatacaaggctaagaccaatgaataaaataattagctgagtaatttgattgagccgcgtcaatatctcctttttctttacacttttccatctccacaattttatatagctacctctctgcctcagccaaataatttctccaggtatgtgctgattttttatgtttctttttttttttttttgacatttaatttggtgattctttataatatcttattactcttatattctcaaattctgtttatatttttatgtacatggtatattcttaattattttactttttccttataaatataataggattatgcgtttgattttctttataataatgatataaaaattctctatatacatcaaaattgggattatatatatacacgcgcatcatatatatagctatgattcatatatatatatatatatatatatatattatcacttatatatatatcatataagtatggttttaaaagtccttattgcctataattaagatcctggattttcttggatatatactaagagatgtatatgtagatataaaataaaatattattggcggacagaaactatataaatatagatatatatatatatatatatactagcaaaaaactacgtgcgaggcacgtataataaattttatgctaggttttttctatg

SEQ ID NO: 403033 - DNA, 617 bp, Cannabis indica
atctatccccttagaaatcttaattaaaccttttcctcaatggatgagaaattaccatcagctattttaactttttgatctcctgaacaaggtatatatgattcaaaaaatttagaagaatttgtcatatgatctgaagctccagaatctattatccatggtggatgatttttgataacaacttagagcatttatttctaatactttgttacctgcatatgcaatagaggcagtaggaataccagatgaggacgaggtagtgttcagcaatgcatgaaggtgattcatctgctccttagtgaaggggctggactcagcttcatgtgcagaaggggttcgacctgccttttctctctctgccttgcttttccagtttgctggtttgccatggattctccaacaggtctctcgagtatgacgaggtttattacagaaatcacaccaacacgtggcttctcatcagttttctgcatgtatggggtgttcttgttatatcctgcgcccatggtggctagcgctgaactctcaacaatagatgtaggtgtcttctttcccaacataacactccttcgactctcctctcttctaacttcagcaaatacttcaccaattggagg

SEQ ID NO: 403034 - DNA, 612 bp, Cannabis indica
cacacttccagctgggtcaaggccctcatacaatttgtaatatccccgctttaagccttcattgggatattacacctacaaaatgatggctcttatacacgagtatttcactatggctgcttctcaggaggtcactcatcttgaaattatcccaagtcaagcacacctaactgtggagttctttcaatatgggctaccaaaaaaataagatgcaccttgttgatataggtagtatcaatcaatccatttaagctcttttcaactatgtagtctcatacgtacacaatctcagaatcatcacactttacattctccaagcgatgtgagattgcacaacttacctggtatttttccttacggaacacatgactactaattgtcacaataaatattacttaaattaaatatttcttaataaaaaatgatgtttgttaaataacatttaaaaaattatacaactaaaattatacatgtgcattgcgcataatattaacttagtttatatatatcgttaatttatacttctcgttgttgtagttcttcatttttaaataattaatagggaaatttacgatttaaatactatatgttttaattttatacacttaaata

SEQ ID NO: 403035 - DNA, 619 bp, Cannabis indica
tactctgctttcaaacttggtatcagagctcctcttctacaccggtggtgtgttcgtgcgagtaaaatatggcagaacaaactcctatgcctgcagaacaaggatcgacagccagaagcacaaccagtggcgttgctcagatttcagctccagctcccactatcgttgggccacatgtgggtacaactcttactcaaccttttgctttaaaattagacaggaacaattatactttgtggaagaccatggtttctgctatagtctgtggtcatcgattggatgggtatctaaatggtaccagaatcagaccagtcgagttcctgcaattgatgtatcttcaggtgaaggtgctactgtcgtaaatccagagtttgaatcatggattgtgaatgaccaactgttgcttggttggctctatggctcaatgacagaaagtatagccacggaagttatggggtgtgactcgtctgcaagcttatggcaagctttggagacactgtttggagcacactcgagtgtaaaaatggatgaatatcgcactaagatacagacctacagaaagggaaccatgtctatggcagattaccttcgtacaaaaacgtcaatgggcagacgtttt

SEQ ID NO: 403036 - DNA, 513 bp, Cannabis indica
ggatgtaaagtcaagaagactcatgacacgggcagtgccaattatctagggtgaaagtctgcaggactcaggtactaagataacatcatggcaatgtttgcctaaggtgaaagtcagcaagactaaggtaaggcaacattgaaatgttgaggggcaaagagtcagaatgaccgaggcattagttcaacatcttcatcaaagtgacatgtagaatggaagaaccgtatacgagtatgtggttagcttgcgagctatatcttgagggatattcttctaagagagaagtttttcccaagttgaagtgggggagcccactaattcatatgttttaagaatcaatgtactcgttcagttttggtatatgaatccaaagggaaacactacaaaatataggttgttcagtgcgaagacttgcatgattgctgcaagctgtagataaaaaatatgcaggggcgtaggccgagatcaagactgagctagtttgcagcatgttatgggcgtgttttgtgttta

SEQ ID NO: 403037 - DNA, 580 bp, Cannabis indica
atataaaatattacataaaatatgtttattggttaaaagtttagactttgtggtatttaacttgaaatttagactttataattaataattttgattgcatttgaatatcaaaactgaaatatagaatttacattatattaattttttttaaggaatgtttgattaatactttaatatatactagatagatgttacgtgccaagtcacgtatgttaattttattttattttttagtttttttaatatcataattttaaaattaataatattcaatgtagtgataatcattgaaatttgaaagcataatagtgatttaaataaaaataaaaattactattatactttgtaatagtaattaaaaaaaaattattattcgtcctaaatttatcttcggaattaatgaaaatgctcatctggttaaactatcaaaacattcaaatttaatttaaaataatatttaaaatttaactaattctaaatgtaggatgctgacccttacgtgacaacatctaataatttgttatttttttatttaaaaaaaaatcacccaataattttcataaaccaaaaattctgttat

SEQ ID NO: 403038 - DNA, 804 bp, Cannabis indica
tcaattaaagtatttttgttgttggggaaaggaaagataaaagctacccaagattctctagctccgcctactcaagagttgatacacccaaagaggccagtgacatttcatgaatcacgttacacttcgtttgaaaatacattgttgatgacgatgcttctagggattgtgcataattgtcataagaagaaaacaatacaatatgagcttaaacctgacttgtttagacctgactatgaatgttggatagacaaggaagatgtcttggatgtgtgcgagttgggaggggttggaacttatgttatgactatattgtgcaggtatagtggttaatacttaagttaataattatatttgtagaattatattaataaaatattgtgattacattcactaaatattagtggattgaacaatacatatgtctttttgaatcttgcttcagtatcctcaatagcttgtaaagatcttaagaaacgtacagggaatctcactgagcgattgatggaaatacaacccgatcaatggttgatttgtccctagaatccactataagtaaatttgtaatttaatatatgtgaatatatatatatcaattatggagttgactaagctttttaattatgtgtagtgaacattggacggtgataatcatttaggctgctactcagtcagtggcattccttgacccaaagaatatgccaattcagaatgaaattagaaaatgtgtcacaacgtaagttttattattttttcattaatttaacttttgttactaatttggtcactaagtaacttctcttt

SEQ ID NO: 403039 - DNA, 781 bp, Cannabis indica
gcttcggtttctttctctctcaattgtatttagcattcattttaaacctcaacaaatacagttaggcgagtgttaccaacagatgacaaagtgtaaagtagtttttaaatttttgctttatgcgtcagttttttttaccatcgtttaatcaaaagacgtgaatcatatattattagtgtcgatttttaaatagtcaggtccaattatttgggctatattaacgtcggttaacgctatgaacagtagtgttgatcgacgtgaatagtgtaatttgtagtagtggtttcctattaatgttttaacttttatgacaccaattgttgcttcaaaaatcctagttttatttacttcatgttatgcttgaggtgttagggtaattatctcatcttgaacaaatcttaaaattattattgatgaacaactaaattattttaggtaaaaaaaatcaatcttataaggtgaaaaaaaaaatatttccatggtaatttttaatctaaaacataattaaattaaaataaatacaccaatgtaaaactcaatatataatagcacataattttatgagttataagaaatttttcttaccaatgtactacgaaacataaaggaacgtactcggtacgtgatattttgtacactagttttactaaacatcatgcagaaacaataaatgtacacggtacatgatatactgtactcaactaccatcgcacaaatacatagaagatatgaaggaatgaaaagatgaaaataacctcactctgacaacatggacccactg

SEQ ID NO: 403040 - DNA, 608 bp, Cannabis indica
gagaatgggttgaaggatttttgaagtggatgagatgggctcgagaggctcaagtggaaagtttcaaagaggatgaaggcttgagtggatggtttcgaagaggacaaagggctgcctgttgatcgccagagcaaggtcaaagagggttaggtgaagtgtgaaaagtacacgcatctgatttgggatttagggattctactggttgcgtgggtttctttctctctcaattgtatttagcgtcattttttaaacctcgcaaacattgtttggcgagtgttaccaacagacgcgaaatataaagctaattttttaaatttttttctttattgcgtcagttttctttttaccatcatttaacaaaagacgtgaatcatatattattagtgtcggttttaaatagtcaagtctaattatttgggcactattaacgtcggtcaacgctatgaatagtagtgttgactgacgtaaatagtgtaatttgtagtagtgtatacaaccatagtatattctcaactcatgagatattgtgatgagataaggttgattagaaaactcacaccacactaatgtgtgtagtgtcgtgtaagttgaagagagagagagagaga

SEQ ID NO: 403041 - DNA, 659 bp, Cannabis indica
gctatctgcacttccacgactaacgggtctttgtgcaggaaattaatcttgacaacatcttcattattaaacgttatggtgggttcctctgcccgtggtatcttttgcttcctttcttcgacggccaagaccacttcttcttgctcgtgctgtaatgtttgggcatacctttctcgggcttttcctgaatctccagctatgtgcggacctcaattgatgacttgtaaatgcccatctactggtggaggcaataagtcttgattattgtctgtctgggcggccctctgattttgatcggtcttgatgtatttttgcacgtgcgagttattctttctatcaagaattcaatttcccgattcaaattgttacaatcattggtgtcatggccataatccccatgaaaacgacaaaacttggacatgttcctcttacttatgtcctttttcataggagcaggtttctagtacggagctactgactgagtagccatgtagatagtcttcaaatcctctgttaagacaaagaaagcagtgaacttggaaggattctctctaggggtctgttcggctttgctggtgaactttccctttttcccattgccttgcctgttatttttgttagaccttttaccgcccgagtttgaattgcttgggtactga

SEQ ID NO: 403042 - DNA, 739 bp, Cannabis indica
gagaatagatcaatatttataggacttttgtggttgagggaaagttttccttttgttgacaatgtctataattgttaagattacacattaaatacaaaatacagtgattgggggatttggacagcttgccatatctttgtgatatgatcccagagttatagggattgcctctgtgattcacgatgcaagtgctgaagttgctaagtgttggcatgctgttcggattgtccactgttcggctaggaagactttattcgtgcagatatgtgtggtgttctgttcgaaacatcttttttaggaaaatatgcgcagtcgattctgttgggattttatgccctatataaaactcatttcaatacaatctgatttgttatcaatagaagattagaagttatttgtgtttacatgtagttttcatgtttatggtttaatgtgtacaaaatctgttaagtccagaacatatagttattcacaattacagtgatgtcaacacagtggaatgtaattgtgattatatgcttcaaaagataatgtcccttaattcatcagtgcactggatttacactgatgtgataatcagcaataaagtatacttacaccttggataagtgttatgttctttctagaacattggcaaagtatgctagtttcggatgtatggagtatacattggactgggaacgatattgatcttagtaaagatatataatcttacctttgtatctttctaagtcaatat

SEQ ID NO: 403043 - DNA, 936 bp, Cannabis indica
caacaccaactacgggtctgggttcaggtcgggatcccgtatttgggtctgggtccctggtcttggtcctggtgcgggtttgggtcccgagtcctggtctaggtgtcgggtccgagtctaggtccgagtttggatctaggtccgggtttggattcgggtccgagtccagggtctaggtgtggggtccgaatttgggtcacgggtttgggtccgagtccgggtttgggtcctggttcgggtctgagtccgggttcgggttcgggtctgggcctgggtctgggtccgggtctgggtctaggtttgggtccgagtcccggtgcatgttcgagtcggagattggtgttgaccctaaatcctttgaaaatattataatacaagctaatacggaccatttgttatatattaaataatacaacatacattgtattaaaaaatttggttgtaataattaatacaatacattattttatccaaacatagtgttatttattatttaatacaatacgaccctaatacgacgtaccaaacgagctcttattttattaaatgttacacattgttattttcattaattgtcaacttggaactagggaacaacattcaatcaagcaagattttcaggatctgtgctctagaacgctgtagagatttcttccttttcttttggtccttctagtttctatttttctttcttcgtgattccatcttttgtttcttatgatttttcagaaaactctttgttatacccaaaattcggttggaacttcagaggaggacacatgtcaaccttggaaaatacgaatcaacaaatataatgtcattatattaaaaaggatattaaaatagaataactcattaaatatggagttgatagagtatatttataactcgctgactgtaaatacttaagtgagataaggatgtacaaactattga

SEQ ID NO: 403044 - DNA, 762 bp, Cannabis indica
aacacagttcagaccttcttcttagcatatgacgaaacaaaggaaagagacaaagtcaaggacaaaaataaaattaaaattataataatttgggaattaaatgaagttcaattttagttctaaataaataactaaatttaatttttcctctacaattaccgaaagttaaaatattctctttaaactattaatattgttaaatttaaatatttttgtcaaatttcattaaattttattaattcagtaattatttatgtataaaattatactatcagatgttgatatcaaatcatattcttaaattttaatccatattaattttttttttaaatttagtaatcttaatagttcagaatttttttttaacaacctttaaaatttacaaagatttggaaattagccttaaattaatttttaaataaaaaataaaaatttaatgacttaaaacaatccattaacttcacattaaaagttacttaagttttaaaaatataatatatgtattatttgagaaattttatttacgccctaaaaacttttaaacacatttcattttaataaaatttatatcttttaagagcactaccaacagtttctctactctattctttaaaatacctcaccaaaactccattttctttattttacctcacacatttacattacatcatatatcagcttatctataattttctctatatcatttaaatattatatttttacatatattttattaattaaaatatgaaaatgagtaaaaag

SEQ ID NO: 403045 - DNA, 908 bp, Cannabis indica
ttttttttttcatttttttgtttttaatactgttatgaaactttaaaaaaactgaaatgcatctattacgaaacatttgaaatttattaaacaaactaaccatttgtccaagtgttttctcttttttctctgtcaaaataaattcctgtaatattgaataaaaccataatgaaatgatgatggaactataaataaacttgaaaaaacttggaacttaactccaattaacatggttgtagcttgattctattttgaaatcataaaaaaactacaatgcaaatgaatataccttatctgtattgtttatacctgatttgaattgattggtacatcccatgttgtgggattgtgtaccggatatgttgacccgctgtatgtttcaagccatattcttgttgtataataatgttaacagtagttgtaaacatttaagttcatctcttttatcacaacaagcgcatgagcacacggtaattcgtcaatttggaatctgttacaactgcatattttctcctttaaattgatcacctatgatcttgttagttctaccacttcgaacatgctctcgtttattggctttacttgcaaattaggtaaatataatcaattgccaaactgtgtagcaaactgaaaaaaaaactataaggaaactagaatgcaacttataattgaaagagattttacattttttgtcaatgagtccacaaagttgttaactagctttttctctgctgtaggtgtcaaaaatgttgtggttttctatgcttttttcctgtttgtgtatgtccattgttgtatcaaagctctcaatgactccattagtgttgtgattggtagttctctagctgctaagtttgctgcgtttagagatttagcaatgtgagaagtcatagttgaatacctgttgt

SEQ ID NO: 403046 - DNA, 503 bp, Cannabis indica
tcagcaaaagaaggtaagaaaaacaatacatgcttatacatatacatatatatatatatacacacaccaaagtgtcttacttttcttttatagattctaaatggtgttgaataagtatgttttgagcctaaatgaaactagtgaccaactcaaaaattttattttgtgagagctcatttattattaaaaaatatttattattacattataatcactcttactaaatttatttaattttatgggtttttttactattttgatctatacttattaaattaaaaaaaattacatttaaattttcaaaagacaatatttttattagtaaaagctataatatttatagatttgtcccaaactacatacaatcttattctcaaaaccatatttaatatcaaaatgttttgaaagaattcatttttatagtttttaaggtgtaagttgtaataataatggtttttttatttttttgtcaaaaaaagttggtttataaaacttttttttat

SEQ ID NO: 403047 - DNA, 369 bp, Cannabis indica
ttgtatttaaccatttcaatagttgagaaaagctcgaaaatataatttaatatatgttatgattcggagaaaaaatatcctaattaatgtattttttaggaagaaattagcctaagatttattaaattaaattacactataaaaacaaaatattaatggtaatgcccaccattattgcagtttagtaaattttaataataattaagtaaatatatgaatatctctttaattaatgttagaatttttttcaacattgtataccttctcctaatagtatatctttatcatttttgcattttggaatttttttagactaattttattaaaaaagtagattaattttttttatagaataatgaaatagataca

SEQ ID NO: 403048 - DNA, 820 bp, Cannabis indica
agagagagtataatttgatagtttttaaagttgggacaaaattactaatttacaaagacatgtcagtatgtaaacagaatgatatgacaaaacctaatagaatgactaaatttcaataaatttaaaaattcaaggagaatttctaacattctgtatattttcagggataaaatcagtagtgtcgaaaattcaaaagcaaaattgctaattatttactaatttaacacttcttatatttgtacgatacattattagtaagaaaattcacatttctctaatctctcatttaaatatttgacatctggattttatttgctatttattaatgtttaaaatattaaatatttaaacaataatattttttaagtagttacataagggggtgttagatagaatttttttagtgtttctaaattacgcattttttaataaatcatacaattttattaatagcaatcagctaaaataataacatgcattccaattgagatatctctccgttggagacacgactagaattaaaataaaaaaaaaacagaagtcaaaataatcaaattgtctaaattcttagaatgtttgtaataaaaaaactaaaaaaaataaaaaatgtaaaaaagattacagcatcacaattacttcaaaaatgcatatatttagttatttatcgctcagaagacactacattagaaattgttgtagcaagttcattcaacccctcctgaaatagcatacttggagacgatatcattaaaacgtcgtaattcatattcaaataagaaatcgggtcaatcaaggagaggcctcttgtagttgacttgga

SEQ ID NO: 403049 - DNA, 591 bp, Cannabis indica
agttcttgactttgcatgtggggaaaattgctgtttattttgatacatttgagtatgatttgcataattatgtaatggattatattgttgtgtattagatgagtttttcaaggttggaattcatgttttattttgtgttcttgctgctgaaagttgtggtcaagtatgcttgtgaatttagaaatttgtttatgggtgttgatgattttggctcaagctttggagctttgattggatgttgttgattaatgttggaattgatgttgttagctctctgttgtgatgattttgatctgtaacaagttaattttgggtattgtttgattagggttcgaatatatggaaaagtgtgcatttttagaccttaaaatttgattttctgggtttttcgaacccagtggccgcggccagatttatggtcgccgcggccataaaacctagcagagagccatctttttcccgattttgttttagccataacttttgactcaggactccgttttggacgttctttatatcgttggaaagatcgttccgaggtctttatgattatttgtattttgaatgccaaatttatattttgtgaaagtg

SEQ ID NO: 403050 - DNA, 1219 bp, Cannabis indica
aatgcttgaaatggtgttttaaagttttgattatgatttggatgtgattttggggcagaaattcgaagttgtagcaggattgtctgggtttggaacccaggggccgcggcccgcccttttgtttctgggcagatccaaatgcaaactttgaatagccataactttgtgatccggactccgatttgggagttctacataccgttggaaagctcgtttcaagtctattagattatctttgttttgaataccaattatatattttataaatgtggaattagggattaaccctgtatgtgtaaatcctagaatttgtgactaggattagcggcacttgatcaggagcacccagggattcagaatctccacttttgcacgacatcaggtaagatagtagattgcacgtagagttaagcgcagtgtcactcatgttttatattatggttatgagtaatcaagaaccgagattagggttattaccctaaaatgagcgattatatggtatagggttattaccctattagttaaagatgtacaatgttatgccatgctaaatatattagaataaagaattatgcgtctaaggcataattacgctagactcggtaaactagtaccttgagtttaattttaatgcggtctaggattattaccctataatattgtgaggtaagaaagcgatgatatatggtaataatactaatccaaagaagatatgaattagggctaatacccttaatagatgttatttgagtatattgtaatgtgttttatgagtggttacttcgtatgcaagttagggttattaccctaagattttatatgttaggtatacattgaatggaggcatgtatattaagagttatgtgtataagacataactgggttagacctgatatgtatcatcaagataaaccaccgaatgaacttaaagtatggattacgtataaatatgaatagggttatgcgagcaaggcataaccaggttaaactcggtaactataactgaaataaaccctactaaggccttattgtaaatatacatgtgagcgtaacacgtaggtctatgttacatagacatatatgggcgtatgagcgtaacacgcaggtctatagcaaatagacaaatagtgcggtggcaccattaattatggtgctatatatattaaggttaagggttatgcgtacaaggcataattaagttggactcggtaaccagaac

SEQ ID NO: 403051 - DNA, 560 bp, Cannabis indica
ttaagtgaaagagtgatggaggtagatagtgaaattaatgaactcaaaataaattaatagtgttattatattatttataattatattcattttcatattattatagataattaattaatgcattttatcttaattaaatattatttcacaaattaacattattttataaaaaatatacattacaaaaaattttacttttaatcacaacaaaatttatgactaaaagtaaaacaattgtggctaattataaatcattattcttatgttgtgattaaaaggtatttttagtcacaattcttgttgtgactaaaattaaattaatgacaacttatatttaaatactatgttttagtcataagtaactttttgttacgattataagtaatatttgatcaaaaaaaattatactgtgactaaaaaattatcactaaatatacgtaattattttttgtagtgataataatatcacttaaaaattattacacaccgaatatatattacatatatattacatgtaatttatgttaattgtattaatatttatttaataaatattttat

SEQ ID NO: 403052 - DNA, 933 bp, Cannabis indica
ttcaaaaattactatgtgaaaagctcttctgaattatcaaattaggattctatttataatagttaaattcctattaaataaatcatatttaattattaaataaatatttataaccaaattctattaatgatatttatgagggaatctctcaattacttgagagaatatttcaactactttgaaatatctttaaccacttttaaaattcaaatatttatctaattaaattaactaaaaagaaaaaactaatagggacaccctacactagggtaggcacccacattctcttatttagaacaatgatggtgtcttttgtccagactacttttgtcttttccctatttaattaatttaaaaaattatttacttattccaaaaataaataattactatttttctaattcaaaatagttttttccaaataacattatacaactctttatatcttcccttgacagtatttcaagatagcgattcggcaaccatgaacgtataattctaagttccaataaattagattatttattgagtctcatcaaccaaataatcgtgtttattaatttcatgattactctactataaatatagaaatgaactcttagtagttataaatttatatttaccaagttttactacagtgatcattgatataatcaattctaatgattagccctccatgtgttggttcgtaattagttctggtcaaattaatgtttcacccttctaattactcttttatcctttagtaccattaattcactagtggaagtataattaagatcccatctaaatttgtgcacaactttctagtcccacatttaacacttaaagggaaccaacattcaatctgttaggaaagttaggatcccataattgtagatcatattcccagccatccacattattagattcccaaaattaaagttgtaagaa

SEQ ID NO: 403053 - DNA, 621 bp, Cannabis indica
tttcctcgactaactaatatatccagacaaatatataggacaacaacttaagaaacactagtttttgttttaggaataattacgtaagcacaaattttttgtaaaatatttacatttttacgttacaaagaatattttttcacaatttttaaagttttacaaaaaataacgacgaaaacaacataaaattaacaagaaaacaacaaaaaaattaacaaaaaaaaaataaaaataacacacatataacaaaaattaacaacaaataaacaaaattttaacataaaaataccgtatttatgtaaataaaataaaaaaatcgtaaaaatgtttaaaattccataaaccatattttgttttaaaatgtttttgtgcatttgtgaaattaaccattttttttttaaaataagaataaagataattagagttcatgatgattacatatatatttttttttttggtattaatgactttttaattatatcagagaagtatttagcaaacattcatttagccacattataataaaaattcctctaagaacattaacagttacttctgaatcattttcaattatcacaaaattatagtcaaaaactattgaagtctctaatctaatataaa

SEQ ID NO: 403054 - DNA, 908 bp, Cannabis indica
ttggtaccatatggtatggtgtccaataccatattgtgattgattagcgatttcttatattatttattaaattaaagtatgcaggattcaaatatttatttacaccaataacaatatatcacctcttgtagtgcttggcatcataagatactccttactatttcttatagtggtgggacccatatataatattataaataattattaatattttaataggttagaaaccagtttgtctaggtaagtttttttttttttttgaatggaaaatcataactgtattaaccattaacctcagctaccaacgaaggtagcaaatcaactgggacagaccccaaattaaaactccaatcaagatagaataaggaagctctagcaaagttatgagccaccttattagctgatcgcctaacaaaaaggatagaaacatgttgactttctttcaataaagccttacaatcattaactatttgaccaaacatagaaatcatatcaattgaactacgcaaggcttgaataaacactaagcaatcggtttcaagaaaaacttggcaagatcgattttgcttgatccaacttaaagcttccttaacacccaaagcttccacaaattctagtgtagccgacccttgataaagcttggtaactccttcgattaacagccttgtgcattgcgaaccacaaaaccaatcccaaatcgattcgtgtcagcaaatatagcgccatcaacattaaccttaatgctattttcacttggtggctgccactgctcagccccatcacctagcacgaagccaggacttgggtaaatcacagtagaactatgagcagcaagccattgattaaggtaagtttttgctgaaaaaactatactttctgcacttaacaatttgttgttccaaaccttg

SEQ ID NO: 403055 - DNA, 666 bp, Cannabis indica
ccaggtaaaaaagcactttgagtatccaaaatcatctcaggcaacacgacttttaatctattagccagcactttagacataattttatacagcacattacaaagcgaaataagttgtagattgctcatttttccttgggataaggacaatattggtctcattcaaacaaggcaaaaaagaaccagagttgaaaaaatacctcaccaacgatacaatatccttacccactaaaccccataaattttgatagaattccaaggtcataccatcaggtttgggaggtccgagagacaaatttgggtgaattaaaaataaagctttcctaacctcttccatcgtgatttgctttagtaggctagcattctgatcttctaaaatggtagcaggtacactctccactaccgtgtgaaaatcaattgcataaggggcaaatatctgatgaaaataatctatcataacaatagacaaattaccattccaatcaacccaatgtccatttaaatttttcagcttttgaatagaattgttttgccttctcgaagtagccatagtatggaaatactttgagtttaaatcctcttctctcaaccaaaattgcttagagcatgtttggtattgttttctgttttttgttttcaaaaaattgtttttaaaaatgagaacaaa

SEQ ID NO: 403056 - DNA, 219 bp, Cannabis indica
gttcctctaaatgataaggtctcctaaaattgttctcgtttttgaaagttagatgacatctggaagagagttcccggaagttctaacttgtccatctggaagaagtctcgtaaaatgacagataccatccgaaagggggttcccggatgcctatcatgtccacctggaagtctttaagaaaattagtcttccttcagaaaggagttccagatggctagt

SEQ ID NO: 403057 - DNA, 556 bp, Cannabis indica
ctacctctttcttctgcattttggtaagaatcttctccatcatcatcttcttcttcatttttttttttatatatataaatatttttataattacataaattatataatatgtggttttagaaaataaaaaaaaaaaatcagtttgattttgttcttgtaagctttattccatgaattttcaaagcttttttctgacaaagattctcactttctaacacaaaaccctcaaatccgaactgggtttccttccatggcgatccacaatcactcctaggatttcttttctctaattcaaaattccccttttttcgtttgttacagacaaaaatggatgaatcaattgtttcaaggtattggtgtcacatgtgttctcaaatagtcaatccaatcatggaaatggttgaaatcaaatgccccttttgccaaagcggtttcatcgaagaaatgaacaacaacgaagagggttcagataatccctctcaaagttccgatcttggatctgatcgagctctctctctttgggctccaatcttactaggaatgatgggtaatcccc

SEQ ID NO: 403058 - DNA, 755 bp, Cannabis indica
ccaaccgtacaatggagtggccatctactaaatcgacagtcaaatctcttatataaataaggctagccctgagatcatgttgatcaagaaatctcctataaatacccctatatttcatgtacaagggagatgacatctctcaacctacaaaacctctgctaaaattccaataagcttcttcttcttcaagtgaaacgagaagaatagagagtgaatgttcatattgtaaacacttgtaatatacaacctttgcctataaggctaataaaatggactcgtggactaaggataattaacgcctgaaccacgtaaaaaactacatgtctattacttattattttacatctttcttgaattctaattaatcagttttcaaaaatctcgataaataatcatttttataaataacttttgtttgattggaaagactcttttgatacttggctgaggtgtttggaccggctcggggttgctttctggtatgctttctttcttgcctgtgcattctaccacaaagtctgctaaggcttggcctttaattgctgttcgaggtttgaaagtaatttcgtattggcccaactctaccgcccacttaagtagccgtccagaagcatctaccttttgcaatatttggcgtaatggttggtcagtgtacatccgaacaggatgagcttgaatataaggccttaactttcttgttgctagaataaggcagtatgcgagcttttctattaatgggtatcggccctcggcct

SEQ ID NO: 403059 - DNA, 631 bp, Cannabis indica
gtttttctgtttttaaaaattgaaaaaagttgaaaatatttttacagaaacattttctattaaacatttttacttttcaattttaattagaaaacaaatttaaaacaaaaaaaaaaattcacttttatatttctttaacagtttttttcttaatcaatattttggactccgaccagacccggacccaaatcccctccccacagccctggcgctgaacccggcttctaacctgaacccgaattcaaccccggacctagacccgacttaaataaattcaaaaaataaaaatgaaaaatgaactttacagaacacacttttgttttctgtctttaaaattgaaaaacaaaaatagttacagaacgcatttttattttccaaaaataaatttttaaaacaaaaatttactttcattttgtgattaaaaaattaaaaataaaagtgttaccaaacgacagttgttggctagtattgtaatttagggctgtccacaaagtatccgatctaatccaatccgcacgatcccatccaatctaattcgtaaaatgcagatattcgcacttgcgcggattggattgaattgaaaaatctaaaattcgcacttgtgcggattgaatgttgtttgacctcaaaa

SEQ ID NO: 403060 - DNA, 723 bp, Cannabis indica
caagcaccatcggtcgtcgaaggcttgaacgtcttctgcttgatcttccgcgatcagaactccctcttcttctccttcgatatccaagttagcatattgatctacccagtctccatcttgatgactactcgaagccatagcacaaactcaaaacaacaacgtcaaggacaaagacactctcaaaacatgtcaaaagacaagactttttatactttttgcaattctgatcttgtatgtattaatcttgatttcttctttttttagttcgacactacatattaaaaaatttaaaatttaaaatttaataataataataatacatagtaattataaattgcataaaataataataaaacttaaatataatattatatactataattttataattaaaattatcacaatatttaaaattaaaattatatatcaagttatttataaagtaatttcagtatttatatgttaactagatagatgttacgtgtcaagtcacgtatgtgaattttattttagtttttaattttttttaatatcataattttaaaattaataatattcaagataatcattaaaatttgaaagcataataattatttaaataaaaacaaaaattactattatactttgtaatagtaattaaaaaaaaattattattcatcctaaatttatcttcagaattaatgaaaatgctcatctagttaaactatcaaaatttaactaatt

SEQ ID NO: 403061 - DNA, 604 bp, Cannabis indica
tttattttgtttctttgtttgtttgtcctctttgttctttgatggtttgtcatcaagtcgctcttagtggtttggaataataagttatttgcggctgaaggggttgttagtggtgcaattatgtaccttgcacaatagttgagtgctcaagttaaggagttgaataaacctactacaataatttctaatgttgtgtcttctgatcggtagaagaaactgaatatagatgttcttaagaatctttttcaaatggtgttatttctttctttctcttattttttattttttgtcaaacgatcaatgaatcaggtggtcaattgttggctcatttttataattttaatcttagtcatatttctaacaggggagatatcttgattaaattgtagaatattattttaattaattactattaaatatttttcttgattaatttattccaaagaaaatataaacattacggaaaaaaatgccaatttaaaagtgtattcctttccaacaaaaaatatatttatagggtaaatactattttggactctgtgttttgtaaaagttaccgattggaccttgtgttttgttaaatgacaaaatagacctgtatttt

SEQ ID NO: 403062 - DNA, 1144 bp, Cannabis indica
aaggatagggcccattcgatgaccattatgcaaaatagaatagctgacagatgatacacaaaacataatcaagttgacccatctttcagcaaaacccatttgaagcataagtaaaattgggttttgtatttattttaataaactcttatgctatgaatttagcataagtaaaattgggttttgcatttattttaaatgttctaaatataaaaaattttgtttaacaataacatctcatgaattcatcacatatgaaatggaaattgtccgtagagaaatgttgattacctttttaccctctcaagaaacgctttcaattttacaaaaaggtatgctacgcagttcaaattcatgttgtaatttttaatgtacctgccatagaaaattctttttttggtagggatttttgaattgtcttttctcatcaaaacattactaatcgagtcagctagtgtagccagtgagaatttgtctatttgaaaagaagaagagagaaaaaaggcatctcctacaattaattgctagccaaaacgttaaaaggaaaaatctaaatcgctttcattccttttaaaattatcattattataactattatgaattctgccaaataaaaattgatttaagggccccctatcagagtcctaaaccccctatcattttctatgactactcgtttaagtctccctccaacactagaaaaaggaatgtggatcaggcaccatataatattcccaatcactacaaagaataaaccaccacgcgcaaaatagaactactcaaacggaccacactacacatgcaatcgttcaatttattatgtaaaaccaaagtcttcgtaggcatttagtataattggaattaaaacttttatcatcaaacgaaaaatagttcaggcattcaaaaagggttgaatacaaattaattaaaaagtaaatatgtaaaaacaaaattaggaggttatagaacaaaagatgtttttttttaagtttacaatttaaatttaaattgcacatatctaaaatattaacaccgttaccaattaaaatatcttttgaaaataatatgacatttctataaaataaaaagtattataaaattaaaatattattactaaaaactaaaattatagttaacaataaatttt

SEQ ID NO: 403063 - DNA, 609 bp, Cannabis indica
aaggatagaattatggttgatctggggaaagttgaataaattaagaactagatgagaccaaggataattgttgatgtttgaatttttcatggaatgattttgcaacatttctatgccgttaatagaattagccaagatgaatcaacgattcctatggtcagacaagtgtgaatcaagtttgaaagaactatagcaacgactaattatgacactagtgttagctttgtaataagatcaagaaaaaattgttgtatattgtgatgcatctagatagggtctgagatgtgttctgtgttggaatatattttatcaggatctagatttactaccatgtatgttgtttaacaacctaaatatgaatttctaaaacaatgtaatttaaacaaatataaagtttgagaaaccttacagtggttacagcggaattaaataactcattctgcttagatctctaacccttgtatccttactgtagcagagtatcaccaagatctaagcccgaaactcctttcttgtgtttggattcttcacagtcatacatattatgattgaggaccaactttgtaatgaccgcttcagtaatttgcattagtaaaggcaattagcact

SEQ ID NO: 403064 - DNA, 1000 bp, Cannabis indica
aacagtccctataccatctttacccgtacttttattaggatgcatatgaaataattatgccactcgcacatcagcttcagtgaagggcctcatcaaaacactgttcaaatcattagataccagagattggatggaatccaacacatggttcttaattagtgttcaaatgaagccgatgagaagtaaatgttagaattattttttgtggactaatataataccataatcacaatcattaactatgtgcccaatatttattcactaccataatgggatggttaataattaataaatgtattagaggcacatgggagcaccctaaaactataattggcccattaaattatagtccaccattaattatactcattaccccaataagcctaatataaccccttagggttaagtgttgtatataaaaagggtaatatgtgtttagtatgagttaagagagggtgtgtggtgaaaagaaaagggtttgctctcataggttctcttctaccaatttggtgtttttcacattgaaggttttggtgtcttagcaacaatggagaatagcaatatgggaggtatgtgttttacatttgtgatgctctaaataaagtattgattttggttttaatgattatgaacaatgatgtttaatgtatatttggatagttcataatctatgtgaatgtttaacaattggtatcaagagctacaatacttgattttagagctccaaaatatttgaactaactcattcatttattcttttttcaaatctgaatttttttttttataatttcggataaaatgagtttaaatgttttagaatgggtttatcttgctcttaggatgattattgcatgatttattgtaagattgcaagtttttcattgagtttatcaatggtggaaacttattttcggatttgtgtgtttatgggtaaagtttattttttttttgttgaaaaatggatgaaatagatattagaaattgatagaaggttagaaat

SEQ ID NO: 403065 - DNA, 873 bp, Cannabis indica
aaaaaaaaatactatttttacatatttaatactttagtgattctgagatcttaagtacatgtagaatggaagaattcaggccctttttcagggtttaagaccttttatatattgttagggttttacgagttgttattcaaaatacataataatggaaaatatctctagaaaatagggaggttacattttggtgttgaatccctatttttgtgagtagtttgaactattctgaagttgtaggagtactggggatgatttggtgttttctagaaggcccatggaaaaagttacgagtaggccagcaaacctggtttgaagctatccggtgtgtctaggttgtaagttgtccagccttctataggctgtaagctattcgacttattaaaacagctttacaagtagagaagaaataatacaaataaatggactcgatcctaagtggcttcgcctctagtggatcaagatctagtagttagttacaaccgaaattgtaactaactcctagaccttgatcaaccctaaactacaactataaaaggaggacaagagccttaccaatctctcagttgagagataccagaaaacagaagccagatttttcagatctggaaaccaaaagctccagaagttgtagatccaagtgttcatgcaaagagaaaagaaaagagagttagtgagatagtgagaaatcaaaagaaaaacacagaaaagaaatattgagtgaatatcagaaataccagtcaagattgtgacttggatttctcacctgtttgtaataatcttctccaaatagtgcagatcctgagaaacgtcttcaaggcgagctcaaaagaggacgtacccctgatttagggcgaacctctataatttctg

SEQ ID NO: 403066 - DNA, 855 bp, Cannabis indica
ttttgtttggttattttgaagttatgttggttgtagttgagatgttttggtgttgtttggagtcttgaagttgtgtttgagtaaagattgagttttagaactcaagctttgctctctattggtgaattttgacagagatgttgttggctggtttattgtatggattatgtttattatggtgtataaaatctggatgttattgtgtggtttggaatcgatttgaggtgtgtaaaaggttttgagttttttttttgcactgaatcggtcgaccgattcagtgggacttgtaggaaccgatcgaccggttggtcctcagggaaccccacagaaccagaattctggttggggaaccagtctaccggtttggacattttagggaacctagtttttcctatttttgcaatatttagggtattcctatgttatccatcgatagggaaacttttagtttcaagtttaagtccccaaaaagtgatttagcatgtcacttatcagttttgtgaataatgtgatttaggggcctgtaatttgtcgagcagctattccacacgggttggccgacatacctgaatttagaaacgaaagattagtataatgattacataaatatatacatgtttaacgtacattttagttgcagtcagaataacatatcaaggtatcaatgaggtatacatagagttgcaccgagatactaatatacctatgttaggcatatcaatagccatcagattagcatatgagggttccagtaaagtgtacatatagtttcacagagatgccaacagatatatgttaggctattagatagtatgaattaactgcttcccattagtacgactagagtactgagta

SEQ ID NO: 403067 - DNA, 864 bp, Cannabis indica
tgggagatctggtcaaagtaaacagcgacccggcgagccactccggccatacattagtagattcatgaaggaagcgactaaggtgtcacgggtaaccgaggatggaaagttatccgctatactggggggcattgaagtctttgttaaactgtggaaggatataaggaaaaacggatgggtcgactgaatgagtgatttccttgactgggccgaaggtttcatcaagctcgaagaagccattcagcgagcagaaggtgaacaaaagccaagcaagacgaaggttccttcccctagaatgtctgcccaacttccccattattccagcaattcaagttgcaagcgttcaggcaacaaccacaagcaaggaaacgggaagaagggaaagttcactgaaaagcccggacagactccccgtgagcacgccaaacacactgcattcactatcttaactgaagatatagaaagtgtgtacatagcaactcaatcgttaattccgtacaagaacccgggcccatgaaaaaagataccagcaaaagggacatgaccaaattttgtcggttctatggagactacggccacgacaccaacgaatgttacaacttgaagcgggaaatagaacttctgatcaagtaaaataacccgcacttgcaaaagtacgtcaaggctaaccaaggtaagaataaccaggatctggtgcctccgccaatagatggacacttgcaagtcattattggaagcccgcacatcgttggagacacgggcaaagctcgagaaaggtatgcccgagcagctcaatacgagcaagaagaagtcatcctggccgtggaagagaggaagcccaaagttccacgtgtaggagagcca

SEQ ID NO: 403068 - DNA, 632 bp, Cannabis indica
aggaagagttaatactgaagcggcaatcaagcactggtttaactccagaaaacttttctcacaccgatcagtccaagcaaacttcaggttctttcaggtgagcttcgttaagggtaccacaatctttgaaaaaccctcaacaaatcgacaataatacccagctaagcccagaaagcttctaacttcagtagctgactctggtgtcgaccaatcccaaacagcttcaattctggttggatccactatgatcccatatttatccactatgtgccccaagaagaagacacgagataaccaaaatttcacactttttgaatttagcatatagcttatggtcccataattgttacaaaaccgatctgagatgctactcatgttctttatctgattcagattacaccaagatgtcatcgataaacacgatcacacatatattcaggtaatcttggaaagtccgattcatataatccatatcaaatatactacgtagccttggcccatcattcaccctgatggtgattcttgcattttagacattcaagatatgactagaaaaaggatctgtgaccttgacggccacctcaatttccccgatgctttatattaccccctgatactccgaaagcctcagc

SEQ ID NO: 403069 - DNA, 821 bp, Cannabis indica
agtccgaaaggacaattcaaattctggaagatatgctacgagcttatgtgatggattctgaaggttcctggagcaagtacctaccactgatggagttttcatacaacaacagttatcagagtactatagggatggctccctacgagatgttgtatggtagaaagagtagatctcctattcactgggatgaaacgggagaaaggaaatacctaggttcgaaatcagtgcaacggactaatgaagctatagaaaagatcaaagccataatgcttacctcttagagtgggcaaaagatccatgcagatccaaagcgtagaaatgtagaatttcaggtaggagatcatgtattcctactggtgtctcccatgaaagggatcagatgtttcgaaaaaggggcaagttatgccttaggttgacagggcctttcgagattatcgagaaggtttgactggtagcatatgtctggccttacctccagcgctttcagtagttcacaacatgtttcatgtttctatgttacagaaatacgtttcagattccactcatgtgctgagttatgagaatcttgagctacaaccagatctcttgtaggaagagcaaccagtttagatcttggacagaaaagataaaagtccttcggaataagacaatagctttggtcaaggtactctggagaaatagtaaggtggaggaatttacctgggagttagagtccaacatgagggctcagtatccagaggtgttcaggttagattttgaggacaaaagtccttttaacgggggataattgtaaagaccgtcttagtttaatttggaattag

SEQ ID NO: 403070 - DNA, 779 bp, Cannabis indica
attatttacccttatttttatcttttatttttgtacacactcacatgccaattctttctagttcttcttcaccgattagtattatccatcatctttataatttttgtaatggttatctactttacaataaaaaaaatagtaaaaaaataaatatgtagactattattttttctcttatttcttgaaagtgctagctctctcaattcatatcactacccaccagcaaatattacacaagatctatatccgtatattaattacactttatcacatgcagtataaatacaaatgttgaatttgttattttttttaggtaaaaacgttttgatctaacttttttttttaaaaaaaaacttacacgaaaagttcttttttatatataattatttgaataattctatttgtttgtattttcaattaattaaatgtcttttttttgaaaaaaaaataattattatttatttcacaaatttatcttaaaaaggggtagaagtctaatttttgtaagaaataatattttattgcaaatattataatcaattggtttgactattaagaaaattatattatagatcccacaaaatgataagtacactctaatatttaaaaaaaaataaaaaaaaaagcttaaaaataatttttaaaaattactcttcatattttctgaaggatttttttttctcacattaatttgtaataatttcaatacttattttaattttattttcattaattttttctaaatcatgtataactctttttatttttttctaataaaa

SEQ ID NO: 403071 - DNA, 565 bp, Cannabis indica
tattttaactggtgtgtaacttgtggaaaacattgaatgtatagatccaagttcttgtggatacagatgattctgccatttgtgacttctttttttctttgttaaagtgttacatataggtattgcatcggtttataataaaattttgagataattaattaaagttacaggttattcaacatttaatgtgctcattattctggctgaataaaaatatttaccataaaaagaaaaagaaaatgtaattgataacaggagatataaggtcttaaacatttttcattcaaattctacttccaactactctgagggtgtaataaagaaagtggattgagttataatatctgaattaatggaaatatcatagatatttatcaatggaaatataaaaattataaataaaattgttagaaatacaaaaatatccaataatgcataagaaaatatcaatgtctagcaatataatattaatatgctcatgtatatgtatttcaaagatttcctattcaattaatttcactgcataatttgacaccaaaatataataaaacaaaaaaaaaaaaaa

SEQ ID NO: 403072 - DNA, 576 bp, Cannabis indica
ttaaaactttataagcgtattttataaataaaaacttcataccgtaaaattttaaataaaacgaaaaaaagatacttttgaaagtttccctaattattttaggttttaatatttctttccataatggactcatgacagttagtctgactgccattgacatgaccttgatatatttactgaatatccttgtctacgtagttgcctctaagaattattgtaaataattcgtggatgctcatctttcaattgtttgatgcataccaaatcgttggactcgatcaatctgtgcccttgatggggaaaattagtcatagaaggcttgtttaagtgtctccaaggaatcgatagatctcaaggagagcttaagatgttgtgctacttttgatagtatgactagaaagatctaacatcaaggattgtcttgaatgtcttgcaggtcaattcgtacttcaaaattttccatgtgagagagagagtcttctttaccagtatatggatgccactaggggtgagcaacagtcggtttggtcggttttttacacaaaaaaaatctgaaattcagttttcaattttcat

SEQ ID NO: 403073 - DNA, 604 bp, Cannabis indica
tggtgaccccgatacactacacctaacttaaatacatacaatgtgtcacgggacccgtaaacatcaacagtgatagcttcactactgcgagtgtacatcgacaccattaagtagaaccctattttggtatcggttagtgatttcgttacaaatttggtgactctggtacactacacctaacatgattacatacttttgtgtcacgggatccctaaatatctatagtgacaataatgtcagtactgcgagtgtacatcgacaccgctaattagaactctatttcggtataagttagtgatttcattacgaaattggtgactccgatacactttacctaactttattacagattgtacacctaacgagtgtgcatcggtaccactaagtagaaccgtagttcgttatcggttggtgggatactctgatacactacacctaacttgattacagactttgtgtcacgggactaggaatgtcagtcgggccgggcccggcccggcccgccacaaacccggcccggcccgatatcactttggcccggcccggcccggcccgactccttcttttggcctagcgggtcaagcccggcccgagataattgggc

SEQ ID NO: 403074 - DNA, 1126 bp, Cannabis indica
tattattcaagcaaatgaatttttttttcctgccaatttcttgacaaaacacttgttagagcgaccttttctttttcatcttcactactttcagaatcatcactccaagtaacatgcaaaccctttttatttttctttaaggtattggcacattcagattgaatatgaccatacccttcacactctctgtattgaataccttttttattgttaaaagaaaaaggtttagagggattgttaccagaaatgttaccttttggagattttgaaaaattctttttatttccaacagatttcatgtatctttggaaatttttcgtcaataaggccatttcatcatcaaaaataatatttttagaaacattaaacacaatacctttgcttttctcattcaaggaactttgcttactccttttcttgatctattgatttaactcaaaggttcttaaagagccatgagttcctcaacctttatttcgccaaagtcttttgcctcttccattgctagaaattttgtgtgaaacctatcaggaagcacatgaacaattttccgaaccaagactgattcatctaatttttctcccaagacaaaaaaatcattagaaatatcagatattctttcataaaaataagacaaagtttcagtttctgaaattctcaattcatcaaatatagtttcaaacatggtaaaacgtgatcttttcacatcaacggtaccttcaaactaagtttgaaggatttcctacgcttcctttgcagattcacaagatgaaattaatttaataaagccttcaccaacacaattaaaaatagcatgtaaagccttattattataaccaaacaatatttcatcttcaatagtccaattgagtacaggttttaccttagtattaccttcatcatcactttcagtaggttgtgaccagcctgtaagtatagctctccaagccttctcatcttttgatttgatgaatgctctcatcctgaacttccaataaggataatttgactcattcaacagaggtggtcgagagatagagcttccttctgcaaacaaagacatctcagaaaaaacaaattaaacagagtaatcttaagatctcactaagaatttagtgactttctc

SEQ ID NO: 403075 - DNA, 551 bp, Cannabis indica
aaatgatcacattaaaaagtagaccacaatagtatcattttcgaaccaaaataatcagtagtgtaattcgaaaatatttttaaaataatagaattgattgagaaagaaagagaaaaaaattatagaaagttagaaatttatatattttgttcacacgaggaaagagaaaaaaaaacactggcctggacggacgggatgatcaagaaatagaataagagatgagatattattttgatttagcggtataacagtacactatctagatcaattaaattgttttagttattttcaatattatttttaatattatgtataatattaaaaattcccctaatattaacaatgtttttgctgtctcttgtgggccgaacgtggaaattggaccaaatgggccaaagggagcattactttcagcttgtggggccgaccccaacttaacacaaaacacgggctcaacaggtaatgataagggtattattccttatagaaaattacactctataccctttttatattatcgtcttttatttttaccctcttttttaaagtct

SEQ ID NO: 403076 - DNA, 737 bp, Cannabis indica
gaaatgatctcatatggaataaaagaacaaaaatggttgctgaagtagtttcatctgcaagatctaaccttaatcaatggagttatgctcaacaaagaagaatagaacctctacttgttcatgatatacaagtttctgaggtagagcattggactacacctgcaactaatacaattaaggtcaatgtagatggtgctattttcgaagctacaaattcatttggtttcggctttattgctaggagaagcgatggaacaattgtggaggtagtatcggttggaaaaatggatcgtgtctctcttgaaattgctgaaatttcaggtatcaaagaggcccttagttggattaagggcaaatgatggcaacaagtttcacttgaatccgactgtttggtagctgttcaagttattaagagttcagtacaacttcctttagcttttggattgctggtatgcaattgtcaacaacttttggcggatatgaattttgtcaagtttaattttgttaaacgttctgctaacaaggcagtgcattttcttgcaagacgttattatttttcgtcaattcgtgtctttttttgagtacaagtcaccttctgagttagtagagattgttaagaatgatttattttattaataaagtgaaccatttgcattcaaaaaaaaacttagagagagagagagaatgggagggagatatgtagtgagagagagagagagagagagagagagagagag

SEQ ID NO: 403077 - DNA, 650 bp, Cannabis indica
taaatcgaagtaacaagagtaagactagtaagttagttgggaataactaacttaactgtcactacagtaaaaaaccagaaacagtacaaatgcaactaatacaatgtgaagacaacatctatatatttctacaatcttgttactacttttacaacacagtaataataggaacttatgccatgttgtggttactaagctttatagatctgtttttgtgattataattgaaacatgttcattcatgtaatgattcagtgaaaattctttatatatatgcaactgttgtaaaccaccacaaatattgcccaatccaaggatgaggaagaaacattcattatagaataattatcttttttaccccctgtacttatgacactatactattatgccccttaatctattcagcttgttataaatagtccttgtataattttatatgcatacatttagtccttctgtttattttgtttaaaaatactgtttgtattgatgatgtggtattataacaaaggatagagtagtaatttcatctctttttagagggaaaattgactatgaggtggcataataactgacaatgaaagatgattaaaaaatgatttcataaccttttaaaaaaatttaataaaaataattttattaaaataatt

SEQ ID NO: 403078 - DNA, 510 bp, Cannabis indica
caaattgttactatgactttgaggccattatcgagacttgttttaccatgatcttaatttactaacatgtatgttacataataatctaacatccaaaaatatgaaattcacaaaatgataaaataaaacataaatagtttagaattcttatattgatagttttgcccctgattttgcccaatgtacgtggaccaaccagacaaggacacgtggatcaagcaacttataatccaaaaatatttgctaagtctttatgccataaggcagcatccaggacgtagctcccggagagggcatatggaaccccatatgctcccggaagctcgagtaacgctaaggcatctccgcgaggtgtcaggtttctcctgagcagtcaagtcgcatttaatgccgcatgggaggaagcgtgttgggactgctacacgcaataaagtctgacggcacaacctccaactagcagctacaaagtaatgatcatttaagtctaacgacggctacactgtgaagagt

SEQ ID NO: 403079 - DNA, 573 bp, Cannabis indica
tcttttcattaaacttcaaaataggtattgcctaattgagttgggacaattttttcttcttctttgtaaaatatacattaataaaagggaagagagatccgggaccctaaaaattaatgccattttaaaactcgaacaagaaagcttttattgtcacatgtgtttgtatttttctcctttatttattttctcttagaaaaatccccttaattctcttgaagtaacacttagtatagttgataccctattcatttttcattatagagaacttttagtatggttgtaactcatttgtttttttaaaccttactccctattttagctaaaaaaataggttaaacctcacttcaattatagacatgtatatatcccaataaagtttattacagatttattattgttaatttgatagtgaatattaaaatgactaaatttaggtggcgttttattgggaagaataaaaatataaaaataggaataaaaatagaatagaataaaatttaaaatgtataaaaaaaaataattattttttttatattgcattggaatgatcatttcttctctttcaaaata

SEQ ID NO: 403080 - DNA, 1129 bp, Cannabis indica
attttatgtaacatgtattacactggtttaaaaattaaagcacacaagtgaattgtaactttcatatcattaccattacaatttacccaaatcaatcaccactatatttacaagtatgaagaggaaaaaaaaaacgatgttaatgatttgtgcagctgtatttagtttgatggatgcagtgattgaatggcagtccaggctccacaggtttcagtctctcccacctaaatttgagcactttatttatgactccgactcattatttaaatttaaatttaattttgtgcactgtgaacggctcactaacatatggaatagctgttttaaagcacattacaatttagaaatatctttttagttaaacctgagcactcccaatactttttgtattttattatttaaaacgtatcattaaaattccaaatttttatatttagagtcatatattaatttatctattttttctctatatgttttaaatattatattttaatttatttacatacatatatagaaaaattgataaaataatattaaaatacattaaactacaataaatggttatctctacctttagctaaatactatttgttgaggtaaaaaaatatataaaatagctaaagtttatctcacttattagaacctcaattttgtaacttttctttattttagctcatattgaaagccgatcttattaaaatattttttatcaaataaaatatttgatttaatttataaaaatataattaattatttaataattaattagaatacttagtcatatttaattacttaatatttaagttactcaatttaatttttagaattaattgtcaaaatatattgagaattaattatggcagagatcttgatggcaagtttcacctatataaatataggatctcggtccccaagctcactactcattctgtgaaacacggtacattgatctaaagagagtggagagagcttggaagcctgattacccacatcaatcgatttcttttgcagatcaaagcttgtgtgggactaaaggtcaaagattcaatggatggaggtatttcgatcattaagttatatcgtgtatatattcatttattccacattttatatacacattcatatattt

SEQ ID NO: 403081 - DNA, 680 bp, Cannabis indica
cccagttcaattaaccattttattaatttcctagaagcgtctggttttgataaaacttgtctcaagggttgatcagttaacacttttattaggtgtgcctagaagaaaggtcgtagcttgcgagacgcgtggatgaggcataaggcaagtttttaaagagggggaatacctcgactcttccccaagtaaccttttactgacatagtaaataggttactggtgctttccctcttcttgcactatggctgcactaattgcgtcttttcagacagctagataaaggagtaacgtctctccagttactcgttttgccggaaccggaggggttgccaaataccttttaatactctgaaaggtctcctctcattcttctgtccactcgaatttcttgttgcctcgtaacacattgaaaaatggcaaacacttatcggtcgacttcgaaatgaatctgctaagtgcagccatccttcctgttagggcttagacttccttcggctttgttggttatggcatatctatcaaagccttgattttctcaggattttctttaatgcctctcgcgttgactatgaatcccaaaaaatttcctaaggaacacttttttgggttaagcttcatattatacttctttaatattttgaagcactctgcgaggttggtggtatgacttccactttttt

SEQ ID NO: 403082 - DNA, 973 bp, Cannabis indica
ttttttttttttttggtaaatctggattattgctacgtacttacacctcataagaggatagtaagtcctttaagagctaaacataatttttttattggatgagattcttgactcaagaggatgttaatagaggcttcacaatttcttttttattaatttaaaactttgaataatggaatgtggatgaagataaaggtgaagaagagtcaaaaatgtaaatgtgtgtgtagtttggttgggattgggatatttgagaacaagacaaaacttctaatcaagaaaaagctgggagtagacacgtaaaccccacacctgcatatgctccaaaataacctctattcttctctatccacttgaaaatgactcccctctgcgcacactaacttatattttaatttttaagtgatgtattttataataagaatagtgatgtatatctcttccttctttccatagataaataaattaatgaaataaacaagtggaatggaagtacgtagaaagtgggttttgtgagaggcgtgaagaatctgaatggctgctgcctctgctctccattccttcgcccttcatctcattttcttcactattttaatttattcttagcttattactacaactttaactgaactcgaagttaaggctgtacattgagcggtttatcttatatattttttaatttaatattaaaatttaagtgcaacttgtttaattttaaaaaataaattgtaaactgaccaacggtttagtcgggttaacctatccaaaccggccaaacatattttttttttattttagtcaataaaaattaaaaagatcaaatttcaccaaagcacaacacaatatatatgactttgacaccaacaattaaatatacaattttatattattatatatttaattatttatgttatacataataaaaactaaaaagtaaaaaaaaaaagaccaaagtcaggttggtcgggttatt

SEQ ID NO: 403083 - DNA, 514 bp, Cannabis indica
tatttattttgaaatgtgattttagtattttaaacttaactcgactatagttatgggaaggtgctcctatcgttaagagatttgaaatcctagatgaaaacctatataaggagagtgaagtcacttgtaaagggagcctaaatttgatactcacaaaatcatactcacgagctcctattctctcattctaaaaactcacttgaggattgaactcttggagaactctcatcaagcattgagttcaataacactccaaatgcactagcctattaccactataaaatcctcgtgctcatctttattaaattttctttcacaaactagtttactttgattaactagtgcttgtgttcatcttgcttgtttacgatctttttagatccgttgacaaaaaatcgcgtcaacactagacactacaaaaaatcttacttttagtcagaacaaagcttgtgactaaaagtaaaaaatttctggcaggccgagcggacgaggaccgtcgaagaagtgcctcgac

SEQ ID NO: 403084 - DNA, 1009 bp, Cannabis indica
ttttttatatttttatggtatttgtaaaaacataagaatataatataaaagtaacaagaaaataacatcaaatgataacaaaataacatcaaatatatataacaaaaaatcaacaacaaaatatcaagagtacaacataaaaatatatcaaaaaatcatattttatgtaaataaaatttaaaaaatcataaaaatattaaaaatttcgtacaaaccgtattttttgtaattttatccatatttttgtgttttttttttaaaaaaattatccccaatagaaaacatatgatctgatatgatatgatcatatagtttaaaaacatatgatatgatcatattaattaaaatttatttatttctttaaaagtttgaaattgaaaagaataacagagaagagctctaattacttgtcccatcagaactgcaactgtagtacaatgaattctgaaaagagatctcctacccctagcgtataattgccctatatatatagagactatagtgaataaaagtgaagaaatgagaaaaagattttatttacaaaaatttacaaaattcattctatctttcattattgatctctttgggcccgtttggtacgcaggattggactggactggacaagattggattatgctgaaagtaatcctgtgtttggtttaagaatggactggactattttatttatttccttttaggaaaaaaaacttaaattaaataaaaatatataataataaattaaaattaaaatatataataataaataaatataaataaataattcgtagcaaaaaaaataatatatcatatataattaaaaatatatcataaatatataataaaatattttgtcatattttttatttaataaataattaaaatagtaaaataaaaatatttgaataatatttaattgtttatcttaaacactaatttaatcactaatttaatataaatattaattttttaaaatatttatataaattttttagtaatttaaaaataatat

SEQ ID NO: 403085 - DNA, 856 bp, Cannabis indica
aatttcagttaatgctgtttacacttagaaccagaaccagccaaaagttttatctccatgacaaagagaaattgaggttgatgttgtttaaccataagggagagatttcgaaatgcctgagtactcctcaaacctcaagtattctagttcaaaagagtcacttttccttgcagggttgcatagcaacactcgctggtacaacttgatccaattcagtaaaagaaagggaagaaaaaaccccataaccatctccatttctcttcaaaagtctacaaacagagttaccaacaagaacattctacctaacaaagggtctcttgacaccataaatgtagctaacaaccttgactcgagaaacaaaactaccatctctaaggtggaaacttcaaattccttgcccttctcggaatgagcaataatagcaggagcttgcacaggagaagtggaaataacacaagcagcattctgaataggagaactcagcaaaggagcagtattaacatggcaaacagaaactccaacaatctcataattataaccccctcaagattaacattataaccaaaagacaccacactagcattattaattataagaaattgattgacagtctcatttagatccatattacaattgttagcccttaaagacatttcctgataaggcaaggagttggaaaggtaaatccgacttcttttgtaaaccgatttgggaggggctctcaaaagctctttataatgttaagtgagaggaataaggaatcatttcacctttttaaaaacttaggtggccttttgttgggataaatgaaaatataggaataggaatagaaatgagaattggaataggaatggaa

SEQ ID NO: 403086 - DNA, 586 bp, Cannabis indica
agaaattgtaataagaaattgacagtagtactcctactaatatctttatatattaaaagtgcctatctaacggcatttcttggtttaacgatcttttcattttttttaacgttatcattaacgccgttaacttattaatattatcattaaaaactaatatcgcgattgacttgttcttctctttcttcaaacctacaaacaaacatattgcgattcaaaccgagaacaagattcctttttcttttctcttaaatctatattgatatttcaatcactgcatgaaatcaaagaccattctctccgattcttgatccccatttattgtaattcttctttcttctctacgattcatcggtgaagagatcgacgaaccgaatcggggtgttgagatgcgatagacaggtaagggggagatggatagaggatacaattccttgctgaaaagaccaacaagtccaagattgcgtcaatgtggtggcctcccattgggtgaacggtgtaaaagggaattgaaacttttatatttatgatctttttccttttccatcctaaggaaaagaccaaataatcacaaaccctaaaaaac

SEQ ID NO: 403087 - DNA, 536 bp, Cannabis indica
ttggggtaatctcaagatggaaagtcttttggggagtcacctcagaaagcgtacgagtgaggacaaagtacggaagaaaaattcatattaggatgcagaattagtagtcgttttagagattatcaagaggaatggatgtgttaataagtagagattgacaaggtattgagagtagtatatagtagtggatggaaataagaagtgctctaattgcatacctatcagaaatgaatacttaacttgttattaagttaagttaataaacaaatttaggaggtcccataggaggaataaaaagacataattatgaattaggtattgtgggatcttattatgatttcgactgaatagtaacggttggacatattgagttaatatgctgtttatcagtatagaaaatttatacaacaagtaaggatatggaatttatacgaaggaatagtctaatcttgtgaaattccaaggttgatatctttagccatgatgttaaggattaaaaaaaaaggttattgagaaccatggaggttaaagcgaaa

SEQ ID NO: 403088 - DNA, 781 bp, Cannabis indica
tttgcctctatcccccgttgacttacgataaatcccagaaactttcatgatttaatcccgaaagtgcacttcttcgggttaagtttcattccatatctctgaaccattgcaaagcattcctcgaggtcgtctgcatggcttgcacatgcctttgatttgaccaacatgtcgtccacgtacacttccatgttctgtcccagaaggcctttaaacatccggttaaccattctttggtatgttgcaccagtattttttagtccgaaaggcatgaccagatagaagtataccccctatcggtcctgaagctggtgcattctcgatccgcaatgtgcatcttgatctggttgtagccagcataggcatccttgaaggacaatagcttgaatcttgaggtggcgtctaccatttggtcaatccggtgatgggggaagaagtcttttgggcaggccttgtttaggtcagtaaaatctatacacacccgccatgtcccattcggtttaggcactagtactggatgggccagccattctgggtaatatacatcacggatcatgccactagctagtagcttgtccacctatttttccagagcttccgccttcactagatcaagggggtgccgcttctgctgaaccggcgacatatgtggattgacgttaaaggcatgagttattacatggggacttatgccggtcatgtctccttggcaccatgcaaaaacatctgtggctgcccttgcgttctaatcttttttctttttcctctggttctggctctttcc

SEQ ID NO: 403089 - DNA, 441 bp, Cannabis indica
tgcttttgatgtgtagtagtgtgcacatagttgtatgtgtctatgttcaagtccttcatgacgccaactgcatggttacatgacatttcatctttttgaaatctagggcatgtgcatgttttgtctttcaagtttactattcttgttctgtgttcatctatcacctcaataggttttcatttgctggcttgacctgcatgtttttctaaagcaactttaatacaatcaaaaaactatataaaaacaacttttccagtttagagtatgcaacgtataatatcaacttacagttaatcacaatgagtgtacgtagttccttataagtttttttcttatgatggtgttagccttgttgtgcacttttatgcatcttttctattattgtatgtccactcttgcatttgtgccctcaagcactccattaatgttgtgactggtgtt

SEQ ID NO: 403090 - DNA, 674 bp, Cannabis indica
caaggaagtgacaggtacaaaacaagatgaatgcgcataatctcaattttgtcgtacctcatgcatgtttagtttgtttttaatgattgttaatggataaatgtctacaaggtcaattcatacataatacatgtatcctgtcgatatgatattatgtacgtcttaattggttaccttatgtgtgatagacattattatggtggcgtgattgtattgtccaagtgggagaatgttagaattattataatggactaatacaatcataggtttaattccataatacacaatcattaattatgtgcctaatgttgctaataaccataatgggatggttaacaacttaattatgtgttagaggcacatgagagcacccttaatactatagttggcccattaaattatagtacaccataaaagaccccataagcccaattggttaataaccccttagggttataagggcaatagcatgtatatatatgtgtaatgtgtggtaaaggggtgagatggttttgtgtggtgaaaggcaaaagggttgctccacaagtgttctctccaaaacttttgctcaaagatcttggtggtgatggctctcatggatggcatatgaggtatgtgttttattgtttttgatgctctaaataaatactagatcttggctttaatgattatga

SEQ ID NO: 403091 - DNA, 687 bp, Cannabis indica
gtatgagtgcatatgggttcataatttttagggaatacaatcaagattaatgttgatgttataattttaaagacgttttctgtcatagttttagcagtgtagcccatgactataatgcaaagtttcttgaggctatctctaagtgtaggcgaggaattgtacaacttgacttggtagagattctgagtgtgaaagaagctctaagctcaatcaagtcgaatgggtggtacaatgcgatgttaaaatactgtaaactctgaatatagccctaattaattcatgagaatcaaacaatagaatatagattagcggaagcgtaccggagtccatagaatcgatctttgattggtatgatcttccaattttgcatcaaaacctttgaaaccttattttcctgatgatggggattcaagaactctggaaaaatactgatacgatgcaaaatggggacccatacctgttatattaccaactgttacaacagttggtaatatttattaataatttctaatttggcccctcatcaaatcagaaactatctaattggtatccacatattaaaatcatgacaatcatgcccttaagtcataaactttattccaaaatagaccacataaatttgacttatttatttgatgacccaacacacattttatatatacagttgtgaccccaattatttctaac

SEQ ID NO: 403092 - DNA, 1368 bp, Cannabis indica
cttttgctcttgatatgctttgtagtataccagtttagggttgctttacgtaaaggttaggtaaaaataccaatttatcatgaaagattttattttctcttttaattttgactacaaaatcaaacaaatcattagtaataaataataatcaaatatttgttaatcaatcaaaacaaggagaatcttaaaaatttgagttaacaatctatacatggatatatatgatgatggtgatgataataatgaatatgtatagtagttttttgctttcagtttttatataaagttattttacaattaataatggtatctattttttagttttaattaaaagaaaaatattaataatgcattaagaaaataagaattaattaatgaataaaaaaaagaaatggaataatacatgtgactcaattataataatgattaacttcttaatatactaactttttcacacataatcgtaacttgtttagattatttattggatttttttaaaaaaaaagtgatttaattttgtaagataaaggattaacgcagattttcgtcaaccaaattaatagtatattcgcaataaatacactaaagaaacaaataagtaataaatgataaataacaccagatattttacgtggttttgtagtttaaatctacatactccacgagtccttattattagggatattttgtgggatacaaagtacaataccaatatttgaataataagattttctctctcaaatttatcgtccattttctcatggattttgtgttggaattattttaccaggatctagatttactactatgtatgttatttaacatcctaatatgaatttctaaaacaatgaaaataaacacatatgaagtttaagaaaccttacagtgggtgcagcggaattaaatgactcattccagtcagatctctaacccttgtatcctttctgtagcagagtatcaccaagatctgagcccgattctccttcttgttgattggattcttcacagtcttacatactatgattgaggaccaacttgatgcgtgtgagcacttactcaaggtatgaaaatatgaagagcagaagaagagaatgtggttttggctagggtagtgaaggaggctttgaaatttttactaaaggaatgagatgcatcatcatcttttcccttaagccataactacctatttataggaaaccacttaaggttaggttagcattaaaatattagaaaaaataaagtggcaaatcccatacaaagtggccgaccatgaattggattgtgccccactttgcaatttttccattttctcatttttccatcttatttcctcaaaaatgcaaggtttccaattcgaaccatttaaat

SEQ ID NO: 403093 - DNA, 925 bp, Cannabis indica
agttccctgactactagcaacacggagggtgtctgtgagccaaagtatccccccgttccaggaaccaaagccatctactccgagaagagtatggattttcccagaggggccaaggaattttgagacacgttaaatcgggctacgcctttagcccacggaagctttgcctatacgtgtcagactatggacctagtgaccaggcttttttaggtacgacttcagaggctgtcccccacgacacgctatcatacagggcatgcacgtccttgtgtacctgaccaaatgatccaacggctaggaataagggaaattcaaaaaggagaagccctaagatgactcgcgcataaggcccagcctgtacgatctgacgcccttaaatgtcatatgggaaaaaatgccacctaccaatacaacaatcagattttgccccaacgatgatccatctaaggcagcacatgcaaagaagttggcttataaatacccccaaaaaagcacaagagaggggaggacccttttttttgggagagaagactcattcttcgtgatcctaagcaaacacattttgtattacacctaaaaaactccaaaatattcctactaagcttcctcttttttgagaggaacacgggagaaaggagttctagtacattgtatatctatttgtataaatagttaccggtcgatgagtctaataaaatggactcgtggattaaggatggttaacgcctgaaccacgtaaaaatctcttatttgttgttttgtaatttactctgttattactttcttaagctctaaaatatatttagttgccaaaagctcagtaaacaccttacattggtagcagcataatattatggctcctttgttgggctttgtgccctaaataaaactctatttcaatgttatcattcaattatcaataaag

SEQ ID NO: 403094 - DNA, 664 bp, Cannabis indica
ttcaattacagtgctatccttgcaagtcaaagatatttcttgaaaaacgtgtcaaattaaaactttttataataaatattaagctttagaatttacataattattaacaaactccgggatcccgaatctaaactttttatacaaaatatgcaaaaatataatatccaggtcgcacagcgactataaaataaaatccccatatgtcccgagaccgaacacttcaagtcacgctgccacgacatgtacaatcccacccaagctaggctcactcctgttcagctttcgccctccctttacctacacatggtagtaaaattgtatgagtctacagactcagtaagaaaatcatacaacatattatataataccgacttgtatctaggtgcccatacacctatatacaaggctcaacagatgagtaggaacgttccatactagggtacaaccactataccacatacactacgtaccttgttgtacgagtgttggtagggtttgtttcgtagcactgatggatataccacaacaccctgtactttcccgtacttgtgctggtatcactgtaaagtactcttaaacaatattcactacgccaatgcactctgtaccataactgtacaagtgttggtagtgcaactaaaccataagcatgcatatacactta

SEQ ID NO: 403095 - DNA, 515 bp, Cannabis indica
tacttttttcttctgcatttaatctcttctaaaaatgcagctccttcttgataatgatggtggctgaacttggttgctttgctaggtaaatatggtacaatgtaataccataaaaataaaagcccattcatttccaatcttggcccactagattttgtctcctctttccacaacagccagctagcgtgattttaaatggctgatacgtacgtgctgatgtggatgaatgaaattccttttgcaactttttccacgtcactatgcagaatgctgaatttgttgcaccaatgctttagcaattcagcccaatttcagcttctattttcactttgtctttgttgggttctgtgtcctaaataaaacccatttcaatataatcagatttactaattaataaagatcagaaactgcattttatgttatatggttcacatgatttatttcatgattatatttaatgtataagttctatcaagtctagaacatatgtatttgttcatgattatagtgtcgtc

SEQ ID NO: 403096 - DNA, 830 bp, Cannabis indica
gtactccagattcaaaatcccctacgccggatgaatatggagctagttttttcaagatgatgtggcctaaacttggagctgaattcaccaaagctgtggagaaatttttcatgacaggttcaatgcctcaagaatttcatgcaactatgataacgctcattccaagacagaaaaccctaccaaggctgtggattttagacctatagcctgctgctcaactgtgtataaatggatctctaaattgttgtgttccagactctctcaagtgcttcctgtgttgattaatcagaatcaaggagcatttgtgcaagggagatcgatagctcataatgtcatgattcttcaagaccttttgaagaattataaaaggaaaaacatatgtccaagatgtactctcaaggtggacattagtaaagcgtatgacacagttagttgggagttcttggaaacgcttctgaatgactttaaactgcccgccagatttgtctcgtggattatgacttgtttgaaagctaccttttactcggttttgatgaacggaagagtgcaagggagcttcaaaggcaagaaggggttacgatagggtgatcccttgtctcctttctaatttttcatgataatggagtacttgaccaggagattactgctagcagccaatcaatccaagatcaggtatcatcctttatgaaagaatcttaagataataaatttgtgttttgcggatgacgtgatgttattttgtaaacaaacttaagctctattcgggagataaaggaggttttggatgaatttaatgcaacttcaggccttgcaatcaacaccaacaaatc

SEQ ID NO: 403097 - DNA, 458 bp, Cannabis indica
agaagagatggaaaaaattccatattcaatggctttggggtgtcttatgtatgtcatggttagcataagacctgacattgctcatgctttaagcatattgagtaggttcatgtcaaatcctaagataaaccattagagagcactcaactggctactgagatatttgagagggacattgtaaagaccgcttagtttaatttggaaattagcagttaatcatgtttaattatgaaattatttatagctatttaaataattaattatactgttattattgaattctgagatgcattttatgtcattcagtagttttcataattttgcattcccggtgcccggtaacacggaactcggcgtttggctcagtaaaatcacaacttagtatgttagtagtttgggacggtttgttaaacattgggaatgtcgggaatggccggaaatttagaatttcccaaaaa

SEQ ID NO: 403098 - DNA, 846 bp, Cannabis indica
gttatggaaaggttggataggggtctgtgtaaccaggaatggtttgatcaatttgagggagcggatattcagttattggattggtgggagtccgatcatcgtcctttggtggtggacatgctgattgttgaggatggcactcagagtggaaaagctaaacgaaatacacgctttcactttgaggaagcatggtgtgaggaggatgaatgcaaggcaattgtggagggtcattggaagagtggggagccgtgtgcaattgcgggctcttttcatggtaaaactcatcgggttgggaagatattgcatgggtggaataagaagaggaagaaggaagtgaatggaaggatcactaaggctaaaaaggttcttaatgaacttacattgattcaacaacctaggagttgggcggagttaaagcaagcggagaagtatttgaatgtgttgttggaaaaggatgagcaatattggagacaacgaagccgagctatgtggttgaaatggggggataaaaacacaaagtactttcaccacaaggcttcggcaaggcgaaagaaaaatgacattagagggttaatggattcaatgggggtgtggcaaatggatccggttatagttcagcgacttattgaagaatactttgagaatatttttatggcttcggaggtgaactcaagggtggttggtgaggttctatcagctgtgacaccgaaagtgtctaatgacatgaatgcttttcttttggaaccgtttatggaggaggatgtggttcgggcggtcaaagatatgaatccaatgaaagcacctggggaggatgggttaccgacactattttaccaaaagttttgg

SEQ ID NO: 403099 - DNA, 775 bp, Cannabis indica
agggtggtaccgtgcttccaagtaaaacggctaccagagaaaacaagcgggaaaagtgagtatttaccaacaaaattttgaaaagaatgcatggcatgtgagggtggtaaaccgcgggtgttacgatcattaaaaccaagataatcgttaaaatccccgatgatgagccacggtaaaagaggggcagtatcaaataaacggtgcaacaaagtccaggaaacatgtttatcaacaacatagggagatccataatagcaagataaatgaaaagtagtattgtttatagtaattatacagtcaatatgatggagggaatgtgacaaaatattaacaaaaacattctccttccaaaacaaaagcaaaccccctcctaaacccgatctaggaacttggaaaacattatcaaaaaaagtattagcccttgcaacaaaagaggaggaatctggcagctttgtttccatgacaaaaagaagctggggctggtgctgcttcacaaggagggagaaattttggaatgctcgggaactccctaatccacgagcattccaactgatgaaattcatttttctcggcggggttgctgagcaacacccgccgtttcctcgttgtcggacatagatggaacaacagcaaagtcggcatgagaggctcgggcccgtttcagcatgctgcggaccgaggagccaacttgacaggtctgacgagcaaaagatcgtttcctggtggaggatggggcagtagggggatcattgatgttaagactggagagaggtgg

SEQ ID NO: 403100 - DNA, 854 bp, Cannabis indica
aatttttgaaattttttttatttcagccttccaatagtggcggaaacagggtccgccgctaatacccccgccgctattgagtgtaattcttgtagtggattgaatgtaacacattatgaaaatatttgctaatagtctcgtctgatctcataaatcgaaatctaacgactctattttcacatgataaacaattacatgtaaaatatagtcacttgttcatctacttgctaatatttattaatctacccctagtttcaaacattatgcatagagtgttagaatgctttcttatacatcgtaaattgatcaaaacaaataacatcactctcataagctatttaatgcacaatttgcctattaacaaaaatatcaagtatgtataattatcttcaattgagccatatataagaacatgggctacttcactcattgccaattggtcttgagatggaaccccatgattctcaacatggtatcagagccatatcccttgcggacaagtgatcatatccgatccgcacctatacagatagtgaccatgtccactctgatacggttcaagattgatgagcaaaaaatagccatcatcttgagggggaatattgtggacaatgtcccacatggaataaatggtagagaattgagccatatataagaacatgagctactccactcattgccaattggttttgagatggaacctcatgattctcaacatataaaatacaaattattgctctaaacatattttattaacttgagattttaatttacttttatatgtggatatgtgtaaagattaatattatatgtttgaaatgaataaaatacattaaaatttgaaaaaaagtaga

SEQ ID NO: 403101 - DNA, 634 bp, Cannabis indica
aatcttcttattatctctaatacctatttttccctctttccaattttcttaatctttttcttcaaattgttttaattgtaacttatgtaatcttattaatatttcagttcactttatgcaatcaatgaataaaaactgtgtaacctacatcaatatcaaaaaatatacgttattttacatgggaaatttgacattttatgcttaaaaatgtctaatggtgttaaattatacctaattataacacattgaaaaaatataccaatctttctcttttcttccaaaaatacccctctcatttcaaacttcccacattccctctaactacattctctctcttctttccctctcccaaactcacgaacccacacccgcacgacccctcgacccagtcgacccagacgaacccagtgccacccgcacgactcctcgacccagacgacccagacgaacccagcgccacccgcacgacccctcgaacccacagccacccgcacgaaccagacgacccagacgaacccacgaccatacgcaatcgaacccacggcgaccgaggagacccgcgaacccacccacgactggaaaaacccaatacccaggtttgttctttatttttttaactttaaattcacaatct

SEQ ID NO: 403102 - DNA, 537 bp, Cannabis indica
aaacatgattgtctgacccttgcagggaagttaatgaaagatttctagaatagaatgacaaaagatattcttattatttcacttgctccgaaaaagagtgtaacaatgcattattattatttcaccatctacaagaattttctaatatgatattcttcatggttgtatacgatataattatttaagatattttgtaaattttaagaaatttaaaataattctatttcacactcgtacaaagtaaatgagacacaagcacaacatactatttaaattttattttgatgtatttaactttcttgaatttctcaaaatattgcaagatgttttaattcttctaattaaatatcaaaataaataggaggtacattagttcactttttttagtgcacatagaacttttcaaaataataaaccacaataaaacatttgtcgaactctatgtcactacataacctaaaattttacgtgtataataataaagagaaatgttaaaaggtattagtggtgtctggcacacttttatgtgtcaatatc

SEQ ID NO: 403103 - DNA, 396 bp, Cannabis indica
actcatcatttatttgcacttcttttgcattttggctttcttctatctcgagttttgaaagatgatcagcaactagattctcggtccccttcttatcctttatttcaatgtcaaattcttgaagcagaagcacccatcgaatcaacctttattttgcatccttctttgtcataaggtacttgattgctgagtgatccgtataaactatcatcttattcccaatcagatatggccgaaatttatcacaagcaaacacaatggccaacatctctttctccatgctggcatagttcatctgagcatcattcaaggttctactagcatagtagatggtgtgaaacaccctgtcaactcgctggcccaagactgctccaattgcgtagtcacttgcatcac

SEQ ID NO: 403104 - DNA, 551 bp, Cannabis indica
caattccgatgactttttcggcgttggaagcaactctgctgaatttcctagtgccaacaacaactccggggactatgccaattccgataacttgtttcagttaactttattatctagcatttatatttcgttatgatttttcatagtatcgaatctagtttcacaggatttataagtttgaaactggctttataggttttaagagttttgtaatgaggttgctctatattatgatgttattgtatattttttattttaagtttctttttattagtttgtttctaggtttgaaactggttttcacacttatattttgttttagattatagttgtgcattgtgtgttattttgtttgtatttatgagtatttttttgtgtttaatttccatttggttgattgatgaaactggtttcaatttaggggtgttcattggatcatatccaatggatttggacccatccaatccaatccaattgaattgagtcatccgatccgatccaatccaatggatgtattggattggatcggttccatccattggatgctttaa

SEQ ID NO: 403105 - DNA, 572 bp, Cannabis indica
aaaaattaaattagtcgcacgaatagcaggtatattgcctagtatgtatatatatacgtatgagagatatgaggcggtgatatgacactataatattactccaaatacatcaaccttttccttccttaattctctcatcttttaatattttattagagcataaatctacaaattgatattttactattattttaaaaaatttctataaaaattctaacataaattaattatttatgaaaaacaccatataaaccacacttaccatatgtatgacataatccaaaaattaattattagtactatatataaaccatcatatacctattcacgtcatttatttttatcctaaaaaatattactccttattctactcattattatgtcttttatttttttttcgtcccttctattattattattttttattaatttttctcttctctataattttataatatatttaatcatatatcatgtaattgtttttgttgggctatgtaccctaaataaaactctatttcaatgtaatcttttctattcaattatcaataaagaaacagatttaatttcat

SEQ ID NO: 403106 - DNA, 530 bp, Cannabis indica
ttggaaatgtgaattttgaagtcattagaggactagtagtcccacatttcttggaacacttatttatgagtgtatatatagtgtaaatatgagcaattgatcagttgggcctcaagggttacctacttttgtggaagagggagcgtcacacaaaggctcacctaaataccatacacgcgcccccacctctgtccgattgtgctgagctggctgggtggtttgttgtttctaccttctgtgcattccttatataatgcattagaaccaacgaaaaaaatacatcttttctcacacagaataaaattttccaaatttatttacgattacattatataagtatttcgagtagtagtattttggtgtggtattttgacgactctctatcatacaatagatatctgatacagtggttcgactggactgttttatcatggggacgacgaggctaatagtctgtgttagagatttataacaatggaagaaaatcaagatttattacaactctattgtaaaataatacaaggactaaa

SEQ ID NO: 403107 - DNA, 591 bp, Cannabis indica
gaggtcatcattcttaactcggtcggcagtattcgaggtatatgtgaaaacctttggcatttgtcgcatttcttgataaattcgtgtgtgtccttattgatagttggcaagtagtatccttgacggattatcttttttgataaacattgccaacctgcatgatctccgcagaaaccttcatgaatttctctgattatttcactagcttctactggttacacacatcgtaatagaggcatagaataacctcttctgtataattttccctcgaccatcgtgtaacaaggaatcaaaatataagagtttgcgtgccttggttttatctgtaggaagttctccacttaatagatacttgacaattggtgtcatcaaggttggcgaagtatccatcatgtcgacatcttcctcttcacatatgcttggctcatctaatacctccagcagtccaaatttaacttgtcaagatcaaattgtgatgctagttttgctagggcatctacattagagttttgttctcttggaattcgttctattttaaaatatcaaacttctataagttcttcgaactttctctaagtatttagccatttt

SEQ ID NO: 403108 - DNA, 546 bp, Cannabis indica
gtggtgaggatcttgatcctgaatattgagacatggtcttatttctttatgttatggatctagagagagaaaaagatcaccaatttagtaaaagataattatatagtatatatatatatggtagtacaggatatgtagtataatttaaacaagtaacagtattaataaggtttctaacaaaaaaaaaaaatattaataaggtgcaattattaatgttgataataattattatattctctccatttcgtctaaatcttcgagcctaattaataataattcgaattagaatatatataaagagcattactattagggtaccagcgggtgccaagtacattcttgatatatcgcgttacgattagctaacgatattttctaaaagctattatattaaattctatgacgtattggaccaataacgatattgacacataaaagggtgttagaaaccacttgtatcctttagcatttctcatatataaaatatgagcattgctattaggcaccagtgatgcctagcacttttgcgacatgttgcgttacgat

SEQ ID NO: 403109 - DNA, 474 bp, Cannabis indica
aaaaaaaaaaaaaaacaggtgtgagattatgtagaagaaacatgtgtgagattataaatcaaactttttcatagtgtattctttttatatcccgatcatataaagttgatgtcgtcattgtagttcctattgatatcctcgaaattttaaacttaacactcaatttaatattctgttagttgatcaataaagtaccacatgtaaatatagtataggcctattggagaacattgtcccacatgaactaaatgtaaacgtattgagccatatataaatggtactcccagccgcgatcaagaataagcgagcaaatagaactcccagccgcaaaacaaaaaaaataagtgagcaaatgacactacttatgataaggtgattcaagattggtgagcaaaaatagccaccatcttgaagggggatattggagaacattgtcacacatgaactaaatgtaaaagtattgagccatatata

SEQ ID NO: 403110 - DNA, 960 bp, Cannabis indica
taatggcgatcccttaacggtgacccatgcgcccgaggttgtgcctctagatttcccttattcctacggtgaacttccggttccttggttcctggctgatcatacggcatctcgccttcaaggtatcccctagtttcctaggttgtctttcctgagcattttgggggttcctttgggctgcctccttccccctagttcgcgagtctcgaggtttgcctcgcagttctctctctagggtcaggttgattttgggagctattcccttgtgccgcctggctgcagttacttcacgctctaattcagcattatgccagtttgcctcttccaatcgacgcctgaaatggcagttttttaattcgacaattggtatatactttgttggatcataggcgccatcttcatcaactagattgggaagagacatgccactgttcattcttggcccttcaagtttggttcccagattttgtgtttttattgaacatgtaggatgttcaaatgataagtcgatagatccctgcggactcaatggctattttcaaggacaatgagtggtttctctgtgaggattattttcttcgttgtcaaacataaagaaaattattatcttatttatttttttaatgtcaggaggattttttctaagctttttcatgaaggctctcaatgaaagcaccaaactattagcgcagattttcgttaaccagatatgagcctaacagtgacaaacttgcacagaaaatctaaaaagaataaataaaatttatgaaaacaaaggattgtttacgggcttttgcagttaaaattctacatagtccacgagtcaatcttattagatttctgatattcttctacggtcttttctcttatgaatttttgtcccttttccagtgtatcttgcctctatttataatcacatagtaggcagttaattacttagttgactgatatctttacaac

SEQ ID NO: 403111 - DNA, 638 bp, Cannabis indica
ctttctccttgttctttagttaacacaaccgaactgctcaggactgaactacttgtttcttactaaattagactcactgtgtcttcatattgtttcttactaaattagactcacttttcttactgaactactgtcgttggctaaaagcgaggtcaatattttggtgctttcattgagagcagaatcaggaatcgctcttcattctaaatttaaccacaaatgcgatggtggtacagactcgtaggggcctagttgatctggcaaatccacgggcggtggatcatgcatcgcagaacccaggaaacacaatggttccgcgaactgttaatcccgagcaaccatcaaatgtatgccatggtgtgacgactcatgtggatgaaatcgcgcctggtgtgcaagagtcatgacccaggcagggcattcataacacagtcgttccgcctgctaccaacgctcgaacgaccgttggagatgatagtgagatctgaaatctccgtgctgctcttggactcatggagggtcataccaacaccatacatcatgatctgaaatctggcgttcgaagagcaaaggcgcatgtttgccgagtggagagacaaaaagatggaagcgttaagggctcatcatgcagagattga

SEQ ID NO: 403112 - DNA, 624 bp, Cannabis indica
aagtgtttaaagtgtgttttcttgaattgaaaatgtgtatattatatattgaagtgaataataactattttaaagtaatgaacatatatatatatatatatagagaaataattgataacctatatataataggacaagtttaaatttaaatctgttctagatttttaataaactgaataattatggaaatgtgaatttaaaaattattttaattagcactttttctttattttatttttattttttttcagaaattattgaaactctggtgggtttttagccatgaaaacacctcgtccaagctgccattaacaaataacaacaaacaagaaaatttcagaccaatgaccccaagggtcaaaaatttcctggcgatctgatcgacggacggcagctcctttcttctcaactctcgacgatactgcaaaacgattccccaagttgaagcccatgacagcccaaggccaggttcctctctaatcctctgtttcgtacacaacacaagccaaaaatcaaggtttttttcttcttctttattcctttgtctatctctggtttagagattattgactgattgtattcattttttttttcagattaagagaatcactttccctttcgatc

SEQ ID NO: 403113 - DNA, 676 bp, Cannabis indica
aagtttaaagactgcttggccagacacgatgacttaaaaaaggccttatggctggacaaatgtattaaaataaaggaaagatacgtgttcagacggcaggagtcccaggctccttgtacgggtcctttgggccggtgggtgctagaggatctgttgtctgagcaggaggcatgtcaaggttcagaccagaggtagaagtggttgcctcggactctccataggccacttgggaagcacagtactcgagatacatgtctttggcctcgcctaggtaattaaaatttgcctgagggttagccttccaaaagtcataaaaaatctcgagaccggctgtctctaagacattcaccttccctttgagcctctctaccttagcgttaagctcctcctccttggacttcttctctgcttccaacctgtggaaaagagttcgaagaacctccctttcttcttggaggtcagtcacttctttggacaaggaggtcatggcaggctcaagttgatctgaagcctccaaatccttcaccaactcggccactttcttctcggtagcaagaagctttttgttgacttcacccagttccattcggacagctccgagttgaactctggcgtcatcagcgtccttcctagccaagtctacttccaccctcatggtgttggacatggcaacatt

SEQ ID NO: 403114 - DNA, 963 bp, Cannabis indica
gaaataattagcaccaacatgtgagggtggcgatggttcgtccaattgctcgttcggttgaatattgctttgaacgccttcgaattggttggtcttcttctcatcggaatatcccatttttgtaagttgtaatgaagattatgagtttgaagattagggtataaatagtgagatttaattacttttatattatcaataattcaaattgttaattcactcttcaaatgcttaatgtgctaggttttgactaaactatacataccttgtgatatacataactttgagatttttatatcaatttaatttgttactcaactcacgtaactatgctaaaatatatataatagtaagaaacataacacaaatcaaaatcaacaaaataattttctaaatattttatacttagttcatatgtatataattaacagataattctttaataggtgttagtctaatttttatttctttaaaggggtctaaacatttttgttcaagtaagcatctacgtatgcaaatatttattttacagaaaatttatgatgacatcatatgtatatataattaattgcattatataataatcaagtttttattattactaattattattgaatgtaaatttcatgttgttagtgataagatgatcaatgtaatgggcctccatctcttgcaattgcttacgggctgggccgcctatttgtggtggttagcatagtaggcccaaaaatatgtgcgcctagtgtatttgttcagagagaaattgtgctccacaattaaagactaatttaaaaaaatttctccaattattgttggatttaaggatttttattcaattttactaacaaacacttaatataatgaagggttatttgcggcaaaacctcctaaagtgaacaggttcttacaactaacctcctaatctaaaattttggtggtaaaactacctaaaccaccagtccgtta

SEQ ID NO: 403115 - DNA, 1066 bp, Cannabis indica
aaacatcaagaaaacatgaaaaaataggggttccaaccatcaccgaaaacggtaagctgttttgaaaaatagcaagccgttttttggggtttcctagcaggataaatggtgaaccgtttttcctaaaacggtggaccatttttctgcaggaaacgagaaccctaagttttacacatctcaaaaccccaccaaaactgtaacgccctaaataattaggcacgcttcccaataaacttatgaaaccctaatcccctaattgggattactagaaaaataagcgcggaaattaaactttattaataaacggaatgaaaataacttgtaataatttaaaccttataatttaaaagttacaaaagttgggatcccaaaagtatttacaaaacactattacaagttcttttcctttggccgacctaagcggcaaaatagagtctcaaaatacatcactggtagaccccaacccgcttggtctagtgtggcccgaacatgtacattcttcgtccagctcctgcactcatggctgatcaacgacagtcttaccctttcctgcacagtagagcacccgtgagccaagcccagcaagacagtataaatcttaacaaatataatatgctcatcatgctatttaaacagtaatgccattcatatatgtctgtatgtcacagacctgcatgtcacactcacatgcctatttatgtctacgtggcgtaggcctatgtgttgcgctcacacatctatttatatctacgtggcgtagacctacgtgttgctctcacacgtctaattacaataaggccttagaatagttcatctcggttctggttaccgagtccaacttgattatgctgacgcataacccttaatctcaatatgtaacacataattattggtgccactgcaatatttgtctatttgctatagacctgcatgttacgctcacatgcctatttatgtctacgtggcgtagacctacgtgttgcactcacacgtctatatacaataaggcctcagtagggtttacctcggttctggttaccgagcctaacctggttatgccttgctc

SEQ ID NO: 403116 - DNA, 910 bp, Cannabis indica
ttagggtagaataagatacaatccaatccaattgaaccaaattaatccaattaaaattacaaaaacttagatatacgattacaattaaattgaattggatagtctaaaagttaaatatctaattagatttgattaactattgaatattaatctcaaaatctaattaaaaactgaactaatctaattacaactaatatatattaaaatattattgatatacaataaaaaatatggaatttttacactagatgctaaaattgacatttttcttttaatattttcaattaggttcggtattttaaacttttatataatctttgtttttcatttttaaatttcaaaaagttcattaattatatttttacctttttgctaatgtcatgcttcctcccatttctgttacacgttacttctctccgtctctttctctgttgtttttttttcttttcaattcattgttgtttctttgtcaattagccacgattggtttttaaaaccgtcccaacctaatgccctaacccattcatttcccaacctcccattttagtcacgatctcctttcttccataacctttttctttctttttttcctttctcaactgtttttttattgtgtataaatggccaccactaggtcaagttccatgtccccttctcttgctaaaaaaattcaaagaaacttaaaaaagctcctgggaagttttctaatccaaaggttgaagatgaacttagggcccgtttggtacacaggattggactgaaaatgattggattggactggacaagattggattatgctaaaagtaatcccgtgtttggtttaagaatggactgtactattttatttatttccttttagaaaaaaaaaacttaaattaaataaaaatatataataataaattaaaagtaa

SEQ ID NO: 403117 - DNA, 697 bp, Cannabis indica
aacaaacttgaccaacataactcgtcaagtcaaccatgctaacccagctgatcccaatgaccagcctctactgcccatggtagatttgccatgggtacctcgtattgtgggtttagccaatgtggagcaaccccagaacaccactaactttggtccccaatattatgctggggaaacagggctgtggattggcgaaccatccattggtgagcctcatgtggactttggagaagactttaaattggccagacatagagaggttgtctgccaagttggccaaagtgaagaaccacacaatattggttgtgatgcattcacacaatagagatgcaaatttctaagatggatggatgaataagagtacatcctccgatctcattaggcgaagctagaccgccgtaacaaagaagctagtgacttgataaggcatttcaatgaaagaactgtcaagagatgtcaggatctgatcagagatcctctccaaagggagactagtagacaaatcggccagggtctacaggaaaacattctaatgacgttcttcaggaacaaggacaaactacccctaccctaaggtggacaagtcttgccacacagatctagtggtgggagtagccaaaatttggcaaccagtggcatggggggttggccagggatctctggctcaataacatccccacttggccagcccttggct

SEQ ID NO: 403118 - DNA, 244 bp, Cannabis indica
agtatattcttagtatctaaattaaatatctgccacttgattaatgaaaataattcatgttggaggattataatatacaatatatatatatatatatatatatatatatacatttaggatatgacttttttgttggaggatttgtatgaagtgaaatgactcattcagtgcaaaaacaaaactaaaatatgagaagtactagtatttgtggttgtggtccctcaaaccttttttatatatttat

SEQ ID NO: 403119 - DNA, 698 bp, Cannabis indica
atctagggggtatatactactacgtctacctcaactacaatgatctacatgggatttagtcgtaggggtacaaaaccctaacccctaaagggttagtctaggggtaaaccccctaaagggttagtctaggggtatacccctaccccctacaccctcatggtacaagtcatacattttaccatagacataatgatacgcttaaaggtagatgagaacatctacattacactataactagtgacaacggacaaggggtctcggggagtcatcccaagatgatgattgtcacctccctcaagttgggtctcgggggctcaccccgcgatgatgattgtcgcccccctcaagttgggtctctggggctcaccccgcgatgacgattgtcttcccctcaagttaggtctcagggggtcaccccgcgatgacgattgtcgccctcctcaagttgggtctcgagggtgttgccccaaagtatgggcttcattctcgaaggtggtcgacgaccgtgtcatacccataggagaccttcgtcgtcagtgactatttcaatcccatgaaaggctcaaagacagttgtcaaccacaaaaaataacgggatattatcttaaaaatcaaacttcaactacctccaaaaattaaggaggtgattgagatagctccacgttggtcgcctctcctgaagcgagaagcaccgactc

SEQ ID NO: 403120 - DNA, 592 bp, Cannabis indica
ttggtagtgatcattataatattgtaaatatggatattttttctacttttttaagtaagtttcatttatcaccccttccttttataggtaataaatatacttggaataataatactatttttgaaagacttgattgggcaattggttctgattcttggtttaattcatttccttcggctgttctttatcatttaccttattatggctctgatcatagagcactgaaagtaatggttaatccaaacgtgcccaactgtaatcttcatattcctaagcgatttcactttgaaaatatttggcttgagaatccggatttttataccacccttaatagtgcttggtccaataatgattcaacattaggtgcttatcctaggttccttcattcccaaaaagcttctattgattctcttacttcttggggcaagtctattagaaatgattttaagcttcgtatttcttatcttcagcaagatattgagagacttcagtcctctcaccatagagatagggatgcaatttcttctattaaacatgttcaatctcaacttgatgctcttttatataaagaagagatttattggcgtcaaag

SEQ ID NO: 403121 - DNA, 766 bp, Cannabis indica
tgaaaatgctaagttttgaatgtttaacacgctccgtttgcgattgaaaatagaggtttgaagcttcaaggcaaatttttgactatgattcattcacttctaggaaaaactttctgaatgaaagttctagatctctcttttagctttccaaaacatcttgaatcttccaattctaagttatatcgagagagttatggccaaaatattatccattgttgtagcagcaaatcaaaaaaacaagagagttgtgactctctttccaatgtcgtggctcttgcaaaaaaaaaaaaaaaaaaaaaaaaaaaaaaaacggggaagcttgccaaattctttctataaaatgagttggagctaggttttctttgtcatttaaacttggaggctaatttagagcataggaggaaggctagaagacacaaatggaggagtccaaaaagtgttctttctcatctatctttatcttttatgtttttagttgaatatttgttgttttagaatgaattttacgagctaattttcttaaaggattattgtgtgaatcacttaaatttattatatggagtaatgtagttatttaatttcatcttcttctcttatttcaattccatacaatctgatttaatttttaattattgactgatcacttataattattatttataaattaaaatcaaaattttaaaaagtgagatttgaatatgctttgattgttatggatacaaattaatttaggacaaacatatttagattatttgtataattttat

SEQ ID NO: 403122 - DNA, 593 bp, Cannabis indica
taaatgtaaaatagtttaattattaaacgcaatttatatatgatattgttgcctctgattttgtccaaaatacgtggaccaaccggattgagacacgtagactgaagaggtttaactttgggataattcagctaagtctctttaatcaaagggatcagcatttaacatgcctcccggagaaggcatgtgagtttcacatactcccggagagcaaagctacaacaaagcatctccgggaggtgtcaaatcctatctgaacagtcacctcgcatttaatgccgcatgggagaaggcgtattgaaactgccatatgtcttaaagtctgacggcgtaaccccccttctgcagctactacgctatgattaataagcctagtgacggctactttatgagaaatcacatcaatcaaggaaggataaaggactacgtccattaaacccctaaaaagcctagggattagaccatgcatttcctatgatgtatccattgggaatgtgtgcctttactgaacattacagaaagacatgtacctcaattttagggatcaccccacaaaaacactataaataccccccaaactcattaaggcatgg

SEQ ID NO: 403123 - DNA, 802 bp, Cannabis indica
agattgagcataagcaaaggtatatttcgatttgaacctctgcttagtgaatacgatttagattttactagagtgacccgtagtcttgaactctatctctaacattgtaccatgcaacaatctttacaagggtgtaatcaaaagcccgtgcattaatggccatgcacgtctattccagtatagtaaacgctctagaaattttgcctaaaatttcataggaagcagccccactcccacattcacataggtgagtttatcaagagtactcttgtagctcggtgctccattccacttggagtgtagatctcattaagagcttctattaactcagccttaaatcgcttcaggaattcatgcttctcttttcgtataattatagcatgatcctacttttatcacttcataacttgttagtacccattgaacctatttcttgggatctctagtctataggttaggtttccattataagtgattcatcaatctaagggcaatagtcccattcctttcgatattttaaggactttctctcttgctaaaccttttgtcaaaggatcaggcaaattatcatcagtgcgtacatgatccactttaacagctcctgttaagagaaactctctaacagtgttgtgcttacgacgtatttatcgcctctttctgttgtaataacggttctgaacttttgcaatagccgcaatctattgcaatggattacacggttggataggtcttccataaggaatctcagctaccgaggcttcttacgcaacatgcttcttcactagcactagctaatgcaatc

SEQ ID NO: 403124 - DNA, 719 bp, Cannabis indica
aatagagattatatatgataagaacgaatatgtattaagttgtatttatcaaacatgtcgtttactgtaaagacataattcatatcataaagatgatcaatagtagatcgacctaaatcttaagtaatcatgaattcatgttcatgttattagtttctttgattcactcgttaaagtttctcaaagaagataattcttataacttctgttttggaatgtaatatgtgaatggctaggaacacgatctaaagttatggaatcttgacttttctaacggatcaaatgttggttccttttatgtgttaattctgaaattaaaaagttgcacacaaatttagattggatctcaattatacattcactatttaaataagggtactaaagaataaaaaagtaattagaagggtaaaacgataattttaccaatattaatttcaagctgacccaaggagggctaatcactagaattgattatatcaatagacactagagtaaaactcaataaatacagttttatatttactaagagttcaattctatatatatagtggagtaatcatggaattaataaacaagattatttaattggtaaataaatctaatttattggagcttagaattataggtttatggtccccgtattgccaccttaaaatattgttcagtggtgggataaaaattgtatgtgaaagtttaaaaaaatctattttgaattatca

SEQ ID NO: 403125 - DNA, 949 bp, Cannabis indica
cctcaaagatcagtggatccactgcaataaaaagagctttttatcccagattttgctaaaataaaaactgggatatatgccagtgggataatagatcttatagaaacctggataaaaaacatctttttatctcagtttttatgtaaatcgggataaaaggcctctttttatataaaaaaaactccttttatctcggttcttataatcaaaaaatataataaaaaaatataacaaaaaataatcagacctaaatcttattatcaatccctgttttacaatatttattcatatgtttttcagataaaaaaaaatcattactttacaatttttttcgtatataacatatacaaaattagtacaataaaacccaaaataagcatgactacaataaaaaccacaaacactcaacaaccacgaaccactgtcgagaatcaccacggactgtcgtcgacgccacaaactcagaagcactgtggttaacgaactgccacaaacctccaacctccgtccacctaagaaaagagagaatgatagagatccagaatatacgaagaacaaatttatttttccaaaaaaataaaaataaagaacgtgatggaacaatacttgaatgtttcggaggatgtggagctcaaatatgaactccattagtcgttcatcgcgagaaaaagttacttggctgccggacgaagatataaaagcggagaggaaggagaaggagtggcggaagagagagaacatatgtgagaaaatatatcagacctaaaataaaaccgtaaaggggttaaaaaagggtgaaattttgattttttggtgatcagtcaaataaggcccttgctccaaagtgtgataaaagacctatcaggggcgtgtttggctagtgagtaaaaaagcaatctttaacttttttttactgtaattttttatttttttagtgctaaaccaaaca

SEQ ID NO: 403126 - DNA, 633 bp, Cannabis indica
tatttatgtttagtttaattatgtatttaattatgagctaaattctctatttagggatttgatggatattgactaagattattccatagattgttgctatttgattgttctttctttctctatcatgatgatttattcatatttgtacttattacatgtgtttgattgtccaccttatgcatgatctataatctcaatacaaaatctaaaaagtgagtactgagaatgctctaaatgaatagacataggttttgatgtaaaacgagaatattcacataatttatgtggcttttagattattgcttaatgtaaattgtatgttgttctatcttagagatgcagtagttggcatgcaatttaggacctttatgatttgaaaagagtttagtcattgcataagaggaagaagaatggttaattagtgttaataattgggtaatcaaagcaattgaagtcatctctttaatttcacattcattgttaaacattttatttgtttattttatttaattttgcttaatttatttagttcaaaatttatttattcgattgccaaatagaaacaagaatttaattaattggtacttaattacagtcctcgtgagaatgatctcacttacttgagtattactt

SEQ ID NO: 403127 - DNA, 552 bp, Cannabis indica
attattattattgttacagtgtagttatttaattaattataataaaattaattttatttaggataatattttacctacatttgaatgtatttgtctacatttgctaatatatttatttgcacatactaatgcctttacctacacataatatgagctacagacacttggccctcttatatttatccatgtggtcctatacaattctgccacatggcacttgatatatatgtgttcttataatattttgccacgtgtaccaatcaaaatttgccacgttggcctatcaaaatataccatgtggacctactagaatatgccacgtacgtataccaaaatgtgccacatgtgctagcatggcctatgactaagctgacacgtggattgccacatatgtaacatgtcatcctgtggggcaatccttgtcagctgccacatagaacgagacatcatcatccacatcacttgcttactcatcatcattgactaagaaaggtgggatccaccatattttcatacctacaaatataattaattgtaggtgaagatctttct

SEQ ID NO: 403128 - DNA, 939 bp, Cannabis indica
agacaattataaattaagttgacttatatattacaccaatttttttttatcaaaaccatcttatgatcataaatatatgtatatttgtataataattttaaaaactcattacaatatatccttttacataagtaaaaaactgttggattatattttaccagatctagatttactaacaagtatgtttttaacatcctaaatatgaatctctaaaatgatgaaacttaagcacgtataaagtatgagaaaccttacattgattgcagtgcaactaaatgactttttccgctgagatctctaacccttggtcctttctgtcgcagagtataatcaagatttgagcctgacactccttcagttgtttagattcttcacagtcttacacactatgattcaggactaacttgctatgggtgggcaagaactcaatcactaagctcaaatttttatgtaaagaacactataagattttgaaattagaagagagaaaagaagaagaagaagtctcaagttctctagttgtctgacaagatgtaaactaggtttagagtcattagttggattaagagactattcttttctttttatactaatttacttagggttaggattgaattataaggaataaaaaaaaataaaataatagcataaataggactatagtggccgaccatatgtgagcccaacactagttatatttttgctatttttcttaactatttatctattatttcacaaatatcatattttctaattttaatcctataaatgtcaaaactatttatttaataataataattattcatcacacaaaattgtcatttatattatttattaattagactccacaaaatatcttaattaacaaataaaccctaaaatcctatttcttcacaatcaagccatatcttagtgaaaattcataaataagagatagtc

SEQ ID NO: 403129 - DNA, 780 bp, Cannabis indica
attcatataagcaatcaaaaataaacaaagtgacaaaatcattaaaagtatattcaactttgcttgaaatagattacaaatgttattgtaaggcagaattgataactgctcacaaattaaaagcatggcagataataaactgctcatgcatatagtagactattaactacttaaataatatcaaagggatatacgagcaatggaaatccctagagtacttggtacttgatcaaaatatgattgtttaaattgtgaaagaaaacacaagcaaataagtatatattaaagtacgaggcatttaataaagataaaatgaaaaaaagttggccatccaaccttgcatatttttctttacaaaaagtgtcactagggggaacccattgtcttggccttagggccattctcctaacaaaaaaaatatacttaaaattgagtctacattattacgggggacttggctggacctttttgctctgcttcaatctcttcttcctcgcctgattcttcattctgagtcttctcacaaaaggcaagcatatcttcagccttgtcacccaaaaggtcgaagtccaactcggggttgaatgaccaaatttgataaatagtccttctaccaatattgttgaccctctctttggttttagctgttggaattattttaccaggatcttagatttactaacaagtatgttacttaacacccgaaatatgaagttctaaaatgatatgaaataaacccatataatgtatgagaaatcttacagtggttgtagcggaata

SEQ ID NO: 403130 - DNA, 595 bp, Cannabis indica
atttttctttccgaggtcgacaaaatatgtcttacgtcgatcgcggctatacagaaatgttctgacttgccagggttatgagcctcactcctgttagttggatgaaactataggaagttttctcgtagcgagatggtcatctcgcattcttgttcctcgagtcaatctgacttttacacttagtttgcttattgcaagctaaagtatgtgttacttttctctggtacctcgttattcaccttcagcgatatatggtttctcgttaatacactaagtgtcagttcgtacattgattcctcgcctaagacctcacagtcagcgtattataaatatactctgatacttacacaattaatgagttattccataaaaagatattgcaccgattcacattccctataccatgacacgtatcctccagccgaatttcgagtataacacataataaaatctatgtggagtaagattattatatccacataattaattataattcatgttcattatgtgatcttgatccacttaatatatataattttatataattaagaatgttgtggctactctctaattatttaaaattatgtggttcact

SEQ ID NO: 403131 - DNA, 635 bp, Cannabis indica
attcttatactataaaaattgtatagtttgtaattattgtagtgaaaagtcttaaatttttatttgttaatatataggcaaattaccccatatattatttttttaacttttttttaaaaaatgtacagtttgggtttcttaggtggtttctctggtagtttctatgtgggttgctatatggattttggttgcaatttaggttgttccgttaattgatatatgggtttctatgtggaattccgtaaaaatacaaaaaaaaattattttaaagtgtaaaaataaaaaaaagctcctaatatatattaatggttgtattacataaagtatattaatgaacaacaaaataacacatgcaataataacaataacaataataagatttgaagaattaaataataatttttttaaataaaaaaatacattataaatagatgaaagtttgttcactaaaataatatctgaacgatctcgatttactgtcgatctcatccaaatttaatagtctatgataactttagataattatgaggtgcttcaaacatactataaacgatcgaattgctacccttgtaaatacatggtttatgttattttatttattattgttgactgaggttttcggcaaccaatataat

SEQ ID NO: 403132 - DNA, 691 bp, Cannabis indica
ttaattctttaaaatatttttatgggaataaaatttaagttagatgtattagattaaaaagttaagattttaattttaactaaacatttaaaaaaaaaatagggatttaatctgggccttacacgtgtacattgagtcacaactaacagaatagtagtaacggagagacccaaaatacaacgtttggtattaaatctgccaaaaaaaaaatatagtattaaagtgtataaaattgaaaacatataatatttatgctgcaaatttctcctaaaagaaataacaaggtgagtcataggaattgtacgaagtgggtgtctccataaactcgtcgacgtcggctatagctgtactaaaatatctagatttcgtgtggtgaatcttaagatgagtaggagtaaggggttaactaattagagtagctaggattatatagggattctatacatctagagtttccttatatagttggctagcgttagtggtgttatatattttagagttatttgcggtataacctcctgaagtggccaggtttttgcaactaacccccaattctaaaattttagtggtaaaaccccctaaactcgtgttctgttagcagtttaacattttcattcatttttagttgttaactgccatggtggaatgtctacgtggacatagtgtacacgtggcacaattttattggtcc

SEQ ID NO: 403133 - DNA, 562 bp, Cannabis indica
caactaagaaaaacttcaaacccaaaaaccataacaataccttctctttctgcttgcctccccctgacttagtgggcttcgatgacggtggaggagccttttccttcttcggcgcctgcaaatcaaaaataaaacaaaaaaaatgaaatcataaatttctagagaataacgaaagatattaagattttcctgaagcaaaaaaagacgacaaagaaacttaccattgcgatgtggttgaatctatagctccggcaaagattatatcgctacacgagagtggaaagtagagaacgggactatatatttggttttcatcgttcgctgtttgccattcgttattcgtcgttcatcgttcgtcgttcgccgttcaccgttcaactggggtcaacagagtgttggaatttattttgccaggatcttagatctactactgagggttttcgaaattatgaagaggaaaagagagagggtttagttcggctatagagagagagggaaggctcagttttctgaaaaagttgattttctgattttcagacaaaaagcattaatttgactgagc

SEQ ID NO: 403134 - DNA, 572 bp, Cannabis indica
ccatcttcatgtggcagtggtcgaccatgcactgttgagtggcttccttgtgcgattttgactttatctttaagtttaagtctttttatgcctaaataattcaagtacttgttgatttccttgtcggattgaggtctctagggtgaaaacgctcgcgcgggcccataaaccttagtttgggcaaacctgagtgtgtgagtcccaacaccaaatggctggttaatgttttcatgagtcttctggagatcccatggggctctcaagtcagatgtcttaaattatttggcctttgtaagtcttggtcaaagtcgcaagattgacttgagtgttttcaaggtactcttggcatgtgagcacttgtgcaagagaggcaattttattttatttttttttttgtaaaaattgggtatacctaattcgttgacgtagtactaacatgatgttttcctggtctagttcaaaagtctaggcaaaaaatgtataaaataaacgtctgatgttaaagtatgtgttgactttagatttggccaaccgacagcggaatcgtatttaatgttgatgtttgccacgtg

SEQ ID NO: 403135 - DNA, 514 bp, Cannabis indica
agagaccatgtcaaccatttacatgcaatgattgaaatactgcgacgatataaaatgcggctaaatcctcttaagtgtgtctttggggtcggctcagggaaattccttgggtttatggtgaatcagcgaggagtagaggcaaaccctgcaaagatcaaagcattagtagaaatgcgatccccgactaagccaaaagaaggccaaagtctcataggtaaagttgcccctctaaatcgttttatatcacgatcctctaataaatgcaaagagttttttcagatcttaaaaggcaacaagaagttccaatggaccgagaaatgcgaagattcttttcaagcactaaaaacgcatttggggcagcccccaatcttgtcaaaacccatgtccggagaagttttgtccatttacctggcggtgtcagaatatgcgattagctcagtattaatctgcgaagatcaaggtcggcaatacccggtgtactttgcccatagcattgaggttttaacaaactacc

SEQ ID NO: 403136 - DNA, 512 bp, Cannabis indica
agttctatggtaatatcgcacaattgaaaaaacgacaaccggacgaacaccattcgctatggcgtacaaatatgaagctatgctgcccgtagaactcgagccaccttcccacagaagattgatgtataatcaagataccaatcacatactcctagtcgaatcacttaatgaaattgaagataaacgagccactgcaaacttgaagttgatggcccatcaacaaaaagtagctcgatattttaataaacaagtgaaggcttggaaattcttcgtgggagatatggtcctgagaagggtattcctaaataccaaagacagtacgacaggtgtacttggactaactaggaaggaccatatcaagtggtcaaagttctcgactccgaagcatacaaattaggtaagtatgacgaaaaaatgcaactcgttctagtaccacggtattggaatggggaacatttaagaaaatactaccaataaagtaccagatcagatgaccacattaaatactgaat

SEQ ID NO: 403137 - DNA, 726 bp, Cannabis indica
atttcttcatatatatatatatgatctgtgatcataattggaagagaaatgttaaagggcattagtggtgcctagcattctcctatgtgtcaatatcgctattggtccaactaagtatcggaacctatataatttaatataataattttaaggagtatcgctagaacgcgacatgtcgagaaggtaccaggcatgcttaataacaatgctctaattggaatcataccctttaaaacataaaattaattataatatattataaccaattaaccaactaaaacatatataagtcgctaaggcaaccatatcgttgattttatttatttatttatttattttttagaaggcgtattatttgatttttcaaaatgacaaaaattcatgcaacacacactcactcactcacgtctttactctttaaattttttgacgagaatattttaattaattattaaaatttttaatgagatttaactgaaatttaattgtctgaattattttttttattaattattaaattttttaatgagatttaacaaaaatttaagtgtctgaattatttgtaagttccttttcaaaaatatatatctattctatataaagtgtgcctatataacagaaaaataaaataaaatacgattgagtttttgttgttgtacagctacgattgagtttttattccttttcttattacaatttagacattctcatgggatcacacataat

SEQ ID NO: 403138 - DNA, 876 bp, Cannabis indica
aattgtgaaaatcttatgaatcccccattgactaagacaactttcaatctcagtccctattgtctcccctttatgatcagtgatttgacaaaagttaatgattcttttttgtaacttccaatcactatcaatccaatgtgcagtgagacacatatagtttatattttggatagaagtccatgtgtcagtagtaagagaaacccttaacttttttcaaaacacctctaattacttctttttcatccaagtacagttgataaatgtctctagcaattgtcatacgggatatagtttcaagtctcggttctaactgacgaatcaattgcctaaacccttcactctccacatgcctaaaaggcaactcctccaacaaaatgtattttgcaatagactgcctacacttttgtttatcaaattgcactgcaatcaagttcgcagtaacaccaccctctccctctttcttaggttcgaaacacaaggtcttttgtttgttcaccctattaggattctttggacaccgattcaagtgattccataaagtactagttccgcaatttttagggtgagcagcataatccttcccacaaaaattacatgctgccctaggatcctcaagattaccacccacaattctagtaaaaaactgccaaatatctgacttccccttaggcttcttatttttctcattccccatttcctctttatcattttctacttcctcttccacttcaatattaggcatatcattatcttctataaccacatcttgtatttctatattaatatccataactccacctaaataattaaattaattttagactatgacaaaataaatttcatacacaaaaataatcaaaacaaacaagatcaaaa

SEQ ID NO: 403139 - DNA, 537 bp, Cannabis indica
atattgaggcattgactatagattaacgcattattttgtgaaagtaagacaaagaaagaataaagagacaaaaagtccaatttttttaactattcaatattaataattatatgtatagctataacattataaattgtgtatacatattaaaatatgtatatttcttctcttaaatttaataatatgtaaaaactttttcatttaggaaaacaaaaacaagggctacattacatatataatcatttaataacatattagatatggaacctctctcttctctctatatatgctttaattaaaaactaacaaactaacaaagtttcctaagtattgatcatatatctaggaatcatcatgattaggccttctagtcccttttagttgttgtgtgagtacatgaatagaatctgaaacttcagccttatagacataatacttagaaataaacaaaaagcaaatgaagttaacaaaactcaacattgcaaaaaaagcatagtaatagtcaagatgtgaatcatttaggttgttgagaatcca

SEQ ID NO: 403140 - DNA, 650 bp, Cannabis indica
gacccaacctgacgttggtcccactacacgaacaacgtgttcaaggagaactcagcatgggaatggctagaatctcgaagtgagagatgaagggcccaatcgtggaggtactcagcccatgggttaaggtacttatgaaatggaaaaccaccaccttaggcgtcgcttggaggaggcaaaccggcggaatgctaaattagagtgtgatgcagtcgcagccagggcagcacaggggaataacactcaaaatcaacctgaccctagagtgagaagaccacagggcagacctcgtggctcacgaaccacgagacgggaaactgctcaggaagaacaacctggggagaatgaggttccccctgaaaatccgaatgatcagctagaaccctctcatagaaatgagaatgggaggcaaccagaaactaacgaataggaaattcctcgtggaaatgaggaagactctgggacacaacccggggagcgtaggtcactggcgaggaatcaccaacgttcttctcaaacccatagagaaagggctcgtacaaaccccagtgggggaaatacgacaaaccatgctcaggggggaagaacagggcgtgaagaagcaagtgtgaccttggcgcgctctgttggaatttattttaccaggatct

SEQ ID NO: 403141 - DNA, 415 bp, Cannabis indica
agacaaataatttcatataaaaagatggagaaaatttatatacctacaatgtttaaaccaaaaatgtgttgcacgacaactttactatgatcatctcttagaagtctattttcaatcaaacaaaaaaaactacacgaaataacattcttaataaaaaaaaacaaagactaaaaagaaaaaagatactttcaatgtccaaaccaaaaataccttgcatgacaactttgttatggtcttcagccattaagcaaatctatcattcactccttaagctaagccatcacaactatttggtgaaaccttatatactatttgaagattgagaattatatgttatttaaccctaataaaaaatacaaattaaatgttatttgtgatgggaatacaaaaagaatgatataataataataataat

SEQ ID NO: 403142 - DNA, 628 bp, Cannabis indica
tgggtgggtactcctacatatattttatatacatggtgtattatatccttataacaaattgagagattattttaattctcaatatcaaccatttgagtaacattaattaatgaacttgtacactgctatttttcaaaattacacttcattattcatcatagcaatctctacgtgatgtcaattttccaactactaattaatatatgttgggcatatattatctacacttaatgagctcatatcaaaaaaaaaaaaaaaaaattacagcaatttcagcataatgaacgttacaacgtagacattatcacaaacacattcatttgagatatccacgtaacaattaagcacaagccaaaacaaacataacaaaacaaattattaattgtcagaggatagtgacatagtgtttgttttgttacaaattaagtgttttgagagttcaagaaactacacaaaccaaacgtttctagtttctacttacttttccttaacagtagcttcacattactacaagcaaaaacaccaagttcaatgcgtaaccatagaaatcagagggcttcaagtttgagtaggggtagtctttacctagtaagaaacattataaagaagaaaaaaaaaagtaaaaaaa

SEQ ID NO: 403143 - DNA, 633 bp, Cannabis indica
atcaatgtttagcgctcccactagttatttgacaagatgaaaattaggtcaagagtcattagaatcattagttggataatgagtacctttcttttctttttatactaattcacttatggttaggattgatatatttggaataaaaatgataaaataatggcaaaaataacacctaatggtggaccatgaagtgggcccaacactagttagatttttgccatttttctcaaccatttatctatttttcacaaataccactttttgcaatttcaatcctataaatgccaaacaatttatttaataattaatttaattatcaaataaaattatcatttatattatttattaattagactccataaaatctcttaattaataaattaaccctaaaatcctatttcttcacaatcaagccataacttagtgaaaattcataaactagacatagtctaattttagaattataattgattaactaaaatcaattaattgagtcttacaagtagtttgtcccaactagtatggggaccaggggcctatataaccgagcttccaataagcagatctagaatttaccaagtaaattatcttattaattcttccttgcacggctatagatttggaattgcactc

SEQ ID NO: 403144 - DNA, 548 bp, Cannabis indica
ttaatttttagcaacggtccccaaaaaaaaaatatttttacgaccgtcgcgaattctaacttttgtagtagtgccagtactataaggcacagtttaaaactgtcgcctataagagagtataggccacaatttaaaactattgcctataggataaggcacaattttaaatcgttgcctataccttgctataggtgacagttttaaactgttaagaatttcacattaccagcggttttgaaccattacctattctatccgttttgcgacaatcgtataggaaccggttatagaaaccgatggcaatactttaaatgaatgtttaaaaatgtcaagagaaacaatttttgtagtagttcactgctcccaaagttggctttggtagtttggatgatctcatcatgcatctaaccctttcgataatggtgtgattcattcattcttctacaccattatgttgaggagttccaggtactgccttttcatgtcgaatcccatgtttagagcaatagtttctaaactcatgagaagtatattcacctccattttct

SEQ ID NO: 403145 - DNA, 541 bp, Cannabis indica
aaaaaaagagtaaattaaaacaaaagaacgaaaaccaaacgttcactgtaaagcaaccaattgttgactgtaactcacgaaaacaataaactaaagccaattgttcaacaaaagaacaaacgaactaaagccaactaataactcatagaaacagaaaactaaaaccaaccaatcgttgactataactcacggaaacaggttgaaccaatcttctactgtctttgatcaacgacacggaagaacacggaaccgccgtcgttgacatttgcgagagggaaggaactcgccgccgtcgtctgcgattgggaggtcgtgcactgccggcgtttgcaaatggggaagagcttacaccgccgtcgtctgcgaatggggaggtgtcgtcattgtcagatcgtctaagcggctgggctgaagcgaaggaagaaaccttagaacgtgactctctccagcacgtgttatgattgtgcgtaattattgttgaaaaaagatgtaaatataattaaaactataaaatacacatattttagtaattaactcatca

SEQ ID NO: 403146 - DNA, 1004 bp, Cannabis indica
ctaacatgcccctttttactaacaaatgcaatcttagcaacaaaggcaatttagtcaattcccaaaccccatcaaaacccggtattttaaaacctaacaacgataccccgctaataatattttaaaataaataaaatgctactctctaaaggcccaacgtcgcttttcacagcttccgtgcacaatcacagaatttaagaaatttacataaatagcgtaataaacatatattagattaaataaattttcaccatatgcatattataaataatattcaaatcttatgaataaatcctaattattgattaatccaaaatgttaatcataagcggtctttacataattatatatagaagagacaagaataaacccgtttttgtcttactctatttctttcccatattttttgaaaacatgtattcgtaggtaacaatgtcaaatctatgatctataaaattatttgatagtaattacataagtttaaacatttaattttgattgctaatttattataatttttttaaaaaatttttaattgattaaggtatgataagactcttaaataaaattgtaaattgatcatgatataggttacgtattattaagtttgagtgctaattcatttttcaggtgttacatattgtttttaatggactaataaaaatctatggttacaaaaacatatatatgatacggacatatataggatgatgtgaatttattttaacactgatgagacaataattttttcttatattctatattattgaataatgctttaatagatgtattgaaaatgattttttctagagttttttttttaataggtgtcattgtttcattttatattcatatttaattttattttcttatttatttttttttataattatttgtcaaaaatacttatatctacaaaaaaaaaaataaataaataaaaaaataggtggacatgatttgagatgagagatatgtacaaaaaaaaaaattgcattgtactttaa

SEQ ID NO: 403147 - DNA, 589 bp, Cannabis indica
ctttaatgttcatgggaatcattctatcaatgttctcattaccatttatgcataatgcatgactcctctctattaactggaaaaagaaaatggatatgagataagtgtagtgatcgatccggtttcctatctacaagcttaattgtacattataattagaggtgacatataatctaatctcttctaattcaattatgaaaaattagatatctaattacaatttaattggattgaattataattgtacttattaaatcgattattgaatgtcaatctacaaatttaattaaaaagcgatcaaacaattacatttatatacataaaaaatttaattatattgatttatataataaaatattaaaaataataaaacaatatattaattatatttttagtggttttttttcttgttgagttcgtaacatttggttattttatgtacattttcatgatttttttccctattttattacttgacattttagttatttcaaacttttaagtgcattacacttgtaaggatgatatttttatggagtattaaataaaaataaagagtgatatttaatttttacgtatttttcttcat

SEQ ID NO: 403148 - DNA, 547 bp, Cannabis indica
cgtttagatcaaaatgtttcatctaagaacataaaaaaatcgcacagtgctcaggatcgcaaccctcccagcttagacaatcagatatgtaaaattgtcactctctaaactcattattgttcaactttagatttgcctttacctacaaacagaaatatatttatgagtcgataaacttagtaagaaaagcattaacataaataaaacatacatacttaaattataaatgagttaccatacaccttgttactattagtctactaccccatctaacatgtaatgtgagatctgaactttcaagcatagtatgattaaccataataccagtctattatcagtactctaattgtactagtgttggtagtattaatctatactattcaacattgcctaatatattagatttcagtaccatagtgttgttgggttttatgccctaaataaaactcatttcaatataatcatatttacttattaatatagatcaaaaaaaacatttaatgttgcatggttcacatgatttatttcatgattatttacataatgt

SEQ ID NO: 403149 - DNA, 550 bp, Cannabis indica
ctctagccagctgcaagccccccctgatgattttcacctccactgcccaactggaatcgctccctgtggcccacattgctgacattccctcatctctggcctttgctattggcagcaatgatgtcccaccccgccgcccaccccagaagaagaaccaatccactccctcaagtggcttcaaaacgcaattggccacgttggggaatgaacagcgggaaatgctgaagcgacacagacctcattcaggccaggatgtagtggaagttgtttcaagtgaagaggcaggtcttgtggattcacaggcctgccaggagtaatgagtctcatcagctggaatgctcgtgggcttgggagtgatcgagcattccgaaatctctccctccttgttagaatgtataagccctccttactttttgttattgaaactaaactgtgtaagaactctgttgatcgctttaaggttaagttaggctttgattttggttttgaagtcccccgtgttggtcttagtgggggactctttcttttttggaactcggatttggatgta

SEQ ID NO: 403150 - DNA, 793 bp, Cannabis indica
ccaatagtataaggttagaattattggaagagaccatgcattctcttgaaatcaataggattaatggaggcagccacaaccttgatgagaacctgatcttctctgggttgaggatttgtttcctcttctattatgccaatgcacattaaggagaagaaaactgataatttttttttaagatattaccacactaaatagctatcgcctgaatatgaagagttgaaactaaattcacgcatacaaaaagtcaaataaagctcaaagacaggataattgcacggaatagaatcaactgatgaaatgtgtgaaaatagttgatagttactgatatatttattttagtgttgtgtgaatgaaaaaacatatggataatttgtgaaggtaccatcaaatcttcgtgtcttttactaagttcggcttcaaagtcataacaatgaagaaggtgttagaccacagtcatgtccagatggtgtgaatcagtggaagagaagtccagaaaagacaaagctcgccaaataacaaaatagtgaaacaacaaacaaagcaataaacctgcatttgaaagaaaaaatattactaaagccacaaacaaacaaacgcaagtaataaataaataaactatatacaattgttcagaaacgcaagtacggcggcgggccggcggcgagggtccatttgccccaacggaaagagaaattatatggacactctcggaaatcgcttggtccatggctgctaagatatccgaatcgaaacatcccaatttttcgaaacatgtgggcagtgcaaattt

SEQ ID NO: 403151 - DNA, 515 bp, Cannabis indica
ataggatagggtctttgcaaaaagacaattagaatggtgtgactccctatctcaggagtcaagagcaatgttgttgcttctctagcttaaaaataacgacattattattaggcatcagtaatgtttagtatcatcataagatagtgctttgtgaatgattaacgatattttataaaaagttattaaaattaaattatctgagactcgatatttaattgctaagacgatatgacacgtttagtggtgctagaccctcaattttataagttatcgactaatttaataatttcacacaaattattaaactaagaaatttatatatgaaaaatacaaattgacaatttatttacaaaaatatctccatgaagtgtgggtaacaattttgtcttcaatgagtttttatttaccaaaatgtcacttatacatatccattcatatatatcagcccaaaccaccttccaacccattacgcacgaaactacctcccagccataacttcactatcttcttcttcc

SEQ ID NO: 403152 - DNA, 673 bp, Cannabis indica
aagagaattagtattaatgcgctatattctcccacatttcttacgtggggacaattaatacttttgattacttctctcacctgtcaccactactaagtctttctttaattttgtttcctagctttaaggctatttctttacatatactaccaaaaccttgtcataaagttaaaataatgtatattttaaggtacaatatttattgggttctcacttctttaatttgattggatttttttaatttagtaatagcttcagcattattgttattattaggtataagtggtgctttatgcaaattgtttaacagttaatttataacaattattagattaagatatagaatactagtcttcaagatcattactcagccaaatgacattgtatattattaggttctatgtagtgttagaattgtaagatttaggttgatgtagttttattttaaaattaattgataattaaaggggtagtatatattttatatataatattattatttccataaattagtgttaactctataatataagttatttctcatcattaatttttgagattattttacaaatataaaaaaaataacaaaaaaattagttggaactgtcgtttgttatttagaaagtcttcagagttagacattaaaagtaacactttcaactttccttctgct

SEQ ID NO: 403153 - DNA, 534 bp, Cannabis indica
tttgtgtgtttgtttgaattttatgtttatgcttatagttttaaagcttatgtttatgaattttaattttaacattgaaggggtttttgattttacaatttatctaaatgactattaattatggaatgaatttaattctatgttgttttaatttagtgtttgtaaatattagttttaaatatattaaaactattatattaattttgaatatattaaaattattagttttagcaattttttaataaacgggtctccgttaaggtgtcaattactaacgggtaattcccgccccattccccaccagggagtatgtagggacggggaaaaaaatagggggcagggaatgcactccccgcaccgtcccgtccccatttgcatccctaatcttaggtttgtctctatggtaggcatatttttatagtcataaatatttaatctaagggtaataaattgatgagtgtataaagatagttaatacttagaatgtattagattattcctaaaattatttttttaataatattcttaaattaa

SEQ ID NO: 403154 - DNA, 429 bp, Cannabis indica
actatctttcagtattttgtaccctgaagacatggagtaacataatttaaggcccgtgagctaaaattacacgaacttgcaaccaggaagacaacctgggcacctagggtttcacccagcgcccaagttgatattcccaactagggtatcagttttcgagatcgtcttagtacaaatgggtcaaaatttgcataccacagacatattcgaggcattagaatcagattcgaagtaagtttatttttgagcacccaagcaccccaacgcccaggttgacaattcgtctatttgggcgccttaagatccatgagctactcctctcataaccaattggtttgagatggaacctcatgcactgtaactacacaatcctaaattctaacaataatactttaaagaatgtaacacttaaatactcaattttatttt

SEQ ID NO: 403155 - DNA, 648 bp, Cannabis indica
ggacatttaccacaaaccatcttaacatttatatttattacacatatacactttaataaaaaaaaagtaatatagtatatataatttttacatcacccattaaaaatggtctaatgatattattaaatcctagctagatctgagtgtccaagtgtttagggaaggaggttggattggatgagtgagagggccaacaatggcaaacatatacgattacgagactttacaacttaattttttttgaggattgactttctttttttttttttgttttcttttttttttttttttatggtgtgttagaggttgattatttgttggcctgtgatcgatttcattaaaggccattaaataattcaaataaaaatactatatttgtaatcataattctaaatattatactataacgagttgtctaacttttaaagtttttcttaaagtgagttttatatatatttttttaaacaaaaataatcatagattaatcaaattatatatgatgatattttgaatcaaatcacatatattttatattcataaatattaaataaaaatatataaaagaaattacggtccacctagaagaattttctaatttattttttttatgatcgcgaacgttgtaatattttaggaccacctataaat

SEQ ID NO: 403156 - DNA, 551 bp, Cannabis indica
aaaaaaaaagattttttattgtataatggtttaaatatacataataataatctcaaataataactaataatattttttaaaattacttattgcatcatttttaaataaagtaaaaaatacttagcataaaacggagtatacgtgtcttgcacgtaactttctactagtatataagaggtttcaatggttacattaaatatgtaaccattatggttacattttttttagtcattagattattattgaatggttgtgattaatttgttggaaattaaataaaaataaataataattaacttataacctaatagtcacctaataatgggtaaactgcggcataaatacttaatgtttcaaattttacacacttaaatacttaatatttatttttagaggcaaaaatatctaatgttataattctcttaggtgacgtttggttggaggtaatgaaatggaatagaatggaaaggaaacaatttttattccattcttttgtttagttgcattttaaagtattggaatagcattccaatggaatgctctttccacca

SEQ ID NO: 403157 - DNA, 644 bp, Cannabis indica
aaattaggatgtctgcaatctaaagttttttcatgcagcagaatcgacaggatgacgcataacaccatttactttcacgcgcccactacaatgaccataccacctctttggctgtatgtcttgaactatataatctttttaatcgaggagtcaacgaaaagtaatgcatcaccttatgcgctactttttttccccttgtgttcatattaatccatctattggtcccacacaccgggtagaaatctttcaatgcatgctaatagtaaaataagcaacaattattcttgcacacatgaattgattcgtaccctgggcgtaatttatctagtttcttctttgtctcatagtgtgttgtaggaattttcttatcctttggaaatgcaaattttagaaatttcaacaattaatcaaaaatataatttggtattttctccaaaattttcaagtgcattaactttgctataaagttgagggaggatatccaatctcaactagggtacaactctgtctcgatctcctcaaacatctcatcataaaattgacccttcttaatcccatcatcggtggctctttcttcatcgtttataggacggaagaaaatcttcaattacatcaaccatctcatcgacatcaacattgttgtt

SEQ ID NO: 403158 - DNA, 701 bp, Cannabis indica
acaagaatacataattaatcataatttttgtttaaatgataaaaaaactaaacaattgaaaatatatttattctcctataaataacaaattgctaatttagtagaataatagacaatttaattagaatcgcacaaatgttattaaattacagtgttaagactaattattaggtagaagtaagcattacttaaaaaatgacacttgtctttaaaatataaaaagagtgcaaaagagagtgtaaaatagagtgtgattagcactcctcttattttataactcgtgtaatttttggctttggtgcacaaagtagttggattacatctttatttattagactttatatatatatatgcatcatttcttaattaaataactaactactaagtttattatatatatcattcctattactaattagtatgaaatattcaagaaaatgtaaaaaaaattgaaactctactaaatacatgaaaatttcaggattttctgtttggttgtgttttcagttttttgaattgtatttttaaaaataaaaatagaaaacacttttttgtcattttaaaaatttaatggtgtttggcacaaattttttaaaactatttttagattttttcttactaaaaaaaatcactattttatcaccataccattgttggattttatgccctaaataaaactctttacaatctgattagtaatc

SEQ ID NO: 403159 - DNA, 783 bp, Cannabis indica
gtgtgtgtgtgtattgtgttccgtgcatgtgttgagtggtgggggcccacatgcgagcccatgtgggggcattgcatgcgatccatggtgtgtgttgtgtgagtgtgttttggggttataagtgacaggtgagaggggaatacatatcgacaaggaggacattagaggaggaatcaaaggacaagatgtgcaagggaaaagtgtacaaccatgccttctaaagactctaaaaacaaagaggtacgagaagcagcgacaacggacatgcagagtctgaggacccaaataacggtacattgcaactactctcatgtaacctctaactggggaccgacatgcctgcaacctgggaccgacctgacactagacaaggttacgaggtgcaaggccacctcctgcgcttgtggcatgcagcatgaaagcggcgctttgtcctctgtgaccacaatatacctcaggcctttaaagcctataaataaccccttctcagatgtgagagggggttgggaaaatcatacttgtaaaaccatattgaatgcaataaaattttactcaattactctctccatttcaagatagcaatttgagtttacattttatctttttctttcatctcatttttgaacttgaagcgtaaagttgattttttgtcccacaagttagctgacgagttctcactgtaacacctggtatggtgggagttaacttcaggggatgctagacattgggtttacctatcccattgtatctttttggggagctccagttttaattttcaagaag

SEQ ID NO: 403160 - DNA, 889 bp, Cannabis indica
aaacttcccaaagttcctatatcaactgtcgacccagcaacagtacaatgctttgttgatgcctctaaagcctctgtctatcaacggtggtttggcagtcgtgagctttggttcgaacaagtggtcatattagatgattttcctgaactgcatgagtttttaaaacttaggaaatgggtcaacacggtcactaacttgtctgctccccatcccatattagttcgagaattctatgccaatctggatagaactgttattgctgagggtcatccagggtgtgtgagtgcctttgttaggggtcatagagttccttttggtccttccactattgcttccttattgcaagttgagtccatcaggaatccaacatatgggaaacacttcaatccagatcaatctttgatgggtcgagtgctaactggcagggatgactatatttgggacaaacaggaaattctggtcactcacttgactccattctatagggttcttcatcgagtagccttgtacaattggtttcctaattctcatttgtctgctgttacccttgagattggcaagttcttgtatgctgtaggcactaatgtgtccattgatctgccctcgctcatttttgaacgggtactggaagcctctgaatccactggcactcgtaacaagctaccatttccaagtttagttcaacgagttcttatggatgctcaccctccactcacaacgcatgattatcaagttcagaatccggttctcagtaagagctttctctcggtggtcaacaggaagccttcttcaaccactccctcaggaaccacagtgagtaaaggcaagtctcctatgttcaaagggctctcggattccagctggcaggtacaaatgtttactgagtttc

SEQ ID NO: 403161 - DNA, 641 bp, Cannabis indica
gaggatgagagcattcctcacataatattttttgctgacaaggaaaattcaactttttcaagagttaacctatgattaccatatgttattctttcattggattacaatatacaatatggttaatataagatagtaattttattattatattattctccttagtgtttctttattttttgaaccatacaatatggttcataaataagatggataatcacttttataattttaaaaaaattaggcattaatgataaatcaccttttatatttgttttttttttctcatatatatgaatttggatttttcacttatatactttattattaaaaataaataaaaaaaataacaaattagagaaattatatctttaatgaaataattacaaattagaatattaaatttttgtaatatttatatttaaatttaaattcaactcaaattattgttattttaattatataacagataatttaacaaaataaattatataacaaataaaaaaatttataaaataattctatatatctatatatattaggcagaagttacgtgcaatgcacgtatacttagttttatatttaatttttattttaattgttgtatttaaatttttgaattaaaaaaatatcaaatataattt

SEQ ID NO: 403162 - DNA, 503 bp, Cannabis indica
aaggatctatttgtttcccaaaaacactcatatctttatttttggcaatagttaagaatatgctcgatagagttcatctaaagtagtaatggacgtggcccagtgccatggtcaacctaggcgatgggtccccgttctagcctcccaattgatttgtttatcccttgaaaacacccttttccttattttggatgaagacaaggaaagttcttgggacagttctctagtattgtggttgaaatcatttggaatattttacagggatctagatttactaacaggtatgtttaattaacatcctaaatatgaattctctaaacaatgaaataaacacataagggtttaagaatatcttacattgattgcatcggaatataatgactccttccgttcaagatctctagcccttgattcctttcattagcaaagcattatcaagatctgaacctggatctctttctctctttcggctttggttaccaccgtcttactcactatgattg

SEQ ID NO: 403163 - DNA, 504 bp, Cannabis indica
tttttttttattaaaactgaaaataacaaattaggtaagtcattaattaatcatcctgtgaaagtaaattaaaactaatatagattaatgtaagaaaaataaaattctatttatagattacatgagcaatatctaaaagtatttttagacaatgtaagagctttaactaaattaataaataatagtattacttttttttagtaaaaacttgaagcttcaaaaaaattataaaaatacttttaaaaaaatattatatgccacaacatcattcttaaattctcatttatatagggaattttacaaaaatactgcttttggaccaaaaccttacatttatactgggacacggcaaaaacaacatttatactgccccagcccaatttcattacttttgtactgcccaagcccaacatcatttcatttctactgtgaacagtaaaacacacgggaaacaaccttgttcgtgtgtgaggagacgccggagacggaaatcaccaagaaaaa

SEQ ID NO: 403164 - DNA, 542 bp, Cannabis indica
tcattttgcccaaattgaaaagagaaaaagaagaaaaagctgtcctcactaggcaatctttacctctctcttcctctttcgccatggttctttactagtaatttctagagtaactctctccttcctccacatttttctctttgtttaattttagtttgaataaaatatcaattttcggtgctatctcctttaaggtgctcttttttgggaaatttacaagctatactagtttttgttatttttttagcagtattttttactttttttactttgtatttttataagttttatactgtgtttattttttaatttttaagtttttttttttgttttagtgttgttttacggttattttccataatttttttttaacgtcgatttcactgttcttgtttcatcttactagaattaatgattattttctcgtggtgttgtggtggttctatgcatgggtgtggagatggaggctataaaatacattttttcttctttctttatggttattttgtggttatttttttattttggttctcctaaaaata

SEQ ID NO: 403165 - DNA, 1088 bp, Cannabis indica
tttaactgcaaaactacataaaatacttgatgtcattattattattataatacttatcaattttcttatatatatctatgtttaatttattacgaaaaaggctcattattcgttaacaaaaatctgcattaactctttggtgctttcattgagagtctacgtgataaaactcggaaaaaatccctcctaacgaacaagaaatttgtccatggctaatgataatcaaaatgataatagtcatcttgaagagacatcgtcatcctgggaaagtaccaatgggttcacagaggccacccacttcagcaacaacacgttcaagaagaagccaaggtagtcatgatcaaaacctagaatgagggaatgaggaaaccaatactaatattggttatgtacccagaactgaggatgcgtatgatcccactacgtatgtaccattagtagaattagaaaatcgacaactccgacaacgcttggccgagtctaaccaacgaaatgctgagttggaaagagaggcagccgcaaccagggtgactcaaaggaaacaacgcacagaaccaacctgatcctggagtgagaaggccacgaggtagtcctcgaggttcaagaaccaggagacaggaaacaaatcaagaaaatccctagaacacccaggagaaacaacctgaggaaactagggatgttccaacagacgaacgatagaataatcaagcacctcgtcgagaagtacctcaaagaccccagggatttacaaatcaggggaatgaaaacaatgacgtgctagagtcttctcgtagatcatctatagatgatctttgactattaggattgtaacaatggataatcataacgtatctttatcgttgtacatatagagcgttctatataattgagagtgctattcaattctaaatctatagtggcgcaaggcgaaattaataagttagagaatttacttggtgaattataaatctacttattgaaagctcggttatatagacccatggtcccctcactagctgagataatactgcttgcagactcagtctattggttttaattaatcaattataattctaaatttagactat

SEQ ID NO: 403166 - DNA, 553 bp, Cannabis indica
agttctcgagagagagagagagagaaaaaagaagatcaatatgtgtatccttttgtttttttttggttttatcttgaatttcctaaccttaatttaaaattaataaacttaaatataattctaattcagccaacaaaagctaaaattcatataagacaaaactaggataatacttggtaaaatgactattttacccctcccactaaactttaactaaacacaacctaggggtattttggttattttaattttcccgaacagactcacaatccaactttctcaactagtccagtgtaattccaacataatacaactctaatcgctgtgacatttctgaccattttgtcgagtttccacgaccgctgaacccgaaaatatcttatttcaaaaatggtatccacgatacccccatagtctgataaaacctctgtaattaataaattacgctttatttgttcacttactagtatttcactaattaactcgtaattagcttaagtaggattataatcctactctaatgcccacttaattatatatttaataaaatatg

SEQ ID NO: 403167 - DNA, 784 bp, Cannabis indica
tgtgtgtgtgtgtgtgttttgatggatctggaaaatctccctaattttgagtctttttaattcgtttggaaaccatctgtttcatgatacaaaggaaagaccacaccgtactcttttccctttgtggtgtcaaatctgtggtgtgtgatgtgtgagaaggagagggaatcgaagaattatctttgaagcagaaagcgaaacagtgggttttccctggtcgataagagactttaatgattgaggaaactattggtttcggcaaatataaaatggtagctgttctgtggaattgtgtgggttatttggcttgatcgaaatacttcaaaagggaataactggatctggtcacggtgaatttaaatatattttctagggctctctcaactcacaaggctttgagggaaaggaaattaatttctcttggataggaaattaccttttttgatagaatttttgctttgcccttttggtggtttttattatgttttttgttggactgatattttattcctcctttctgtcttccctttctcaaccgaattaataaatgtgttttagtttcctaaaatgaaagtattttggttttgccatgttaggctgtattgcagttttgttcctataaaagtatactttgggtttgctattttaaagtatattgcatgtggacgctttctcttttgtaagggcaagtggacgctttctcttttgtaagggcaagtgaacgctttcttttttgtaatggcaagtggattctcttttgtaagggctaatggatgcttttgaa

SEQ ID NO: 403168 - DNA, 969 bp, Cannabis indica
attttttttttttgaagcagttaattttaacaaaacagtttataattatgagtttatagtagtaaaataaattatgcaagtttattgatagaaaaacaagttaaataatcaagagcgtaattcccaaatcgtttgacaaaaaaattaaaaaaaatgcagcattacagttttatctattgtttagaaaacataacaatagaaattgtagtagcagatttaacctcactattagtaatttaagatgcattttgaaaaattcagaataatttacaatataaaaagcagtattcaaataaaatagtcatgcttgcaatacacagtttaaatcatgttttcgatcggttaaattttttaaaatttcttaaaattttacaaaaaatattattaaataattattttagataccaaaacgcatagagtgtatcggtgcatccattttaagatatgcattgtaaaatatttttcatatttgtaattaaaagatttggtatgactcataatgtgtcttggggttttcaggagttggaatactctcagttccatatgcattagcaacagcagcattctactcaggcttgttaattaaaagatgtatggattttgattagggctgaacatcgggcgggtttaccgggtttcgggttggcgggtttcgggttcacgggttttgggttcaaaaaattaaaaccgaacccggacccgtatagggcacgggttcgcgggttcgcgggttggcgggtcacgggttggcgggttttggttggtcgggtttagcgggtttgcgggttgacccggtcaactcagtcaactcggtcaactctttaaaaaaattaattttttattcaataatttttttttatatttattaaattaaacatatataatataacaatttgttcatagtatctactattgaagaaaaaaggcattaatcaatccaaccaacaaacaaacaacctatttatcaaa

SEQ ID NO: 403169 - DNA, 712 bp, Cannabis indica
cccgaacttaaacttttacaagcttaattaaaatatatttataatctggtcgctcagcgactacacaatacaaccccagatgtcccgagaccgaacactccaagtcacatcgtctggacatgtacaatcttcatccaagcccagagctcattcctgtttagccttcgttgttcctttacctacacatgaaagtagcatatgtgagtcaacagactcagtaagtaaaacatacaccaaaccatataatcacgacttgtgtctaggcgcccatacacctatccacaaggcttaccagatgacttaagaacgttcttaacaattggtgctactaaccatgttatcatccattatcaacactatcattgcactgcgggaccgacactatgttcgtgccgctatgacaacatcaatagcacccaaaagtataattggacatgattgtactcttaaccagtacgatgcttgtactgctgaactgacacaatggttgtgttgctatgatagcgccatttaattatttctaaggtgaatatcattcttaaccagtacgatgcccgtattgctgaaccgacacaatggttgtgtctatatcataaacacaacatgcacatgtatcacacatacatacattcgcatatatacaatatgttttatgctattcttacctcatttctgaattcaagtgagttggccgacatgaatgaaaaacttc

SEQ ID NO: 403170 - DNA, 548 bp, Cannabis indica
aaaagaatatattatatttaattaaattcaattcaaatataatattgttgggctttgtgccctaaataaaactctatttcaatgcaatcttttctattcaattatcaataaagaaacaaaattatttttattacttatttagtatgtcatttggttcatgtgatcatttatatgtttatttgatttataaattcacccaaatccttatcacattgatattcttgtttattgtgttgtcatcacagtagaaagtaatcaagattatgtgattaaatgtattcctagatttatcagtacatagggtttaactgatatgataatctacaacatagtttacttgcaccttagataagtgctacgtcctttccaggacattggttaaagtaaagcttaagttggatgcatggagtatgcatcggaagggaccgatattgaacttggattagatatcataaatttaccgtaatatatattcaattcaatatcacctagttgatcctagattaaatgatcttaatcctgacatcgttaggttcgatctcaagagt

SEQ ID NO: 403171 - DNA, 628 bp, Cannabis indica
atttactaattaattggcatgtttgaaaagtaacttttgaagacgctttagatgaaacgcgccgacgaaagttatatctttaaaaaaaaatatatacgtttagtcatgaaaccaacatatatgatatgatgaatttattaacttaaacgtacttattttgttctaaaacacaaatcaagagaaaatttatttacacaaaatgtgccactaattttttcaggggaactactataatttataaaatttaattattaagtcatttttatacttattataacctactacgtacattgttagaaaaagtaacttttaaagacgctttacatcgaaacgcgccgccaaaagttatatttctaaaaaaatctatgtttaattataaattcatcatataattaatataatgaatttataattaagtattgtatttttaataattttttctatatatatttgagtgggttgatcaaaatattttgatttttttgttctattctaagacacattgagagaaaatttacctttaatggcaagaaatgagttttatttgcactcaaaaaaatttataaatacatcctattttaataatttttattttgtataatatatatttttaattatattagttttt

SEQ ID NO: 403172 - DNA, 647 bp, Cannabis indica
attcaaataacttatttcacacatgtgtgaaacagaccgtttgaaccttgtttgcagcgcgttaaatttttctaaatttttcaaaaatttatagaatatcttacataactatattgtacactatcgtattggataaatatcatgtttggtgtaattataaaaaaaattacattgtacgctatcatataaaaagaaataaaattaaaactatctaaatatcgaacgtgagggaaaagtgttggaatgtagggacatttgaaaggaaactttatgtgggaatgtagtgggtcccacaaacttttaagggagatgttgaagaatactctctttttttatacattaaccaaatttaccttcaaataaagtttaattcaaatatacttctttttatgagtattgcacttaaattttcctcacacactcacataactaagacataattttaaatataatagatttgtgttctttgtaaatggatgtgtaggtttctgaaaaagttgggagaaaatttgaattagagaagaataaaaactatcatgaagtgataggggtaaaattggtagaatgattgaaaaaagagataaacacaatagattttgaaaaagatggtaaaaattaaaaatatcaagttaaaagaggtatgtagt

SEQ ID NO: 403173 - DNA, 1768 bp, Cannabis indica
ggttgagcggcacggacacaagggcatcagcaaaatagggcattttattgatgagtacttcatagtgaaacgatccgaacatcacccggactcggtttcaacagatttcgacatatcaccgtcctcccctcacccttgctcttagggatagagctcagaaacttgcacggttgccggaggaagacaggaatatcatccagttaacctccgatgataatctggtgaagtatgggctttacccagaggacttttctcctaagtccgtggcggggaagaaggggaagtctgatgctggccggcctgaacgagctcataaggaggatgagctcattcaacttaagcgggaggctaagttgaaaggaggtgccagggccaaacagtacgctcaggagcccttgaatcctgaagatgaagccgaggctgaggctgaggctgagcaggtgaccccattgaagaggaagaagaaactcccggccacgcccaggcctgttgaacatgcaattcgcataagggagcccatttcacctgttcggccatcttatccctttgttggaaaagggaaggctgtcatgtctgagataaacgcgatgtcaggtgatgatggacttctgatcttctgggcgggcagtcactctgcattttacttctttttcagcttcttgactttcatgctttgtatttcctgctggtttttctaaccacgctgtttttgttctgtgcagacatgtctcggcagatgcttgatgctctaaggaagaggatgggcggaagctctagcgcctcccctccggccaagaagcttaagggcggagaggggtcctcggagaagagaccttctggagaggttattgacctttccgaggagctgactgctgcaaatccttctactcccaaatctgccaagtctaaggagtctggaccaccaacgactgggtctgaactggtcaggagggtccctgagcgggtgcaggcaccaactccacctttgcccgtgctgccagaggccaagaagggcaaggagatgctggcccactacatgaaccggctggttcctgaggtcagtgagcaactggctggtgctgatagcgactcatctctggatgtgttggtgggcggagtcttgaaggagctcaccagggttagtcttttttgatacttcccttttaacttttcacacttagctccatatgctgacttttcctttgtgcaggccggtttgaagttggcttacacttactcccgggctaaatctgctacttccaagagtgcggctctgtccgacaccttgagggcggaggcggacttggccaagaaggaagctgaggaggccagggcggaaactggagctgttcggcatgagctgggcgaagccaacaagaagctgtttgctgccgagaagaagatctccgtgctaacaaaggacctcgaggctgctgatcgctttgaggagaccatcgagatcttatctgctgaagttaacagtcttcaggatgagaggagttctctgcggcaagttcttcttcggctaaaggaggagagggacgccaaggtgaccgaggcggaccaattgaaggagaaggtcaatgctttggagactgccggcctcgagctcttctttgatttctggaaggctaatccccaggccaattttgactacttgggcgacgctaaggacatgtaccttgagtactgcgcggcccaagttgcttatggtgggaaagaggcggctgcttcaacttccggccaagcttctgaccaggctgctgat

SEQ ID NO: 403174 - DNA, 803 bp, Cannabis indica
ttttcatttataagagccataaatctgttgaagaaggcacaatagaggcttgaaaggggacgttacagtttacctaacctaggggcccaaaaaatcattttaaaaatacatgtacatttttttgcctcttaaactttttacactactaagttgtgtcacaaaaaaatatgcaacttgcaaataatagtcctcgaaatatacattaatgtggttcttccatcacactttattcaattttttttaaaatgaataatggatggtaattaataaattgatgcaaattatatattttcactatttttacattaatgaataatctattaaaagacttttttgttttttctttttttatgacaattcatatttttatttatagttgtttattcattagtgtaaaaatagtgaaaaatatataatttatatttatttatcaactattattccctacatcactcatttcacgaagacaatgatcttgttgtaatacaatgatcttgtagttagtcgtaagagaaagaccttgtagctggtcgtaatacaacaaccttgtagctggtcgtaatagaaggatcttatatctagttgtaatacaaggaccttgtagcttgtcgtaatacaaggaccttgtagcttgtcgtaatacgagaatcttgcatcttatcgtattacacaatcaataatgcatctcctcgtaatacatgctcagctatgcatctcctcgtattaaacagacaacaatgcatcgtcttatattacacagacaacaatgcatcatttcgtattacacactcagcaatgcatct

SEQ ID NO: 403175 - DNA, 853 bp, Cannabis indica
ggaagcactatgacccctcaactctatatgtgcctcatgtaaattgtatttttagttaaataagatataattaatatatgttaaattgctcataattaaatgtgttataaaacggttgtaaacatgtaaaatattgttataaacatgttaataattaattaaattgataaattaaataaaattaaatatataatgagttggaatgtattttagttattattattattattttttttgcacaaaataaatggattagatttgtgttttacatttatttataataagtctccacagaacaataatttatatgaccaataaacatgaattctccttcctaattatacgacaatgactaggaaacgacaacacttcactaatatactacaaaagtaaaaacgactactttaaaatgaacaagctagcacgaccgtcataatatgtagtactaattatttaaaaccgtacaaattataggcagtactatatgctaatgtaataattgattaaagttgctgtgaagtttaagcaatatttagaggaataagataaaacgtatattttattactaggtagggacccatttatttatgaaatttttacattaaaaatacaaaatattaattttattaccaaaaaaccactacacggttacccaaacatttatacccttttcttttaattttttacatttgtaccacatgcacacacaataaatgctttcttgattgacacgtgagattgatgtaccacatcaatctttctatatatcatttctctcttttttttttctcttcttttttctttttatttttcatttcttttcagttttttttttttaaatattaacctccat

SEQ ID NO: 403176 - DNA, 794 bp, Cannabis indica
ctgtgtacgaacttaaccagactgctattgttaagtgggatccatctaagatgtaatcaaatacggaacattaggagacaatcaagaaagaatctctgaaagtgacctatatgttagatgataagggtgtatattagaatccttatatctacaccaactcataacctattagaaatggtggttactctaggggtggaggaattattctagaggatgtaaaaatccttctaaagtaatttaagctccatcaatgtagctacataactaagttgctttcgaaaagccctggaaagttattcagctgaagaaagttctaactgtgttatctctattccatttggatagaattagagacatgtcttctgtatattcatatgcacataataaacaatatagaattcactatccctagatgagataatgcatatagaaagtgatgttgcataatgttttatgaacacaaaggaagtaatggtggagaaagcagtagcttaccacagacttatagttcctgtaatttgagtttattcaaatacactacacttgatctggatatcaagacaattgattaattgaaatgcactacttgttttatgttagtgcaagtgggagtttgttgggattttatgccctaaataaaacccatttcaatttaatctgatttgttatcgataaaagattagaagtcatttatgtatacatgtagttttcatgtttatggtttaatgtgtacaaaatctattaaaccagaacgtatagttattcacaagcacagtgaagtcaacacagtggaa

SEQ ID NO: 403177 - DNA, 551 bp, Cannabis indica
ttcattaagacatagaatctttcattttttttagtgaaaaaaatcaacttttatttaactattattaaattctctaaaccaaagaaagaagcaaactcaattgagatattctccaaattaaaaaatgcaaatcagtatataaaataaaaaactctaaacaagactatgtgctaccataattgctaatcatgtaacaaaacaaaacgaaacatttctcaaatcatgatccaaaaacttgcaatcacgaataaaaattccaaacaaagaaattatattcacaagactgcttattgtttgtaacacccttagacaattaattttttaaaaacacatgctcttcagctaacccaaggcttctccaactattatatacaatagtgcataatattatatttatagggatattggcgactaaaccacttgaactttacggtttgtaacacttaaccacaaaaaccgaatttttggcggctaaactacctaaaccctggttccgttttgctctacacacctccgtccaaaaatcaccgttaagtgccacggtggactgt

SEQ ID NO: 403178 - DNA, 507 bp, Cannabis indica
catctggccagttcagcaaaaaaggtggtgttggagaaggagcgcgtccaaatcctcaaagatgaggtcgaatggcttagagccaatgacttcataaccgaggcattctacccttagtaggtatcgaacccaggactgatgccaaaacccaacaagaagtggagagtatgcatcgactttacgaagttgaataaagcatgctcgaaagacttctttccattccccagaattgactagcttgtaggtgccatagctggcaatgaaatcttgagttttatggacgcgtatttgggctacaatcaaatatagatgtatccaccagatcagaagcacactagcttcatcacagacctaagcctttactactacgaaggcatgcccttttggccaaaaaatggaggggccacatgtcaaagactagtgaacatgatgctcacagatatcatcgaccgcaacatgaaggtgtatgtggatgaaattcttgtcaagtcataaaaggctgggggg

SEQ ID NO: 403179 - DNA, 504 bp, Cannabis indica
atctactcttttggagtgaattagtgaagcacaattacaagatccaaagttagtgaaatcccgagataaggttttggctgggaagactagtgactttacagtggatgatacgggaatgctacaatttataaatcgtgtttgtgtgcctatggatgatgatattaaaagagaaatcttgaatgagtctcatacgattccttactcagttcatccaggatcaatgaagatgtatcaagatctcaatgccatgttctggtggccaagcattaagaatgatattgctaagtatgttgctaaatgtctaacttgtcagcatgtgaaagctgaacatcagaggcctgctgggttgttgcagccactggatattccggagtggaaatgggaagatattgccatggactttgtggttggattgcctaggaccacgagacagtacgactctgtgtgggtcatagttgacaggtttacaaagtcagcgcacttcttacctgttcggacgaactt

SEQ ID NO: 403180 - DNA, 748 bp, Cannabis indica
ttcaacattcatttgaactttaggggtactgaccattctcaatcttgttctttaagtggaaggctttaaaggatctttctcggaacctaagtcctttgattgatcactcccattaatcaagacattttcaaaaaaaattgcattcattgattccacaattcttgtgctatgtgatggacaataaaacttgtaaccttctgacttttcagtgtaccctataaaggattcacttatagtcctttggtctagtttcttctcatggagtgtatattctaacttcagatggacacccctaaatgcgtacatggtttaaacttggtttccaacctttttataattcaaaaggaatttttgagattgcctttgttagaactcagtttaatatgtacaaggatgtccttagagcttcagccacaaggattaggaagataagagtttccgctaagcatactttgcaccatgtccattaatgttcaatgttttctttctacaataccattttgctcaggtgtaccggtaatgttgtaatgggaaacaataccatttttgtcaagaaactttgcaaatggaacaggtgcttatccttcttctgtgtatctaccataatactctccacctcaatctgatctcactatcttaattttcttgttgtattctttctctaattcagctttaaatatcttaaagacatataatgcatcttttttgttgtgaagtaagtagagatacatgtagcgtgagcaatcat

SEQ ID NO: 403181 - DNA, 612 bp, Cannabis indica
aaattaaataaaaaataataattaattaaaaatataattaaaattctaagacataaaaataaattattttttccacaaagtaaacaaccaattaaacatctaacatagaaaaatcagttatgcaaagcaattttgaattgattagttatttcaacaaaaattagttacttaaaaaatatactgaaatttacacttagtaactaaaaactttttttatttacaaatttagtgcgacatttttttttttttcttttttacgttttttattttttttttcatttatacggtgtcagaagtattgttgactatcatagaccccacttgttgcttttgggaggaagactggctcattagaaaatttctatcaatttttttttttttaacaaataaaactttaaaagtaaatactgctaataattaaataattaaacaaaagtaaaaaatgaaatgacgtgtaggttgtatcactgtcatgtgaaagtgattgagaagattatttttttttaataataaagtgtaagagtaattatgaaaaataaaaagataacatgatttgtcttttattaataaaatgctatattttatttagctttttttaagagtattttattt

SEQ ID NO: 403182 - DNA, 565 bp, Cannabis indica
gagaagaaaggaaagttaagactcagatttatcggtctgtttgggtttctaggaacggggagattaggtggcttatcagctagccctacccctgttctatttggagttcaaaacaacttgttacatgaagaacaaccagtacagattctggataggaaagaaaaggtgttgtggaataagactattctgctagttaaagtgttgtggcagaacaacaaggttgaagaagcgacttgggacttagagtcgaagatgcgggagcagtatctcgagctttataggtaaatttcgaggacaaaattcctataaggaggggagagttgtaatatcctggaaaataaagtgatatttaaatagacatattttattaaatatgtaattattttggtaatggagtaagattatgatcttacttagggtaattagtgagaatttaattaaatgattatattaagcgtaatttattaattacggaggttaaattcggatatgtgagtatcgaggatactatttaaaataaaaatatttttcgggcccgacggctgtggaaatttgagatgtggtc

SEQ ID NO: 403183 - DNA, 546 bp, Cannabis indica
gtgagaggcgtgttagagtaacagtcacctcggctttgtgctgctcgtgggtgggtccacttaaatgacgctctcggctgggcccgtaccttgtaggttcggctccgaaccataagtttaaattttttgaacgttagaagacgacaaagtgtgtattataccattttattttatatgaattggcagcatggctttatcataaggtgtttatcttttatttttttacgctaaatttatcatgggtgttttactacttcttctttacaccatctccaatggtgtaatatttggataaaaaaaaaaaaaaatcaatgttatatttaatttcttttaaaagtacacaaaatttattaagtaaataaataaataataataataaagtagtgattctaattttttttttattattatagtgattccaaactctttctcacaaaaaacaactcttaaatttgaatctctcttccccaaaataaaaataaaaataaataaataataaactacaagttataaattacttaattaatttaattaacaaaagtaata

SEQ ID NO: 403184 - DNA, 543 bp, Cannabis indica
aaaaaaaaacttaaaaaaattattaattaatgtaaaatgataaataaatatatgtaaattttttatataaaaaagccacgtttttattaaaaaaacttaaaaaaatattaattaaaataattgttaataataaaatgataaaaaatataagaaaataaataaatatttataaatctaataaaaaattaataaaaatagagaattaaggagagaagagataaaactatttgaagtgatattaaaatgccacatcaccaccttatatttctcctttatatatatagaagatatatagatagatatttataaacctaataaaaatagagaattaaggagagaagagataaagctatttgaagtgatattaaaatgtcacatcactgtcttatacttctcctttaaagtgatattaaaatgccacatcactgccttatacttctcatttatatatatatctattttatataaagtatgcctatataactgaatttttggtttatgagaaattcatgggtgtgctttttatttatatttaataaaata

SEQ ID NO: 403185 - DNA, 556 bp, Cannabis indica
aacatttagaagaatgaataacaacgatttatctttgtcttttttttaaaaaaaaaatcttttttctttttctttttttctttttataaatatcaatgtttatctttttatctcaattttttttaatataattttgtttttcttttttttctttataaatcttaattttttgcaattttttttttaaatctgaaatctttccttttcttaatctcactttttcattatttttttttttttattaaatctcaattttttaaaacttaattatatttgtttttaatctcattttatgttttttttataaatgccaattttttttaatctctctcttttataaatgttgtttacaccaagtagtcttgatgacgtgaacatcaatatttgacacgtggcaagaaagatgatatctaaaagttgagtagtcccgaatcatagcaagttgacctaagaggggtccctagtcctaaggccaggttgagttcgagaactccaggatggaagttcgtgtaggattttgtgcccaaaataaaatctatttcaatataatcagatt

SEQ ID NO: 403186 - DNA, 746 bp, Cannabis indica
gttcaaagaatattcagatataatcaggccttgcaccagcattcctcctccaaaaagtccttccctgcactagccttacatgctcaagattttcagtgtttactgatgcctcatggtgtaatggtaaggcagggattgcggttattttagtcaaacatgaagataatacctggttctactcttctcaatgtgtgacatcgtcgtcggctcttgatgcggaaacccaagccattctatatggtttatcgtgggcctccaagctgaattggaaagacattgtcctgttctcggattgtcaagtggcaatttcagcttttgcaaaaaatgtttgtatcccggattggcgtactactcatctttcttatgcaattttagatattgttaaaacttttagctcttgtaatttctggtttgttaagcgtgaacttttaactgcagtggatgttttggcaagaagtgctagaatttctagcctagatgccagtttttgtcaaggggagggaaacccccctgtggttcccacttttagttgttagttaatgaacatttgttccttcaaaaaaaaaaaaaaaaactactagtgcttagaaagtagacaatgattaaggctttatacaaaaactaattttaatgaattttgagagaattaaaaaaatagcttacttgacattaaattaagaaaaaaagattaataagatcacatattttgtcgtttatgttatatgtttttattatatatataatta

SEQ ID NO: 403187 - DNA, 856 bp, Cannabis indica
aaagttttttttttctaattagtttttaaatttttttttaagtattttataattagtttttaaaagttatattacgtaggaccgctaaaaattgtcacgtgtacaagtgtgtacacgtggacagtccatcgtggtacgttaactgtgagttttggatagaggggtacagaagcaaaacggaatgggggttcagtaggttttgccgtcaaaaattgaatttatgtagttaagtcttacaaaacgtaaagttcaggtgatttagctgtcaatatctctatataatatattatatattgttattttaatatgttatctatgtaataaaaataaaatgattagattagggcttttttttaatatattatatatgtaaataaaataaaaaaaaaaaaagtgaccgggttggcgagcaggtttgggttcaactcgaaacccggtgaccataaaaaatcaacccgcgaacctgtttgaaagtgtatcaggttgaacccgacctgcccgaacaaaataaatttttttagtttttcaggttgaccgggtcgggtgcaggcgggttggctgggtctaggtcaaacccggtcaatatgttcaaccctaattgaagttgattcaaaattatttagcttgcgctgctcgttttttttttcaggtcgtcgattcagtggggtatttgtcctgcttattttcatgctattttattagtggatttatactttaattaataatacaatgaacatctagtaaaaaaaaccaaaactttatagaggggtgtgcataagttgatccaatccaatgataatcgatcgatttaattacaatgaccgccaaacattgaatattcaattgtgatcggatc

SEQ ID NO: 403188 - DNA, 920 bp, Cannabis indica
actatgcataagagacaaaccatagggagcctactagtggcgaacccgcttgggcttgggagaagaccttgagctggccagacttagggaagctgtaggcagtgcatgcctaattgaagaaccacgcgatactgactgcaatgtatttgctctacagagacgcgaattccttaaagaaccacacactattgattgcgatgtacttgctcagcagagacacgaattcctgagatggatggatgaccaaaagtacatacttcgatctcaccaaacagagttaaatcaccgcaacagagaggccatcgatataataatgcgattcaactagagaaccgatagaagaggtgaggatctcatcaaaaatccacttcaaggaagacttgttgatagatcagggagggtctattgatatgttgatcaaccctgctcctcaagaactaggatagatcttgccttgccagagagaggacagacctttcctcaaaggttaaacgacaaaactaccagatcctggcaactagtggcatggggggctggccagggatctcaggctcaacaatagcccctctgtccatcttgtggccgaccaaccactagtaggagtccatggtcggccacactcctccagcaatccccatggccggccaaagaagagcactccctctctaaggggagcgagttacccaaagatcaattttcaactgacgaggatcgagagcaggtagaaacacccataataacaatttgagaagtgaaatcaatcgcttcagacagttggatccaccaaactccaataatttgtgtgatctattccatgtcaacgcacaagctccaccagctaggcagagaagtgtggacgtccatgcccttcccaacttagggctggttgtattggaaatattttaacaggatctagattt

SEQ ID NO: 403189 - DNA, 796 bp, Cannabis indica
ttttctaacagtgatagtattcccaatagttataacgcgttaggaatacttactaagtatcccaacgcgttataactgttaggaatacttggtgttcactgttttcttataaaaaatttcatttagtattgcctacggttcttcactattggcattagtttttcccaacggtttctttgcttcggttctaaaccgttgggaaaaaatcttcccatacattttccaatggttttcataattgaccccccttattaactgttggaaaaaagccaattttgtagtagtgagtagtaaatttggttaaattaggggtgtttttatttgagaaaattacatgttgacacgtttttttccatttaattctaataataacgttactttttaaatttttgaatataccgttatttataccgttttttcattttaaaccatttttttttggcttgttgggcacgctgagttgatgggggtgacgtaagtgtcagtgggaacagatggaggtcatgtccaactgggcccgtgggcacgttttttcagtttttgaattgattttttaaatttttacccaaaaagtggtttgtaaacctgccaataaaattctacatcataatattttttatttacatcgtaaacaactgaaaatatttttttatcaataaaaaaatacatattaataaaagaatgaatcatttttatgttgtgtgaaaaattagcttcatagttacttctaggtttcactttcggtatcataagcaactaaatagttacttttaattatggcgacgatgagaaaatg

SEQ ID NO: 403190 - DNA, 578 bp, Cannabis indica
aaaaaaaaaaaaatacttaaaagctttctcataattaatgttctgacttctgagagcaaagtgaaaaaaaaaattcatttaaatgatgaaaaggagattttttatttttttaatttttttttttgattaatggccctgggagcagggaacaaagagaacacagacaacaaacgaaaaaaacaaaaaggtcctaacagcaaagaaaagaagctactaactaaacaataaaagagtacctaaattatatcaaaacagagaattaaagacattccatccctgctagcgcagagggcagagtgccactctcagaagacagatcaatccaaccaaatcgattgttctgattcgcccatttagccaccgaatgggccacaccattgcagtttctcggaatccaggagacttcccaaaactcgagctggtccacggagcatctgaaggccgccacctgatcctgaatattatgatgaagagatccaacttcctgcaaattcgacttcagtgcagcagttgcagtggaagagtcattctgaaagatcatctttgaatacccaagcttcagcgcttcttccgctcct

SEQ ID NO: 403191 - DNA, 626 bp, Cannabis indica
ccgaacctaagcctcacattacatgcctatgaaagtcattttgatctaggatgtaaagctaagctacattagtggagaggtttgcgctaattcaacttatggaagctaactttttaaacttgaggataaagggtagttgttatagagattcaaggtgttggtgggaagcatttgtacactttattgattaaattactcttgaaaagtattaaggacatagatagcatgtaaaactcgattgaaacacacaagttcaaggcatattcactaccctcatcacatttccattccattcaactctgagagcaatttcttcgctaaaccaagcttgaatgaacaatatcttctctgttacaaatgtgttattgttgctgtcattgttttttcttttgttcttgttgttttgttctttctatttttcattactcgaggatgagcaatactctaagtttggggtgtgataactctatggtatagagttattttttatgctttaaaactgaaaatattgtgaggagagtagtgaaatgtgtttggttacttaattttaagtagttttagtttaatttctatttaggaagctaacttttgagtcttgtaaaaattattgtgttaagtgtgttttt

SEQ ID NO: 403192 - DNA, 1667 bp, Cannabis indica
caataatttctaatcaacatagtcgttgtagtatagtggtaagtattcccgcctgtcacgcgggtgaccccgggttcgactccccggcaacggcgtacttttctaaaatttcattttgtactttctccttcccctttttataccaggctattttattcttgggccggctaattatgctctgtaaaaaagcccattgcagacccaactgcttgaatgttctccttcccaggtatgaatctgagtcttaaattcatttcaaattatacttgtgtaattatgtatcttttaatatggattttgtttatttattttgaaatgcattaacgattttattttaaaatacagattaaaacaagttttatttacaaaaatatatatagttcacttttgtaaacaacatttacaatattgtaagcaattattacagattggtaaaaaaaaaaattacaaatgtatagtgcttacaataatattttgaaaaataagtatagcatatttgtaattaattaattttattgtagataaagaaaaacaaaaatatcgaaaaccatacagaatgtaatctttttatatttttcttgttctctttatggactctttagaaaaatactcactgcattcaattctttcatgacattccatacgaccatttctccatttctacaaaaccttatgtgttgttgtatccaccttatctaagagaaaaaattcactaagacattgagcttgtttttaaaagtgagaatagaaaacagttttttgtcattttaaaaatttaatggtgtttggcacaaatttttaaaagctgtttttagattttttcttacggaaaaaaaaaatcaatattctagcaccataccatgacattaacccatccgggtctaggttcgagtatggtttcgggtctaggatccgagtatgtgagacaaaatataaaatataatatgttaaaaataaaaaaatttttttaaaaaataaaaaacatttatattttttattttctatttttttaatttttaaaactaatttttaaaaaacagatttaaaattttttgccaaacgactctgatagtttttaaaaaacagtttttaaactataaagccaaacagtctcattgttttttattatttattttttaattttataaaaaaaagcatgtgagttcgaaaaatcttgaaatgtcaatgaaagagtaaatgtatttttttttcaaaataaccaataaattcaaaccaaaatgttttctttaagtcttaaaaactaaaaaaaatttgtaatcacttatggtgtattatgtaattttttaaacattagggttcattcaatttcaaactagtcaactcctcccaaaatttagtcctattgggttaaaatatgagagaggaccattggcccaataattattcaagttaaagttttatcaatactgaactaattacaatcaaacaatttacaaaaagaaaaaaaaaaataacaaccaaggaataccccaataaacccgcttaccgcagctttacatttttaaactctactcgggaaagaacctatgagactaaatcctttcaattaaattatatttaattgtttaaataaataaatatctaatttagtgttgatatttatgagagaatttttcaattacgagagaatatctcaacaacattaa

SEQ ID NO: 403193 - DNA, 749 bp, Cannabis indica
gcctgtcacgcgggtgacccgggttcgatccccggcaacggcgttttttttcgaatattataattcacttattaaatgattttatactaaacaaataattgctaatcagcaatgtcgttgtagtatagtggtaagtattcccgcctgtcacgcgggtgacccgggttcgatccccggcaacggcgacttttctaaaaatttcattttgtactttctccttcacctttttataccaggctattttattcttgggccggctaattatgctctgtacaaagcccattgcagacccaactggttgaatgttctccttcccaggtatgaatcgagtcttaaattcatttcaaattatacttgtgtaattatgtatcttttaatatggattttatttatttattttgaaatgcattaacaattttattttaaaatacagattaaaacaagttttatttacaaaaatatatatagttcacttttgtaaacaacatttacaatattgtaagcaattattacagattggtaaaaaaaaatttacaaatgtatagtgcttacattttgaaaagtaagtatagcatatttataattaattaattttattttaaataaacaaaaactaaaatatcgaaaaccgtacagaatgtaatctttttatatttttgttgttctcataatagactctttagaaaaatactcaccgcattcaattctttcatgacattccataccaccatttctccatttctacaaaa

SEQ ID NO: 403194 - DNA, 641 bp, Cannabis indica
tatattttttattgtataatttttcattaaaaatttgtatatattatataaaataatttatattcacaaaaatataataattttttaataatatatataatataactacttgtgttttgattcttaacatattacaagtacaagtagtagtaaataataactaataagtacagagaatgttaaaatatgatcctattttttgctgttcactcatttacattttgcatgttaagttaaataaacaaatggtagatgaacgtaatatactatgtgttgattaatcatttgcccagatcttttatatatttaagttgatttcatggttcaagctagctaaatcttgtcgtgtgtttccattttaaaatacagatgatgtcctgacagaaaaagaaaggagtcaaagccaagtcacccaacaactttcaagctattatatggactttggatttataagtatttttttagtattgagacattaatatggacttatttagatttttattgtatggactttatggattttagatttttatggactatggatattggatatgcatgtattttgaaaaattttagtttttacttttatcacgattcatgaacatgaatatgaagttcgatttgatgaacatgttgtttgt

SEQ ID NO: 403195 - DNA, 768 bp, Cannabis indica
gcattaatatatctatttcaaggaggtgcatggtagaattttctaaaaatataatatatatatgtaaagaaatatcattttagattttgggtgattctacaatgcacccccttaaaagggatgtactgatgcacccttaacttgtttcggcatccaaaaaaattttttagtctaattttttttcatattcatgtacgttatagctatttaagatatcctacaaaattttgaaaaattcggaataatttacaatatagaaaacaatgttctaacagtctattttacacgcgtataaaataaaatagtcacgcgtgcaacacactgtttgaacataattttcggtgtgttaaacttttccaaatttcttaaaattttgcaggatgtcttaaataactataacgtacatgaccatgaaaaaaaatttaactaaaaaattatttcggatgctaaaatagataggggtgcatcaatatatctattttaaggggtgcattgtagaattttccttagattttttatttaaaaaaaatcttttaaaatgatacttacaataaaaaaaaaaaaaattaatcccgaaaatcccatattgcatgatgggcttgtaaacttttttgttaaagtgagctttctatattgggctctagggagggagcatcgggccgggcccgtaagattagcccaatttgatttccctctcaattcacagttttctttcttcttcttctccattttctggaacttaaacctaattcccctgcaaattcaaac

SEQ ID NO: 403196 - DNA, 698 bp, Cannabis indica
gaggaaaagcgaggaggtgagcctgggcttggtgtggggatgatgagtggactacgggcctgggcttggtgtctaaagcccattaaatagtacagcccaattctgaaccaatttaaatgggttggtatttttctaaaggggttatttcaaaaatacatagtaataataaaaaaatttacaaaaatatggttgtacaaaattttaaatatttttatgatttttatgattttatttacagaaaacactgtctttatatgttgttatctgtatattattttttattgttgttttgatgttattttcctgatactttggtgttaaaatacttttctacatgtaaaaatttgtatttggttatgattcacagacataattaaattttttggctacaattcatgtttatatagttgcattttcgtttacttggtgtttgaacttaagtattgagttggagtcaacaaatctttctttaatgaattgtgaaactctacatcagaaataatcattggtgcccaactaataatctgttgtacttgcaggattatcaaagttttaggattgagagtgatggaaatcttcagggagttgggcttttcatatctgttgaaccaaacactgggcatttggtaggtatatgaatcttctccaaaaatttttgttggattacacgaaatagtgactaacatccaaatttcaga

SEQ ID NO: 403197 - DNA, 612 bp, Cannabis indica
agttactacacttatgtaagtgactaattaaaatgaggtagaagatattaatattaaaattcaattttcaacatggcaatggtagggtttcgtttcagcttctttctctaacgtacataatttcatttaagggttggtaacaaatcatgaagtgttgggagtttgaatattgaaattgtggttcacttacataaagacatatgaggttcaaatgggatacattagtttttatcaagagagttcattgttagaaactctttttaggctagataaatctaaaaaaactatatttattcttttcttttcctaaagtgcttgtaacaagggaaaataaatttttagataaaagtgtaaaacgttgtttaaatttagtgatttctcaaatattatatatatatatatactagaagaaagttacgtgcaagacacgtatatttagtttatgttaggtgttctataatttaattgagaagattcaataaataatcatataattaaatgaatttaaaactaatttaattagtgtgtgggttatttagaaatcaatagtagaaagtacaaatttaaaatttgcagaaagagaagagagaatggagattagcttgaaatata

SEQ ID NO: 403198 - DNA, 859 bp, Cannabis indica
tttattttttttctcaatcttcatctctcttaccattatttattaaacatagtatctaagttttttttatatgatctgttatcattcgaatataaaatctacaagtctccaactattttcaaagaaaataatacttaaaaaaaaacaaactaactacagagttacagtaaaataaaattaaaataattagtttttttttaaatgaagtttacaggcataaaccacatcagaaaagataaatctccagggtatcattggggaatccatccccaaaatcaaaactcttatacaactaaattaatatcatatatattgttctcaaaaaaaaaatcatacatatcattatatgaaacaattatattaatgtttcatgattcatataaaatttttgtaattgtaatcttgaattggtgatttgtttagggttgaataaaatattgaattttagtaggttgggtgtatttattaagaataaattttataagaaacttaattttagaatttccctctgaacttcagactcttatgtattccgaatattaatttaatgaagttgcgatttcatgtaataaaaaaaataaaattagaatcgtctattttagtcattttatgaaaggataaaaatgtatttaatttgttgaggtgtacttataattatttggggtgtaaatataacttcttattttatttgcatccccataaaattataagtacactttattttattttattttagataaatacatatcttttatttgtactagttttttttttttaaaaaataaaattcttcattctcatattcttaaaaaatatacctataaaataaaaaaaaaatattttaaatattaagacaaaa

SEQ ID NO: 403199 - DNA, 852 bp, Cannabis indica
gtttgggcgggaaattattaccatgaaatttcatttggcgcgatttaaaactagtggagctttatagtttgggcgggaggtttataaggtttatgttagaagtgtgttgttgactggagcttaactatggacagagggactgtggaccccactttgtagctttaatttcgtttacaagtgtcaatacgggctctctttgacatgtcatcattacattagaaaaacgctgacatggcgaggacaatgtgtgaatgtgttggttttttttttttttttttaactaatttaggatttttactctttaaatattaacatatattaagttatgttctctgaacttttctgactattaaaaatttctcttgatttattaagattattagatttaaggatttttgtttaatttcattcaattttactatttccttaattgtttatgtattaaagcttgttccccagactttgatattatcaaattatgctccttgaactttaacatatactaaatcatacccagaaaacttttaaggttgttaaaaatgtcctatgaactattaaaattgtagaatttaatagttcaggggtatgatttggtacatgtcaaagttcgggaataaaattcataattagcttttttttttcaaagcattactgggcatttggtatgaggtgttcaaaataatttgattataagaaatattatgaaagaaaatatgattatagagaaatgtgtaaactgtgtttgactgtatagggtaatatgcaatgatattcttattaattgaattacactgtttgattgagtgcaggaatcttatatattattttaaaaataaaaaaaaaatacttttt

SEQ ID NO: 403200 - DNA, 1252 bp, Cannabis indica
atagaaattacttacgtataatgtgaaatgcagttgagttgataggagaaagatagtagtctagaagaaatcatccttgaactcggttttgtttggtaacctcacaatgatcatgcaatcatttgtgtgggtacaaagataataaaaacctcctaaacaccgctacctcgcgggaacagctttgacggaataaaaataaactatctcgaggtgagtgggacactcccagcctaaaatatggtacaagacttttagactcgcaagaatcctataagagcttggaatcaattgaaaagaggcaattccaagataattacagaattctttgtagtacactcttaagaggagaatcgctccaaccttgatgtgctcgaggctccaagcgcctattccagacgagccactagtattggcgccaccacactcctcgcgaattactcgttttggtgaaaagcagttgaattctctaggagcaacagatctgatgcgaatcctcgcccttgcttaatgccacaagtcgttaatacgccaccagcatagtctccaatggcccttatcttggattcaataagctcggcctcaaaagtgacattaggatcctggggggtctttgatttgtgagtcttggtggacataatttcaaaatctaggtcaccgggtgaaaaagcaacagtgactcgaggtaaaaacaaaggtctcgttaaagggatagaagataaagtttgaggttcaggccaagctgcatctcgcaaataacgacatttaccctcagttatctcttgtaaaaattgcctatatcaactggaaatttcaacctgattgatttttattagatgatccctaattttggcatcattaatctcaagttggatttaggtttttggattttgggtttgaatggaagggctaattctttatgacattctatttctaggaaatctggagttgaaatctcaaaaccagattgggacatattaacaaaataataataatcccaattcctggaaggagttgattcgacttaaacaagaaacctaggaatttaataaacctaagttcactctttaaagtcctaaaaattacccaaaaataaaatcgaaaaatacttaaaccaaacacagtaaaataagatgcaatcggaagcaaaaataaaagtaccaacttaggaaaaaaggaataacagagagtaagaaataaaccacttactatatttccgaagatttctgggtactgaattgttgggttttatgcc

SEQ ID NO: 403201 - DNA, 452 bp, Cannabis indica
aggagtgtttagaatgggttaatgctaacaagggaatggtaaagtgaaacattaccttgtttgttttgagtgtttaaccttaaaatgttattcccttagggggcgtttggtataaggtattcaaaataatttgattatagagaatattatgaaggagaatatgattatagggaaatgtgtaaaatgtgtttggctgtgtagggtaatatgtaatcatattcatgttaattaaattacactgtttggttgagtacaagaatcttatatattattttgaaaaaattaaaaataaaaattattttttttattatatctattaaatgttaattacataataaaaataaaaaaaaaattataaagtaatatattattaattagtaaacattaatttattgtatttttattaattaaaatgaacatttctatatattttatcactatgttatttattt

SEQ ID NO: 403202 - DNA, 717 bp, Cannabis indica
ttgactttgttaattttggttctaagttggtgaatgtggttagggctagcttctttaagtcccaaatgacattttaaggtgttttatactgttgttgatgtttaattttgggtttgagcaagtctcaaacttgactcaaaaatggtatgttgtggtttatttagtttttcttgctgttattgtgtgggaattatttaggatttagttttctggtgttcaagagggtatcaatgcgtttggggaagatttggttgagttgggagatttttggggtttgctggtgcaaattggtccaccggttttacatgtttccatgccagaccccgaaatctcgctttggttatccttagtatttgggatgatagtgcattattgtgtcattaggattaccatagatttttagttaaggctttggtttagttgttcaagtagtttacttaattgtattttgtgacttaggacctccgtttagctcaaggattttccattcaagtcgactggcaagcttgaatctggaacaaggtaagatagcataataatgtatatatgaatggattattgtattggatgtttgcactactaacactaatatgtatgtgattttaagggtgttagtatagtgtgggatgtcaatgttgttacggtgttaccaacacgagtaccagggggtacgtcgtgcatgtggtacaactcgtagtaactcccgggagtacaata

SEQ ID NO: 403203 - DNA, 798 bp, Cannabis indica
aatgctcactgatgagggagagctcgaaacttaccaaaaagccattctacatgagcataagaatgagtgggatggatccattcaagaagagatgagatccttgcatgagactaagacacacgacttggtgaagttgcctaaaggaaagaaaactctcaagaacaattgggtttacatgcataagactgaaaataatggctcacaacagtacaaggcacgattggttgtgaaagaattcagtcaaaagaaaggtattgactttgaaaaaatattttctcctgttatggaaatgtcatatattaaagttgttcttggtttagttgctcacttgactttagaagtagagcaacttgatgtgaaaattacatttcttcatggtgacttggaagaagaaatttacatggaacaaccagagggtttcaaagtcaaggaaaaaaagaatcttgtgtgcaagcttagaaaaaacttatatggactcaaacaggcacctagatagtggtacaagaagtttgattccttcatgttgagccatggatataccaaaactacttctgatcattgtgtgtttacaaaaatgtctttgatgatgatttcatcattctcttgtcatatgttgttgatatgttgattgttggccatgattttagaaagattgaaaagctaaaggaagaattgagcaattcttttgctatgaaaaacttaggattgacaaaacagatacttggaatgagaatttctagtgacaagaagaatgagaaactttggttatctcaagaagcttatgttgaaaaagttctt

SEQ ID NO: 403204 - DNA, 552 bp, Cannabis indica
aaaaaaaaaaaaaaaaaagcgtaaacatagtaagaatcaaagagttagacatcatggtcgttacaaaataagctaaccagtatagaaggtggatctaccatacctattaccttactgccaaaagcccatttaactacattatgggcagcaaagttaaaaaattcagaaataaatgaaaaattacaactagtcaaaaaatttgagagcattttacattgaagcacataattactaatactccaaacagtagaggttcctttcaaagtattgatcactgtttcagagtcgctctcaatgattacaaaagaatgcttcctacgaattgctgattccagggctaacagacatgttgcagcttctccaatgagaatgtcagagaagttgagaatattgctagccacccacaaaaattgactccttatgatctctcgccaaggccaccacacacattgggtcgctaccaactttaatgtcacagttgattttgacccaatcgtctggcagagggtgttggaatttattttaccaggatcttggatctactcacaagta

SEQ ID NO: 403205 - DNA, 422 bp, Cannabis indica
atagttgctcaatacattatgcctagttcacatgagcaaaatggcgatgctgacaggagaaatcacactctcatggatatggttagaagcattatgagtagattaaatcaagttttatggggtgaagcacttatgagtgctacttatattttgaatcatgatccaagtaaatctgttcctgaaaccttcctttgagttgtggagtggaagaaaacctactctgaatcatcttcatgtatggggtctccagttgaataagaatttatgattaaaatttgaaaaagttagattcactgttatttcattggttatccaatgtactcaaagggctattgcttttactgccttactcgtggtacgcaaattgttgaatctgagattgctaaatttcgagaatttgttgttgcttaaaatattccttc

SEQ ID NO: 403206 - DNA, 947 bp, Cannabis indica
ttttatagtttatttgtagttgtggtgaggttgacttctagttttttttttttagtaaatttttgttatttttattgagaaaagagtatttttataataaaaattttaggatgtaaaattataaataaaataaaattagaaaaaaagagtatttttaaaaatttctccaatccttaatttgtagatgaagacaaaagctaaataaacattttaaccaaaaaaaaaaacacttgattaaaagaaaagagatttatcaagattagatgtaacttcaaattgaataaataaagataaacttttattaatattcatgtagaggtaaaaaaaaaacacaaaaaaccaacccggtatttaaaatgtcaaatactaatttcaaattagacttttcaaataaaatttatagtttcttttggtgcattctgttaaaattacttacttttttctttattctttcaatagaaaaatatattattttaatttattcaaacaggttctttttaattcttttttttttttttttttagtaaaagaaaacgttcattagaaataaaaattagacctcacattcattacataaaatattcgtaggaatggcagatatagtaaatcgaccaaaccggttgtgggtaaacgctcacttagccacattatgggccataacattacaagttctgaaaatattacaaaacaaacaactagcaaaagaagatctgactctattacaaaaataggagtagttgtcaatttcccatctaggagcctccctggaaatggaattgactactgtcttggaatcactctcgacataataaacttagatctatgttactttatgttagattatgaaaatactataaggacttattagtaatttataaaatatgtgaaaagtctataatatgtaattgtgtagctattgtaaaatatgaaaatgaaaaaataaaaac

SEQ ID NO: 403207 - DNA, 824 bp, Cannabis indica
acttaacaaaaaagtaaaatagaatagaaaattatataaatgccatctaatttattttgtggtttttcttatataatatattgattatcactaataacaaagccaaattatcaagattttatttattttttaatctaaatccaatttgaaaatctaaatattagggtcaaacattcgaagccacattcgaattagtgaagccaccattcaatgtgcagcaactctccacatgattcactccacagcatatatctttgagaaacatttgatcaaaacaaatggtgaaagtgactaagtgtccattaacatctctaatggagtgctaaaaaaagatgtattattatactttagcacatttataaaaaaattactattcaaatcgtgttattaaaagtgtaccaaatttggtacatgttcaaatttatactaaatttggcacaagatataaaattgtgtaaaatttgggaaatttacatcatttactaacttttccaataatcttacaattatactttgacacgcccaatataacatttttactgttttttttttttaatttggcagtatactgccttgattcaaaaatatggacattagttataggtttttatatattatgtggcttataggtgtctttatgaggtttaatctcttcattttttaaaaaatagtggtttaaaaaaggatgatttgacaactttattattacttaaatttgaaattgaagacaactcacccatcacccacgtgattcccattcccaagcttataaatgtattttgttctctctctctatctctttttgtgggttgtatgtttataga

SEQ ID NO: 403208 - DNA, 535 bp, Cannabis indica
tccactaaaggacaaaaagctaacccttcccacaactaactaatcataaaatcacttaggggtattttgtcaattctaaaatctcgtatattcccgacattcccaatgtctaactatattgccccgctatactaaaaatactaggatgtgattctaatagccaaacaccgcgttctaatattgtcggacacaaaacatgtaaaaatatgaaattccatatataacatataaaatgcattctgaatttaaataaatcaccgtaaaataataattcataactaacatgaagtttcataattaaaccctaattatctgctaatttccaaattaaaattaagctgtctttacaattatccccccttaaaagaatttcgacctcgaaatctaatctgaacaactcttgatactgagcccttattccgaaggaccttatcttttctatctcagatctgaactggctgctcttcgtatgataagtcgtattgcagctcaagattttcatagcttagtacatgagcaggatctgaaatgtact

SEQ ID NO: 403209 - DNA, 622 bp, Cannabis indica
cctccatccgacacttatgccttatatttcctactcaggaagccagagtggggacagtgaggggaaactaagaagaggcaaggcaatgctacaatgttgcaacgcacttgtcggaactcgtagtccatgagggcaacgaaccaagattgatggaagaagatgagttggatccccacgtgggatttgaaaaaactgtaagaacctatggaggacactgaggaagtacaagtgtgcgacctcgactccaccaagatcctccgtctaggaaaaaacctagagctggaggaaagaagcaagattgtcgaagcattaagggcagccatagatgttttcgcgtggtgctaaggggatattaccagcataagcccccatgtgattacccatgtcctaaatgttaacccagacatgccgtcggtacagcagaaggggcgtccccttgatccgataaaagtggatgccttagaaaaaagaggtagacaagctactaaccaatgacttgatccaggatgtgtactacccggaatggctggctagttcggtactggtaccgaaactgaataggacatggcgggtgtgtatagatttcactgatcttaacaaggcctgtccgaaagattgcttc

SEQ ID NO: 403210 - DNA, 762 bp, Cannabis indica
atttttcaagaacaaaacaagtttggttatggttgcgtagctcgtgattcgaatggttctctccttgaagcaatttctgagtctcggacttggggttgttaagcctgagattgctgagaccattgggattaaggaggcgttaagttggatcgaaagaaagcaatggcccaatgtagtcattgaaactgatgctttggtggtggttcaagctattcatagttcaattttaatgccttctcagtttggattacttgttgatgattgtcgagttttactctcgtctttaaataatgtttctttaaagtttgttaaacgatctgcaaatagggctgctcattgtcttgctagagagtcttgtttttcgtcagattgtgtttttaatcagcataatgtttctgctgattttaagtctattgtaatggctgaaagtgtttaaatgaaattctcactttgactcaaaaaaaaaaattaaccaaacatatttttaaattttttaaatctgttaaatctttatctgataagaatatttttatattgattatttttattctttaaaaattaatgggattgatggatttgtggagattgattttcatatgataattgattaattgattaacaattttatttttggtattgatttcaaaataaatatattgggtaatataaagatgagtttttattatatatttaaaatatatttttaatcatttatccggtctttttaaaatacatacaaaattatttttaaaaaaaaattat

SEQ ID NO: 403211 - DNA, 984 bp, Cannabis indica
gtgcaatgacagcaggccaaacagccatccacagtcgtgggtggtccaacaagaccaggagatcgtgtttactaggtctcgaacctaaaaaccccaattcttttgtgcttcgactggtcatgaattgaaggaacactagttttagaggatttgcgccattagatttgtcactagacggtccgattaggtcacctgttaggatattattagtgttatttttaggttaatttgagtgtgtttttaatttagttttactcttgtttggagcaattttacacgttttgttatcttttttttttttgtagatttaaaatagaagaacaagggaaaatattgaaggaatgaaaaaaagatcaaataaaagctcactgcacacaaaataggaagtgcatgccgcgacccgccccttctaatatcaagcagaatagattttcagcatcttttatcttttttttttatcattttttagctataaaagaagtggacttccatagtttttaacaagcaatcaaggagtacgaattttcgagagcaaaattgatattgaaggctttctccacagaatttttaacattcttttctcctctattttcttcttctactctaaattaatatgtgcgaaattactacgatgaacatgagcagctaaacagtttattagggtttagatggatattgtttgacattgatttttagttttaatgtgatttaattctccctcaatttttatgtattttatttcatccgtacttaattttatttaattgcttggccctcaattaattgtttatgattttgatacaaaatttgagaagtaagtgtcaattatgctatagtgaaatagaaccaaatttcgatataggacgagagtacctatatggtttcgatagcttaaagggtttctgtgtttaatgcctttaacatgtttagtttatctacgacactcgacaatgaaaatttgcatgtaattgaggtttatatatc

SEQ ID NO: 403212 - DNA, 1131 bp, Cannabis indica
agagagagagagactatattaacagtagcatcaattgagaaatgggaagagttttttttttttcaatgttagaggaagctaccaaaaaaataaaccagaggaaacatggaaatagaagaggatgaagatgaaaatctcagtccaagtctgagaaaggaaataagtaatgatagcatctaaaacattggactttaaggctgtttgctattccagaagatgccaaatagggacttgtttgaagaaatatatagtgactggaattggtttggtactctgagactcaaaatgcatgatgttctagaaagggttcaacacaagacaaggtaagatacaaggctgagagtgataaagggatacttaattggtgcttatttaaagcaatttttacattggtgagacatgcagaagaagaaacaatgaattgtatttataaaccactaatttaagacttataataagcgaaaatgaggctaaagaaatcaaatacagtatgttgtagtggtgatttatcacaaaacgatacctattagattttatcttgcatactatagagcagaatctacacacacctaaggatcatgataaagggttttgtcaaagaacaaaaactaaaataaaaaatcatcccaaagggtacatacatgaaagataaacataaatattgagtgtaggaaatttagctctaatttataggaaattcagctccgatacataggaattaacctctgtaattccatgttcaagatcacacttaaacaaataaaagttacatcaaaacaaacaaatcaagaactaaaaatcagcaaacacatattaaaccagaaagataaatatagataaatctagatagcttccagacacaacaacagataagaattatactagtcatgatcttaagttcaatgtgaacttggtcatactccagtttgaaaacactgtcaccaatatttattgataatgagaattagagatatctatctcaggagctagaaagaaataaacacacagtaagtcatccatggtgtaatccttcaacactcattaactcactaacccgagtcaacataatcgacaatgttgcttaatacaatttcccaaatccacagctctctctctcaagatatctctctc

SEQ ID NO: 403213 - DNA, 806 bp, Cannabis indica
tttgttcgaatactcacatattttggtattgtccaattttctcggacaatacaaagtaactagacacaacaaatagccaaagagaatggcacatagcaaggcaagatatatcaattatatatatatatattttaccatagaagatatttaagtaatagattctgataaataaaatgatagggacacgatattgtcccgtgatgtactttcacggaatgtatttcgtgatgtacaacagccgttcgataagggagttgttatagtgagatttctctcacctagaaactcgagaccagactcctatttaaaggacacgtgtattcagatttccaatgaaagctgaattgtccatgagagactcctcgatgttttaacctcgcccaggataaaaccagcgagatactgcgagtacgacctaagtcgaatcgcataactttaactcacattatacaggatggatccaactcgcatgtgtcaggacatatgcgagtatcctctctatacttctgcgaaagcatagagatcaactctctatgatgtgatttggtcccaacgatccaatagccttgataaaccgatataactcgcatgtctaggttctatcagctcgacatgcgatgtctacaagaggcaattacctaagggcgcagacgttccaaacgtactgataaccctgcgagctcaacaacggaacatgaacagtcaactcgcagatgcggaagacgcatacgttgatggacttagtaactgtcgttcatttattaatgttaacgttgcttgggtttaattattgcaattcaatatgt

SEQ ID NO: 403214 - DNA, 529 bp, Cannabis indica
tgggtttagacttggcttggtcaggatctgtaattttgctattgcgattagtcttgtctctttgatatgattttgagtgtcttttgtttaggttattgtgattagttttgtttctgtgacatgattttgttttattttatttttctgttggctcatctttttgttctttgatgtcttgccatcaaattgctattagtagctgagaataataaattctctccgactaaagaggtattattggtgtagttacacaccttacataatagttgaatgcttaagctaagggactgaatggaccttttgcaaccttttgcgacagatctatcgttgtgtattttccaacaagagagatatttcaattagttattgctattaataaaattgcatgatttaaaatatgttattcttatacttaggggtgtacagaaagtcatccgatccaatcccaaccgaccgatccaatccaatccaatccaataaaatcggatatccaatcataattggatcggatcggatgcaaattttaaaa

SEQ ID NO: 403215 - DNA, 538 bp, Cannabis indica
caaaagcttgctcgactgccgggagaagatcggaatatcatgcagttaacctccaaggataactttgtgaagtacgggctgtatcccgatgacttcattcccaaaccagtgaaggggaggaataggaaatctgatgctggacggtttgaacgagctcatcaggaggatgagttgattcaactgaagcgcgaggctaagtttaagggaggtgcaagggccaagcaatatgctgaggagccctttaatcctgaagatgaggctgaggaagagcaggtgactccgctcaagaggaggaagaaacttccggccccgcccaggcctattgaacatgcgattcacataagggatcccatctcacctactcggccgtcccctcctgtgcttcgaaaagggaaagctgttatgtctgaaataagaacgatatcaggtgatgatggacttttgatacttacttgggccatcactttgcatgccacttcgtcttgttttaagcttcttgaatattatgcctcatgtttctgatgtctgttttctctaa

SEQ ID NO: 403216 - DNA, 510 bp, Cannabis indica
acgacatgagaagcccgaatacgtgatatatagacttggctaaaaataagacatattaaaaagaattatttgcaacataaatactttatgttttcgatttcatacatttatataccccatctttttttccgacaaattaaataccttaagttatatttccgttactactagcttgttaagcgttgattggacttattagtactgacacatgttaatatattattaggccacctcaaattaatattatttcaataaataaaaaaataaaatttattttaaaaacatagatttgagtaaaataaatttaagagaaaaaaaacaaatatgatcaaacttcattcactctttctctcttttgtctttcctctgacgttaatggcagaccatagtctctctctctctaaaatcaacatttatagaatgcctaactactgcctcatccaaaacctgtatagagtgcaaacaaaaattatgaacaggtgtgatgttaagaagagagagagagagaga

SEQ ID NO: 403217 - DNA, 587 bp, Cannabis indica
taaattagagatacattggttagaatggatatgtatatgttcatgttgtgccatgttatgatatatcagttagcacgatagtttgtgtacagaattttacacctaaaaaaaatcgatgatacgtgtctgacaattctagaaagagcgaatcgatattttggcagtacaatcatagtgttgagactcaatgcaattatagtattgaggatatggaatgaattgatattataatggtatgatgctgatttagagtggaggatagaaagttaaatgttgatcttagtaaagatccttaacagactttaacattatacttgggacggacttttcccatgtttatggctaatttgattgtataagaaagatagtaatcttttagccgacaagcgaggaaccctggattatttgtgggattaatttggggttcccgaatccaaattataaccgggttaaggttaggaacctgattacaagatgggtacataggatatcaagcggtaataatttatatcagcaaacataacatattggacttgagaagtgtttgtgagtagtttataggaagttaaggaccatatgttttacat

SEQ ID NO: 403218 - DNA, 603 bp, Cannabis indica
tattttattttatttaaaaaattcatgttaagggagtcgtatcgtatttgatccgtttttatttcgtgtcaagtcgtgtcgacccgttttcgactcgcatctaattttctcgactctaacccataaaattcgtatcatgttcgtgtttgtgtgtcgtgtcgatgttatattattttatataatataatatttagattaaataattaagttgtaaataattaagtgtgacaaagtattaattttgtcaaattgtaacatacattatggagttacaaaatgtatgtagaatgatcacaaaataggagttgcaaatcctttaaattgatgatcacttgaatatgtaactctcatctctttttcactcttaaattagtaaaagatgttactaattatttatgaatgtgaatgaatgatagctattaaaaatatagttgttggagacttgatttattcatttataaggtgcataaatggttcaaaatcaagtgtgaatgatttggaacactttggaaaagaattggccaaagctgaaaaaatggtaactagtaactagttactgtttttttcagcatattattgcccacgtttttgaaagtttgagag

SEQ ID NO: 403219 - DNA, 760 bp, Cannabis indica
gtctaacacctacgttcatatattcctatatcaaaccacgattatagaacactaaatatgcatcaaatttttaggttatgcaaggtagatgaaatattccaatttcactttacaaagtaaaacctaaatcttagtagttcaacttgaatggagcacatgccaatatgttatatagtcttaatttgtatcattttactttggcattatttacacctccattgaataccctttcacaccatttaattttacaaacttaataatgctaaaatgatacaaattaaatatagaattcatataatttagtaataatttgtatgtaatatcattaatcaattataaagtgtttcctctagatagtgctaaacaccactaatacttaataactgtgcctatttttcacaagcacaagattctctcagtcatgcagctaagacgattctctcccgcttaaagttgttcgttggtggatctttctatttcttttatagagagtgatcctgaagttgtcatcaatttatataatcctttctttttctgaggttgtgttcgggtgaagctgttttttagttctattaggtccttgttatatgtctttccgagtatatacaaatagaggagttatattccaaccaccgaccttaggcttgaaaccacaagagtacctaaccacaccttggcaaaatagaaacaattaactttatgaggtaggaccttacaaagaaaaaaactttaggtaggattataagtattccaaatcttt

SEQ ID NO: 403220 - DNA, 596 bp, Cannabis indica
ctagtgcaacagaaccggtcaactggtttgcttggagggggaatttctcagttttcctcagggccagttttaaggctcggggtgatttccatatttggtatagattgtttagaagttgtaaaacctattttgttgctaatggaagttagggttactggttatggaaattagggttattcccggaatgattcatttaagttatttattgaatgttgttgtcgtgacataggacccaagatcgtcaagctttgattccacttaggtcagcatgcacgctaaatttctggtctgaggtaagaaaactttaatgcactgttaagtagctaaatacgaatttattataatcgttagtgcctcgaataagatcaagattaatgatatgtatttgtagtgactcgatctttatcgagattaataatatgtatttgttgtgactcgatggtaatggtggtaatgatgacaaatgattattgttgtttgtgaattgtttatgattgaaggaagaacacagttatcaccattgttgtgaatgaattgagatacagtcattaccgttatgagtaattactcctaaaactgcagatatgtttcttact

SEQ ID NO: 403221 - DNA, 512 bp, Cannabis indica
aacaatgtgcatcacatgtgtagatctattcaatacaaactaaatacaactaaacccaacaacaattagtaaagaaattacatatctagtttttgtttttatttttttgcaagaaatgtgttgctacagtgtgtgtttgtggtggtctaatgcacttgttgtggagtatggtggtccagctaactccggcaatgggtgctcttatgttgggtgctccggttagactcacttgagtatgtgtgtgagtgtgacttttctagagagagagagacaagaaagagagaagaaaaatgaataagtgtgggttttattatttgagatgtaaaattggaactaaattaatacactagtataattattttatgttttaatggatggtatattagacatctctaatgggagatgtaaaaattatgctatatttggtacaaaaaataattttgcggtaaatttacaccaaattttagctttgtgctctaatggacaattacaaaattttgatataaatttaa

SEQ ID NO: 403222 - DNA, 501 bp, Cannabis indica
tggtggatatcagatgcgactacacggtattggatatcgttttctatgattggtattgacagctatggtctatttactttgtttatacattttgataccggtgatgaggtattttattgttacaaagctaaccatgcaggaattttattaaaccaatggtcctttgatattagttgttttcctactaggctttataagctcaccccctattttatcccattccaggaactcagtttgatgttagtggatgaggatggtattgttgggaaaggaagttgttaatagattagtcttattctactctttaatcttttaatgaaactgattttgtatttaagctgaaatggatggtctagatgacttaaattagctatgtactgttgggttttgtgccctaaataaaatccatttcaatataatcagatttatttattaataaagatcaaaaataacattttatgtttcatggttcacataatttatggaattgaccattttacc

SEQ ID NO: 403223 - DNA, 604 bp, Cannabis indica
gccagggtggaacttggagttgtccagatggagctaggtgaagttaacaagaagctttttactgctaagaggaaaatagtcgagttgactaaggacctcgaggccttcgaccagcttgaagctaccattggcaccttgtcggcaaaagtgaatagccttcaagaggaaatgggagtttttcggactttcttctgtcggttggaagaagagaagaagactaaggaggaggcgcttacagctgcgatcgagaagcataaattggagatggtgaggttggaagagaaagttcatgccttagagacaatcggtctcgagatcttttatgacttttggaaggctaaccctcaggcgaatcttgattacttgggcgaagtcaaatacatgtatctcgagtacttttcttcctaagttgcttatggttaacccgaggtaactgcttctacctctggaaagaatgttgatgttccttgcgctcagagaacagatcctctggctcctactggcccagaagacctgaaccgagagcttaggactccagctgttaaaatacttctctttttatctttcttttttatatatatcttattcttccataaggcctttt

SEQ ID NO: 403224 - DNA, 633 bp, Cannabis indica
aaagaaattttgcatgctttgagattgtggttgctgtggttgatgtggttgattgttgttgtgttcaggggtttaattatggtttgttatgttggtttatgcatgttttagaggttgttgtgttgtttgagcaagctttggagttttgaactcaagcttgactcatcaatggcaaattttgattctgtacttgggtggttgctttgttgccttgaaaatgttctctaaggtgtatagaacaggtctagaaagtttggattggtttggggttgttttggtgaagatatgaattttttggtgtttcctgcactgaattggaattccagttcagagaggcctgtaggaaccagaattccggttggcttccaggatttcctcccagaactggaatttcggttggggaaaatttgggaaccctaatttttcctatttttgtgttatttagggtattgccatgttagttatcgatagggaaacttttagtttcaagtttaagtccccgggaagtgatttagcgtatcgcttatcagtgttgtgattgatgtgatttaagagcctgtaattcgccaagcagattgttccactcaggttgaccagcacacctgaattcagaatcgaggtaagattagtata

SEQ ID NO: 403225 - DNA, 1001 bp, Cannabis indica
caccataaaaaccaagaactgcaaagcttcactggttggatagccatgctcagtagatttgtttcaaaaatcaacagataggtgtgtcccattcttcaacatcctgcgaggaaacaagcagttcgagtggagggaggagtgtgaaaaagctttccaagagctaaaagtagaacttgcaaaacctcccgtactctcaaaccccctgaacggagaagaactgggaatatacttagctgtcacaaaacatgccatgagtgtcgtgctaatcggagaagagaacagcgtacaacacccagtctattacatcagtaaaagactcattgaggccgagggccgatacccattgatagagaaactcagttactgccttattctagcaacaaggaagttgaggccttattttcaagctcatcctgttcgggtatacactgactagccactacgctaaatactacaaaagccagatgcttccggacggctactcaagtgggcagtagagttgggccagtataaaatcattttccaaccccgaacagcaatcaaaggcaaagccttagcagactttgtggtagaatgcacaggcgaaaaagtaagcataccaaaaagcaaccccgagccggtacaaacacctcaggtaagtaataatgaagataagccgacctggaaactacatgtagatgggtcagctacagatcagctatctggtgcaggaattgcccttgtcacgcctatggggcaacacctgcacactgcaatcaagttcggattcaaagcatctaacaatgaagccgagtccaaggctctaattgctggctaaagctattccaggcaatgaaggcctgacacattgacctttgcagttattcacagctagtggtaaatcatgtatccggagaatacgaggctccgggacaaaagacgatagcatatctgagcaaaatacatgatctgctcgcacaattcaaaagctacggtctcagacaaattccaacagaagaaaa

SEQ ID NO: 403226 - DNA, 603 bp, Cannabis indica
cacattaatgataatatagatttgtattagcgccagtgatagtactccaagaccatacatttgttacattcttattgtatgtccacaattctcgacaaatctaatgtcagaaccctgccaacccaacgtaaatttattgcatatgcaaacattcaacatctattgtggataaaacatttattatatgttaatttcctcccatattgacataacttgtagagatctctttaaattgtatattttttagatatgtatatcatttataggtacctatatataaagttgtacactcggatggcctggtccaacctgtttttataaaagtccacttttttttatgtgagcctagcccgactcatttttattgtaaccattgagtagtcattattttaactatatatgtaacgtttagatgcatattttagattaacatattgacaataattataatcattttcttaaaattaaaaaatgatattcaaattcaagtcacgcttaactaaaaaatctaagctagttagtcatttttttccttgaactttgacatgtactaaatcatgccccctggactttttttgccgttaaaaattccccccgaactat

SEQ ID NO: 403227 - DNA, 1047 bp, Cannabis indica
tttagtgtagtatggtatcttgatcacagttgtgagctgaaaaagaatttacacttgttaccacttagcaacacgttggcgcgctttttgccatttgatgccaaaaaagaccatttgctttttattgttgcaattattaatcttgtaattgtcttcttattgatctgtaccaaaaaaaattaaatatcttcttgtcatataaaataggaagaagttttttgctccataaataagtaaaatgggggtgtaagttttacttgtaaatcagtagattcatagatgaaatatcagaagtaaacaattaaacgcaaaatataaaattactagtgtaaggagctttcattcttgctcctcattttatcggaataattgcggtatagtgtataataattttcttctgttttgttagtacaaatttcattttgattctattaaaaaaaaaaattagaagtaaattaattgatattacatatttttgttcaagtacaaatgatttagaatacaagtttcacgtatgtcctgttaagtgttagaatgcgaaagtgtatggttaaggtactagaataagtgagtgtatggtaaaggtactaaaataggtgagtgtatggtaaaggtactagaataggtgagtgtatggtaatgtacacgagatttcatcttaaaattaattggcaataagaggagggttttctttttttgtaccgactttaggatatggttaaggtactagaataggtaagtgtatggtaaggtgcatgagattccatctcaaaatcaattggcaataaaaggagtagttcatgcatcttacatatggtatttagtttcaacacattatcaatttagaactctctaatattaagacactaaaaaaatctttattaataaaattgaacaaaaattacagtcttacattttatatttacgttgttaaaaaaattattaagttttcaatatctatttataaatgtaaaatttcaagaaaacattattgttaacaaatcatgaagcgtcatttactattggtatccaataacaatactctaa

SEQ ID NO: 403228 - DNA, 483 bp, Cannabis indica
acaagtatttttctgttaattgtatatgaaataaactggttataaattgtcaacttttatatacaagttaattatgataatttatattaagatgatccgtcgagaaattttaaggtctatacggaaaaggaaattaataaaataacttacatacaagtggtttctttggtggtttctatgtgggttactatacgatttttggtttcttttatctataagtatttagaaatttttgtaaacacattataactaaattaatatttaaacttattttatattcatactaaccgttatatattctgtataaattattagtgcaaggacctatgtacaactcgacgatggtactgagttgctagatgctgtgatgttcggagatgttgcagaaaatatattctcatgtactgcagttcaattaaagtcatattcgaacgaggtaaatataaaaaaaataaatatataaaatttatacattttcataaa

SEQ ID NO: 403229 - DNA, 527 bp, Cannabis indica
tcctgataaaatattcccaacacgacgatcattaagttgaattttgagttgtatccaaacttaccttcctagaaattcagtttgcatattgatgaaagtggaaggtctatgattggttactagtagttgcctaagttcttctagggattcacctagtgataggaaaattttagaatgatagaatggttatgtacttagtgtaaactattactagattcatgaatgtcctgatcgtgaccttaagaaaagctagaactgttaactaaagtttacatgtttgatagctattctaggtgattaggggtgtcctattttgagcctaatttttccacctcttattctttgttaaaaataaaatatatatttatccttgattatgagccatgaacttaaataaattatcattaccttattttgtaccataaacataggttattgtgtacaaaatgaaaaatatgatgtaagtgagatgaatttttttttttgagaattgtgtttggaaaagatgtaggtgcatagagagttat

SEQ ID NO: 403230 - DNA, 523 bp, Cannabis indica
aaggagaatcacaagattgaaactagtgccacacacaaagagggatgtgtcggctttagatgcagtaaatccccaaccaagtaaggttgatttcagcttgtcattccatgctctaggggcttgctttaagcaattaagagccttattcaacttggcaaacatgagtgggatatttggagtcctcaaaaccttgtggttgactcatataaaccgtctcttgaagagtaccatttaagaaagcaatggccacatcaagttgtcgaatttcccattgtgatgagatggcaagagtaagaacaagtttcactgtgacaggcttcacaaccgaactaaaagtgtcttcaaaatcaattccaggtttttgaagataccctttagcaaccaaccgagatttcaacctgtcaagagtaccatttgcattaagtttaactcgatgcacccacttattcccaattaagtgcatgtgaggttcataaggaaaaagagtccaagttccttgagaaataagagctttaaattctgt

SEQ ID NO: 403231 - DNA, 928 bp, Cannabis indica
ggcagcgctgggagatggtacccaaaaacaacctgacctggagaaaagagatttgtgaggcaaacctcacggatcacaagtcaagggtaggagataacccagagatatgctcagaactctcagaagatgcaacctgaggaagctgaggaaagtcgggcaggagataacccagagatatgctcatatggaccaagaattatgcctaagtctttcgaatagacattgcaaggtttcctcttatccttataattttgataatttattactatccatgttaatggttagattaactttgtttagttttttttttaaagttcctttcttgaacatattattgtaagttatcaccagtatcatcaaaataataacgagttagaaaaatcttcccactaagataatcagctggttagtgcctttgaccctgactcccacaaggggctgcccaagctcttgcaaagggcttctgcgaaggatacttccatgtagggtgaggacatggggaacatctgcgatccatgatatctcccaatcccaggaggtgaagccaaatgggttggattatattttaccaagatctagattcactaacaagtatgtttttaacatcctaaatatgaacttctaaaataatgaaaaacacatataaagtatgaaaaatcttacattggttgcagcggaattaaatgactccttccgcttagatctctaacctttgttcctttctgtcgcagagtataatcaagatctaagcccgacactccttcagttgtttagattcttcactgtcttacatactatgattaagaactaacttgcgatggctgggcatgcactcaatcactaaggctcgaatttgtttgtgtagaagactataggatttcaaaaactgaaaaagaagaagaagtctcaaactctctagttgtctaac

SEQ ID NO: 403232 - DNA, 1162 bp, Cannabis indica
ttctaacgatataaagaatgtcctaaacagagtcctaagttaaaagttatgaacaaaacaagttcaacatgcaatctgtccacgcaagcgggccgcggcgcccatcagagcaggccgcgacgactgggtgaaaaacccagaaactccattttaacagctcaaaaaatgcacaaaaactcacccaaactcacccgaaacatgcatatatctcaaaatcattccccacataatataactaacataacagggagttaaaacacaaatttcatgcatcaaaatccaacaatatagaccctctaaattaagatttaacaacacaaaactaggctccaaacattaagcaagattcactgaaatcccaaattcaagagcttaaacacaagaacaaaaaactcaactataaattcagagctgcacaaattaattagagaaccaatctaaactcaaaattcctctcaaaacataacacaaagcatcttacattaatctttaacacaatcaagcatagagtatcaaaaattacactaatatcaacatacatgcatctcaagaacattcaaagctcaaagacctatttatccacttccatttcagcaacaatttcaaattaaaatagtaagaaaactacctccaaatcttcaacaattcaagatccaaagaattcccacaaattaagcttgaacccaagcgatttctctacaaattcacaagttgcaatgatgaaaatagggagagaggggtggggggtcagttttggggtgtaagaaaccaaaaaatgcttttcattccaattaattatcttttgttgtaaataattaaaatataaaattaccaaattgcccttaaggccatatttcacatactcaaactttcaagggaaattatgtcatttaacttcacatacctacccaaaataaattcagattaatcacacataaataaaatgccaatatatcatcccaaaattgtacttcgaccctgaacccagttcgtcccaaaatacccgattgtgactataccgcgtcgacttgttagaacacacctgaaaaaggaaaaaacaggcatactatataataatatagtccataagctcgcaattaaattaaattcacaattttacccttctcgggtcaaaattactaaaatgctcctggctcaccaa

SEQ ID NO: 403233 - DNA, 901 bp, Cannabis indica
tatttagtaatataaatacattctaaatcaataaatcatcacataaattataagtttcaatttattgcttaaatattatacgtcttgcatttttagatgcaaaaatattaattaaatttgcataatcaagttttgcaactaaatcatgttcaatggataacatagctaaaccacttaatctttcttgagacatggttgaacagaattaagatttgatcaaggttaatttggaaaaactcctttctgcatgggcaacggtgaccagaatagttagaaaaatcatataagcaatctaagcatttagataactatcatccacttcttttatatagctcaacacatcgataactcttttggtaaactttgacgcaacatatataactcttggtataggtcatcattgtcaaggtctgaaatctcaccatgcttcattaagtttgtaagattgatacaaaaattcttcaaagtgtcatcatctgcagactttaatttctcaaaatcaaacaatagtccaaaattctcctcaaaattctgaaattgttcgaacctagttgaacaataattatttttattagttattatggtaggaagtgaaatataattttaaataaagcactataaaagtatgcatacctagttttaaatgatgaaatagcttgatcgttatgcaaaaaaaatagtcaattttaaatgactctactgctgattgtgtcaccccctcattgacacttcatcaaattgctttttcctgtaaactttttgtttttcaataaacacaggttcaacttccatcatacttgcaatctcagtagctttagtcaaagcattctcaaaaccagtttctctatacttttgaagaaatgaaagtagaatctttaactctttgatagcaacatcaatt

SEQ ID NO: 403234 - DNA, 997 bp, Cannabis indica
ttgataaatataactagttttttcatatgatattttgagttattgtgtattatttattttgttatgaaagtactggtttaggtttatgcttcagtattttcggaattgttgctcgccttttgttttataattataaccgatttatgaggtattatgtgttattcgtttttagtcaatttattgtggaagtagttttgtttttaatttatgtttcagtgttttaggaaccaattttctttttgttttttaattataaccggtttgagttattctgtgttatttgtttgtatttattatgttatagaattagaaccgattttattttaattataacctatttgagttattctgtattatttatttttattcattatattataaaactagttctattttaattataacttgtgtgagttcttgcgtgttacttgtttttattcattatatgttatagaactagttctattttaattgatatataagacatcctccggtgatttttccaacgatgacacaactctgttgacttttttcggtgacttttccgtcaacggcgacttttatcgacttttctgtcaacgacgactttccatcgatttttccggtgacttttccagtggcaataacttttctaattatttttaatagtcaccggtgatttttttgactacaattattattagaagttttatcaaatttatttattttctttttttatttcctatattttaaactttgattattttgtaagaaaaaatgcggcaaaactcccaaaaatttcgctctagttgcaactaacccccaaaacctattttttggatgtaaaatcctccaaacccgtattctgttagcatttagccatttctatcttatttttgctgttaagtgtcatgtgggcatgtccatgtgtacacaggtatttgttcacatgaacatagtgtatgttggatatattttaccaggatcaagatttactaacaagtatgttttattaaca

SEQ ID NO: 403235 - DNA, 1128 bp, Cannabis indica
tataatgatataatattgtgttatcactaacacgtaaatcaatcaaatttagagttacgtattaaaatttattgattggaatgttaactattttattctagtcttattactgtagttgtagccaaaaataaaattttatagttacgttgtccatactcactcacatgttgttgcagcaatctttaaattttgtacacaaaatccttactcaaataagttcttaaacttataaactaaaattttccttttcttcacacgcattagagtatttttttttttttagtaaaataaatcacgtaatacattaatgtagcatgattaataaataaaaaaaatagaagaaataataatataaaaaaattatatgatacataaagtataaaatagttaataaaaaaattaaaaaaaaaggagcaatttatacaactttctctcataaataaaaatacttacaaattctttatttttcttagtgtaaaaagattctcaaattctacaaattatcaaatactccatgatagaaaaattgaagtagtagagataattatgaaattaaaaagaaaaaggattgaaagagtaaattatgaaaattaataggaatagtttgagatatatagactacaattatttaaataaataaataaattagttatacataaaattataaatattaaggatccactttatattgaaaataaattctacatacctctttctttaaataacttatttgaaacttctaatcttcattactattttttttttatataaaaaagagagagatatgtaggtatgattgtttttaatagaatagaatgagaaaattcaaatagaaagagagaaatttagggagtagatatttttagaaaagataaaaaagtatccgtatattgctactctattcaatcctacaagaagatcagacactgagttaccctatttgtgccttggccaacttggctgcagcacttcttcttctaccaacggctacagacctgtttataaggcatgatagtatagcaacattagatggtggtgctttaggccatctcaccgagtgttccttttgatggaacagtagaaaaatttgaaattcagaaatatattagattttactataatgtttag

SEQ ID NO: 403236 - DNA, 983 bp, Cannabis indica
caacatttgtatttggttccccatgtcggggatctacatcttcctccccgccttggtcggttctctatttggcaatgcttttcccttttccaaactctggccaaaggtttcttccttttttgccttggtcagggcaaggttgtaacattcccgtgcaacttgttggtttcctttcaggcaccctaccccattctttgttgggaacttaatgcatgaatggaaaattgatgtaacaactttcaactcatataaggctggtcggcctaacataacgttaaaggctaatggaacatcaattattagaaattgtgccatcacagttatgctcctcggatcttgtccaatagtgatggtagacaaattttccctaaaggtgcaacactgtggccagagaaaccatacactggttgggtgtaggggatcagatctctaagttggagccccatcttttcatatggtgttttgaacggatgttttccgaggctccattgtctatcatagtcaaggcactattttatttgctatctgtacctccacgactagtggatcattatgcggaaagtgaacattgataacatcttcttcagtgaaggttatagtgggttcccctactcatggaattttgggcttcctttcttctatggccagaattacttcctttggttgatgttgtaaagttcgagcatacctttcccgagctttgcccaaatctctagcaatatgtgggcccccaatgatgaattgtaaatgcccgtccacaggtggtggcattaacagatcttggttgttatctgcttgggcagcccgttgattctggttgcccttgagtatttctgcacgtgcgggttatttttccttatcaggaattcaatttctcacttcaggttgtttcagtcattagtgtcatggccatagtctccatgaaagcgaaaaaatttggacatgtcccgcttgcttatgtcctttttcatgggagcaggttt

SEQ ID NO: 403237 - DNA, 1128 bp, Cannabis indica
aagaaaagaaatttattttgctttgcttaaaggaggaacttagaaaaccttaagggaaagcatctctctcttcctctctttgtcgtgcacctcaaagaaccagcaggaaggaattttgctgctggaaattttagtgttgtaaaacctaaacaagaaggttcaatttaaggtaatgattcctagctttactattttaattttagtaagcataagttaggttttaagcttgattttgggaattttggtgttgtgtgtatagttgtcactctaattgtagttctggagcttgttggtaatagtttaaattgttttgagttatctttgtagattgtttcaaggttttggctaggattgagtttgaaatctcaaacctagctctctaatggtggattgagattttgtttgatttgatgagttttgttggttgggattggtttagtgtagtgtatgcaggtattctggaagttattgcaaagtttgggattgaattgtgatgtggggatcggttttgaggtttccagctatgaaccggtcgaccggttctaggaagcctctagcaaccggtcgaccggttggtacccaggaactggggttccggttgggaaccggtctgccggttggggctttttcccgagccctagtttttcccgtttttgcgtaatttagggtattagcatctaaattatcgatagggttaatcttagtttcaattttaaatccccgataagtgttttagcgtgtctctcatcgaattctatacattatggtttagggccctgtaaagcgttgagctgcgtttccactcaggctgaccggcacacttgagcacggaacgaggtaagatagcataagaatatatatgaatgtatgcttgttttggatgttttgcactactagcgctaaaatgaatgtgatttaagagtgttagtatagtgtgacatatttgtatggctacagtgttaccaacacgagtaccagggggtacgttgtgcctgtggtacaacacttagtagattttgggagtacaattgaggctctaccaacacgagtacagggttggtactttagtgcattggtacagtagtcgtacttcccttaagaacgttcttatccatttgatgagcttaa

SEQ ID NO: 403238 - DNA, 506 bp, Cannabis indica
cttttcttttgtgctttactctatggcatctaatctctcatacttaactcttttttcttatttttccagatcgctgcagagaccggtcgcctctcaaagactttaattgatcatgggtacgtcatgtccgagttcgggggcatggacgaggccatgaagagtctgagagatctggcagttgagaggaaagtgtttcgggaagaggcccaacagaggcaggctcaggcagagacgaagcatcaggaggcgctgaagacctgggatgaggccgtggctaaggcgaggcgcgagctgagggaggccaaggaagcagttgaagatctgactgccaggctgaagtctatggaggagctgcatcaggctgacttgcaaacgatggccaacttgaccgttgaggtgaacaagctcagggatttcaaagatcaagccccgaagaaggagaaaagggatgagctcctggcccctgttgtctgcaagcattggaccaagcgctttgatgatggcat

SEQ ID NO: 403239 - DNA, 503 bp, Cannabis indica
tcaagaaaaattcctaagcgatttcaccctcataaaaaattcattaacaaggatcgatagacacatatatacctcactaaaaactaactaacacccgtcgcaatactcccactaagccaataacttggcatctttaaattcaaatgtgatttcaagatttatcaatttgaggcctagtccaattttctaatgagagatcgatatgacaaaatatactatagtcccaactggtaactaggcggtagaggttttaggattgcttaaagctaaaggaaaatatcttagagcagtgccactatgtgaaaacaaggattatgcaatctgctcgttttcttagctttctcaatgatctatcaacagaaacgatcatgtcatgctagagtcgtttgaacaaaacatgtgactcttacacatgtaaggacaacgacttcaaatatcataaccaaattcagctaatccactaccgattgggtagaaaaaattgtgtggttcatgatatctaa

SEQ ID NO: 403240 - DNA, 534 bp, Cannabis indica
ctaattaataaaagatcaaaattcatttaatgttggacggttcacatgatttcttttctgattatatgtttaatgtataaattctattaaatccaagacatatagttattcatgattatagtgttttcaacacagtggaatataatcatgattatatgttttaaagtttatgtcccatgatttgtcaatacactgaatttacactgacatgataatcagcgataaagtatacttacaccttggattagttctaggacattagcaaagtatgcaaggatcagactggaccgatattaaacttggataagatatcataaacttactgttatatctatctaagtcaatatcaattagttgatcttaggttaatagatcttaatcttgatatggttaggttcgatctcaactgtattatttatgttcttggagttgttcgttaaagctgaccaatggattggcccaatacttacatcttgggaatatggtagtgcatttgagtgggagcgctaaccatagatatggaatctatagctt

SEQ ID NO: 403241 - DNA, 667 bp, Cannabis indica
tcgtcttgtagttgcagaagcataaacatatttgttattattgtctccttcttgcaaccataatttctttgatctttgacgccagaaaacttccctttgcacataactttgaaccaaatttctctttggttgtttgtaattggcaacggatacttcatctcgacccaatttccacctttgcagctcatttttacactttttcaatctttctttaaagttcccagtaacctccttaccccaatcggccagcttttccccgcaaaactaaattttatacatcacgtcatcagccccacaaatctcccaactatctttaacaatctgataacaaagaggtaccctcaaccatacattttcaaaccgaaattgcttcacaaaattgtggccagtagtaggaaccatgaccataagaatcagagtatggtctgaagttgaaatttcaagattatggagcttaacagaagtgaacatgttcaaccaagcaagattagctagccccctatccaaacgcactttgatccaatgattagtacccctcccacgctcccaagtaaacggataactacataactccatgtcttgaagtccactatcaaccaaagactgttgaaaaccttagattaaaaaatcagggtacctattaccgccccttttgtcatcatgagat

SEQ ID NO: 403242 - DNA, 616 bp, Cannabis indica
acacacacacaatgaagacaaaactcatgtggggtttggttgtgtatacgtggaaacttgattggtggattttagctaaatggtcttattactactactctaaatagaatttgctgacaacagtgtctgtttcaaaatgattctaattaatttaattttaccatcacctccacgtggggctgtactaaattttttttcaaccatcaaattcaaaatgggtccttagtgatctctctctcgatagttactactctattgatgtacttgtatattaagtggagaaggctgtacctggggcatagaaatgttcttgtcaagacttaccattaacatgaataatgtaaatcagccagaataaattaggcaaaagtgaaaatgaaatgcaacaactacacgtatgttcaatttgataacgaagagaagaccctaaaatctatatgtggtatagttccttcaaatgaaaaggttttcaaaagttattcttagaaagttattcatctctaggaagtatgttcctgaacagctaacctgtcaatctggaagaagtcttgtgaaatgatggttgccatctggaagggagttcctggatgatcatcatgcccactgcgggtgtagt

SEQ ID NO: 403243 - DNA, 447 bp, Cannabis indica
atttagaaaataacgaaaaatgtatcaaaataaatattttactatagtatttgatgtagtttcttttggattatactcgagttggattgttttggaactccagtttaattttttgagatttacatttcatggatttgaaaattgaggtacaggttatcgattttatgcgaattaaattggatttctggttgaattttaagtttcgtagtaatttttctgcactttttttcatgaatttgatatagtctctgttttgattgatttccggtcgtcttctcaggtaaactcgttgaaattaatggtggtttttttctggttgggtttcgttttggttatgttgggttgttgggtggttgaccgaaggttgtatcacacgaaggtttcaatctcaggaagcgtggaccgtgagttgaaggtgtgtgtaagaggtatttgtgtaagtttttt

SEQ ID NO: 403244 - DNA, 635 bp, Cannabis indica
agtcttttccttttagttatttctggtttgtgtcttgtcttctgacatggtttgtgtagctcagaatcatcaagatactatggtagaagcatttaagaatgagaagattggatgtgttcaacccgaaattgctgagataataggcattaaagaagcattgagttggattgtaactcattcgtgggataaagtcatgttggaaacagatagcttggtgtgtgtccaagcgatttagagcagtattttttatgccttcacagtttggtcttattgtttaaaatattcgaaatttgtttttggctttatcttttgttgatttgtgttttgtaaaacgatctgtaaataagttggttcattacttggcaagagactcttgtttatctacaggtcgtgtacttcagctgaaagactatttctcaaaagtgcattctattgttttgaacgaatttattaattaataaatattataatttttatttaaaaaaaagtttattatgtaattgagtataagatgttacctattttaatttaattattattattattataaaatttcaatttttgaccctaataatacaacctatatcaaaatttatacccctttataatttgtacaaatttagtccattaattac

SEQ ID NO: 403245 - DNA, 434 bp, Cannabis indica
attccatattttaaggtttttttttaaaaaaaaaaatatatcacatttgctacaattaagtttgctatgacatacatatcaatatttttattttttttttctatatttttgtaaatagcctaaatgaaaatgacactaattaatacaaggtctaagttgaagaatacttctttttttattcattaataaaaaattccctcatattatatttcattaaaatgtattcacttttgtgagtggattgccaaatatagcatcaccctccacttaattctagcacataatttatattaatttatgggatataatgggaacatcatctataaaagtgggtatatattaaagaatataaaaaagtaaaaactaaaaaaagtaaagtaaaatggatatattgttataaaataatataaagtagatgagaagaaagaagaaga

SEQ ID NO: 403246 - DNA, 894 bp, Cannabis indica
atatttgaattatatttttagtattttttggttgaatttgcaacatttgtttattttgtatatttgttgtcatgatgttttgttttattttattacttagtaatgttattgttttacatattttaatatttcagttgcattacatttgtaacaaataacaatgatatttttatggagtattaaacctaaataaagggtgatatttaatttttacgcatttttcttcatatttttaagttaatattaaaaattaggtatgtaattggatatccaattaaaaaataatccaatccaattagtaattaaattacattttgaggactaatagatcacattgtgtaacaccctacttgcttaggcacgctacagtgcttttctgcttaccgtgcacacctttgctaatcaaaggatttctcaaaaaatgtgtcaatttaaacttttataaatttataaccgtacataaaactcgggatcccatgtataaagtttacaatactcaattacaaaattgttgctcaacgactacaaaatgaaggccaaagtcatcccgagatcgaactctctaggtctaacatcctgatatgtacaaccatccctaagctctagactcattggtgctcaattttagtctttcatttacctacacatgtaatcaatatatgtgagtcaacagactcagtaagaaaaacatataatatatatcatattaccgacacgtattcagacacccatacacctatctacaaggctttacagatgatcaagaatatttttaataaaagtacgacctctgtaccacatttactaagtgtcgggttttatgccctaaataaaactcatttcaatataatcagatttattagttaataaagatcagaaataacattttatgtt

SEQ ID NO: 403247 - DNA, 819 bp, Cannabis indica
tattaatttatttttcttatatttttaagagtaataaaaagtaaaaatttagtagaatagttacttattttattattatatatttatataaaatattaaactttgaagttttatataattttatgatttgattatagttgaacaattacaaccgcatgcgaagcgggatttgtttcctattttaactataaaagagagatatggaacggtctaaaatctttctaagtagcattatttattctttccttaattctcttatttttttttaattttttattagtttcataattttttttccctttttctaatatttttactaaaaaattgtataaaaaattattatttttaacaaaaccgtataaaacatattgaattttatgtcttgatatttagttaattattttatcatttttttaaaaaaaaaaatacactaactaaatctatctaatccctaatggtaggggtacaatggcaccagacatggctgaaactttagccattaaagaggcgttaagttggattaaggatcatgaatggcataatgttaaactcgagtctgattctcttccaagttattcgaagtaacaccaccatggtttcgcctcttgggggagtggtgatggaatgtcgaaagcttttatctattttaaacaatatttctttgtttttcattaaagatctggtaatatgactgcacacagctttgctagagcgtcacattcttttccagattgagttttcagtgggaggatgttcctactgaattacagtcttgtcatttggctgatttagcaaattaataaaattccaatttgcatt

SEQ ID NO: 403248 - DNA, 532 bp, Cannabis indica
ctaataccaggagcagagcctgtatcaaaagctccctacaggatggcgcctgcagagctgaaagaattaaaagtgcaattacaggggatgatggatttaaaatttacaagacctagtacttcaccttggggtgcactgttttgttcgtgaaaaagaaggatggaactttacgaatgtgcattgattaccgagagttaaacaagttgacagtgaagaataagtaccctttgccaaggatagatgatttatttgatcagctgcagggaaagaccgtcttctctaagattgatcttcgatctggttatcaccaggtgaggattcgagaagaggatattcccaagacagcttttcggacccggtatggacactatgaatttctggtaatgtccttcggatcaaatgtcccggcaacatttatagacttgatgaaccgagtgttcaaagattttctggatgattttgttattgtctttatcgatgatattctaatttattcagactcggaagagactcacgaaagacatcttcgaat

SEQ ID NO: 403249 - DNA, 723 bp, Cannabis indica
gagggatggctgcacgtagtgactttaagttcaggaaacattttatttttttatcttttttttttatttattattttttgttatttagcttttgttttttttttatctttttttttatttattatttagttcgccataaagaatttaaaaattaaatatctatgtattccttttcctattataatttggacattcttattctaatttatatcatagctagctgagaataataatatatgtcatcaacccaaaacctatttatatttcatctcttctctgtcttttttcattccaatatatataacagaatcatataccctctaattttttttgttggccgttacaccgcttcttttcttctccagatttttctctctgcttattctcccaagtaatgttaatattcatcactttaatatcattttaatattatttttttttaataaagataaatatgaaattttaatgttaatattcatcgcttcttcatttgtttcttttaagaagaatatatcttcatcatgcatctctctcatatttcgttcttatcctatattattattatcaatttcgtttctattgtttctattaaatttcaaaaacagtaataacattgattgattgtaaattaaaagaaagtagttgtaacaattcattgtgaataatgaatattgtccaatcatttaagtaatgtttttttaagtattggaacatcaattttta

SEQ ID NO: 403250 - DNA, 455 bp, Cannabis indica
ggtgattgattctggcacttcgtttcatgttactgctcgtagtgatttattcacttcttacactactggtgattttggcaatgtcagaatgggaaacaatggtgcatcaaagattgtgggtatttgagatatttgcttagaaaccagtgttggtagcaaaattaattctcaaagatgttaggcatgttctagacatttgccttaacttgatatctactggaagaattgatgatgaggggttcataaactggtttggtgaaagtaaatggaagctcaccaatggttttcttgtagtggcgagaggaaaggaagtgaatactcattatgtcatggaagataagctacacaaaggagagattaatgcagttcaaaaggatacaaacattgatctttagcaccagaggctcgatcatctcagcgagaagggacttcaaactcttgctagaaagcaattc

SEQ ID NO: 403251 - DNA, 513 bp, Cannabis indica
taaaaataaaaaaaaatgagagtattaagagaacaaataatactattaaagaattttagtgataatatagattagtgataaatagaattaaaaataaattaacaaatatatatagtacttaattttttatgtgattctttttacttaatattttaaaaaataaatttatagatattaaaaaaactcctttatatatattatattcggttgaaatttggtagagtcttgaaaaatagtttttgttacatatatataaatatcatattggttgagtattttttgagttttaaaaaataatttttttttgggttgaaaaaaaaagaattatagtgttataccatagttttgacggtttcgtacatataatgtttttttttgttaattaatcaattattaaaaataaatattagatattacataaagtattttgagtgaatttagaatgttattttattaatttaaaatgagagaattaaggagaagatagatagagttattttgagtgattttaaa

SEQ ID NO: 403252 - DNA, 558 bp, Cannabis indica
agtttaatataattatcgattgtgaaagagaatggtaattcttgaactagaaaatgaggactcgttcgtgatcatggccaaggttcagagatcctaaattccattaattttagcgttaaggcaagagatttgctgtgagatggatgtgtcattttcttagccagtgaagtagatattatgaagaatacccatgggattggaacacgttccagtggtctaagagtttttgaatgtctttctaggggagttactggggttaccaccaaagtgggagattgactttgaaatggatctggtacttggagcagaatctatatcttaaactctgtattggatggcatttgttgagttgaaatggttgaaggttcagttacaggggatgctggatgttgggcttgaaattgctaaactgagtaccccattctggagtacgccaattttgtttgtgaagaagaagaatgaaattttacaagtgtgtattgattgttggaaattaaataaattcatggtgaagagtaagtattcttgtcaaagatagaagttatgatgattaatttt

SEQ ID NO: 403253 - DNA, 520 bp, Cannabis indica
tatatatatatattttttccaaaattttaaattttgtgactattcttggtctttgtgtttagtatataagatacaacaaaagattagtcttcctttttgtgtcacaccaagaaaaacctatgacaacgacataactaaaaaccatagcaataggtttcttaaggttttaggcttattagaaacccaaataaaaaataatatatatattttaataatttttaaaaatatcattaattaaaaaaaagtcaaaaaaattatttttttaaggtccaaattaaatcaaagacggccctaaatttaatacatgtcataacaaatgtttcgtattaatagattgtttcaattgtaatacaaaaattactaaagtgtcgtctggtaacacttttttaatcagttttttgtttttaaaagtagaaaagtgaaaatatatttcaaaaacatattctataaaactgtttttacttttcaattttataattagaaatcaaaattttaaaaacaaaaaaatcactttcaatat

SEQ ID NO: 403254 - DNA, 956 bp, Cannabis indica
  modified_base (114)..(114): a, c, t, g, unknown or other
atcttacagtgagatagacacctcgctatctgttatcttggttcaccatacttttcacacttagtttgtgtaccatgtaatgtacgcttaagtgtttttaacgttatcatatcncttccacgcgacgaggttgaaacctcgtcatgcacatttgtactcacatggtttctcgtcgatacataagtcaacagttcgtgcgtttctgtctcgcagaaggctactcagccagtataaacatactttgcaaattatgtttctaacgagttcttccatgctaagtgtactttcgttttcgtgtttgagttcttcgttttcctagctcgatacgtgtcttcctctggtgtgcttaccgaatttcgggtgtaacatggttaattttaaattttttgattatttttgtttattttaattataagattagatattacttattttattattaaatttgaaatgatcatattttgatattaaaatattaataaaatttataaagaatctagttaaagtttcaaatttgctaaccatatcagttttttttcccaaattttgttatttttaaaatatattttattaaattaaattataagattagaaaaatattatttttaacattttatcttattagatatttattttaattaaaattttatttttggcaaaataacatgaaattttgtaaagcttattaattttgttttgaaaagaaattttagggtttggtagccataaaattttcaaacctaggatattttgttttattatttgataaaatttataatatcctaaccttcaaatatcttatttttctaattaattattttgttatatttaattcattaaattataggattagaaatatctaaattttaaattaagatattatattatattattagatatttaattaatttaaattatttaaatatactgaaaatttgaaaattagttagatactt

SEQ ID NO: 403255 - DNA, 579 bp, Cannabis indica
tcttttctcccttatttaattaattaagttctccctatcctaattttaataatgtaagtaaacaaatgtaaggaaatgattaccttaccattgatttccattacttattagtaaacatgccaaagagttatgattcagccaagaggaaccttagtagtgactcatggatcatttgcgacattaacactctttaaatattcttgatagtcaacagtcaatttatctaatttaaccccagtcatctctgctctaatttttaaagcacaaaaatcaacaatagaagacgagcaaaatgtgggcaggcctttgaagacttcttctattagaatgtcatttataaagttggtagcatctttggtaatatggacaattccaagttcgtgcaaagcaacattataaacaaaatgagaatccccagcaggctgagaaatcaaaacggtgagacgttagcaatgggaaagacttcaggattgataagtttggggaaccaccgatgagcggcatacagttctctgctactcccggatatagtcagggccaggccttggcacccgcatcatcctattttggaaatccctc

SEQ ID NO: 403256 - DNA, 575 bp, Cannabis indica
cttgaagcagggacgttacattatcttcctctcgtcagtactgatcagaagtacattctcaaactaagagttttctttttagtaattttatactaaatcgttgattttttttcgtgatgatttttttgtttgttgcttatattggtgtgatgatttttgtctggagaataaggtttgggggagtggagggcaacgctggtttaggaggagctttaacgacgtaacgtgcttatatcatgggtttgatgcatgtgttcgctaatttaggtagagctccaacgatgtagggtggctgctctctctcgagctagcacatcggagctgggaaggattgcagaggtgttggtggtgcgatctggagagaaaaatggtgtgatgggatttgaataggaaaaggaaggagaagaagagaaaactcgtgcgggaggctgttttattaggaattttcaattttttttttgcttcagtttatttttattcttttaattatttagtaaaaaaaaagtaataaatatattttttagataattttataatatttaaataattaaattaagtggaccaataaaattgtg

SEQ ID NO: 403257 - DNA, 879 bp, Cannabis indica
tttctccattcaagcgaatagtactgatctggtcagagtgagactcagtagatttggtagaaagaacagtggaattggttgggatggggttgtttttggttatacctgactcagaatctgacacggtgcaaataggacagaggttatcagggttaggggtgcgattagggtagagtatgatttttttttctttttctggctctgataccaagtcgacagatttagggaaaaaatgttttttctgtgttattttatttctaatataaagcagtatatatagcatgtacaataagtctataaagagaaacatatcaaatcataaagatacaatgaatccctaaactaattcccttaaaatatggtacaataaaaatagaattattattatacagctatacttcataataataataattaagaaagctgattttccaacaaatagttgcttttgacaatgttcaggattctattcctaatattgatcaagttttagatcaagagaaaccaaacataatcagtcaaaccctagaggtacaaactcaacaacctcaagaacaagtgcctttgcgacaatccactagagaaagaagaaatgctattaatccagataaatacgtagtgcatcttcaagaacatgaggatgacattggaatgatggaagatgatccaatcaactttcatcaggccatgaaaattttaactctcaaaagtagaatgatgccatgactgaagagaataagcctatgcaagacaataaagtttgtgaagttgtcccattaccagaaggagtaaaaccaattgcttgtaaatggatatataaaaccaagagggatgaaaatggtaatgtagtgaggtttaaggcacgtcttgtagaaaaag

SEQ ID NO: 403258 - DNA, 535 bp, Cannabis indica
ttgtgatcaactcactcattcttcagtaaccaaatttgctatataatatgttggaaatttataggtgaataatattgataaaataatgttacaactctagacaaaatatacacataagtatagaaaagaagatgaagagaagattataaaacacaatataaatagtagtatatatatagatgtgagaacaatctcaacaacactaacaccaagtgtcaagtaggggaatcacaaaacttgaacaaggttttgcacctttgtccaaaagcttatttccccctaccacaagcacttagggaagaaagaaatggaaatagctttctggaattatcaagcttatagtttctagcaaggtgctctctttgatagaaactcacaaaattgtgtcttcacaagtgaaccaaagacctctatttatagtgtttaagatcacacactttgaaattcaaactcataaccctcatggatgatatgtaactcatgcacacaccataactcccatagcattaagaatttcaaattaaaatgtgtaaca

SEQ ID NO: 403259 - DNA, 791 bp, Cannabis indica
gtgtgttccaaagctgatttcattaggaaacctttctcgtctcttgttagggggtaattgatgtgaagagtaggggattgggtatattttgagagaagaacactagaatttttatttagtaggcgagttagacttggtgatggctgccattggggaggaagctagtgctactgggattttggattttgtgtttcagactacaactacgaattggggagagcattatgtaggaaggaaaatatggttaaccaatccaatagtaatgctattaattattagtttgtcaactagatttctcttattattgtttttctgaaaaaaataaggaaatttaaccaaatcaattcataaaagaatatttaagcagtagcaacgccgtctgtgggaatcgaacccacgaccacatggttaaaagccatgcgctctaccagctgagctaagacggctgtatgcttaatgctggcagaaagcattttctgttaacagtgccaactattatttatttattttgtgttatccaaaaatacagagcatgtattcaactcgatattaatatgacttatgagtttttccagtttatatttcaaaatatatttctagtttttctagtttttttttccttgcatcaatatctacatttttttaacatgaataattttacaacaaatatggagggagtcgttgtttattatttgcaagacgttatcacagtcactaatagagatatatgtgaacacatttttgtaacgtccccgcttcaagcctccattgggtccttacacccacggact

SEQ ID NO: 403260 - DNA, 543 bp, Cannabis indica
taccgttttattggtcatattctcattatgtggattaagaactctaattttgataaattatatgaggttatattttgtactttgattataaaagagagtacttatcaattaaaattattttggagttatatttagttaatgtgtaataaaaagtgatagttttcaacttatcccaaagaggaaattacattgtatacccattttattttatttattttaatttttatctccattttcatattctttaagatatactcacttttatagatgatatctctattagattccttaagttaatgtaaatcatatgttagacttaagtaaatagttggggtatattgggcaacctattcctaaaagtaagtatattttaataaaatataatatgaaagtatttttgattaatgaatataaaaaaatgatatttttcaacgaattcctaaacaaagcaaggccaaaccaaaagacaaagtcttaagtggaaacaagaggttccacctccccagggaatgaaaaaacaaaaaaagaatgagcagcagtcca

SEQ ID NO: 403261 - DNA, 662 bp, Cannabis indica
tgtgacttagggccttcgattacatgcagctatttccactatggttgaccggcgcacctaaactcaaaattaaggtaagactagtataacacacatacatatgcacatgttatttttatgtttggcagatgtatgacatatccgttaaaatgatagttagtgtatatacgattgcctcttgatatcgtgaatgtatgtgtttggcaatttagaaggtatgaaccaatgctaccaatactagtatatgccagattattgagtgcatgtggtattatggttggttatactttcgaaagcatgaactagtgctaccaacactaaaacactgaagtactgagtgcatgtggtattatggctagttgtacttatagtatggagtaatgctaccaacactagtacgattaaagtactaatgcatgtggtattatggtcaattatactatggtcaagaatgtttgagactcaactatacatgtttgcattgtttatgacttgttgataggtgtatgggcacttagtcgtaggttagttatatatttacgttttatgcttttctcactgagtctgttaactcacagatgttatgttatgtgcaggtaaaggaaaagctgttcttgaacggcagtgagttttgagctggatgaagattgtatatatcgaga

SEQ ID NO: 403262 - DNA, 725 bp, Cannabis indica
ctatttctagtatcaaatctaaacgtatacaattttcatcaaggagaatataaccatccttttatatattttgctattcgttttaaatgggataaattgacaaggtattaaaataagactaaatatctcttttaaattaatgcttttaaaaaatttttcttcctcttttaaaatctattatacatatttttttaaatcattctaataattttatccctattacttcatgataatttctatttctctaattaaaattttgctcaaactttttcacaaatctacacatctataacacaaatgtattatttttaaaattattatatttaattatgtgagagtgtgaggataatttaagttcaatactcataaaaaaaaatatctttaaattaaattttatttaaagatgaatttgattaatgtaataaaaaaaaaaaaactctcaataaaacgagtataacattctttttctgtagtttggtatctgacattgattatatatatttttatatttttatatatatatacataaaatacattaacgcgtttggttgggtaggaatgaaaatataagaataagaatgagaatgggaatgggaagtaggaatggaagtggaataaaatttaaaatgcataaaaaaattgataaaaaataattaaattttttttcttgttacattggaatggtcattccttcctttttaaaatggaatagccattccaccaaa

SEQ ID NO: 403263 - DNA, 996 bp, Cannabis indica
ccattttaataaatacttaatctcatatctatatatatatggttttatcacgaaaaaaaatcccattctaaaataataataaataatctcacaattttgtgatcaatattgattagttcttcattatttagtcttttataacaaattaattgtttgtattgtgtgtaaattttgtcatactttatgtatagtaatatttgaagaaaaaaaaaaacaacacttaaagttggtatagtattagtagaaattttttctcataaaatttctaatatgactatttaatagtggtggccactccaaataatatggtagatgatacaaaatatcgtggcaatgccaacttgaatatatggggattgacaacgacaaatatagccataaatgatagttaatggtagcagctataacactgttgaaatatatataaaaaaaaatctctcaatttagtaggatctactataaaatcttaaaagtttaatataaaatattgcagactattaatattaagataaacactctaataatttaataattaacatacattttttatataatcaataataaatagattttaataacctatatgtaatagaactaatattaataaatatattaataagttttaaaattttaacatcacatgtcatgtgtcatgtagtttagttgattctgatacttactattataaatttcttttaaaaaatttataatttttataacacaatagtatattttatattgcactcattcggtacaaataaaaaataatgaatattatattacactcactctacatgtcaaatattaaaaattaaaaaaaaaatcctttaagttttttaacgaataagaaaataatttttttattttaaattgttaattttagttcaatatataatactaggaaaattctacaatgcacccccttaaaatggatatattgatgcacccctatctgttttagcatccgaaataattttttagtcaaattttttctca

SEQ ID NO: 403264 - DNA, 965 bp, Cannabis indica
catcgtggctcagcatttctggccatgcttttgccagttttagagctggaatctctttcgttctttgggggttgggtggtggtgatgactgcttttgtttactgtttttgcctgagacaaagaatgtaccaattgagaagatggatgaggtttggaagagccactggttttggaagggctttgttggccctgctgaggattgtaagatatgaaacaatattacttttgtttaaaaaatcatccagtgctaattgatttgaataatggaaaacgcaggcataaattatacacaaattttataatgtatatgtgtgctaaaatttgtaattatatatttacatatcaatattatcattactcatttcatatagcaatgtgcaacaaaatcaaacataaaataaagatttcaacaccaatttgcttatctcggacagtgtcctattttattaaattagtgtagaattttcgcatcattctactttaatgatacaagaattagtgtgtactaaatttcacgctattaatatttaatagtattagattgtgaatcagtaccaaattgatacataaccttttgtttcttttcatttaaattattctttttaatttattttaaaaattattataaattatttttgacaataagcataattatagtataagttaattattgttggttatgtaaatagtacacaatgtgagacttttgaagaaaaacatttttatttagtattaaattattagagttgttgcatcaaataataaatttttcactatattagtgaaaaatgcacactaaaatagtgcaacccttgaaaattgtctaagcagcatctttttcttcttcaatgaaaaagctctaccattttacctacttattatctcactcaaaatttaatttattttaaattttaattagtttatttctttcttataattaattacttttttatttttttgaaaaa

SEQ ID NO: 403265 - DNA, 926 bp, Cannabis indica
attttctctttgcaccgtggactacctcattattgtattaagaattgaacatatcctgaaaactcttcccaggtcattgtagtgacgtcttgggtgagggataccaactcccaccacacgagagcgtcctcttggaactgaaacgtggcacaagtcacttgatcattttcggtgacacccataaagtctaagattctctcgatcactgccagccactgctcgaccttcataacatttggacctcccagaaaagttggaggcgcttgtttttgacatctctcatacaaaggctccatacagctgccagcaacaagttgttatactggcaccgtcgaaaccaaagcggttagcacttgctgtggaggcactataggaggaccctgattaggaccggcaaaacgggtcagacacgatgacacgactcgaaacccgcacgagagttagcaagtttgggtttgccttaaatgggttcgggtcgtgttcgggttgacacggctaacacgaaattgacccgttaatgacctatttaaagttattttggtactttaacgtgtcataaatgggttacaaacatgttgaatacttcataaacgtgttattgattgatctgtttaaacaaagtatacttataaacgggttacacgggtcgtgtcgtgtcaacccgtttataaacgggtcgtgctcgggtcgagcatgtacctgttatacatgggtctcgaaacgacacgaacacgaattgccacccctaaccctgatgtctcaccgtctaaatctcctcttcttgttggttgattcaagcttgcatttcttgcaaacctttgctcctaatcctgaagagcttgtggtggttttcctgaccacctctttgaaaccttccacgacctttaccgcgtacacatgatgttggaaattattttaccaggatc

SEQ ID NO: 403266 - DNA, 762 bp, Cannabis indica
tggagattcgaattctatagagggaggttctcaagtttctagttttttgacatagaatgaaaactagaatgacttaggttagatataatgagaaccacgttattccttatataggatttttcctagggttagatttaaattatatggcattcaaatatgataaattattggctaaattctccttaagtggccggccataagatgggtcctactaaattagaatttcgccattttatttaataattaaaattaattatcaaattaaatttttatttaacttatttattaattacttaataaagtctcttaattaacaaataaatcctaaaacctattttcttcacaattaagccattacttagtgaaaattcataaataagacagtctaattttaaaattataaatgattaattaaaacaaattaactgagtcttacaagcagtattatcttaactagtgtgggaaccatgggcctatataaccaagcttccaataagcagatctaaaatttaccaagtaaattatctaacttattatttccttcttgtgccactatagatttagaattgcactctgaattatatagaatgctttatatgttctatgatatagatacgatatgaattatccattgttctaatcacaataatcaaagatcttttatagatgatttacatcaggtagtgacaaatttaccattccaaccctcaatatattttatccttaaaacagttagcttcctataaatgatatttcagtaaa

SEQ ID NO: 403267 - DNA, 667 bp, Cannabis indica
tttcaaaatgttattacaagtccgtttctttcagccgacctacgcggcaaaatagagtctcaaaaacaccacactggtagacctcaacccgcttggtctagtatggcccggacatgtacattctccatccagctcctgcactcatggctgatcagaaatagtcttaccctttcctgcacagtagagcacctgtgagccaagcccagcaaggcagtataaaacatatcaataatatgcccatcatataataaaaatagtaatgccattaaattatgcctgtgtgacacagacctgcatgttgtgctcacatgcctttttatgtctacgtggcgtagaccttcgtgttgcgctcacacgtctatttatgtctacgtggcgtagacctaagtgttgttctcacacatctaatacaataaggccttagaatggttcctctcggttctagttaccgagtccaacctgattatgacttcaacaaataatttttaaatctcaatatattcatactcatagcatggcatagcatttatacaacttatatcactagagtaataactctagactattaaccgctcatattagggtaataaccctaatcggattacaattactcacatatatcattttcaacataagcgccaccacacatactctacgtgctaactac

SEQ ID NO: 403268 - DNA, 584 bp, Cannabis indica
cttcttcttcatcttagctcttatctcatagtcacatcaaacaaagttgttgacttttcgattgtgtttatcagtgagattcatataactttttctatttaattatttttcttttagtactttctataccatgtttgagaagcaaatgaaataccctaatatcaatttttcttatatttaacaagcttgcttatacgatacaaccttaattcttaattgatataagaagtatataattgagcatttttatttcattaagttatgtaagtttgagttggctaataattttaattaattgtatatgtttaatatcgatcacaactagctagctcaattcagctacatacacatatctatgacaccctcttgttattctcatctttagatttgtttcttgctaaaaagtttatcctttaacatcattcaatatttcattttggtctcatctttagttttgcttgtggcaaaaatattacagttgtctaaaaaaaattattttttaatcttcatgcaataaaaaaaaaatacatttttttatttaaaattacattaattactaacttttattataaattaattatgaa

SEQ ID NO: 403269 - DNA, 624 bp, Cannabis indica
ggctgggacaaagcaagggcaagaactagttttctcttccatttttctaggatttagcaagaattcaaggaggaattaatcaaggtaaccttagtcgctctctagttatggtttttctcaagttttgcttggtttcatgaagtgattttgagttttaggagctattagggttacgattgtttggcgttcgaattttatgtttaatttgagttgttttaggatcctagcagctgatattgttgattggtttaagttttatgcaactttgagctttgagttcaaagctttgagctttaatggcaagtttaatgttaatggtttgttctgtgattttctggctggaatgtatagtgtatgcccttattaggtattctggaaggtttcattgtatttggtggagaattgagcaacaaatgaagagctttgggaaaactggtgcaaactggctaaccggtttgcagtgccacaaaaaccgggtagccagttttggcagggttcgtcgggcctttcattttctaaattttcatctttgtggtgcctcggttgggtgtttccccatttccagagttagaataacctattgagagtataacagaacctagggttttggttttgggtttcccg

SEQ ID NO: 403270 - DNA, 819 bp, Cannabis indica
ttggcccttacacctcccttcaatttagcctctcacttcaattgaataaactcattctccgaatgagctcgttcagcccgtccaacactagatttcctcttcttcttcatcacggatttaggagtaaattccttgggatagagcccatacctgacaaaatgatcctcaaaggtcaactggataatattccggtcttctcccgagagccgggcaagtttttgagctctatccctaagaccaagagtaaggggagggcggtgatatgtcagaatctgctagaaccaagtgcgagtgatgcccgtgccatccactatgatgtactcatcagcaaaacgcccaatcttattgatggtcgtattgtccgtgcccgttaaccacttgaagcctggttgagagaagtagaagtaccccgacctgcattgcttggggtggacttcaagtcaaagaaccaggaaacctcgtgaggagagggcataccccatttctaggaggcgtagaggacgaagagggcagatagatacttgatgcccttaggagtgaactgggtcgggcagaggccgaagaagtcagccatatcttgaagtattgatgcaaaggcagcaatgccccttgctgaccatgggcacccgaccaggcgcacatccccttttcagggtttgtggcacgattgttgtaggcgggaatgtagcaatccaagtcgcctaggtatccgtcctagtcgagagtttgaaggcgcgcctcagtaaccttggacagagggcttacccacctggcgcccaaggcaccttgccttctatgaggaaccgcagtagcaagttc

SEQ ID NO: 403271 - DNA, 553 bp, Cannabis indica
tttattatttagattttaataaagtaaaatatttatatttaaataatatcctaaccgattatgttacaaatattattttaaaattaaacatttaactaaatatctaataaccaaatgagataatctttcaatcatttgagggaatatcttaaccgcatgaagagaatctctcaaccatctcaactaaattaaatatttataactaaattttaaatttaaataaatatttaattttaaattaatcaaaaattaaacccaatggggtccatcctttatggtaggtgcctacacgatttttacacagtataggtgttattacctaggggtgaaaatcggtcggtaatggtcggtttttaaaattttataaccgaccggtcggttacggtttttattttacgaaaattgtaaccgaccgtttagaaattataaccgtataaaaccgatcgtacggtttttagcggttttcggtttggcggttttaggcggttttgggcggtttttggcagtttttggcggttttttagttaaactatttttatttcaaaaaccgaaa

SEQ ID NO: 403272 - DNA, 654 bp, Cannabis indica
gctgaattggactagattcctcaactagcatcggagcatatttagcaagtttagagaaagtctaaccttagctaaacttacatacttggttatcatgtctacaaggttctcttttgttccaattttcttcacaaacacctcattttctgcaataatatctctgatgaagtgcaacttgatatctatatatttagatctttcatggaacattaaatttctcgttaagtgcagtgcattttagttgtcgcagtgcattgttatgtcatctaaattgaaccttagttccttagtaaaacccttgagctgaattgcctcttttatggcctctattgcagccatatatttacactacaacaataccaataattaggggcagaagagtctgccggtattaaagtccaaatccgctggtatttgctattaccggcagggttccgccggtattgccccgccggtaatactcagtcgctattaatcattaatagcggcagactgacacatcctccgctattaattattaataccggcggaccattagcggggggcccaccggtatttaattcgtcaaattcaattgctgacacattaatagcggcgggtccccgctggtattaatgtttttatataaaaaataataaattataaatatattta

SEQ ID NO: 403273 - DNA, 987 bp, Cannabis indica
gaagtgcaaagtttaactggtcgaatcgctgcagtcagtagatttgtttcaaaatcaacagacaagtgtggtccattcttcaacatccaatggggaaataagcaatttgagtggatggaagaatgtgaaaaagccttttaggagctaaaaatgcatcttgcaaagcctcccatactctcaaaacctctagacggagaagagtttgggatatacttagctgtcacggaacacgctgtgagtgccgtgctgattagagaagaaaataacatacaacacccggtctattacattagtaaaaaactcattgaggctgaagggcggtacccattgatagagaaactcgcttactgcctgattttagcaacaagaaagttaaggccctattttcaagctcatcctgtttgggtgtacactgaccaaccattacgctaaatattgcaaaagctggacgcctctggacggttactcaagtgggcagtggagctgggtcagtacgaaatttccttccaaccccgaacaacaatcaaagttaggccctaacagactttgtggtagaatgcacaggcaaagaagaaagcatatcagaaggcaacctcgagccggtgcaaacacctcagccaagtaacagtgaagacaagccgacttggagaatacatgtggacgggtcggctacagatcaactatctggtgtaagaattgcccttgtcatgcctggggggcaacacctacacgctacagttaagtttggattcaaggcatctaataacaaagccgagtatgaagccttaatcgatggcgtaagattagcccgggagatgaaagccgagcacattgaaatctgtagtgattcacagctggtgctaaattgtttatttggagaatacgaggctcggggagaaaagatgatagcatatctgagcaaaatacatgatctgctcgcacaattcaaaagctacggtctcagacaaattccaagggaagaaaaca

SEQ ID NO: 403274 - DNA, 1051 bp, Cannabis indica
tgattgtcaatggtttgctgacataggaaccactcaccatgtcacctcggataacactcagttagctcagtctctcccttacaatggcactgagagtttggctgttggaaacggtaagaaactcatgatttctcatacaggttcaaccttcttgccctactcttcccttgctttaaaatctgttcttcatgttccccaaattactgagaacttagttagtatatccaagttaactgatgataacaatgttttccttgaatttcacaaatattgttgttttgtgaaggacaagcaaacaggggttgtgcttctcaaagggaaacgtaaacatggtatatacacacttggtgatactccttgttcttctactgcttctgcaaaatgtcttcttgctagttcagagatgtattcatctcatatgacatgtacttcccctagctgttgtaataatgagatttctaaatctctacattgctgtaattttcatcataataataaaagtacatgttcttattcaagttcaccatctatctttattacttacaaagtaaatgatgttaataattggcaccaaaaattaggacatccatccaaagcaattcttagtaatctgttgtccaaattgtcccactcgggtaatatccaaaatttgcaattttgcaatgcatgtcagttaggtaaaagtcacactttgccattttcttcgtccaatagtcatgcttcaagaacctttagaattaatccacactgatttatggggaccatcccacataacatcgaaagaagggtatagatattacatcattcttgtggataattttagtaggttctcttggatttatcctctaacagtcaaatctcaggcctttgatatgtttattcggttcaaaagcatggtggaaaaacaatttgaattaccgattaaggttgtgcaagctgatggaggtggtgagtacaagccttttgcaaaattcctcacagaccaaggaatactgtttagtcatccatgtcctcatactcatgctcaaaatggaagagtggagagaaagca

SEQ ID NO: 403275 - DNA, 637 bp, Cannabis indica
ttggatcaacatttaaatgacggtagataatattagggttaattcctatcatatctccatggctccaagcaaactgatcttggtttgccttcaaaaagcctattagctactatttgagctgctcgtccaggttcttcccaatgtatacacattttgtgggatttcctgggtcgagaataacctcttccaattctttgattggttttagcaggtttctttcatcttaaactcggggatcaagatcttcgtctttcctcttgttttcttctgccaagatcgtcatcaactgatgaccaacttttctatgttgtaactctatgcaattgcaatcgcgagcaaacatctagcaccactcccacgccatctggcgtttggaatttcaaggattggttcttgatcgaactgactgcccctagtccaatcagtgctggaccaccaaaaaaaatgttataagcttagggcaggtcaacgactaagaagtcttgcataacagtagcagatagaggtgcctcgcctaaagttaatgcgagctcaattatgccaaggctagcgatgctgtctccggtgaatctggaaaggttcaccatacaaggtcttaatttggctttttcgaaccccattttctttacagtctcct

SEQ ID NO: 403276 - DNA, 721 bp, Cannabis indica
gacaaaagagtcacatcgtcatttggtgtctgtctactgtttggtttgggacaatcaaatcatatatcactttccacgtgtgaacttcatataaatttaatttcaaaaaataaaaacaagaacaaaaattagtgaggtacaactcatcaaactccacttataattacttctttttcatttttttacttttttttttttagaataaaattcatttttttactttcaaccatggaaaatgaatacaatcgaatcccctttaacaaaaaaaaaataagagagatttgtaaaactataaagtaaaaacaaatgaaaatttatgtagcatatctcctaaaacatttggtaaattttgttattttaaaaaaaaaattatcaatatacggtaccggttgtggaaattatattctaatagggatatttttttttttaaattaaagaatatgggtaaatagtggcataagtacctaaaattttatctttgtaagcgatataaatcttaatatttatttttagcggctataagtacctaatgtatatgtaaaactataattttctttcagtttcgtcagtacagactctattttgaattttattaaatgaacatttagaagtaactgacactacatatttccatctagacccaatgagtcaagaatttaggccttatatgtaccatgtttaagacaataacagagtgtgtactaacaaaagttaaaaaaaa

SEQ ID NO: 403277 - DNA, 588 bp, Cannabis indica
agaaagtaaaaaaaaatagttgcttaaactcattatatatattcttaactaagttataatgtaatgacaaaaaattaatttaaaagaactaagaagtaatatacatatatgtattttaatagataatatattacaacttaaaattagaaataattatttaagagtaattaatgaaaataagtaatcaaaaattagtttatgatattttgttaaatttaaagttcaattagttacttactttaataatataaagatattaaatattatttttattttaattattctttttagttatatatatatatatatttatgttaagcctgattaatagtataatttgatttattttattttaaaataataaaattgaaaaaaagaaagaaaatcaataatcaaaataaaataaatatatgatttctccttttggccttattatttcagagtgtaagtgttaattgtcgaggttgataatgttttttttcgtaattttgttaaacgatctgttaataagattgcatattttttgatgtgatcttcttttattgaggctgatcgtacttttagtagtgtttctttacctactgtaat

SEQ ID NO: 403278 - DNA, 947 bp, Cannabis indica
attatatatacaatagtttttttaacacaactttcaaatctcaacgtttgttcggtatatatataaattaataaacatctcgcacttcgcagcggatatataaaatattttaataatatagataaaaaacaaattgtatattttaattaataataattacttaataaaattatattaaaatttaaactttactattaaaaattttgtgacataaatacttaaaatattaaatttgttactaataaataccgaattttgaaaaaatagtaacataaatcttcatttatagtttaatttttattttgatgtgtgtttttaatgttggagttttagtattttactgaggttctaatgtttcaatttgtgtttatgagatctgtttttatttatttatttatttttataaattttaagaacttgaaatttaatgttgtttctattgattattggaattgaaaatttgatttttcacacggaaattaaaatttaccttttcgtttcattgattgaaaaatattagtagaaagtttatggaatgagaattttgaatatatgaaaataacatttgaatcgagaattaaattttattcttaatctccttacaaaaaaaagtttattgttaatctgtaaagataatatggggggaagaatatggaaaaatttatttttatttcatttaatatgtatataatattttttttgaataatatgaatttattttaattttttttttattttttaaaattattttttctaaaagaattattagtttggctaatactatatttaaatgtggcactttattgattaactaataaaatgataaattgagtgttaaatttaaaaatttgagaatatcaatagaaactacaatgatgacataaactttatatgattggaatataaaaataatgcattatgaaaaaatttgattcataatctcacac

SEQ ID NO: 403279 - DNA, 656 bp, Cannabis indica
ttagaaatcttatcagtaatgatattatttttggagctaaacccttcctaatctttagtcttgtagctagagaagtgggatcaacctccacttcctctaactcttctacaggtctaaagttgtctgcatataaagcaaggatctatgtctatgtccccgctttgggtcggacttcattgccctttgttgggcttttcttctctaactctaacattcaaactccatggctgaattttatattgtaatggtggttattaagttacctatgagctaaactttttatggtttgaattattgagaaccctatgttttagtttagtaattttcttatgcaaatatttagtaaaaattctcatgttcattcaagtgtgctttatgttagtttcttgatattgattggccaccagtagcttgttattgagttatatttaattctggaaaggttaaatgtaatgaacttagcttggatgacacaagatcttaatcttattagattagatttgagataacataggaatatgttatatcctcgtgtaacatttgagagttatgcttgtatgtattcttgagcttgattggaacaggaatatgtttgaataggtctgaaaattgatagcataaaatttggaagagttttgtgcactttattggagttc

SEQ ID NO: 403280 - DNA, 676 bp, Cannabis indica
acacttcgtttatttctttgttggagcagccaggcctatggaaagtcttctggccactcttgccaaggcatatagccctgacgcctctctgtctccggctccatcccagttggtgactcccgggaggtcctcatccagtgcccctttaggcacgatcgtcttgatagatgaggagggggaagtcgaggaagatgaggtagaggttgcgaccacccttgagctcaagcgaaagggcaagatggctgtgactgagccttctaagaggacccggagtggggacactccggtagtgaacaacgactccgggattcctcccgaagcggaggagtatactgtccctcatggcattgtgatgaccccggttcctgcggatgaggagaggcaaatgctctgagttgccaagcacaactacaccctggacgagtacaatcgggggcacgctgaggtggaggccttaaagaagattctgcgggaagagcagcagaacactttgcacgaggacgccttccaaaatccttgggacctgaacatggaccctttgacggattggttcaactgctttgtcgggcctaccctagctccctttgcctcggagatgaccagccagttcgtctcccacctgactcagttcccagccaagagatatgcggcttgtgcctccttgaactctgtttac

SEQ ID NO: 403281 - DNA, 1081 bp, Cannabis indica
agaagaagaagaagaagaatagttgtcaagggttacagaagaaaagaaaaagaatattatttttttatttttaaattatttttctttttaaataagaaattatttttaaaatttaattaattttccaatatttaaaataattaaattatgtgtgttgacctcgcttttagccaacgacaacgagtatgatttagtaagcgataagtgatttataacaatcgatatataataaagcaatttaaagacacaagaattttatagaggttcagccccgagcagttcggtaatagcctaatcctcgttattgtattgacttaaaaacaaggagaaatgttccttttcttatagctcttacaacagtatctctgaatatgtattcctagataatttctttagggtatagtctcgactaaactgtttgcgaccttttgcccagtgaacatgcatcactatttatagggctatatgcttggagaggaagtctttcccctctcgttacaatggatataaacagaaagatcgtgggattaatgctgagtacaaagatcgtgggattgatgcagaatacactgattgtgggatcatgtgtatgccatatccctgtaatctgaaacctaagttataggaatttcgttgataactcataatgcaaaagctgaattcgctaagtattggttgccctgtgcggattgcttattgctttgctctgggcatgccagcgaagcatcctgctcagactgttccatctgagcagatactccaagtggattacacgtgtcaccattatgcgatgccacgtcagagtgcaaaaattgggataacatttgcccccaagtctatacgggacttccgaagttgcgtgtagacttcatcccagctgcttctgcctttggatggggacacgtgtcaagcgcgactgttcgagactcgatgtgaggctaactgggcatcccttcagtttttggctaataaatgctctgacaattaatatttcgaaatctgattttctctcaccacggctgacggctgcaattgattattttttatttcccatatttgcttttaaggagggaaattgagg

SEQ ID NO: 403282 - DNA, 1236 bp, Cannabis indica
tttgaggtcactgtgttccacaataaacacacatgtaatctagattctagacatgttgataatcgtcgagcaacattgtgggttgttggccaccttattaagggaaagtacgtattagatggaactaagtacaagaaaaaagacatacatatggatatatttgacgaatatagaatcaagattagttatgaaaagatatggaggtggagggagaaggcacttacatatgttaggggtacgccaacacaatctcatacgaagttacctggttacttgtacatgctagaatagaagaatccatgtactattagagagacacacaaaatttatagtagttcactccccatgttgcgatggtagtggagctacgtctacttcgattttttatttctcacgagaattacagaaaaaagctaagtgtttaagctttagtttctagagagagaaactaaagagagcagttttgaccttatgggtagttttatgaatgtaaaaaatgagcttatagagctctccttttataggtgaaggaggcccacaaaaataggagaaaattacaaataagatatttttgactattgatgatgatctaacggtaaaaattagctcttgttggtaacttggagcttattttcataactcccttgatgttgaattttgacgacgatagcttcaaaattacgtctggtgtgtgagacatgacttcatagagcatttaattagcttcgaatgaatcacgtcaattagatcaaagttgagtgagttatggttgttttactgaaggaagttcatgacccagccaccagattgacatccaacgaccaagttgacatcccaatgaccatgttgacatatgacctcaacctggatgctgggtaagtgtaaaagcatccaaggtatgtactttaagatgcctaagtgatattttgacatcacttagcctgattctgtgttctggcaaagttggtcaccagttctaggagatgttgctgttttgtggaaatgacagactcgaaactcttcatttttgagtgaactggaaatgaaaaaaatgcaaagttgtgaatttgatttttctgacttcatggatctttgtcattgtgaaaaactagatggacggtcgaaaatgcatcagattcagataagtagaacccagcgcaccaagccatttgtcaacctgggcgctgggtacttactcctgagctcccgagctcccaagatcttatttttcatact

SEQ ID NO: 403283 - DNA, 500 bp, Cannabis indica
aagaacgaaaggaggccatgttgaaaagtgatggatactagctcttttatatttttctacctttgtaggacttactgtgcaaaggccaccattgaagtgtgatgggtggccattactgaagggtgatgggtactagctcttttatggattactgcacgatgaaacgttaggacgaaccgctatacaaattttgctagtgagagcacttatcgagatgttctctattccagttatttagtagaagagccaactccaggttctcattggacttcgccaggcttgtatgctaccttttcttatttatcttataattatgtgtcaaccaacctttttcaatttggtccaaacttgcttgttgtaggatcattgttgtcaaggaatattctttagagcaccaagtctcttacggagaatttcctctcttttgactttttttgctgaggcacctggcaacattttactggcaaacataccgttttaagttggcttggtctcttctt

SEQ ID NO: 403284 - DNA, 849 bp, Cannabis indica
tgactaaattataatgatatttttaatttaaattttgattgttttgttttaattgttcattttaccaatttaattgggtaagattgagttaatcactcagtgattcaatggaaagaagaatgagtaatatatttataagttacaagtcttaacattaatcacatttttaaactatgcgagacttttttcaaaaaataaaaataaaaactctataatgaatatccatattatatagaaatataaaaatacaaataatgaaaggagaataaaaatattcaaaatattagaaacaatttaattgttttttcattcatttaaccaaatatcaaagatgttttgacatcataaaaggtatacttaatgaggtaagattgaattaatcaatcacccatacagcaaaaaaagaatgggtgatatattttaatgaaactttcataaggtaatgtaaaatcactacaacatatatataagtaatcattacgagttttatattttatatacacgaataaaataattatattattctccaaaatatgtacactcttcaggagactattatgtttatcaaactttatatttctccaagaatcactatcatcaattcaataatgtgtataatttaaaaggtacatgacaacttcatcatgttgttgtaatggtcaaatagatataaccataatatagcattcatttttcctcgtaactttctaacaagtcgtctaatttattaacatactattcaacaatccaattatcatgacttgtcacttttataacttggtaaaaactatacatctaggtacatataaagatattttactactccaagtagcaattatatgtaagact

SEQ ID NO: 403285 - DNA, 698 bp, Cannabis indica
cctctccctctgccttggaaggattgcacggacgagcatcatccaactcctcaatctcctggacctcaacgtccccctcacgatcctcctccatcaggacggccgaatccagttcgacgttgggtagggtggcaagccgagccacttgaggatcagaagcgtcgaccagacgcgtggttttctttgtacaagccatcatcctatggctcggtacaaggtcagaagagtttccctcgctagaaggaggactagcacgaagacgaggatgatcttcgtgcagaagttgaagcagatcctggtcgatctgatgcccgagttcccaagactcaccagggttcatctacaaaagacaacacacaagatgagtgttggacggagtatctagcgaaaaacaagcaaatatgccgaccaggagtactcaacagattaaagaacagctatgtctaaagaaaagtcagaactcaagaagtcaaaaagttttcttgagttagggcacaaaagttcatgaagcttagaataagcaagatgaaagacagacgcaatgtggttcagagacaggctctatggccgtaaacccacatgaagacatgataaagaagagttgcagaagtttctaaatcgtagggtttcctaagtgttttttctacggcatagttgcattcaaagtgtaaacatgcaaagaaaagcataaaggaaat

SEQ ID NO: 403286 - DNA, 1091 bp, Cannabis indica
ttcaagttgttcatatagtcaatagtttatattgaaagggattcatttcatatatacaaatgtgtatatgatttcttattccattcttttgaaatcttaaaacagaggtagtaatagtatcatatataatcatatagcaatataatatatttatagcttactagtgtgttagtagaatacaagaggtttaggaatcatgaatggattagtattgaacattgaattatagtagaagaaatacaaagaaatataagaaaataaaaatagcaaaataagaatattgtgaggatagctaatatagatgtacccatctcattgacatggtggtctcttggccttgtcttacctttggattttagaatatcctcttattttattgagattagtagtggtgatcttgtctatttgtgttattttaattttctttattttttgtgctttgttgagctatgtttttattctagtttattttttcaagtttgtgactttgttaattctcaggtctttagtatttaaatgaaaatctaggtgatttattttatcatttgaccaatgtcttgatgaattttaaggtgatttattcaaattggttaggcactaaaactatagagagcaattttagaagagtttcataatttatatatttttaagagtaatttatgtattatgactcattattttactttaattagatggagaatgaaaaaacagttgtactaagagtgacataccacgaggtaaaacaatatagaattctgagagtttgaattttttcttagaattctgtatgaaagaggttgatgatggacatcgtcctactacttatttagataaaattggatatctaaacttgattacaaatatgaagaaagcaactgaaagagattacactaaacaacagctgaaaaataagtgggatggattaaaaaatgaatggaagctttggaaacaactcaagggaaaagaaattggtttaggatggaataaacaaaagaatacaattgatgcaactgaagattggtggaatagtaaattacaggtacattataatcttgttagggctcgtttggaacgtcgtattaggtcgtatt

SEQ ID NO: 403287 - DNA, 612 bp, Cannabis indica
aatgtatggccatcttttttcacatatattattatattattgagtcggctttccttttctttgttgtgttcattattgatagtgcctagtggctgagctgactcacatgattatgaaagaactaaactataaaatgaaaatgcttaggatcactgacttaactattttgattgatttattttaatattagattttatatattttaattaataaattatatgaaaaattattaattaattataccgtaccagattagtatagtgttaagcataataaaaaagaaagaaagaaagtagaagaaaaaaaaaataccaaaaagtctctctttttagagtgtttacttgtctctcctctgtgagtgtcctgtgattgtttgtgtttgtctcctgcgatctgattttctccctgtccctgtccctgtccctgtcccatggcctccagtagcacaccattgaatgagatagaagaaggatggaaaaatatccagcttgaagaagaagaagcagaggaaactttctataaagaaatagaggccgacgatgatcagcacactgacaatccatggtgtctcgttgggcggctgttaactggaaagatctctgattttcgtat

SEQ ID NO: 403288 - DNA, 799 bp, Cannabis indica
attaaaaattttaaaaagaatctatcgatttaaaaattaattatatttataaaaatttatttagatattaaaaatttaattttatggaacaaacttatttttttctctaaaaatcaaaatttattaaagtaaatatatatcatattttgaagtttaatttatatttttattgtattttaaataatttttctttaatttttaagatattagtttgtataagtttatttttttttcttcacaaatttttagcttgtttaaaatatttattatatttttaataatttttatttgactttttaagatatgtgtttatgaataaaataaattttaatataatttttataaaataatttttttaagtaaacttttttaatatatactttttaattttttaagaattaatagaaaattataaatgtgatcataagcttagcttaatggttccacacttttccttataaaaagaggaggtccaagttcgaaactttcctccctcaatatctaaaagaatggaaaattataattttaaaaattaatttttttcaataaaaggaggttaaatttagtatcggtcaaagttcaaaggtacaaaatattaattattaactctaaaagaaacaaaatttatagaagaaatataattatgtatctattatattttgagagttttttaataagttgttaatgtaatttaaaataaataatattaattatatttataattattaaataaattaaattttattttaaaataaattaattaactaaaatttctaacaaatagtgctacgtatataat

SEQ ID NO: 403289 - DNA, 751 bp, Cannabis indica
gtatctcaaaaataaaggataattacataaaatactattttttgtaaaattttaatatttttaagttctaatttttttttttacctttttacggtgctctaataaaaataacatgaaaataacaaacaaaaaaattacataaaagtaacagaaaaataagaataaaataatatcaaaacaacaacaaattaacaagagtacaacataaaaatacatctaaacactgtattttctgtaaataaaattataaaaatcgtaaaaatatttaaaattctgtaaaagtataattttgtaatttttttaaaattatcccttaaaaataaattaggtatttttttttttaagaaaatgattatattttttaataaataatagttaaaagataaaatatagtatttttaaaaaaataaattttgaacttttttggtaaaaagttttttgggtttgggtgtggggatgtgagcttaggcccttactgcctcaccctcagccggtgttgtaaatcaacacgaatttttttaacgttttatactcactcatacgttttttgagaaactaaaaaatgtgcgagtgaggacatcataacgctggaaatattcgtgttattttgcaagattagtcattatttcaaaaagcaactaaagtgacatacttatatctttatatatataaaaagtgtctatctaacggcaattgttggtttaacgattttttttttatttagccttacacgattaacttaacagactgt

SEQ ID NO: 403290 - DNA, 626 bp, Cannabis indica
ggatcccctttctcccaagagatcaatgtcttagagtttcctcacaagtttaagatgccgacctggatgatgtataatggaaaagagcatcccttatcacatcttaagtattttgaaatgcaaatggacctccaaggagtataaggagatgtatgttgaagagtttttcttgtcacgctctaagaagccgcccagcaagggtatttcaagttgacacccggaaggttcaactcttggaaggttttctcctcggaattcagtgcacaattctcttcttctcgccaactcccactgcatttagaggaccttgtcaaagtgaagcaaaggttaggagaacctctccacgcttacatcagcagatttatgacggagggaatgaaggttgcacggttgatcgaagaagggaaattgaccgcgatactagggggcatcgaagttctcggagaactttggaaggatatcaagagagacggaccggtagattctatgagtgacttccttgatcgtgcagatggcttcatcaagcttgaagaagccattcagcgagaaaaagttgagcttaaacctgggcagccaaaagctccctctgctagaacatccatccagcccccttagtacccaagcaa

SEQ ID NO: 403291 - DNA, 567 bp, Cannabis indica
taacacaggatcactttaaatactagctagtgtaattataaaaaaaatatgaaaaaaattgagtaattttatttttatgatttttaaagtataagtttgtaaaaatatagttttttttttacaaaaaaaaaaaattctgggaaattataaaaaaaaaaggttaaaaaaaaatatgtaaaaaaacaacataaaatacctggtgacacttttatgataatcggttacctctctagttacaatagggaaatttacatgatttactgactttttccaatttattacaaaaatactgtcaggtggtatttttttcttttttactgtgtatatttttggattttatacggcaatatactgctttttttgtactaaagttttttttttttttttacttacactttatagtatttttccacatcaaaatttaaagtttttgttttaataaaaaggctggttgtgacgtgggctgtcacaaaagtgacaagttctctactttttttttattattttaatggatttaaaaattattctttttaatttttaattatttaataattattacataaatct

SEQ ID NO: 403292 - DNA, 562 bp, Cannabis indica
cgattatgtgagtcatagaattgggttaagaagttgtacttagttgaattagttgttgtgatcaagttttagaatgagattttgagccttatgtttgagaacatagagtttcaatggtagaatttgatcctttgtgttaaaatgtgttttaagttatagaatatgttgtattgatgatataaaactgctatggaaagtttggtagtaataaaagttttgagtaggttttgagagctttaaattcataaatttttgagcaaaatttgttcagacaatcgaaagtctggttggtatagggctatatataacaattagaagtggggttgcacagttttaggaaaggctaactattgtattttagctatataactttttattgcgatgtctattttggacgttctatatatgattagaaagcttgtgaaaagctctacaacatagtacatacttaagagccaaaatatgtattttattttaaggtattttcaccatgtagtttgataaaaaaaaaaaaaaaccctaagattgtatacatgtattagagagtgttttagaatagaca

SEQ ID NO: 403293 - DNA, 860 bp, Cannabis indica
tcctcttcacatatactcgggtcgcttaagacctcaattggtaccaaattcaacttgtcgagattgtattgggatgccagttttgctaacgcatcgacattagagttttgttctcttggaatttgttcaattttaaaataataaaacttttccaagtttttccaaaccttctctaaatattttgctatttttaagccttttgcttggtattctcccaagacttgatttacaatcaattgtgagtcgctaaagcacataagatttttgaccttcaatgcctcagccattctcaaacttgccaacaaggccttataatctgcctcattattcgaagtatcaaattggaatcttaatgcgtagtggaatctgaagttgtcaggcaacattattatgactcctacccccaaccccattctcatttgtaagccccactctacatataaattccaagtttctgcattgtgttcaacatctgggtcttcctttgagtttatcccttcaattagaaagtcagcaaaagcttgacctttaattgatgttcttaggtggtaggttacatcaaattgtcccaactcgattgaccactttatcaatcttcctgaagcaccaggttttgataaaacttgtcttagtggttaatttgttaggactttaataggatgcgcctaaaaatatggccataatttgcgagatgcatgtattaggcataatgcaagtttttcaagagggaaatatcttgattctgccctagtaaccttttattaacatagtaaacatgttgctggtgctttccctcttctcgtactaaggcaacaccaatggcatgctctgagacagctagataaaggtataaagtttct

SEQ ID NO: 403294 - DNA, 568 bp, Cannabis indica
gatgtatagtataatataaaaatttgaaaaaaaataataaataaataaagtatattaacgacatttgaaagcataccattttaataaaataataaattgaattgtgataataagttaaaaaataaataaaatatatggtgtaattttggagatatatataatctgcctagttgctgtaaaataatgtaattatgtaagtacacaacaaactacctaacattaggttagggattgcatgcatcaaccttgggtttttaatatttaacttttttatttgcaatttagtttattttgttattttttttttatatttatacttttattttgtaaataattttatatttatactctcttggcctttattattttatttttataaattaatttgtattatatcttaattttatgtctatttctcttttggacaaaaattcttaagttcgcccttgaccatttaagctaccctctctttagaaagaaaaaggatgtcattctaaaaatttgcatggatgatatgttatggtattgatgttattcatttttttaataaaaaaattgaagtaaaaaa

SEQ ID NO: 403295 - DNA, 709 bp, Cannabis indica
tgtttttagaatctatagattgacacccttttacaagaactatattggtatttttgcatttcttggggattctatttggtgtgttcttgatctatgggcttcgttttaattgcaagtttgtattgatattaatttgatgattgtgaatggttaccaaacaaacttctcctcctccattagtggattcatttatttctattggatttttgcatttcttgggattcatttgttaagtttgtttggtattcatttcttgcaattttgctacatctggttgtagtggtctccattagtggaagcaatatcttgagtaacgtctccaaacagcccttcatgagagatgttaactttttcgacatgacatttaaattttaaggctcattcatttttattgcagggcattgaattttcataggttatgtttggttggggttgaatgagtggaatagaatggaaaagaattgagttttattaaaattttatttggtttcaatttccaacattgcaatgctattctgatttttgtaccatttagctggactgactattcttctctgaaactacaaaagtctattccaacgaccatatatattttggttttcttttatttgctatatattcatattctatgttacttgtctataccatagttgaaatcaaagtatttagtaattactacagtttttttttaaacattatagaggattag

SEQ ID NO: 403296 - DNA, 717 bp, Cannabis indica
aactgcagtccaatgttcctctcctgaattttgctgatacctgctcacaatcctacaccatagaaaatgtcaggtctagtgcataacattgcatacattagacttacaactgctgaggcataaggaacccttcccattgttgggttttgtgccctaaataaaacccatttcaatataatcaaatttactagttaataaagatcagaaataacattttatgttgcatggttcacatgatttatttcatgattataaattctattaagaccagaacatatgtatttgttaatgattatagtgttgtcaactctaaaaaaatgaattttaaaataatttacataaataaaattatgattttaatttacatattaaaataaaattaggatgcttaaattttattactgtaatatattattattattataaataaattttatataaattataatttaaaaataaattttttaatttattatataattttattactgtaattttatataaatatatactaatatataaattatttgaaatatatataaattttattattattattttatttacaccccaaaaatttctaaagacaccccattttaataatttttattttatataaaatttatatctttaattgtactaaatttttttaacttttttcttccaattcattttcttaaaaaaatatacccatcaaacaaaaataagttatatttt

SEQ ID NO: 403297 - DNA, 533 bp, Cannabis indica
cttctttattgttaaaagattaaagatctaagcctatgaaaacaaaaccgactactccaagagttataatcttattttattttttccttgtaacttatttatgagacaattagtatgggaatttatccaacagatatattggatgagaataggatttataatacacatcctagaaaattggtttttttttttaatttttacattttcattttaacacctactactacctttctatttcttttccctaaagtctaatattttgtattgacataggttcatcgcttccggttacttgaaggtcatattagagaagcaatagctttattggataaggtaaaagtattgagtactgaggagatcaaagcaatacgggatgagtgagccgaatttgtgaagcctttgattattgattgaatacaaggttacaacttcttgttatgatacatgagaatgaagttttatgattgttgctattaacttttttgcattatgtaattagtttatagttagtttttatgatacatggaatataa

SEQ ID NO: 403298 - DNA, 734 bp, Cannabis indica
tctctctctctctctctcatatgcccactactcttctcatacttaagattttccaactctgattcctacaatgtaacctttagagagctattttatatcccatcactatagtgttctgagtagtattatctcttagtatcaatacaactaaaatggaagtaggtcattacccgctgactaagggagtcgaacctctataaaattatgcgttcatttactttgttgttcttattatgtaacatgtggcaagcatcaacattaaatatgactccactgtcggttggccaaatctgaggtcaatagtttccttaaaattcttagctaaaaattataattttaaaataatttttcttatttaatgtgacagttagagccccgtgatttggggaaagattggtaactgtacaatcccacattgcttagggaggatcatttgtgatgattttgagattgtgtaggtatgagactacatagttgaagatgacttaaatgatttgattggtactacctatatctacaaggtagatctattttttttggtagcctatcacgaaagaactccacgattaagcatgcttgacctggggtaatttcaagatgggtgacttataggaaagctttcctaagaagcgtgtgagtgaggagaaagcatgctggaaacactcatgttggtctgtagggtcagtcatcattccatgaaacaactagagtgacgtactcgtgtataagagcca

SEQ ID NO: 403299 - DNA, 642 bp, Cannabis indica
gtcctctggaattcttccctctaagacttcgggattgttatcgcgacattggtgatttatgcttatctttgcctttctccaactctgccagagaattctcaatcctcttatgcggttctgccatggcaaagaactcgaccagcgattctagtcttcgagcttgtagttccttccagaaatcggttcttggcaggacacctgttattaacatacatactagagaagactcgggagccttctcaacctttgttacttcagcattaaaacgcttaaaatagtcctgtaaagactcaccaggttcttgtttgatgttagccagagtggtatagggcgacctataggtcatcatggcttggaaatgcgtgaggaacaggtcgacaaaggtctcccatttcgagatagaagcctcaggcaattgactgaaccaatcgtgggcattctcttccaatgttgccgcaagaatgcgatattttgcgagctgaggtacctgatccacttccataatagtattgaatttctctaaatagttaatgggattagaggtacctttgtattttagggattcggataaccggaatcccttggggagtcgagcttgctgcacttctgcagtaaaaaagagaggtcccatgcagcttgtat

SEQ ID NO: 403300 - DNA, 543 bp, Cannabis indica
gagacacgagataaccagaatttgcgcttcttgaatttagcatagagtgtatgatcttgtaaccgttgtaaaaccgctctgagatgcaactcatgctcttcttctgactcggagtacaccaaaatgtcatcaataaacataatcacacacctatccaggtagtccttgaacacccaattcattagatccatgaatgctgtcggggcattagtgagtccaaaagacatcacaaggaattcatagtgtccatactgagtacggaacgcactttttgggatatcttcctctagaattctcaactgataatagcctgagtgaagatcgatcttagagaagatcatcttcccctgtagttgatcaaacagatcatcaattcgaggtaaaggatatttgttcttgatagtaagcttgttcaactcctggtaatcaatacacattcgcagggttccgtctttcttcttcacaaacaacacaggagcaccccactagttagtagctcggtctgatgaatcccagatttagtaactcttgcaattgtatctt

SEQ ID NO: 403301 - DNA, 508 bp, Cannabis indica
agagagagaaaaaaaaagattaattaactggaggaggttaaaaataaataattatttatttaaataattattatttaatttaaaaatatattattaaaaaaataattttaggaataatctaatacattctaagtattaattatttatatgcactcatcaatttatgatctttagattaaatatctatggctctaaaaatgtgtctatcataaggacaaaaataaagtgcttaccatagacatgtcttatacatataatttaccataaactataatagaacttgtcaaataattttaaagttattgttactactatatcttactattgtacctaaaataataaataataaattataatttgtagcatttgtttaattttatcaatttacaactatcaatatttcagtctattatgaaaagtaggggtggagtgttcataaaatagttaatctaattcaatctgcaaagtgcagatatccacacttgtgcggattagattggattaaaaa

SEQ ID NO: 403302 - DNA, 1152 bp, Cannabis indica
tgcaatccaggttttgcttgtctcttgaaagcaacactggattgcaaaggcataacatctagaacctcaatctcatcttccacagcaggggatgcagattcaggaattgacaccaaatcccatttctcattctttgcactaagtggggaagaatatgcccgagtgattctatcaaccaaatccaaaatggattggtcgactgtaatcgtttcatacgaaaaaacaccgccctcatccctctcctcacctaagccagagtgaacctggaataaaaacacgaatcaattaaacttacaatctaaaaaaaccagttataataaacacatcctttataacaaagaaacaaacatacaaccttatcttcccgaacgagtgacaattgcagcccaccttcatcgtcatcatattcaggaagattggattttgacacaacctacaaagatagaacaaaaaacaaagtcataaccggtttctaaacagcaaaagaatagaataaacagaaaatgcaataaaataaccggttataaaacaaaaaaaaaaaaaaaacaggaaacataaaagaccaaagaaaataaaaaataaccggttaaaaaaacagaaaaacaacaaactaaaaagaaaaaatacctcgggagacggcggatcgaaaaactcattgtcattcccaccaacatcaatattatcagagcaagaatattcaaccttctcctcacaatctttgggcacagatgaccccttcttgctcttcaatagttcaatcacttcatcaaatttaatattgaactcatcctttaaatttttaatacttaataaaattttcttttggtcgtcttgaatacagaccaaagccttctccaaatttgaaaactgaaaacaaacaataatacataacaaacataaaaaaaaacatataagaaaaaaaacaagaaactaaataaaaaacaaactgtaacaacacaaccaaaaagtaaaaaaaggcataaaaaacacatacctttccatcgaaaccttgaggtttcttcggaagataaaccggttcgaactttaggttttgcaaggcagatttcttcagctcatgaccaactggataaaaatccttcacagttgtaataccttagaattgagaagtggattagcaaaaccctaattaga

SEQ ID NO: 403303 - DNA, 922 bp, Cannabis indica
atttttataggtggttctctacttcactcacttctctattcaaggatctaagaagtttcaatgtaaataagtttttatttagaatttatttttaaaatttactatctcttaaacttatacatgacataaattctaaattacttattttaacatcttttaaagaaattactattttagccatctttcattgttttacagaaactctaactttattggtaagactaagatgggccaaatgtgttttattttcagacatcaaagctttattatctaattttttttagggcatctctctcttatgttagtcgtaatcttttgttgcagctcatagattggctaagcatgcccttacgatagataatgaatggaattagatgaaaaagaaaaagactcctcgttggtgcttaacttttctgaccaactaaagtggtcatgaaaaaaaaaaaaaaaaaaaaaaaactaagcaagcaaataataaaaaaatacttttattataattataattatgatattaaatttacaaatttaatatttcaaagaataaaatatatatgtaaaagttgtctaccaaaaatatggttagtcttttaactccatgccaactataaataatatagtatcattaatctattatactattattttggtattttatttacaaattcaattggcgttaatttttttaattattataattattattttggtattagatttacaattcaaaagaaaggtctttaagtttttaattataaatatttatttttatggtattaaatttaaagattcaaaagtcttgaaaattttaatttataaaataaaatgtttatactagaatatgaaatctttattttcttttaattatttagtatactacaaaaacatataattttacattataaaatttaataaacaaaatgta

SEQ ID NO: 403304 - DNA, 549 bp, Cannabis indica
aggttttgaaaattttaggtttatgctctttaagccgttatgctgcccaaattttagtagatagctaaataatgtaatttttaatttaaataaattaaatagaaatttgttaaataatatatatcataaaatgtcaaaagtatgaaaaaaaaaatattttaaatttataaaatttataatctgttatagtgagattcttctcacctagaaactcgagaccagactcatatttaaaggacacgtgtattcagccttccaatgaaagctgaattgtccatgatagactcctcgatgttccaacctcgcccaggataaaaccagcgagatactgcgagtacgacctaagtcgaatcgcataactttaactcacattatacaggatggatccaactcgcatgtgtcagtccatatgcgagtatcctctctttatttccgcgaaagcatagagatcaactctctatgatgcgatttggtccctacgatccaatggccacgataaaccaatatagactcgcgtgtctaggtactatcagctcgacatgcgatgtc

SEQ ID NO: 403305 - DNA, 667 bp, Cannabis indica
ctcccttcattctagccaattgtttcccactgttacctccacctttctcggccgaaactccatgaaactcggcagtagcagctggaacctctccaccattttttgagccaggttcattcatccccgcactcgaagcttcagtcgacaccgccatcggaggacaccatcccttggttcggagccatcttgaaccaacgttcttgtgattacgctgcggtaaagctttcatgaactcaccatacggcttctctacacgatcaattggttgatgaaaaagacgtgggcaaaacttgtcggagtgaccaataatgccacaaataaaacaaaaggtaggacacctctcatatttgaaattaatccaaaactaattcccatcttctttggtgattttcatacgccttcgaagtggcttagtaatgtctagagtaactctcatccgaagataatcccgccatacaccaataaaattcttaggatcggactccaaatatttccccatagtattcccaacttttctgattgttgattcagccataaaaccaggttccacatcatgtaattgaaccccaatatcaagagtattcagggctaacattttcggatcaccaccaacttttaatctctcaataatcaattgcatacgatcataagtccaagggctaccatt

SEQ ID NO: 403306 - DNA, 897 bp, Cannabis indica
tttctttcttttcgttaggggatcctgctagcaagatgtagtttacttcttgtcagtagtagaccaaaagtataagagtaaattgttggcaaatcaggccggccagggtacagactaggtggacagccacgttgagggagcatcacctggctagtttaatgaggtgagtggctgaccagcctatgtaggtagtggtcgaccatgttgttgattccatggtcggccagcctgctgaggccatggtcagccaaccttttagaggccaggtcagaactatagtctaggacaattttatctcgcctatagtcagttggctttgcccccatcatgattgttgtagagccttcatccacttctgtcaatatctttttagcctatctcttggtaacgcacaatagaggtggtattgggataccatgtctgcgtgttacgccttcaaggattggacacccaacaactatccctcttatccatgctttttggcaaggttttagtttggaagtatgctactataggtgtcatccatattggtcagtcatccaacatatctatttcttttaaactagagatgctcagttcctttaagaactgaacgggtacaaagttttccttggctgtcaaggcgctgctggtaagtcgagtgagtgaatcggctattgcgtcatctttggggacttgcctattagtatagcctttgagctaacttaacaagtgttgaaattagctcaaataggccatcatctttttgccttgagttgtgtattcacttaggacatgacctacgactagttgaaagttatggtgtatgtctaggtatttagcccgtgcttcatgtgctaccttgaggccagcaatcggagcttcatatttagcctcattattagaagctttgaaact

SEQ ID NO: 403307 - DNA, 788 bp, Cannabis indica
aattgtaaaaatacgattgtataaaatttttaatatttttacgatttttataattttaattttcaaaaaatacggtcttttgatgtatttttatgttttactcgttaatttattaattttttgtgatttgtatttaattttttattgttattttgatgtttggatgttatttttcaaatacttttatgtaggtttttttagcatttttgtgttgtttttatagaacaccgtaaaaataaaaaaaaaaatacttaaaatgtaaaaatgtaaattttttccaaaattctataatagaacccatattaaagaggttttttttttttttatttctgtctctggtcacagctgtaaacaaagtaagggtcatctttaatgagctaggtgtgctacttgaggatgtcatagctttattgtctaaacttccgaggcagttttgtcccatgtggctcgggatgcaacttctacatcacatagtttggcaaaacatgctcttcggttagacgatgagctatcctggtttgaggaggtgccgtcggcgattgtggattgctactttgttaatcatgtgtgattttgatcaccgcgtcaaaaaaaaaaaatctataatggggttaaggtttagtagctatgtgtgtaatataaattctgtattactcatactggggtgataaaatgagttttgacacgacacatgaacacaaacacgacaccaatttcatgggttaggtcaggaaagttattagacgcgggtcgagaatgtgtcaacacaacttgacacgaaataaaaa

SEQ ID NO: 403308 - DNA, 660 bp, Cannabis indica
gaatagcctttaagaggaaagggaagttcttcagactgtctttcgtcaggtggaagaagagaagaagactaaggaggagacacttacagctgaggtggcgaggctggaacagaatattcatgccttagagacaaccggtctcaagatcttttatgatttttggaaggctaaccctcgggcaaattttgattacttgggcgaagccaaagacatgtatctcgagtactacacttcccaagtggcttatggtgaacccgaggcgactacttctacctctagctagaatgttgatgttacttttgctcaaacaatagatcctccagctcctaccggcccagaagacctgaactacgagcttgggactccagctgctaaatacttctctttttatctttcttaaatgttctccattccaataccatggtactagaacaagttgcattttctcatcatacctacctactttgtatgctccggattcgaggacttcgaccccgtaatatggtccttccaagttaggtctgagtacacctgccgtactgtcgttggtgtttaggaaaacccttcttaggactatatctcccacaaagaattttcgagcctttacttatttattgaaataccgagctactttttgttgatgggctatcaactttaagt

SEQ ID NO: 403309 - DNA, 682 bp, Cannabis indica
tccaggttggcattttaaacttacggggcaacgccaggagactgatctcgggagagaaaggggtcccacttgctcggtccgactcgagattattgtttctttgtccaaccatgccttggaacatattgtttagttcgtccagctgtgcctacagatctggactaacctgttcggtattttggccgatttgagtcacgtcagaatctttctgagcgagaatttgagcatgggttccgggctgcacgatcggcgtgccaagctgattgtctactcctctccttctgtttagatcgtttctgagatcatgagttgtccccaacctatcgaatacagaagtgcctagctgtcttagtgattgattggctatattgacaggtggaatggcaccgttagcctgtttggaattatcaggtatgacttttccgatgaattactagacaaggtctgcccacctacttcttggcccacaggcgaagcctgtgacaagagatttggcggctgaccatttatagtctgggaagtattcatcgctggatcttcctctgtttcacccaaggggatgacattcgagggttgttgcccgacaatttggtaggctttttgtatcaacacagtagcttgctcactacgattgtcaatctctggatgatgagcccttaactcttccatctctttgtcctcc

SEQ ID NO: 403310 - DNA, 672 bp, Cannabis indica
attataaaagaaccacaagtttcgtttgaaaatcataattatattgttgatgttgaaatttctgaaaacacggttcctattgagaatgatagtattgagaatcaaagtgaaaatgatgatgtgaaaaaaataggtgacatgcctattaaaaatgataatgttgaaaatagaggtgatgtgccgattgaaaatgataatatgaaaaattaaaattttgattctgaaaatggtgatgatgatcatttgaataattcacttgaaaatgatattttagaggataatagtaatgacaatgcaaagtaaacatacccatttcaaaatttactttatatatttgatccaagaaattgggatgcagttgattcaaaaatgattaatttattagtgatgaaagatctaaaaaaagattattttattatggctagtcctataggtaaattttttagacgattcactgctaatttgtatattagagttttattaaatggagagaagtatgatagagattgttgtttactcaaaagagttagataaagtattttatttttgttgcaaagtttttaaagcactgattgttagaggccagttaataaatgaaggctttagtgattgggtgcatgttggtgaaagacttagagaacatgagataagcatggaacatgttaaaaatat

SEQ ID NO: 403311 - DNA, 1146 bp, Cannabis indica
tcaccccataaaagtgttaaccgcagcccttaagacaaattttatcaaaaccaaattggaagattgataaaatggtcgattgaactagggcagttcgacataacataccatcctcgaacatccatcaagggccaagctttagctgacttcttaatagaaggtataactctagaagaaatcccacctgattagcgggatgcagaaacatggaagttatatatggatggcgcatccaacgaatagggttcaggtgcacgtgtaatattaatatcgccggaaggctttaagtttcactatgctctgaggttctcgatttgacgcatcaaataacgaggctgaatatgaagccttgatcaccagtttaaagatagcagaggccttgaaagtcaaaaatctcatttttcatagtgattcgcagatgatcgtgaaccaggtcctcggggaataccaggccaaaggcttgaaaattgcgaagtatttagaaaaagtttggaagaacttggaaagattcgattactttaaaatcaaaaaaatttcgagagaacaaaaccccaacgttaattccttagcaaagctggcctcgcagaatgacctggataaactaaatctggttccggtagaaatgctgagcgagccaagtatgtgtgaaatttaagacgtcgagatgatagatagctctccaacatggatgatgcctattatcaactatttactcgacgggcaacttccaaatcacaaaaacgaggcgcaaaaactattgtatacagtgccttgctacacaatgatcgaaggcaaactatatagaagacggtattcaatgcccctacttcgttgtgttcctctcgtagaagcaaacgaaatcattagagaaattcatgaaggcttctgtgggaatcatgcggggtggcaaagtctgtctaaaaagatcattaggcaaggatattactggccaaagatcaataaggacatacatgagtttgtcaagaaatgttataagtgttagaacatatacctcgcgtatcgccaacagaacttagaatgatgacctcaccctacccattttccatatgggggatcgacctaattggggcattacccactgggcgaggaggagctaagtatgcggtggtagcagtcgacttcttc

SEQ ID NO: 403312 - DNA, 624 bp, Cannabis indica
cttttcgtttaggtcggccaactgacttgaatttggaaacgagctaagaatagtgtagaacatgttatataaatgtgactgtatgtttgtgtgaaatgtatatgcaagcttattacggttggtacactaccaacacttgtacgagaatggtacagagtgcgttataatgtatattgtttaaaaaatacattacagtgttaccagcacaagtacaggaaagtatagggtgtgtgtggtatatcacttagtggtactcagggtacgaaacaaaccctataaacactcgtacaatgttggtatgaagtgtatgtggtatagtggttgtaccctagtatggaacattcttactcatttgttaagccttgtaaataggtgtatgggtgcctagatacaagtcgatattatgtgatatgttatatgcttttcttactgagtttgttgactcagagttctcctttcatgggttggtaaaggaaaggcgaaggctgaacaggagtgagcttgagctaggatgaggttgtacatgtcatggcggcgggacctagagtgttcactctcgggacatctggggtttttattttgtagtcgctgtgcgacctgtcttttgtatttggaatattttgt

SEQ ID NO: 403313 - DNA, 824 bp, Cannabis indica
acaaaaaagatgttccatttggtagtacgcgcactctcagggtctaacataggggaaagccccctgatacagtgagatttagtgttagaggattgccctgtcaacttcagccaagcttccagggcgtctcgtagaatgtccttcctggagcatccaaatggctcatttggaggatcttcatcattccttcctgtcagatatgtgacgtcttcttgatctggagcagtccaaataagaatgttaatggcccatagtctgaatggactctcgaccatatttccgtgtagattcaacctattaccttagttgggcccatatttaggcttcaattgtttgtatctgatctgaatatgctaggtgttctccttctagaaaaacacgaataacagttaatgatagttatttattattttattaagaatatacaataattattatttttatttttaaataatattaatatagtaaataaaaaatgcaaatttttataaaagtcaatgtattattatacatattttgtggcaataaattataataactagtggcactataataaataataaaagttatttttattatgggccaaatttgacacaataatataccatgtgttaaattgtgtacaaatttttagcatgtactaaatttggcaaatcttttagaatactattgcagtggtattttttcttatgtgtgcaaaatatagcaatacattatattttttaacactctaatgtataatggtttacatttggtatatgttaaaaattgtgtcaaattttatacaaaatataacataagtaaaattttatagcacaataaat

SEQ ID NO: 403314 - DNA, 526 bp, Cannabis indica
tttttttaaattagatgagatcttatacttaatttgtatttacgttattttgaaataaataaaaggtttgtgcatattggtttagggttgactaaaaagccaatcccagccgtcgactcgtgaaaggcagtatcaagggtcccactcccacctcatcaacccaacccaaattgcctaacgtaaataatttaactaaacaggtaaactatactcttatattacaccctctataaatccacattttgctacttttatttgtttcacgtagcattcaactaaaggttttttttttttttttttttatttttttttttcatttttattggtatgatgatataccttatttaagatgaactaaaaattttaaattatttttaaataatttataatatgaaaaataatattaaataataactatttgaaacttattcttcattaatatatattttgatttacacatggtcctaacataactatatataataagtgatagatttaaaattttattttgtgaggacttatttat

SEQ ID NO: 403315 - DNA, 1051 bp, Cannabis indica
cccgtatttgtttagtattttaagtgaatattaaagcatgttaagaagcatattagattataattatttattttaagtgtgttacctttatgtccttaagtgcagtattaagttttatgatcgctgtctaacctgcctgacttatgggtttgcaggctaagtcctataaaatggacgcccagcgaaatacaagaagtcagggtaacatggttgagaccggaggctgtcagggaaatcaaattccccataatccctgtggtcgcggtcgtggccgtagcagagctcagggtggtcgccctttaaatccaccacaagctcctctggattgggagcagaggtttgcagaaatgcaagatcgaatccccagtaggatgaaggaattcggaggttgaggcagcagggtcctcctgtcgtgcctcctcagcaagttgctcaggccgttatagttccagcagtgccagcagaacaacctgttgctagcaactgtatggaaccgttgtacgaaagattccgtaagcaagcacctctagtgtttctgggaggtcctgatgtgatgaaggctgagcaatggctcacagtgattgaacgtattttgaactttataggagtggttggtaatgattaggtgacctgcaccacttttcagttccaggaggacgccctcgtgtggtgggagttgataaccctcactcaggatgtcacagttatgacctgggaagaattttgggagttgtttaactccaaatattataatgaagctgtctatagtgctaagcggaaagagttcacagagttggtgcaaaccgaggggatgtcggttactgagtatactaccaagtttgaccgtctggccaagctcgtcgtgggtatcgtgccaactgactttagtgagaaagaaaaatacctggcgggactgaatgtgaaaattaggcatgatctagtgattactaccaatgaagtaacgtcttatgctgaaatggtagaaaatgttctgcgagctgagggtgcggtaaaattccttcaggagccccgagtgactctgaatatcggt

SEQ ID NO: 403316 - DNA, 527 bp, Cannabis indica
gacttaccaacacttttaacattttttcttattaagatggataaggaggataactcatattaagcgagatacaaccttccaagtcagcaataaccgtctaaaggataaacacaaagagtagttgggtagttattaaatattgtcctacatgtgattatataaaacgtggggattatccacgtttcatgaatagctatatttgaattgatcccaaaagaataactgctagcctctactcctataaataggggtagattctacagaaaaagggacgaaaaaattgagagagaaaatactattattctgatattgtattccgtactcaataaatatccccaataagaaggactcatggagtatgcagatttaaactgcaaaactacgcaaaaatatctagagttattgatattttattatttattaatttctgtagaaaatatattactaaaaggctatttaatttcattaaaaaaaaaaggctatttaattttggttaacgaaaatctgcgttaacagtttggtgcttt

SEQ ID NO: 403317 - DNA, 591 bp, Cannabis indica
ttttttttttttataaatttaatgttgttatggagtatttaatttaaataaaaagtattatttaggaattttagtattttttttttataatttttaaattaatattaaaaattaagtgtgtaatcagatatctaattagaaaaacgatcaatctaattaataatttgattggagtagattttaaaatctaattggattgaatggatggtgatttttcaaatctaattactaattgaatttaatcggatgaggagaaaaatattgcattggattggatgcatagcccaacccgaaatatgtgttgaattttttaaagggattatttcacaaatacacaaaaaacataaaaaattataaaaatatggttatatgaaattttaaatattttaacgatttttatgaatttatttacagaaaatatagtcttttaatgtatttttatgttgtactttaattaatttgatgctgattttttattatttgtatgttattttttcttgttgttttgatattgtttgggtgttattttttagggtaaataccattttagatcctgtgttttgcaaaagttaccaattggaccctgtgttt

SEQ ID NO: 403318 - DNA, 547 bp, Cannabis indica
ctcaattctagggtattacagtatacgtatatttagttatactaagttgatgttacatgcaatacgcgtataattagttttctttttaattaagtttaattaagtgattttaagtgcattacatgtataattatttttttaatttaggtaatatatatatattaatttttaaaatgggatttgagattttgatctttaaaatttttttttagtttattgtcggctacattgacgtgtcatttggatgtattaattatatatatatgtgaattttatatgtacgataaaactcaagtgagatatgtgaatcgatgtgtacccaattgagcagagttatctgttattttaattcatacttaaaccaacaaaattaaaaatgtagttaaaaatatctacatgtatatattttcttaaaaaaactgaaattttgatctttgaggttagctattgcggctacattagtgtgtactttagatgtaattatatatacacattttgtatgtataaaatgtagttaaaaatatctacaatatttaaagtattttaa

SEQ ID NO: 403319 - DNA, 520 bp, Cannabis indica
aagcagtaaacaatttagtatccctaaacgagtaatgcatatagaaaatgattttgcataatgttttatgaacacagaggaagtaatggtggagaaagcagaagcttaccatagagttacagttcctggaatttgggtttagtcaaatatactacacttgatctgaatatcaagacaatagattaattaaaatgcactacttattttatgttagtgcaagtgggagtttgttgggattttatgccctaaataaaacccatttcaatgtaatttgatttgttatcaatagaagattagaagtcatttatgtttacttgtagttttcatggtttgtgtacaatttctgttaagtccaaaacatatagttcttcacaattacatttgttgactacgcttttagccaacaacaacgagtctattttataagcgataaacgatgtgtagtatcagatatataataaagcaataataagacacaagaattttatagaggttcaaccccgagcagttcggtaatagc

SEQ ID NO: 403320 - DNA, 817 bp, Cannabis indica
aataaataaataaatagtatattcatttgattctattatcttgaaatttactactctaaattatgctttatttaaattaaaaaaaaattaacatttatttatttattattttacgcggtaactaataactatgggcccaattgaaggtggggtcgtaattagagcggggccacacacacacgatatgctggggtacaccctataattgcactttatgtccactctttcggcctttactccttcggcttttggcactgctcttttgaataggggtgttcaataaaatttacaaaccgctcaacccgaataaaccgcccaaaccaaaccgaataaaccgacaaaaaatacaacccgaaataatataatgaaaatccaacccgcccaatgaatatattgggtggtttacaaattattctaaaccgcccaattaacccgaataaaccgaattaaaccgatttatatattttttaataaaagtgtatatcttatattatataaattacatttattagttaaattattttgtatttaaagtttggacattttaatttttaacttaaaacttagattttatagttaataatttttaatgtatttggatattgaagttaaagtttaaaatctacactatattatcactttttttattattttattcaattattttatgtttactcaattatatttatcttatattaaagttcttaaaattaatttaaactatagcattatttaacttgaaatataaataatatatttttatttttttttttaaacttttttattacttattctagaaactaacaataataattat

SEQ ID NO: 403321 - DNA, 663 bp, Cannabis indica
aatgagtttttttgtgaattgctagctgggatatgttgtgtataccctaattaggtactctgaaaagtttggttgcatctggtggagaattgagcaagaaatgaaaaatttggggtgaactggtgcaaatcggctagctagttttggcagggtcaccgaatgctttgttttctcaattttcgtccatttcagtgccgtggttgggtgcttccctatttttcagagtttgtgtaatcccttaaaagtataaaagaacttagggttattggtttgggtttcccgagattagggttttggtcatgtaacttacccaattttataatgtgattagggcatccatctagcacgagattttccatttagatcggccagcacacttgaatctggaaagaaggtaagaactaaatataatgtgtgatatcaatatctgaatgtatgtatatgttatgtgtatatacatgcttaatgtgttagttgcactaccagcacttatgcagttaaggtatagagtgcattggtatagtgaatgttatctgagagtacctttcagtgataccagcacaagtaaggagaagtacttagtgtgtgtggtatatcacttagcggtactcagggtatgaaacaaaccctaccaacactcgtagagtgaggtacgtagtgtat

SEQ ID NO: 403322 - DNA, 669 bp, Cannabis indica
tcaataaagcatattcatcgattagagacacaaaaacaatctactcactaaatagtttgataggtaaagtaaaatagggtaaagaacaatataactgtaacctactatagcatccataatttacttctctacacaccaccttaattaatagtacaactaaacccaaactttttacataaaaactataataataataaataaataaatagtccaatatgtattatttgtgttataatataataaagagaaattttattttattaaaaaataacataataataagaatacaaatttaatttagtgttgtagttggaatggaaaaatattatagtgatatatttggttggtgcaacaccacatatattattgtggttagagataaacaaagtaattataatgttatggtaaggatcaaatctaccaagttaaacattattaattacttggctaattattagttcaaatattactttagtaaggtcagatatattagttctttgataatggaaaaaaatggtgtttcatacacatttacaaaactttttatttgatttgagtggtgaaaataaacttatttttctatattacacaacaaaaaaatttacttttagtcataataaaacttgtaattaaaaataaaaaaaattgtgactaattataaataataat

SEQ ID NO: 403323 - DNA, 1480 bp, Cannabis indica
ccaactacaaactcaattttagctttaaccatttctgatgccagttgaggagctatcattacagtggtaaaaatctgcccgaaacctcttgtactcagtgcatctgccacaacatttctttcccggggtgatacaaaatctcaaaatcatatctttaaccgattccagccactgcctctacttcatatttaaatctttctcggtgaaaaagtacttgatactcttatgattagtgtaaatctcgcatttttcaccataaaggtaatgtcaccatatttttagagcaaatactacagcagcaagctctaaatcgtgcggtgggtagcgctgctcataatctttcagttgacgggaggcataggctatgactttgtcagcttgcatttgaacacatccctgaccctgtctggatgcatcacaataaacaataaacttttctcgatccgatgcaaaagctaacaccgctactgttatcaatggctatttcaactcctagaaacttgcttcacacttgtctcaccatattaatcactgatttttgttagttaactcgattagtggcatagagatcttaaagaatcctttgaaaaaatgtcgatagtaccctgctaaactaagaaaaacttcacacttctgtcacagacattggcctcagccaattcttcactgattcaatctttcccgagtcaaccataaaatccatcttttttcgataatatgacctagagaagatacctcagacaacaagaattcacactttttgaactctgcatacaacttatgatctctaagtggctgtaatatcattcgaagatgatactcatgctcctcttctaattgagagtgttatcccaaattttgcaatctgacatggtatcaccccatggtgacacatggaatcaacttcacatatctgctcgcaagggatatgccgagcagagcaccgcacatattcgcacttacaaagccttcttaaccgagcaataagtaatccgaacaacatgttaacacttagcagtttcaactctcgcatcgtgaatcacagaagcaatctctataatttaaggatcatatcaaatagatatggcaaactatccaaatcccttgatcaatgtattctgtatttaatatgcaatcttgccaattatatctattgtagtcagaagggaaactttccctcgaagcttatagccatattaatagtgatctactctcactgggcaaagggtcaaaagcttatctaagaatatatattcagagatattattgtaagagctctaagaaaaggaatcatcacatcctttgttcttaagtcaatacaaatcaagaggagtaggttattaccgaactgctcggggctgaacctctataaaaactcttgtgtctttgtttatttcattatattatacatatataatattatttatcgctcacaattaagactcactgttgttggctaaaagagaggtcaacattttgg

SEQ ID NO: 403324 - DNA, 723 bp, Cannabis indica
tgatcgcaaggatgacatcatttatgcaaagcaaggcatcaacctcgctacgtatgaagaaaagtaagcgagacgtgttaactgttagaacacttactgtataatgtacgttatacaaactaagtataacagttggatgaacatgaacaacgaatagcgaggcatccatctcactataaagagacatactcatggtacctacactaatcagctccagacatctttcaataagatccactgctccgtcgagtcagctctctcagatagaagctaacattcaaatgatgttgactactgaagttcaccttgtcatcaagaactgagattgtcaggtggagagttgtcttcaagcacagaaacgacgagatttacattatcaacctcagaaagacatgggaaaaactttagctcgctaccagggttattgttgctatattcccagggagatgtcccagaacgatacgctttacaatgtatttaatacacgtatgcattaacccggtaaaagcggaccaatcacagttgtgtgattttcaaataataattgcatttattttacgtgggacgtaatcaaatctcacaatttcaagagattattgttgtaagatatcagtttgatttgtaattaactgccctcttatgtaactataaataggagcaggttacactgaaaaaaggacggaaaatccttaagagaaaaagccttagaattgtatcagaaat

SEQ ID NO: 403325 - DNA, 743 bp, Cannabis indica
ctaagaatcctcctagatgttaatttgccaattcgaggggtatgaatataaggtttattggaatggggagggagttcattaaatggattgatttcaagtatgaacgtctgcctgatttctgcttttactgtggttgtcttggtcacactaaaaggtattgtcatgctttcttgcaaaaatgtgatgaaactatgtctgagcctctttgtccttataatattctgcttaggggaaaagagaatttctgataagggtgctccttttcagtattctcacccacctgccatgactatgttgaatgttcctcctgtcaatcttagtatctctgctagtggctccttggatttacctattaggtttccttccttcctcaattttaatactgcctctacctttccatttacacagaccctgcaaactactggcattatgattccaactcctcttaacccaaatatgcgtgagatgattcctcctttcaaccggtccgatcttagtttgtctctaagtaattctgcttttagtccttataccactaattctgtgattgtaaccgctactgctcctatgattagctctgagcttcagttgggaggctttcagcctcaagtttccattccgtctgctcaggatgggaatgtttctctccattccaatcctatggagatggaacagggtgcccatgtgagccagcctgactgctctgttcgtggtaagggtttggcctctgcttcaggggtcaa

SEQ ID NO: 403326 - DNA, 1000 bp, Cannabis indica
tctgggttcagcacccagatgccacgacatgctctggagcatggcgcggcccgctcctttgagtggacctgggaattggtcccaggtgccgcggcatggtctgggcatgccactgcccgccctcgtgtttttgtgcagttttgagttgattttcgaaagttcgtaacttttgattccgaactctgatttgtgagttctttatatcgttggaaagctcgtttcgagctctgtatgataatctgaattgtaaatgccatgcttgaattttattgagttaaaagtcaggggttaaccctaagtatgaattatcccgaatttgtgtgactaggattaccggcacctgaattatccagatacttttccttcttgctgaaatcggttggcactattcccaaggctaacctcgccaaccggtcgaactgggtggtatactcagtcacactcatgttttcccgctgggtcaggtgggtgaactctttcctcttggcacttctaactgcctcattataatacttcgcgttgaagagttcctagaacctttcccaggtcatggtggcgacatcatgaatctgagacaccatgtcccaccagactagagcgtcttcttggaactggaaggtggcacacaccaccctgtcatttccggtgacacccataaaattcagtatcttggttatcaccgttagccattgctcggctttcatgacatctggacctcccagaaaaaccggaggtgcttgcttccggaacctttcatacaagggttccattctgtttgccgctaccactatctcggcctgggcaacaggggcgggtgccactggaacttctggcacaggcactgcaggagccccctgctgccgcaatctctgtatctcaagatcttgctcctctatcctggcttgcatttcagcaaacctagtctcccaattctgggcatcctgatcggcttaggcagcctgggcagcctgtggtgggttaccatcaccccgaccacgag

SEQ ID NO: 403327 - DNA, 365 bp, Cannabis indica
cgtgccgatcgtcggcctggtgagaatcctgaggttaatgtttctcctaagatcatggatgttgattgtgttgaccatagtggtgatcataatcccatgatcttagggagacaaaagaagaaagaaatatgtatggaaagtgggcaaaagaagaaagtaatatgtatggaaagtttggcttctgatgaggagagtaatgatgatgagatttggttgttttgttggagagcaagaggcgacgtacaaggatgggtgtagtgcatggtgacgtggcactgcatggtgaaggggtagcttcggctaagagtgtaagtggagatgatgggcttgttgggacaaaaaacgattcacaggtgggccttggt

SEQ ID NO: 403328 - DNA, 1160 bp, Cannabis indica
tttttttttttttgcatctttcatcaattttagaatctcatggaactattttcaattgcttgtggttaatttatttcatttactgatcacaggaccttctcttgttgctaatgttagatcattaacccatgatggagagaatcgattttggcttggacagccggaagaaggccatcgtcgggcctggtgagggttgccgtcaaggggagtgaagtcagggctcgtttttggcttggactgttgaaggaaggccattaccgggcctggatagggttgccgtcaagggaggctcctttttggcttgaaagctgaaaaataaatttcacttacgttttctttttttctgaattgtatctcatgtatcatgtaaattgtaaaatattaaaatatattaattttttttattaatattgtttatttttttaattaaaattaatattattatatatatttaatatttaaaaaaatattaaaaagtaattctatttacgtttagcaaaaaaaaaagtaattcaatttactccaataatacttttaacaacagttataaaaagtcatttaaagtaactttttccaacatttatcaactgtcatttaaaatgacttttcccaacagttataaactgtcttttaaagttctttatttttatgacacccacatagccaacggttttaggaactgttgggaaatagtataaaagacagttataaaccgatggaaaaagtcacttttgtagtagtgaaattatttttatttaattaaatattatattatttattaaattatttgataatttttcttattgcaaggatttattaattattgaatttatcacttatttaatcgttaattatttatatttaactaattaaagtcattttataattatttaattacttattattattttttcataaaatatacaaattatttttttttacttaaaatacttaattttagaattcatttcactaattttgttaaataaatattaatttaaataattgtccatttaaaatataacttgttacctgttttataagaaactattaacttattataaattattaaaataacaaaattttttgttatctctaaattttttttatttttttatttaataaatattattatttttttattaatataattatttatt

SEQ ID NO: 403329 - DNA, 888 bp, Cannabis indica
taattattacgataaatcccaattcccttaaatttaaaaaattaaataaatgagacgtgagatatatagtacaaaatcctataaacaatgaactaaatgatactgtccataaccttatcttgctcattaaccccttatcttacatgatctggatcaggtcggatcataaccggatcagatccgacccgccctattaacattcctaaagtggggttaatgagcaagataaggggtccccacttaaatacgttctttcaacttcgagctaaaatcctttaaaacttatttgaaacaatttgaatggcgaccacctcttcctaatagagcatgaaccacgttaaaaaaagatggagtactttggccatcaatgggcttggctttcgatggtgtctttctatttaaggagtcttattatgctccaagcctcttgagaagtactattttcaaaccaaatctattaagaacctaccatttgcaatggttgcttcatttgaagtgtgtcctcgtgtagaagattatgcttatttgagaaaatttccattgattaatgaaatatgaaattcatgttattgttgtctctaccaccatagatgagattttcaaagatacttcacaaagtgtttaaagagaaagattatcaaccaacaaaatctatacccaacgtttttggacttgtgattggtcaagtctttatcgaaaaaattgtaagagcttgccaaaattgttcaaaggacagctcataaacattatatttggtgtcataccgagtttttacaaagatttaaattttgaacataaatttacaattttacggttatagtattttttacaaaatattattttttataaaacaaccgtaaaacaacataacaaaacaattaaaacaac

SEQ ID NO: 403330 - DNA, 594 bp, Cannabis indica
atatatatttatatattgttacatacaagtatacatggaaattattattcccaaattactaaattagtctttggctaattaacaggtatttcttttttttttttttttttgtttggaagataatgaaaatattcatattgactagttaatggacgtactttatgatcaaacagcatgatacatatatatatatatatatatgcatatcaaatcgatcgtgtacacaatagtcaagtgcatgtaaaaaaactcatagctattccaattaaaagtataaatatttatagctaaattgttgctgtacagtgaaaacaaatatttattatgccgatggaataatataccaatcctaacaatgattaatatcatttatcatcttctaaaagtactaaaaaatacttaatagatattaattttaattataattattacacaataacattataaaaaagacttataaaaaagacttgtgactaaaagtgaaaaagttatatatgactattaatatttataaatcatcacttttattttatgactaaaaagtctgtaactaaaggtaatagtcaaaaaaattacaatttgttgtggctaaat

SEQ ID NO: 403331 - DNA, 518 bp, Cannabis indica
gtatgcggatttatcccatccgttgaaagacctagacatagattacgatcttcagctccaaaactaggccacttcatatcaactcttttccaagttaaactatcagctggatgtcttaataaaccatccttcaccctctcatttgcatgccacgataaatttttactatgtttggcacttctaaacaaatgaatgaatcgaggaataggcgacatataccacaaaaccttagcaggtactccttccttaacctcaatgctatatttttttcttttgccatcgtgactctccacaagtaggacatgagtatgcatctgaaaaactattccgatataatatgcaatcattagggcatgcatgtattttgtgataatccatacctaatgagcatatagtttttctggcctcatagaatgtcgtcggaatttcattatctttaggcaataaatcttttaaaaaactcagtaaatctgtaaaacttcgatcactccatccgcgtcttgctttcaaattgtaca

SEQ ID NO: 403332 - DNA, 746 bp, Cannabis indica
tgcaagaggtaacattatcttctctctctgctgatttctgaattcaaatctcatcttcatgtgaaagctttttattatatatgctatgtacccacattattagcattagaaacttgactgaagtagagttccaaacttaggtttatgacatttataatgtcactaacagtaaaactgtattctcctacgtgcatggactataaactccataatacactttaaactttaaagcaagtcaataggcttgaagaattgattcaattagttgttgcaacttaacattatttattactacggactacttcaattgctttgaaatctacctaaattgtttggtaccaaacaattagctgcagatttataacttgtactgtaaaccaagaccaatcttttacaagcacataaatacatagaatatgtatcctgtttttgaagtcatgaattgcatcctataaattaaggagtctttgaatgctggctatgaattacacctcattttaacatttatgaaatctttatcatgtcatgctccatcctatttttaattactttgatcctaattcagacaaatcagatttgattaaagtagcctttgtagtaacaaggttctttcatcattactgtttcaggaattgctacctaggaagtttatggaatgattggttagaagtttttgtagatgaagtgtcttttgtaagcaggtggagagctgcttagtttatactaaaaacatgattagagctaat

SEQ ID NO: 403333 - DNA, 372 bp, Cannabis indica
ctcaaaaactatgatttctatggcaaattgagaaattggttgctgtagagattgtttgtgcgtgggtttggtttctgcagttttattatgcatgattatgtagtttaaaccaggtttggttgcttgtaggtgagttttagccaagtttgagttttgaactcaaagcttggagctcacatggcatttttcatatctgtgatttctggattgttttgatgctttggaaatgtttatgggggtatgtagagcaggtctagaaggtttgaaagagtttgagtttgtttcgagcaagttatgaaattttgtgtgtttcctgctcagaaccagaattccggttcagcaactggaattccggatggtgttccaggattc

SEQ ID NO: 403334 - DNA, 502 bp, Cannabis indica
tccaccaaacgctttgattatctgaagttgaggagctaagtttttcttccaaagaattagctcggtgaaaaccagattgcacagtatatgacccattggaagtgtaatgccaaatcaacctatcccaatcagcaaaaaaactcagtggaatagataatatacgatcagaatcaataggttgaaagtatctattcaacattggtacattccaaactctttcctctgttatgaagcttgaaaccggcagtgagtgtgatccagagaaactgactggtttgaactcattgaaacccgggatccatggatcatgtttacaatcaatatgagtaccattcccaaccttatatctcaaccctttaaccaacaactccttaccccaacagatgctttgccaagtcaaggacggtgagtgaccaatgttagcgtcaagaaaagaataattggagaaatacctatgtttgagaagtcggctcaagagtgaatctggcatatcaaaaatcct

SEQ ID NO: 403335 - DNA, 539 bp, Cannabis indica
cctatcctcaacgtcctcattactatacgacgtcgccatcagaaaacttcacaaaacagaccacaacaaaccaccgaaaagaagaacagaccacaacaaaaaaaacaaaaatcaaagaaacattctcaccatgtcaatagacaagaccttaaccttaattttaagtttaattgccttgaatgataattaccttttagtttggattcaattaacaaaaatcaaattaattaatagtttttatattctaatcagtaaataattgctaaactaaattcgtgcgacttaatattaaaatacattaattataactatgacacattttaccgtggtaccattagcaattttttgttttctaatcttttctcattttttatcaataccatgagggcccgtttggtacacaggactagattggattagacaggcttatttgtccaatccagtgtttgggcatgttagaagtctggataactaatccagttaacctcatctgtctgagattatttatcccatccagcagggtgggataaataatccca

SEQ ID NO: 403336 - DNA, 570 bp, Cannabis indica
aagcaggcttggcgacttcttctcaatgagaactcacttgtaagtcggatttacaaaagccgatactatccaaatgggacgtttctctcagcaaagagtggtaacaaccccagttttatatggagaagtattcatgagactcaaggcttaatttctgcaggcgcacgattgagaattgggagtggacattctgcctctgttcttgaatctccttggctccctgatacaactaatccatacatcattagttctcacccttcacttgtgggggctactcttaatcaattgatgctttgtgaggagatcaaatgggatgtggatgtgttaaatgatttgtttgaggatagagataaagatctcattctaagcattccattaaatacaaccagaatagaagatcaatggtattggcttcatgagaatactggctgttattcggtcaaatctagttacaaatggatacaagagaataaagggcagtggtctactgctatggaatcaaacttctagcgtgtttttttggaaaactaaagtacctccgaaggtactgcactttgcttggaaagctgt

SEQ ID NO: 403337 - DNA, 570 bp, Cannabis indica
gggcccttcttccacttcattttgagttccacacaaatatgatattatctcttttggatttaagtcttaccattttgttttttagaaacttttctaaaaaatttaatactaataaagtagtgaaatattttatattcaagataactactattactcattttctcaatgcgagacgtactttggggttaatatcccaacaaattaattaaacaaagtttaataaccaaagaaaaaatgacttttaatttaattaaaaaataactaaactaattctttttaataataaatggtagcaatatatttttttttgaataaaaataataactttattaaatcaccatctctgttaccaaactaagcaacaaatcaattggaacagactctaaactgaaactgcaatcaggatataatataaaggctctaacaaagttatgagccaccatattagctgatcgtctaacaaaataaataacaacattatttgaatctttaagcatatccttagaagctttaacaatttgactaaacattgaaatcatgtcaactaggcttcgtaatggtagcaatata

SEQ ID NO: 403338 - DNA, 1084 bp, Cannabis indica
ttttgcacataaagaaaataattacaaaaaggctccttaataagatttgtctataaaaattatcccttaaagcaacatccaatcaaaccctagtaccatgtccaaaataattataatcatttctaagaatcaataaaaattcaaaagttattttctcaaatctcgccactcacaaaaatataaacacttaaacttggtagcttttctaagcaaatatgtgctaacaatcttcttaccacaaagtttggcatgtgcaatttgtaactctagaaaaattctaagtaacaaagatagtaaaaattggcttgaaaataacattttacaagaataaatgagtaattttatgaaaaatttgaccatgaaaatattaatatgacaaaaattaagaaacatgcttgaatatgctcaccacccccaactaaaattagacaatgtcctcattgtttagaaaatatatacatgaaatgcatgaaatgagaacacttagagagtgagccaatgcaaaatgacatgatattgatgctaaaatacttagagagtttttgggtttattggatcactttgaatagcttatgcacgatctaaggaagccaatagtcatgaccaaacaggctaagagcagaggtttcgaaatccaccattttcatgcacattcaagcatgttcttgagcaatatcgaatttaaacgtgtttgaaccatttctgggtttaaagaacattgtgtttaagcttataggaccccaaggatctattttgacgtggagaatcgaagctctaaggccctgaacgaaaatcgccattattggactccatttttaatggtacaccggcaacgaagaagacaacgatgttggaccgtattatttggtgatttatggtcggcttgaggttctaagcactgtaggaagctttgccaatcaaaataatgcgtgaaaagcaactgtataagaaagttggaggctcgccgtcgccggagaagaagggttcgccggcgtaactccggcgaagctccgatcaacaccttctgaggttttttctctagattttcttggatattttatcttacttaggtatttctaggtct

SEQ ID NO: 403339 - DNA, 866 bp, Cannabis indica
gacgccacagctggccatgagatcctgagtttcatggatgtgcatccaggttacaactagataaagatgcatccaccaaatcagtaacatacaagcttcatgacgatcttaggcctatactactacaaagtcatgccctttaggttgaaaaatgtaggggccacatactagaggctcgtgaacaaaatgtacaaaaatctcatcagctgcaacatggaggtgtatgtggacgacatgcttgtcaagttaaaaaaggttgggggcatatggaggacctaaacgaatgctttaagatccactaaacgatgacatgaagctcaactccgcaactacaacatgaagctcaacccccctcaaatgttcttttggagtaggcacaggaaaattccttggcttcatagtcaatgccagaggaatagaagaaaacccagataagatccaaggccttttggacatgaagtcacccacaaccatcacggaagtacaaagccttacaagatgcattgttgcactaagcaaatttgtgtacaagtctataaacaagtgtgtaccctttttcaacattctcagaggcaacaaaaaatttgggtggatagaggaatgtgaaaaagcattccacgagttgaaaaaataattggctcaaccacctatatgttgtcaaaaaccctagacaatgatgagctaagtgtgtacctaccagtcacagagcatgttgtgagtgttgtcctaacaagagaagaagactatgtacaacaccctgtatactacatcaggaaaagactaatcgacatagaaagttagtacccactcatggaaaagctagccaacaacttcctcttggcctccagaaagctaaggccatactt

SEQ ID NO: 403340 - DNA, 528 bp, Cannabis indica
cccatgtttcatttaaatgcatggggataatacagaataactactttttcttcttatccttatagatggttaatgctgatttggacaattgtatatcgcttatctccgagctgttatccttgtctattataatgtgaaaaaaatgccaagtgttagcagattatttacctcatcaagtttctttagaatagcgaggtggctgtctcgctattcgtaacctgaggttgctttacataattgtattcactcctttgaataaatgaattatctacttgagcttgtgtactctgaggcaggtatgtgtcttgttaatataagttttaatagccttttatccttgtctcgcttaagactatgtagttagcgagttatgaatattttctattaatcctttatttaacgagttattctttttctttgcattaaatgatataattttattatatcaggtggttcatattccactgcaagacacgtgtcactttctgaagtgaagtcgaattttgggtataacagtattttatcctt

SEQ ID NO: 403341 - DNA, 577 bp, Cannabis indica
tatcaagtggtcgaagttttagagtctagagcgtacaaacttggtaagtatgacgaacaaatgcaactcgttcaagtacataggtactgaaacagggaacacttaagaaaatactaccagtaaaagtaccaaaagtcagatgaccacgtaagtatgagataaaagaacatttactcttaagtgaatggccttctgggcggaccactctcaaaggttcggataaaattacaaagtactcaggtcgagtgaccacttatgaaaggacaatttttattttttacaacttgtttagtttatgctaagctaaagttcagactagatcaaaataatagctttgatttaagttactatggaaacaaacatattcctgaccaataaatgaataaagatgtttatttcaattcaaattgagtcaagttcattagcatgttataaatttaccattaaatgcgtacaaaaggtctgctcatacccaaagctttgaatagacaaaaagcatacttgtgaagaacaagtaaccaagagtcaaaagtctgcttggtcacttggggggcacctatacctgtacaaagcattt

SEQ ID NO: 403342 - DNA, 716 bp, Cannabis indica
tgccaagtctaaagagtctggaccaccaattgtttggtctgagctggtcaggagtcatcctgaatgggtgtaggtacctgcttcacctttgccggtgctcccagaggctaagaagggcaagcagatgctggcccactatatgaaccggctggtacctgaggtcggtgagcaactggctggtgttaacagtgactcttctttggaatcgctggtgggcggagtcttgaaggagttcaccagggtaagtttttttttatactttcccttaatcttccatacttagctcaatatgctaagatttttcctttgtgcaggccggtctgaagtttgcctacacttactcccgggctaagcctgctgcttccaagaacgcggctctatccgacaccctgagggcggaggtggacttggccaagaaggatgctgaagaagtcagggcagaagccagagctgttcggttggagttgggtgaagccaacaagaagctgtttcccgctgagaagaagatcactgtgctgaccaaggatctcgaggttgctgactgttttgaggaaatcatcgacatcttatttgcttaggtaaacaatcttctggatgagaggacttccctgcgagcagttcttcttcggatgaaggaggagaaagaagccaaggaggaggagctttcggccgaggtgacaaggttgaaggagaagatcaatgccttggagacagcc

SEQ ID NO: 403343 - DNA, 989 bp, Cannabis indica
tatatatatatatatatatatataaacgcttcagaaaaaaaaaattgattttgatcttttcctccaaaaaaaatattggatatatttatatactatttgatcttaatttaaaatttatactgtcatgaaatctttgatatactattggatcttaatgtaaagtttattctatatactgtcatgaaaaaaatctatactattggattttaatttaaactttatgctgttattaaaaaaaaatatactattggatcttaatataaaatttatactgtcatgaaatctttgatatctatttgaatttccaatttttttctatctttctttctgttttttttttttttgttttttttttcttaagtgagattatactatttgactttaaaaaaagttaaacattacaattaagtagactcatgggtgggcagtaattgtatatatagacttcaaaaattaatcttaatttaataattgatcgtatcccttgatttcaaaccataaatatttaattcatgttcattttttttctttctttctttccttctttattatttatcttttctcttatgtttttacattaattaattattttaattcctaaaaaaaaagtttatacttgtataaaaatgaaaaacgaaaacgtatatatgctactcaataattttccattatatgttataaaccttacaaaaagagaaaatttctggaataacattgtttgcaattggaactgtatatagtgcacgtgagaattaattaactatataaatataataatacgactacttttgttttaaagttaagcaactaataattagtaatatatatttattttgattgcttgcaaactggttggtggcacaatcttaattttttcttgctttgttctctgcagccttatctttctattgtgtggtctaattaatgaacacagctgttttatgtaagcatatcatgatgcaacaaagaaaaagaaaaaaaactaatac

SEQ ID NO: 403344 - DNA, 923 bp, Cannabis indica
catatgacaagaaggaccttgatttcggggggttggtcacgacggaaaattatcggaaggccaagctgatcctggggcaccagtcggtggatgactccaacctttccaaggtcatctgcccgaacgtaagggttccggccgcggagaaggtactccgggaggacatcatcgccacggcggaagataagtaccaaaagtacctcttccaaaaggcccaggagcaggcttacgctaaggcccaggcggccgccgggaggccccttcgtattgggagcccggtggagaggagggccccagaccaaggcctacggtccaggtgccgaatacgggggctcccgatgccagcacttctggttctggtaagtcccctttaacgatacattacgtccctcctgttcgtgaatacgctagccttaggcctatagggttcgatgaacgtctccttaggtttaggatgccctctactcggtggggggatcatgcaaaggagtattacttctccaacttaggtgattatttaggccggtcccggatgggttctgggcctccggtgcccgttcccttggatccttcagcctatctgtcttctagctggttccgtccctcggacagctatctcggggatgatgcagccagtgttaagattcgggactttgctagggccgaattagagagtcagggtagggctagcttgattgctttttaagtgttcactgctttcacagacattctaacacttgacttttttctcttgttgcagcagctgatcccatggatgcgatcttggccacccttgccggagctgaagctagtgcactcttgatctgctgtgtgcatctttatttggttgtaaccggcgtacacgtccatgaaggacagtagcttaaattcggaagtggcgtctaccatctggtcgatcgtgg

SEQ ID NO: 403345 - DNA, 552 bp, Cannabis indica
tccaaggacgaaagttatccgaatctagaagggcccgccttttggaagacggaatagataaaaccctctgagtgaacattgggacgctcggagaggaattccaagaggtacctccacaagccctttgaagggtgacgtggctgccctctgacgctcgatcccaccaactcagaccttgtctcctatgtcaaaacatggtagtgagcacaccaccaaaagggatacatcctctttgtacaacgatacatgtctgacatctttgcctactatagcagtacttgcgtgcaacacatgtccagacctcgtgggccccatctacacggacaccatctcctcacgagccagaatcctgcagtgggcctagtttgtacagtatctctagtgggtcacgagtatgcccggatccggatcctagcctataaatatcactttatactttcctgaaaaggggatgagagaacttgggtatattttctttagattttcttcttcacaaagtaagcaaaaattcatagggaaattgttatagccatatgttgggttttatgccct

SEQ ID NO: 403346 - DNA, 504 bp, Cannabis indica
aaattccagttggtacagccctgaaccaatcagaattctggttgtctaggcagaaaaatatgaaaatgtataaaaaaaatcacatatggcatatataatacatctagcattcaaatatatcttcgtatgagaaaatattttcctaaggcctttttctgacaataagctctaatttatactaagaggcacaaaatcacataataataattaaacctcttaattatctgctaatcccatgatttaactatgtggtcattacaattatttccctattaaaatgattttatcctcgaaatctaatctgaataacttcagacattgagacctcgagttggattctcattcccaggtggtttcctccaccttattgtttcatcaagtatcttgctcaatactatagttctgcttcaaataactttacttttcttaacaagaatttcaattttgagatataagtcaaagtcccaacatacaacatggaagtgcttgttgggttttatgccc

SEQ ID NO: 403347 - DNA, 947 bp, Cannabis indica
tctaatataaaattaaaataaatgttgagctgctgctaccggtttcagaggaggaagttcgcaaaacgttgtttcaaatgcatctagacaaatctccaagccccgatggaatgactcaaggtttttttcagaagagttggccaattgtaaaaggagacattatcaaaatgataaggaagttttttcaccatggtttatttcctccaaatctaaataaaactattctggttttaatccctaaaaagaagcatcctatggatatgcgagacttgagacccattactttatgcaacgtgttatataagattgtgtccaaagtggtggctaatagacttaagaacgttatgccaactatcatatctgacactcaaagtgcagtcttataaggtcgtttaatttcagataatattatgattgcttataagattatgcatcatttgaaaagaaaacgaagagggagggatggctatatggctctcaaacttgatgttagtaaagcctatgataagcttgagtagggttatctctgtgctatgatggtaaggatgggctttgatgggtgatggataaacttggttatgcaatgtgtttgttctgtctcgtataccatcttgcatggtgggaaggagttgggacctattgctgctcaacggggtttgcgtcaaggtgattcgttatcgccttatctctttattttatgtgttgaaggcttctctagtttgctgtgaagttatgagcaaagtggtttgctcacgggttgtaagattgctcgaggtgcgcttgcggacgatagttatatttattgtaaagctactgaggaagaagcacacaacgttaaggagcttttgcacacttatgaggtggcttcgggttaaagaattaattttgctaagtcctccgtgctcttcaaccataatacaaattgtgatcttcgggatgttatttgt

SEQ ID NO: 403348 - DNA, 457 bp, Cannabis indica
taatgagaaagagcaataagatcccaaaaagcttaagtattacggaccttgtagtaagtatatgtaaatttcaatggtaatttaaagatttaataaattattaatgtgattatttaaattataaattattgttgtgtcctcatcaaccaagtaatgtagagtggctactatattatgaggatgataaaagatctagttcagttacctaatcaacgtgactatattaagaaagaggtacataaatatttgtaaaataattatcaaatataaatttatgatttatttatatttattatttaattaatttatttctcttttatattttgtagctaatagaaaaaaagtcatatccaaaaattatgattgaagagtgagcgacagatatgcttccacacttgcagagtcatcacattgtggtcattagtttattttttttaaaaaaatatatattatttat

SEQ ID NO: 403349 - DNA, 506 bp, Cannabis indica
gtacactctgttgatggaagatcgaggctgcaaccaccacttcccccgggtttttttggtaacacgattttctcagccacaccaatagttaaaacaggaaaattactcgaatcgaatgaaaatatatggtatgctgtgaaccaaattcatagtactttaaagcgaatagatgactgtatttgagatcagcgttggattatctagaacttcagcctaatttatcagctcttagtagagggtcacatacatttagaagccctaatcttgggataataagttggattagattacccttctatgatcttgattttgggtggggtagaccaatttttgtgggaccttctacaattctctttgatggtttaacttatttgctatctagtccatcttatgatgaggatgggagtttgttagtggctattggtctccaacatgaacacatgaaagcatttgagaagtttttatatgacatatgatcaattacatccattgatgatgatgagaaa

SEQ ID NO: 403350 - DNA, 812 bp, Cannabis indica
atttaaataaatttagatttaaaagttaaacctaattaaaataaatttagaaaacaaagatgatgatgtcaattatggcaataacatcatcttggaaacggcaatgccaatatctcaaggacaactatgacgacaatgggtacatgtagacgatgatatgacaatgaaaactatgagattgaattttatggcttatggtattaatttacatacatgattaaaatatttttaaattatatattaattcctcctaactccacaatagatttaaaattgaactctcaattacatagaacgctctatacaccaaatatataaatattataaattatccattgttataatctaaataatcaatgaccctctatagacggtttacatcgaattaaagacgaatttattgttttaccctctgatgtattttatccttaaaatacttagctccttataaatgatattttgataaaataatgtaaatactaaaataagagcccttctatttatattgtttagcctagctaagatctaaggaaactatcacttcacttctaaatagctatagaagctatacaaattccatatctatgattaacgctcccacttaattgcactatcgagtttctaaaatgtaagtatgagttagtccaaccggtaactagtaatgaacaagtcaaagaacccgtatagtacaattaagttaaagcttaatcatctcaaggttagatcaattgatctaaaatcaactaaatgagattgacttagaaaagatataatagcaagtttatgatatcttttcactatcaatatcggtc

SEQ ID NO: 403351 - DNA, 395 bp, Cannabis indica
atgtgaaaaccaaggtccattttgattcgggattagaagtacctagggttggtagaagcggaggcttactttgttatggactaatgatgtaaaagtcactctatgttctcaatctataagtcattttgattgttatgtgtcgtgtgccattactaatgtttcgtttcacctcacttgcttttacggctctcccgtcgactctcttaaacctcacacttggcaaatcctgaaaagaatcggccgggataatccccgtgacccttggcttctcattggtgactttaatgcttcctcatctccaatgacaaaaaagggggtaatcctgacaggggcccttcatcggactttagacaattattggactcctttaatctttccccgattgaccccgtggg

SEQ ID NO: 403352 - DNA, 517 bp, Cannabis indica
tctgaaaatgggcgataagagcaaatttccttgaatacgagcaaattcactgttaaacttttcccactttattttccattaaacgcctgatagattttttttcccattcaatacctttttaattatataaacaaagttgtatttagaatagatgattatcatcctttattatagcctagtcagccacaagaagatgatccattctataacattgaatagtgtatagtgaactgtcacacaatctatcacactactgctgcaattactagtcaatcagaaacatggagaaagagtatgccttaaagtcataattgaaggtccttaaccttttcccaaatatatcccacatcttcatcatggttgaacaatctattcctcctcttcaaccattttacctacaaaatagcatggacactacatttcctaatgtcttctttcttcgctctgaccctcatggccggttatgtcctgcacagtttaattcatatttatataaagtaaaataaagatgtttaag

SEQ ID NO: 403353 - DNA, 538 bp, Cannabis indica
tgttttaatataccaccaaattacaaatactatatctatacttttaatattttttccttccaaaaatacccttacatttcaaaaaaacttctctctcactctctggcgtcaaccccgacccagaatccctaccgtcaaacacacagacccagaaccccagttgcaaggcctcgacgtcatcttctctcacgacctctcttgttttttgcgtttctttcttctagtttaccagtttttttgcgatatttagcgatgtatttgtaatgatagaataaatctgaagttagggatgaagtttagcgataatttgcaatttttagcgatgatttgtgatatttagtgatgatattagcgatgctttcacgatgttgtggattggagacatttagcatgtttcatgattcgcgatgtttcgcaatatttagcgatgtttcgcgatattgtcaaaaactagaataaaaaatgcataaaacaagcgagttgagaactcatagattttggggctttgggtttcacgatttctttttgtagtttcgcg

SEQ ID NO: 403354 - DNA, 462 bp, Cannabis indica
agagcttcttttaaccctcgccaaactagatttcaacttgcttcaacaactacatcaaaaggaattgaattatattacgaggttggtattttatgttgaactcgaccacgcaatgataacttattataagaattttttttaaaaaaaaaatacataaaattatatacaatatatacatgagaaatatatattagtacaaattcatattttttaatccgtttttataaacaagtatatatatatatgtatatatttatatatataaatgaatactcaatggttacaaccataatgactatattttctatgacatgttataacatgttaaaaggtaaaaattttatttttcaacatatatcaataataattaactatatacttaaaataaattatttttaaattaaaatattaaatacaatctttttaataattaatatttttaaataatttttatttttattt

SEQ ID NO: 403355 - DNA, 518 bp, Cannabis indica
agtatgatacttcacatttcaaggaacatttgccgccagtgggcaggtggattagcattattaacccccgcattatcccttagattatgcggaggcataagcagtgttggtggattggcttggtaaattccatgctctacgtgctcgccctatggtctagatgattgtggagggtccatttttcaaaaatagccttgaaatcaacaaccccagtgagtgaggcaccaataccacatttacgcacttattgccttaaaccttgactcaaacattctattcctcttattaaaataaacatttgtcaattaaaacactgatctgattttcatatcacattcatttctagatgcgcacatactacctaaaacagaatgtggtaaataaataatcacaaaggcagttacgaatttactctcgacacttactacaccacgagtcgagcttgtctccagtgatgattgtacatgttcaaccgttctatagaaagtttaaaaaccttggtgctctaataccaaatt

SEQ ID NO: 403356 - DNA, 929 bp, Cannabis indica
gcaaagttataatatttcattcatctattgttaaatttaattctctacaaaaaaaaaatattgattgattaacacaagttaggtagtatgtgtgtcattgcttcaacttacaatcatgtccactaaatcttaaaggcaataaattaaataatttttggtaattttttattttcactttaaaatatttttttttttgcatttttacggaattctatatagaaattattattgtaactagcggagcaacctaaatcacaaccaaaaattatatagcaacttatatagaaactactagagaaaccactttagaaactcataccgtaaattttaaaaaaaataatatatagaataattctcctaatttttttctgaaaaaaaaaaaagagcttagcttatatatccaggcggagcatccttacctatattgtatagatagagtgttttattacagcaattataatgtacttgaaaataattgtgtaattactaattattaaaatagtagttatataacatagtaatctatctatttctatatatatttatataaaatgaaaatataacgcggtgatgtaacaatttaaaattgtttagaagtatccaatttatttttcctttttctaatatttttactatataaataatttttttgtaccaaaaccgtacaaaagtattgctaacaaaatacaatccttataaatctatatatctatcaatatattatattatatatttatagagcattgctaaggagaccctcttttgtactcttttttacactttatttataaattaaggacaaatgttatctctttttattagtgtatttgtacttaataattagacataatattattacattattacgtctatgccattacaataaaattatcttaaatatttacttagagttaaatataaatatatat

SEQ ID NO: 403357 - DNA, 736 bp, Cannabis indica
aggatacttaggggtcgtcattggtaccccatattgcaagcgagactagcaatgctagggagcggtatgctcagacactccgtcacgatcctaatagtgacatcctggtaggcaaagaatgagactctaaccaaccaaagcttggagagcccacaagctctttccaaaaaagagatccaggatacatggtggacataggagcctccttcaacattcttttcaaatcaacatatgaaaagatggggctccaactcactaatttggcaccctgcaatcaagtgatgtatggcctctttggccaaggcatcgcacccattgggtatatctgattacctctcactattggagaaaatccaaccaccagaactctgatggcgcagttcgccataattgacgttcccttagcttccaacaccatgatgggctgaccagccccatacaatctgaaggcggtaacatccatctaccacctctgcttgaaatttccaacaaggcagggggtaggatgtttagaggagaccaacaatctggctgtcactattacaacttggccttgtccaaagccaagaaagagaagatgcaactaccaaataaggagcatacaagtttcatgatagacttaggcctataccactacaaagccatgcccttcagggttgaatgtaggggccacatatcaaaggcttgtgaacaaaacgttcaatgatcttatcgaccgcaacatggaggtgtatgt

SEQ ID NO: 403358 - DNA, 527 bp, Cannabis indica
aacccatggatgatggtgcctattatcccacaagatacgtaccgattgtcgaattggaaaattgtcatcttaagcgccgcctggaggaggcaaaccaacgaaacactgagttggaacgggaggcagctgcagccagggtggcataggaaaacaatgcacaaaaccaacttgagcctggagtgaggagaccatgaggcaaacctcgcggctgacgaattaagtggcaggagacgactcaggaggaccctctgaaagctcatgaagaacaaactcggaaaactgaggatgcccttaaaaatgagcaaccaaatgattaatcggagccttctcacagaaatgagaacagaaggtgacctgggactagggagcaggaaatccctcatgagaacaatggaaatactgggactcaacctaggacaggtgggttgccaccaaggcattgttaacgtccttcttgaaccaacatggaaggggcacatacaaaccccagcaggggacatgcaacaacccatacccaagggagaagg

SEQ ID NO: 403359 - DNA, 552 bp, Cannabis indica
atactaacacgtaaggtgcaaaattggtcagtcttcaatatatatcagactttattctaacttattacaaacacaaatatttttttgcataacattatacatttttcttttttggaatcaaataatacatttgtttatgcatgttttctctatgttattactttattagtatttatatcaataatactatagaccaattgagtaaaatttaaactcaagagatatgaaaatgacataattcaacaataaaaactctacccagacaaaaaaaaaaaaaaaatctaccttgcaaaaattcatagttttttttaggtaaataccattttggatcctatgttttgcaaaaattatagattggaccctctgttttgttaaatgataaaatagaccctgtattttctaaaattgtaaaaataagaccctgagcttaatttttgacaattttttttaatacaaccaacttgaagacaattcctaatatgaacagatacaaaaaaatgtaaacattttgtcatagcacttttagatcggattataattaaactttaaaaa

SEQ ID NO: 403360 - DNA, 856 bp, Cannabis indica
taatttaaaataaataataaaataataaataattaaaccataataaaaatttatctagaaaaattaattttcaaattggtaaacctcctaatatctaaaaacaactttaattatttaaaaaataaataaatattaactttattctgatattttagtttttaaattgaaatttgaattctacataaaataaattaacaaattttggctttttagtcattaaaaaataatttttaaaactcaaaatatgatcaaatcaagtttggatgcaagttagggcacataattcggacctgaccgagctaaagaggcaaaaaaaagggtgttcgcgcgcatagccgaggtttttagacaaaatcttgtctgatctgcgcgcgtaagtagggtctctcggccagccttgcaaccaattatcaaaaaatcatatctcactcaatttaatccaaattgagatctgtaaaagcctaaattgattaattttttaccaacattctaaaaaaaatacttccagaacaaaaataaaaataattttggtagaaaattcataattaacattcaatcatcagttaagcacataaactaacatgaacacatccaaatcatacaaacatttttaaatctatatttcatgaaataaatcattaccatggctctgaggtcaattgttggaacttgttttactaagatccagatactaacatgtatgttgattataattttataatctaacatcttaaatataaattttctaaaacgatgaaataaacacataagagattaagaaatatttatattgatgatagtagaataataatgactcattccatttagatctctagcctttgattcctgtctgtag

SEQ ID NO: 403361 - DNA, 748 bp, Cannabis indica
aagtgttagttgttaaattacttgttaattacccgattacctgcttatttgatatacgttagttattagaaaagcatagtagtgagcaataggtatgcgtatgtttgaaaatgcttattagcattgatcatgaattgagatatactaaatgttggaaagttacggtcgtaggtgtgtagatcatgcactcgaggcgatctgttaagggtaaccacgagcttgcaaggctcagcattggcagtgagggtgagaatcctccaccaccacccacctgggaagagttgtatgcagcgatgcaggagaccatccatcagctaggcgatcaaattcgagaactgagggaacagcaagctcaacctgctctaaatcctaatcctgatccttcggcacctctagtagtgccacatgatgcaggaaatcttctggagccgttgtacgagaggttcaggaagcattgtattagaattataccggactagtttagaattttaagttgtcagtttgacggaattggctagaaaatgaccaaaatactcctaggttattttacaagtttaagtgttgagggaaggggtagaatagtctttttacagtttaagcttttcttctttaatgcttttactagactgagatttcattaagtaataggtttatattaagcttatatatgtttttgtataaactaagataagcccagaaaaaaaaattaagaaaagtcaaacaagttcttctccttctttctccttgt

SEQ ID NO: 403362 - DNA, 1273 bp, Cannabis indica
cttttgtgccaacctctttctagtatcgaggaatttcctgaggctgggaaagagatcttggctttaggaaatgggatcttctgatgaggagaatgaggtctattcagagatcaaggctctctacatgtagccggtctttctcaactacgtgtagtcagtctttctccaagctacgtgtagatgatctttctcaggctatacgaagatagtctttctcaagtttatcagcttctcctctcatcctttgtttaagaagatgacttaatagtttgcccctagtagcatttttgccttgtaccacctatactcaattccagcagattcctatatatcaccgtccacccatcacgcttgctctcaaggatagagctcaaagactcactcaacttctgggtctacccggaatatcactttattgacctcagagatcaactttgtggaatacgggctctacccgaaagatttcattccccagcctgtgaaggagaagaagaggaaatccagggctagttgagctgagggaactcatcagaaggatgagcttattcaacttaagggtgaagctaagttgaagggaggtgcaagagcaaaacagtatgctcatgagcctcttgagcaaggagatgaggctgaggtgaccctactcaaaaggaagaagaaacttccggccgagcccaggcctatcgaacatacgattcagatcagggagccttgtctgcctgctcggccatccactcctgtagtaggaaagggaaagtcatcctagaggatcaaagagactcgttcgatgatgatgagccatcaggtcttgctcgggcaaacatttctttcgaagtgcaatatactccgtcttgcttttaactttcttgattattatgctttcatcttctttagagcttcgagcatcttcttattatgttagttttatttcatgcagacatgtctcagacgatgctcgaagctctaaagaagagagtggcaggaagctcaggcttatctcctccggccaagatatccaagagcggtgagacaaccccgtccagagagagggcgccgccgaagcagttattgacctctctgaggagccaaccatcgtggacccttctgccccaaaagtgactaagtccaaagactctcgaggagggagctcggacaagcctgaacagccaaagggtggatccgagctggtcaggagcgaagctgaatagattagggcccctgccccacctccagtgctgcatctagagactaagagaggcaaagatatgctcac

SEQ ID NO: 403363 - DNA, 453 bp, Cannabis indica
caagtgatcatagatcttgtgggaaatttaaaaggttctccttaggctgataaagaattccagagggaagttggcgtggttttagataaatccgagaaggaggttggcgtggtttctattagagaacccagccaacccaagacctaaacctgtgccagaagatctttgtgccaacctctttctagtatcgaggaatttcctgaggctgggaaagagatcttggctttaggaaatgggatcttttgatgaggagaatgaggtctattcagagatcaaggctctctacatgtagccggtctttctcaactacgtgtagtcagtctttctccaagctacgtgtagatggtctttctcaggctatatgaagatagtctttctcgagtttatcgacttctcctctcatcctttgtttaagaagatgacaaaatagtttgcccctagtagcatttttgc

SEQ ID NO: 403364 - DNA, 594 bp, Cannabis indica
actcttgacaatacctaaagcaatattattgagtaaatattattttggactccgttttataaaagttataaattagactctctattttttaaagactaattatttcctgaactttgacatgtaccaaatcatgcctctgaacttttaaggtcgttaaaaatactccatgaactattgagattgttagatttaagaacttttgtctaattttattcaattttactattttagtaattgtttatgtacaaaaccatgctccccagactttgatatcaaccaaatcatgtccctcgaactttgacatccactaaatcatgccctctgaatttttatccatgttagacttttttattaaaaatggaaaaaagtctttaaatccaacaatctcaatagttcatggaacatttttaacaactttaaaagttcaaggagcatgatttggtacatgtcaaagtggggtaaaaatcctaattagccttttttaaatgacaaaatgaaccttgtatttttcaaaatggtacaaagaggaccctaaactaatttttttgtcaaaaattatctaaaattgagctcggggtcttatttgtaccattt

SEQ ID NO: 403365 - DNA, 766 bp, Cannabis indica
cagtacaactttctatcctcagagtgatgacaatccaaaaggacaattcagatattggaagatatgttacgagcctgtgttatggattttgagggctcctggagtaagtacttactgttggtagagttctcgtataataacagttattagagtacaaaagggatggcttcctatgaattgttatacggcagaaagtatagatctcccattcattgggatgagacaggggatacgaaatacttaggtccagaataagtacaacggactaatgaagcaatccagaagactaaagccataatgcttgcatctcagagtaggcaaaatagttatgcagatttgaaatgtaggaatgtagagtttcaagtaggagatcatgtgttcctacgggtgtctccaatgaaggggatcaaacgttttagtgaaaaaggcaaatcatgccctagatttataggaacattcgagatttttgagaaggttggacaaatggcatatcgtttagctttgcctccagctctttcagcagttcacaacgtattctatgtttctatgctacgaaaatacgttttagaccctgttcaagtactatgttatgaaaatcttgacctgcaaccagacttatcatacaaagaacatccaattcagatcgtagacagaaaggataagttccttcggaacaagaccatagctttggtcaaagtactctggagaaacagcaaggtggaggaagccacctgggagctagagtcagacatgagagctcaatatc

SEQ ID NO: 403366 - DNA, 569 bp, Cannabis indica
aagaaaaccaagaacttttaaaaatgtcctttgatctactttatgaaaaatgtactgagtcgcagattactaacgcagcataccaacaccgagtaacaagatacttcaacaaaagggtgaaaaagagacttttcaacgttggagacttggtgttaaggcgagtatttgaaaaatacaagggacgcatttgcaggattattcacccaaactggcagggtccttatgtgatcgaagcaatagtaggaagttgggtttacaaattggctaggctgaatggctcactgatgaagaactactggaatgtggaacatttgcgaccctactaccagtaaattgatgttgtaactcacatttctaatgtaatattttgaacttcagttattaataaagttaatcatgtttcaagtaattacaaagtgttattctttaaaattacttaaggagcatatgtgtatgattaaccagaatttatcaggaaatacatgatatattgcaaacccaccactttaaaaaaaaaaattcaaaacttttaaagttctttttgattaaacctttctgacgagaaagga

SEQ ID NO: 403367 - DNA, 817 bp, Cannabis indica
acaattatataaatacatagatattgattgattaccaaaatattattaatcttcttattaattaccataaaattcttttatttaatgacatgaataatgatagtttttctaatatgggttgtttatacacagagaagatcattgtgaccagtggcatagattagagagttatatttttactattatcatttttaaattttttgttgaacaatatcattttagaatatatatatatatatatatttttgacatgatcattttggaatattattttaactatgataataagaacatgatattaaattattcaaatctttaagtttttttttataagttatgcaaataaattttattttaaaaattaatttgtagcaaatttgttggaatttatttaccagaatcttagatctactcacaagtatgttgtttaacaccttaaatatgaactttctaaaacgataataaaacacatataaagttaagaaaaccttacattggtagcagcggaataatgtctccttccactcagatctctgtattatcaagatctgagcccgagtgtccttctctttgtgtgtgatccttcacagtcttcaatctatgattgaggtaccacttgctgtgtgtggacactactcaatcactaggggattcgaaaattgtgaagaggaaaagagagagttaggttcggctatagagatagaaagaggaaggctcaattttttctgaaaaaggcaatcttaagaaaacttgttgaaaacttgtttatttgactgagccatcactttctatttataggcaactactaggtttaggt

SEQ ID NO: 403368 - DNA, 617 bp, Cannabis indica
ccactacgacaaggtaccgttacaatttgtctaagtacactattggtattatcctcattggttgtgtcaagacaacaaagacagtgggaccatcttatatagaataagatgatagaacactttggaaaaaaatatctttacactttgctactttgttttcagacttagtcattttcttagaaaagtagtatttgttaaaacaaacactttcttatcttaatgaccataggatggtccacccctaatcacttagaatagctattaaacatgcaaacctaagtaattagttttagctttgcttaagttcacgatcaggacatccctgaatcttgtaatggtgtacactaagtacataactatttcatcattttgaagttttcctatcactaaggtattcccttagaaggacttaggcaactattagtaactaatcatagacctttcactttcatcaatatgaaatctgaatttctagggaggtaagtttggatacaattcaaagttcaacttaataatctttgaactctatatccaccaaatttttctccacccctattagctcgtaagatctttaaccacttaccttaatgttttttaacattgctagaaattcatga

SEQ ID NO: 403369 - DNA, 525 bp, Cannabis indica
ctgaaaagtttctttttatcccttccatagtatgaaggtaaatcgagattttctcatgacactcacatatgggcattgacaatcgtctgtgaaagaaaacttgaacggctagtagtggtgttaggcaaaaatgacataacagacttgtcaaaattgaggacttgacctgaagctcaatggtagatattagttaagcatcatttttctaatttgttatacaacaattaataataagaaaaattgcaacgtatatttattgtttattcttctcttgtttgctttttttatattgtaatattttcaatccattatatagtcatgatctatatatatgtgaaattgatagttattacagtaaaataacaaagagttaattttgtatgcaaatcatttaatttatataaaatcatataagcaaaataattattcattttgatttagaaaaaaaaaatacatacttaaaggctttttaatttaaataaaagacattatatattaaaaatataatactttccttttatttta

SEQ ID NO: 403370 - DNA, 502 bp, Cannabis indica
ttgttggggcagccttacaaatgtgacacgaactcttgtggtttaaggtgtacgtacttgtttgaaacctcatatagatgcgaacaaattttaggtaggccatcactttgtaagggggtttttgtttttctaatttctggtaccctcagaaagtatattccaatcgtttctagaagataaagtgcgttaaagttatagcatgcatcttggatctgttttaatttttttttaaataatttatagtgttgaaattatagaatttaaacagttaattgcatgtgtttttctttatactagtgtacctgactattttaaactttattttaaaaaatcgtaaattatttagaatttttcaaaactattaaaatacgtatctatatctagtataattgcaatatgcaccatctataatttttctaggtatcaagaatagaacctgccaaaaggaaaaacaaaaatgctatctttagagacaacattttatagtcacaacataaatttt

SEQ ID NO: 403371 - DNA, 990 bp, Cannabis indica
gctggtgttattgctcctttgacagggactgtgcctcctgatgttgcagaagccaaggctattcttcttgcattggaatgggctcagagtgtgaatcttccagtggatgttgtagagtctgattgtaagggtttagtggataaagttaatgggtcttttagcaacctttctgttatgagtgattttgtaattcgtattagacacttgctatcgttcagtcctacctgtattctttcttttgtgcctcgtgagttcaataaactggctcacaggtgtgctagggcagggttaggattagatggtgagtattgttggaatggttgtttgccttcctggcttacctgaggattcttgttatgttgtactcttttctcaggttttaaagcatcctctgtttacaaaaaaaaaaaataaataaataatggtacttcagtcgagcaaatttcattttttgtagcatgacaaaaaagtgtctcatgtatatttttgaaagaaaataaagttaaaataatttttttcatttacttatttacatataagtcaattctaaacgtttactacacaattttcagaatagaaataaaataattgagaaatataacggaataaatgaagaataatcaaaatcaatatttgtaatatgttgtttactaaaatttcttgaaagtagaatgataatgatttatcttgtttaatttatcaagatacgtaatcaaaatacttaaattgactaaattacccttttgagttaactatagtgtatagcagttattttgtaagacatcttttaaaagataaaattgtcattataaatgttgtaaattcctacaacacaaagtcatcacacacacatgcacaacaatgctcataaactagatactaaaaccagaaaagaatcaaacataaacaagacaaaaatcaatgcagaaaacagagaaaaataaagagtgagacaaggaattttatcctggttcggatctcaatgtgagt

SEQ ID NO: 403372 - DNA, 1068 bp, Cannabis indica
attacacattggttggcgccactactgttgtccttaacagataggtggcacaccaccttatcctaataaacaaagatgacgttcctattagtcttgtccatacaatgacatttatccaaattatttaaataaaaataaattatttattacaaaatacataattactattttgataattcaaaatatatttctaaacatcattatcttgtatcatccataccattgacaatgttacatagtgatgatccaaagaccatggacctataataccaagctctaataaactagattatttactggtaacattaattcactaatgaatgtataatttagatccaatctagctttgtgcacaacttttcaattctagaattaacactttaagggaaccaacatacgatcagttaggaaagtctgaattctatattataattcggttcccaacaatccaccttattagcttcccgaaacagaagttgttagaatcatcttctctaaaaaattataacaagtgaatcaaagaaattaataacatgaataggagttgatgattactctagatttagactgatatactaattgatcatcgttgtgatatgaattaggtatttatagtaaacaactaatttaataaagataacttaattacatattggtgcttatcatatgtagtttctattatatataacaccttcactgagatgtcttgctacattagcgatctgaattgagaatgcttgcacctaataatgggcatcagtaaaccgtactagtaaccgttgattaaagattctataactttaatatgttggtaactgttttattcatgatcaatgatcttaattttccgtacaatataagtcataaccttatatatgaataaggaatttttgatattatttatacataaattattaaatataaaatattaataattcaacattgaattatatatcaaaaattttaaactactatttataacaaaaataatctatacattttttctaaagcataacctaacaaaacaattgaaacaactcgtcgagatctaaatgcctacctacgatg

SEQ ID NO: 403373 - DNA, 401 bp, Cannabis indica
tgtaggtatgggattacacagttcaaaaagacttaaatggttgttagtccataaagcagccagagtgacatatctatgtataagagtcatcagttgtttaacaatttaaagtgtcctctaacatttcatgtaaatcatattttgtaatagtgatatatgtaagtattctgattattctaccttatataatattattaaattaaatccgaagacagacacccatttttatggatcgttaataatatttgactattaagaaatatatttttaatgaaacgtttctcatggctttagtttaaccaaattttgaaggattttttatgtggataaacagtgatgagacgaacatataattaaatgctaattttaaaaatattaaggtgtgtttggtaatatttttt

SEQ ID NO: 403374 - DNA, 857 bp, Cannabis indica
cttacctttaatttggaaattagtaaataattagcgtttaattatgaaaattgtttattcatcttgaattattaatgtacgataatttatttgaattcagaatgcactttatatgtcatatatagaatttcataattttgcatattttgtgcccgacaacattagaacgcggtgtttgactattagaatcacatctcagtatttttagtataacggggcagtatagttagatattgggaatgtcaggaatggtcgagattttagagttgacaaaaataccactgagtgatcttttatgacttatagtgtgggaagcgcaaaatggtcattttgccctattggaaatttgtctttttgtgggtttatgttatgtttagaaaatctgattttaataatgttttgagctgataattatttaataaaataaacattttattcattttttaaaattaaagaaaaaaaataatgaaaaagactctctctttcaattccctctttctctctctcaaaatccctacaaccaactagggtttggtgttattttttgcatttcaagcaagtttcagcaaggattaagtggtctcaagctctaggtaagctcttagtaacatcctctttagtttcttgaattgtaagaaaatggattatgcatgtttttgtggtttttggttgtctgaagttaaattatgtttagatatgttgatttgagcttgttttgataggtagtttgttgattgagcaatctttgagttttagaactcaagcttggttctttaatggtgatttcaattctgagcttgggtagttgttctattgcttggagaatatttattggggtataatatacaggtctggaa

SEQ ID NO: 403375 - DNA, 800 bp, Cannabis indica
tctctctctctctctccttttgtgatagagattttcatcatcatctcatattcacagtgtctcatgagttgagtacacactgtgatagaaattcttcttttgataatatctatatataagtccactcttatcctgagtgttgaggctggtctagaagattgtggtgtgaagtcttcatcgttgttcacaccaaaagattagatgatccatatttattacgagaagaattgatgatcccttgatagggtacaagaggtattgtttcagtttcatgtagtttagatttaatctataatattatgttgagattcatggaattatgattcatgttggattaaattatttcttaataaaatctgcttctacttttctaactataatatgaaccataaaaaccaacaatatttgggtctttctttcgaattttagtcactagatgtccccctagacttcctctttaagacaacattagtctaaaagatatggctacatggaaaaaataacttggttaatttctacagaatatataataaaggcaaggtgaaatccttaaaaaatataccctagacttctgaaggagctgtaacgtccccgcttcaagactctattgggcccttacacccacagactaatgactcttatacacgggtacgccactctagctgcttcatggactgacgactgaccctacaaaccaacacaagtgtttctagcatgctttgtcctcactcgcatgcctcctgggaaaacttcccaggatgtcacccatcctaaaattgccccaggccaagcacgcttaa

SEQ ID NO: 403376 - DNA, 633 bp, Cannabis indica
ttttttagagggtaaatattagggaatttttcaataatatacgttatttagaaattaattacaataataacattacctaaaataattgaaacaattaacgtgacacctcagcctaaataaccataacaataaattaaagatgcctgaaaaaaatcatgtccaaaccattttaatcaaataaataaaaaaaaaattaaacctgataaaaattagcccacgttctcccatatcaatccttattggtatcattagtaactatggtattttttcctttatatatatcaaaactattccagaaattaataaattataagtaaaaaaaatcacataatattttaattaaatttgtagacatctaagttatcaattaaatattttaaagttacaatatgataataggctatacaaaaagactactatataaacatcataacaatagtttatttaaatatgtcaaaataaactaataagtttatttggcatatatgagtagtatatatattatatgtgaaataaatttatgagcaagaagtttcatcatatttaaatctttgacaagtacatatattgttactatataagacatattacaatcatgtgttttgtatacaactagatttgatatctcaactt

SEQ ID NO: 403377 - DNA, 565 bp, Cannabis indica
ttttttttttctagaacttttgaaaattagtctcagagttaggtcttttagaattataggtatgttttacaaaagtaataattggtaaaatggtctatttttggaagtcatttctttctagttatgaaaattattttaaaatagtctctaactaaaaacttgactagacatcgttttcaccatctctcttaatttttaaactaactgtgtgacgtatttcgaccaattctctaaagtattggataccattttgcacaaaattaatgaacctaagaaagcaaaatgtaaaatatgactttaaaaatgaattttgctaagaaatcctttaccaaatataaaagggaaatttgattttctatacttagaaaatcttaaaaattttgccctaaatacatacttaataatattggtaatatatgaccacatttcccatatcccacaaatacccctcccatttcaaaaaaatcaaaaaataaatcagccatggatgcctcatcccgaacctctctctcccatggctgcctcattccgaccaccacgcccggccaccgacgactacccacca

SEQ ID NO: 403378 - DNA, 752 bp, Cannabis indica
cttgcataagagtctcctctcctttttctaatcttatctaccactatttataattgcatagtggtagttaattacaaagctgaccaaaatgtaattacagacattatcccttaaatcgtgggatccgactacaaaatataaatgtagtacatgattttgaagccatacaactgtaattttcctgcttttactgggtcagaagtattgtgtattaaacacttctttaattattgattctggagatgtctcggtagaaacttgattgtagtgaccccaacggcgagctggaaccagtcttatatccgagatcaacaagatatgttttatgtcgattgcagatataaggaaatctgttgacttgtcagggttataagccttgcttctgttagatgggtggactatagggagcttcctcgtagcgagatgaccatttcgcattcttgctcttcaagccgattcgacttttacacttagtttgtttgttgcaagttagggtatgcgttattcttctcgggtgcctcactattctcctttagccacatatagtttctcgttaatactatacgtacgagttcgtacattgattccttgcctaagactttacagtcagcgggttgtgtgacagtcagtagtcccgtgatccgtaagggggaataccgggtaagctgtgcaatcccacactgcctggggaaggtcaagtgggatgattctgagactgtgtaggtatgggactacacagttgaagagagctt

SEQ ID NO: 403379 - DNA, 629 bp, Cannabis indica
agagagagagagaacaagagagggagagagatgttggggctcggggtgctcagggttgggaaaatggacacgagattcgattgagagtagtggcagagcacgctgttcttaatctgcattggcgccacacaagcgaaaataatgagggaggtagagagaaaaggattagattttaaggttttccaattaaggttagaacattttctatttatatatccttttatctatttacttcaatattataaaaatagattctaacataagtgtaattattacaaattatatgtgtaacctcaactaacttattggtttaactatctcatttgcaggttccttttcagttttacaggcagaagcagttgctttactagtaggtttgcgttgggctcaagatgtgggacttcccgtggagagagttttttctgattcactttctttggtctcagctttggagggccagactgtgtatttaaatgaactgggggttatcttttctgatattaaagtcctattgtctagttttcctggggcatctctttctcatgttagccgcaactttaatgttgaggctcatagattggctaagcatgcccttaggatagacaatgaactttcttggatggaagaaa

SEQ ID NO: 403380 - DNA, 530 bp, Cannabis indica
aaacttaacttctcatcacaaccaaaaagaatgttgaaatatttatgcagaaactataaatttaatggtaatttttcaatcattcaaacagaaatattagcattacttgtagagtctagctgtttagagttggtttttgcttttccaaagcaatcctcttttgtaataagttaggctctagataatattgctagtttacttactagtttttcagagacatttttagttcatgttcattgtacaaccaataaaattagagaaatttgagaaaatatgcttacatttggcaaaaaataataatctaaactaaaattaaattactattgacaatataggtttattattcatatctctccaaattatccctcttatatcaaaaacctcacacactctctctttcttctataacataattctaagcacctattggaccaccatctaggattgtacataaaattttgtaaactgctcaacttgaacaactcacccaaatcagaccgagataacccgacgaaaaatataaaccgaaa

SEQ ID NO: 403381 - DNA, 524 bp, Cannabis indica
taatttaaatatataaaataaaattacatataatgatagaaaatatattatttcttaattaaaaataataaaaataatttactgacatttcttatttattcattaaatatgtaatatcacaaaaataaatgttaatttaggattttaaaaataaaaaaataatataaattaataaatctacatacatgttacataaataatatagattactctcatttagttaaaataacatgttaattattctttaatatattactcatcaaatagttgtttataaaataaaattatatttggtatatggactaaaatttgatcaaattcaatcttcacttaatttcatatatatttaatagcaattttgttatattaataaaatttgagtttattcattaaatgtgtacgatttcaaattaaaatgtaccaaaataagttatatttcgttaaaagctaattaggatttttttctctcgaactttgacatctaccaaatcatgtttcctgaatttttttggctgttaaaaatt

SEQ ID NO: 403382 - DNA, 862 bp, Cannabis indica
ctctctctctctctctctctctctctctctctctctctctctctcattgccctaccaaaaccccagaagcaacctcagatcggacctcttataggtggagcaagagaccgaatcttcaccgcccgttcaccgtccagttaccccacctcccttccatcctcgaatcttcaccacccgttccatcaggcccttccttaagcagagacaaggcctcggcaggcctcaagctcctagatctcgagatcaacgggtccagtggggccgcgtggtggtttttcctccgtctaagcaaacctgacattggggaagcactcttcgccggactcttagccctcgacagaggtggggttacaggggcactgtttgaaattcgaagggaggaagagatgaaggaatggcattccgtagataaggaatcagattagagggagtgtagccaacgaagaagatgaagaactcacttggtatgaagggattggacttggaaaggaaaaagacattgggctcggattttgggaagcgtaaggggtgattcttgtggaagtacctgccacatccattgggaccaacctgcatccctacgatcaaccacatccattcgtgaggatggttgaagaagaagaagaagaaaaggaggaggggcggcgggtagggcagagagagagagagagagagaaggagagaagatcagagaaagagggagggaattagggttttcttttaatttttattttttaaaattgttttttaattttaaagaaaaaaatttacttttttttattttaaataattaatttttatttttaatattattatgtgactaataaaattgtaccacgtgtacactgtgtacacgtggaca

SEQ ID NO: 403383 - DNA, 547 bp, Cannabis indica
tttaatttttttgtcaaacaattcgggaattaaaaaactgattatttagtttatttttctaatttaaattctaatcgtatctctaacagagagatgtgcagattattatttagtcgactgtgagtaataaaatttcatttatatttattaaaaaaatgtaagaaagagtattattcactacaaaattaaagataacatgtaagcacgatattacaccaatatgttaaactcaccatctctgtattacacataaatgtattctgaaaccaatctacattctcatattttacctcctacgtagctctccaaatgtagtaaactgaactctgggctgaaatataatgggtcatagaaaaataaatatttttaaaccctcattttttttaagagatatttttaaaaatatgagaaaaattattaaggttataataaatatggcataaaaagtaaatgccactaaatatggcattatctaaccaatcaaattaaaatatggttttttttttctaaaaaaatccatataaaacattaaaaaaatatgaattta

SEQ ID NO: 403384 - DNA, 700 bp, Cannabis indica
gctatatggatcactaactaacctcaatgcaagcatataaagctctaactaacctaggatatatatttgtttgaatttctaaacaatgtttcccatccccatacgttcaaaaagtgaattaaaattgacatactcaaggtcttggagatcacattgcttaccattgatgacatccctttgtgagaaatcttcattaaactttcttgcatattttccatgtgagaagacctcatgccttgccatatttcgttgccccctttgttgcattgacaatctttgcctctttggtcttgaggaagaagcatccatggaggtaggaggttgaagagaataagaaatttaggtttagagagtgagaatttgagagaaaaaagggtttgaggctctattcagggttaaagtatctgaatggggagtgagaaactcggtagtggggtttttatagaaaaaaaaatctcttttgaaaagactgaaacaaccttggaatcgtgacctgcgagtaaaccggttaaccagcttaccagatatgcagaaccgattcaccagtttctgcagcaggaaaattctcccgaaaaggctcaaaaaactattttatccaactgtttgaccccaaatcttttccaacacctcaaatatgataaacaaaatttctcaaactagaaaaacgaaaaaaatttgaaaaatgacgatttacggtaag

SEQ ID NO: 403385 - DNA, 511 bp, Cannabis indica
tttttatagaatacaaagatagatgtaactcacatgtaatgtgataggcgagccatccaaaacttgatgggtgatgatataaaaaaaatgaaaagatcattatttatttttatttttaattattttttacatgtaatttttaatagaataatttacgacatagatacttaagtttaattttttatgataataatacttcagatatttccagaactttcgtaggtacctagccattaagtatcaattcaatggtcacgtggcagtcccttgattggtcaaagccattaaatttttattttttatttaaaattaatttaaacataccaataagaaaataacatgttaataatgacttcacacttaacggtcaggttcttacagaaatttcagaaatatgacttagtattattactgtcaaaaataaaatttaagtatttatttgtaaccgagatttaaacttaaatatttacgctgtaaattaataatttttttttaaaaaaataaattaggg

SEQ ID NO: 403386 - DNA, 814 bp, Cannabis indica
gttgcaagcccaactattgtatgaactttttcatcataaagcttctttataagcttcagttaaaacatagatacaacctcaatagagaaaaagcaacacactttctgtaacctcgattgccatgaaaaacctcccctgcaaatgtcatcaagaatcctgaagtggatttcctggtatcacaatcaccagccatgtctgcatatgtgtacccgtcaagcataggttcaccactgtcaaagcataagcacaatctgaaagtaccttgtagatatcttaatatccatttcactacttcctagtgatccttaccaggattagagaggaatcggctaacaactccaactgcatgagcaatatctggcctcgtacaaaccatagtatacatcaaattgccaactgcatatgagtaaggtattgaagccatttcttgtttatccttctcacttgtaggacattatttggagcttagcttgaaatggcccgcaaatggagaactaactgctttagcttttctcatgttaaatctttcaagaactttttcaacataagcttcttgagataaccaaagtttctcattcttcctgtcacgagaaatctgttaggttttgtgccctaaataaaactcatttcaaaataattagatttactaattaacaaaagatcagaaattgcttttatgttgcatggttcacatgatttatttcatgattatgttaaatatataaattctattaagtccagaacatatataaatatatattatttgcttatgattatagtgtcgtcaacacagtggaatataatcgtgattata

SEQ ID NO: 403387 - DNA, 690 bp, Cannabis indica
ttttttttttttttgtctgaatgttaattaaatacatactacatactggaattgggaattatactgctaaaaaaaaatatactcattaaatatttattaaatattaatatattgattctggaatgagtatatgactaaaatatttatactcattaaatatactcagtataatgagtatcatttgtgaccttgccttaattcacgaagaatatttttatagattattccagaaatgagtataattgtccatatttttttctaaattatatgattgcacttgcaatcttaattcaactaaatctttatataattatttttatgtctatatgtataattcaaataaatctttgtgtaaatgaactgtaatagttttaacatatttgaaaaattgaggttaaaatttttgaattactattttcactacaaagtactttccatggcctagcctttctccataatgtggagaacaatctcttaattcttacatacccactctattcccttattcacctattcatactaaaaagtaaaaaaaaaaaaagccaaagtcgggttggtcgggttattcggtttaattgagcgggttggacctattttcaacccgcccaagcccaattaacagattgagcgagttgtaattttttcgagttattccggtttgtaatttttatcggttttttcggttcgatt

SEQ ID NO: 403388 - DNA, 587 bp, Cannabis indica
taggagcaattattaacaatatgttttattccaattttacttctttaaatcttgattcgttaagagaaactcatgtttttattgaattgactaatcaaactaatcattatcccttagggatagttgaagatgtttttgtgcaggcttatggacttgtcattctaggtgatctctacataattaagatggaagatgagggtgatccaaatcctactttaactaagaagttgcatatgaaagtatggatacttataatggaatgatggagcagtaattaagtataatgtgttaaattccattgataaatacataaggaataagtctttattagaagacccaacgtgaagaccacatgagcacaacatgcagtcgagctaacgacgttaaacaaagcaaacttaagggaatttttcttactaaacaaagcaaacttaggggagtttttcttactcttttctctttattttatattgattttatttgattgagtcttgagaacaatacttatattaagtgtcggagggagggggaagattaactgtcatgtctattcttagttttttttttccttagttgtttagttattt

SEQ ID NO: 403389 - DNA, 557 bp, Cannabis indica
ccacgctcgacccaacgacccacggtggtgactgacccattcgacggcgtagaggaggacttcgacccacggtggatccacaccgaagctaaaatgtcgaaggtatgttgtgattttttttgttttttttttttagaaagtgttaaagatttattttgtttgtgattttgtttgggattgtttgtgaaacctattatttgtaagatttaagaaaatttttgtggaatggaaattgggtggattcagatctgtgaaaggagaaaccattggggaagaagagggtccgatgggtctgatggtcccgatgcatgggtccgacggtgtgggtccgatggtcccgatgccatgggtccgatggtgccaaatatgatagccatatgggtccgatggctaccaatcgaaccaatcagatccatagagcaagaccgattctcccaaattgtgaaggtccgattggaccgatagggtccgatggctaccatatcgggcatatcggacataggacccgtaggtgtttttttttttagggtttattaattattaaattatttagttat

SEQ ID NO: 403390 - DNA, 1081 bp, Cannabis indica
tcagccacatacaaggcaagtcttgtctcaccaaactcctacttcagagcttatcattggtatacacgacaaacatcatttcctacacctattaaaaagtaccatgtagaacctagaaagtaaaaatatatatgtatatatatatatactcatcgtccaaagaatatcctatatattcagcttataaatacaaacagaatgtaatggaaaaggggattcgagggattcgaaatataaagagaaaaaaaaactttaaaattgtaataaagaatatactctcaaagcaaaaaaaaaaattgctcattaataaaagtgattcctgaactacggttaattaatacctgaactatgtaatgatatttttcaatactcatacttaatttttttaaatctaaaatttaagaattaccaaaaattcgcatcaacaaatatatatattgtgtgtgtaggacttaaagatataaaaatcaataatatatactcaaattatttatcaacctaacactctgaattaattcctcatgtacaatttatactaataatagaatgttgtattaattcatgctaataagccaaaaaaatatatttatgaaacctatacttacgtatattaatcatcaataatatatatagcatagggtttgcatttttcatattatttatttaaggctaatttagatttttagagcttctccaaggaagcggcattttatataaatgtcattcctttttgttccaaagagacatcattcaacacagcattttgaggttaatgctacagtgcacggtatatatactgtgcactgtaaacacggtatatgtttttcttttttttttttttaaaaaaataatatttatattatttgatttatttattaaattaaaattttaattttgagaaattctaccatatacatttttaaatgtaatgtattgtttgagcacctcacaaatttttttagtctaatatttttatagtggtgcatattataattatttaagacattttgtaaaattttgaaaatttcagaaaattttaacacgccaaaaataatgtatctttttaaaagtggtgcactga

SEQ ID NO: 403391 - DNA, 748 bp, Cannabis indica
gttgattatttgaattgcttacttatcttaaatgtgtgagttaatagagaagcatgatgtattttgatataaaactgttaaatacgtttatgcatgggcggtaatgcttattagcattaattctagtgggaaagtttctaaccacgaaaaggaacggttgcaagtgtactagaaggtgtacctaaggcgatctagtaagaataattgcgagcctattaggctaggggtaggtggtgtgggtatgaatcttccactaccataagactgagagcaaatgcatgctatgaagtaagagattacttgagtgacaaggttgtagaacctgtatggttgatctcgagcatcgcattgatgaaaaatgacactaagttttgttttaattaagcggctgctaaggctgctaggaaggctttaaggtcgaacgagtatatcactcggaatataaataatatggctaaaataactaggagatgtcggtcttatgcttagatggttgagctaatccttattgctgagggtgaaggactaagtcacaaaagaaatattatgaagagagattcatgaaaataaatgtccagtgttggatcgggtaaagggtgttgactctaatgatcgtaaggaaaagactaacaacccattggttacgggtcctagtaagagaatggttggttgtttagttgagctaaatttagatgatttgaggtaatgttgaggcttggattgacttgtaaagtatagtgcaaatatt

SEQ ID NO: 403392 - DNA, 628 bp, Cannabis indica
gttccctcttgttttctctccgacttcatcgacgtaagtcactttattttgtttatttatttttatgctaattattatttttaacatgtaattaaaaataacctatgaactattaagattattagattttactgttttttatatactaaactatgtttccgagactttgatatataccaaatcatgctcctccaattgaatgaaattacattgtgtaattactaagggtgcgtttggaaagccataatgtaattggatttgtgtgtaattgaaggtaatttacacaatttagcatgtttgcctgaccatgtaataattacactgttactgtgtaattagaagtaattgaggggttccaattacactctccaattctcacggctccccatgagaatttgatgtaattacactgtgtaattactaaaaactttccacattaaacattagctactaaaaaatattattttcccatgtagttactaactattttgccaaacaagatattaagaattcatgtgtaattactaaactgtgtaattactaccctagtaattaccctacctagtaatacacagttacttccaaacacgccctaaaattttttcatattaaacattagctactaaaa

SEQ ID NO: 403393 - DNA, 674 bp, Cannabis indica
ctggctggtgctgacaactcatctctagatgtgttggtgggcggagttttgaaggagcttaccagggttatcttttcttttcgacacttcccttttagcttttcatacttagcttcatatactgactttttcctttatgcaggacggtttgaagctggcttatacctactcccgggctaaatctgctacttccaagagtacggctctgtccgacaccttgagggtggaggcggacttagccaagaaggaagctgaggaggccagggcggagactgcagctgtttgccatgagttgggtgaggcgaacaagaagttgtttgccgctgagaagaaggtcaccgtgctgacgaacgacctagaggctgctgatcgctttgaggaaaccatcgagaccttatttgttgaagttgatcgtcttcaggatgagaggacttctctgcggcaggtccttcttcgactaaaggatgataaggatgctcaggcggccaagacggaccgcttgaaggagaaagtcgatgctttggagactgccgacctcgagctcttctttgatttttggaaggctaatccccaggccaacttcgactacttgggcgaccccaaggacatgtaccttgagtaatacgcggcccaagttgcctatggtgggaaagaggtggctgcttcaactttcg

SEQ ID NO: 403394 - DNA, 565 bp, Cannabis indica
attctcattggctctaatcatctgaaaaagtttatgatttctcaaagatgggtggtcgatccatgaatgcaaaatatttttattttgtttttcaaatgacgttttctaccaaacaattgtcacttaccagttctatcaccgacatagtgtaccaccactaattattatatcaatatatgctcagttcagtcaactgccaataaggatgacttttctacttaatcaaattacgttattaaacttattatgattaagcatgcaattcatttcttacttggtaattattggggcatggttttgtatagagaaataataaaaggtacaatgtgtctagttaaacatggtgtaatattactgtcagaataactaattattttttatttttatttttatttttagaaaaaaatctataacacaaagagaaacaagaaagatccggttacaagatttaaacaagatttgaaacacaattgttcctagtatactctttgtaatacccgaaattaagaaatggattagcaaaactctaattgaataattatgaataattgaggaattatattat

SEQ ID NO: 403395 - DNA, 585 bp, Cannabis indica
ggcctgaacccggtggctctctgctactgcagcttcagattactggtcccaatgcaccaccgatgtcggccaatatcggattatgattcctttttcgaatgccttgtcttaggttccgttttctagagttgatcttcgattctaattttagttttaggggttgaattatgaattctaaggttctaatttttcatttgtttggaaatggacgaactggaaatttgcgtagcttgtttttagtaatgttttgggtatttttgtttgttcattataattttttattgtttgatttgtattttgatatggcattagattctagatttagcaaatgcttttaggaggtttgtatttggctgagaaaattcttgaattttgaagttgatatgttgttttttcttttgcattacataatgtattattggtgtctgatgagcatttagctgtaggaggtcggacggttggggttggacagtcgggggtggacggcttgggctggacagttggtgttcattcttgggggggtttgatttctcgaaaaaaaaaacgaagaagaagaggaagaagaaaagaaaaaaaaaaaggaaa

SEQ ID NO: 403396 - DNA, 878 bp, Cannabis indica
aaaataggaaactaccagattacccatggtattatgatcagaaacaatattttgattatcatctttaagaaacttgatggtgttattctttttacgtttagaggcaaaacgatggaaaaacttagtatttttatcaccagctttcaaccaatgagttctagatctctgcctccaataaatctcttccttataaaggagagcatcaagctgagactgaagacattgaagtcggaaacggttatcctgatcagaacaaggaatatcctgaattcgagcaatttcacgctgaaggtcagatatacgagatttgagggagagattcgtatttttattccaggtctgaagagcagaaatacacaaatcctgcttaaacaaaaaactttgaaaagaactccgagggctctggctagaaagaccacaatcccaagtgtccttgactaaagaaaaaaattcaggattctccagccaaacattctcaaaaagaaatcttctactatgcctagaagaagaattaaagctatcatccgtaaggataagcttcaaagcccgatgatcagagccaaaaaaaggaaggtgatgcaaaacagcatcaggaaaaagatcactccaagaatctgagataatagcccaatcaagatgttccctaacagaactatttttccaagtaaatttatttcccacaaaaggcaaaggagaaagatgaaacttagcaaggaaattagaaaaagcatccatatccctattatcataataagtactaccctctttgtcatcataggataaaaagctattaaagtcacccattataagccaaggaaaagttggagcattataaaaaagtttatctaataaagcccaagtaaaatgtctttgagaag

SEQ ID NO: 403397 - DNA, 504 bp, Cannabis indica
cactgaaatggaagacccagttgtccatatatatatagtggcagaagacgaagtgtgcttacgtggcagaagatgcctggtgacatttttctggaccgttggatcactgtgatgatagtcggtttgtgtatgatcatgtggtttgtgattaataagtaaaagatagagcctttgaaattgaacaatgaatgtgggcattaatgttgtagttgttggattcaaaaagtttcagactttattgttttatcatttgtttaagtttaactcaaaattttggcattcctaactaattctttatggtttagtatagtattttttgacaacttgattgattttaatattatgtgagagtatgaacaagctttctccttcctctccactgcgttcacattctgctcttcatgttcccactctgtggaacctttgccaagccccagatctctcgatctaggtggctccgatccatcttccaatgatacccaacggcagctcgacgcgccaaag

SEQ ID NO: 403398 - DNA, 1239 bp, Cannabis indica
caagtggaagggaaaggagttgagctagtttgcacactcaacaggtccttatatggtttgaaatagtttccaagacaatggaacaaaagatttgatactatatgcaacaaattgagttcaaacgatcagcatatgatcactcttatatttcaaaaatttggagcaatctacaattatgtttttattgctctatgtggatgatatgctcatcatgagcaaagatagatacgtgatcagaagtatgaaagccaagcttaaaagagaatttgagatgaatgagcttggactagtccaaagaatacttgctattaaaatttcaaagaactggaaggaaggtacaatcagcttaaaagcagtccgggtacattaaaaaattattcagaagttcaacaaagaagatgcaaagagtacatctgtcttgttcagcggacaatttgttttgtcgaaggattaatgtctgaacagtgcgaaggagaaagaggaaatgaagaatgtgccctatgaagtggttttaggatgtttaatgtatgtggtggtgagaacctgaccggacatagctcattctctaagcatcctaagtcggttcatgtccaatctggacattaaacattggaaggccctcaaatggttattaaggtacttaaagggcacttgggattatggtctgacctatgagaaaacaacaggagaacttgagttaaaagagttcatggatgttgactattcttcgaatagagatactagaaaattaaccacttcctatatttttttgacaaatcaaaactgtatatgctgaaatgcccagttacaatccgtgtttgccttttccaccacagaagtagaattcatggccaccatgaaagcaatcaaggaagcattatggctttggggaattttatttgaattgaagcaattaaaaggtggagtgactgttttcccgaatagccagtcatccatccatcttcgtaagaatcctgtttatcatacaaatagcaaatatatagacataagactctattggattagagagaagatagaggaaggattgattgatttagagaaggtcagaatagaagataatcctactgatgttgggaataaggtcttaacagtgaacaagttcaagcattgcttgtatgacagtcagtagtcccgtgatctgtaaggggaaataccgggtaagctgtgcaatcccacatcacctgggaaggtcaagtgtgatgattctgaaattgtgta

SEQ ID NO: 403399 - DNA, 784 bp, Cannabis indica
tctatcatactatacataattcatgcacacgtccccaacttccataatcccctaactaagtttataccttaatactattttcatacatgaaacaacattattcctaaattacttactgtacgtcataacttcataatggtatatatatcacttatttaacaattaactaaataatcataatataatactaatgataatcacttcttaattctataagtcctaaacacataatggactaaatctttaagcccataatcaattagctaagtctaaattagaaaaatgacataattattcttataactttaaagaatactatttttttaataacatattttatgcaatcactatttccacatcgagtcatctagactaacgtaatagaaaataataactaaatattttggttattacacaaatagaggagataatttttttttcttgattccaaaagtgttctatcatcttattatgtataagatgatcccactatctctgttgtttttgacacaactgaagaggttaataccatttagtcgtcttagacaatagtcacggtactttgtcgtagtgggaggatttgaaggaacttaccctgttatgacctggaagacaccggtgactaaaatccattgttagtttaaacaagtaatggattgtctaaataagaaactaagaagaaaagtcaagagaactatggttaaaaccattcatgtggaataaccaaaagttttctattacaaggacaagaaaggaaatttcgttagtaagtctattcaatgga

SEQ ID NO: 403400 - DNA, 976 bp, Cannabis indica
ttacatactcatgagaattgtatcttaaagttggtttacgctctcttgtggatctccttactggagccttagctggtggtggtggagatgcttcttgatactgttcatttggctcaccatcatcatcatgttggaatatgttttaccaggaaccaaaattactaccatgtatgttatttaacatccaaaatatgaaattttttaaaacaatgtatattaaacacatataaagtttgagaaactttacattgggtgcagcagaattaaataactccttccgctcaaatctctaacccttgtatccttctgtagtagagtatcactaagatctgagcccgattctccttctcttgaattggattcttcacagccttacacactatgattgagtaccacttgatgtgtgtgggcacttactctatcactatagggttcgaaattatgaagagagaaagagagatgaaggattgaatggcatagagaagatggcttaaatttttgactgaaggtaagtgttttcatcatcttttaagttgtggccatcactatctatctataggtatccaactataggtttaggtttgaattatttggcattaaaaaattgataaaattaatggtaaaataccccttaagtgggcggccatggatgtgggcccccactttgcaattttgccatttttctcaactatttttctcattttctcaaaaatatcatttttccaattcaaccatttaaatgccaaaaactatttatttaataattaaaattaattatcaaataaaattgccatttaacatatttattaattagacttaataaagtctcttaaaataataaataaacccatagaaatctcttttcttcacaatttagccctaccttagtgaaaattcataaactagacatagtctaattttagaattataattgattaattaaaatcaattaactaagtcttacaagcagtatttg

SEQ ID NO: 403401 - DNA, 70 bp, Cannabis indica
ttttttttgaggaaaaactgctattataaattaaaccaaagaatcatttacaataacagaatttataggc

SEQ ID NO: 403402 - DNA, 669 bp, Cannabis indica
aagagttttatctcataataaaattttttttgatagaaatataaaatgagagaagaagaaacaagtactgaaattggctttaatggctgctgctactttagagagaaatatatcatagcaatgtgataatagcctagtctgatgatacatatatattagatcatatccttttgacacatcaccccttatatatgatcttatctattattgtattgtattattagggtgacttttaaaattgacatgaactaaaagtagttgagtcaaagtatagtaaataaaatttaccatgagttgtttatcttttatttatcttaatgtgggtggttgtataagtttctaagctgttttgaatatttttaaggacataggtgattgcttgttgtggaattcataattttataaggacaaatgcagaaaaaaaacgtatattttgatggagatgaagacattcctgaagtacaagatgctactatacaaagcacacacgaaactttgaatgatagtgttgagtttagcatttcaagagatcaacttcgtgaaatggctaatgtccgtgatgaaattgctgatcatatatggagagcaaatcgacgatgaagataatgagtgaagattattaacaattataacttttttaatagttttcttcaagattagacaattatt

SEQ ID NO: 403403 - DNA, 939 bp, Cannabis indica
gtaagacttacaaaattatgaaataatagtggatgctcataatatggaatgaccttgactctcgcctaaacgggacaacgccgaattctcttttcgatcgaataaaaggttgctagaatgtttgtcattttagatgagctgacaactctattcaatggatgatagctttgactctcgcctaaacgggacactgatatcagtttgttgaaaaccttggaaattatttaggattgtattttttagtattttctctagtcattcctacttgctatgtgctaataatttctgaataagattttgtgttaaaccataattgatttctatttattattttgtagtatcctgaattgcaatgtcgaatcccatgttgtcactgttgactgaaaataagctaaatggatctaacttcccaaaatggagagagaacattaatattgctctcataggtgaaagtgccctgtttgtgttgactgagccgtctcctgagcagccaggtgacaatgcaaccaaagctgttaaagagaagttcgagcgttggcagaatgctaacaataaagctcgatacttcatgctttccagcatggttgacaccttgaaaacaaggtttgctaacactgtcacggctgcagaaatcatgacgcagttaactgagctattcggtatggcatctatccagtctcgctttgacgcgactaagaaattcatcaacgcacggatggaaccccatcagaatgtgcgtgatcaccttctccagatggcaagttatttccaggaagcccagaatcatggtgctgaaatggatcagactactcaagtgagtctcatcttgaatagtctgactccagattttctgccctatacatcaaattatgtcatgaataagaaggaacaagactttcacacgttagtcaatgaccttcagacatatgaaaatttgaa

SEQ ID NO: 403404 - DNA, 748 bp, Cannabis indica
attatcactaatcaagaattcacattttagaattttgaaataacccttaactaaaaagaaactacaccatactaatcatcataatcaaaatcataattaaaaattaaagagataggagaagaaaaaaaaactagattaatgaataactgatgatgtaatcttcctcttccccactttctgcaggtttctctatcaaaaatgcaatacaaccccctaaagtgatgtctaaaaatcatatttatataaccctaataattcattttaatttgaactaaaaacttaatattttgcaaaccgtacggacgttgtacaacctctaacagccccagtggtatttaagtggtgtcagggcagaattggctgggtaatttatgtcgcgtgctcagatcagtattttggccaaacatctttaataaaagtcagaattggaagattgaagatattctaaaaagtagagaacgagatctacaactttcatgttgagctccaagtccatttatgcctttaaagctgtcaagatttgtaattacgttttgcttagtcaaaccgagctcctcgacttccactattttctaccaaaatgtgctacaagccctttaaatgactccaaatgcatgattagtcttcaaaatattctaacaaattaaagtcagaataatcaataatttaaagaatcgatttaagaatattaataaattagtcattttataaaacaaatatggacttatcatattgttgggttttatgc

SEQ ID NO: 403405 - DNA, 808 bp, Cannabis indica
ttgtgttcggaaactgtggaaagtgacgttaggcctatagagagtcgtattttatatgatttagagtttattcggggtatcattgttagatatttgaagcgttggagttaccaggggtttgaaaatgacttaaatacccttatgggttagtagctaattagtaaatagccagaagggtatagtggtctttttgagttaagtcttgttttgtcttttatggtgatatatgctgactataggtttaatattttttaaaaaagaaaaaaagaaagaaggaacctaattacttaaataaaaaattgagaaaaacctagacatttccaaagtctttctctccttctctttcgaaccaccaagcttcgcaaggaaagagggatttcattgctgtaattctcaaagttctagcaagaatttgatactccaatcaaggtatgaacccctaggtattttatttgagttttagctaagtttaggttgtatatagcatgaattttggtgtttaagttgctgtatgttctaagggggtttgatttggtaatctggagattgtttaatattggttaagttagtttgaactggaattatgggttgaattgagatttgagaaaagtttgagcttaagaactcaaacatagctctctaatggtggaattggattttgtgtgttttgttgagttctattgcttgggattggtttagtataatgcatacaggtattctggaagttttgagaagattttggattgatttgatttaaggggaagaatttttgggttcccagctcagaatcggaatttcggttcctggg

SEQ ID NO: 403406 - DNA, 627 bp, Cannabis indica
atatatactttccacatattgaaataattatattaaaatataggttgagatagtactttttttaaatccaaacaattaatgatgtagctataattctttttcaaaaacatgataaaaaggaactttagaaaaaaaaatttaagttttagatgattaaaacaaaaagaaaaaagaatgtactcaaaaaaaaggaaaaaaaaaaagtgtcactgaaaaaaaaaatgactaagaatgtgggtgaagcttaagaatagtaaatctccatctattattttggaagcttcttatataattcacgtcatttcataattataatttcctttgttatttctataattatttttcaaattaggtatataattaaaagaaccctattagaaaaactaaaaaaaacattaaataaaaattggaccctttccttgggctctgtgcaatagatctgcctgcacactaatagggatcgggcctgcatagcaatatctcaaagtataaaacttgtttagaagagatcatctatatcccaattttatgccccattattatcatattttatcgtagggaatttttagtcctacaactaaaaggtaactttgtagatcaaaacttaaatcgatcatattttcaact

SEQ ID NO: 403407 - DNA, 848 bp, Cannabis indica
atatatatatatatattgtgattttatgtacatgtgtagacttagtttgatttggttgatattaagataactaaaacttgtatgattgatttattggggcaaagtcttgaatcatttgagccaaaaaactaaccttaatacattatcctttattgtcctattttaagtctaattttttaatttttattctttgttaaaaacaaaatgcatatttatccttgattagagccatgaacttaaataaattatccttaccctattttgcaccataaacataagttgttgtgtactaagtgaaaaatatgatataagtgggatgggaaatttttttgggaattacatttggaaattttgtatgtgcatagagaattatgatccaagtatattacattgaaaagttctcttcttattaaaaaacaactttaaagaaaaaaaaatcatattaagaaaaaaaataatagcaagaaataaatttgataggattataactttaattgtgtgaacaatgagatataaatttaaaaaaatattagttgggagaaaaaaaaattataatgaaaggttttgtattttgattagatttgtaagtttatgatgtgaaatctaacctaaatggcattcttatccaccatttacctaaacctaacgttacatgtatataaagtctttttgatctacatgactttagtttacattagtggaggtgaattagttatgcaagtctatagttatcttgaatgttttgtggaaagggaagtatttatgcacatggattacatgtacataaaggtagtagaattgacatatatattttaataaaaataaaatattagaagttaaatttaaat

SEQ ID NO: 403408 - DNA, 641 bp, Cannabis indica
gcatagaaatagatatgctcatttatttgcattgcctgatttaggcaagttcgtgtcataatgcaatatcatatataatatcattacaccacctcattaggtgagcccatgccacaacctgacaccaatatatcgcatcgtttaatcagatgagcccgtacctacgcctgatacttatcatatgtcactgacgcccgtacctatgcctgatacttcgtcaggaagaaacttaacaatagttgcaatctatgccataaccaaattttcatatcactgacgcctgtacctacgctcgatacgtagcaaggaatattgcatcacctaatcaggtgagcccgtacctacactcggtactcatcatatgtcactgacgcccggtacgttgccaggtatatcggatcacctaatcaggtgagcccatacctacgctcggcactcatcatatgtcattaacgcccgtacctatgcccagtacatctctaggtatatcgcatcacctaatcaggtgagcccatatattatgtccatagtatcatcacattatcattacctaatcagacaatcaataattttagaacatgtcatgccatgtggtacattatgcttttttttacctctagttctagttcaggtatgttggc

SEQ ID NO: 403409 - DNA, 776 bp, Cannabis indica
aatcaaccaaatggagaaaaaaatactcataaatataaacaaaacaacacacagacaataatagtctaaaacaaaatataagtgtgaaaaccagtttcaaacctagaaacaaaataataaaaaatatacaataacatcataaaatagagcaacctcattagagaacccttaaaacttgtaaaaccagtttcgaacttatgaaccctgtaaaaccagattcgacactatgaaaaatcataacaaaatataaatgctaaacaataaagttaactaaaacaagtcatctgaattggcatagttgtcggagttgttgccggcacaaggaaagtcactggagttgctgccagcgctgaaaaaagtcattggaattggcattatctactccggtgactttttcggtactgacagcaaactcctgggaaattcgtcataattggcattgtcattggaaaaattaccaagaaactggtttcttcatcaagaaactagtttgttggtaattttttcggcgactatgccaatattctgatgactttttcgaagtttgcgttcggtgctagaaaagtcgccagagtagctgccaatgtcagaaaagtcgtcagaattgccattgtcactggaaaaatcaccaagaaagtggtttcttcatcaagaaattggtttcttgaagaacgagttactggtttcttcttcaagaaaccagttgattagtggttaaaaatacacacttttatttattttaaatgataaaataaattgagttttaattgatattt

SEQ ID NO: 403410 - DNA, 449 bp, Cannabis indica
agtagtgttctaaattattacatataaggttatgctttataaataattaacgtaagatttttcataataattgttaaataaaatgtgtgagatttttgttaaataaaatgtgtgagattttatatttaattatactaataataatactatgacatctcgtgttggtgctagtagtatctattagaatatttttaatattggtacaaaattattttaattaattttactttttcttattgacggtatatattatcacaaatcaaaatgtgataagagtgaatatattaaacatgatcagattacgatttactaattaatttatttcttaatttaatttttcaattgattgtcaaaatatcttgacaatcaattgtgacaaagactttgatggaaggtctcactaatataaatatagagtctcagtccttgagctcactacttgtaatacc

SEQ ID NO: 403411 - DNA, 750 bp, Cannabis indica
gaaggtgaacaaaaacctggcaaatcaaaagctccttctacttgaacatccatccatctcccccattacccaagcaattcaagttcaaatggtaaacggtccagcaacaataataggcaacagaatgggaaaaagggaaagttcaccagcaagactgaacaagctccccgggagaatcctgctaagtatactgcatttaccaccctgacagaggatgtagaaagtgtttacaaggccactgagtcactagctccgtacaagaagcccgcacccatgaaaaaagatgtcagcaagcaagacgtgaccaagttttgtcaatttcatggagactacgaccatgacaccaatgaatgcaacaatctgaagcaggaaatcaaattcctaatagaaaaacaacccacaagtacagaagtatgtcaaggccgatcaaaatcagaggggtgataacaaccaagacttgctaccaccaccagtatatggacatctgcaactgcaagtcattattggaggcccgcacattgctgaagattcaggaatagctcaggagaggtatgcctgaacagtaaaacacgagcaagaagaagtaatcttggtcgtagaagagagaaagccaagaatcccacaggcaggagagcccaccataacattcaatgatgaggatgttatcaaaatcagattttcgtacaatgacctgttggtcgtggaagtccagatagccaacaagatggtggcccgaactatgatagataa

SEQ ID NO: 403412 - DNA, 881 bp, Cannabis indica
atagttgcgtttttttttttttttttttttgaaatggatactatagtgcttttgatcttgctaatatataatagtcttgttatatatggttggtaattttgacatgttttggtctcttgttattttaatggggctttgattaataatatagttttggactttttgtgagcttgtgtttgttttgttgtggagtttggatgccctattaattgcagtgatatattaatgattttttttttttggttatatataatataaagtaatttgcggtataaatatttaaatttaatttttaattgctaataaatgcttaaatttaatttttaacgataataatacttaagttatatttctaaaatttctgtaggtatctaattgtaaagtgttaagtaaattgttacataacaattcctaattggtctacgtcattaaatttttattttttttaaaagaaaaaagtttaaatataccaataataaaataacaagtgaataataatttgacatttaacggtcagatatctacagaatttcaaaaatataacttctgtattattatcgctaaaaattaaacttaaatatttataccgcaaattattatataataatacctcaccctggtcttttatcctgttgtaaacaatttgattaaaattactctgtttattatgtttttatgctgtggtccatccatgttgtcattttttccataagggcccgtttggtacgcaggattggactggattggactgaaaaggattggactggactggacaagattggattatgctgaaagtaatcctgtgtttggtttaagaatggactggactattttatttatttgcttttagaaaaaaaaaacttaaattaaataaaaatata

SEQ ID NO: 403413 - DNA, 524 bp, Cannabis indica
tttatagcctccatcttctatacccaaggatagaacaaccacaacaccacaataacacccagaaaacaattattaattttagtaaaattgagcaagaacagtgaaattgatgataaaaataaattatgaaaacaaccgtaaaacaacactaaaacaaacaaacaaaaaaactaaaaaaataaacacagtagtatgaaccttataaagaacacagtaagaaaataaaaatatcgtctggcagtatttttgtaaaaaaaaataacaaaactcaatataccatataaatttccctatttttattaaaaaaaaaatttgaaatgtgatatttaagggtctgattggttggtgatttgaaaacagtatttttaaaaactgtgattctgaaatgaaaatgtaacgcccttacttacgtaaaataagatgccataaataaactggcgttaagatactaatgttgcctttatttttttttttaaaaaaaaaaacaacttttcaaaacatgggtacccagttgaaaataaagt

SEQ ID NO: 403414 - DNA, 804 bp, Cannabis indica
gctgttgcttcactggcactgatttgggttttacttcaaaaagtgataaaagttatatcatagcccgtttaagctcttttaaaaataatataatatgaatacgccattataagagaaaacttatttgtaacttgttggaattgactgttatttttttatttttttttaagaataattagtatttttgtccttaatttctaacactatctaattttattcttaaaatatacgaattgttaaaaaaaaattctacaatataacaattacatcttcttttagttttaaaaattaatatttttaacctttaaactttgaccaatactaaattttgtactctttcataacaaaaatggtaaatttcaaaaattataatttttttattaattttgaaaaaaaattaaagaaaagttattaaaaaatctgttaaaaatattaaatttactaaaaaaatttaaattattttatttttaaatattattttatttataaatacatatcttaaaaaattaaaataaaattattattgaaaatttaataaataatttaaaccactaatattttgtaaagagaaaaatcaatcttattttgtgcttacaaatttatatcttaaaaataaaaaaaaataattaaaaattcaataaaaatataaaattattttaaaatatatctataaattaaacttaaaaatatgttatgtatatttaaatatatctagattttttgaggaaaaaaaaaatcaaatttattcttgttaaattagttttttacagatcgaatttttaatatatttttttttaaaaaagt

SEQ ID NO: 403415 - DNA, 642 bp, Cannabis indica
agtgtaaatgagtgtaatttttttgttgacaaaattagattggaaaattatacactgcaccttttaaagaaaatacatttttattagttttagtaaaataattttttagtcaaattatagttatttaagacatcttataaaaatttgaaaaaagtttaatacgctaaaaattacgttcaaatagtgtgttgcacgtgtgactatattattttatactcgtgcaaaataaactatttgaacattatttttcaatattgtaaatttattactaaatttctactaaaattttgtaggatatcttaaaaagctatattctacatgaatatagaaaaaaattaagaactaaaaaattcttctaatgaccgaaacaagtaaaaggtacatcagtacatcctagaattactcaattacatttattgaccaaaactttaaattttttaggggtagtttggaataggcgagaatttaagattgtaatgttatttttttaggaaaaagaaattttatttacactttaaaaatttttaaagacacctcattttaataatttttattttatatgaaatttatatatttaattgtatattttaaatattatacaaaaaattaaaataaaaaattatataaaattttcttaaaaaa

SEQ ID NO: 403416 - DNA, 649 bp, Cannabis indica
attccaattaatatttgtatgggtttagaattataagcagttcattccttaattaattttaatgctatgatcgtgtttatgtgttgaaactaatttaattttttccattagtcttgtcttttgacatggttctttagtcttttccttttagttttttccattagtcttgtcttttgacatgattttttagtcttttccttttagttttttctggttcgagtcttgtcttttggcatgggttgtgtagctcataatcatcatggtgttatggtagaagcattcaagaaggagaagattggatgtgttcaacccgaaattgctgagataataggcattaaagaagcattgagttggattgcaattcattcgtgggatagagtcatgttggaaacaaatagcttggtgtgtgtccaagcaattcaaagcggtatttttatgccttcacagtttggtcttattgttcaagatgttcgaaatttgcttttggctttatcttttgttgatttgtgttttgtaaaacgatctgcaaataagttggctcattgcttggcaagagactcttgtttctctacaggttgtgtgcttcagtttgaggactgttcctttgaagtgcgttctattattttgaacgaatttattaattaataga

SEQ ID NO: 403417 - DNA, 619 bp, Cannabis indica
taatctatatggggtagcttctagggagggttagaattaaaatggaattaaaaaagatttaaaaaaaatgggtttaattgaatcttatggccaaaccctagtgtgggccctaaaggattttaatttttccattttctttaaaaacttatctttttcttttcatagatgtcatattttaattttaactctttaaatgtccaatctatctatttaatcattataattaattatcaaataaaattatcatttaacttatttattattagaccttacaaagtctcttaattaataaacaaaacttaaatcctctttttcttctcaaataagtcattgcttagtgaaaactcacaaacaagatatagtcttattcaaaattcttatcgattaattaaaactaataaattgagtctacaagacactatgatctcaactagtgtgtggaccatgggtctgtataataaagctcctaataagtagatctagaaatgactaattaaattctctatcttattaattcctcctaactccactatcgattcagaatcacaatcctgattatatagaatactctattcaccaagaatagaaacgctatgaattatctattatttcaatccaa

SEQ ID NO: 403418 - DNA, 992 bp, Cannabis indica
  modified_base (67)..(67): a, c, t, g, unknown or other
aaagttgtccaaaatgcactaccggtgccactggtttacacaacgcaagtgattgattcagctttangttcaaggtgtaaacacgcatgggaatcaattggacatgccttgttctcctgtaaatctgccaaggctgtttggaaaaacactaaattcctaattgattatcactatgctcaaggtatgtttaatggagactacctaatacatttggcatcaacgatggaaaaagtggatgttgaagcactcatatgtgtcatgtggcgcatttggaatgataggaacaaagtccttcatggtggcacacaaagagatcccatttcaattgcatcttttgcattgaattacatagagaagtacagaagtgctaaaggattttcctgcaaaaaattgcagcagccagtcactcaccaatctgccacccaacaagcagaacccgcacaccagctttcacaccagcatttagttcaaaaccaacactgcacggctgttaactctacagagatgccaactccaacaacactatacaatcctacccgatccaactgtcagcaagttggagataaccatggggtggctcaacttagtactgattcgcaccagcaaccagcagcagtaacaaggcaccagtcgatcaccttgaatgcagatgacagtatcctgcttccacgtcccttagacaatatcacttggactcctcctgttatgaacatgcttaaaatgaatgttgatgctgcagcaaatttcaaaaatcagacactcagaattggagctgtgattcgcaactataaaggagatgtcattgctgccctctccaaacgtgttcaaggctgctttcgtagtgatgaaatggaagcaaaggcgctttttcatagtctcaatcgggtttcacaatgtccattttcaatagattttgtggagatagatgcgctaagagtttcctctgctctgaactcttctcataatgatttatcatgttttaatgatctaat

SEQ ID NO: 403419 - DNA, 576 bp, Cannabis indica
ggtttggggtggtgttttggatattgtttgacaactaattttgggtgatgggcagggatttaagtggcctgtctttttcttggtttgggggtggtgttttggatgttctttgacacttagttttgggtgatgggcaggaatttaagtggctagtttttgcttgtgtttgggatccagtttgtgctgatgttttgctactttgggctttctctggtttggatggtgtttgaaagttattttgggcatttggctgggtattgtgctcagatattggcctcactgaagtggcatgggctgtatgggcatgttagggtgtaaatggacctcacttgaatcggtatgggccttcatctacagcttcacctccataaatttttccaatttcatcgagtgtctcaatcatttggacactagaatcactaccatcaccacttcctccatcaacatcttccatgtcaaattatggcatgtcaatatctggcatgtacataacaaactcatcataccaataagtagatctacaatttacaagtaaatttcttaacttattaattcctcatgactccactatagatt

SEQ ID NO: 403420 - DNA, 731 bp, Cannabis indica
ttgaaaatttttcaaaagaaacacagtgctttgaaatgaaattggattaaaaaagaaaaatgtctagctagtttttctgataaaagtgctgcttctcaaatgtgatattttcacagtggttgttctagatatatgacggatgacaaggattttatagtgaatatcaaaccaatgcaatttggtgaggttacgtttgacaatggtctaacaggaaatgtcattggtgtgggaactctcaattttgaagggttaccaaggttgaaaaatgttatgcttattgagggactaaaagctaatttacttaacattagtcagatttgtgatcaagggtataccgtcaattttgacaatgattattgttttgttcttaacagtaataaacaatgcattttacaagggtttagatctgttgataattgctatactctcacatctgttcttacttgtcattctgcatgtgaaaatactagtgctgcatatatttctaaaaatcttgttcaacattctcgtacaaaatacattgatataaggcatcattttattaggaaacctgttgcaaaccaaacattgcagttagaatatgttgatactgaaaagcaattgactgatacttttagcccagattcaagtcagtttgactcccacagaaaatctttggaggtttgcattatctaaatcttttctttttgttctctattttgtacaaaattttttgagtagttcttatcttg

SEQ ID NO: 403421 - DNA, 647 bp, Cannabis indica
acctaaaaccacctagcttaacttaaaattcaactaaaacttcaagagaaagctaagagggttaccttgattcaaagtattcaatatcttgatgagattagaaacctttaacaaagaattaatcccctccttgctgggatgaaggttcgaaagaaagagaggaagaattggggattttcttctaaaatttctaattcccttcactgaatagtttgctcaagactaaacctccaattaaagtgatatatggctgcatcaaaagcctactacaagccaaagcaaggagggaaaagacttaaatgccccttgaccctaataaaataattataatcccttaagggcaaaatggtccaatactaatccccgaaaattctaacgcctctaccattaaatgataaaactccgataataaactaaattataaaatgcaactctctaggcccaacgtcgctttccacagcttccgaacacaattagagaaattaggtaattaaatataaaataacataaaaacacatatgatatataaaatatatttctaaaatatgcatttcataattattaatacgaaattcttaaataattaataagtcaaagtattattcataggcggtctttacaattatccccccgttataaggatttcg

SEQ ID NO: 403422 - DNA, 603 bp, Cannabis indica
agctcccaaacaaatcgtctgtagccttctcatgtgctctgcttggagtaaaaatgatgttgcacctcgggttcttgagtaggagaacttttagtactcacttcccagtcttcgaaactcgagttagagagcccatcactcaaagaggacggactggcgcgaagacgaggttggtcctcgtatagaagctgaagcagatcctggtcgatatggtgttcgcctccccaaagctcaccagagttcatttacaaaagacaatacacgagatgagtatttggccaagatatcgaacaaaaataggcaaatttgccgaccaggtctagttgacggactaaaaagatgaaaaacatgtaaagattaagttcgtaacccaagagtttgaaatttttgaatcaagggttaatgttcacgaagctttggatgggcaaggtgaagatcgaacattgcgagattaaagtcaaaatgtcacaaacaacaaagttgtacgatctactacagtaaaaattacgaagtatcgaacctagattttctatatgtctcctaaaacaagtcaagaacaattgtattttctacaatggaaacccagaaaattgaagatacaaa

SEQ ID NO: 403423 - DNA, 914 bp, Cannabis indica
ttaggaatgcttgggacctgaacgtggaccctctgacagactagttcaactgcttcttcggtcctactcctgttcctttcgcctctgagttgacgagccattttgtctccaacctgaaccaacttccagccaaacgatatgcagcctgcgcttccacgaactcaatctatcaggttcagaatatcagcgctgctatgaccgcggtaagtctttattaatggtttcttcttttcttttgtgctttactctagcattcgatctcttatacttaactcttttttcttatttggccagatcgctgcagagaccggtcgcctctcaaagactttaattgatcatgggtacgtcatgtccgagtttgggggcatggacgaggccatgaagagtctgagagatttggcggctgagaggaaagcgttcccggaggaggcccaacagagggaggctcaggcggagaggaagcatcaggaggcactggcagccaaggcggaagagctgaagacccgggatgaggtcgtggttaaagcaaggcacgagctgagggaggccaaggaggcagttaaagatttgtctgccaggctgaagtctatggaagagcttcatcaagctgacttgtagacaacggccaccttgaccgttgaggtgaaggagctcagggatttcaaagatcaggccctgaagaaggctaaaagagatgagctcctggcccctgttgtctgcaatcattgcactaagcgctttgatgatggcgtctttatggcctggaagacaaacggtcaaaaacttaagctcaatttctaccccaagcctgaggaggttcttgtccgctcctgggagaaaaagaagagacttgatgccctgctggaggagcgcagggggcctcgccttccgcctcgtattgattaagccaacca

SEQ ID NO: 403424 - DNA, 762 bp, Cannabis indica
cagttttcactcaaagttaccgacacacttgcattcagaattaagaaaatattagtataatgatatgcatatatgattacatatttagcgtgcatgttaatgaattcctgttagttaacatattaaaatagtagtattagtgtacatagagttgcactgaataccgatagttatatgtttggtagagtactaattgacgctatcacatcggtacgactagagtaccgagtatagactaatattatggtcaatagtactatcatatgaacattctagactcagtttgcgtgggacatgtgatagggttataattgggtgtatggacgcctagttataattcggtgtaagtttatgtcatgattatacttttcttactgagtctttcgactcacagttattacgtgtgtatgcaggtataagctagaaccgaattgggatgagtctaaagctaatggtgaagattatacatatcaagatggttagacctggagcgttcatggtcttcgggacaatttaggctcacctttttaatagtcagttaatgtaagtattatgtagacttatgtaaattttaacgggatcgcagacttatataaattatgtttttttttttgagaagaaatgatttcattaatcaacaaaataaatacaaacatcaataaaatactagcaaacaaccccggtctccaactagcagcagaatacctttccaccatcttggttgaatgactactccattttaaaatagaaggaaagaccatt

SEQ ID NO: 403425 - DNA, 775 bp, Cannabis indica
tggttgatagagggatttttgggattgtggactatgcatgtatttgttttgattatcttggtgtagttttaaattcttgggaagtagaaattcaaggggaggtgctgcccaatttttcttagaattattttgaaaaaacaagataaaaaaaaagaaaaaaatatttatttctaagttaatgggaccaaaaagaacaaggcatgttgaagaaggttcgtcgtcaaacccgccagctacgggttttgatagaacccgatttgtaaatgaggaggctcaaaatcatttcatgatgctcttgattaggccttacattgaagattggggtattgaatttcctgaaaaccccttgaggggtcaacctaggttcgaagcaattcgggctcaaattgagaggatgaaaaggggtagttttgtggatgctcggggtcaggctaatgtgactatggcatgtgaatttctcaccaattggcccgagcgcaaaaatggggaggtgaaggtgcgaggaaagaaggttcccgccactgctaatgcattcaatgttatgttctctgtcgcggattattctagggaggaacaacgcctccgaattattgaggaggaagagcagtttgatttggtggatgtggctgaaatagtgggatttccggggttgaggttccacgacaatgatggccgagacgggtcaaaccaaacatcctacataggtgtgagatcaacccggtggcgaagacgatggcctgtactttgtgagtgctcggttggtgccgagtaaaca

SEQ ID NO: 403426 - DNA, 697 bp, Cannabis indica
aactatgtagtaggttctgatcaatgggcagaagtgggtcaacattcacatgagctatcaatggcttcatcttcttcttcattttggtgtactcgtcaaaccacctcagtctcttcattggtctcttatccacgagtgttggaacggtctctaaaacatgtacctctgaatctttcatatctccaatggacgtgatcgacatgttctgaggtgtatggagtacatcttccacatcatcgggtctctaatcattgggaagaatgaactcatctcctagagaaatggggtctggctgtggctcttcctctgcattggaccttctcggatctcccatgagtgttgataggttcttcaagtaatccatgagctctgcctacccttttattatatcagtctagccttgcttcaaggcaagctgttccctcttaacactctccaatcttgccatatatggcaaaagatattggaacatgaagctgtgaagtgcggggaagagatgctaactacgggatagatacagaatggggcatcgatgtagatgttgaacagaacgggcccctgatggttgagagggtggtagtgtatcctctctgaagattctagcttccttcactcgctgttctagggtttgtgtgagctttgaagcctggctacacaaactatcctgagtaggttgtccatcaataccaataaccga

SEQ ID NO: 403427 - DNA, 568 bp, Cannabis indica
agcaattataggagcttttgaccgtaaaaaacctgttggatccttgttccaacaccaagtatcactcctaagactaacactcaaaggcacctgtttgatgagctcaacatcacgggaatcaaacaagtcctctataagctccaaatcccattgtctactatctggcttcatgagctgagacactttacagttggccagtgccggatgagtagagaccacacgggttagtctcagacaaaagccaaggtgtgttaagcacctcagttgatgaactaggtccaattctcctacaggcaccatctctaagcagcgtttgtgactcaaagacactacgccaaataaagctcggattgccacccaactcggcctctaagaaagaacagttaggaaagtatcgagccttatatatccgacccacaagggaatcctggtgcagaagtaactgccaaccttgctttcccaacaaagacagattatactcacacaaactccgaaaacccatcccaccagagctcttattgttgcaaagtttcctccaactaaatcagctcacacctttcctactact

SEQ ID NO: 403428 - DNA, 767 bp, Cannabis indica
acaaatgaattacatgaagacattgaggagtagggagcacactcttaacatagttagaggataagcaaaggagtcttatcagttgttgcctagttatttccatatgctccaaacaacaaacccaaaatctgtagtgcacattggaactgaagaaaacaacaaattctcattttgtttcatggcactaaatgcttcactgaaagcatggaataaatctagacctataattgtagtggatggaacttttctaaaagctacatacgggggaacattactaacagctattacacaagatgcaacaagtaaaatattctcactaactttttgtatggcagattcagaaaataatatctcatgagaatggttctttgaaaaattaatagcaacatttggtgtaataccctggaattaagaaaatggattagcaaagccctaactagttaattgagtattattgtagaattatattattatataatttattatatgcgaattaatttgagaaatgacatgttaagaccccgttggtgagctaggggcattttagtaattttgaccccagaagggtaaaactatgaatttaatttatttatgtgcttatgaactatattattatatagtatatctggtgtgtcctttttcaggtgtgttctgaagggttggcgcggtatagtcacaaccgggtatttcggggtcgaaatacaattttgggatgtttaattggtattttatttttatataagaaatctgaaacttattatttgtgt

SEQ ID NO: 403429 - DNA, 521 bp, Cannabis indica
cataaaggaacatgagattgaaacaagagagctctagcaacattgagaagatgttgatgcttcctttcaaccacagaattttgttgtggcctttggacacatgaatgatagtgtataatccctaatttggaaaacaaatcattgaattgtaattccttagcattatcagatctaaaacctttaatgactttaccaaattgagtcttaacaagttgaatgaaatggggaataacagattgagcatcagacttatgtttgatgagattgatccaagtaaacctagaacaatcatcaacaatggtaataaaatatctatgcccttcaacagttagagtgctatagggaccccatatatcaacatgaataagatcaaagcaattcttggcaatgttatgattggaaatgaatggtaatttcctttgtttggcatagtggcatatggaacaatggaaatgagaatcagaattggaattgaaatgaaaactcaaatctttattcaatgaatgagcttttacacaaga

SEQ ID NO: 403430 - DNA, 350 bp, Cannabis indica
ttttacccttctcgggttaaaattactaaaatgcccctcactcaccaacggggtcttaacatgtcatttctcaaattaattcgcatataataaattatataataatataattctacaataatactcaattaactagttaggactttgctaatccatttccttaattccagggtattacaaattctttcttggaccaccactactaatttaaactctaagtctgatttgcccattgtaacaccctaactagcataggcgtattacgtgatttttaaaacatgctgtgcagctcgttgctaatcaacgaggtttatggaaaaacgtgattaattaaaatttttgctttttaa

SEQ ID NO: 403431 - DNA, 1189 bp, Cannabis indica
ttgaacagcggacgtcacaaaaaacgtgttctctcatccaaaggtatcattcctttcatctttctcaattcaacctttgtctttagtgtaaaaatattgcattgaatcgtgaaaatattgctgtttacataattaaaacaaggtaccttgggggagagaagaccttaaatagtttagattagaaggatttaagtctctggcaattcaaaattaatttgatagacagacagaaaagacagcctttgggatgagaagttttaactgtattagctgctgaatttaatcttttaggaaaacatagcttgcaacttcccgtgggacttcatagttcatacagataggggttaaagtgatgacactcgactcctcctgatttcatgttttgcctagtagcttagtgacaacatttgtttgttttttgttttttattatttattttatctaatcgctttatcttgactcactgtcgttggctagaagtgaggtcaataaccatattaccattatttaaacaataaaaaataaaaataataatttttgtatatttttaataaaataataaatgataatgagtaataataaattttttatttattttatatattatgtattaaaatataattataaatagtgaattaaataaatttatttttgtgctaaatttagcaaacattttacatcttgtatagagatggtctaatacatggtatgaattttataacaatttagttcaaaaaaggactcactattatatttaacttaaattttgcaattgcattttaatatataaggtacaaaacatttcaaaaaagaaaaaaaatgtataaggtacaaacaaattaatctaatttaaatcaattatatacgtttacttttataatatgagctaaaaatatatatacaccacaattataacttttatgctctaaagatttgtattttaatgttagcctctttctttttctcctaaattcgattacttttatactcttttttgaaatatcatatcaccaattaaacagctaagtaaatctaacaaaacataaagaaatgagcatttttgtacagttgtattatattagagtgtttttaacaagcgcatatgagagaacattatttggtcgtatgataaattcatgggtgaaaaaaaaactaataatattattattgttgttattattttaaatag

SEQ ID NO: 403432 - DNA, 1029 bp, Cannabis indica
aatcttacctgaaaacatccttataaatatatattaaacaaaattaataaaacaataaaaggaaaatgttttgagggattgatgcacatgtaactttttgtaaatttatattgagtaatgttagagatacacttaaattatacataatttttatacatagtaaattagtaatatgtatttaattttacccatatataagtttaagtgagaaccctattattttaattgtataattgagatcaaatacacattagtatattaatttttttattctatttttgtataatatctcacgaaaaactcattttttttacctcatatatttatattacgctacataagtatgtatttatctatattttttatatatcatttaaaaattatttatgttaatatattttattatttttttaaaaataaataaatataataatattacacacacatataatgtaaaaagttttgaaaaaaattaatataatatttatagctcaataaatttctacatgtagttaaacgttatttatgaactaaatcattgagttaatatagctcattaatttgatggagcactattttttacctcttagtctaatttttttttaactattaactattttacttcatttattgtgtagtaaataaactaataaataataaaatataccttgaggcgtttaagtaaaatcatatccggtcattccgggcatacaatagtccgtcatgatcaaagttgacttttgatcccatctgtattatatccatccacataatttattaattaatacataagttaaacaattagttagttaattaattaattctaaaatataattaattaacaaacaaattaagattcctaatgccaactttttgtacaattgaaacatcagtgtagtcaaactaaacattatcataaataatatcatgattaatgatgagaaatacaaaaatgaagagatttcttacaacttaagatatatatattgttcaatatatatatatatatatatatatttatatgtatct

SEQ ID NO: 403433 - DNA, 1089 bp, Cannabis indica
ctctctctctctctctcaaaatgaaataggacaagaggtgctatttataactatagctcatacaagataacaaagtgttatgactgaaaattaaaagagctaaatagctcggtttcaactaacttaaccaatagttagttatattttttattattttggaggattaagttccaaaaattccaccttcactctcaaaagaataacagtctcaaattttaatcaatgatgatggtaaaatcttaaaggtcttaacaggtaccaatgttcaataagttaagacaattctttagcttactgaaagtgaaaccttagttcccatgtcagcaggattgtcacttatgtgaactttatccaattctagctctttgccttctatcttctctctcatccaataaaatcttatgtcaatgtgtttactcttctcatgatgaactggattctcgcaaaagtgaatagatgacaagctatccgaatagatagtccatttgtctttgagcagctttagttcttgtaaaatacactacaaccaaattgtctctttaaattcctcagtagtggccatgaattctgactctattgtggatagggccacaacttgttactgcttagacttccaactgatgcagctcttatttatggaaaaaaaaaatgtaggcgcaatggaccttctgttatctatgttacaagcataatcaacatctacataactagttaggaaaactttttctggatctctctcatagactaggccatatttggatgttcctttcaagtatctaagaagtcatttcaaggccttccaatatgatcaagccatgagttggacatgtgactaagactagatgctttaccaagtaacatttcataaggtattttcaatttcaaaaccctactaggacttctattgatcatgtaacaagcagcaatcaaagctttccccctgaaacttttccccaaaccagaactaatgaagaagcacctaactttgttcagcaaagtcctatttgttctctcggtaataccatttttagtggggtgtgtgcttaacaattttgtgtctaacaatgccatactcagaacacaataagc

SEQ ID NO: 403434 - DNA, 615 bp, Cannabis indica
cattaggaaatgtcctctattaaatggattaaaacaattacatgtagtacaatagagttagcaaatatttgctaaaaaatgaaaataataacaatcctatttgcttatagttttcataagaagacaaggttatgagtctgctatcatagttatatacattattgacttaaatattattagggaaacttacaaaatattgctttttttaccaaatgttttcaaaaatactgagacacggcaaactttatatttttactgtccaagcccattgttttttcttttatactgcccaggctcaatatatttacttttatactgtaaacaataacaaaacataaacggcacctctccttcgtggttggggacggacaaatcaacaccgaaataatagaaacacgagaaaaaatcataaaatctggcaaagagaaaaaaattactaaatcaacaacaaattactgttttgtagtgttattttactgttgttttaatatgaaaaaaagaccacataaatgaaatattgtaaaaaatgacaggacatagaatctataccagttctcataaagagcaatggacaatgggaaaaagaacataattatttcaagagaatgtgacaat

SEQ ID NO: 403435 - DNA, 501 bp, Cannabis indica
tttaatggtagattttaattctgatcttgtttagtttatttgttgcttggaatatgttatttggggtatattaagcaggtctggaaggtttggtatggtttggatacgaattgggcgagatttcaaaattttttgggttacctggtgtaaaccggttaaccggattagaaactggtttcctaaacttttcgtgttgtcgattcgtgttagtttcaaagctttggttggttgattacttgattatttagggtattgcaatgttgtttatcaataggggaaacatttgtttaagtccctgaagagtgatttagcgagtcactcactagtgttacgaataatgtgatttaggggcctataattcgtcgagtagttcttccactcaggttggccggcacacctaaattcagaaatgaggtaagattagtataatggttgcatatgtttacacatgtttagcgtacatgttagttgtcatcaaaataggcaaatttatagccatca

SEQ ID NO: 403436 - DNA, 515 bp, Cannabis indica
aaatatctaatcttttcaacatggtagaaattaagatgaggataattaatggcagaaatctatggcggagatgagttgttggaagtagagtgtcgactagatactaaaaacttattacagccagaaattatgtggagataatcaagttttagattttcaattcatgaaaaattgttcttgtttgcaggatcaatggtggtctcagttgtactcgagtatacagattatttatgtacattttttgtatttgtataattgtaaacttgggtgattttggcaaaatgattaatagaaaatatcttttacttaattaaattattgttgttatatttaattgtatttgtttataatttatataaattattatttataatatataaaatttaaattaaaataattaaatattataaaatatttaatgtagtggcactttttgtgtgtcactatatctccaaaaatattaataaagaataaaaaaaaaaaaaatatagtgacacttcatgtgtgtggttgtt

SEQ ID NO: 403437 - DNA, 705 bp, Cannabis indica
aaggcttaaggctctaaagtgcattacgaatcaagtttaacgtgtccaataatgaggcagaatatgaggccttgctagctaggtttagactttccaagatggtgggggccacgtacatcaaaatatttagtgactctcaaggatagtcaataaggtaaaagaagaatatctagctcacagagagcgcatgtcttcctatttgtcgtctgtttgggagctactccaagaattcaagggatataaaaattcaaaagatacacagggaaaaaacacccaagaaaacttcttagctaagttaggatccaacaaagaaatggaaaaactgggagtagtccctattgactatctctcggagcccagcatcatgtctaagaaagaagtttaagtaatcaatcaagcatcaacttggatggattcctattaggctaaaattagtctaagtttcgggtcatattttcggttagttttcactctttgtttctagttttagggctatattacgcttgattcttttgttttaggtcctcgggtgtttaaagaaagtatgtacaagaattgagaccaagtggtgaaggaattaagagaaaaatcaaaaatcgtgtcgttgcctaatccagtcgcggcaggcaatagaaattttcaaaaaacgaagttcaaccccgtctcgacgggggcattgccagtcgcgacggggaccccagtgac

SEQ ID NO: 403438 - DNA, 513 bp, Cannabis indica
ccacatataaggtccaaattcttagacagaaacatgtgatatcagttacttccaaatgttcttttaataaattcaaaacggagtctgtactgacaaaactggaggaaaattacagttttacaaacattggatacttatgccgctaaaaataaatattgggtttatgtcgctatttacctattataataacattatatatatgtatgaaagaaaataaatttagatttttaataaaaggaaaaaaaaattatgttagttgaacttaaaaaaattataggaaacataaaaaaatatttaaataatttctctcaaaaataaaagtaaacaattacaagcatccaccaaatcaagttactcaaactctttctcatcattctccgatcggattggatgttgtttgacctcaaaaagtaaccgatccaatccaatctgcacttaattatatatattattaaaaaattataatatgtaatatatattaattaaaaaagacacaaacttctaatttcttaa

SEQ ID NO: 403439 - DNA, 817 bp, Cannabis indica
ctggatagaagatccgtccaggcaagacaaccctccaacatagcgagtatccaaaagaccttagtcagagtatccgagaaagtaacaaacgagtcttcaaacatctagctcataatcatattcattaagtaccaaatctcgcgatatcaagacttaatttctaggatctcgtccgaggatcatatctttccaatatggaaagatattaattgacggtcaagaattaaagtgtctttattatccataaaagtaggacacggtttgataattatcaagatgtggtctccatgttatcaaacaatcaacgcctcatggacagggcatcaccaaatcagcccaaagtcattatattatctgtattcaccccatcggtgggcaagaaccttagcactataaaaaaaaaaaaaaaaaaaaaaaaaaaaaaaaaggttagaatttcaatccttgagtactcagacaaaatctagggtttaaacacttgtgtaaatcataaggcatttccagtcttatagtaataatagtgactcgtggactaaggcacattaacatcctaaacacataaaaattttggtttcacccttcattgattattatttctttacctttctcattattttattagttttcggaaatttcggtaaatctcatgcctcttggcaggtctgcaccacaaactttgctgatacatcttcatccatagccaaagagtcatttggaaccaccactgccttacttttcttatttttcttagcacagttagagctagtttggcacaattgtgttgtgggaaaaaacaattgtagctgtgctgtaagaa

SEQ ID NO: 403440 - DNA, 942 bp, Cannabis indica
taactttgccagtgcatctggagaccaagaaaggtagagagatgctcgccattacatgaaccggttggttcctgaggtaagtgagcagctggctggtgctaacaacgagtcttccctggagctgctgatgggaggagtcttgagggaattcaccagggtaagtctttgttgacagtttcctctagtccttctttacttggttcagactctaaagtttttctctgtgtaggctagtctgaagttggcttacatctattcccgagctaaatctactgcctctaaaaatgctgctatgtccaacaccatgagggcggaggtggacttggttaggaaggatgctgatgatgccagagtggaacttggagctgtccggatggatctgggtgaagtcaacaagaagcctttttactgctgagacgcaaatagtcgagttgactaaggaccttgaggcctccgaccaacttgaagctaccattggcaccctgtcggcagaagtgaatagccttcaagaggaaaggggagttcttcatacgatattccgacggctggaagaagagaagaagactaaggaggaggcggttgcagctgaggtcgagaagcataaatcagaggtggcgaggctagaagagaaagttcatgccttagagacagtcggtctcgagatcttttatgacttttggaaggctaaccctcaggcaaattttgattacttgggtgaagccaaagacatgtatctcgagtactgcgcttcccaggtggcttatggtgaacccgaggcgactgttattacctctagccagaatgttcatgttccttccactcagaaaacagatcctccatctcctaccggcccaaaagacccgaaccgagagcctaagactccaactgtttaaatacttttctttttatcttttctttttttatatatatatcttattcggc

SEQ ID NO: 403441 - DNA, 1355 bp, Cannabis indica
tcatgtttagtctagtttgagttttgctacggttttgggttctggtccgggtctgggtcttggtcaggttcgattccctgatttagacaccgattatgcgtcaggtccaagcctcgtttcttgggtcctgggtcacgggccaaaatcgagatcctagtccggttctagctcatgtcttgggtcatggttcgagtgtcaggtggaggtttgcatctaggttagggtcttgggtcgtgagtcatggatcctggtccccgattgaagtcagggtccaaggtcccagtctgggttagggtcccagtctgagtgcaggtcccggttcgtttttggtactggtccttgtcttgggtcttggcttggtctaggtttgggtcacaattcggttctcaggtctaaggtctaagtatcgggtcccaggtcccgggtcctggtcccggtctcggtcccggtcccggtcccaggtcccgttctcggtctcagtcccggtcccggtcctaggtcccgatctcggtctcggtcccggtcccaggtctcgatctcggtcccagctcttgagtctcgatcctattcctagtccagtttctagtcctagttctggttcacgtctttgtcctagtccgggtctaggtcccatacctgatatcggtctaggtccgggtctcgggttcgagtccgagttctagtacgagtacgagtctgggtttgggtctgattctgggtccaagtttcagtccgtgtctgggtccgggtcttggtctgggtttgggtctgggtccgggttctggtataggtctgggttcaggacctggtcccgagtaatgggtcctgggttacgggatctgggtcgcaggtcctggcgcaagtctgggcttgggttcgggtctcttgggttcgagtcattattcggttctgcgcctagatctggttttggggccatgtccaattcctgttccacggtccttattccagttcttattccgatttcgggtctcggatccgagtttgggtttgggtcctagtctagaaatgtttccaggttcgggtcttggtacgattcccatatctagacccccactaggggttgggtccaagccccatgtcgtgggtcaagatctggataccaatattcggtccgattcggatcttgggtccctgtccgtgtccatgtcctggtcaaggtttgggaccgagaccggggttggggcttgggtcactctcccagtcccgggtctcgattcttgttctaatttttagtttgggaccccaatctaggtctgggtcctgggtccaggtctgagtctccaatccaggtccagaatcctgggtccgggtcttggtccaagcccatgtctggg

SEQ ID NO: 403442 - DNA, 868 bp, Cannabis indica
atttttttttttgaacccatactcccagttgtgcagcattgcttcagcaattcattctcttatgcatctctgtttcaaaaatgctgagccaatgctataactcctaggacctactgctttaaacacaattcctacttttcagcatatttcaacaacttcattttctgccttgcacttgacaataaaaatcaacaccatagcaaaaccattagtaactgtagaaatttgaaaattatatatatgtaattatataagtatgtatataattaatttttttttctttttctttctttttctcttttttttttttttttcaagccccaaacttaattttaatcacactcttcttgttttttttacaaggggtgacacaccccaatcttattatataatatatatatatatataactaatataatcttgttcttccgctcttgggttacccaaatgtgatacaataaggccatggcaacccgaagtcctttttcctcaagcctcttccaaagtgatggaggtttttgctcgatcaacctcatcacccccaaacttcactccttggtctttcaccaagaattttcttcttgaaagtgcatcacgtagttctaccaccccatcgggataaactctcaccactaagaaagatccatcacaccttgaatctagtcgtccatgagtagccttcgttaaagagttggcgaaaaagcacttgttgcccaacttcaaacatttgagaccaaatttttctactaagcttctttttctttctcttctttttgggtagttttttaggctcaaatgatgttttgtctttgctttctcgcggctcgtgatccttagcaatttctgggaatcttctttctcaccttct

SEQ ID NO: 403443 - DNA, 554 bp, Cannabis indica
agtaagtttttgagagaaaaatcaaagaaagaacaaaaatttcattttttcattcaagagctctctctctctctccctctcggccttggttgggggctgctagggctgtgatttctttgcaaaattcaagtgttttccctcaagtttagagtgattctagtgaaggtaatccttgttcaagcttctcttttagtttcttggaattttgaagaaaaataatgttgaattgcatgcttatcttgaagtgttgttgtcgctgtgtttgttaaatattttcagaggtttaaccttgtttgattgagtagaatagagctagttatgatgcatgttagttgtgttgttcaaatttttgaattttggctcaaaaactataattttcaaggtaatttgaggattttcgtggctgtagttgttgtaattgtttagtgttgttttcacaggctattttatgcatgattgagtagattcaagcaggtttgaatgcatgtttgaggggtttttcaaagtttgagttttgaactcaaagcatggagctttaatagacatttttagta

SEQ ID NO: 403444 - DNA, 1030 bp, Cannabis indica
gggttattctttctgattaaaaacttaattttgcgctttaaattattacattcatttgtgtcctggccgtagtctgcatgaaagcggtaagactttattgtatctgtttgcttactcctttttcatgggagatagtttcttgtacgacaccatagactgagttgtcacatagattgtctctatgtcatctgttaggactgagaaagtagtaaatttagaggcattttctctagggtgctactcggcgttgccagtgaatttgcctttctttccattaccctacctatttctgctattagacctcctcccatttgaattcgaactgttgggatattgtggattctggacggacatccctattgatgtggcgcgttgttgatttttcttttgccagatagtatccacgtgttgaacaacttctttgagcttaatgaatctaattcctcgatctaaaaattaagccattgataccacagttagccttttaatatctttccacaactctccaagaggctcaatgcccccagtattgcagctaatcttctttctttagtcagccccttaacctttgtggcttcggtcattcgctaatataagctctgaggggtttgttggaattattttaccaggatctagatttactaataagtatgtttaattaacatcctaatatgaattctaaaacaatgaaataaacacatacgagtttaagaaaccttacagtggatgcaacagaatattatgactccttccattcactcaagggatttcgaaaacagagaagaaaaagagaggaaagtggtggctcaggaattcactctgaaaagaatgagatctaattctctgtgaaacctgaagcctttaccttctatttatagaataccacacagggttaaggttgaattacttggcatttaaaaatgaaaaataaaatgataaaagggaagcaaagtggccggccatagaaaaatggaaacaagcctctcacttttgcaactttcctattttatcattcctagtttcccattct

SEQ ID NO: 403445 - DNA, 796 bp, Cannabis indica
aaaaggacttttccttttatttactattttggcattttgtggacattaggatctgattcctatttattttttgagttagatttaattaggaatggattattttattaaaggaaacgctagagaaacctagaatatctctctctctctctctcttcaattccctctctcttttgagccacctagaagcagtaggaatttgggattaattattttaacccaagaaattcagcaaggttttatgactctacttaaggtatgattctctagtgtttctatccttgttttctttgagctctagcttgaatattgcatgagttatgattttaggggctgtgtggattagatttgtttgatgttctgaagttgagttatggttgtttatgtaatattaggttagattaattgattattaagaggttgggataaagttggagcttgtaagctcttacttggtgctttaatggtgtttttgtcttctggactcattgtggagttttattgcttagattgggtctattacggtgtgtacaggtgttctgaaaggtttcattgaatttggggttgaattgtggcgtgagggtcgatttttggtttttctgcacaaaaccagttaaccagttttgtgggacttgagaaaccggttaaccgttataagtaattactcctgaaaccgtagttcggtttattacttatcgtttgctttatcaagcaacgatagtgacatatgcaacttgtggttaacgagtggtaagggttggaaacgatcattaccgttatgagtaattactcttgaaac

SEQ ID NO: 403446 - DNA, 523 bp, Cannabis indica
aattagatttgaaatatgaaaaataaaaatctaaatacaaaactacacaaaaaatccgaaattaattccatgaaaaagcatgaaaaattgaagaaaatttaaaaaattgcaagttgtacggagctaagaaaatttgaaaaataaggtcaattttttaaaaattgtgttgcataccatccgtgcgctgagctagggatgcacaaccgagaaatctcagtcagagccgcacccttaccctggtgttcagacaaaataggagacacccgaccaagaaaacttggacatctccttgtctgaagcgcacgtgaccgagtgatcactcggatccgcacgcgtatggggtgtttccaccccttatctttattcaaaacttcaaaaaatcaataactaattcaaaataaaatacaaaattaagttactagtaaaaaagtaaattgcttaatttttcccaaactatccaacaaaaataatttcagaatgaaaattaaattatttttcataaaaaatttcaaaaacatcaatc

SEQ ID NO: 403447 - DNA, 1117 bp, Cannabis indica
gtggtcggatgtgggagatatggccaggtcacgaaccgggtcatgccgatccgggtttcagacccacagacccgcctgagcaattctgggtgacagggacgatgaaaaaatgacttgtcgtttttgcctctatcgggcaaaacgacatgttgttcgtcataatgcttcatcccctgaaaaacgacgtgtcgttttttttttttgcagtttcagcccagccttctaacgatgtgtcgttcggatctatgcctccttagtgtaaatgacttgtcgtttgaagcccctgtctgtgcatcgttttggccaaacagcacgtcgtttttgtcaaacaacatgtcgtacggccatggctatttaaaaaaaaaaatcaaaggcagcaggcacgtggggcgcgtgcacggcccattttgggccatttttcaccatttttcatattttttaattctctattatttcttggtatgtacaatactaattgcatgaattttattcatacttggttgataattttagtattgtggcataaattttgtgatttatttcaacaattagtgcttattttcttgcctatcgtaagattaagcatggaaaattgtttggtaatgaggaacatttaaatattaatttatttaaatattgtatcttcctccaaaataacattaagatccttataagtaattaattatcctatcgataataattgcttgctaaggatgcttaatatggtgaagaaaatttattaaatattatgaatcacagtttatctatcctttcgatagtaaattaatgtatttgattataatatttaatagattgttcttacctgtgtatgagttctactttatttatttgtctaagaactctagcatacatgatgatcatttgttattttgcgatcatttatttatgagagaaagagcacaaatgacatgattttgttataacatgcatttaatggttattgctcttgtttctcattcagctttaagcattccaagaacctctgccatgttgacactgaatggaaccaaccacaaacagtgggtagaatctctcatgttgaatttgactcttatgagagtggatttggccttgagaatggatgcaccgcctaaac

SEQ ID NO: 403448 - DNA, 633 bp, Cannabis indica
ctttcattgctctccttgtctacgttgacgacatcatcatcattggtcctaaaatcactattccccacaaattacaaaactcaaggctcttggaaatcttaaatacttcctcggctttgagatagctcatgccgaagatggtttattcctttctcaaaggaaatatacattacaacttcttaaagattcaggctacatgggcagtaaacccaacaaaacacctatggaatctaagctcaaacttgacaacgaacatggagaagcattggataacccttctcattattgacagcttgttagcaagctattatgctgttggaatttattttaccaggatcatagatctactcacatgtacgttgatttaacatcctaaatatgaactttctaaaacgataataaacacatatgaagttaagaaaaccttacattggttacagcggaataatatgtctccttccactcagatctctaacccttgtatcctttctgttgtagagtattatcaagatctgagtccgaatgtccttctcttggatttggatccttcacaatcttccaaactatgattgaggtactacttgctgtgtgtgggcactactctttcactagggtatttcgaaattggaagag

SEQ ID NO: 403449 - DNA, 641 bp, Cannabis indica
ttgaaacctcttccatatattttattttgagtgtagatatgattattctttttcattctacacagtattttagtttttcttatacgtatataatatatataaacactttttaataagtattattcattgatacgatatttaaataaatttaattataaatattaattttaaaaatattaaacaattaaattatgatctaatgacaaataataaaaaaaatggaatttttatttttaatttagctatttaattaaaaataatataaaaaaatatctctgtttatactatacaaaaaatatatttttatacaaaatatttaagtcaaatttatctttttttaccaaaaaactttttttcaaccgccggaacaactagtccatataatgtaaaaatgagagatttttctaattagattaaaaaattaagcataaaaacatgaatttcctaatactacccttcatgagttccccattaagagtgcacccatatatatagatatagggtaaatggtggtaaaactccccgatactttcattttggtttcacttaacccccaaaacccaaactttgggcggttaacccccgaactactcgtattctgttagcaatttaatattttcgtccattttaggtgttaagtg

SEQ ID NO: 403450 - DNA, 660 bp, Cannabis indica
ctcttctattttgaagttctacatgataatattcgcaagccaacaactagtcgcctcgtaccacacctactcctgctggcgtttggaattttagggataggtgtttgattaaactaactgtccctagtcaaatcaatgcagggcgacccgtcaatatgttataaactgatggtagatcaacaactaagaactcctgcataagtgttgtagataacggtggctctcccacagttaatgggagtctaatgatgccttggctggcgacactatcaccagtgaatccacataagctcaccatgcaaggttttaactttgcatcttgtagtcccattttcttcaatgtatccctgtaaaggatacttaccgagcttctattatccaccaacactctttttattctcttgttggcgagctgaactgtgatgacgagagaatcgacatgtggaaacctcacgtgttttgtatcttcctccgataatataattggaggttcttctgtttttacttttttagtggttctggagcaaataccgattgctcgttctttatttcattaacatatcttttctgggcattactactctctccaacgagatgttgccctcccgagataaccagtatatcctcgccctcaaccgggggaggttgcaatctttggtt

SEQ ID NO: 403451 - DNA, 766 bp, Cannabis indica
taagtaataaattatatcaaattgtaatataatttttcatataatattgcatgaaaatttaagtgtataaacagaccgatccaacttgtgtttaccaaatctcgttattgtaataaataactaaacacgacatgtattaggcttgacacctcgaattgttataagaattgacaaatttatatagcaaacttatcatatgattttaagaccgttcccatcaccatatctcacttgtatctcaagtgtgttgttatcgtcatatcttacttgaagttaattacgttaagaaaattacggaaattttcttatgaatcaaataagtgagaataaaataacaacagaaataacacacacacacaaatttgataacaaattttggtatgtctctaaatctgctacaaatcttttactgaaactgagaaacaaaaatacacactgttttacaacaatcctcacaacccacaccccaattatactcgagaatttttctcataaaaattctctcaaaaaaaatttctctctctaagcttttaactaaagctattcttcttttttgttttgggtatatatataaatgaaacctatgtgggtttatatagactttggacaaataaaatgagtggtagaaattagcctatagttatgcaccttccattactaatttgcgaactttggcttcctaaaaataacaatggatgtgatccattccttttattttaactaagaaaggataatgttatttctttaacaatcttccacttgaaaa

SEQ ID NO: 403452 - DNA, 589 bp, Cannabis indica
aatttcactagctgccatacataacttagtcgtgcaccaaatgaatgttaagacctcaatggtgaattagaagagaaaatctacatggatcgacctgaagggtttgtgatccgtatctaggagcataaggtctacaagttggataaatctctgtatggtctaaaacagggactaagcagtggcatgaaaaatttgacactttagtcatttcaaatagctttaaagtgaatcaaagtggtaagtgcatttattacaaatctaaaaacaacatatgcacaatcatatgtctatatgtggatgtcttgcttatttttggttctaacattcatgtcgtgaacactatgaaatcaatattgtgttccaactttaatatgaaagacctcggagaagcaagtgtaatccttagaataaagattactaggtctgagataagggaatttttctagattaatctcactacattgagaagattctaagaaaatataattactttaactgtaaacccgcttgtaccctatatgatgtcacagtcagtagtcccgtgatccgtaaggagaaacagcgggtaagctgtgcaatcccacaccgc

SEQ ID NO: 403453 - DNA, 618 bp, Cannabis indica
aattaaaattactaaaacatatagaagcttaccgaactaagagtcaagcttatccttgatgatgattgtacatatcttgacaatctttggaaaataacctgaaaattctgataccaaattgaaacaccctactacattaggtgtgttaccatgatttcataatttttgtgcacacctttgctaattatagagtttaatgaaaaatgtgaataattaattttttttaaataacttaaactttaaagataaacataatatatataagtctgggaacccattaaaatttatataagtctacaaaatacttgcgttacaaaagttttccttatatgactattaaaaaggtgagcctaaactgtcctgaagaacctgaacgctccaggtctaactgatgggttttatgccctaaataaaactcatttccatataatcagatttacttattaatatagatcagaaataacatttaatgttgcatggttcacatgatttatttcatgattatatgtacataatgtataaattcatatgaaacccttttcacatacttgatcctgtttattgtgccgtcaacacattggaaagtaaacatgactatgtgaataaagtttcctagat

SEQ ID NO: 403454 - DNA, 812 bp, Cannabis indica
gtgtgatatcacaccaaaacctcgtccaactgaacgacaattgtataatcatttttgggtttgtctacagtgtcccaccatagttaggtgggcactgtagacaacactaaatagtttattttaaaaaaaattaataattatataataattaaaaaaaaactaaataattataaataaatattaatcaaaacttttataaatgtatttgtttgtatttttatatttttaagtgtgctaaaaaagtaatttagcggtgttcgcggggcgggtattgcggtctttgacctttttttaagagaaatgatagtaaatggccccaaatcataggattatgttagtttatgtcctcatttcaaaaaaatatagcaaatgaccctaaatcataagattatgttagtaaatgtccttatttcaaaatcattaattttttatttttttttagaattagaagaaaattatttaaatattatggtatatctatattagttttgttaaaatcttttttttttttaagttatgtcaatttttttaagaaatttttacactaaaaatacaaaaggctaactttattacatatatactacaacacggtaaaagcaacttttatacactttaagtttattttattacacttttaccacttgcacacaaaatcttgtgggtatgtttggaaattattcatggcgaaaataacccagaagactccgactgctttaccgtgagacctattttcggtgaaatccattgccaccgccgccgtcacagcatgtgggtcgggatcctccatagccggattttctgtggcgccgcct

SEQ ID NO: 403455 - DNA, 566 bp, Cannabis indica
acaataaaaaatgattgtcccaccaagtagttcataacatgaactataagatagaacaagaaactcctactaacccaaaagaactaaagattataaaatactcgtataaacatgtttattaaacaacacgacacttaatcctttggttagaaaatctgctaacatcgacttggtcttgcaatattctatcacaatgtctcctttcttgaccaagtctctaatagtgagatactttatttctatatgtttggaagcactactaatctcattatttttttgaaaagaaaacatcagtattattatcacaataaattagtataggagatgaaatagaatcaactaatcatatctctaaaattaaaattctttgaccatcaagctcgcaaacatgccccataacacggaacaaactcatcatattttgtatatgatgtgattaaagtctatttaatactttttcaagatatagctacactagtccaagtgaaaatacatctaaaaattgactttgaatcatctacacaaccaccaaaatctaaatacgaataaccaacaactcgaagatt

SEQ ID NO: 403456 - DNA, 524 bp, Cannabis indica
gatggggtgatttaataatttattgagtttttgttgtttttccatttaattttataatttttaacgattcagtaagatgttatgcaatttttatttatttttacttgaatagaagataaatgagtcatgttaatatgtatttgaataatttggggtataaatatctctgttgcaaataaatatttaagttataatttcaggtaggtacttatctactaagtgttaaacaaattgctatgtggcaattcttgattgatcagcgttattaaatttttattttttttctaaaaaaaataatttaaatataccaataaaaaaatcatggataatgacttgtaatttaacggtcatgtgtatatagagaattaaatttaagtatttatttacaactaaaaattaaactttaagtatttatacctatataattctatggaacttaaaatttaaggtaaatattattttagaccctgtgttttgtcaaaacagaccctgtattttctaaaatggtaaaaataaaatcctga

SEQ ID NO: 403457 - DNA, 1365 bp, Cannabis indica
atgaataaaaaaatgaaattgaacttttttgcagggagttcaatttcaccctgagagtataattactacagaaggcaagggaattgtgcagaattttatcaaaatgattgagagaagagaggcagaaacagagaactagatctttggtttactacattcaattcaacacacataggctttttttccattcttttagacttgtgatgaactatgctatgtagtaaactataatcaaagttggcaaactagtctgttcttcttgttttaattgcttcatgatgagcttgtattctaaaataaaggggtagaaaaaaaaaaaaaagaataaataggattttaactatgaaacagagttttgctttatgaaatttttattttttggaaaaaataaggtgatgtttgataataattgtttaaaaattttttaatcacaaaaataaaagtgaaatttttgtttttgaaaaataaaaatgtattttataattattttttattttttaattttaaaaactagaaaataaaagtgttttttaaaattttatttttatttttatttattgtatttaatttaagttagagttagggtctaagtctgaggttggatttggggtttggagtagaggtaagggagttggggtcggagtctatattgagattcgggtccgagtctcaaggtttgatttgggatcggaatttaaaatattgattaagaaaaacaaattgtttaaaaatagaattgaaagtaatttttattttttctaaaaagttttataagatatgtttttgaaaaatatttttacttttttaaattaaaaaatattacataatgcatcctaaattattatgaataccatcaaaaaaaatataatagtatttttataaagttgtggctctcgtcttaattaaatattctgcgtgtaatattttgatgcatactttgtatatagacataatacttagtacttaaaaaagagaaaaaaaaaataaagcttatagtatcaccctgagaaaagttggcaaattaaagccacaaaatatatttctatatcaaatgttaccatattgtttgtataattgtttcaattaaacccaaaattcctaccaattgatgatgaatatggtaataactaaatggatgaaattgtggataagatgtcattgacagccaccacaatgttatcatagcacttcaacacacgaattgcatccttatcccttgctgcataatctagctgccaatttcaatcaaatgttttccacttttcagtctaaatacacaaacaaacttcaacttaataactttacttaaaatgctaaatctcactcgttttataattagttagcggtttctcatatcatttatta

SEQ ID NO: 403458 - DNA, 588 bp, Cannabis indica
catggctactacttcgaacaaggggatcttaagcaataagatagatatcaagatgttatgtatataactatgaacatataataatgataataattatatatacttacttataatagtaataattgtattaatttctagctagaaggggctaggtagcatcctattaagttatttattgtacaattttcaaaaaaaagcaagagaaaattatgcccattgtcatcggctcacctttttcaggcagcgaaacacccgtgcggaaccttgacttctctaagccaaggttagcctttgaaccatccgagtaacaacgagctcatttttcgcgcgactcccgccgagtcatgctcgcaagcatccatgagtgcatcgctgcattgaggctctatagccaagatactcgcactgtccgtaggttcccactatgataaggcaaatcccaacaccgacgctcaccctgtcactcgtgaccaaggttagcatatgtggcaagatgccaacaccaagttaacgtgccaacgcttctatcatgccccattcgatactgtccgaacaatctccctcgtcgcccaaggactcccatacgtc

SEQ ID NO: 403459 - DNA, 987 bp, Cannabis indica
aaaaacactatggaaaagctcaactccatcaaaagttaaggtttttgggtggctattggccttagcaaagtaaatgttcatgagaaaatgcaaaagagttgtccctatatttacatctcccccggatggtgtgcgtattgtaagaacaatggggaagatttggaacatctatttcttcactgttgtttcgttctaaaaacttcgttgtacctggtggcaaagttcgaactggagtgggtactaccaggcggtgttccgacaatgttggttagcaatttaagtggcagcaagcgtaaaaactaaactatggagaactgcaattttagcactcttttgggtggtttggctgggaaggaattcaagaattttttagggtcgtgaaagctctacagaggatctgtgggagaaaataaagttcttgtcagctatgtgggtgtataagtccaaacgttttgagaatttctcatttttggacttaagtagagagtggaaatctcttgcataagaaactattcattgatgttgtaaaactttgaagagagtttccttttttttgtaagtcttatattgtaaagggttactcgttgtgtcgttttttattttatttaccacggttttcctccgccacaagtgagtgcattaatactataatgggggaggtcggtctaagacaagcgacctctttctcttttcaaaaaaagatattagctgcaaaatttgagtcaacaaagcctgtaacttcttctctagattgattttcattgttgaatattaaactagtctctaatgttcccttgatatacctcatgaatcacttcagagctttttaatgttcaaatcctggatctgatttatatctactaaccacactcatgatatgagctagatcaggtctagtgcatatcatgaagtacatcaagcttcccacgcagcctgcatagggtatcttactcatcttaagcctctctatatcaatggttggggact

SEQ ID NO: 403460 - DNA, 674 bp, Cannabis indica
cgttcttcccgaacccatagggagagggatcgtacaagcctcaccaggggaaccacgacgaaccacgcccagggggaagaacggggcgcgaagaagtaagtgtgacctcggggcgctcaaggacccacagtcgatcaactcgaaaaggagaaactactcgtcgtgctaatgattgagaaagcacgggaacaccactaaaactgcaagtcaatcaaggacgaggtccatgagtaaagttggacaaagtccatgagcaagacgaggtccgtaagtaggacataatctgtgagtagaacgaggtttgctagtaattattcccaactggatctgcgagagcacttgaatcagaaaaaatctgatctttgccaataactcggtccaaagcaagaggatcctatccaattgcaaatagacgagttggaagataagttcaggagatatcaagtggaggaattaggaaaacaatctagatacgacttagatgagaaactcgagtcgtaccatccaaacatcatgaatactccttttccccaggaatttaaaaaccctcatgtctcatcgtatgatgggaccaccgatccggtctcgcatttgaataatttcaacactataatgcgatccagtaatgttacaaataatttatggtgtattttgtttcctacctcgctagttgg

SEQ ID NO: 403461 - DNA, 1729 bp, Cannabis indica
cttcaacttagcctcacgcttcacttgaattagctccctcagcctagccggcaccaaatttcctcttccgccccttcactggcttaggaatgaaatccttcgaatagagcctgtaattcacgaagttgtcctcagaggtcaactggatgatgtttcggtcatcccccggtagctgagcaagctcttgagctctatccctaagagtaagagtgaggggagggcggtgatatatagggatctgctaaaccgagtatgggtggtgcccatgcaatccaccatgaagtactcatcaacaaaacgcccaattttgctgatggccgaatccttggtgcccgtcaaccacttgaagtctgattgagagaaatagaagtaccccgacctgccttgcttaggggtggacttcaaatcaaaaaaccagctaaactcgtggggagatggcatatcccacttctgggaggcataaagaacaaagagggcagacagatacttaatgcccttcagagtgaactgggttggacagaggcggaagaagtctgccacattcttaaagtacgggtgcaaaggaaacaatgccccttgctgggcatgagcacccgaccaggctcacattcccttttcagggtttggagctcgattattgttggcgggaatgtaacagtccaattcgcccaggtagtcgtcctgatcgagaacctgcaggcgcgcctcaataaccttggacgaatggctcacccacctggcacccaaggtaccttgccttctatgaggaaatgcagcagtaatttcctcactgacgtagtccacgccctcaatcaggacgtcaccatcggcatcggctggctccccagcctcattgtaccccccatagtttgggggtgcaacctcttcctcttcctcaaccttagagggacagctaggacggacatcgcccgctcttcaatctcttggtcctcagcgtccccttcgtgatcctcctcctcctagacggctggatcttgttcggcactaggcaaagtggcgtgccaagcaacttgagagtcagatgcgtcagccatatgcattgtctttttggtatgagccatcattctatggctggatgaaagatttaagggagaatgcctttcactggaagaaggtgggctagaacagagacgaggatggtcctggtgcaagagttgaagcaagtcctaggtgattcgatgttcgctctcccaaaactcacctagattcatctacaaaagacaacacacaagatgagtgtttggttcgaatatcaaacgttaaaataagcaaatatgtcgaccaggagtactcaacatatcaaagaataagaatgttcaacgaaaagtcaaaactcaagaagtttgaaattttctcgagttaaaaaaaatcatgaagcttagaataagcaagatgaaagataggcattatgcaggtcagaaagtaaacattatggacagtgaaatcgtatgaacccatgatgaaggagaattgtagagtttctaaacttagggtttcctacatatcttctacaacaaagtcgaaggtccattcaaaaagaaaacatgcaaagaaaacataaaggaaattgagaacttactcaagaatcagatgtcaaaactacaaaaaagccccctttagaggcggttttttagcccttttagcgtcggttttggcaaaatttgctaccgacgctgatcagggcaacgctaaagggttataaacaacc

SEQ ID NO: 403462 - DNA, 1040 bp, Cannabis indica
aaagcatctcaaagtcttcggctacatatgctaaggtcacattccaaaaagagaaaagaggcaagcttgatgagaagactaagaaaggaatcttcttaggctgtagtactcaatcaaaagattatcgagtctatagcttagaaacaaacaagctaataattagccgagacataaaatttgacgaagatgctgcatacaactgagagacacaagaggttgaaagaatggaactcaatattcctctaccgccaagaccagaaattgatcaaaatagagttcttactcaaccaacaacataagaaccagtaaaagctattgagtccctgccagactcaccagtaaggcgaataagaccactatcagaaatctacgagacatgcaacttagtacttatggagccagagagtttttaatcaactcaacaacaagaagtatggagacaagccatgaatgaagagataaagatgattgaaaagaatgagactgggagcttgtagatcgtccataagacaaagatactataggagtcaagtgggtctacaagacaaggctgaagcagatggctctatccaaaagtacaaaggaaggttagttgtgaaaggatactcccaacaatatggagttgactacagcaaaatatttgctcctgttgcacgcctcgatactattagggttttaatagctctagctgcacagaagaaatggaagatttttcaactcgatgtgaagtcggcattcctaaatggttatcttgaagaagaaatatacatggaacaaactcaagggttcgtggtacaaggacaggaagataaagttttcatgttgaaaaaagccttgtatggcttaaagcaagctccgcgagccaggtacagtagaatcgataactacttcactcaataaggatttaggaggagcaagagtgagccaactctttacatcaagactcaaggtacaagtgacactcttattgtctctttatacattgatgatctcatctacacaagaaataatgagggtatgataaagaaatttaaagaaga

SEQ ID NO: 403463 - DNA, 1114 bp, Cannabis indica
tgccaagctggcataactgcgtccacttagcgcatctgttactacgttggccttctccgggtggtaatagatttcacaatcatagtccttaacaagctatagccattgtctctgcctcatgttgagttccttttgcgtaaagaagtactttaggctctattggtcggtataaatttcacatttctatcctagagatagtgcctccatatctttaatgtaaaaactactcttgctaactctaaattgtgtattggtataatatcgcaataagcctaatggtaagtaattagggtttatatatattatggattaatcatgtaataagtgagattatgatcctactaatctatttcaacaaaaaatttaaatttgctataagtgagtaaataagcctaatttataaattatggagatttatataacatgtgtgaatggtaatatgagctattgtggaataaaaatattttcaggtttggcgaccttagagactcgatcgggggccaaaaatgtcacaacggatttaatcaatagaattaatgggaatattgtgataagttagtaatgtaggtattgagataattaggaatctgtggaatttgacttggcaccttaagaatagatatttcttagtgactaaaaaataataagataattattaataataaagttttattaatattattattatattattttttttatgaaaatttatcatactgataaatttattatatatattataagtttataaacagtaaacctaaatagaacgaactctccttctttttcaacgaaaccctcttttccttatatctatttcttcgatttctaatctgaaacttagtgatctaagctccgatagtagcgggatagcaaattctcggagtgggaaaaattaaggtaaggtttaatttcgttttaagtgagaaacgattagttttgtatatgggttttatgaaatagaagtattgtgaaggttctgaccttataggattgttctcgggtagtcatgggactagttttgatattttcttgctgaaatggaagatattttgggttttttttttatttaagcgttttatatattataatcatgttttacctgggactcgaa

SEQ ID NO: 403464 - DNA, 503 bp, Cannabis indica
aaaaaaatagtttgtgagtaaattaagagttatgtaagttatttaattttaaaaatagctgccaagtttttcttaaaaaataaacttaaaataataataataaaaaaaacttcttattttttttatccaaacaccagttttaatttgatgacttctttgtttttagctcattctctatgggcccgtttggtacgcaggactggattggattagacaggctaatttgtccaatccagtgtttgggcatgttagaagtctggataactaatccagttaacctcatctgtctgggattatttatcccatccagcagggtgggataaataatcccatgcaggtgagatttttttttatcgtttttttaatttaaattttattaatatattttaaatttaataagaatttaaaggaaataattatcacacatttatttatacatttttttatcaaaaacttattcattaaaattagtgaaaatgtataattttgaattattatacata

SEQ ID NO: 403465 - DNA, 712 bp, Cannabis indica
aggtagagcgtctatcatcgattgaactcaaccagtctaaattaggtgaaaggagtcagctggtttgatgttaggtaggattggccaaagggggttcccatggcagctgagagtttggtcctaacatgttggttttagataaaagatcagctgcatacttagcttgagtaaggtaaatcctagtgtagtgagctttgtcaatataaatatatatactgagattttcatttttggttaattatttttattacatagctgcaacaacttgatacacaagtataaggaagataacaattgacataatctaactgaccaaagaaaaaattcaaacagagagaatcagtgaattgtcctttcttttcttgtatatataatctttattaattcatctattcagtaaatacatagaacataattaccattattacaaatcttgattagttttgacaattatcaattgtggtttgatccttttctgttgattggtttgtaaattatgagatcaaattgattgtctttcactaaatattaagagaaaattgcaataacacagttatactattcaccattactatttatactttcttttcttttcacattaatttatacatgacttaggagcaggaggagcttcttcttctgattcttccaaaaaaggaagacactcttagtgcatgtttggcattataactaaaaaactgttttttatttt

SEQ ID NO: 403466 - DNA, 696 bp, Cannabis indica
gcacaaataagaggtaatttgagatttttccgagcagcacccttgaaatcataagtacaagcatgttattcgggcaaacgatgacgactacaataaacattgccacaacaacatgaaaacatcgtcaatctaactttcttattgcaatccttgcatcgatttgtcctaattttcaaatcctttaattgataattccaatgcttttagggttgagatgtaaaatcaatttaaatttagaaattatattagtaaatatttttttaaaaaaaaatattaataaaatagctaaatacaataaattagttaataaaaattataaaaatatatttacaatacattaattttttttaaaagaaaatatataataattaaattaagttatataattttttggctgattctctaatgcactcccttaaaagagatgtattatgcactctctacttgtcttggcatcgagaagaattttttaatctaacttttttcatattcatgtacattatagctatttaaaatattctacaaaattttgagaaatttggaataatttacaatattaaaaattatgttcaaatagtctattttacacgcgtataaaataaaatagtcaagcgtacaacacactctgtttgaatgcaattttcgacgtgttaaactttttcgaatttcttaaaattttgcaggttgtcttaaata

SEQ ID NO: 403467 - DNA, 533 bp, Cannabis indica
acaatagaaatacttagcatatattacacagtatacaaacttagtataaacagaggggtggattaaggtgacagatagcgaggtgtctatctcgctgtaagatggcatgcacacgagaaagatcatctcaacaccaaaaattatagttgtcataattaaagtaaaagtaatatcaaccttcgaaagacatatgacgagctccatctcaccatcaaagttaactcagctccattcccaacgaggcatcccaatgagataaggcttaccatatatcttcaatacgcgttcattttggcccaacaaaagcggaatattcacaactgtatgaaatttaaataaaaattgcatttacttagagtgacttgtaatcaaatctcatgattctaggcgatgatcgttgtaaaaagattatagtcaactttgtaattaactgcccactatgtaattataaataatggcaagcaagatcaaaagggggacgaaaaaactcatatgaaagaggccttgagcaaacaatcaaaaatctaaataag

SEQ ID NO: 403468 - DNA, 522 bp, Cannabis indica
aaattgtattatattttagagatgatataaatttctgatttgactttgacaatttttttttaatttttctttaataaaaattgatgatgaaaaatttgataccttgaatattaataccctttcattttactttaatcccacttgcacattattctctcttcctattcatcatcatcttcttcttcttcttcttcttcttcttcttcttctacttcttttttttactctttgcttcctcaagttctctctatctttctccattaatatatttttttttttttcttgttcaatccttcttcttcatcttcttatttagtttttgaagtttttagtcacgtttttggaaaagataagagttagtgtgattttttttattctaattttccagaactaagcttgcaaatataacgtctattgcatctagtgttgaactgtgcagaaaatggttagctttatttaatcatttttttattcttttattttttttatttattttagtgttgttttacggttgtttttcat

SEQ ID NO: 403469 - DNA, 643 bp, Cannabis indica
gttcagaggtgaagtgggaggttggttgtcctccaaccccacgacatcgcttggggattttcctcatagaaacaacatcacatcgtctcttagaggtggcatatggtagtgtattttctttgtcagtggttacaggtgttctttatggggtatgttggggtctgtagcagcagtagtagttgatgttgaaggggtataaatgatggtattagatgatagtatcagtggtttaagagaagggattggaagagtggatggaatagaaggtggtaggtggcgaaaatattatgagacaaaccagaagaactcaaatcaggtacataaacatgggaaaaatcagcaacataactagttgaaatagggagaccgaggtttggtttggcatggtttggagaagtgggtggtacaacttttggatggaagggtgccccaagaatatttttgcctttatgagttggtaagcttgagatgggggtggagtgtaagacaatattttggtgtgaaaaagagttggctggggttgataaggaggaggacgatgggtctgttgcgtgtttaaggagtggctgtgatgagatggatgcgtagccaaaaatgcagagcttgtcatagagttggtagtgggtttggcatgagaaagggg

SEQ ID NO: 403470 - DNA, 741 bp, Cannabis indica
aatatgcagattaagttttcaatattttataaagcataaaaattggaatatgtctaatgttatagaacacatataaaaatcaagtccaataatcaagttgagtccctacctcttccgagtcgttaaactttttccaaaagacaatcttaagctcttaagtaccgagctccaattgttttagtccaatcttacatattactctcacctataccattaaatggttaaataattatcattatcgcattctacattcaaaaccgagtccaatgacatataatagactatatttaaaattaggagtttcgaagcctcacctaagcggtgcacattaataatcggtggcagtaaaaatcggtgtaccggaaacgtcaccgaaaatagggggtagagtatatcaaaacaaccaccttgacgagtagatcacacacatgccaaccgtttgtcaaaacggtacacgatgtcacaggaaagtcgccggaaaggggcggagctacaaaatgttaccggaaagagtagcgaaccgggaaaaatggtttagtgtaggttgttctcctcgacgagccgagtttagtggtgaagacgattcgtcaaacgaacagcgaaggtgattgaaaaatccgttcaaagtttgaaaccccgaactttgacttgcgatcctaagctaacggcggcgagagaagcggcaccgctgttgggttttatgccctaaataaaactccatttcaatgtaatctattttat

SEQ ID NO: 403471 - DNA, 591 bp, Cannabis indica
gagagagagagagattaaatttcaatttcaattttgttttatttctcagttgcagttgattagtggttaaaaatacatttttatttatttcaaatgataaaataaattgagttttagtttatattttcatgagattattgtaatatattttataaataaaaatatttgattttgatttaatttatgatttacttgtaagagttaaagtgcatttctgttgaaataaagaggaagaagcaaagttgaaaagaaaagaaagaaaaatagcatgtttgttaaagttcaaagtaactccgtgtgaaatcaaccacctaatctatattacaactaccgtactagaagtcatatttgtgtgttaaactgtagtcccatcctcttttttatatatcactatttattgttttaaaattataatatttaaaattctttttaatcctgtaaaataaaaagataatattatatttttatttaaaatttaaaataaatatcatataactgaataacaaaattcaattatacccttttattttatattatttttaatttaaatacattatcctataatatatttaatccaaataataaaagata

SEQ ID NO: 403472 - DNA, 814 bp, Cannabis indica
gctcaactagatcttatttgaaaactaaggtttttcataagaaaattattgtttctcaaggatcactctcattgcaatcaaggctaggactccacattcgaggtaaggaaattaagtagaaaaacataagttttctgtatgtaataacattcataggaagagtgggaatagtaaaagagaagttaactaaggtcttctgcctgactctttattgtttgttatttaatgtactgtataatatatatttaaataatatgtttataagattcatgttatttatgtatgtttacagtattagagcatggccattgctaaaggtatatatttaaataatatgtttataagattcatgttatttaagtatgtatgtaaatagtgtgtttataagattcacattatttaaactgattatgtggtttggataatggacggtacaatggattcgcattatttaaactagttatgttgtttagataatggacggtacaatggattcgcattatttaaacaatgatatgattatggtatgaatatgatatgattatgatattgttatgatatgattattatgtagttatgatataattatgatatggttatgatatgattataatacgctatttaaataatgtatagtagttaaacattatttaaattagatttattgtagattatgtgacatggtttgaccgacaagataatggtcagatacttgactgttatgtctatatggtagatagggggccatctagtagtgggtacgatgggaaacaccgagtaagctgtgcaatcccacaccgcctggggaaggtca

SEQ ID NO: 403473 - DNA, 674 bp, Cannabis indica
ggaagttgagtacagatatatacaacaaccaatagaactgaacaatacaactgaaaaagaataacagtaagatcagaataataacaaactgtaacaacctttataacagaaatattacagttggacaaactgaataaactgatctaactgattcccttaacactgagcacctgtcatgaaatttaaaatctattttcctttccactttagctagaattcgagacagatattccatgcataggacaaaaattaagggggacacctctcttagcttcaaataaaccatagtaataagttaaatttaagagttcggatgcataccattactagttagttgaatgaactttgagagaaaattcaaggtaaccatcatttcttccccaaagacccattctatagaattagaatcattgaccttctcgagatcaaactttatcatacaatttggtctgaactaatttttttatggtcacgctttttttgttgggtgatcctaattaactttatattcaccaattttatctcatcgtcttcattatatggatttcgttttaatacagggtgttatgcggttgtggtgattcaatctatggccgtttctttcttgtctttttacaatttccttttcttttcctaaattatgaaagtaatgtattttttctttttgaaaaaaa

SEQ ID NO: 403474 - DNA, 508 bp, Cannabis indica
acagagatagatgttgaagcagttggaacaagagcttctacagaaaggtcatccgaagaaaacaccagagattaaggcttggatttcttagatgataaggcttcaacagtatcaggaattggagtagaagccttgtaagatgcaacagtagaaggagccaccaaatcctctttctctgtcttgagatcacttttttgcatacttaaaatgttgtatgagcaccagtgtactgagaaaacttaagaaatgcactttgaccataaggccttgcaggctggacaatcatgtcttgggggttctcaatagaaacaataactctggcagcgagctggagcttaccatgagtgtgccttcctatagcgagatggatgtctcgctatccattatttatgtcttccttaagattatgccttcgaacgtgaaataatttctcgtcaatacgcgaaccaatagtttgcacatccttatctcgcttaagaccgtgcagtcagtgagttacaaatatact

SEQ ID NO: 403475 - DNA, 1040 bp, Cannabis indica
ataatcatctcattttatgagataagaaaagtgaactatgagagttatacctttttgtattttttcttctcatagcaaaaataaagtgatcaaagtggatttaaattgtgaaatgagctcataaaattggaaagaaaattttcgactcaaagaaattagatcattatggattcaaataatgagataaaacattataaaattggagaaacaattatgaatcttaaaaagcaaaatggtgaaacaaaattgatgaaaaataattttgttaattttagactaatttcattgagaagataactataaaattaaaaaagtaattttattattataataattttgtgttatctattaacaaaatttaagtataattttgttaatagagaataaaataaagatgttttattttaaagtgatatggtattttcactttatggtaaaatgtgggggtgagatttaaatttaattaaatttgttgagaaattattgattatatatatgtgattttgaatttaataatctaattaatattttgctacgtgcatatgtgaaattttgacatatttagtgttaaaatttggtagtaattatttcaaaaaggaaattaaatctaaaatggttagagacaaagtgatcttatatatttttaaatcaagatacaaatattatattgtcaatgaaatgtgaaagtatggggtgcatactcctatatgagaagtttagacatgtttggtgtctaaaactaaaaatgagtatatttgagccatcagccatgcttggtatcttaaataaagtgtaactttgacatatttagtgcctaaggttaggtgtgtaattaaacatatttgatgtctaaattagtgtttaattttgatatgctttgtattcagtgacagactcagaatttttactttgtgggggcttatttatcattaaaaaatatttatacttatattataatcactcttactatatttatttaattttatgggggcttttttattattttggtttataattatcaaattaaaaaaatatatatt

SEQ ID NO: 403476 - DNA, 546 bp, Cannabis indica
tctaagtcctccacatgcccccaatcctttatggacttgactagcatgtcgttcacatacaccttcatgttgcagctgatgaatctaatgtgctcctgatccggtggatgcatcattatttaattttaacctaaatatgtctccatgaaacttaggatttcacggcaagttgtggaatctactagctggttaattttaggaagcaggaagtagtcctttggacatgctttgttcaggttggtaaaatcgatgcatactttccccttcttgttgggtttgggcaccagtaatggggtggatacccatagtggatagaatgcctctgttatgaagctatgggctcgtagccactcaacctcatcttttagtgcttgagtatgcttgtaatatcccgaaaaatatattgatattttaattggacatattttattaaatatgtgattaagtgggtattagagtaggattataatcctacttaaactaattacgagttgattaggaaaatatgagtaaatgaataataaagcgtaattgattaattacgga

SEQ ID NO: 403477 - DNA, 736 bp, Cannabis indica
ataaacataaattgagatatacaatgatcatcaattcacttccacattgtttcacatctagtttttgccgctaaatctgagttatccactcgatgagaccaagattgcgacagtttgtaaatgtattgttagaaaaaatagagagattacaatggaagaataaaataagatgaataaaagactaagacaattacaactctaaacaaaatactacaaggacaatatattaaataaagagttacaatcccaaagcacaaaatacaaataaagaaaaagagttacaactcaaaactcaaagatacaagtaaatgtaaactatataaaaatatataaatatataatagtgtatatatatatgatatagaatatatatataatagagtatatatatatgatatagaatatatatataatagatgatatatagtagtgaaataaagagtgtatatatagtatgtacatataatatatatagtactatatagtcaatatataaatatatgatatataggagtgtttagaaggagaacaagaaaacaatataaaacttgagaatagaacaaaataagaaagaagaacaaacacccaaagtggagatggggatcaccaaaagcttgaacaaagtttctacacctttgtccaagaagattattccccctctatgaaacacttagggctttgtggaaatacttctaggaattatcaagccttagaactctctagctttgtgtttgaa

SEQ ID NO: 403478 - DNA, 688 bp, Cannabis indica
tacctaatataaatttcaatatatagtaatgatgagatacggtgatggtgatgacaccaactttgaatgtaatggtaattataagtaaattacagtaacaataacagttttgaagtcatataaaagtattttatagatttattttattattttttttatagatctttattttgtgtgagaattcagttctaatattatttttcactataactaaagaaatctcttattgtgctttttttgttagataaaaaatggtatgatgattttttttatatatatgtatatatatttctataaagtcctctataaatttatcttttatttaatattttattttttattataacctctaagaatattgataattaatatattgtaaaaaaataatatatagactaattatgatttttgtcctttgaactttgatatgtttcaaatcatgtcccataatatctactaaatcatgccctgaaactttaacatgtaatagattgtaccccaaaatttttatctacgtcagattttttttttagtaaaattagataaacgtccttaaatttaataatcttaatagtttgaggagaatttttaacgacctaaaagtttagggactatgattggtacatatcaaagtttagagggcaaaaatctaaattagcctaacatataattctttacaaaattcaaa

SEQ ID NO: 403479 - DNA, 513 bp, Cannabis indica
agtatactctttgctatccttggaatcaataaatatatgcattgatttctatttttcagtgtaaagagagttatatttctctcaagtatcttaaattaaataagattgcaacaattttgtcatgttaatttacttttttttttttttttttaagtaagatacatttgaggccaaacacatttgttaatgattgctatagactatagttgagaggatccttctattctatgatctatcaaccaaaaaaaaaacaaaacaaaaaaaaatcaaggtctacaaattatatatatataagcccttcgtgcagtagtcaccactatttttaaagtagttacttatcatcgtattttatttatagttcaaacttgttatcaataatattgtatcttacttataatcccactccatttaaaatctaatcaccatattgaagattgaccaaatattatgaaaattaatagattttcttttttcaataaaagacggtttgaatcaatttgttttactatatac

SEQ ID NO: 403480 - DNA, 1339 bp, Cannabis indica
ggggttttagcttggggtcctatcgatcttattcacacgatctcatcctgggtaaatggagagactgagctcaccattgatgatggtgacatcatgggcacgagggcacattaccagggctgcgatgttgagctcgattgcagaatggggtctggttgtggttcttgaactcttccttcttccatgagagaactgggcttagattttaccaccctgagagagatgagagaggctcgacagcgagtgagaaaggggtcagaattggggttttttggttctaaggattttttaggatagatgtaacaccctactagtttaggcgtgttatcgtgattttatactaattgtgcaacctattgctaatcaacggggtttgttgggaaaacatgattaattaaaactttacttaattaacctttaaatgaagataaataatctttgcataaacggagatcccgcatttaaaatatttacaatcgtattacaaaatattagttacaaaagttgccgcctagcgagtaatcaaaatacatcttgttgtcctaaagatcgtatactctagatataaccaccctaatatgtaaaatcttcatctactggcactcactgttgatcaaccttagctttgcctttacctacacatgtaaacaataactgtgagtcgacaaactctgtaagaaaagtataatcataacataatttaaaccagattacaactaggtgcacatacacccaatcataaccctatctcgcgtcccacgtgcattgagcctagaacgttcgtatgatagtactattgaccataatattagtctatactcggtactctagtcgtactgatgtgatagcgttaatcaataattagcccaacatatattgtcgatattcagtgcatctctatgtgtactaatatcgctactataatatgttatctaacaggcattcataaacatgcacgctaaacatgtaatcacatatgcatatcattatactagtcttacctatatcttgacttcaggtgtgccggttaacctaagtggaactgctgctcgataatttacaggccccaagagctgctaccttcaatccctaagaatttacccatagaaaaaccttctcaattgttgaggaaatgcaagaaaatccaagctcatatggttctaggtgagaccgaccccaagagagagaaaagagactttgtgtttttaatttattctaaattcaatctcaaaaattatttccttattcagcataacattaattaaattaaaggattaataaaaatccttttctcactaaaaacaaactagggtaatattactattttaccctttgcttc

SEQ ID NO: 403481 - DNA, 1854 bp, Cannabis indica
agagagagagagagaaggctaaaatttcactgaaggcttaacttgcatctatttatagagatccttctagatttaagtttgaattgtatgatattaaaaaaatgataaataaatggctagattgagcttatttggccgaccattaggatgtgggcccaccaattacaattttgccattttactcaattatttatcctattattttacaaatgccatattttccaatttaaccacttaaatgtcaaaaactatttatttaataattaaaattaattatcaaataaaattttcatttaatttatttattaataagacttagtaaagtctcttaattaataaataaacgttaaaacttcttttcttcacaattaagccctagcttagtaaaaattcataaataaaacatagtctaatttagaattataattgattaattaaaattaattaattgagtcttacaagcagtattatctcaactagtgtggggaccatgggcctatataaccgagcttccaataagtcgatctagaatttaccaagtaatttccctaacttattaattcctctatgcaccactatagatttggaattaatctctcaattatataggatgctctatatgttccacgatatagatacgctatgaaattttaaccatcgttctaattctaataatcaaagatcctctatagatgatttacttcaagtagggacaaatttaccgtttcaaccttcaatgtattttatccttaaaatacttagcttcctataaatgatattttagaaaactaatataattactaaaataagagctcttccatttatctctataaagccaagctcgaagaaaatcatcatttcacttctatgtccatatagaagctatagattctgtatctatgattagcacaatgtctttgtggtacttgcaaaatttggttgcgtctctctcatgtctcgcgtgccttatgggctcaggtttacgaaatgccaccctgtgctcatgcgcgagatagatgttttcccgagtttcattaagctcggtgtaaatggtgtaaatcggcacgtacttatcgtgcttcttttgctttttcttgtccttggatgactccttaaagttatccttcctctttgaactagaggctcctggattatcagccttggtcgagacggtacttgttgagacattgctaggtttatttcccgagccagtctgcaacaacttcatctcctttctggcttcttctttttcgaacaaatacttgagccctttcattgaactcagtaatgtttttttactgggcgaccctatagattatccaatagctcgcctccagtggtagagagatcattcgtgatccctgcctgaagagcagtaagctgagtactatcatctaggttcctcaccctcgacaacaactgtgctaaaacgacttaagtaggccttaagcgtctcgcccggctgttgctttatgttgatgagtgaggatgctttgggttgcctatcccttgcggtctggaactatttttttaagtccttagacaactgttcccaaaaagtgattgaatgatgagtaaacttattaaaccagctgcttgctgtcggaaatattttaccaggaaattagatttactaacaagtatgttgtttaacaccctaaatatgaacttctgaaacgatattaaataaacacatataaagtatatgaaaccttacagtagttgcagcggaatttaatgtctccttccactcagatctctaacccttgtatgctttttgtcacagagtatcaccaagatctgagcttgaatgtccttctcttgaatttggattcttcacaatcttccacacta

SEQ ID NO: 403482 - DNA, 542 bp, Cannabis indica
gctcgtttgggccttgtattttaattaaagcccaatgcatttttgatgagtgggttatatttactgatttggttttaaaggattgtaattccgatttcgaccgtaagaggcatttgggcctggtacaatttttggccactacaatgattaacctgttgtgtcacattgttttggtaaaaaaatttttgttcacaactctgaatggatcattgatacatgagccacacatcatgtgtgtcctgacattactttgtttacaaatccctacaatgattctagtctcaaaacttttcttttatctactggtttacacactaagatttcttgtgttggaacaattgttctaacccatgactttactctcaaaaatgtgctatatgttccctcttttaaatgtagcttgttatcttacatataagaatatttctatttgaggaaacatatttctatttaaggaaataagtttctatttaaggaaataaataaataattaattttgtgataaatgaatattttatattcattgaatctggacaaaatca

SEQ ID NO: 403483 - DNA, 1115 bp, Cannabis indica
caaagaaagtcataaaggagatagaaagtatttgtagaagtttcgttatggacacagaagagcaagtatgaatggtccatgtagcattgcgtgggataatctttacaaatctaagaaagctggtggaattgggtttcatgacatagaaaaatggaatcaaggtgccgtagcaaaacatgtttgggaaattgctaataagaaagataatctatgggtgaagtgggtgcatagtgtgtacattgatcaagaaaattggtgggggtacaatgccctgcccacaacagttggtactggtgtagaattgtcaaagtaaaaaagaagtgaagctgatatttactccagatcagtttactgcatctgatttcaaaatagcacatatgtacaagatgttaaatcaagaacaaagaagttttcatgttagcaagcaagtttggaggaggttaaatgttccaaagcacaattttcatctctggatagcagtgcagaatacggttgaaaacaaaggaaagacttcaaaaaaggcagattgttgatgatgcttcctgtatactgtgtaaaaatgcagtagaaaacactctgcatctgttctttgactgcaggtatgctcgatgctacttacaagaattaaaaacaatggctacactggaggatcaaagctgaatccctgccaagtattctaagatggattgatcaagcaaaactgagcaaattcaaggcaagcagttacacagcttgcattgctgccttggtttacaagatttggcaatccatgaatcaaatgttatggtcccaggagactacacaaccgcaagctctcttgcaagaaactaaatggctgataaaaaatagaattacttgtgtaatgccaaaatgtatcgatcaaaaagaattagaatggtttcaagatttataagagtttttttgttttcttacagtaagatgtataggtgtttgctctttgaagagccataggttgtaacaaaaaaggttattgtgcaatgaaattcctaattcataaaaaaaaacaacttaaatattaattttctatttaattaaatatcactagaaaaatatttcaagcaaacagacaataactatctagactttcattgact

SEQ ID NO: 403484 - DNA, 950 bp, Cannabis indica
aaagaagatctaaaccgagagctagagaaaggcaaagatcttcaaggaagggaactgaaaaggttccgaattatctctttgtccgttccaagggctgatctggcaaggtcatgagctgcggtgtttgtagatctggggatgtggtggagaacagcacctggaaaaaacgacaaagaggaaactatgagggcgactaggcccgagagcgccgatcgatctggagaaaacttctgaatacggtgcaccaaggtttggcagtcagaggtgatgacagcaattgggaaacggactgcttgagtacaccaaaggagtgctcggtggggagcttcggcctcggcaaaaatagggggaagagctgaatgcgaagtagccgttaaggttgcaatgactgttcctttagaatcagttacaaccgcctcgtacccatgttggttagatgaatgagaaagagcagcatccacagaaagccgataagtgtcatctgggacttgaacactcggtgaaggatgatgggaggtgtgaggtgatatggatatccgattctgcgcatccctgtattccagcaaataataactgacagagctctccacacagaaatcagtgacatgattaggattaaaaatggctctgtttctgttgttccaaatggcccacataagacccaagaaagagtaaaattgatctttgtcataactttcaaaacctcttaacataaattctttaatatcacactttttatttttaagataaaattgataaaatgaagagtgtttccatatcttacctgccctggaacattcaagaagagagtgagtattggagtcatgatgagaaagacaaaaggagcaaaaaggggagggagtggacttacggtggaaaaggttaagattagagggaaggatgtggtggaaagctttccaaacaaaatgtttgattttgggtgggatgtt

SEQ ID NO: 403485 - DNA, 489 bp, Cannabis indica
tttatggcgaaggaatttatttgcattatgcagattgtaacttgatacaaggaaaaagaaaaggaaagaaaaaagaccctttgaacaaacaaattcatagctagcctagcccataccacaacaaatatttaatcaatcatgaaaatgttctatattaaggatcactttctcagctattgctactctacaaaacatagctatatatgaatatctttttcatactatgatattagtatatataaattagaagttaaaagtattttcttgatgggacagagggtgagatgatcacacgtaaagccacgttgttgtcgttcgcctggggtcgcttggttctcaattactgtaaccctcaaattgcttaattgaattgcttaaaaaatttaatttatttagtaacattaattaaaagtaatattttattttatattgttaaaatattcaatttaaaaaaaaaaaactgacatttgaaaatgtcaataattttaa

SEQ ID NO: 403486 - DNA, 614 bp, Cannabis indica
ggattatcttctgttctgatcttctctaaattaaccagtccttcttctatcttctctctaatctagtatggtcttatatctatatgtttgctcttttcatgataaattgggttcttacaaagatagatggatgactggctattcgaatacacaatcactccccctatgatttgttttaattcataaggaattcctcaaagccataatgcttccttgaatgcttatgtagttaccatgaattatgcttccgtggtagaaaaagcaaccacagattgtaattgggccttccaacttatacaattttggtttatcaataaacgtaggaagtagttgattttttagtatctatgttcgagggatagtcaacatccatgaatcttaactccaattctccttttgcgttctcataggtcagaccatgactccaagtgcccatcaagtatcttaataaccatttaagggtcttccaatgttgaattcccgaatttgacgtgaatcgacttagatggaatttgctgaataatcaaaaatgagtgaggagctcggggaccgagaccctatatttataggtgagatactccatcagtatatgcgccacattaattgtcagaata

SEQ ID NO: 403487 - DNA, 559 bp, Cannabis indica
ccgcgagcttggtatagcagaattgacaattactttaccgagcaaggattcaagaagagcaagagtgagccatctctttacatcaaaactcaaggtacgaatgatatactaattgtctctttatacgttgatgatctcatctacacaggcaataatgagaagatgataaagaagtttgaagaagacatgatgaaaaattttgagatgaccgacctgggattaagacactactttctcgagatcgaaataactcaaaaagaatatgggatcttcatctcacaaaagaagtatagagagacactattaaagaaattaaaaatggagggattcaagactgtatcaactccattagacaacaacaaagctcttaagaaggaaaatggctcaccaaaagatgatgaatcaaaatttcaaagtctaattggcagcctactatatctaactgctacaagaccagacataatggacgcagttagtctcctatcaatattcatccatgatccaagtcaagttcactacggatagccaagcgaatcctcaaatacttgtaaggaacaaa

SEQ ID NO: 403488 - DNA, 566 bp, Cannabis indica
taaattaaacatgtaacaagcatcaaacacaaaaaccttataagatatccaaatcatataggtactctcgtcatatatcgaaattcggttctatttcactatagcataatcgacactcacatcaaaattatagacgtttaattggtgattaggcaattagaagtaattaagtacgaatgaaatagaatacataaaaattgagggaaaattaaatcatattaaaaccacaaataaaatatcaaacaatctccatctagaccctaatgaattgtttagctactcatgttcattgtatcaatttcacacatattaatttagaatagaagaagaaaatagagaagaaaaaaatgctgaaaactctattgagaaagcctccaatattgatttttctctttaaaattcgtactccttccttcctgaaaagtattgaagtccacttcctgaaaacttatttttctcaagattcgaaggggtgggtcgcggcatgggatttccatgactaggcatgaccccctttatttgggtagtgagtttcttgtagcattgactgatagtattttagccat

SEQ ID NO: 403489 - DNA, 534 bp, Cannabis indica
cttgttttaaaactctgttgactgagttgttcagtgtttctttgaatctcttgactcgcgccctcgtcaacgagccaaatggaactttacttgtatctttagcctaagtgttctcatcattccccacctcttgaaaaaggatttgtcctcaaatcatcacttgcatcaaaagggctcaaatgagaaacattaaaagtagcactaacattatattctctaggtaaatcgagttggtaggcattgtcattgatcctttcaagcacttgaaacaaaccatctcctcgaggtagcaatttggaacatcttttggctgggaatcgttctttcctcatgtgtaaccataccttatcatcgtgctcaaaaacctacttttgacaacccttgttagctagatttatgtattgctcggtctttctttctattttgagttgtgccctctcatggatttgcttcacaaattctgctttctttttgccatctaaattcaaatgctcaaaaataggtaaaggtgatagatctaaaggagtcaaagga

SEQ ID NO: 403490 - DNA, 728 bp, Cannabis indica
gattacttagtcgtatcagttaacatgacatgttcaaaaccaactcaccccacttcagaaacgttattcttcccgttatgattattcaatccattcgcctatataatgcgattgaactgatgggaagaacacatctctttcgtattagaaaaaatacagctttcataaaaattgcgatataaaaattctctgggtgtattcgactgtgctcagtgcagtggggttccgatacagtgcgacgactgggctgttttatcttggggacgaccggcaaattccgacggcttgcaaactcctgggcagtgccgcgaacgtcttaaagagagcgacttaatctgcgactcaacccagaatttttcattcggtaatatcgttcctcttttattttgctagcagtttattgaattcgggtgctgcttctcattagcggggagaaattttattaactgtgtgttatgtgcttaatagagttcctaaatctaaaaggaaaatttctccatatgaaagtttgaaaaataaacaacccaatatctcataatttaaaacttggggttgtttggcatatgttagaattcctaatcttaagagaattaaattggctagtagagcatatgaatgtgtcttatgctgttaatagtataacatatagattttatgatttaaatgtccatactattttgaaatctaatgatgctgattttttccaacatagatttccatttaaattg

SEQ ID NO: 403491 - DNA, 481 bp, Cannabis indica
gtggaggggtttgtttggaaaaacatgatatgcaagttcgggctgccccaagagattgtagcagataataattcccagttcatcagccaaaagttcagaagtttttgtgaacaatggaaaattaaactcatattctcgacaccacgttatccgcagagcaatgggcaggcaaagtcatcaaataaagtcatcataaacaacattaaaaagcgactcgaaaacgctaaaggaagatgggcccaagaatcgcctggcgtactgtgggccaatcgaaccacgccacgtactagtacgggtgaaaccccgttctcgctagtatacgggatggaagcagttatcccgacggaaacgcaagtgcccacttcgcgatccgagctaagtaacgaagacaactctttcctgagactacaagccactaacgacgtcgaggaaagaaaggagtgcgccttgtcccgaatgcagaactactattccgcggtgg

SEQ ID NO: 403492 - DNA, 730 bp, Cannabis indica
tggcatctattcaagctcgctttaaagcaactaagaatttcatcaatgcacggatgaaacctcatcagagcgtgcgtgatcaccatctctagatgactagtagttccaggaagttgagaatcatggagctgttatagattagacaactcgagtgagtttgatcttaaacagtctgactccagcctttctgcccttcacttcaaattatgtcatgaacaagttgaagcttgactttcacgagttaataaacaaccttcaaacttttgaaaatttgattggaggacctcagaaaggatgagctaaagctcctaattttgggaatgctaatggtgcggctaagactgaagcaaatattgcatctacttccaaacccaacaacaagaagaagtggaagaatagcaagaagcttgttcaagctgtgaaaatagttaaagagaaaaaggctgctaatcccgatggaaagccaaaaggaaaattcttctattgcaatgaaaaaggccactggaaaccccaatgccctatgtttctagcaaggaaacaaggtattgctttctatgctataaactcatgtgttttagagaattattatccccttgggttattaattctgaatctactaaacatgtttgattttcttcttattttagctccagctgcttaaacttggattgttatcctagagagttgagtcggatggttgaacagatgggtggagattgtccaagattga

SEQ ID NO: 403493 - DNA, 1016 bp, Cannabis indica
caattaatacatttcgaaagacacagtgagcatttgtattcttaatctgtctatgtcgaccaagaaaatattaaaactaatattttcatttgatatccatatctttgatttgtttatttttatttatgttgttcttttagttttataactttgtgttatgttgtttttattttatttaatattaatattagtatttttgttgttgttgttgtcattttgtatttttcaagatgttagcaatttaattaaattaattattacttttgtaataaagttttataggactaaaatgtaagattattttttataagaaattaaaacaagagttagaatgtaaaagaaaagtttaacactaaattagtgtaaattcaaaatcttacaccattaatggtgtagaatttagtgtccactattttgatgcataatttggtgtccatttgagtgaaatggtatgaaaatttcacactcatttgctgaaatggtacaccattagagatgctcttagggcgtctccaatgggacactataatcccaaaagtagtggagtttaaacacaaaactactccaatggaattctaaatctcatcatatatatgtgggagtttatagtgtcacactaaaaatagtgggacactatagactacactattttttttttttgtaatttttaatattaaaataatgtatttatgattaaatttttatatttatataaatattatactgggcaatagtttaataaattaatataataataaaaaaaaaattagtgtagatttcagtgttgtggttggaatagaaaaaaatttagtgctaaaattatactcttttggtgttgttttgatactatatttaagtttaagcattggagatgcccttagactatctccaattaggggtggcaattcgtgttcgtgtcgtgtcgagacccatgtataacaggtacatgctcgacccgaacacgacccgtttaataatcgtgtcaaaaaaatgaaacccgaacacgatccgtttat

SEQ ID NO: 403494 - DNA, 515 bp, Cannabis indica
atataaaaaatacttgcaatgttaagacaaataaaataacttattaaaagaaaaattagataaaacttaacaacataaatgaaaaattgaaaaagagtaataaaaaaagaaaactaaaataatctaataactaaaaaataaataacaatattttaaaataataaatcaataagaaataagaaatgctacctaaaataatatatttaggttaataactaccaataattctgtaaaaaaattaaaaaactaattagacacgtaatcacccctgatcattagtgacaaataagaaccaccaaaaaatcgacagtcgcatagtgatttggtcacacaacaaaaaaaaatatatatattaaaaatgaatatttaaaaattgttataataataataataatgataaaacataggttggaaagacattcttggaacagcactgaaatctccattcagatcaacataccgaaaagtggcgatatggtgttaatggtaggaaatccagagatagaaaaaggagt

SEQ ID NO: 403495 - DNA, 397 bp, Cannabis indica
aaattttgaaataattgtacacataagcagtctatattagtaattaactatgaaaaatgggaagcaccttaaatttgagcttagaaggttaagtggaagtagaatgataattgagagggtttaaccacaaaaatctattattaaatataaatatattattattactactgtatagaattatctagtgtgtattgcctcataatttattatagttattcaaactctagattagttaagtatcgagttattagaatggagtttttagggtgtgtttggaagtaactgtgtaattactaggtagggtaaattattagggtagtaattacacagtttagtaattacactatattttaaaatgtaagatgtgtttggatatgaggtggtaattacatatgaa

SEQ ID NO: 403496 - DNA, 502 bp, Cannabis indica
aaaattgccatctcaggcgtcgcctggagtaggaaaaccaacgaaatgctgagttggaacgtgaggcagacacggctagggtagaacaagagaacagcacacaaaaccaacctaattttggagtgagaagaccacgaggtagaccttgtggctcacgaactaggaggcatgatacagctcaggagaatcctcaaaacgctcaagaagaacaacctggggaaccactgtcactccctctgagaatgaacaaccaaacgaccaaccagagccttctcacaaaaatgagaacagaaggcgacctgggactagggaacatgaattccgaacgagggaaatcctgagactcaacctgggacaggtgggttgccaccgagacattgccaacgtccttctcgaaccaacagggaagggacacgtacaaaccccagcagggggcatgcaacgtcccatacccaagggagaaggatgggacgtgacgtggcgagtgttagctcgggatgca

SEQ ID NO: 403497 - DNA, 548 bp, Cannabis indica
ttaatatatgtaaatctctctcacagcatttcaaattttcaaactattattctaaaaagcaaagacactgttaacaaaaaaaaatatgattgttaaaattttattttaagtactataaattaattaaaatttatcgaaactatataaaaaacctattataattatattgtaatttatacatataaagttataatctttctatatatcaaaaataaaaataaaaacaccagtaaaaataaggaattatttcataaatatataaaaatgataaaaaaaaaatttacatttataaggattgtttctttttttgttttttttttgtttttataaaaaaagttgttttgacattgattttatagaaaaataatgtgatgtttgtttttacaacaacactattgtttttgggaaacttataaaaatactggaatttgagttaacttttacaaaaatactgtcacacggaatttttttcaaaaatactgtgtttttataaaacacagtaaaacacaaagcagtataactcaaaacaacagtagaacactagtaaa

SEQ ID NO: 403498 - DNA, 499 bp, Cannabis indica
ataattatttttgtagtcattcatttcttttttattctttaaaaatggatattgatattattaattagtatggcttttgtccacgacattatctacttttaaatcatactttctacttaaaagagaaaataaaaattaattaatttttataattttttatcttttttaaaaaaagtagctttgtattattagtcaattaatatatttattgttgatttagatgagaaattttacatcttcattctttatgtttcattgaaaaattttgtaaatagaagaagaatgtttaagcaaacaaaaattcttacaactttttttagaaattaaggttatttggatattcaataataataaaaaataattgttaggattaaactcactcaatctctcaagtcagtatgtctatctatttgctcatcagatgaatacgaagaaaactgctgcaatatataacagttggttttaataccaacttaaaggggacccaccagcaactata

SEQ ID NO: 403499 - DNA, 426 bp, Cannabis indica
gagcagttcggtaatagcctacttcccttgatttgtattgacttaagaacaaagaatacaatgattcttctcttagagctcttacaatgaaatctctgagcgtactctcttagataattcttttgaccctctacccagtgagaatagatcactatttatagggctatgtgcttgagggaaagtttctcttttgtttatgttgacttcacttttagccaacgacaatgagtctttttgataagcgataaacgatatgtcgtaataagaatatgtagtaaagtaataataagacatagaaattttatagacgtttaggcccgagcagttcggtaatagtctaatcctcgttagttgtattgacttaagaataaggaagaagatcccttttcttataggtcttacaataatatctctgaatatataatt

SEQ ID NO: 403500 - DNA, 983 bp, Cannabis indica
atgccacataactcgaacctggccgagagaatggggccaaaaagggggtctacgcgcgcaagagggctgtctgagcgtgcttgggtgaggtttttagacaaatcgtgtctgatccgcgcacgctagtaggtatctccaccaataaccaatttttgaaaaatcatatctaactcaattttaatccaaattgagatccgtaaaagattgattaatttttcatctactttctaaaaaaattcttccagtacgaaactaaaaatatttttgtcaaaaatttgtaatgaacatacaatcatcaattaaggacataaaccagcatgaacacatccaaatcatcacaatcatcgtttaaaatccatatttcatgaaagtaaattattatcatggctctgaggccaattgttagaacttattttaccagaatctagatttactaacatgtatgtttaattaacaccctaaatatgaattctctaatacgatgaaattaaacacatgagagtgtagaaaatcttatattgatggcagcagaattgggtagcattaggccattatcgggcctacatcaaacctatgtcttcaacctttgctcatttcaacaacagcaaggcattgggcttgcatcgaaccaccatcagaccttcatccctaacctccaaattacactactatcgtacctaccatcggaccactatcgtaccccatcgtaccatatacaaaaaaatcacaaaaaatacaaatttcaccaaaactcaattttttacccaacaataaacaaaaattacaaaaaaaaaaaaaaacaactgatcatttgaatggataattcagggtttaaatggataatattttataaaataaaactaaccttccacattctcggttcgtgggtagttgtcgatggttggggaacttcgttggtgatgcaaggtggttgggctgcttcgtgggtggcgctcgggattgaaactgttggaaattatttt

SEQ ID NO: 403501 - DNA, 1380 bp, Cannabis indica
gaattaatgattattttctaggtatttttgtggtgctgtggtggttctatctgtgggtgtggaagatggaggctataaaatacatttcttcttccttctctatggttattctgtggtttttttattctggttcacctaaaaatacatttgacgaccttactaaaaaaaaaaaaattgaggtgtgtggttctttaatgtttttctaagtggttatatctacttattgttttacttttgtttttgtgttgctttagtagtttttttgttctgatttttcaagattgggcttgcaaatataagtgctattgcatttggtattgaggttgtgcagaacatttttaattttttaatcattttttcctttcttttgtttgatttattttagtgttattttacaattgtttttccatgattatttatttgacgtcgatttcaatatttttctcaatctcaccaaaattaatggttgttttccgattgttctggtgttcctctgatggttctgtccgtgggtgtggaagatggaggcctctttttttttttggtgtttacagtataaaagaaaaaaaaaaggccaagacactataaaagttatttctgccgtgtattagtatttttgtaaggattgggccaaaagtcagtatttttgtaagtttccctttatgaaataataacatagaatttatcagataagtcttcctttaaaaattttatttgagttttttcgtaatataattttgtaattatttatttattgagttcttctcaattaatagattgtacttattacattttgacagtagcaaatttatcgattgggagttagtaggttatagagccatcaaaggcgatttcattgtttaaatttttctactttagaagagagatttaaaaattagactaaatagtttaacttcgataaatggtgactttggttttctcaagaagcttcaaagataagttttatttttttcatgccagatattaatttcttaatttttctcaatattattttttcaacccaattagagaggtttattcagttttgcgttatctagtaacagctatcaacaaaggaatggtgttttaatgagttggggtgatgtttgaggatgttatagctttatcgtctaaattctcaggggcagttttgtcccatttggctcgcgataagaattctgcagctcatggtttggaaattaaagcatgctctttggttagacgatgaactatcttggttcgaggaggtgttgtcgctgattgtaaattgttgcatcattaatcatataagtgattttgatcaccacgtcaaaaaaaaaaaaaaaataattacgacgtcgagaaatacatctgaattcttctctccatcgcagccgcttt

SEQ ID NO: 403502 - DNA, 755 bp, Cannabis indica
ctacgagtgtggagtctatgccattttttcttatcatttacttcattgttgaatggtattacttggaccacttatttattaaggggcccaaaattttatatcgtcttaggcccccatttttttaggactgacccttattattatgtcacaataatgatgaacaaataaaaaggtggttaataatgtagctaattaattaattataggccaacatttatttaaatatggaaaaaaatgaatggagtagtactcagctgtgccatacttggctacacttattaattatcttgtttggacactttatgggctcccttttattcatccaggaagtattttggttgtgactataaatgggtctggtcttgtaattgagcttacatacttaatcatcttcttaatcttctgaaataagaagaaaatgattaaagttgttcttgttgttcttgctgagcttgttttcatttctattctcacccttttgactttgactttgactcattctcacaagaaaagatcaaccattgttggtaccatttgtatactctttaatatcatgatttatgctactccattagctattattgtaaattactagttactaggtattaattagttactttttagtatcattatttcttgtttgattttaattgtttattgtttttggtgcagaaattggtaattactactaagagtgtggagtttatgtcatttttcttatcatttgcttcattgttgaatggtattacttggac

SEQ ID NO: 403503 - DNA, 1015 bp, Cannabis indica
ctacagtggcttatataataacaaatgtgataggagttggtgtgttgtaactttcatggagtgtgactcactttcatacaaaaagttaaatgaaactcaattaaaagtgacagcttttgtcactataaaatatatatatatataaaggtttaaaaaagctggcatatactgttaaaaaaaaaaaaagcctgtcgtataaaattaaataatatagacagtaaaaaatgtaaatatcctcataaaaaaaatacaaaactaagtatattatgtaaatttctcatataatatgtgccaaaaagatggcccaaagcatgaaaaaatagcatttttgaagcccaagaaagcagcccattcaacccattttctccctctctagctaacatcagggccacgtggcgcctccggattcgcgcatcagccacaggccccacgcctgtagcacgccagccccttgtcttcctctctcccttccaagcgcgtgtgaggcgcacagccaggggcttttctacccaatttcccttcaacctccaaaagttaacttgctcatcttttacagccatttaaatggtgacatgtggcactacctcatacaaagcaactaatcaacgggtgccacttgtcactccagttttagctattattatttacatttttacccgcatacaatttataataaatttaattacacattagtccttttacccttctattaatataagcttaagattttaaaatttagtagagttttcagaattttaggcagaaaaatccagagaatatgctcgcagcgctcagtgttattagtttcccgcttttcttggttaattttcttatgagttttcaagtttccttattattaaggtggacgataaaatctagtatatttaattaagtatttattttttattttgattctcagtaaatatatgcctatgatttttcgcttcttaaaataatttcttttatctttaatatcacatattttttatagctagaaattattaatgcttggttc

SEQ ID NO: 403504 - DNA, 1248 bp, Cannabis indica
tgggtttttctaggagctggatgggcaccaggtttgttttgtcagttatggaactgcttgctacgcgggcgaagtgcatctgctatggcgatttctgttctctagggatctgcttgatcctgtagcctttgagctgacttaataagtctctgatttttgctcaagtaggccaccattctatcatctcaagttgtgtattcacccaagacttgattcacaactaattgagaatcactaaatatgtccaggtggttagcccgtacttcctgcgtcagcttgaggccagctatcagggcttaaaaattcaacctcattagtcgaggctttgaagctaaattcgattgctccgtgcagttgttgcccccgagtgttgtaaggaaaatgcttgcaccagaaaattggtcagtacagcttccatgaacatggagtttccatgttagatcttcaggattttattgctactcttgctctagcttcttctctggctcttgctgttctcccgagtcttgaggggcctcaatatagttgagttggtgcactcagccacgaagtctgcaagggcttgaccctttgtagctattcttggttggtatgtgatctcaaactggccaagcttaatggcccgtttgagtagtcagcctgatgcttcaggtttgtgcaaaacctgtcgtagtggttgatcggtgtaatcctttatggggtgtgcctagaagtagggcctcaactttctagaagctaagagcaagttgtaggccagtttctcgatgagtgggtatcgactttctgcgccgaccagccttttgctgatgtagtatacagggtgatgtacactgccttcttctcttgtgaggacagcactcacatcgtgctctatgactactaggtacacgcctaactcttcattgtctaagggtttagacaacactggtggttgggccaattacttcttcagctcctggaatgtgttttcacattcctctgtccactcgaattttttgttgcctctgagaatgttgaagaagggtacacatttatctatagacttggacacaaatctgcttagtacaacaatgcgtccagttaggctttgtccttgatagttgtgggcgacttcatgtctaaaagggcttggatcttatctagatttgcttctattcccccggcgttgactatgaagccaaagaattttctcaagcttacgccaaaagagcatttaataaacgaaaaataagtattcttattaattat

SEQ ID NO: 403505 - DNA, 889 bp, Cannabis indica
ggcaatggagataattgaagcattttgttggatccatggcttcctagacccttctaatcccttttattatctgatcatcctggctagtgaatcaaaaggtgctagcttattctcgatgcaatctaagagttgggaccatgatgttatcaatgatctatttgatgagagggataagaatcttgtgctgtcaatacaattgagtgtacatgctacggctgataggtggtgttggaatgaagaaccagtggcatttacactgtcaagagtgcttaccgactgctacagcaggattctggtgcgcatgtttcggttgaagataaaaaaatgttcaaggctatatggcagttggaagttcctccgaaagtgcagcatttcatgtggcgtgtgctagttggttgtctcccaactaaggttcaacttagcaccaaaaaggttaatgttgacttgtattgtccattttgtaatctagcagtggaaactatatctcacatcctgcttgagtgccgatttgcaaaaagctgtggtgcgtctccattgttccgactggtgtggataatggcggcttcaacaactggttttctgcattaactgagcaacagtcggctgctgtggttaatgaagtagcgtgtatcagttggaagatttggtctgttcgtaatgagcttttatggaataacaaaacttgttctgcattggatgtggtccgatcggctaggatggtgcttaaccaatattgtactgctcaaactcaaaagacgggggcattgttgattgatgatatcaataatgtagatgagcggtggaagaaaccaatttctcatatggttaagattaatgttgatggggctatttttcagaaacaaaacaagtttggctttgggtgtgtggc

SEQ ID NO: 403506 - DNA, 639 bp, Cannabis indica
atggacctagtgaccaggcttttaacggtacgatgtcagaggttatctccaacaacactctatcgtacagagcatgcatgtccttgtgtacctgagaaaatgatccaatagccagggataaagggaaattcaaaaaggagacgccctaaggtgacacgcgtcggaggcccagctcgtactatctaacacccttaaatgccatatgggaaatatgccacctagcgatccaacaattagatttcacactagaaatgatccatccaaggttgcatatgcaaaaaagttggcctataaatacccccaaaaaatcacaagggagtaggacctttttctggatggaagactcattcttcatcatcctaagcaaataaattttgtaaccctcctatcaagtccagaatattcctaataagcttcctcttcttcaagaggatcacggtggatgggagttttagtccattgtatctctacttatgttaatagttatcggccgatgaacctaataaaatagactcattgactaaggatagttaacgcctgaaccacgtaacaatctcttatttgttgtcttgctatttattctgttatcactttcctaagctctaaaaaatatgcagctgccaaagaactcgataaaca

SEQ ID NO: 403507 - DNA, 417 bp, Cannabis indica
tggtgttaaaatttagtgatataatttaggaataattacctaggccacctcttttgtaaaaatatgaaattttacgtttaaaaggaaactatataaaagtaacatgaaaaaaaaaacaaaaaaaaaaaaaaaaataacatacaaataacaaaaaataaacaacaaattaacaagagtacaacatagaaagatcatattttctataaataaaattaaaaaaaaattgtgaaaatatttaaaattccataaaattgtatttttgaattttttttattatttttgtagaattgtgaaataatctcgataatttattatgttgacatttggagttggatagaaataaagtgagtgtggactcaatatacaaattgaatgagggcttattatatataagacaaaaatttaaataaattaaac

SEQ ID NO: 403508 - DNA, 1334 bp, Cannabis indica
aattactatctagatcgctataagtgggatctgctatagtactcttaggattacaattaatgattaaacgcctggcaaaactcaagtgttggaagcctaggatgttggacaactttaaggtggcgtgtgggggagaatgaggaagagaaagagtttatcagatacttgagatcaggtttctagcttagaggcagcttaggcaacttaaattttcagtcagaggttaaggcctttatataagaagccttaaaccataggtttacaattcaaatcctttggaaatcgtatagttagttagatatttacaaaagaacaaaatgcctttaattctagatattattcagctattcttttgggcttttgcgacccaattcatagcccatctttgttgtccatgtgcaccagtgtcctgtggggcctacaaagcatcctttggccggccaggcccttgtgctggtcggccatggtgttgtccttgggctggcacaaccaggggtgggtggctgctcttgagagggagctgatctttcatttgttccccatttgagtgtcggggtcttaatttgctcaggtgttaacttggccttccttgtagtgagttgtactgccacgtggctcaggttttgtccaagtaagcataccatgtcatgaggataaaaattgggataacatttgcccccaagtccctgtgcggacgtctttacggatagggactttaccagtaatattaatgttgtcgggactgttgttacctttgttgaataaaaagtggtgcgtgtgttaaaacattttgtcttgtctgtctgatctcatcgcactagagaaataactgtctttagttgccgttatgatgagttggtgaattaagtgaagaaaaaaggggctcacatgtactacataagtgtagtttgggggaaacccctttttcacttttactttctctcactagaatttcgctcttggaaatgctcctccttctctctaggtggctgaaccttgaagcttcattctccttgggattttcgcggtatttcaacgatccaagcttctcaccttcaacttcatcaaaatcttgttgtgggtaagctttctattcccgctctttcacttgatttgattgattttcccttgaatgcatgaacattgagtcttattttgaacatgttttgattcttacgttagattataatccatttagtatttgatccacatgatagcctcaggataaacaatgtgtgatttttgatgaaaaagaactgaatctaacattcattgtgattcttggctctttgagtcacgaagaacacgaaaaacacgtttgagctcttgaaaaa

SEQ ID NO: 403509 - DNA, 702 bp, Cannabis indica
aatacaacacaacttaattcccgtgacattttacttcaaaaatggtatctacgataccctcataatccaatataatctccgtaattaataaattacactttatttaatcatttaataaatttacactaattaacctaagtaagatcataatcttacttcatcaccaggataactacatatttaataaaatatgtcaaattaaatacaatattactttctaggatattacaactatcccctgcttatagaaattttgtcctcaaaatttacctgaaaagctcaagatactgctctcgcatctgcgactctaactcccaagtcccttcttctaccttgctgttccgccacaacactttaacaagtggaatagtcttgttccgcaacaccttttccttcccatccagaatctgtactggttgttcttcatatgacaggtcagtttgaagctcgatatcttcataacttaatacatgagttgtatcagatacatatttctgaagcatcaagacgtgaaacacattattaaccccagatagagcaagaggtaaagccaaatgatatgctacctgacctactctctcaagaatctcaaacgggccaataaacctgggactcaactttctcctctttccaaacctcaaaattcccttcattggggatacccaaagaaaaactaaatccccaacctggaattcaatatct

SEQ ID NO: 403510 - DNA, 764 bp, Cannabis indica
ttttaaatttattttttcgaaaagtgtgtcgtttcgtttggatactctatatttataccaattaattaaaaaaaaaaaaaaaaaatttaccgcataaatagttaagtttaattttcagttgtaaataaatatttaagtttaatttttggcggtaataatacttaatttatatttttagaactctgtaggtagttaaaatattatgtcattaaaaaaaaatttaatgacttggaccaatgaagaattgccacatggcaatttacttaacaattaaccgtcaggtacctacaaaagttccagaattataacttaggtattattatcaccaaaaattaaacttcggtatttatttacaactaggagttaaacttaaatatttataccgcaaattactctaacaaaaaacataaaagaaagattttttttttaataagagtatagttcattgaatcatattagatttggaccccaccgatccaatctaattatttattgggtattgaattttatcattcaatccaatctaatcgaatggagtcatctgatctgatccgattcaatagatgtattggattagatcggttccaatttttggatacattaattggttttttattggattggattgcatccatccaatctattttagctaccattttaagttaatttcattaaaaagaaaaatatatacaaaaaaaaacgtaatttaaaatttaataatccaacatatataataaacactagtccaacctaattctcatcat

SEQ ID NO: 403511 - DNA, 554 bp, Cannabis indica
aatttgttatatttcttaaatattgtgttgatccattctctttcatcttaccattgatatattctttaaaaaaatcaattttgaattagaaaaggaaaaagacagttttttgcttatataattgagatgctcataggtagcaccgattcgctccgcgtggaaattgagttagggggaaaaaattttgcccgtgccgatttacgctaacaaaggtaaattgttgacaatttttagtgatgaattgtgaaaaatcgtatttttttgcaaatgttaataattttattaaattttagtaaaaaatacaactgtaacggactgcagtaacaaattgtaatcttatcactacagaacacaaatttgcagaatcaaacagtaaccaaaaataaataaatgcaggattttaaaagaaaaaattaacacaagagaattatatatggcatcagtgttcttttcaaacactactagaacgaggtcacgctcagaaaaataaaatcaattagtaaagtatcaaagattcaaaagtggattgacttaaacaaatttagactctttct

SEQ ID NO: 403512 - DNA, 652 bp, Cannabis indica
agaaaaggaaaaagtacagtttttgcttatataattgagatgctcatagctagcaccgattcgggggaaaactttttgccggtagccgatttacgctaacaaaaggtaaattgctgacaatttttagtgatgaattgtgaaaaatcgtattttttgcaaatgttaataattttattaaattttagtaaaagtacaactgtaacagactgcagtaacaaattgtaatcttgtcactacagaacacaaatttgcagaatcaaacagaaccagaaataaataaatgcagaattttaaagaaaaaattaacacaagagaattatatatggcatcagtattcttttcaaacactactagaacgaggtcacgctcaaaaaataaaatcaattagtaaagtatcaaagattgcaaaagtgattgacttaaacaaatttagactctttctagtgatttttcgcagccttttgtaatccatcttgctaatctgatctctgaaacacaccaagtaataaactcccttcagctattgatgtgtacttacttcctcctgaagtaagacttaaacaaatctgctcccgaaaatatatgctcacttcctcccaaattgagacttggaaaagtcttctcctaaagacccacgcttgttcaaagcttc

SEQ ID NO: 403513 - DNA, 532 bp, Cannabis indica
agacttggtgctaagatgagtctgtaaaaatacgatatatgcatctgcaaaagtgttaaacccgaattgggagggtccatatgtcatcgaagcagcagtcggagtcaaagttaataaattggctcgactcgatggctcgcttataaagaactactggagcgcacaacatttgtgaccctactacaaataaataaatgatgtaactcgcattactgatgtgaacttctaacttcagttatgaataaagaaaatcatttatattaagtaattacaaagttttgttctttaaaaattacttaaggggcatttatgtatgattaaccgtaattcatctggaaatacattgtataatgcaaacacgtcatttcaattttttttttttgaaattcaaagattctcgactaaacctctttgacgaaagtggagtcaaaccgttataacttcctgacggaacctttttgacgagagaggggtcaaattgttatagcaccttgtcatgttgggttttctgccctaaataaacccatttcaa

SEQ ID NO: 403514 - DNA, 739 bp, Cannabis indica
aaaacagaggttggttagtctcaaattcttacaaagggggtggaaaccaaatccttttttgttcgaaacctgagataaaagccttgacaggtattccattatcaacacaaacagcagaggagataaggggtctccttggcaaagacctttttctcctttaaaagaaccttgaatccgaccattaagtaaaaggaagtaattcgtacctctcaagcagacaagcagccaatgaataaatctcgaaggaaaacaaaggctgtttaatatgtcttccacaaagtgccagtccaccgtatcataagccttgctcaaatcaatcttcattatacatcttgcagaaacgactcttcgagtgtaacctttgaggaggtcttggaaaatcatgatgttatgagcaaggagtctatttttaacaaaggccccctggttgtcactcaccaaacaaggaagaacttctgccagttaagagcaaatcatcttcgaaatgcatttatacacagtgttgcagcaggctatcggacgataatcactggcatccttaggatcttgagtcttcgggattagagtaatgacagcgtccttcaaagatatcggcattgaaccctcttcaaagaagttgattatggccttagaaacatccgccccaatctctttccagaggctcttgaaaaaccccgaaccaaatccatctaagccagggctcttggtggaatggataccatgttggaaattattttac

SEQ ID NO: 403515 - DNA, 795 bp, Cannabis indica
accatgattttcacatcctttttaatcatgggtttcatccccttcaagaaccttttgacccgaagggtctcggttggtacgatctcttgtgcaaactttgccaaacggtcaaattgcctagcatactccgtgacactgagactgttttgcctcagattcataaacttatcttcttttgcagccagtatggcggcactatagtacttcctgttaaacacatcaacaaagtccaaccaggtcatagttgtaatgttgcgactttgtcttactacttcccaccagatccgtgcatcctttttaagtaggctggcagcacaagataccctttccctatcattgaggtccatatattccaatatggactccactgagcgcaaccattcctcagcttcaagtgagtccgagctcccattgaatattgatggctgctatttctgaatctctcgtattgacaggttcaaaacgttctattggttctggattcaatgcagctggttgaagagctaggtttctaacgggtggattttgattccggcgtaactccttattctgagctcgtagccttgcaatttcttgagttagctcctcacgtatacgagcgttttctcggagtatctcagcttgagcattgggaggtgcttgttgttgttcgagtgctacttcatctactggtgctaccgatgctccttgtctacttcccctaccgctttggcctccacgtcgaccatcacctcggcctccgccccttgcgggtgctggagctgcatccacgtggatgtttctattgccgttgat

SEQ ID NO: 403516 - DNA, 1484 bp, Cannabis indica
ggttgacatgttgtcaacctaggctatttcgatcaagctcatgaaaaattgtttcaggtttttttttcataaaaaataatgaagattcaagctaactcaggaaaaaaaactacaaactcgagccactagaaatagggccaagtgcctaggttgacctggtgttgggcccagcacccaagttaacaataaacctaggcgctgcttttgattactcaaatgccaaatctaattcgaccaataaatctggaatggtcaaaaatagggtaggagacctcatcctcaagttcaagaaccttgaaagtatcaaaatgaggtcccagaagcttaagaatgactacccaacgcccaggttgacaaatggtcaggtgtgctatccaattaggattatgttttgaccgtccatctagtttttcacaataaataagatccataaagttagagaagtcaaattcaaaacttctcatttctcatttccatcatgggaaactcacttggaaatgaagagtttcgagtccctcatgtctgcagaaaatatcacaaaaatagactaattgatgtcaaaatatcacttaggcatcttagagtacatcccttggatggttttacacttacctaacgtccaagttgacgtcatatgtcaacttaggcgttgggatgtcaacctgggtgctgggtcatggactaccttcagtaaaatagccataactcactcatattgatccgattgatgtgattcaacttatgttttgaagttaattcaatactttatcaagtcatgtctcacacttcaatcgcaattataaagctatcagcaccaaaattcactctaagggagttacaaaaaaaactcaaagtagacgtagttctattactgtcgtgatacaaggagtgaactactataaatttgatgtgtctctcttataattacttaaatactttttcattcttgtcaatctagcgagcaggtgtggcttagaagtctagtccatatttctaagtcaatagaaattaaagtgtctttcctaattttaccacttatctcatctaattatttaaaaactaattttattttgataattatcaaataaaatataatttaaatatatttattaattagacccacaaagtgtactagttaacaaataaattcctatttctcttttcttctcaaaattgcccaagtttgatgaaaattttcaaataagacagtctatttttgaattctaattgacttattaaatcctttagctgagtcaacaagttgatattatcccagataatgtgaggactatagacctatgtaactaagatcctaataagaagatcttgaaatttatcaagtacatttcctaacttattaattcctcctggctccactatagattcaaaattatactcttgattacatagaatgctctatataccaaatatagatacactataaattatccattgttcaatcacaacaatcattgatcctctat

SEQ ID NO: 403517 - DNA, 355 bp, Cannabis indica
atacaccctcatttttttttcctatactcatttattattttatattttcaaattatttagtactttatattttaaaattgtatacatttaatacttttaagaaaacattacacattttttttattaaacacacaatgatctatatgaaattatataagaaaaaagaacgtaggattgttatttgataaaattccaacaatttcttaatgtttttgtatgaagtttagtttcaacaatttagcaaaaaatatagtctaaaataataataataataataataataataataataataataataataataataataataataataataaaatagcaagttattaatccaaaaagtaat

SEQ ID NO: 403518 - DNA, 520 bp, Cannabis indica
cttgccatagccatttgcaatatggaaaattaacctaattgggtctttacccacaggtcgaggtggcgtaaaatatgttgttgttgtggcagttaacttttcacaaaatggacaaaagttgaacctccagtatccatcacatgctagaaggtccttgattttatcatcaagaacatcatatgtaggtttggtattctaattaagatagtatcggtaacgccctaaataaataggcacgccacctaaaatactcatggaaccttaatcctctaatcaggattactaatcaaaatagcgcagaatttaaacttttaattaaacagaataaaaataaaacttgtaatacttttaaatttttaaacagttgggatcccaaaagtatttacaaacgttgttacaagtcatttctttctagctgacctaaacaacaaaatagaattcaaaagtttatcactgatagacccttaacccgcttgatctgatatggcttgaacatgtacattcttcgccctgctcctga

SEQ ID NO: 403519 - DNA, 829 bp, Cannabis indica
aattaactgctaccaactacatttggtagctaaacttttgttgctaaaaagttggtttcttgtagtgtgcaccaaaacttgcaactgcccaaacttcttctttttgtaagtcaccaatcacaagcatttcttctaatcttgttttgttattgtagcaacttcatttgttaatatgttttcataaatgtgatgtttgcactatatttacgatttgggcattttctcccaaccatttttagtttccatctcaagcaagggtttccatgttaaggttcataggacttgctttcttttttttttcatcccttgcaccatcattctttatcgtggtgtaattagcactcgatgctcaaaatatgaaatttattatttctaaacatgctagcattcagagagagcatcttctcagcagttaggggattccatattgggttgtctgccctaaataaaatacatttcaatataatctgatttactaattaataaaagatcataaattatttatgttgcatggttcacatgatttacttcatgattacatttaatgtataaattctattaagtccagaatatatatatatatatttgttcatgagtatagtgtcgtcagctcaatggaatagaatcataattatatgtcaaaaatttaatttctatgatttgtcagtttactaaatttagactgacatgataatcgacgataagatatacttacaccttagataagtgttatgttatttctaaggtattggccatatggagtatacaatggttaactgtgatgctgtaatttttttcattttattttatttttaatttttttgtcaaa

SEQ ID NO: 403520 - DNA, 727 bp, Cannabis indica
catgggtggagcgtactgggcccctagcccaaaggccccatcctggcccaagaattttctaaaaaggctcctaatatatttttcaaaatacaatttttaaattgagattatttcacaaataaacaaaaataacaattaaattacaaaaatacaattttacagtattttaatttgattttttttacagaaaatacagtttttttatgttatactcttattaatttattgttgaatttttattatctgtatgttattttttgttgttgttttgattttattttcatgttacttttatgtagttttttttgttattttcgtatttttttcatagaaaactgtaaaaatataaaaaaaattctttaaacatgaaaatgtaatttttttacaaaaaaaaaaaaacagtgtctcatgtaattatcctttttaaatttttgttgtcaccatatattaaaaggtaaattgcggcataaatacctaatgtttcagattttatacacttaaatacctaatgtttatttttggagataaaaatacttaatgttacaattctcttacaccgttactaccacttttgttaaatcataaatatggacacgtgaagggttcagatgcattacatttattattttattttattttaaaacttaatattcttaatatcagaaactaaatgctactttttttaaaaaaaaaaaaaacttgttctcattaacaattttcacatgat

SEQ ID NO: 403521 - DNA, 513 bp, Cannabis indica
ccacgtacattggacaaaatcagagacaacaatacccttataaaaaagtgatttgacatcaattaactaagattatatattaaaaaaaatatatttttattattaactagaatatttaatttaattttttaaaaaagaaaagcatattttatcattgattttttttgaaggaatatcattgaataatttagtcacaacaatcttaattttaatattattatcctcctagtgttttaagtgataatgtgaagatgttcaataatagcaaattaaatagttcaaaaaataaagtagatacaatatgtataaatatttgtgtgtggtttagaattaaaatgaaatatttgtaaaaaagaattaaaagaagatatatggggctataatactactatgcattgtctctttaatcgattgagtgtgaatgtaagataaaaactacaatataacttctatttaagaatactttattaaagaataatctctaatttgttataaaaaaaattaagtcccaat

SEQ ID NO: 403522 - DNA, 1001 bp, Cannabis indica
ttgattaaaggttttggtagctgtttttattgctttgtgttggatttttgcaagtttgtgctttgaaacctaagctttgatctttaatggcatgtcttaattcagtggttttttttctgggaattattggttggaatatgttgtgtatacaatgtttaggtactctggaatgtttggttgcttttggtgcagttttgagcaagaaatgagatcttttttgggaaaattggtataaattggttttccggtttaccagtgcctgtaaaactggtaaaccggttttggcagggttcctcgaatgtctcgttttctcaattctcatccatttcagtacagtagttgggtgtttccctgtctcctaagttagtgtaatccctagtgaatataacagagcctagagttataggttcgagtttcccggattagggtttcgaacatgtgatttaccccgtttttatatgtgattagggtatccatccagcacgacactttctgttcaggtcggccatcacacttgaatctggaaagaaggtaagaactgtgtataatatgtgatatttatgcgaatgtatatatgtatgatgtatatgcatggtctgtgtatgattgtatatgtttaagtgatatcatagtgacacaatcattgtgtcggttcagcattacaagcatcgtactggttaagagtgatattcaccctagaatgtatgaattggtgctatcatagcgacacaaacattgtgtcggttcagcagtacagggatcgtactggttaagaatgatatcatggccaattatacttttggatgctattgatgttatcatagcggcacgaacatagtgtcggtcctatagtacgatcatagtgctggtagtgggtgatatcatggtcaatagcacaaacagttagaacgttcttactcatctattaagcattgtaaataggtgtatgggcgcctaaatacaagtcggtattatatgatatgttttatgcttttcttact

SEQ ID NO: 403523 - DNA, 1110 bp, Cannabis indica
gttagggtgttgcttgctagacgggtgagggcatctgctgttgtattctcttctctggggacttgccttatagtatagccttcaagccaacttaataagtcttgaatcttgcttaaataggctatcatcctttcacatcgggtcgtatactcacttaggacttgatttatgactagttgagagtcgttatatatgtccaggtaatcagcccgcacttcatgtgctaacctaaggctagtaatgaaagcttcatatttagcctcattgttggaggccttgaaactaaacttgattgccccgtgcaactattgccccaggcgtaatgagggtaatccctgcaccgaacaggtggttagtacagcttctgtcaacatgcaacttctaggatgaatttttgtgctcttgctcttacttcttctctggctcttccttttctcccaaatcttgagagattttaggagatatgcatgtacattcagccacaaaatcgagaagagcttggccttttatagccaatattggttggtatgtgatctcaaattggcttagttcaatggcccacttgagtagtcagccgaatgcttcaagtttctgtaacacctatcgcaatggttggtcagtgtatactcttattgggtgagcttggaagtataaccttagctttcttgaagctaagagcaagtagtatgtcaccttcttcatgagtgggtcttgactttcagcgttaataatccttttgctgatgtaatatactgaatgttgagctccatcttcttctctaattaggactgcacttacagcatattctgtaacagccaagtatatgcatgattcctcattatccaaagattttgatagaataggaggttgagctaattatttctttagctcctagaatgttgttttgttgggctttgtgccctaaataaaactatttcaatataatctttatcatttaattatcaataaagagacagaagtattttcatcacttatttagtgtgtcatttggttcatgttatcatttatatgtttatttaatttataaattcatccaaacccttatcacattgatattcttgtttattgtgtcgtcagcccagtggaaag

SEQ ID NO: 403524 - DNA, 910 bp, Cannabis indica
gtagtcgacgattgatacggttgatcgagactagcagcgggtcttgcgtacgatcatgagttaacttatttctagttctccatatttcttcaaacactgcagcaacccctcccaagaaaaggtgtaaatgcattcgattaggacgtttgtcttcatcagagaaccacattagccaatcttcccagcttgtagctgtgaggatatcagggcgcacttgccacaaacagccaaaccataaagttctcgcgaattcacagctccagagcaagtgagtgaatgatcatcgtccatgttgtagagagggcagagaacagtgtccatgtttgtaacgcccgtattttatatttaataaacttgaaacttaattttaataatttatagcttaataaccatatgggtcgggatcccgagtatcaaaatacaagttaaaagcattttactaatatgtacatataatattttttttcaaaaaaaactaacacgctaaaatgcaaccccaaaatacagaccccaaaatcctaaaagaccgaaaccctccaggttgcactgccgcgatatgtacaatcattgtcgagttctgcctcactgttcctccagctttgcttttcctttacctacacaaggtagcaaactgatgagtcaacagactcagtaagatatgcaagaaatatataaaagtattgcaatgccggctttatgattaagccgccctgagctcaataaccaagctcaccaaatggttaagaacgttcttaagggaagtacgactactataccaaatgcactaaagtaccaaaatctgtacttgtgttggtagagccctaactgtactcccgggaattactaagtgttgtaccacgaacacgacgtaccctaggtactcgtgttggtaacaccgtaaccacactaa

SEQ ID NO: 403525 - DNA, 612 bp, Cannabis indica
atgtggcaatccctaaatggaacccttggattattagaactatgtacgttgccaaatatagtgactgttcttcctaagggtatccaacatcttacaagcttacaagaacttcaagtttttttttgtgatagtctaacaacaattccagggtggatccataacctcaaatcacttgagagactttacttgtggtcctgccccaatctgacatcattacctgaaggaattcgaagcctcaccactttgaacctgttatatattgattcatgtcccatgttattgaagagatgcaaaaggaatacaggtgaagattgggataagatttctcatatagaagacttgaccttaattccagatccaaacaaagaacaagaaaatgaggtagaaaagtcaatgtctaatgtttgcttttatttgcagttaacattaaatgaacgcttatgatgtttatcttgataatatattgcagaatacaaagggatgcaacctcttgaagaagtttaggctacgcaatacaagaaatcaaggatagattagatatatcatttgtgtaggtaattattaaagagtgctttcatggtgatgagttcgtcttgtcttggttttgaattg

SEQ ID NO: 403526 - DNA, 705 bp, Cannabis indica
gtgcaactttccaactacaaattaaatttcagctttaaccatttttgtggccagttgaagagctatcattatagtggtgaaaacctgcccgggacctctcctactcagtgcatcttccacaaacattggctttctcgaggtgatatagaattttgcagttgtaatctttgaccaattccagccaccagctttgcctcatatttatatctttctaggtgaaaaagtacatgatagcctatgatcagtgtaaatctcgcatttttcaccataaaggtagtgtcaccatatttttagagaaaataccactgcagtaagctctaaatcatgcattgggtagcgctgctcataatcttttagttgacgggaggcataggctataactttgtcagcttgcatcaaaacacatccaagaccctgtctggatgcatcacagtaaacaatgaacttttctcgatctgatggtaaagctagcacttgtgctgttatcaatcggtgtttgaactcctgaaaacttgctattgtctgaccatatgaaccgttgattcttcttagttaactcggttagtgacattgaaatcttagagaatccttcaataaaacgttgataataccctgccaaactgagaaaacttcgcacctctatcatagattttggcctcgaccaattcttcactgattcaatctaggggtgagcaaaaaatctaa

SEQ ID NO: 403527 - DNA, 626 bp, Cannabis indica
ctagacaaccgaaaataaagggaaacaattaactaattctttaacagacttaactaacttaatgtatagtaaaaataatgtaacagtaactaatcatttttacttctaacatcccccctcaagtgacactggtcattgccgagtgttaacttgttaaaaaaaaactgaaaagaaattgctggtaaaggctttgtaaacaggtctgcaatttgattctctgtttccacatatcggatgtctagttgttttgccacaaccctgtctcgaacaaaatgcatatcaacctcaacgtattttgttcgagcatgaaacacagggttagaggctaaacagactgctccaagattatcacaccaaagaattggagattgaggagttggaatactgattttcgagagcacaaattgaatccacataatttctgaggtagccaaagcaatggctctatactcagattctgtacttgatctagctactacagtttgcttctttgaacaccaactaattaagtttcccccaagaaagatgcagtagccagatgtagatcttctatcatcaaagcaccctgcccaatcctgtaatatatagtttatatacatatattggtatttggtatattaagtgtg

SEQ ID NO: 403528 - DNA, 584 bp, Cannabis indica
tgttggtttgactgtctctcatatctactccgttaacccacaactccttcaattcatccaccaagggtcttaaaaatacatctatgtccatacccagtgatttttctctaggaataagaatggtcaacataaaattattatctttcatacgtaaccaaggcagaagattatagttcgccaaaactacaagccacatattgtacacttggatcatgttgccaaatagtattaaagccatcggcaactaaacctagacgaatattttgaggttcaccaaaaaaattaggacgtttggcatcaaagtccttccatggtccaacatccaccaggtgtcacatcaccctatcatcttttgatttaccagtgtggttccataccatgtattttgttgtatgccttgaactatatagtctcttcaatcacggagttaacggaaagtaacacatcacattatgagacacttttttttgctcctaaattttgtgaagttatctatctactactgccacaaactcatgaatctttatttgcatgttcattgtaaaataaacagcaaatatatttgcacacatgaattgactcat

SEQ ID NO: 403529 - DNA, 836 bp, Cannabis indica
gttgaccattttcttaatttttttaaaaagtggtaaaatactaacttagttaccaaatttagggccattttgcatctcaaccctatttttgtttgggaaatcggggtaagttgaaaaataccacttttattaatcaattaatcaaatttacctctaattttatatttaattgaaacatacctctttttatatgtattgtacccaaaataccctgacataagagaatcacatggagaatatctagaagtgacaggggtaaaattgatataatgtttaaaaaaagaggtaaaaatgacagactttaaaaaagaggataaaaataaaagaggacaatataaaaatggtatggagtgtaatttttttttttttttaatatatacataattaaagaaatatgtataaaaataacaaagagtaatttaaaatagcgtgaatacgaaccgcagtatgttaatttttataatttcctctttatttatcaattttcaatgcataatattctacatagagcccattgtgcaatattgggtttcaacatataattatagggattatttgacaaatcacaaaaataataaaaaaattacaaaaatacaatttcacagaattttaaatatttttacgaattttttgattttatttacagaaaatacagtcttatgttgtatagttgttaatttattgttgatattttgttatttgtatgctatttttagttgttgttttaatgtcatttagatgttatttttatgttacttttatgtagtttttcttgttgtttttgtattgcttttatgaaaaaccgtaaaaatgtaagaaaaattctgtaaacgtaa

SEQ ID NO: 403530 - DNA, 770 bp, Cannabis indica
acagtttattacaatcgccaaagaaatcaagaccagtaattaagtaatactcattggcactgaaccgtatacaacggccagtaaccttagcccaaaattctttgagattaggctagtaaacctccctcaacagtaggctatgaacaattggggtaaaaaacaaagtcaggaatatccaaaaaaggtccaaactgggtgtctcggaacatagtttacaaattcacagacaaagtattcttaatgttattaataacagagaaattactcgtacatacacacttcgatctgtagaaatctttgggactatatttgttaacccagtcttgcattttacaaagaaagcatatataatgaaataacatatgcaagtagcgaagctataataaaactacaaaactactgtaaacaaacataaatataggaaaaactctttgaacatcaaaatccattataaatctaattgttacccatttatgatataaaaatggacaggaaacaactagacaaaattatattccaaaaagacacatacgaaagggggtttaaactattaaaaaactatgaaaaaataattacaaaatgacaaatgatcaaatgaagtaactgaaatgaaaaacaataacacatgtggaaaaaaaaaagccaacaatatgaaacagaaattaagactaaacaaacgaaaaatgaaaaactcataaaaataacacataaattaaactaaaaaccggaagccctaaaaaaccaaacaaaaccaaaagaaatgctaaaat

SEQ ID NO: 403531 - DNA, 867 bp, Cannabis indica
ttacaattttagtatcagagcaactaggttttctacaaaagatcgtcaagacatctacaatcattgtaagagaaaagctcgactcacggttcagtaagcctttatttgtttagtaatttttatgattcgaaaagtattttaggaagcataataattttatgattatttatttgaattctttgccttaaaatgcataagtgtagtacttaaagtatatatgattgttttctaacctacctgacttatgggtttgcaaggtaagtcctattctatggacacctagtcaaatacgagaagtcgttgtaacacagtcgagacaaagggcagtcaaggaggtaaaaaacctccgaatccccgcgcatgcagcaaaggttgtggaaggtttcagggtggtggacatgaaagtccacctcaagctcctccggttcgggagaaaaggttggcagaaatgcaagcccgaatacttcaaccagacgaagaaattcaaaggctaagatagcagggtcctcctgtagtgcctccacaacaagtactgactactttggttccagcggtgccagcagaacaacctgttattggcaaccgtatggaacctttatatgagaggtttctcaagcaggcgcctccagtctttcggggaggcccgaatgtcatgaaggtcgagcagtggctcactatgatagaaagaatcttgaattttatgggtgttgtcgggaatgatcgagtgacttgtgccaccttccagttctaggaacacactcgtatgcactactagaaaattaggttttagtgacacaaatttagtaactttaaaactatatagtaaacttcaacgcgcgtcaccaatgagggtgactggaaaaacag

SEQ ID NO: 403532 - DNA, 547 bp, Cannabis indica
gtctgggttctggtacaggtctcagttttggacccagtcctgggtctccggtcttgggttatgggatctgggtcgcaggtcctggcgcaagtctgggtttggattcgggtctgggtctgggtattgatcccactttgggtcgggctcattgttcagttctgcgtctagatctagtttgggtccagatctaattccggttccacaatccttattccagttcttattcttatttcgattctcgaatccaagtttgggtttgggtcctagtttggaagtggttccaagttcgggtcttggtacgattccaagatttacacgcccactaggggttggtccaagcactgggtcgtgggtcaagatccgtatcccaatcttaggtgctggtctcgttccgattcggatcttgggtcccaatccgtgtccgggtccaggtctggggccgagaccggggtcggggcttgggtcacatacccagtcctgggtcgcgatttcggttctaatttttagtttgggaccccaatctaggtctgggtcttgagtcaaggtc

SEQ ID NO: 403533 - DNA, 1067 bp, Cannabis indica
cctcgtactctctagatacatgacttaccaccaactgtgagtaactgcagatctcaatgtgttcggctttcatttcccgagcaagtcttaggccggcgataagagcttcatattcagtttcattattggatgccttaaatttgaacttgaccgcagcatgcaggcgttgccccccaggtgtgacaagggcgattcctacaccggacaactaatccgtagctgacccgtccacatgtagcttccaagtcggcttgtcttcactattgctcggctgaggtacttgtactggctctaggtttctttttaaaatgatttcctctttaaatgtaaattcaactacaaaatttgctaaggcttgacctttaatcactgttcggggctgaaaggtaatttcatactagcctagctccactacccatttgagcaaccatctagaggcatctggtttttgcaatacttagcgtaatttttggtcgtgtatacccgaacaggatgagcctgaaagtagggccttagctttctcgttgttaggattatgcaataagtgagcttttctatcaatgggtactggctttcagcttcgatgagtcttttactgatgtagtaaaccgggtgttggatattgttctcttctctgatcactacgacacttaccgcatgttccgtgacaaccatgtatattcctaattcttctccgtccaaagcttttgagagcacaggaggttttgcgagttgcatttttagctcttgaaaggattttttgcattcctccatccattcaaattgcttatttcctcgcaggatgttgaagaataggacacacttgtctgttgactttgaaacaaatctgctgagtgtggcaatccgaccagtcaaactttgaacttccttggtttttgttggcaaattcatatccaggagggcttgaatattctctggattagcttcaattcctcgggcattgacgataaagccaataaatttacccgagctgactccgaaggagcactttaaaggattgaatttcatgttgaggactttgaagcattcgtccaagtcatctatat

SEQ ID NO: 403534 - DNA, 714 bp, Cannabis indica
gaaaatggaagaaaaagatgaagctaaactgtagcccaacatagaacaaagcacaaatatataacaaagactaattcatcatcttatttcatttccaccattttcttctctaaatttctcatactgggttaatggagtcttaataatcttcaatattaatccacctaatcatttcaatttcagttctttagaatttcaagctttattctactttctaattaagcaacaagttattgttattaattagtatctaattaattaattaccaggtagtaattttcgaatgccaatatgttttatgcatataaatattctattagtatctatttatatcttttatttttatcgctttaattcctcttttgtgtgttttttgtttttcaaatatttacttggttatacatatgtgtgtgttcaatgagatggcatgaagcttgagacttgagttagccaattaaatgaaaagaaaataaaaacagtacgggcaaaaaggatcagctaattaatatgttttatacataatgcagccttttgtgataagtgtaaaaatacatgcatataaaaattactctatggaatgtactaataatttgaaatatatatactttgattcatgaaaaagtttcatataacagataaattttgtctaattaattattaagtaataaaacttcaaataccagaataaaaagttaaataacataccagaaaaac

SEQ ID NO: 403535 - DNA, 512 bp, Cannabis indica
aattgctaatagaacacgagttttgagaattattctgccataaaataaattttaaggttaattgctagcgaggtaaaaatattaaggtttcgccgtgttggattaatttcccatataagtcaacctgtaacaagttaaataagtcaaacacagctagttaaaatcctaactaacctaaccgtatgcaatccaaaatcaagacagttgttagttatttctaactaacctatttctcagctacaacacatataaatagaagaactaaaatcagagaacacttacagcttcaaaattactcctcagaaatctagaaagaaagagatgaaaactccagacctagaccaagagagtttctctcgtgtgtaatcaaaaagaaaaagagtttgattatagaggaagagagaagaaaaggatcgtttggtaacacttttgtttttaaattttttacttacataaatagaagttaatttttttaaaaaaaaaacaaaaatgtgttttgtaaattttatttt

SEQ ID NO: 403536 - DNA, 502 bp, Cannabis indica
attttatcgtaaaatgagtgacatagtagatgaacaaattaaatatcttttatttattaacgtaaaaatataaaaaatatttaattttgcattaaattatcaactccgttacttatttttatttcacgataaaattaaataaaatataataaaaaattatattattgtaaaatttatatttaaaaaatattaataaattgtataccataaaaatactacaaggtataaaaaatttgggtaataataataataataataatgtaagttgggaagaaactgggttggtgggtgagtcatcatttagtttgcatttaatatctcaactcatctcgattggcaattcaagtcaacactttgaacactttgaaatattattattatatatagtcctaagccccacttctcaaacttaggcaaccattttctttcttttgggcggtaatactattaggaaaaattacaaaaatattgaaatttagagttaatttttataaaaatactg

SEQ ID NO: 403537 - DNA, 1082 bp, Cannabis indica
cctgcatcaggcattagcaggggaggtagtggctcggtcattcatcagaaaagaaaggcatctactgctaccactggctcgggttagaacaagaggttccatgggaactagggtagaggcaatcgccagagttgcgtcgaaacccaatacacttacctagagtaccccagttgtaaaaagcaccatccaagggagtgtaaagggcaggggtgctttcagtgtggtaggccagggcattacaaaagggattgtccccaactcaggactgaagcacgtaagactgcagcaaaatccactccggcaagggtgttcgcgataacttaggctgatgcagaagccagcccctctatggtaacaggttagctctcggtcaacaactcttatttctctgtgttgtttgactttagggccactcattcctatgtggcggccagaatttttagtaaattggaaagaccgcatgatagttatgaaacaaagtttggaaccctactgcctggtggagaattagtcatctccaaaaggtggatcaggtctatcacggtcagaatagaggatagagaattaagtgctaatctaatatagatgaatttagcggatttttatattatactgggaatggatttcttgtccaaatactcagccagtattgattgtaagaggaagatggtaatcttctaaccagaaggcgaagaaccgtttgtctttgtcggttcggtacatggatctcagatcccggtaatttcggtactaacagccagggaattgttacgagagggatgtctaggatttctggcagtggtattagataccactcagcctgactctattcggccagaagacatcaaggtggttcaggaatttctggatgttttcctgatgaacttccaggtttaccaccttagcgaaaaattgatttttttattgacttggcacttggagcagaaccgatttctaaagccccctacagaatggctccagcagaacttaaggagatgaaaatttaactccaggtgttgcttgacatagggttttctcggcctagtatgtcaccctggggagctccaatactgtttgttaag

SEQ ID NO: 403538 - DNA, 2027 bp, Cannabis indica
tataactcagaaatttggacgcagacttctaagccacacccgctcgttagattagcgagaatgaaatatttgttaagtaaaagtagagaaacacacatcaatttatagtagttcactccctctatcatgataataatggagctacgtctattttgagttgttttttctcgcaagatggtattacagaataaggctaagtgtcaaagctccaatttctagagagaaactatgaccttgtgggtagttttctgaacagaaaaaatgaactaagggatgtaaagaccgcttagcattaatttgaaaattagcgaataattaggatttaattatggaaataatttattaattttgaattattaatttatgatgatttatttaaatttagaatgcatttttatgtcatatatagaaatttcataattttgcatgttttgtgcccgacaacattggaacgcggtgtttggctattagaatcacatcttagtatttttagtattgcgcgacaatgaagttagacattgggaatgtcaggaatagtagaaacctttgaagtgaccaaaataccccttaatgactttttatgattttttattgtgagaagggcaaaatggtcttttgcctaattatgtttgtcttatgtggatttgaatttagtcaataaattagatttttaaatgtattataagctgatattttatttaaataaacccttttatcatttcatttttattaaaaatcaaagatatcacttagaagaaaatgttctctttctctctttgccctctctctttcgaaaccctctagatcagctaggctttgctgtgcttttgttcatttcaagtttgttgctgcaagaattaagtgtttataagctctaggtaagcttttaacttgatcctctttagtttattgagttataagaaaatggattttgcttgaaattgagaatttggttgctgttcttgctgtggttgtttgaaattgttttctgaggttaatttatgttagattatgttgatttgagcatgaattaagggttgctagtaggtttaatcaagttttgagttttagaactcaaacttggagctttaatggtgattttggattctaagcttgggtagttgatttattgcttggaaatggtttattggagtataatatgcaggtctggagagtttagctaagtttggaattgttttggtgaagcttttattttttttgggtttttttgtaaaaaaccgggtaactggttttacaggtacctgtaaaactgggtaaccagtttctgtagcagggctcccgaaaattttagctttgcaattcgcgttagtttttaggtttctggttggttaattccctattagtttagggtattgccatattaagttgtagtagataggattttcgttttaaacctaagtcccggttgtgatttaacgagtcacttattcgtgttattatcgatgtgatttaggagcctatcattcaccgagcagttgttccactcaggttgaccggcacacctgaattcggaattaaggtaagattagtataatgtcatgcatatgttattaaaagtttagcgtacatgttctttatgcctgttagattacattggtatcagtaatagtatacatagagttgtactgattactgataaatgtatgttggctaaaatatcgatcgatactgtcacatcaatatggctatagtctgactagcatattgagtataggttggcattatcgtcgatagtattgtcgtatgaacattctagactcagtaccgtgtgggacacggggattagggttatgatcgggtgtatgggcgccaggttataaaccgggatattaatatgttatatgttatgcttttcttattgagtctgtcgactcacagtgctatttccacgtgtaggtaagggcaaggctaaagctaaggagccgtgagaatgagtaggtgaagattgtacatgtcggggcggttaggtctagagcgtacgatcttagaggacatcaaggcttttg

SEQ ID NO: 403539 - DNA, 489 bp, Cannabis indica
ctaaatacttataataaaaataataatataaaaatattaaaagaaatttaaacaaattttttaaaaatactgaaccataatttaagaataaaataatcaattttttaatttaaaacctcaaaatatcaaagaattaatattaatctattaaaaattatatattattatttaaaattgatatttaagtttaaatatattaaaaataatattttattttgaaattaggatttgaaaatcagaaaaattcaaaatttgggaaaaaatcccacaaaaattagatttttgggtgtgctgcctaggaggggctacacgtacagccacaataggctgcaaacagccctgtccgcgcgcgcatggtgagtgttccaggggtcatatgggcagcaatcctcggcgcatgcacgatcctccctcggggtgcatgcagcctctcatgtctgaagacacgggcatgacacgccttcagacaagggattgtccccccattcc

SEQ ID NO: 403540 - DNA, 545 bp, Cannabis indica
actagatttatggatgtcctaattgtcaccttaagaaaatctaaactattaaccaaggttttcatgtttgatagctattctaagtgattaggggtggaccatcctattttcattaagataagaaagtgtttgtttcaacaaatactatttttttttaagaaaatgactaagtctaaaaacaaagtagcaaagtagaggagatattttttcttgattccaaattgtttgatcatcttattcgatataagatggtcccactgcctctgttgtattgacacaaccgatgaggtaaataccacttagattcttagaccaaaaagtcacggtaccttgtcatagtgggagggtttcaaggaactcaccctgttatgacttggaagacacttgtgatgaaaatccattgttagtttaaacaagtaatgaattgtcagaataagaaactaagaagtaaagccaagagaactatggtaaaaaccattcatatggaacaaccaaaagttttctattacaaggacaagaaaggaaatttcgttagtaagtctatt

SEQ ID NO: 403541 - DNA, 432 bp, Cannabis indica
attttttaaaattaaattaactataactaactattttcttaaaataattaatctttaatttaaatatttaataagattctttttagaaattaatattaataattttattttcatatttaagtctccattatatttttcttaacaattaagctatttaattataatatttacaataaaactctattattttataaaaattaaacttccacctcttcttgttaattttatcaagaacgcatatttaagatccataaccaataacaattaataactttaaaatttttaataatacatattcaagatcaataactaataataattattaactttcaaactttttgaataaaacgtattcaagatcaataatcggtaacattaataactttcaaacattttaataatctatattcaagatcaataaccaataatgat

SEQ ID NO: 403542 - DNA, 915 bp, Cannabis indica
caatacgaacatagaagagtacgactgcccattgttttagtccttgaacttgaagaagcaacattgttaaaagtatcattctcaatcaccctcttcctttttcgcatgtctgcaaaactggagggaggcctccttgcaggtaaagtccgctcgtaagcacgcaattctgcgtctagcttgtctacgttggatgagttaaaattgttgatcatgtaagatacaacaaatctattatactcaggtggaagactattgaggatgaattgaacccattgttgttttgatgaagcaattcccagtaagttagctttctggaacttcagattcatcattattaaatgtgacttaatgctcttactaggagataatttcacattatagagttcatttgcaaaggcatgtagagggtgacagttgggaggagggtagtttattttgacactacaaatatcaataaacagaaataaatcatttgcttcacttaaattcatacacaagttcagaaaataacaagtaagtaaacatgtttgcaaaaaataccaaaataagacatatatattattttccaaggtttccaataaaatgatacagtgtcctgtttaggcgagagtcaaagatatcatctatagagttgtcaactcatctaaaatgaataacattctagcaaccttttattcgatcgaaaagagaatctgacgttgtcccgtttaggcgagagtcaaggtcattcttatttgatgagctcctactattgtttcataccttgtaagtcttactcttagcagccactattggggtggatgttactaagaataaaacacttacaaataatacttatctttcgagattctacgacattaaattgctaatgaacgttcatccattagggatgattactcactaaaacaagaacta

SEQ ID NO: 403543 - DNA, 563 bp, Cannabis indica
ttaaaatagtcaacaaagtaccatcaatggaaatctaacttttcacggtagaaagaccaacattagcctccagctagggcaaagcaaacacctgagcaagaactaaagtctcatcatccttctattccgattgttgcaactgtgggcaatttcttattaaatggcctactacccccacactggaagtaggctctagtttagcattcaccctgatggcatctcttgcacctcggtcctctggattgtttttcaaatttttgttcccaccacgtcaaaaacttttgttcccttaaattcttgtactaggacccgtaactggtgtgtcattagccctttttcttgggataattaatgtaagcacccttattagagctgtaagcccaagttcttgtctaacctatctttttcatatttagattgattttatcttgatttaagcttgaatataaaaagaacaaaatcaaagattcaacaccagaattttacaagcttcatctacactgagaacacatctcagccgactagtgcttaggttccccgaaccagggtaaattcatccacta

SEQ ID NO: 403544 - DNA, 1137 bp, Cannabis indica
attaatttagtatttataggggggaggttgctacaattagaactgttaaaggagtaaccagaaagtaaatacccttatattctagggtatagttacgatctgttgaagctcctacaatttgggtagatcagtcggatccgcatatgtaggatacagttcgagatatttgtggaagttttttgatgaagaaattaaggcttgtgtagccctgcgttacaaacttggagtcgttcaccctggctggcgtgttgacaccctgtcaggcttgtctttcttatgagattatttgcgaaacattcttgcaaggtgagtcaatcttcccttctctggccatcataatggtagcacaaccagatgcttcttggaagtcaatttgcagttcatggatatcagcttcatatgggacctgtcacgtatacttctacttggaagtctcttgtcatattaagggtgcgttggcttatgtcatgcgtacgtgacatgtgaaatgtgcaaactttgagataatagaaatatattttttaaatgtggacaatgagtttaaaaaaagataactatagaaagatttttttttttttaaaaaaatatatgtctagtttaaatttgaattgcaacgtttaaaaataaaataacactttatgtttcatagtcacattttatataagaaaaatatgtctactttaaatttaaattataatatttaaaaaatacaacacttttgttttatagtcatggaatcgtcaaaaaaaaataaataatagtgctcagcacaatattacatggcttaattaagtataaattctatatatttttatttaaaaataattaatttaaatgacaaatcataaatatatataatctgcaattcaattccaccaataaaaagagtaatggtgttctacacaacaaatgccttttaaaaactaaaaatctgtacaatttaaattaatataaattggtcaatttaggtcacgagatgagttatattatatgtaataccaaccgatatattaaatttatcattaaaggtgatcagaatccatactatgagttaatttatttcgttaacaatagaataattatcgacaatctcagcttgtaatcaaatgtatatcataaaattaataaagactccat

SEQ ID NO: 403545 - DNA, 684 bp, Cannabis indica
atataccatatactcggtatactagtcgcatgagatgtctacttggttattacatatactcagtatatgtgcgacaagtattaaatcgtctcggtcttgctatttttttgactatgcaaggcatagtatgcgactagaccctgtctcggtcgcatcttcttgcaagttgtcatcaagccaaattagtcctatgagaggtatctactaaaacgttatcatttctattgggaacccaggtccacgtgtcaattttacacgaggttgtactcgtacttttaggtaaaaaatttgcactataacagtttatatcatttaaatagctatgaacattatggatgatgcatacgatagatgcttaatattatattttttgttttataaattattaaatctgatcacttggtgattgaataactgtgcggatgttattgttttatatatattgagcaatggtcttattttatgacaattattttttatttattatagaagttatactattattttatatatgtattttatttaagggtaaataccattttagaccttgtgttttgtaaaagttacagattagaccctctgttttgttaaatgataaaatggactctgtattttctaaaatggtaaaaataagacctgagcttaatttttgacaatttttttttaatactaccaacttgaaga

SEQ ID NO: 403546 - DNA, 582 bp, Cannabis indica
tgagaattggatgtaattacactgtataattacataactaaaaataattttaattattaattaatatgatttagtctttttatttttattttcttttctcttatacataatttttttttatcatgtgtctgatactattttataatattatttagtgtgatttttcttgtattgtttgtaacaaaaacttaatatacaaatatatgatatatgtatttttttttttttaaaaaaaattaacattattttttgagttctcttttaaattagatatttaacagatttattcatgatttagatgaaatacttaaatttatttattattaattttcaatcaacataaaaatgacaaatatatactcaaacttttaagattggaaaactatttaccaaatggaatagctcaagaaaaattaaatagtcttaatacacaaaaattattttaaatatttattataaaattattatgaaatttgagtttattttaggaagagtttttgatttattttaaatattattgatagataaatttattttaaatctttgttataaaataataataattttatattataatattac

SEQ ID NO: 403547 - DNA, 535 bp, Cannabis indica
ttgatgcttcgaactcccttcctccagctgacgcttaggtgacgactgaaagagaggaaaagtatcagttgcaagtggtgatcccctcaaaaatgccaatcagcctagaacttcatcaagataaccccaatggaaaagatgatccgaatgagtactaaaaagatgaacgagtagagtattatgacaaagaagatgaggaagactacaatctctctaaggacccagaggtagaacgtttaaagaaactggtcttagatgaagaagctaaaatggcagaataagaggaagctactcgccaaatataggaaaccatcatgcagttaataaccctgattgtgacaagggttggaaactgaccctgattatgtggacattaatgtttgacacgtgataagaaagtaaacatcccgaagttgagtagttttgagtcatggcagttgacttggaggggtctctagcctacgtttaggttgactctaagaactcaagaatgggtgtttggatcccgctaagttgtttccaaactcactatttt

SEQ ID NO: 403548 - DNA, 569 bp, Cannabis indica
caaacaaaaccaaacgaaatgttgaaatggaaaacatagaatatcacaaaccagaaacgcaaaatcgagaaaatgaaaaatacaagaaaatccagaaaaggggggaaaccaaaaagaaactataaacaaatctcagtttgaagaataccaccaacattatcgttttttccagcaacatcttgagccattttttcttgggcacccaccttcgatttcttcttaggaggagcttgcccactcttagataatggaggagcaaaatcagagtcatcctcctcaataataggtcgtttacccttggtcttattagctaatgatttcaaacctattttagagcttttcttttgaacaagggaaggaggtgatgaagaacgggtcacaaccatgtttatatacagattgagaaacaaaaagaaagagggaaaacggttatgggattgggttagtgtgagttgaaaaaaatttgaagaacgaaaataggagggaaatggatgtgggatcgtggatatggaagttcagcaatggaggttactaattttaaaaaaaaaaaaactgaaaagaaatgaaaa

SEQ ID NO: 403549 - DNA, 1211 bp, Cannabis indica
taatttaaaaattaatacaaaactaaataaataaaataccattatttatgagtgaaaactttatatttttaagaaaataaaattttggaaactattatcaaaaaaataaagtttgaggactagttagttaaactttatatagtttagggactaaatttaccaaaaaaaataaattcaaggatcaatttactaatatttatacaatttagaaaccttcactacaaataagcctactaagaattaaaatggaaccaaaattttaaaagattttgaaaaaaaaaattgagattttttcatttttacactttaaagtaataattttttttttgtatttttatgaaattttacacaaaaatctatatagcaattatggaataatttaaatcgcaattaaaattagtataataatccatataaaaactactttttttaaaaaaataaaaaaaaatagtatataagtaattcccaaaataaaaaaaaattatgtgattaaatttaagtatactaccattcagtaaaaattagataattttgggtagtttaaagggattttttgaaatgtatttgtaatttgtgtgaataggcttagaaagaaatacaattcccaaggtgggtgggttgtactgaggtgggtcccactctccgtcatgaaataaatgtctcagcctcgaccacctcaactcactccttcactctcacttctatcaactagtccacttttccatgtgggctatccttaacgctccgcgcattttagcttccttcacccctactaacaattatttattatcattttgtatttctattgttaaaacattttagttaattttacaatattaaaataggtgtataaatacgtctttttatttttggaaagaataaatacatttttatattgtaataatttttaattttcatgattatacataacaatataatatatatttaaaatatatcttaaattctttaaaaaattgaaataattcaaataatattataaaaggtaaatagtattttaaattattaattttgtaaaaaatattagctttattatttattttgttaaatagcaatttatattttatgttttttaaaatagtataaataaatattaaaaaatttgaaattttattatgctaaaagtaaaaaactcaagttaggttggtttttaaatttcaaattagttatattaaaaaaattaataaataatt

SEQ ID NO: 403550 - DNA, 588 bp, Cannabis indica
cattgatttggagtccaacatcctgagtccaccttaaacttaccaataaagcaatcgcttctacttgaaaagctgataaagagcctgcaaataaaagcctcttataagtatttaaaaatatcactaaagcaaaatagtcctaagactaatctaaccaaatgaaaatttttaagaacactgtaaatttgaatttagccacaattaattcgtgagaaacaaacaataaattagagagtagtgaaagcataccagagtccatagaatcgatctttaaatggtatgatcttccaattttgcagtgaaatctttttatgtaacatttgtctcttgataatagggtttcaaaagaatgaaaagatacgatactgcaaattggagactattaccgtttatattaccatctgacaaaactgttagtaatatttattaactatttctattttggcccctcatcaaattagaaattatccttatggtatccacgtattaaaataatgacaatcatgcccttaagtcataaactttattccaaaatagatcacataaatttgacttatttatttgatgacctaacacacattttatata

SEQ ID NO: 403551 - DNA, 662 bp, Cannabis indica
gatcactactgatctatcaactgctgggggtgaattgtggaacgacttacagggtcatccagtgaagaacatcaccgagttcaacgagagggctcaggtgttcgtccgaaaagagaaagctcaaaaagagatgaacttgttaaaaattggctcgggaggcaaacccagcaatgtttcaacaagtactgtctcaactagagttgataactcaggggcctttggctcaaagagaaaagacgatcctaagaagtcgcaaaggacaaaaagaaacaaaagaagcacgataagtacgtgccagtttatactatttataccaagcttaatgaaactcaggaaaatatttacctcgcgcatgagcacaaggttaccttcagcaagcccgagcccatgaggcatgggaggcataaaagagatcctactacgtattgcaaataccataaggacattgggcacacaacagacgagtggtgtcagttgaaagatgagatagaaagtctcatcgcttggggccacttcaagcagtgtgtgaagagacagtgcaatggacataaccagtacagtcttcccaacaacccaagcaaccaggaattacaacctcttcctgttgaacgagaggacatcctggttattttgggagggccgcacattgcaggagagagcaa

SEQ ID NO: 403552 - DNA, 534 bp, Cannabis indica
ttgttagaaggtattttttaagcctttaaaatgaaatttcccttttcttttgtggttacatttagaattatctcaaatttaatcaattatctaatatattaattattatttttcatttaatttttttagctggtaccactttttatttatttatttattttaacacaacttagtttcttttttatgttcttatttattcttttataaaatactcaatattatctataccttctattattatttttttcacaatttttatatatacaaaggtaatggcaaataatataaattattacacatacatatatggaacacttcttgatgggtattacccatgaatggttactaaacaaatttaattataaatattaattttaaaaatatcaaaccatcgaattttgatctaataacgaataatgaaatcacaaatttaaatttctatgcttaatttaactacttaattaaaaaaatatcaaaacatatctctttttacactatatcaaaaatatgttcatacaaaaatatttaactcaa

SEQ ID NO: 403553 - DNA, 561 bp, Cannabis indica
tttcctttcttcctctttggatacatgtttaaaaattattgaacaattattagaatagtagttataaatttaataatcacattttatttttaaatattagttgtaattggatataagggaaggattatatatgaattttttattttttattggacaaaatatttactaataacatagaaaaatagcatttgtccagtaaataatatttaaagtgaatttttttagggggtgtgtctgtaaagttttagtagttacacaatattttaaatacaaaatgaattttataatgttgtaaatacaaattgatttttttgacacgacataaaatcaacacaagtttgggaggcacgagcatgacaaggcatgaaaaaatataacttgggcacgatacggtacgaaaaatatagacttaagtacaacacgatcacgactagactgaaacacatgagcaacaaataatctagcccgacgacacgacacgactaaaaccttataatatgaataaaagtaataataataattgactatctattagtaaatatttaaatttaataattataa

SEQ ID NO: 403554 - DNA, 442 bp, Cannabis indica
agttgaaggtatactaattccaataaactgttcacattatgaactttttgacataatatacgaagctttgaagttggacaaaaataaatataagattgatcaccatgatttcaagtaacagaaggcatacctccaataagaatcaaatatgatggtggatgcaagttttataaacaaatacgaagagaaaatgacgatgaaacaaaataccctattttggttacactaatacaaaaatggattttgtcaacgtttttaaatggtcgtttagagtattaccgtcggtttgtgtaaaggtcacttatacgaccgtcgtaaaatgggcagaataggcgactgtttaaatccatcgctaatctgggttttcccgacgatttaaaaccgtcgcctataactgggtatagacgacggttttaaactgtgcctaatactataggcgacg

SEQ ID NO: 403555 - DNA, 524 bp, Cannabis indica
gtagtgatataattatatatatatatatatttgtgaattattttaataggtattatcgagtagaataaaaaaaaaaagaatgacatggctaaataatatcttaatagaacaattcatttttccttggtatcatttttatttatttttattttttagttatatatatatatatataattttgactgcaaatattctaaaactcgtattctattggcaatttactattttcatctaattttagttgttaactgccatcttaaattatctacatatacataatgtacacgtgacacaatcttattaattcacgtaaataatatttttttagagataaaaaaaaacacctaaagtaataataaattgaggtgtattaaatatataaaactttatacatattatgataatatatttattttaaaaaataaaatgatattaataattaaaaaacttattaatttttaattttaattattatttttttttaagttaattgaattattttatataggtatttatttttaaaa

SEQ ID NO: 403556 - DNA, 505 bp, Cannabis indica
gactaggcataaagcgagttatttctagagggggatatatagattcttcccctagtaaccttttacttacgtagtaaataggttgctggtgcctaccctcttgtcgtactatagctacactaatcacatcttccgagatagccaaatagagaagtagcgtctctctagttattggttttaccaaaactagaggcattgatagatgcctttttatgttttgaaaggcctcttcacaatcttttgtccactcgaacctcttgttgcatcgcaatacattgaagaatggaaagcacttattagttgactttgaaatgaatctgttaagttcggccatccttcctgtcagggtttgcacttccttaggctttgtcggtgatggcatgtctattaatgccttgattttcttgggattcgcttcgatacccctcgtgttgactatgaatccccaaaaattttcctaaggaaactccaaaagaacatttttttgggtttaacttcatgttat

SEQ ID NO: 403557 - DNA, 996 bp, Cannabis indica
ttgatgcttcgaactcccttccttcagttgacgcttaggcgacggctaaaagagaggaaaatgtatcggttgcaagtggtgatcccctcaaaaatgtcaatcagcctgaagaactccatcaagataaccccaatggaaaagatgatctgaatgagtactataaagatgaacgagtagagtattatgacaaagatgatgaggaagactacaatctctctaaggacccagaggtagcacgtttaaaacaactggtcttagatgaagaagctaaaatggcagaataagaggaagctacacgccaaatataggaaaccatcatgtagttaataaccctgattgtgacaatgggtcttgtttacccagaaactgaccctgattacgtggacatcaatgtttgacacatgacaagaaagtaaacatctcgaagttgagtagttccgagtcatggcagttgacctagaggggtctctagccctacgtccaggttgactctaagaattccggaatgggtgtttggatcccgctaagttgtttccaaactcactattttagagtattctgtactatgaagacatgaagaatccaactctaaggcctggaagctaaaaacacacgaaacaacaactcgggtgcccagcgcccaagttgataaccctactagggttttagtttctaggtccgtcttagtacaaatgagtcaaaatttgtactggacatgaattaaacatgtcatgaatatatttgaagcaacaaaatcagaatcaaagcactttcactgtaaagaccgcatatgattaataccttgaattattaaatagttagggtttatgtatgagattttattattattaataataatacaattatgggaatttatttgagttcgtatatatatttattatgctatttatgtaaatttttcaatttctgtgatggtgtttggaagccgtggaaagcgacgttgggcctatagagagtcgcattttatataattta

SEQ ID NO: 403558 - DNA, 534 bp, Cannabis indica
ggaccctctatattttgttaaatgaaaaaatagatcttatatttttcaaaatataggacactgagctcaattttcaataattttattttttaatataaccaactttaagacaatttctaacacgaacaagtacagaaaatgtaactagatttgtcataacatctctagattagattattattaagttttattttgacaaaaaatcagttcagggtcctatttgtacaattttagaaaatacaggatccattttgtcatttaataaaacagatggtccaattagtaacttttacaaaatacaaggtccaaaatagtaattacccatattttagctacatcatttatttacgggataattacataaaatatcattttttgtaaaaaaaaaatatatatatttttacgtgtaatttttttgttacatttttacagttttctataaaaataacacgaaaacagcaagaaaactacataaaaataacatcaaaaataacatcaaaacaacaataaaaaataatatatagataacaaaaa

SEQ ID NO: 403559 - DNA, 650 bp, Cannabis indica
ataggcgcctaccactgtctttaggatatagttggtattttttgtcatgataacttttgccttgacaaattttatcttaacactttttgtctttttttcttatttaattaatttgaaaaagttatttatttattacaaaaataaataatcaatatttttccaattcaaaatagatttacttcgaacatctttatacaactctttatccccacccttgatagtatttcaaggtggcgattcggggaccatagacttatcattctaagctccaataaattatattatttgttgagtcacatcaatcaaataatctcttatttattaattccatgattactccactagaaatatggaattgaacttttagtaattatagaattacatttactgagtttgattgcagtgtctattgagatagtcaattttaagtggttagccctccatgtgttgatcgtaattagtttggtcaaaataatattttacccttctaattacttcttcatcctttagttctattaattcactagtagaagtataattcaagatctcatctgaatttgtgcacaatattccagttttggaattaacacttaaagggaaccaacattcgatacattaggaaagtcatgattctataattgtacatcatg

SEQ ID NO: 403560 - DNA, 258 bp, Cannabis indica
ttagctacggaccttttagtcacaacatagaatcatgatttataattagtcataattttttcacttttagtcacaaattttttcgtgactaaaagtaagattttttgtagtgttaactttaaatacaataatgactacaaatgagatacggtgatgatagttgttttaaaattatatgatgaattttctataaatttattatcttctttttgttttagatctctattttgtgtaaaaaaatatttagtttctaatttt

SEQ ID NO: 403561 - DNA, 508 bp, Cannabis indica
aaaaaaaaaaaaaaatactatagaagaataaaaaacttataaatgctatatttttataatttttttaataacaactcatatttcatgtaattttccgttgttttaaattggtgtgcatagcaataacaatgctctaataagattggttccaatttcttgcaaataaaattttaaaagcaatagaatatataaatattccttaaattttcctattaaataggaaattcacatcttggaatgacaagtcaagtttgttctcttttcctactatttatgaaatcaatagctgcttcttctccttccagtcgttgatctcagcatcgattagtgcttctactttagcttgaaatcctgggtaaggctcatagtttaggaacttttgcatagcctgaaattgaaacaaccaaaattttatgtcaagctaataaatgcttctggcattatattcaatccgaaacttaaaatatatatatatatttatatatgtatatatatatatagagagaga

SEQ ID NO: 403562 - DNA, 917 bp, Cannabis indica
aataagcctattatgacatttttgtccctcaaacgagtccccaaggtcgtcaaacctaaaaatatttttattccacataaaaacaataaaaacaaaattacatgcataaatgaagtgattaaaatataaataaaatataaaataatggtgatctgttctagcagaaaattaggtcattttatatagtcattgtataggttaaacttttagacaaagacttgtatttatcactaacacaaactaggaaagcttaccaaagcaatactcaaaccatgcgtgtacttcaaactatttgaaaaaaataataattgttatataagttgaattgcatgtaaagtgataaaaggcaaaacaaataaaggaacaaaattaatatattattaattataagttcttcaatgagcagaataaatgtgtagtcttcaccaatagtactaaatattagtactttgttttactttaaacataacaagaaaattaaaatacaaatgaaaaataaaataaaaatggctgttagctcttagctggagacaatgttattctaaatatatcattgtattggtaaaactttgggcattggaaaaagacttgtcaatgagcaacacaatcacaagtgtttagtcttatccaatggtactacattctcattttagcaaatatatcttacaattttatgtactatgtatctcttttttttactttatacacaaatgaacaataatatgcatgcaagaattgatttattggtttgtagagaattaaaatatattacaaaataaaatagaaatggtcactgttgatcgaggtttttggcaactaattagataatatatagaaaaagctgtaggaagtttaatgcatgagatttttacgtggttggggcattaaagagccttattccacgagtctttgttatt

SEQ ID NO: 403563 - DNA, 613 bp, Cannabis indica
ctgaggttgcaagaggtatgaatgtaactccccctgtactgagatctggtagcataattcgaaacttagaatcacgtttttctggttctacctcaaaacaaaaagtgaaaattactagtgaagatatacaggaagaagttgagtattggaccccttctattgtgtgttatgtgcttggggccaatcccccaatgtcaattttagatggctatgttagaagggtgtggaaagacagggttgacaaggtaggaacgatctcctatggtgttttcttggtcagatttaagtccattgcagaccgtgatgagattttgtctggtggatacacttttttcaacaatcggccagtgatcatgagggcatgggatccaaacaagaatttcaggaaagaggatattcattctgtaccgatatgggttcaattgcagggattagaattgaaatattggggtgagcatgttttgttccgaattataaggcaaattggtgacccagtgatgcttgattctgttaccaaagcgaaggagaaactgaactatccgagaatccttattgaagtttctttaaatcaacaatttcctgaacagatcgagtttgaagatgaatatggaga

SEQ ID NO: 403564 - DNA, 662 bp, Cannabis indica
aaaaaggtaatgtgaaagaacgaaagtaaaccaatctatattaaatataatgacttaaagatacatgaaatacttatttgttaaaagtgaaaaaatctttgaagtagaaattatgagcacaaaatgcatcaattttcttacccattaattatactacaaaattatcctaaataaatagggacaaaccttaataaatgatacaaaaaatatacaagtacaaaaactgtaaaagacattacaatggtgcaaaatcatgtgtacatgtaaatttcctataattttttttttttgtaaaaaaaatttatcatctttattaattgcaacccatagtgattacatgattaaaatctagactaacatcactactcctgttaacacgatcaacaactaagtagaatgctcgagctaagaaatgagcaacactatttgcagaacgtctaataaaattgacataaacatctcgcaagtcatttaacaacatcttacaatcagaaataatactctcaaagtatgaaaccataggaatagagctacgtaacgcttgcatcacagtaagactatcagtttcaatgacaacctgttgggttttatgccctaaataaaactcatttcaatataatcagatttacttattatatagatcagaaataacatttaatgtt

SEQ ID NO: 403565 - DNA, 618 bp, Cannabis indica
taactgaagttaatctcctatttgtgtggggtttaaagcccaatttggaattggaagtctcatacaggctgaaagctgtagaggcacaaaaagtgcctgcgagaagagagactggtcggccttcccattgctggacgctagctcacctatgttagaaatagggccagccaggggtggtctagtcagacccccttagttaactagttcgttgcctctttttcatgcttaagtatttggactccccatcaagtggtacgttggccatggttacttggccttcttgctgacaagttgtactccacatgtcatcaatcttgtctatgtggacataccccctatgtccctatgtggacgtctgtacagattaggactttccagcttcagttttaagtgttgaagtcttaaccaggcaggttttatataacaacttcagttatgaaatattttctcttttcggctgctcacgttccccaatagggaactgataatattcttcatggttattttgcaggttgcgtagtcgcttgctgcatgttggatgagtagggctcaccagaacctatttaaggctatttggtgaagtacattctcatatcaccctttattctctctctctct

SEQ ID NO: 403566 - DNA, 390 bp, Cannabis indica
caatacaactgactctcatggattagggattatggacatctgaaccacgtaaaaattacttgtctactatttactattttatttatttctaaagctctatttatttatgtttacacatatttttagaaactaaatatttagagccttagaagttaataaaatagtaaataatgaacagatgatttttacgtggtttggactttaactatccctagtccacgacttagttatgttggccttacaagccagtgtttaattaatacaatatatgtgtacaataaaaccctagctttgtattcctaatgtttctcttgaagaagaaagcttatatgtaaagcctgcttagttaatttggaaattagcagtgtttatgattaattatgaaaatta

SEQ ID NO: 403567 - DNA, 516 bp, Cannabis indica
gcggacaacgcgctcgaggagaattcagcatgggaatggtcagaatctcagggtgaaggatgaagagctcaaccgtggaggtgcccaatctataggagaaagaacttatgagatggaaagtcgccgcttgagacgctgtttggaagaggcgcaacatcaaaacgctgagttagaacgagaggcagcctcggccagggcagcgcaggggacgaacgctcaaaattaacctgaacctggagtgagaagaccatgaggcagacctcgtggctcacaaaccaagagataggaaaaggcccgggaataacaacccgaggaagatgagacaccccctgagaatcaggaggaacatcgagaaaggagacaactggaaattgatgaaccagaaatccctcatgaaaatgaggaggatcttggaactcagccgggagaacggagatcacctgctaggaatcaccaacgttcttcccaaacccatagagcgaggactcgtacgtaccctgatggaggaaatacgac

SEQ ID NO: 403568 - DNA, 850 bp, Cannabis indica
gattcataatgatctttgaaactgtaaaactgctagaatcaaaggaggcgtcctttccaagaaaggattttggcaataatgccctccgtaattattaaaaagctcttttactaaaaaagaaatttttaaggagcaattgttatacccgaaatttagctggaggacacatgtcaaggtaaagggaatgtgaatcggtgcaatatctttttatagaataactcattaattgcgtaagtatcagagtatatttgttactcgctagttgtaaggtctttggcgaggaatcaatgtgcgaactggcacttagtgtattaacgagaaaccatatgtcgctaaaggagaatagcgaggcaccggagaaaagtaacacataccttagcttacaataagcaaactaattgtaaaagtttgatcggctcgaagaacaagaatgtgagatgaccatctcgctacgaggaaacttcctatagtttcctccaactaacaggagcgaggctcataaccctggcaagtcagaagaattctgtatactcgcgatcgacgtaagacatatcttgtcgacctcagaaagaagaatggttccagctcaccattgggatcactacaatcaagtttctgtcgagacatctccagattcaacaattaaaggcgtttttaatacacgatattcttgacccagtaaaagcgagaaaatcacagctatataattttcaaaatcatacaccgcatttacattttatgaaatataatcagatctcatgattttagggatgatgactgtaatcatattttggtcagctttgtaattaactgccactatgcaattataaatagtggcaaacaatctcaa

SEQ ID NO: 403569 - DNA, 1442 bp, Cannabis indica
acgcgatttattccattttttcaaatttttgttgatgttcgttgtcttttatctagctttctttagtattgttatttttcatattccaagaaatactaaccatgctagatttataataacagtttagattttttttttaaaaaaaatattaattgtttttttttaaagtaaaatatttaaaaaatattaatatattattttataaattatttatataaatttaaaattaataatttctttttcttataatcttctacgtacgtacggcctcagtcacactattatttttgtgtattgattttgagttaaatatctatctatagatagacaatcgatatatatttcaaactctagtatattggatatttttaatttaaatttaaaattattgggttaattttcagttttcaatacatatctaaattaatgaaatatctagtaattaagtaataaatatttttaatataaaataaataattctatagaaaaaaaaacttattgttattatctttttttttttaaaaaaaaaaaagagtataatatataggtaattaatctgatttttttatttttattttgaatcaacatttaaatataaataatttaataatagaatttttaaaaaaataacaaagtatattccttttttttctctatatatatctaaatttaaatatctattaatttagtaattaatatcttttaataagaaaatagatagttttccatatataaaaaaacgtatagttattatttttcgtttgaaaaaaaaaacatataatatataaaaatcttattttttgaataaatttaaatgcaaaacaatttaatagtagatttttgaaaaaaaaaaaatatcaaagtatagtctttaattttattttctatatatatacacactcatactcatacgtaacacactcaaattattattatttatttttagtttttctaattaaacaacacacacaaattatagccactatgagttcttctatgtataacgttttcttctccattctcataacttttattttcttcacttcatattgccaaggtattactattttcacaattgaagattttgttgatgataattattatgaccatactaaggtacacaaattctctcctaattttctttttctaatatcgtatttggttgtgttatacatgtaattatttattagttattgaactttatgtaggcatttacgaaagcatgggagaaatcgtgttctacacgaggaaccgtagttcttatagttcctcgaaatagaatatgtaacgccccgatttcccgagacgtcacactagctagtccgtttaaaaccatttaagataaagacaataaaagacttctttaatgaaaaataactaagcatgagatctcattatttttaaaacaaaacatttatttattcataaccttaaaatataaa

SEQ ID NO: 403570 - DNA, 800 bp, Cannabis indica
gcaaaaattgggataacaatagccattagaaaaaggcttcaacatcttacaaaaataagttggttgcactagagtaagtaaattaccaggtgtaccacaagccataggtttagattatctcaaacctataatgctaggatcatgaaattttgttaactccattgaatagacttattatcgaaatctcctctcttgtccttgtaatagaaaactttttgttactccatatgaatggttttaaccatagttctattggctttgcttcttagttccttattttgactatccattatttgtttaaactaacaatagatttttatcgcaagtgtctcccaagtcataacagagtgagttcgttgaaaccctcccactacgacaagttaccgtgactttttgtctaagaaccttaggggtaatatcctcattggttgtgttaagacaacagaggcagtgggaccatcttatatacaacaagatgatagaacactttggataaaaaaaaatatctcctctactttactactttttttttcttcagatatagtcactttcttagaaaagtaatatttgttgaaacaaacacttgcttatcttaatgaccataggatggtccactcctaatcactttagactagctatcaaacatgcaaaccttagttaatagttctagcttttcttaagttcacgatcaaggcataaatgaatctagtaatggtgtacaataagtatataatcattctatcattctaaaattttcctatcactagggtatttccttagaaggacttaggcaactacta

SEQ ID NO: 403571 - DNA, 1631 bp, Cannabis indica
ctcgagtactctacaaactggcccaaacgacctaggacgtaacttgctctcttcaaaacgtctaactccttcattggcaggactctcgcggaaacaagtcctcctgcttgaaatgcaatatctctgcgcatcggattagcataactttctgactgctttacgaagcaagcatctaagccttgatcttgtctatagcttcaatggtcctttgaactacttaggacccaaatacttcctttcccctgtttcatcccaatggactagggaacgacacttcctaccatacatcatttcataaggagccattcttatcgtactttgatagctgttgttgtaggaaaattctatcaaaggcaagtatctactccatgaaccctcaaagtccatgacacaggctcgcagcaagtcttctaatatctgaatggttttctctgattgcccatcagtctgaaggtaaaaagttgtactgaacttcaacttcgtacccatagccctctaaagacttatccaaaattttgatgtaaactttggatatctgtctgaaataagggatttaggagcctcatggagatgagctatctccttcacatatagctctgcatactgatccactgtaaaggtagttttcaccgatataaaatgtgttgacttcgtgaaacggtccactatgacccatactgagtcatgcattcccatggttcaaggcaaaccaaccacgaagtccactgtaatattttctcacttcctctcacgaagtgctaaaggttgcaataaccctaccgaccgctggtgttcaactttgatttgctgacaagtcatacatttagacacgtaatctaccacatctttcttcattccacaccaccaaaaataaagtttcaaatttagatacattttgttcgttcctaggtgaaacgaataagctgtagtatgagcttcgtcaagtatttcctttttaagctcaccatatctggaactcaaacccaagctttataagtaacatttcgttattcgagatcgaaaagtccttaggccgaccggccaatacttcatcctgaattttaactagcttccgatcttccaactgtgtctttctaattctttccaacaatcagactgaagttttaggttgtgtaactttcctaccacaaattcaatttcgaccttaaccattttttaggctagctgaggagctatcattatagtattaaaaacgtactcgggaccttttctgctcaaagcatctaccactacattggctttcccaggatgatacaaaatctcgcaatcctaataggctatgaccaataaagtctagtgacgactactctgggaagaatcacatcagtcaaaagggattaaggactgccctcataaaatccctacagcacctagggattagaccatgcattacccatgatatattcattgggaatgtacaattttactgatagttacagaaatgcatgtaccttaattctggggatcaccccacaaaaacactataaataccccccaaagctcattaaagaggggtcgagaattctgggttgcaaaagtgctagaagattaaaaactcaccaagaacattctctgtattaaatactatcataaatacacagactcgtgga

SEQ ID NO: 403572 - DNA, 523 bp, Cannabis indica
tacaaagagataataaggtgtcaggcgcgtggactgcaaaaaacacactagacctcgtagtgtgaggtaactctgcaacttatgaaccactctgcaacttatgaaccaaaaaaacctaattagtatgaaaacggtataactacaacggtaattttgataattttaaaagctacctcatttgtgtaattgagatgtattttagtggtctagatgtaaatttccctaaaactttttataatttcattccttatgcgaaaaaagacaaggataaattagaaattcgtaattttcttctatatatactttgtaatttaggtgacgtttagttagaggtaataaaatagaatataataaaaaagaaacaatcttcattctattcacttatttagttatatattaaagtattggaatgtcattctaatagaataacttttttaatattttggtagaatgattattttatttcaaaatgaaaagaaattctattcatgaaaaaaaaaataataattttttattaattttt

SEQ ID NO: 403573 - DNA, 577 bp, Cannabis indica
acactgtgaagaaattggtacatatttcgtgacaaggttcacacaggttgggagagaacctgctataacacgccacaaaaaattcaaagactttgggaggtatcttcaaatgccagaacttacgccaaaactagaatgtttggccgtaaaccgactggtttttgactctgcagtacggtgataggcgctttgcacagtaaaattccctttgtgatccgctgtccaagaccaacaatcaggtctagaagtgttgctaagtggaatgccaagaattaaatctgcttcttgaggagaaaacaagtcacaaactacatcagcatcccaacagatcatgtttggttgaaatagggaacttacagtgtgagtgcttagaccaagatagagtagaagagacatatttattaccggttgatggtagccaaggagaacccagaattctagtatttctaccatcaccaataacccgagcagccccaagccgaatcaactccttagcaccccagatactacgccacacaaagcttggattatttccaagatcggatgaaataaagtcagaattagggaaatactttgc

SEQ ID NO: 403574 - DNA, 583 bp, Cannabis indica
tgaacattcatcccttgtatcgccctggccgaggctgcctcacgttctaactcagcgtttcgacgttgcgcttcttccaggcggtgacattctgtttcataagttatttctcccatagattgggcacctccacgattgagcttttcatccctcgtcttggcgttctgacccttcccacgctgagttctcctctagcgtgttgtccgcgtactaggacctacgtcgggttgagttctccaggaacgtgtgctccgtgcgctgggaccaccctcgggttgagctctcctggaacgagtggtccttttggactgcgggttggtaggtcttctagagcccatgggctctttcccagaacgatgattggtttccttatgtggggtgctaacattttttggattttcaaccatgaaggaggttgtttttcttcaaaagagggaaggttttttttttcggagctttttcacagaagctctcaatgaaagcaccaaactgttaacgcaaattttcgttaactaaatttgagcctcacgataataattccacacccaaaaaataaaagctatagaaaaattatatatgaaca

SEQ ID NO: 403575 - DNA, 519 bp, Cannabis indica
ctcttatcaagaaatcagtcaaattctctgctcttttgtgttggagatctccccatagcaaagatccggtagctagtcctaatatcaaagccaccgtcttcatatcattagtaacttttctttttgttactacgtctgtcatacgctgaatgtacttcttcaagctctctcctagttgttgtttgacattggtcagggaactagcttccaagtcaaaggccttcactgctacaaattactttttgaacattgcttgtaggtccctttagttgtggatcgatcctatagataaccttttccaccaatcttccgcggacttgctcaaagttagtgaaaaacaaaggcactttgcatcatcactggctttagcaacttgcatcatgcaattgtacttggacaagtggtccctggggtccgtcctgccttcataaaattccatttggggcattctgaagcgctctagcagtggtgcatctataattcttttcacacatggttttgtatcttcttcttctgaat

SEQ ID NO: 403576 - DNA, 712 bp, Cannabis indica
gaatgaacatgagaatttttactaaatatttgcataaaaaaaatactaaactaaaacatagggttcttcaacaattaaaaccataaaaagtttagctcatagctaacttataaactaccattacaatgtaaaattcagccatggattttgaatggtagagttagagaggagaaaaaaaagaaaaaaataacaaacaacaatggaggagaagttttccaaaaggtagatgctgaaatcttgttgtccttctcctcttttctcttcctttttcttctttattctctctttcttgctctgtacgaacagaggttctatggcagaattccttctttcttttttcttcttcctattttctcacaatggaggctgccttcttcaagagaacattttagattttgtaccctttgcccaacataaaccctacacataaaatggatctagtctctccaagtatttgctccagccaccactcctagaatgccacgtcatctccaaaaatgccaccacatttaatgaagtattagcccatcttttgtccaagaaatttacacaacctactactgacatgtttgctacagaaaaaacttcacagaatttcagcaaagttaatgttaacgcagatttttgttaaccaaatttgagcctcacgatgattattcaatacagaaaaaataaagctatagaaaaataaaaaatgaacaccagggttttt

SEQ ID NO: 403577 - DNA, 577 bp, Cannabis indica
tgataaattcaatgtatacaaaacatatgcaaagataacgatctgaaggtaaaaagtccagatcaattacataaattaaagatgaaacccctaaatttcaaaatctctaattttataaacaaaattatcaaatcttcaatcaatttaacaaaaggtagctctaacaccgctagttatgatttataaaacactcaaaaaatatatatatcacagatctaaatatattcctaaaagtgttttaatatagaaaatcctaaattataaatttatcgaacttttgctaaattaaagaagaagatgataaaagatgagggaaaacactaacctgaagccattgttggagattgcaaaaaatgttgtgatcttccaagaataaactatttctctaaaatattttctctgatgggaaatgagagaatatagaaactctaatatttcttggggaacactgcctatttatttgctgagttttgggtatttataatttggtccctcaacaaattagaaattaacttatgctatctacacatttcttccatgacaatttaattcccttttgatacctataacataattg

SEQ ID NO: 403578 - DNA, 551 bp, Cannabis indica
cgtaagcaaaagggcaagatggttgaggcggagccttctaaatggacccggacgggggacactccggcgccaagcaacgactccaggattccttccgaggcggagggatacactatgcctcatgacatagtgttcaccgctgttcctgcggatgaggagaggcagaatctccgagtggccaaacacaattacaccctcgacgaatacagtcgggggcatgctgaggtagaggccttgaagaagattctttgggaggagcagcaaaatactctccacgaggaagccttccggaatccgtgggacttgaatagggatccgttgacggactagttcaaccgcttcgttgggcccaccttggctccttttgcctcggagacgaccagctagttcgtctcccacctgacgcaattcccgcctaaaagatatgctgcttgcgcctctctgaactctatctaccaggtccaagacatcagctctgccatggccgcggtgagtacttcgtaatttattccctcccttgatcttttgtctaaggcatcttatctcactct

SEQ ID NO: 403579 - DNA, 1217 bp, Cannabis indica
ctgctgctatgattataaaaattcctcgttctgaatgcgattgccattgcatgacagacacttttacacccatagaatatgagcactgcaacgcccaatactataatagcattttcattcttgatgagatagatatatttttattattttttaattgaggaatgccgaaaaagaatactatatcataacatcaattagtaattttttctttgaacttttaagtaaaaaaattttcgaacttttgtctagtaaaaaattctaagataaagtttaagggacatgatttagtacaaaaagttcacgacacaaattattacatattaaaattcagtgaaaaattactaactagccattttttttattattattttattaaattaagaaaatttgtttatttaatatagggtaaatatcattttgaactctgtattttacaaaagtttattttgttaaatgacaaaatggactatgtattttttaaaattctacaatagtacaaataggacctttaatttaatttttgacaagttttttttttttcaatataactaacttgaaaatacgaacaagtatagaatatgtaaatagttttgtcataatacttttagatcggattattattaaattatttaacaaaatagagtattcaatcagtaacttttgtaaaatatagggtcgaaaataatatttatccttaatatatatcgaaataatactattatattattttaatgttttttagagatgcttattattagattattttaaaacaaaaaatattaaaaataagatggagaaatgataaaataaaataatatatttcaagtgatgtgaaagtttgaagatattctaaatttaatttgaaatataaattgattgtgaatatttactatacatttatattttgcatatttttaatttgtaggggaatcaccttatacggtgattataattttcttatttgttattttaaaatatattttatttttatgttaaacattaattttttattcccttttaaaatttttgttttcttttctttgccaaaattgatttatcattctccatttcatagctaaagtcaaatcgaagttcttattagggctgaacattttgaacgggtttgacctgaactcgagcaacccgcccgaacccgaactggtgaacctgcaaaatttttttttttaaaaagtttcgggtgggttgggttcaacccg

SEQ ID NO: 403580 - DNA, 500 bp, Cannabis indica
tttttcatccttttttcagtgtaaacttctcctatttatagttacataggagggcagttaattacaaatcagactaatatcttacaacaataatcccttgaatttgtgggatttgagtacgtcccatgtaaaataaatgcggtcattatttgaaaatcacacagctgtgatttgtccgcttttactgggtcagtgcatacatgcattaaatacattgtaaagcatatcattctaggacatctcgctaggagcatagcagaaaaaaccctagtagcgagccagagattttcccatgtttttctgaggttgataatgtaagtctcgtcgtttatgctattgaagacataatgctccatttgacaatcgcagttcttggtgacaaggtgaacttcagcagtcaacatcatttgaatgttagcttctatctgagagagctgactcgacggagctgtggatcttattaaaggatgtctggagctgattagtgaagataccatgag

SEQ ID NO: 403581 - DNA, 643 bp, Cannabis indica
taaaaagcataaaaaccatcaaaacattatgaagaatattgttagagaaaccataaatataattaatatactttaatatatgattttaaaataatttaaaatagataattaatccatatactttaaatattttatttgatcttacttataattacgaaaaaacaaaagtaaaaatactatagatatacaaaaataggctaaaaacaaaaaagtataaactattttaaaaaagtatagtataaaaacaaaagattatataacttaccataaattaataataatactactacataatagaatagactataaaagtaaaaaattaattaataataaaataatactaatgaaccctcaaataaacaataaaatatggaaaaacattataaaagttgaaataatataacatctcatactaaaaaaccttaataaagaatcttgagaatgattaatatacaaaatataaatagcaaaagtttagaaaacagataataaaaccatgttaataaatgctaaataatataagaagggaaattcaaagtaatcaatataataaattattaatactaaaattcttacatttgtactcaaaaatttaaaggtaaataatcgtcatagtcataaaactaattaatagatttagtac

SEQ ID NO: 403582 - DNA, 915 bp, Cannabis indica
tagggtgattctacaatacaccccctcaaaaaggatgttctgatgcacccttgacttgtttcggcatctacaaaaattttttagtcttatttttttttcatattcatgtacgttatagctatttaagataacctacaaaattttgacaaattcagaataattttcaaatatagaaaacaatgttcaaactgtctattttacacgcgtaataaaataaaatagtcacgagtgcaacacactgtttgaatgtatttttttggctatgttaaacttttccaaattttcttaaaattttgcaggatgtcttaaataactataacatacatgatcaatgaaaaaaaaaaattgaactaaaaaattattacgggtgctaaaacagataagggtgtatcaatatttccattttaaggggtgcattgtagaatttccaattaaattaaatacataaatatgaagtaattattctaataaacttaaaaatatttaactcacgcatatgccatgatgaaaccgagtcactgacgctcatacatggctaatccaaaaagggaaatttgaatttctatgcttacattagggaataattttttccttaaacttaaaatagggaatattggtaaaatgggataacattttcttaattcccacaatacccccccccccaaatttcaaacctgattcactctctctctttcgcctctctttctctctttctctctttctctctcgctcggtgccgcacctcagaccactcacccacggcagaccggactacgcacgaccaccgtccgaaccacgcacgacccagccccttctctcggacccagcccctctctctcttcctctctctcaaactgaaaaaaaaaaaataaaaaaaaaaaaaaccagaggtccgatggtaggaccacatggtcc

SEQ ID NO: 403583 - DNA, 508 bp, Cannabis indica
agagagagagagaattaacaaaagtttcagtataatatgcatgaattattcttttcattttatgctggcaaaagttctaataccaacattgatttgccaaccctcttttaccaacacatgcatcacaagtaaattctattttaccagcgcaatatcaacttttgccagcacaagtgacatttcttgtggtgtataaccgggatctcgagtttaaaatatttataactgattcaaaatacaccctgttgtacaaaatacaacctgttgtcccaaacatcgtacgctccaggtctaattgcccctacatgtacaatcttcatctgctcactctcacagctgctcagccttagccttgcccttacctatacatggaaacaataattgttagtcgatagactcagtaagaaaagcataatcataatcataaatataacacagattacaattaggtgcccatacacccaactataaccctatccccgcaccctacgcggtactgagtctagaa

SEQ ID NO: 403584 - DNA, 1208 bp, Cannabis indica
gggacatggcagtagtggctcagtaccgtgttggacacggcagtagcgggactcagtatcgtgttggacacggcagttagggttatgatcaggggtatgggcgtctgatcatgaccgggattatgtatgagtattattatgcttttcttactgagtctgtcgactcacagttctacgtttatgtgtaggtaaaggcaaggctaaagctgatggaccgtgagcgagcttgtgaagattgtacatgtcggggcggttaggcctggagcgtacgatcatcgggacagcgaggctgattttgtaactggtcgctaggcgacatttattttgtgtatcagttaaacagttaaatctttttgtaaatgattttataatcgggatcccgagtcttttgtaatattattttataagtttaattaaaaagcaaaaattttaattaatcacgtttttccataaacctcgttgattagcaacgagctgcacagcatgtttaaaaatcacgtaatacgcctatgttagttagggtgttacaaaggcccttgttttaaaggtcaatacctcagccatcaggagctttggtttggttggacattaaaaaactcatcttgaactcattttttgttgtgtaatttttttaaggccgaacccaacacaacccttgtccttaaatgtacctatttttatctcttaagtgaccaaaaagtgggataaaatgttccgacatattttttatcaaacttttaatttttcacaattataaaagtggaataaaaagtctcatttcttgtagtgcttgatcattgattcaattttgagtgcgttctaactaaattgttgcataccttgttcggtagccgaagttattggataataaagttaaatttccattaaaaaaatatgagactatgtttaggattaattgataattgtaatgaatggtgaatagaattatgtgttgtattctatacaatagtatatatttatatacaatgttaggagactaaatgggaagctactaaatacagataggagactagtaaatacattttaccctaatatttacaactaatattctatcactccccctcaagttggagcatggatgttaatcatgcctagcttgttacaaagataatcaatcctcacgccattcaaagtctttgtaaaaatatctcctaattgttcttcggtcttcacatatcctgtggaga

SEQ ID NO: 403585 - DNA, 814 bp, Cannabis indica
tctataaagcgagctggtcttgacgatccaatagcctcaataagccaatatagactcgcatgtctcggttctatcatctcgttatacgatgtccgtaagtgcgactatacaagaacgcaaacatcttagactcaactaagtgttagggtattctgagtctgggagcttacacaagaatatgaacagccaactcgcacattagaagtctcatacgttgttgtatttagtgaatagaaattgttcttcatttattaatgtttacgtttttagcttaattattgtaaatcaatgtacaaatggattgacaatgaatgcaatccttgtgtaaatgatcggacacttgctttgtatataaaagagtgatccaccgtgaaataggacacctacaaaatctttgcaacagtggactaagcagaccgtgatctgactgaaccactatattcccttgtgttctttgtatttccagttttcattaagtatttgtgttcccagtctgggtactcgccattctaggtcgaatactcgcacttgttaatcatattattatagtaattattattgttattatgtatttttggtgttgtgaaattccttcaacaacaatttggaacacaaaccctggctttaaacaacaacatcgcactgtctggattagtcatctgagcgactttaattcgttctagcagaatagattgcagcgccaagttgtgaagcttgcctacaacaaactcaatgctaaatttgaccatatcctctactaactgaggtgaaatctaaatcatactaactacctgcccaggacccttcctactca

SEQ ID NO: 403586 - DNA, 507 bp, Cannabis indica
aaaaagaaactagttactagttaataatatgttacttctttatacaattttgaatgcaaggaaaagttggtcgatatgcaccagtgttcgagaagtaccagtaaaaagcagagtaataatttcactacgatagttataaaagaaacccaaaaaataacattaacaaagtgttattattgaaaaattagtaatattaaaatgtaatatttcttaatatgtaacataacaataatgtaattaaaaatgttattatatgaatataacataaaagaaatgataacattagaaaatagtgattattaagaaattataacaacataaacatgtaatatatcttcatatataacatgataataatgtaattaaaatctataccattacattttgaaaatgttattaataaatgtaacataatgaaccataacactaaattaatgttaactatttataatatataacaccaaaataatgttataatatgctatttaattacatgagttgtcttaa

SEQ ID NO: 403587 - DNA, 737 bp, Cannabis indica
gaccttttttggttaggttgcttggacttcaacaaaaatgtaatttttttcttttctttttaattttgcttctttctctttatttcaacaaaaatatacgttaatgtctacaagaaaatcataaattgaattaaaatcaaatattttcatttataaaatatattataataatttcacaaaaatattaattgaaactcaattaaatttatcatttaaaataaataaaagtgtatctttaactactaatcataatctgcaactagcttattggtagtccctaacaattcaagcagagaaaataattatcaagttgaataaacaagtcaaatcacaagtattgaaagtgtgatacttttttggagttgaaaaagtaacatttttttaaaaaatgaaatatcaacttcattaaaactagcattcggaatacaagatggcatgaaggtcagccataacattatcctcaagaatgctacgatcagggtagaatcgagaacgtctagccacaaaatgggccactcgatttgctgatcgtttaataaaatgtaaactagtattaggtaaagaagacaataaaattttacaatcattagtagtcaagccaaagacagaagacatttgttgtttactaaagattgcttgaacagtgagtaagctgtcagtttccacctcgatcgtgctccaccttttgccttttagccaactaagggcctccttacccctaaagcctcaacaacctc

SEQ ID NO: 403588 - DNA, 763 bp, Cannabis indica
  modified_base (598)..(598): a, c, t, g, unknown or other
gtttatttataattaatttatagctatcatgaggttgatttctagttacttcttactttttgtgagaaaaacgtatttttgtaattttaaaactttaaaagtatatttttataaataaaaactttagatagtaatattataaataaaagataaaagagtatttttaaaaatttcccaaacttatattatttataaatatttataattgtataggatttaataattatgtttcctttttttctttacattttttgtattatagtatttagggacagtttggcacaactgtactgtgggaaaaatgcagttgtagctgtgtagtgaggaaaagcagctgcagtagaactataaaaaaaaagctaagttgagtgtttggtaaaattataaaatttcaaagaactgtgagttgttaagatctattataatgataatgataatgttataatctagtttattataatcacaaatatgtaaaaaatttattttatataatattttattttttatatatttttaatttttttttgcaaatataaatttatatgcatttgataaaaaataatttatagtattttttatattatattttatcaaaatntaaaaaaaaaaattagaaaactcgagtatataagaaaaaattctaggttgatgttattggttaatattaaaataaaatataaattatttttttaaaaaataataagatttaataattatttatttttattataattagtttattttaaatatttttattttttaa

SEQ ID NO: 403589 - DNA, 699 bp, Cannabis indica
ccaaaggtcgtacgctccaggcccaactgtctcatggctgctcaaccttagccttgcccttacctacacatgcaaaaaatatctgtgactcgacaaactcagtacgaaaagcataaccaataacatagcaataacccggattataatcaggtgcccatacacccaactataactttatccctgtgtccaacacggtactgagtcaagaatgttcgtacgacagtacttctgaccataatatcagcctatacttggtatactagccatactctagtcataccgatgtaatactgtcaagtagtatagtactgtcgactataatatcatcctatactcgatacactagtcgtactctagtcgtaccggtgtgatactgttgagtagttcttaagccaacatacatttatcgatatctaatataatactaaatatattgataccactattataatgtaatctaacaagcttaactaacatgtacatgaaacatgtaagaacatatgcatatcattatactaatcttacctcatttccaagtttaggtgtgtcgaccaacctgagtggaacagctgctcgacgatttacagacccctaaatcacattattcgcaaaacggatgagtgacacgctaaatcactttgtagggacttaaactcgaaactaaaagtttccctatcgatagatacatggcaatatcct

SEQ ID NO: 403590 - DNA, 664 bp, Cannabis indica
tattttaaatcaattattataatgaccacgcgaggcgcagtcacgtaacctaatttatcataaagtaattaatattgaatcactagaacaaagatgacttagcttagctatataatatatttattttatataaaatgtgattatgtaattgaatttttagtttaatggtatttttaattttttttatgttaattttaacaaaatatttgattatttattaattttctattattattatatatatttaaaaaataataattatatagatattttatttaaaaagtattagctgtctagggttaacatatatatgccttattttagtagttttttgtattttttttttctaaaaaatcacgtatcatttaattaagtagaatttacgtggagtatgggttttttaaaccttttatgataaatatggcataattaactatggacactttatatggcttttttcaactttggcaacagtttatgggattttaaagcccatacggctggaactattttgccaaaagcccatattgtgtgttttgtaatttctttaggttattttagtcattttaagtgtttaaattttttggtacagtttttttttttaagaaaaccgtttattgtagaggggtttttgcatgtaatgatggtgatttgatggttgctt

SEQ ID NO: 403591 - DNA, 750 bp, Cannabis indica
ttttaaataaggctagaacttaattaattatatatatatatatatatcatgtattgtaattatatatgtattagtgtgcatgcacgtacgtatgtactaccttatatatacatatttgcattatatatatatgatctatcatatcatttaaatttggtaaatcatgagaagaatttcatcgcacaccaaacaacaaatacagattaaacttttttacaattataatcaactaatctactaaattaaaccacaaatagtctgctttactaattttctcatttttaaagtgagaatttttttatatctactataaaaaatcaagatcctctggtgtctgtgctaaatcaatctaaatttgacggagttaggggctacagggtgtcatgaaccccccaaattttttttattttttttttgaaattatatgtaaaaagataattaaaaaataaaaataaatatttttaaaaatttttatcacatgtattagcaactacatataaaaaaattatataaaaaatgcccaatagcagcttgcgatgcagctaaggaagcatcaagcaaaccagtattacagattcaattagggggtattcatccgatccaatccgcacttttttggtcaaacaacatccaatccgcactaagtgcggatttcatattttgaatccaatccgatccgcataagagtttaaatccaatccaatcccaatccgcaatagtgcggattggatcagttattttagatcggtt

SEQ ID NO: 403592 - DNA, 582 bp, Cannabis indica
taactccaagaccacttgaatccgtagcttaattccaaaaaattggggagaaaaagctagcctttcccctgattttgtctcaaccgaaagagagaggaagagagtttccaagagaaaagtctttctttctaattttccttctttccttaattttcctcaaataaactaaagcttaggaaattaatccttgcaaaaataaaagaggccacatgtcaccaccctaggcagccaccaatccaccatttaaaatgtccaaaatgccctttaggttaaaacttaaatatttcaaaagctaggggtaaaatggtcaaactccataaccccgcttaatcccgatatttattttctatacaatatttcccactaagaaataaggttctaaacttacccatgtgatcaaactagctatccatctcattttctgttgtcgccgagcaaaattacaaaaattgcataattcacatataggacaaataattataactctcgagaattgagaaattataactctaatactcaataataataatggggtccacaaataataaaattcataaataattataaaaataacagatatta

SEQ ID NO: 403593 - DNA, 596 bp, Cannabis indica
tcagtcactttctctcttccttaagtttctccttgaaaccctaacagagagtttctctctgagaaactcgaaccctaacccaaagcaaacccagaaatcaaagcctaaacacaacacacagatcagatctacaatgatctgatctgtacacaaccacacacacaaaaaaaaaaattagggttaaaaaacaccaggattttgccgaagttcaccaataaattggctacgtctccgtttgagctgctcctcaaagatgagagctcgatttccactaaatcttgctgttcagaagtacatcaatggagattccaagtcacaggtaaatttctgactggtaatctcttttattttacaagtttaagtgtttaatccctctccctaacaatttctaactctctgtttgtttttcttgtacatgcgaggttatttccttcttctccttcaagctcagaactcctggatcttgaagtgaactctcaaccttctagatctaagcttgagtgcaggtatatatagatctagggtttctggttttatttctgcatgtgatagttagttagttacagaaattagttaggtgtggatttaaccaaatc

SEQ ID NO: 403594 - DNA, 690 bp, Cannabis indica
gttttatattcaatatcatctttatgtattgaatataattaatgagattattaatgaatgattattgaataatcatatttcgattctagtgttcaaaattagaaagtcttaactttctcattaatttctttctcatcgtgatttgatttttcaaattacaaagtaatcactaatttaaattagttagatattcaaatcaaactaggtatatcatgaatttcaacaaatcttatttattgatatctttataattcattggatttaggactattttaaagaatattaattgtcttggtaaagaacaatcttaaatttttaattatgacaataatcatttccaagtctaatagtgagtagtatactctcactaaaataattaataagacctaatttttactttaaaagaaaatcttattctattcttattattgatggtcatgactattaaactttttaattttgacattcaaaataaattattttaactgtcattttgattgagattttaatgaattgaattagattcacttaatttttctcacttgtatgttctcaacgcataatcttttgtgtcataatttcaaattgaactcttttaattcaaattatttaaatgactcatgtttctttacatatctttacatagaatttatggttcaattatttatggattgtgaaggttatgaagtg

SEQ ID NO: 403595 - DNA, 714 bp, Cannabis indica
ccctttctcatcacctttcttctgaatttccttagagttcagggctgcctttacctcagtcattgtcaatgtctcttttccatacaagattgtatcaacaaagtgttcatacatcttggggagtgagcttaacaggattattgcttgatcttcatcctcaattttcactccaaggttgtttagatccaaaatgatcttgttgtagtcatcaaggtgcttccttagttctttagtttcatccattctcagggtatacagtttcttcttgaggtagagtttgtttgccaaggatttcttcatatagattgaagacaacatgttccagaggcctagggccttttcttcatcagcaacttctctcagaacctcatctccaagactgagcaagatagcactgtgtgcttttgtttcaatttccagcctttttctcttgtcatcgatcaggtccaatgcatcaggatccaatgcctcatagatcccttgatgcaccagaaaagctctcatcttaattctccacaagctgaaatcattggagccagtgaatttgtccacctcaaaccttgcagaagtcatttcagatcagattcttgaagcttgaatctgattcttgatgacttgaatttggttcttgaaagtttgaagatgaatcttgatcacttgattgctgttcttgatcttcaaagacagccttgctctgataccatttgtggtgaa

SEQ ID NO: 403596 - DNA, 555 bp, Cannabis indica
agggtttcaggcttgaggtcactcaagtaaccggaggacaaattgtgtactctacttctgtattttcatttaattaattatgacatctactgtccctacctctgtctctatcttttcaatttattttatttatttatttatttttgaaagagagacttttctatttttgatcataccctttttatttttctctgtttaaattcagtttgtttgttactcgccctgtaaaaataacattgaaatagttaaatgggcacgaaatcaaataagaaatagttcagttgtgatcgtcccccgacggacacagtagtacagtagtactggtggtggacatatatatattctcatattttaaatttgggttattattcagccaaattactaaatatttgaggaatgtaatgcctaaatagctaaacaataatcattaccaaaaaaacataacttaaaaaattagtgtaaaaatatctaaatttagttagttacaatatttaaatatttaatataggctaattaagattttttcccactaaactttgatatatatcaaattat

SEQ ID NO: 403597 - DNA, 513 bp, Cannabis indica
attctcacgttagattgtaatctatttcagattatgatctgcatgggaaaaaaatcttctgtccccaattacctgtcacactcatgtcccttcaataaatagctgccatgtgtctttctcttttcctaattaaccgattcaatttcaagattaactctgttagttccatctattcttctcctcataactaattatttcctaattaatgagtatattcaaaaaaatacatattctatgacatttaatagatatctaacatgtgtctttctatttatttatttaattgattcaattttttaaattaactttgttagtttatttatttatttgaaatggtctgttagtttattctctggtccctcctctctcctcataaccatttttttaaggggagtttttaatattgtacttaaaattgattttatttataaaaatacctttaacaaaattatttgcacaaataccaatatgccacctcagctcaaataccgaaatttaaaataattaccgaaa

SEQ ID NO: 403598 - DNA, 570 bp, Cannabis indica
taattagatttgaaaaaattattatatctaaaaattcaatctaatctaatttaaataattgaatcgttttttaattagatatctaattatatacctaatttaatattaacttaaaaatgtaaagaaaaatagataaaaactaaataacacattttatttaaatttaatactctataattataccatcgttacaaatgtaatgcaactaattcaaaagttaaaaataattaaaataacaaaattgctaagtaataaaatagaacaaaaaatcataaaaataaatacactaaacaataatatgttacaaatttaacacacacaaaaatccatttaaaatataattaatatatattatattttaatatttttgatatataaataaatataaataattttttaacatatatatgtgtgattggattagatcggcttttaattgaattttgagattgatattcaataatcgattcaatctaactagaattcaattttagtatccaatccaatacaattgtaattaaatatctaattttttgtaattagattgaattggttggattcgattcaatc

SEQ ID NO: 403599 - DNA, 356 bp, Cannabis indica
atttatctaaaaaccacgagactcaagcacaagttaaaagccttcaataggcactcgattgggaacattggagatgcttatgagaaggccaaggataattataaagaggctcagttccaatgtcaatctaacccgaacaacaatcatttccttgagttggagtgtgcggctactaaccattttcacatttaggaaaaaatgtacttaaactttctccaccaaagaagcaaggttaattggattcaaaaaggagattgtaacacagcttattttcatgccatgttgaagaagtggaaggaagaaaatgttggaaatattttactagaatctagatttactaccaagtatgttttatt

SEQ ID NO: 403600 - DNA, 698 bp, Cannabis indica
agttttttttagttttagtagagatgaaagaagtggaaatatggttttcaacattatatacatttattgtaatatgcttatagttgggccagtgtatttcatcaggattcaattttatattggtttttggtgtatggtacataattttgtatatattgtgtgtcctacataatcacgataaacaaatctgtttgatgtacctgaacatggtcaattgtccttaaaatctttcataactcagagttcacgggtttaggaaccatggatctgtggaggtggttagcaatgttgggaagactaatcatatgagttggttgtagacctgctacctataacttgtaatcctttttttttttttttttttcggatttcaagtgtttatactttatatattacattgcataacttggcactcgaattcaggacttccaatacacatgcagtctcctatagccacttgagctaccctcaagtggttaatccttattagctttaatatgattgtagaaatgctagggagactaatcatatgatattctgtcaatgtatttttggatgaaaatggattttttgaaaattggttatttaattaaaattgtatgtattgtgtgaaaatagaacgtacgttgtacgaccaatacgaatacttggtcgagttccacttttcgccactacactaagcaaaataatgctcatgt

SEQ ID NO: 403601 - DNA, 684 bp, Cannabis indica
ttgccatatcagcttatcttagttcatgagatacaccagattatttctttattattattttgcctttgagcatcaacattttgcaacctttcaccactatttcctttgagatttacttttctctaattcatcaacaacagcagagaccgcgacaatcgttgcaattgaagcactacttcactagaaacttaagagcctctttcgctatgaagagtggacctccgttactcctgtgagtgaaaagcatcgcatcaataatactaaaggtgagcaatccgcttaactacgaaactcgcattatcagtactgcaccacacggaacttcaatatcagaggacaccgtatatataatatgatttattactattttgtattgatgatgattaaaatcgccatcttttgatctttaatttgtagataaattgtgaatagctaatgttttttattttatacccttaaatacttaatgtttatttttgatggtaaaaatacttaatgttacaatttcttacactgttactaccacttccgttattaatttataaatatggacacgtagaggatccaaatgcattacatttatttattttattttaaaatttaatattcttaatatcaaaatctaaatattacttggtttttttcttaaaaaaaaaataagagagatgcaatactaaattacca

SEQ ID NO: 403602 - DNA, 627 bp, Cannabis indica
ttttttttttccaaaagagaagaatatgaaatttatattatttttattctaaaatgatttttttctttttgtaaatattttaaataattatattgggtggattcaatataaatgtgtatacaaaaatagatacataaacaccttatgttgttatttaattgaaataaattgacgtcactttaaatttatttacaatttattagttcagaggatgttattattaaatttaagcttaagagattaagcgcaaataaattaatagttgagaggatttagatgttaaaaattcaagaaatttttacatcaaaaatccaatttacttaatttactacaaaaaaaaaacccctacacgcttacatcatcatttttacctttcctctttcttttattacaattataccacttacacatcaattccatccatgcagtcacgtcattgattgatgacttatatcaatcacaccttacatcattcacttatctttttctcttctttcctttttttttttttattattttcaaattcttttcaatattttttaataaaacctccatagctaaactcttctcctccccctttcgccaaacgaaaagctctaaaactggggttgaaatctgtagctaata

SEQ ID NO: 403603 - DNA, 571 bp, Cannabis indica
tttttttacttagttttgacaatgttatatatttgtaatattacattatttttttttcatggaatttttattgttacaattttatttttttaattttttttttctttttcttttttgagttagtgatagttaaaaaacaactataatctgaaaaataactaaaaaataatatgaaaataacaaaacaaatacacatatatacaacaaaaatattatctggaataaactgaaaatatacacgataaaaaatgcacataaactaaacatgtgcaaaaaaaatacataaaaacaactataaaaaaattattgaacacttaaacaacaacataaaaacaactataaaataataaaaagacaactataaatcagcagaaaaacaacaagacattaatcttgttataaaatatgcaaatcattcataaattaatttttgaataaactacaaaacatccaaaaaaatatactatttttaataatcatgtaaaagatagaaaaatataagagaaggcccctaaatttttttgtttagaaagaaaaagagtattaaaaaaatgagatataaaaatgtata

SEQ ID NO: 403604 - DNA, 1061 bp, Cannabis indica
tcaccccgctctacagactcaccctgtgatctagttggttcttagggttccttctttcaaataatcctgaaaatcaacaatcctagtgagtcaggcaccgattccacacttacacacgtcatgccaaaaccctaattaacacacacaattctctttgccaaatatatcaattattatttacatttaataatcatgcttttcattatatatatatatatcttctagatgctcatatgctgcctattactaaaagtagtaaacatttattcacataagcagataagtatttactctcaacacttactgtaccatgagtcgagcttatttttgacgatgattgtacatgttccgccagtcttcaagaattttaaaaaccttggtactctgatacaaaattgtaaacgtcctactcagaggaatgccacgtgtcgtgattacaagctactaatatcattaatcggggtctataagccaggtgatttaaaacaaatataaaacttggttaaataaataaattgcaataaacatcgacattttagtataaaccaaaataatttaaagtgacatattcgggatcccgtaaaaatttatttttcaaatattacaagttatttattacatgccgacctaagcgacaaaatagaatttctatactattcatgttggacccaaccctcgtggtctagcttagctggaacatgtacaagtcatcctcaaagtcctcgatctcatggttgacccgacactactttacccttgcctgcacagtagagcacccgtgagcctaggcctagcaagacagaaaaaaaagacaatatgataattataataataattatacttcatacattacgccactgcgtatatatactgagccatcacactttatattaaattattatatataataatgtcattataataaatgcctatgtcatacagacctacgtgttacgctcacacgtctttttacatttaaggccttacaagaagtttgtctcggttataatcaccaagtctaacctagttatgtctgttggaatttattttaaccaggatct

SEQ ID NO: 403605 - DNA, 855 bp, Cannabis indica
ctatttttgtttttttactaggtattattcatttttatattatttattattatatatttttattttaatttaagttttcttaaaaggaaataaataaaatagtttaatttatttttaaatcaaacgtaatattattttcaacataattcaatcttgttcagtccaatccaatctaatccaatcattttcaatccaatcctaaatcccaaacggaccctaaagttcaactcaaacacaaccaaatactaaccaagaagagccacattttttgcattgatccccatacttttaagttttttttttttttttaaaaaaaaaaaaactagagagagaattcagatattaggtaggtgggtaggttaaagactttcatctctaatagtaagtcatcactaagaaaaatccctctaacaaaataataaaatgtgaaagagatatacttcttaaattagataatccaaatttccaataactatagctacacatgaattagttgtacatgtttttcgaattcgtattagggtgttgaactctattttagtattcaatgattattcaatgctttcaaaaaagagtgccaagaatctaagtaaataaaaatcattactaatgaggctctagtagccaaattttattatgtatgtagtttgctcttacaaagtatgaggttcgagttgctgttactaaacacgaaccaagtttcgagagaaaaaaaaaattataaaatacaatgtttaatgattatgattatgagcatgaaggagaaaccaatccttttacagtcaatccaacattatggcaagaagcttcaacaacaccatctccttctcttaccaaattcacatttctcattga

SEQ ID NO: 403606 - DNA, 571 bp, Cannabis indica
agaaagcaaacttttataaaaatcagcaaacctgaaccaacacacagcagtcttacaacacagaatacacaatcgccaagttaaaaaactacaaaaactcaaggacgcaacccaggcagccagcttatgagctgcatcattgttcacacgagaaattcaacaaacattacaagaactactattattaaaaagatcaaagagttgcagaaaaataggaaaaaacctccaagacgggacctgcctcgccagaatcgcatccaccgccattttacaatctgaaaaaatcacagcctcgaaccagccacaagataaacatctcgataatgcattgagaatggtccaagactcagcgtcaagaggcgaaacaacagcctccttaccagcaaaggcccccaaaaccttacccaaacagtcaagaataaggacagcgtagaagccaaaattgtctctcacagcagcatccacgaatatattcacccgattgcctgaaccgagatcaaccgaaaacaaggagttgcacggcaccagatgctggccttaagttgaaatgagctataggcaaaaaaaaatt

SEQ ID NO: 403607 - DNA, 661 bp, Cannabis indica
cgcgtgacatatagaggcactagaacttttacaaaaatcaagtctcggtttgtggagtacaatttgaataacacggtgaaagaaagccatttcggcaacttttggaatgtcgtatccctgacattctcctcggtgttatttcaccaactcatgttccacaagatgaaggttgatgttcaggaggagttgaaaatgcagttttacattggtcggaaggagcttagattcggagtggttgagtttgccctcattacaggcctggacttctcctcggggcctacagaagtagagaaggctgcgcaagttgctcgctcagggtcagaccgattgatcaacaaatatttcaaccggtctgatagtgtgaagatagaagcactccatgataggttcacaaactgtcagaacccagaagacttgtacaagcttggcttgtgcttgtttgttgaggcagtgcttctgggtcgcgaggctaacacattgattacgcctgacatacttagatatgtcgaagatctcgagttcttcttccggagtccttgggggaagcactcactcgccagacttatgcactctcttcaaaaggacatgttgaaacagaaggccaactacgagaagaagctaagtttggatgttcagcatgagtgcaaatacacagcttatg

SEQ ID NO: 403608 - DNA, 661 bp, Cannabis indica
acacaattaatgagttattccataaaaagcggttgcatcgatctaaattccttttatcttgacacgtgtctctcactgagatggtagccaaattttgggtataacatggtggtattttgtatgaaagttttattctaatttaatcaattaaaaaagtttttaattaaaccacacttttttctaaactagtaggttagtcagaaataagtttgtaaaagcacacacgtggcgtccttgagggtcagggtattacaataagtctttgtgatggaaaaacttaatgtttttgtcaccaacctttaaccatgaaaacctagtttttcctaatgccaataattattatagaaaaacaataaaatttaactatcatagtctgcggcaacagaatgtaattctgtcactataaaacataattttgcaaaaacaaactggaactagaaaatatattcagcagaacttaaaatactagtagaaaataaaatcacttgacacaagagaattgtatgtggtattagtgttctttcgaacactcctagtctacgaggccacgccctcagaaagaaatcgattagtaaagtctcaaaaattacaaagacaattgacttatacaagtttagactccctctaaatctttgccccaatcctttgtaacacacttcac

SEQ ID NO: 403609 - DNA, 695 bp, Cannabis indica
gtgtcattatcaatgtatagtttgtgtgtcgatccgatacgaaaggtcttagcatgtgagctaacacactaagtaatgtatatctattctatataaaattaataaacatagtgtgcttggcggctgatatatcaaatattttaaattatacataaaagataaattttgtattataatttatactaattgtacttaataaaattatattaaaattttaactttactatttaaaaatctgtgacataaatacttaaaatattaaatttattgctaataaataccggaatttagaaaataataacataaatcctcatttatagtttaatttttattctgatgtgtgtattaagttttaagtttgaattttattgtgtgtgtttttaatgtttcagttttagtattttactgaggttctaatgtttgagcttgtgtttatgaaatctgtttttatttatttttatagattttgagaacttgaaatttgatgttgtttctattgattattgggattgaaagtttgatttttacgggaattaaagttggtcttttcttttcattgattgaaaaatattagtagaaagtttatggaatgaaaattttgaatatataaaaataaaattaaaaaataacatttgaatcgagaatcaaagtttattgttaatgtccttacaaaaaaaagtttaattgttaatatg

SEQ ID NO: 403610 - DNA, 1040 bp, Cannabis indica
ggtaattgtttccttgttattatataattaatcccaaactgtaacttgcgatattgtacatgaccacgcaagattatttgcagccacatatcaaaagctcaaattaaaaagcttactttttattgttctaaattaaagggcttacttcctttattgattagcttataagtaaactgttcttagaaggaactaataattaattaaataaatatattggtacaaatacaatgttcttgcttagccaagccatatagaaaagaaagtttttatataatttacagtaaaaaaaaaaaaaaaagtagcagtcaaaagttaattaaaactttataaaagttaataaaaagcagtgtattgatgatatatagtactaaattttaggttctactttccatttgcagaaagtttgggatccttgtagatgtggacataaaacagatgtttcaacaaccaaccaatcaaattgtagattctaccaggcgtttttaccaataatagatcctaattccagtcaatttaataaataaattaataaaattgaaaaatatgcaagaccaattttgatgctttacttaaagcccaagcttaccttataaagtgcggtaagttgaaaaatacttcttttattaataaattaattaaagctctgttcggcaaccattttgttttttgttttcttaaattccacttaacaaaatcttgttatttattcatagtttttgattaattaatcaaaaaattgattttttaattcttaccgaacaatacctaaatttatttttaatttttatttaattgaaacataccactttttatatgtattgtgcccaaaatatcctgacataagggagtcacatagagagtatcttgaaatgacaaggtcaaaattggtacaatatttaaaaataaaagaggacaatattaatatttttatagtaatttaattaagtttttattttttagaaattttaaatttagatttctttttaatgttttatatagttttttttttaaaaaaaaaaatcatatttttagtttgattg

SEQ ID NO: 403611 - DNA, 962 bp, Cannabis indica
ggaccctaaccgagacagaaacctggatctaaacctcgcccaatacccaaatcaagacctgaacccagactcggacccaaactcgaccggaacccgtatcccgtgacttgaaactggaaacgaaaacagaaacggattgggacctaggaacaggaccaggaccaggacctctacccagaccgaaaactgtcaccgaaccaggacgcggattcagacacacacccaccctgggattgggtcccaaacttgaatccaaacccgaatcgagactttggacccaaaccacacctgaactcagaccccaacatggaacaggactcgggacacagaatagagatcgagaccaagaactgcaccctagtctcagtcccgaaccaagaccgagacctagactaagacctaggacatgaaccaaaaccagactaggacctgttattgggatctagatcttgtcccaagattctggaactagggcttggaaaagacccatagtctgagtctttatttcggactcggacaaggacccgaagctggacccaaacctagacatgggacccgaaactgaaacttgaaccagaacgtgaccaggaccctggaacaggaccgagaccgtgacgagtacctcgacctagacctggaccgacacccaaacgtagtccagaacctagtcccggacccagactaggactgagactcgaacccaaacccaaacccgaactcgggactcgatcccggacccacaccaagcccttgaccgagactgggattcggacctggacattgacacgaacccagacgcggaactgaataccgacccagacccagaccgagttcaaaacacggcacctggacacggacccagacgcagacgcaaacctagaattagacccaaacctagacccaaactcgaacccagatcgggatcaaaacccaagacttagaccaggaactaaacctggact

SEQ ID NO: 403612 - DNA, 546 bp, Cannabis indica
tttttatttgtctcagtggttgtatggttgttgtcgttggtctccttgtattggtgtctcttttttaggagagtaaaaatattgactcaccttcccaattattgatccatatctccacaattttgaaatgtcaaattgatttactaaaaaagcaagtgaggttaaaatagatgtgtgtgggcgcaatagttcataataaatgttcatagttttcgcggtgaggatgagctcttatatatttgagaagtgttatttacatctaaaattacatatccaaagattttttttctcaatttctttttcatagtagtattaataataatattatttttatatattttaaaaaaattctaaataatttatattcttgaaaatagaatttttgatattttaatttatcacacatatttaaaaaaaattaaacttacttttgtaaagtatttaaaatttttaaaatattaccaaaaataatattgcaagtataacgaataccaacataaattttttttcaaaaatattctatcacgtgtttttgaaggcaaaaat

SEQ ID NO: 403613 - DNA, 680 bp, Cannabis indica
ttttcatagtataactaattgtataatgtttaaaatattatttggttacttttgttttttaaaaaatatattaaaataactttattaatagacttgttctatatatattatttagtaactcataaattcggttattacttatttaacatacatctagagtactttttttaaacaacttttcaagttaattgtaagtatatttaaaaaattaataattataattacatataaaagtttcagatactatttagtaccctttggggaacttattgaaattgctctataacacaagctgaagaagaatccaatcggttaacttttaataactcgtaatttgtaaaattggttaattggttagtttattaaatttcaataaaatttaaactttgaccattttttagtttttttcattgaaatatatggttaattatttagaaaaaactaaaaaaataaatatatttttttcaatcatctttattggtgaaggagaaaaaatataggcttcttacatttcaaaatgaccatcttaaagagtaaattacaattgtgtaatttttgagcctaaataattagggaaatttgattttctatacttaaaaaactaaaatattttattcttaaaccaatacattttaaactaacaaaaatatgacacttttttcaaaaccctaaaaatactc

SEQ ID NO: 403614 - DNA, 587 bp, Cannabis indica
cgcaaccagggagaaagcagccacatccctcgaagctacgggaagtagttctcaacaatgaagactcgcccaaaacggggtcgaagacattgatccccgttttggggataatgatacaggggttggtccaattgaagaattagaagaaatgccattagaccccaaacaaccatccaaattaatcaagatcgggaaaaaccttcctgaggacataagatctgctttgatccagttcttaagggaaaaccaagatgtctttgcttggtcacacgaagacatggagggaataagccccaccgtgataagtcatgctttaaacatcgacgtcgaaaacttcaagccagttcaacaaaaaagaaggctactcgacaaagaaagggccaaggcattgaaggaagaggtggaaaaactatggaacaacaatttcatcaaagaggcctactacccagtttgggtatcgaaccctgtactagttccaaagccaaatggcacctggagggtgtgcattgactttacagacttaaacaaggcatgcccaaaagattgtttcccttaccgagaatcgatcagttggtagacgcaacagc

SEQ ID NO: 403615 - DNA, 354 bp, Cannabis indica
tggataataatttgacatttaaaggtcaaatacctataaagttcaaaaaaaatataactaggtattattactgtcaaaaattaaatttaaatatttatttacaactgagagttaaacttaactatttatgccacaaattactctatcatgtattaagagcattgaaaatcgtttttatttgcataaatttaaatggttttatggtgttttttttttttttttgaaatcaggttttatgattgtttaaaaataaaaaataaaaatcttaaaaaaaaaataataataataaaatggcatttacgggattatataataggaatgtaaaaaagtgagatgttatgaaatattatttat

SEQ ID NO: 403616 - DNA, 536 bp, Cannabis indica
gtggaagaatttgttgttaattacttgcaggagtacaaggatgtacaacattctcaaaaacatgacactcagccatcagaagtttcaagcatcactcagtcctctcatcagcattggcttctttccttgtcaactgatactcctgctctgtttgtagatgcagccctcgaccatcatgcaggcctaactggtgctggttttgtttttaaaaggggatatcagactgtgttggcttctcaattccggaggctgcctggtgttgtctcgcccatcttctcagaaggccaagctcttttacacagtctcaagtggtgcatcgattcccagtttactcctcaagctattttctcggattgtctaaacttagtctcaaaagtaaatggagattgacaggacaattctgctctttctggtttagtttcctgcattcgattgctcttctcgaacttccctggtgcttctttgcagttccttccacggcagtttaatgtggaagcccataattgtgctcgtgaagctctcaggtctagagaagt

SEQ ID NO: 403617 - DNA, 587 bp, Cannabis indica
caagcgtcgaaaggtttaatagcattgggtttgcggaagtcgtgttgaatttttttatggaacgagcttcgacttccaagcaggaaggctaaattcgtgtaaaaaattaaagcttagacttcacttgaaaagatctagaggaaagcatcacagagggtaagatagacttcaagtagtccttccaatttgggaaggagggttgaagatgtatggtacccttagtgatctttctcgcaatgaaaagcaacgtgcatacgagagtcatgttgaattttttattgacaagcttcggcttctgggaaggaagactaaagtggtataaaaattcaagcttagactttgcttgaaaagattaaggggaaagcatcatagagggtaagatagacttcaagcagtccttccaatccgggaaggagggttgaagacgtatcgtatccccagtgatctttcttgcacgaaaagcaacgtgcatgcaagactcatgttgaatttttatgtaacaagcttcgacttccgagaaggaaggctgaagttgtataaaattcaagcttagacttcgcttgaaaagatcaacgggaaagcatcac

SEQ ID NO: 403618 - DNA, 1270 bp, Cannabis indica
ctctctctctctctccttcgaaagccctagactagctagggttctgtttgttcttcagcaattcaagcaatttttagcaaaagttttgtgatcttaagctctagctaagttcttggcttcaccctttgtagtttcttgaattttaacaaaatggattatgcatgttttgtgattttagctactgtagttgctgttggtgtttgttttttgtttctgatgttaaattatgggtaaatatgttgatttgagctagttttggtggctgttaataggttggagcaagctttgagttttagaactcaagcttggctctttaatggtgatttttcattttgagcttgattagttgttttattgcttggaatatgtatattggggtataatatcaaggtttggaaggtctggtaaggattggaatcgatttggttaggttttggaatattttgggtaatctggtgtaaaccggctaaccggttttacaggacctgtaaaactagttactcggatttgctgctgggttccccgaaaaattcatgttgtcgaatggtgttagtttcagagctttggttggctaattccctgctagtgtagggtattgccatgttaagttacattagatatgtttttcgtttaaaacctaagtccctggctgtgatttagcgtgtcacttatccgtgttgtgatcggtgtgatttaggagcctgtaattcgtcgagtagttgttgcactcaggttggccggcacacatgaatttggaatcaaggcaagattagtataatgccatgcatatgttattacatgtttagcatacatattgtttatgcctgttagaatacattgatagcagtaatagtatacttaaagttgtactgattactgagaaatgtatgttggctgaaatacagattgatgttgtcacattaatatggctaaagtatgacaagcatatttagtataggatgacattatggtcgatagtattgtcgtatgaacgttcgagacttagtactgtgtgggacacggggatagggttatgattgggtgtatgggcatctgattataacccgagatattattatgttttatgttaggcttttcttacagagtttgtcgactcacattgctatttccatgtgtaggtaagggcaatgctaagactgagcaacgtgaggacaagcagatgaagattgtacatgacagggcggttcgacattgagcgtacgatctttgggacattagggctttttctgtatagtcgctaggcgacaaa

SEQ ID NO: 403619 - DNA, 580 bp, Cannabis indica
ctcaaatctttgtgctcatttgaaggtaggttacggatacaagttcatgaatggaagcttgaggatcaccaaaggttctttgataataaataaaagtgagaagatcaatggtttgtatgtttttcaaagaggaactatttcaaccggagaagctagtttggtaaaaggtcaagaatcagatatgcaactgtagcatcacagacttgggggcatacaaagaactgcacaaacaaggtctaattgaaaatttaaattctcgtgccttaccattttgtgaagcttttattttagataaacaacataagttgaaattcacaccaacaagacatacaacaaagaagatactcaaacatgtgcatgctgatctttgggggcatacaaagtgcctactcactctcgtaagtaatattttcttttatagttgatgattatagtaggtgtgtttggacttattttctagcaactaataatgaatgcctagaacaatttaaaacttggaaaacttagaaggaaaaccaaatggaacataaagttaagaaccttagaatgaataatgggttggagtttgttaactctaaat

SEQ ID NO: 403620 - DNA, 1229 bp, Cannabis indica
tatatatatttttacagaaaatcacatagcaatcaacagaacaacctaaatcacaatccaaattcacataagaactattaaaataatacaaaccgtaaaaatgaaaaagaaaaaaaaaagttaaaaaatagtatatgaggtgattcccctactatttattcatgggataataatcattaagagtacactatatatatttgaataattggcatttttaacccgtgaacttttgacactacctgatcttgccccctaaaatatatgcttgttaaaaattcttctcaaaatataacagttacataattatgctctttctgttaggttctatttattttaccgttagaatttagcattcttacctcttgaactttgaccaatacaaaatttcccccttttgttaaaaaaatttaatttaaaattataatgttctattaattctgaaaaaattaataaattgtaaaaaaaacttattaaaatattaagtttactaaaaaaaaattaaattattcctaaaaagatattttcattaaactttatattatttataaacacgtatcttaaaaaatcaaactaaattattaaaaaactaataaataattttatctacactatatttttgacaaaaatcaaactaaaaaatagttatgtttacttaataaatctagattttggagaaaattaaaagcaaactcaagcttatccccgtaaaattagtttttacaaaatatatctaaatatattttttaataaaaaataaatgatttctaaatctcttaattagtttaaaattttaatttctttttcaattttcttaatcattcaaaatgattttcttttttaagatctaaagtaattttttaagatttactaaaaaatattaaatctttctcatttttattttgaggggatacgatttgataattgctaaagtttagggggcaaagttgctaattaacaaagatacatcagtatttaaacgaaataatcggacggaacctaacagaaggactaaatttctgtaaatataaaagttcagaggggaattcttactaagatgtataatttatagggcagaattattattatcgaaagttcaaggggcaaaattactagttattttatttaatattaataattcaattctcactaatttaaataagttaaatagaccttattataactatgtctataatgcatagttacatcaataaagtgggtaaaaaatgaat

SEQ ID NO: 403621 - DNA, 647 bp, Cannabis indica
agactaacaatgactccttaacataagcatacgataattgatgattgttattggacaataatagtgctaaacattttttatagatgacgcctcacaattggtttagagatattctttaaaagttattttttaaagttatatgagactcgctacttaatcaaaagcagtatgacactaatgaaagtgctaggtataccagtggtatcttttagcaattctcatgataacttacaaagaaatgctaatggtgtctagcattcttatgagatgtaatattgatattagtataatttaatattagatttcatacattttattttattgaagattatagagaatcgctaacaaattttaaaataatatattatagaggtgttagacatcttagtgtcccgtaacaatatttgaattgttaggaaagtataaatccatgaaaagaaatataattaaccaataaaattacaacttataatgcaaaaagttataaggagaaaaaaaaattaaataaaacgagataagaacgcaaaatagaaataaaagaaagattagaaagagataaaagacaatacaactcaaaaacacaaaattacaaggtaaaaaataaaagtaaaagcaacaatagtctaaataatatatgatatataata

SEQ ID NO: 403622 - DNA, 536 bp, Cannabis indica
aataataataattattattattattattattattattattattattattattattataggaatgggtcagccaaaaaggaagagaaaattaaggagatattttctccacctccaccactttcacgattaagtggattttatcaacaaaaaaataaaaataaaaaaattggctataaagagagagggtggagaacggttaaaagaaaaaagaaaagggtttttgaaaaaaatatcttgggcaattgatacgtaagagtgaaacagagaaaagagatctcagagaagagagaagagaaaaaaaactacattattccaagtgatttttcaagctttacaagggtaagcaaagatccataaatggatctacctctctttcttctttctctttatttttgtttactgcaaagagtcactccaatctcctttgattcactaaacttcagaaaataagttgatgtgatatataatcaaagggaaaggaaaagactaatatttttatgttgccaatttcaatattgatttctataattctcttt

SEQ ID NO: 403623 - DNA, 618 bp, Cannabis indica
gcaacaatctgaagcaggaaatttaattcctgataaagacaaataacctgcatttatagaagtatgtcaaggccgatcagagtcagaggaacgacaataaccaagacttgctacctccaccagtagatggacatctacaagtcatcattggaggcccgcacatagcttgagattcaggcaaagctcgggagaggtatggccgaatagcacagcacgagcaagaagaagtaatcatggccgtagaagaaaagaagcctaaaatatgacaagcaggagggcctaccgtaaccttcaacgatgaagatgctgtataaattaggttttcgcacaatgacctattgattgtagaggcccagatagctaggagcctcttccaatatcttgttgaagacttatgaaaagatgggactccagctaaaggatctaacccgatgtctcttgcatgtctatggtttctctggccaaggagtcgcacctctaggacaaattcgcttaaccctcactgttgggcaagctccgacaagcatgactatcatggcatatttcctgatattagatgttccttcagcctttaacgtaatgctaggtcgtccagctttgtaagacttaaaggctgtc

SEQ ID NO: 403624 - DNA, 682 bp, Cannabis indica
aaatattattgtgggatttgtatctgcttgtaattaactaccaccctatgttatcataaatagggacagaatgtactgaaaaagggacgaaagatccttgagagaaaagaaccctagtttgtatcagaataatttaaataagattgactcggggactatgtagtattttaactgcaaaaccacgtaaaaagcttcgtgttctattttcttcttttattttctataatttctgtgtaaaaatatgcgttaacagtttggtgctttcattgagagtctatgtgaaaaaagctcataaaaagccctcctaaccaaaagacaaatctttctccatggctgataacagagaaaatgttgatactcatcctgaagagactactcaccgtcctggaaaagagccaatgggctcactaaggcctcccaattcacgatctacacggtccacgcattcaagaagaacccaacatgaaggtggccaaaatacacggtccatgttgggttttgtgccctaaataaaacccatttcaatataattagatttgctaattaatgaagattagaagtcatttttatgttgcatggttcacatgatttatttcatgattatataaattctactaggtccagagcatatgtatttgttcatgattatagtgttgtcagcacagtggaatataatcatgat

SEQ ID NO: 403625 - DNA, 897 bp, Cannabis indica
tactattgagacattagtacatggcacgtgaatcagccacttagtttatctgaaaaacatgtcatcacgcatagtacatgatattggacagacaaaaattaaagcactggtggttaagacggattacataatattgatatcacaagtgacgatctttataaatgaaacaaccaaaggtaacctgagatggagattatcatgttcaagacgtattcattgggatagatgcatcataaaacacacacacatgcaggctcgaaacaaaaagagtttgaagttaattatcaaataagtattagttcaacaatgcaggggggcgagcaaagagtttgatgtaaattatacaaactctagctactgagatattggaaaaaagaataataataaaaaaaggacagagatacaatacagacttaattgagttggaatacacaagaactagcatgaggtatgaagcaatatcaaaacagcaaggatagttaatgattcaaatctcaaaagataaagaagtattgaaaaaggtaaaaaaaaccaaaatcaaaaacactattgttagatcaaattatacagcatgtaacttattaatcacactggagaaagtaatctcaaaactgagccaattgtaagaataagtgttaacacaagtactctaacgaaatgagaatctctttcagaattttgcaattagatcaatgtacctaaagtctacatatgtgacactaaacacatattcggaaaagaaaaaaaaagaaaaaaaataaaaaaaaaacaaacccccaaaagaaggagaatttttttaacattatagacggaaaaagcccctaaaaatataaggctaattagcaattttagccccgactttgatatgtactaaatcatgcctctgaatttttttga

SEQ ID NO: 403626 - DNA, 1060 bp, Cannabis indica
aggagccttatgcttatccatagaaaagagggttcttttgatctcatctgctccagggcaagaaataagattgtctgcctcttccatagaaattctctcttgaaataacctactacaatcgtaggtcagcccgttgtctgacccggagaagatacccttaaagaaatccacaaattctccgccaataagatccctacctgtgatccaaatgttgtctttgtttaataaactctcaatggcatttctccttcctttgatagcagcagacaggaaaaaaatttggagcacttgtccccctctttgatccaagagatccttgccctttgcttccagtatatcgctttcctttgccgggattcatttaaagctctgcggagatcattctcccggttccagtctctggatccagccggaagactctgcatagtgtcaagctgcttctctaggtgttttatctccaaatcaaggttgccaaattgagtgcggttccagtgtaggagggccactcgagtggcacctacttttctaaaaacacgcgcaggagcccacgggtgattaacagacttccacgcactcgctaccaccaatttactcctctcatcccgagtccacccttcctcaaacttgaagcatctcttgaatttgggctcaagaccacccgactgaagaaatagcggtctgtggtccgagttactagtatgaaccgagcagaggatagctctcgggaaaaggtcaacccaagcaccattggctaatcctttgtcaagggcagattttacatgtcctcgaccagaacgatgattatcccaggtcattttttctccttggatggccaagttgataagaccacgggagtctaaaagattcgagataaacgggataaaggggtcccttcccgaggacccttctctttcagaatcactaagaacaaaattcaaatcccccaaaataaaccaaggacccccaaatctatcccccaatttaacaaaatcattccaaaaatttttcttagcatgcaaataaggggggccataaacacaagagagtaaccacgggtggg

SEQ ID NO: 403627 - DNA, 511 bp, Cannabis indica
taaatctgtctttgatcagccataagtgtgagagcttggcagtgcttgtacatgttcgggccacactagaccaagtaggttggtgtctaccagcgatgtacttttgtaactctgatttttccgcttaggtcagctagtaaaaagacttgtaatattttgtaaaatatttttgggatcccgaattatgtcacttttgattgtaaagtttaaagttattacaagttttattttcattatgttttagataaaagtttaaatttgacgctcttatatctcaaattagggaattagggtttcttaatcggttggcttaacgtgcttaattgttagagagttacagtttggtatcagagtgccaaggtttttaaacttcctgtagactggccgaacatgtacaatcatcgccagagacaagctcgactcgtagtgcagtaagtgttgagagtaaacgctttactacttatatgattatttatttaccgctttctattttagacagtatgtgagcatc

SEQ ID NO: 403628 - DNA, 1130 bp, Cannabis indica
aactcgagatcattgtttctcttttcgggcattccttggaacatattctttagtttgtccagttgtgcctgcacagttggactaacctgttcggcattttggccgatctgagtcacgtcagaatctttctgagcgggaatttgagcacaggtttctggctgcacgatcggcatgccaagctgattgtctactcctctccttctattcagatcatttttgagatcacgagtccttcccaacctttcaaatacatatacgtctgcttgtcttagtgattgattggtttggttaatgtgatgaccggcaccgttaacctggttggaattatcaggtatgacttctcccgatgaattactagacaaggtctgcccacctactgcttggcccacaagtggaacctgtgaccggagatttggcggctggccatttatagtctgagaagtattcatcgctggatcttcttcatccaaggggatgacattcaggggttactgcccaacagtttgataggcttttcatattagcatggtagcttgccgactacgattatcaatctttgcatgatgagcccttaacgcttccatctctttgtccctccattcggcaaacatgcgtatctgctcctcgaacgcaagatttaccgcagtgcgcagttcctcctgatcatgatgtagggtgttggtatgaccttgcatgagtccaagagcaacatagagattttggatctcagtatcatctccaatgctcattcaaatgttggtagtaggcggaatgggtgtgttatgaatgccctggctgggtgctaaactggtattcccagtctcttgcacactaggcacgatttcatccacatgagtcatcacaccatgacccacgtttgacggctgctcgggattaatagctggtagaacccttgtgtttcttgggttctgcaatgcacgatccactgcctatggattttccggatcaaccaggcccctacgattctgtaccaccatcgtacttgtggttaaatttagaatgaagagcgattcttgattctgctctcaatgaaagcaccgaaatattgacctcgcttttagccaacgacagtgagtctaatttagtaagcgataagtagtttataacga

SEQ ID NO: 403629 - DNA, 946 bp, Cannabis indica
cttggaaaagggaaagtttctctgtctcaaatcagagcgatgacaggtgtgatagacttctgagtgtctgtgcaggcggtcaccttgcctttttactttatttttgagcttcttgcttttcatgccttgtgtttctgatggttgttttctaaccattctatttttgttctgtccagacatgtctcggcagataatcgatgctctaaggaagagaatgggcggaagctctagcgcctctcctccaacaaagaagtctaagggcggtgaggggtcctcggagaagagaccttctggagaggtcattgacctttctgagaagctgactgctgctaaccgttttaccccaaatgtgccaagtccaaggtttctggaccaccaacggctgggtctgaactggtcaggagtactcttgagccgctgcaggcacccactcagccttttcctgtgcttccagaggccaaaaagggcaaggagatgctggcccactacatgaaccggctggttctcgaggtcagtgagcaacgtgctggtgttgatagtgactcatctctagatgtgttggtgggcggagtcctgaaggagttcaccaaggtaagtcttttttgatacttccctttaactttttaacactttagctccatatgctgaattttttccttttgtgcaggctggtttaaagttagcatacacttactcctgggcttaagtctgttgcttccaagagtgcggctctgtcagaaaccttcagggcgaaggcggacttggccaaaaagggaagctgaggaggctagggcggaaggtggagctgttcggattggagttgggcgaagccaacaagaagctgtttgctgccgagaagaagatcttcgtgctgacaaaggatctcgaagctgctgatcgctttgaggagaccatcgagatcttatctgctgaagtaaatagtctt

SEQ ID NO: 403630 - DNA, 547 bp, Cannabis indica
ttttttaaaaaatactgtgtaaaatttatactgcgtaatgttttaagttttcactgttgttccgcagttattttttagttgtttcactgttgttttatttgttctattttgttgttttacggttgttttataaaaagatagtatttttgtagaaaaattctatataacagtaaaattgtaaatttttactcaaaattcagtatttttgtaatttttatttaatttacattaaaataacaattaaggtatcaaattatgtctcctgaacttgtaaggtcgttaaaaatgcccctgaactatatttgtatataaaaaaaaaatacaatttgtaggatcctacaaattctacatcacattctaatttctttaagttgtcggagcttagctctccgaccagtcccaaaacctgttttgttaactgttgttgttttagctcagaccattccatttagaacttttggtatggttctcattgaaaatagtctaagggatatctgtagcatttatttttagaatgataaatctgtagctaggggtgttcattgga

SEQ ID NO: 403631 - DNA, 1232 bp, Cannabis indica
tttttttattattttagagtttttctatattagattattttttttaaataaacatatatttttaaaaaatacaacaaaaagaaatttaaaattatttgatactaattttattgttcaattaatatttatataattatttaaccgccgcacgcaaagcgcggcctatttcctagtcttatataaatataaatagtatgtgaaattttgagatgaattgaggaatacctctttttatattcattaaccaaaataccctcatattttattttattaaaatctacccacttttatgagtaaattgcctaatatatctttaccctccacttaagtgtacatatgatttacattaatctaagggatataataggaacatcatctataaaagtaggtatatgttaaaaattatgaaattaaaggtaaaaattaaaacaaataaaataaaatatacaatgcaatttcctttgaaatttttgtgtctttatactcattatgtataattactaattagtgtgtgaatattaattattttatataatattttttgtgctatatacagtagaacctctataattaagaggttataactaaatagagttatactagaaaataaaaattaaataccaaaaaatatcaatataacaataataacaataaacaatcatgagtactatatcataataaaattattttagagtaaatatattatttatacatgtattataatttgaaataaaattattaattttgcgaaaataaatttataaaatatatgtatatattttattaaaatgtaattattcttatatagagcatagatgtatactttgttaatacgggacttagaaaatatataactaatttaaatttagaggttattcttatttataacttagactttaattttttataataaattagagattattcttgaatagagtattcttaaatacggttttactttatattgatggttttactttatatttatgacaactttcttttttttcttactaaatagattgggtttattgtttttttttacaatggattgggtttataatttattgatgtacttttatctttaacaaaatgaaataaaaataaaaagcaagatgatttttaattcgttagaacttagaagactctatttaaattattcaaaaaaaaaaaaaagaaactctatttaaagaatttttttttttatttagaatattataagggaaatttgaatt

SEQ ID NO: 403632 - DNA, 793 bp, Cannabis indica
atatatttttttaaaatatttatagtattctatattttatgaaatttcaaacataggattatgctgtttggaaagatgtcgatcttgtatgtttttctttctattataaaatcgacctaataacaattttaatattttaaatggacgttgaattatgcaatgtttatttaaaatatgttcgtgtggtttagtttggacaactataataacctgcaaattgatttttaaataacttttttgtttttctttaactttgtaatacacatcatgatgatgtccatgtactcaaaatttgagatcttctagtgtttctaatggtggaaaatggtataatgagtaggtgtccaaaaagggaacaaactacactttaatatcattttatagcctatagtttattttttcaccatatctattttaattttttaagtaatagcaacagcttccatcatgcaaactaattaaattaaatatcaattcaaatttcaaactagattagtattaattaatcagtaattgttaaattttgtctcaccttaaaccccaaaggagctcaaaacgcgtatgaataatataaattattccatttttacaaaaataataaagtaaattattattctatttcttttctctttttgccccctagttttttggctttattatcacagaatcctttagcaaaaagattagatcacacagtaattgttagagattttataacaatggaagaaaatcaagatttattacaactctattgtaaaattatacaaggactaaaataagagattgattaaat

SEQ ID NO: 403633 - DNA, 1097 bp, Cannabis indica
tttgtgaattgaagaagatttcagtagaactggctgaagatatgaccagagcaagaattgaatttgtggtaggaaaacttgctaacattaccctgcagtctaatctattagaaagaattaaagtggcccaacaaagtgattctgagttacaggggcacaaggagaagttagaggtcggatctgcaaaagacttttcactttcatctgatgggttattatgatacaagagtaggatttatgtaccgacggacaaaagtatcaaacaggagatccttgatgagtctcatactacaccgtactccttacacacgggaacaaccaaaatgtatcatgatgtgaaagctttatattggtggtcggatatgaagagtgatattgttaaatatgtgtcaagatgcttaacttgtcagaaaatcaaggcagaacatcaaaggtcggtgagtttgcttcagcctccaaagattcccgagcaaaaatgggaagacatcaacatggattttgtggtgggatttccaagaacaatagggtattatgactctatttggctaattgtggatcgatatacgaagtctccacactttttaccagcgcgaacaacgtatatagtggaccagtatgctgatttatacatcaaggagatagttcggcttcatggtgccccaaagtctatagtttcggatcgagatccaaagtttacatccaagttctgggaaagcttatagcgagcaatgggtaccaagttaaaattcagtacaacttttcatcctcaaaccggtggtcaatctgaaaggactaatcagatacttaaggatatgctgagagcatgtgtaatggattttgtaggttcttggaacaaatatctacctctgattgagttttcttataacaatagttattagagtacccattggcataactccatatgagatgcattatgggaggaagtgtcgttcacccattcactaggatgaagccggtgaatgtagatatcttggacctgaagttgtccaaagaacgagtgaggctattgaaaagatttgagcttgtatgcttacttcacaaagtagacagaaaagctacgcagatccaaagcatag

SEQ ID NO: 403634 - DNA, 910 bp, Cannabis indica
acaataagaaccggctataacaagtatatattagagtgtgtcactactaatttgtacaatctatagatatttcaaaattattttaatccaatataaacgttttttttttttgaaataggcttgaaggactctcaaggcatataaatatatatatataaatatatttaataaattatattctaattgagaggttataattgaataaagttatactaaaaaaaatttaaaacaccaaaaatatcaatataataacaatgacaataaataatccttaatactacattataatagaattatttttgagtaaatataatatttatacgtgcattataatttaaaataaaattattaataatacataagtaaatttataaaatatattttgttaatataagacttagaaaatgtataactaattataatttagagattattcttatttataatttgcttaaattgaaatttaatttttcgttaataaattagagaatattcttgaataaagtatttttaaataaaggttcttgtgtagggaagatcttgtgtaggacttatgcatttgtcctcatactatagggaagtaaaataaaccaatcaaaatatagaaaaaatgaaatgtaaatagaatcttttcaatgaagtgtatgagatcattccatactattctatttttttttattatttttatttatgaaaattttaatagtttattctaatttatgttagagtatttgatgttgtgtctattttttttatttattggcaataagacataatttaaaattatatgtgatgttatgtttaaaataattttaaaaaaatccttttcaatttttttttaaaaaatacccgacaaaatattataaattaatataacaacgttcaaaccgcccgcatcgcaccacaccgc

SEQ ID NO: 403635 - DNA, 522 bp, Cannabis indica
aattagtatataattgatatcatgagtaatctattgtatttttttttattctagaaataacaaaaaaatatatacttttcacattttgaaatgttcatattgaagagtaaattacaataatatatttttttaagctaaactaagtaatgatgtgtttataacaaaattataaatatcaaaaatatattttaagtaacattaagatatcatactgtaactttaaaataattaattgataacttaaatgtctataaatttaattaaaatgttatgtgaattttatttcttttaatttattagtttcttaaatagttttcgaactatgaagaaaaaaaattacataattactaatgatatcaataaggattgatatgggagaacgtggattaacttgtcaggtttatttatttatttatttattttcatttagttgataaaaatggtttagacatgatttctttttcaggcatctttaatttattgtttttgtatttacgcactgaggtgtcacgttaagtattt

SEQ ID NO: 403636 - DNA, 593 bp, Cannabis indica
gattacaacatttttgtgagtttgctggtagtagtgtcgcaaatgctcaatattccagtggttttttattagcgagcctttaaacggagctaatttctaaaccctggttccaactattgcctcgatcacataaggaccttcccagtttgggtcaaatactcttataaatgtatctctcgtgtttgcaaatactcgccttagcaccaaatcaccgacattgcattagaatttgcgactcagttacgtttttctttaagtagatccaaggacaatttcaagagttcttagttttcttcccgattacagaaatctcatctgtgggtcgcaatattgacttctactggtagcattgcttctgagccaaatgccagcgagaacagagtatgccctattgttgttttctcaatcgttctatgagtccaaagtgcttgtggtagttcatctaaccatctcccttttgcagtgtacaacttctttttgatagtatccttgaaggttttattaacagcttctacgtgcccatttacttgaggcctggagactgatgagaagctcttaatgatcttgttcctctcgcaaaactcagtgaataa

SEQ ID NO: 403637 - DNA, 907 bp, Cannabis indica
gatttatatagcatgtgtgaatgtaatatgagctatatgtggaataaaaaatatttttcaggttcgacgaccctgaagactcgataagtggataaataagcgtaatttgttaattatggagatttatttgaaatacgtgaatataatatgagttatttgtgaaataaaaatattttcaagttcgacgaccctggagactcgattggaggccaaaaatgtcacaatggttttagttagaaatactgatgggattattgggacatgtttattttagaaataacgggatattttggggtactcgaggttcaccaaataccctaaaaatatagatttcttagtggctaaaaaataataagataaataacagatttatattattatattattaatatatataaacgaaactttatcagattttatatatatgttatatgttataaaaacgtaacagaagaacgaacaacatgaaaccctcatcctcctatacccattttctttgattttcaatctgaaacctagcgatctaagctctagtagtagcgagatagaaaatccttaaagaggaaaaacttaaggtatagtttaattacgttttaagctaaaaatgattggttttatgtagtggctttgtgatttagagtggttatagagattctaacttcgtagaattgttctttggtagctatgggactagttttgatgtttacttgttgaatttgaggtgattttaagttagaaatcaagtttggaactttttaaagcttagtctgaacattaatggcatttttcatttaaggcctcgaatttaatttctattacgtaaggatggtaatatttatggtatatatgtgccctgtgaagtttggagtgatttagataagttttgtttcgatgagtgcaaaatttg

SEQ ID NO: 403638 - DNA, 789 bp, Cannabis indica
cagaaatagtatttttgtcataattttttatttgagtgtccgttttggacgttctatataccgtattgaagcttgaaacgagctctacaatatagtgtattatagagctaaaatataagttttattttagtgtgtttctactgtggggtttggcagaaaacccaaaattgtcttatgtgaatattaagcagtgttttgggataaacatttattgatttaccgttgttgtgacatagggctgagattattgagaatagttctccacttgagttggccgacatgtatgaacctggattataggtaagaaaagtatattgtactgtatagtacgttgtatataatacacttagtattgtaattaattgattaatattgagatgtagttaatattattatataatgaaaagattgattggttgagtatcgataatgtgatgatattatgcatgtgatatatgggctcacctgattaagtgatgcgattttcctagcgacatactaggcataagtacgggcgtcagtgatatatgataagtaccgagcatagatacgggctcacttgattaagtgatgtaattttcctggaaatgtactaggcgtaagtacgggcatcaatgatatatgataagtaccgagcataggtacgtgcttacttgattaggtgatgcgacttttctggtgacgtactgggcataagtatgggcgtcagtgatatatgatgagtaccgagcgtaggtacgggctcacctgattaggtgatgcgatttttctagcaacgtactgggtata

SEQ ID NO: 403639 - DNA, 1244 bp, Cannabis indica
gtgctttcattgagagctaaactaaaggattgctctttattgcaaatttaatcacaagtacgatggtggtacaaacttgtaggggcgtggttgatccagcgaatccacagatggtggatcctgcactgcagaatccaagaaacacaagggttttaccagccattaatcccgaacagccatcaattgtgggtcgcggtgtgacgactcctatggatgagattgcgcctggtgtgcaagagactgggaatgccagttcagcaaccgactagggcgttcatagcacagccgttccgcctgccaccagtgtttaaacaaccattggagatgacactgagatccagaacctccgtgctactcttggactcatgcagggtcagaccaacaccctacatcatgatcaggaggaactccgcgccgcggcaaatctcgcgttcgaagagcagatgcgcatgtttgttgaatggagggacaaagagatggaagcgttaagggctcatcgtgcagtcattaacaatcgtagtcggcaagccactgtgctgatacgaaaagcctgtcaatctgttggacagcaactccgaatgtcatccccttgggtgaagcagacgaagatccagcgatgaatacttcccagactataaatggtcagctgtcaaatccccggtcacaggttccgcctgtgggcccagtggtaggagggcagactttgtctagtaattcatcaggagaagtcatacctaataatttcaaccaggttaatagtgccggtcagcacattagccagacaaccagtcgctgagacaactaggcgtttccgtatttaatagattggggactactcatgatctcagaaatgatctaaataagaggagaggagtggacaatcaggttgacatgccaatcgtgcagcccagaacccacgtttaaattcccgctcagaaagatgctgatgtgaattagattggccatccaaggcatggcccatcaaaggaaagacgatctcgagttggactgagcacgtggaacccctttctcctgcgagatcaatcttctagagttgccccacaagtttaaaatgccaacctggaagatgtacacgggtaaggaagatccattatcccaccttaagtatttcgagatgcaaatggatctgcaaggagtacgaggagacgtatgtgcagaactttttcctgccacactcttggaagccgcccagcaatggatttcaagctggcacctagaaagtt

SEQ ID NO: 403640 - DNA, 665 bp, Cannabis indica
gtgtgtacattgggaagaacctgcacaagcagcttaaatagcaattaataagcttttgaaagtgaactaggatcaattcgcctggagtcatggggatgtgatagggatcgaccctaagattatctgctatcacttaaatgttgatctaaactacccggcaaagagacaaaaaagtaggcccttgggttttgagaggcaaggggtactaaaacaggaagttgacaagttgttagtcaacaattttatacgcaaggtattttatccctcgtggatagccaatcctgttctcgtctcgaaacttaacagaacttggagaacttgtattgacttcttcgatctgaataaggcatgcccaaaagactatttttcactttccaagatcgaccagttagtggatgcaactgctaggcacgagcttatatcatttatggacgcatattctagatataaccagataaaaatgtacgccccagatcaagaacatacaagattcgtaaccaacatgggactctattgttataaagtcatgtcgttcggactaaagaacgcttggtcagcgtatcaatgactagtaaacaaaatgtttgcaagccaaatagggtgaaacatggaggtttacatcgatgatatgttggtgaaatcaataaagagtaaggatcatacct

SEQ ID NO: 403641 - DNA, 1308 bp, Cannabis indica
taataactttctgcacacctctagtacttctatttcctaacattataattttattttcttaaatttttgaacatctctttctcatattaattagtaatatttggactatgaattggctaaatatactcttctagcttatttaattgaaaaaaacttctcctcccatatgtaactctattccatgcatacaattttaatacaatatggtattcctgctaacaaaaaaaaaatgtaataatagattgaatgataaatacaacagttactacatcatccaaaagccaattaatccataataattatgattatttctaatatttaggattttatacaataataacaaagttaattaggatttttattcatgaactttgatacgtatcaaatcatgccctttaaacttataagatcgttaaaatcccccttgattattgagattagtagatttaaaaacttttatctaattttagagaaaatgcctaacatagatgaaagttcagaggacatgatttggtacatattaaagttcgatagacataatttggtagattttaaagtctatggaacatgatttagtacataaataatcactaaattagtaaaattgaatgaaaatagacaaaaatctttaaatctaacaatctcaatagtttataaaaaaaaattaacagcaaaaaaaattcaaaaagcatgatttaatggtgtactgatgaggcttctattgctcagtataagcggtctgttgctgctcttggggaagtgtatactcagcgtgaggttttttggcgtcagcgttcctagcaactttggcttcgtgagggtgatcagaatagcaagttcttccatgcaaaggcaactgctcgtaagaaaaataattccattaattctcttttgaataattctggtgtgtgggttgattgggaagggggtctttcagatgttattgctgattatttctctgatatatttacttccactagctctaactttgatactgtggtaagtggtattcggccgactattactagtgttcagaatgactctctgttacaacaagttacacctgaggagattaaaaaagctttgttccaaatgcaccccgataaatcacctggacccgatggaatgacacctgggttctatcagaaatattgggatgtggttggtgtggatgttatatctcaagttgttgatttttttgagacttgctcttttcctgctgctttgaatcaaaccaatattgtcctcattcctaagaagaaacatgttaccactatgagtgatctaaggcctatctctttgtgcaat

SEQ ID NO: 403642 - DNA, 585 bp, Cannabis indica
aaaaaaaaaagaaagaaacaaaaacaatcagagatctcttttatatcgtgtccctctctctctccaaaacacaaaaagaaacccacaaaccaccatcaccaccactctccggcgacccacctctggccgtcgaccagccccacacgctggactattcgaacccgagtataaattaaaaaagtcactcgtgcaacaaactgtttgaattttatttctttaatctttttgaatttctcaaaattttacaaattatcttaaataactacaatatacgcgaccataagagaatcgaaccatttttttttaaaagtttcaacattaaagaaagtagttacattaaaaagaaatatttagcgaagaagcagttacatttaaaaagacaatactgagtatagagttttataatatatgaaatgaaaaattttgtagtgcaccctctaaaattagggctgttcatccgatccaatccgcacttttttggtcaaacaacatccaatacgcccgcacaatagctcaaatccaatccaatccaatccgcaaaagtacggattggatcggttactttggattggttactttttaata

SEQ ID NO: 403643 - DNA, 749 bp, Cannabis indica
ggttaaaatactaatttttacgagtaaaagaaacaatatctaacagaaatgatataattatgtaactgttatattttaaaggaaatttttaacaaaccgtatattttaaaaagtaaaatcaggtagtgtcgaaagtttaggaaacaaaaatactaattattcgtttttttttaatcaatttttatacattttaaattttattgtattccattcctattttaatttttattcttatatttttatttctcctaaacaaacgtctacttaatatttaattcatcaaaaaaaaaatatatataatatttaaatatataaaattgaacataaaatatttatcctacaaatattcttaataataataaccttaatattaaagataccaactaaatattttcattttttataatttcttttaactaaacgtcactttagtatttaattcgtcaaaaaaataaatataatatttaaatgtataaaactcataacataaaatacttatactataaatattcttaataatataaaataatattaaagatgccaactaaatatctttcaatttcattaatgggaaaattgtttggttacgcggcgaaccattccaaaatgttatttttgaaacatgtgtaatatattatagaaacaagaattatgatttttatttaaatatgtgggtaaagtgaaaaatgtcccttttattaatcagttaatcaaatttacctttaattttatatttatttgaaacatac

SEQ ID NO: 403644 - DNA, 645 bp, Cannabis indica
ccaacaaaaggactttgtacttgctcctattgaccccgagattgaacgcacatttcgaagaagaagaagggttcaaaaggctaagggccgagacatcatggctgagaatcttgatgatgatgggatcactcaacaaattgttaatcccatcatattggcagatgatcgagcaagggctttaagggagtatgctgcccccatgtttaatgagctcaatccaggcattgtgaggcctgaaatacaagcaccgcagtttgagctcaagctagtgatgtttcaaatgctccaaacaatggggcaattcagcgggatgccaactcaagatcctcaccgccatctccgttcattcttggaggtgtgtgactctttaagatccaaggagtgattgaagaggtgttaaggttgaagctatttccattctcactacgagaccgagctagatcatggctcaacactttgcctcctgattctgttaccaattggaatgaccttgctgagaagtttctcaggaaatactttcctcctactagaaatgcaaaattcagaagtgagatattgtcttttcagcaacttgaagatgagtccacaagtgatgcgtgggagaggtttaaagaatttttgcgaaagtgtccacatcatggcatt

SEQ ID NO: 403645 - DNA, 705 bp, Cannabis indica
tatatatatatatataagtgcatttgaattgactgtttgaaccttatttttggcgagttaaacttttttgaatttttcgaaaatttgtaggaggttttaaataactatattgtaaactatcatattaaaaaaataaaaataatacatcgatacactttattttagaggtgccttataaaatttccctcactttctagtaaaactctaaaactttcaattcatgtacataaattataaattataaggtgaatttcgttacaagtccttaaaacatcattattatagtcgttttttaaagaaaaatttggtacttcaaaaaaaaaaattataaatcatcttttttcataaggtaaatagcagcataagtactcaaaattttaagtttgtaagtggtataaacccaatgtttatttttagcggcataagtacccaatatttatttttagcggcataagtacccaatgtttatttttagcggcataagtacccaatgtttgtaaaactgtaattttcctccaattttgtcagtacagactccgttttgaatttattacaggaacatttggaagtaactgatactacatatttttgtctatacccaatgatctagaatctgaaccttatatgtggcctatttaagaaaataacagagtttgtactgacgaaattagagaaaaattacagttttataaacattggtactta

SEQ ID NO: 403646 - DNA, 498 bp, Cannabis indica
ggtcgcctcaatcttgagggccaagactccctttttggagtttgcccctctgcggacctttccctttagggaaatctgagcggacctttcgcggatcctgcgccttgttctttctcccgggagtggaagcagaattttcctttggttcccttcagagggataccttatagggctaggttccctagacttctgcttttgggcacttggtgaggattcttctggttcctttccaagtccagcagggatggctttaggatgcaagtggattcctgctgcctccatggctttttgcacggccagtatcacctcttgcatcttttggttttgctctttttgggctgcgatttcagcctcatgatcgacagccttttgtcttaagagtaccagctctgagtagctgccttcgtcataggcgtcgtactcgctgaagtttccttcatactcgtcatcgggggttccttcttcttcctcagaacccacatttgctcttgaggccac

SEQ ID NO: 403647 - DNA, 543 bp, Cannabis indica
aatactacaaacaacaaaatacaaatttaaataataaaagtcattactattcttgatagtttaatagtaattcagaatattcattttttcatgttactgggtttgtagcacacggttgtgatggtcgaatagttgaggcgtttttaattatttcttctatcagttgctgacccgagattgcagaaattttaagtgtcaaagaggcacttagttggataaagaggaataacaagtcaaatgtcattttagagacggattgcattttagttgttcaagctattcttagttcggtatctatgccttctatttttggtctatttgttcaagattgtcaatctattttatcttctttaagtagtgtttctattggtcatgttaaacggtctgctaacaaagccgcgcattgtatggcacgtggtgcttgttattgatcaggtcgtcgttttactgagagtgatagttacccttgctcttcaatccattgttttagcagatatttctgtttaataaaatttattttcattcaaaaaaaaataagtaatt

SEQ ID NO: 403648 - DNA, 550 bp, Cannabis indica
ttatattcaaaaggtaattgataattgaccatatttatccatgtatacatttttattgtttatgaaactacatggaatgaagcttacattgaccttatctcttaatcagtcaaaactgctgaatctattaatatctttcatctagttgattttgatgcatgtttgaatatgtttcttggggtcaaaggtaaactatttaaacacatgcttcaaacctaagggtcacgtaacatcaattctaacgattgtaacatataatacgtacacgtaataatagaaacaaattatattatgttatgaaatattagtattatgtaatattataatttagagaaagaaaatagagaagagatgagaattttctgagtgatttattccaataggtgatctcctatttatacacatacaagagtcaaatattaagaaactaagagaaagggaaactaagaaaaagggaatgttgattacattaatggaaataaataaaagatttggacatccacataattaatactatttataacactcccccttggatgtccataataac

SEQ ID NO: 403649 - DNA, 879 bp, Cannabis indica
actgtttttttaagtggaaaaaatatatatatcagctatatctataatctgatgctacagttagactaaaattagtctgttatattacttaaatcacatcacatgtcatggataaattaaccaatatatatacctgtggtttcgtgagaagtttggccaaagaacgcagctagtctcttgtacgagtttcaagagagccagtagtaccaaatccaggaaattttctagcagcagttatgaaggcgtcgtaagtgtagaagcctttacttttgcatcgaggatcatttcgatttttgagcatcttctcgaaaagcgaggaagtaatgatgtgactaacatcatcgggagaaaccggaggtggtggcgtgaagggcggaggtggtggtggtgggggagatggggttcgacattggctttggcagttttcaggggcacaatactcatctgtctgaccacagtatccagcgttactacaacaatagccgtcatcacagagagcatattcatgttgttttccacactctccacctggaggattggacctaattcctactaccaacaatgctgtaatggtagtgaacagccacaaataataagagtatttcatttttcttttccttttctttatatcagtttgaatgaggttgaatgaggttgtgattgtatttataacaatctgtggattaattcacacgtacgtcaccatcaaattatacatatatatatatatatatactagaagaaagctgcacgtatacttgttaaatgttttataatataattgagaataattcaataaataattatataatttaatttattatttagagaaattggtgaagagtgaaatacaccaacttggaaatttcttaagaattt

SEQ ID NO: 403650 - DNA, 973 bp, Cannabis indica
tgagattccaagtcacaagtatgtttttagactagtaatctcttgttttaatacatatttagtgtttaatccctctctctctaactatactaactctctattgtttcttgtgcatgtgagagcttcttctccttcttcttcaagcttttcaaccactggatctagaagaatatcactcaactgttcctggttgtgattaatgcaggtatatatagatctagggtttatatttgtacctgtaaatatttagttacagaaattagttaggtgtggattataacctaatccattctaaactaatttctgttagggattatagaggccggaggccaaattagggattttgcatgtatttactgttttgtccttgtaattagtccattatcagtgtaagtggaggtttacttcaacaagaaccatgtcaaaagacaagactaatggaaaaaacttaaaggaaaagactaaagaaccatgtctaaagacaagactaatggaaaaaactaaattagtttcaacgcataaacacgattacatcattaaattaattaaggaatgaactccttataattctaatcccataaaaatattaattggaattaaactagtaatagtaaattaataaaggaaaacaaaaatctgaaacggaggacgtcattgagccgaactgagccactctcagacgactgctcttgaacccttcacagacgactgttgaaaccactctcagacgactggccgtcgttgatcggtgaagccggccggctgaaccgaacggaagcttctcgacgtcccagccaatacgcatgcgaaatcaccaatgattactaattaattaattacattaatatatgatgaatatgcagttagcctaattgatgaacatcggatgctgaaattcaaacacatatcatgcaataatagatttccagcgcaggggatcaaattaaggtttatggattttccttaatacttg

SEQ ID NO: 403651 - DNA, 596 bp, Cannabis indica
tttgagtcggaattcgtgtcttggttacgggaaaaaacaagtacgcaggttggagttggggttgtcggagcgttgcgcatggaggtcgtttgggtggtagtttcggagggggcgtgggtgtgagtggtggggggggggggggggcggggtaggaggaatggggatgttggtgggttggcggtgccgtgtaggtggtgccctccattgcggggtgagtttgtgttgttggttgatgcggcggttaccccgggtagagggtttgttggatttgggggggttattcggggaggggatggtgaggtgtgggcagcctgggcggtgggtagtgttggcgagtttcaggtcgcggtggcagagcttctggctatgcgtgatgggttgcggtgggcgtccatgttgggctacgagctggtgagagtggagacggattctacggttgttaattcttggattacttttccgaattctatctttatgtataaaccaattgttgaggagattatttctctcttagctgctgttggtggtggttcttgctatgccattccgcgtgttgcgaatggtgtggtccacgaactagcaaagtctgttactag
